United States Patent Application Publication US 2013/0129668 A1 - sequence listing, part 6

SEQ ID NO: 84755 - DNA, 122 bp, Homo sapiens
ggtccgcccccacgccgggctcggggtgggggctcggggcctattacgggatggaagctccgggtgtcgcgggggcgggaggaattaagggagggagagaggcgcgcgggtgaaaggcgcat

SEQ ID NO: 84756 - DNA, 122 bp, Homo sapiens
tgggtgtgcggacctcgggggggatcctggtgctgccccaacgtgtccgggggtggaacccggatgtctagacaggagttctggaacgtccagacctgggagcccccacccatacgagaggt

SEQ ID NO: 84757 - DNA, 122 bp, Homo sapiens
acctgtattcacccagagtaaatattcctaaaatcccgttcagtgtgtctgtgtctctcccgcctctttccgtttcaggcaaatgtctaccccccctctccccccaccgttaacacctctct

SEQ ID NO: 84758 - DNA, 122 bp, Homo sapiens
gtcttgccccgcctcctgcaggcggcccggcgcggtgtttacccgcggtgcatggtggggcggtctccttcggcaaccccggccgaacggccacccagaggctgtgctgagctggcgcagcg

SEQ ID NO: 84759 - DNA, 122 bp, Homo sapiens
tgtaatcacagagcagctgacactccccactcactgcctggaggagcttggcggtgggatcgggcaaggcgggaaagataggtgtaaaacaaagcctggcacttaattacagtgcaaagatc

SEQ ID NO: 84760 - DNA, 122 bp, Homo sapiens
ctttgaggggctgcgaccccaaggcgcaggctcaaggatgcaaggctgattgcaacaccccggtaaggaagcagggcctggctgactttcttttagctgagtgaatgcagctctgaagcctg

SEQ ID NO: 84761 - DNA, 122 bp, Homo sapiens
atggggccttgtaagtattacataagctgtcatatgcaaaatgtccatcacatagttcaccgccccaggcatcctagaaactattaagtcacgataaggaggttgctactgtcctgggacct

SEQ ID NO: 84762 - DNA, 122 bp, Homo sapiens
gacttgatcccgccctgcagctagtgtggcccctcagggtttggggagtcccactctggacgggaccctgtgatgcgtaggcaggaataagatcccccgcccgtgccggtgtgccactgctt

SEQ ID NO: 84763 - DNA, 122 bp, Homo sapiens
tgcgcgtgcgcggccacacacacacacacacacacacacacacacacacacacacaccggcgtactggaacctctctcgcgatcccgcacccagcttgaattcagcaagaatcgaaaacagg

SEQ ID NO: 84764 - DNA, 122 bp, Homo sapiens
ccagagaggtcaagtgccttctctggactcacgcagcttgttagctggtgctcttcccatcgcccccgcccaccttgctgctgggagcaatgtcgtgtcacagagccattgcagtcagcagg

SEQ ID NO: 84765 - DNA, 122 bp, Homo sapiens
ggagaggtgatgacgaagagtgtattcaaggctgcctttttggcctttatatacacacttcgagggtgttccttttctctgtcacttcttaatccctgttacagttttggtaatccgtaatt

SEQ ID NO: 84766 - DNA, 122 bp, Homo sapiens
ggctgatggatggaccattggagggattaacaaatgacgaggacacagagaaggaaaggacggagaagaagaaagagcgctgatatggtttggctctgtgtctccgcccaaatctcatctca

SEQ ID NO: 84767 - DNA, 122 bp, Homo sapiens
actctgaaaccaaatatcctgccatctggggactttcaccagccctgtcggttatcttaccgcaacaccaaagaggaggctcagccttccccagttccctgagttcacattgattcaattct

SEQ ID NO: 84768 - DNA, 122 bp, Homo sapiens
ggccgccagactcgcgggtccgctacggatgtctgcgcctcaggcctggccccactaggacgccccttccactgccaggggagaccctggaataaaggcagggagggagagctgctgccatg

SEQ ID NO: 84769 - DNA, 122 bp, Homo sapiens
ccgcgcgccaccccgtagcgcctgggggcgggagcgggcgagccgagaagctcgtcttggcgcgtctattggctggtactgacgcccatccggaccccgaggccaggcagttggccaagggg

SEQ ID NO: 84770 - DNA, 122 bp, Homo sapiens
ttttttttttggaacaacccgcttttgcctccgattggccgctgccagtcacgcggcccgcgggcgggacggaattggagagctttcacttgctgacctggcgtcaccaccgctccggttct

SEQ ID NO: 84771 - DNA, 122 bp, Homo sapiens
ctcccctatggcttgttgctactgctgttggaaagttttaactttgcgcagaagggttgccggctgctggctgtatgggagtttgtgtttggcggtgagcccccttctccggttccttctac

SEQ ID NO: 84772 - DNA, 122 bp, Homo sapiens
caggaggccattaggacccagaggctctcggagcactctgctttgccggctgcctctcaccgctcactgcagtgcttcaggcttcagcagccttggagaagcatcagctgagaggagctatc

SEQ ID NO: 84773 - DNA, 122 bp, Homo sapiens
aggaaaccaccatggatagactcctggaagcagtcacaatatgcatcttcttgattatggcgacacaacctgggggcagtataaagcagtccattgataactgttgggaagatgtttgatca

SEQ ID NO: 84774 - DNA, 122 bp, Homo sapiens
gcgtgtaacggaaaagccagtggctgctggggatgtacctgctgatgcccagttcaaagtcgccctccgcgctcgtggggcgccaggctgttccgttctttgccgcctcaagatccatctca

SEQ ID NO: 84775 - DNA, 122 bp, Homo sapiens
aaaacacacctgggccgataataaatgacttcaattatgtgatctaaatcatgaaccccacgcttgcgacagaacatcccccacagctgtcaggttgtcaagggtaacagaggtcatgtgct

SEQ ID NO: 84776 - DNA, 122 bp, Homo sapiens
tcatgagaaaggaacaagcactacatgacacaaatcctggcatattcttaattttctcaccgataaaaatttagtaagtacgtacacctcacatataatagcttgcatgtaacaatactgat

SEQ ID NO: 84777 - DNA, 122 bp, Homo sapiens
tgtagtcccagctacttggctaatcaggaggctgaagcaggaggatcactttgagcccaccgaggacttagaggccacagtgagctatcatcagagtacactactgtacactccagcctgag

SEQ ID NO: 84778 - DNA, 122 bp, Homo sapiens
gcctggaaaagagacacgtggtcaggcatccctatgtggtctgcaggcaggtgacgggggcgctgtggacacaggttgtgtaggccttgaccttccatgataccgcatgcttagacgtaaaa

SEQ ID NO: 84779 - DNA, 122 bp, Homo sapiens
accaataagaaaactgaggcccagggcctggcagtggctttagcaaggtctctcactgtccggagcagagccagggctggaactcaggactgtccctcgggctgttcatcccctggtgactc

SEQ ID NO: 84780 - DNA, 122 bp, Homo sapiens
tgattttccacactgggattctcactccaattctcaggtttcctgatagacctgatgagccgcttcaccagcgccgcttagcttcgcttctttactgtcattggctgtcgctgttccaggtc

SEQ ID NO: 84781 - DNA, 122 bp, Homo sapiens
ctcggcttggtgctccctgtcgccctctgttgacatggggagagaagagcgggtctgactcggaaatgacgccataatgctgaggaaccactcctggcgttgcggaaggtggggtgtggggc

SEQ ID NO: 84782 - DNA, 122 bp, Homo sapiens
agcggcagctccacctctcctcgcttcggaccccgctcctccgcgggccgcagctccacccgctgacaccgaaagttcagttcagctgcactcagaaccgccgggcaaggcggagccgccct

SEQ ID NO: 84783 - DNA, 122 bp, Homo sapiens
caagccctaattgatttgctccaaactgttatccagacccacaagcccacctgggctgatcgccaccggttgctcatgttcctctttaagagagatgaaaggcgaaaggcggagagggctcc

SEQ ID NO: 84784 - DNA, 122 bp, Homo sapiens
gatcctctgtacatcctttcaggaaccagcccctcgtggggagcgtgcacacggaaggggcggggaatgtgaaaaagtcacgttttcattggtggcctcttggtgttgagcccacctctgtc

SEQ ID NO: 84785 - DNA, 122 bp, Homo sapiens
ataggtttttccaagagctgcacagctctggaattgacctgggagggggcacatttgggccgggaggggtaggaacagcagcaaactctggtcttatctgaaatcatggtctgttgtccacc

SEQ ID NO: 84786 - DNA, 122 bp, Homo sapiens
aagaacaggcttgcctgggtcacggtagtagactggcttctgaaacctgtcagtttcagtcgtacaagtggaggcagaaaggtttcgaggggtgggtacaggaggtgggaggggagaagaaa

SEQ ID NO: 84787 - DNA, 122 bp, Homo sapiens
ggacagtctttttcacaagaggtttaaattcagtaaggaaaaaaggcagaaagcgtgactcgtagagacaacaggaacaattttagcatgttgcaagaagagtaaatgcagtgaatagtctg

SEQ ID NO: 84788 - DNA, 122 bp, Homo sapiens
caccccgtagcctttcctcaggctccacgagttctcccggtgatgtgatgaccgacatggcgtctgggctctgaacacagactttactccttccccccggccccgaaacatggggaaaccac

SEQ ID NO: 84789 - DNA, 122 bp, Homo sapiens
ttttaatttataagcattttacacattgaactgtatagctcaatggctgctgttacaccgcgcgcgtggggagggtcccaccccgggacgcttcctgctcggggtcagccgccgccgcagcc

SEQ ID NO: 84790 - DNA, 122 bp, Homo sapiens
gcccgcctccagagagccggaagtgagggagctgggagctgggtctcgggaggtgctgtgcggacccggggtcgacctctgcccagttgccagtcccgctgtcagcatgcgggtccgaggaa

SEQ ID NO: 84791 - DNA, 122 bp, Homo sapiens
tttctataaagaagagggaaggaaggagcaggccggggacggggacggcgtgctgccctgcgtggctcccgcgacctggcttctcctggggggttaaagatcagccacagagcacaggggtg

SEQ ID NO: 84792 - DNA, 122 bp, Homo sapiens
aaacgttttaaaagccgtctaaacccgcagagcaggtgctgacataggatgcgggtcttccgtgcgttcaaacgttttaaaagccgtctaaacccaccgagcaggtgctgactcaggatgcg

SEQ ID NO: 84793 - DNA, 122 bp, Homo sapiens
gccattccacccctcctccccgggccgtcacgtgggccagcctccaccgggcactggaagcgggagggtgatagaatgtttggtgggcaccactgcctctcctgtagccacgaagaaaggga

SEQ ID NO: 84794 - DNA, 122 bp, Homo sapiens
cggccgtggcaggtgtcgactgcattaaaccctgggctgtctctgctcgagacctgccggcgccatgggtgaagacgacagtgacagtttgttctgtggggactctctagccaggtggtgga

SEQ ID NO: 84795 - DNA, 122 bp, Homo sapiens
gcccgcgccagggtccgcagtctttgttccggacgcagaaccagtgcttcagctggttaccgaggcgtccccgaaggggaaagggtggacacggtgagaatctacagcacagcagatcactt

SEQ ID NO: 84796 - DNA, 122 bp, Homo sapiens
atatgcgtggcagttagcactggtgcatgtttccttcagcctcagaaatggaggtgtctgcgtgttgcccagatctaccttgaaaactctagttgcttcctaacacctaggttgtatagtgg

SEQ ID NO: 84797 - DNA, 122 bp, Homo sapiens
gccgagaggcattcagccttgtcacttggcagagtagctgggttcagggtatatttggagcgggggtagggggcacaaaaagggtacatggttttgctttactgtttattcctgctcaaagg

SEQ ID NO: 84798 - DNA, 122 bp, Homo sapiens
aagccgggtacttacaggtgcagaagaatttggaacaggaaaatggagcttacaggctcccgaatgcctgccgagtcagttgcatcagattaggaagtgatgatcctaagaataagatgttt

SEQ ID NO: 84799 - DNA, 122 bp, Homo sapiens
gcccacttcacttataggatgagaacatggatttaaaatcagacaaatctgggttcataccgtccttttgctagctagacaatgattggagtttgtcagtttccttgagaaaaaaagggata

SEQ ID NO: 84800 - DNA, 122 bp, Homo sapiens
gcagtgcggagggccccaagagcgccttagggttgcctgctccagagagcgggactcctgcgctgcagccgggatactgggcgccgccgtgcgcccaccccctgccagtggttcgctccgaa

SEQ ID NO: 84801 - DNA, 122 bp, Homo sapiens
aacttgtttttctcgaatgttgccccttgggggaaattgcttccccagtgtaacttccctcgtgcgctgtatgacgtcgacgtgacgcagcaggatgccacccctttccgttccatgacgtc

SEQ ID NO: 84802 - DNA, 122 bp, Homo sapiens
agcacaaagcagcagactggaagtgggggcggaagtgcaccgcgctcaaccgcaactgcgcgcctcagtccgcgaagtctgaactgcctgacaaagggggacccggtggcagcgctcgactg

SEQ ID NO: 84803 - DNA, 122 bp, Homo sapiens
ccgcctgtggactgagggcgagaagcagcagcttctgagcaccgggcgcgtgcaagggtacgagggatattacgtgcttcccgtggagcaatacccagagcttgcagacagtagcagcaaca

SEQ ID NO: 84804 - DNA, 122 bp, Homo sapiens
cgcgggcgccgtgacgcgggggccccgcgcgccactcctgggcgcgtcccggggggaagacgccaccgccctggagtctcaggggtcctcgccccatcccggtccaggccgtttgtgtatct

SEQ ID NO: 84805 - DNA, 122 bp, Homo sapiens
taaacagacacaataataacttctttgtgcttccctacaatgcagctgcttaaaccatttcgctacaaggctgctttgccttaataaaaaaaaaaaaaaaaaaaaaaaaaaaatcccttctg

SEQ ID NO: 84806 - DNA, 122 bp, Homo sapiens
ggtgagggggttggaatgccagtgtctggcccataaacgtctcacatataaagagttacacgctcccatttcaaccgcggcagaggggaatccaggtgcaagaggacactccagcttttggc

SEQ ID NO: 84807 - DNA, 122 bp, Homo sapiens
ttagtaaatcggtgccaggaatgaagtaaccgtttagatccaatgcgccggctccagcatcgaactcatgcccagcaccctttaaaccctcccgggactctgcagaacccgctgaccactca

SEQ ID NO: 84808 - DNA, 122 bp, Homo sapiens
ctaccagactgtacaagtggaattattgtcaggggaacacgcgctgcagtgggcagagtgcgcctgggcagagggccagggttaaggacacggggccggaggagcatggggtgctttgaggt

SEQ ID NO: 84809 - DNA, 122 bp, Homo sapiens
ctgctctggagggggctgttgctgacctggaccaggagcagcaccaaaggaattagtgggcgaaggacccattgcagcctggtgttttacctccttcactctcttgcctttcctttctgtag

SEQ ID NO: 84810 - DNA, 122 bp, Homo sapiens
tattctcattacatgcacacaatacatactattgtaaaataacaaatagtgttactgtaccgaaagcgttgaatatcggcatcaggtacaagatttttgattactagaaacccattttcttc

SEQ ID NO: 84811 - DNA, 122 bp, Homo sapiens
tgaggtaatctaggaactctacagggcactgcggtccttagctgaggtgctcaaggactccggaaggaagtcatgttccccatttacaacccgttccctagtgcgggaagccagccacggag

SEQ ID NO: 84812 - DNA, 122 bp, Homo sapiens
gtccctcattttttggtaatttgaggcccctattcctgtcactgtggtttgggtttttctcgggattagccactaacatcacccacattatttttcttgagcacctacagtatgtaaagcaa

SEQ ID NO: 84813 - DNA, 122 bp, Homo sapiens
agcctctttagttcagcttcttcttccagctaataggagagagtgtgcgtgctccaatttcgggggagaggttcagataatttcaataaaacctggaaaaagccattgtaatgcccacacag

SEQ ID NO: 84814 - DNA, 122 bp, Homo sapiens
cgtcggcggcagcagctgacccggacacagtgagaagccccggcggaagtgataacatcccgacctcctccgggcgcggcagccggcggtggaggcggcgggggcgtggcggcggcggaggc

SEQ ID NO: 84815 - DNA, 122 bp, Homo sapiens
ccgggggacacaaatttgtcaggggagaactcaaccaaaaccacatacacagatcatgggcggggacatccctcctccctccatccctccctcctcccggctccaggaccattctcagcgtg

SEQ ID NO: 84816 - DNA, 122 bp, Homo sapiens
ttatctgttttgttttgttttggtttgagacaggatctcattgtctagcccaagttagagcgcaatggcgcgatcatggctcgttgcagcctcgggctcctacagcttatgcaatcctctca

SEQ ID NO: 84817 - DNA, 122 bp, Homo sapiens
ctctctgctctcccctcaaaacaagtttcaggatcttgcaggcctcgcggcgtcgttcttcgttgtggcggcctgtggctctttgaaaaacacgacgaggcctgcaaaatgcgtttttcttt

SEQ ID NO: 84818 - DNA, 122 bp, Homo sapiens
tgaggagcggacggtgacctgtgtgactgtcgtggagccggaagccccacccagcccggacgtgctgcaggctgccacccacagagtcgtggagctcaggcccccttcccggtcccgctcca

SEQ ID NO: 84819 - DNA, 122 bp, Homo sapiens
cctaagcccccggggcgggcgggggggccaggggtgtgggggacgcgcccacctgcaggacgtaggagaagcagtcctggaactgctcccggcgcagcgcccggccgttcacatacacctcc

SEQ ID NO: 84820 - DNA, 122 bp, Homo sapiens
ggcctctggcagaccctactggctgggagagtgaagggcaccacctcgttctagccaggccgggacagcagtcaggatccattctcacaccccggtgctggctgctgcgcaaggccaggtgg

SEQ ID NO: 84821 - DNA, 122 bp, Homo sapiens
acaggcgacagccagatcgcgctgccggcccctcgaacgctgggttccctggccacagcgcgtcttgtttattgcttttgcggactggttaaatgcaaaagctcaaggttttctttcttttt

SEQ ID NO: 84822 - DNA, 122 bp, Homo sapiens
ggcctcatctctttaaggagggtttatccgaagctgctctgggtcctcggtgttaaaacacgggcggtgatgtcattggcaaccaatcaaaaacttaaaagagccagccggggccgcgcgga

SEQ ID NO: 84823 - DNA, 122 bp, Homo sapiens
aaggaggaggcagagtcaacttggcaactgattgagtacaggaagcaaaaacaagggaggcgtggatggtgccttgttaaaaaagagtgtcagtgagcccagggcggtgccttctggccctg

SEQ ID NO: 84824 - DNA, 122 bp, Homo sapiens
cttgccttccttgtgaatttcagatgacggagcatgacggctgcatgattatggggtcaccgggcctgtcctggccctgagggaccaaggatcagaagggcagaaccaactcgctcagctag

SEQ ID NO: 84825 - DNA, 122 bp, Homo sapiens
gaacacacgcccgtatcttggtgcgctccaaagctcacacttgctgaaaaaataaggttccgagtgtggcggcagggggccaccttccagacctttctccgcactttcggacactcccaggg

SEQ ID NO: 84826 - DNA, 122 bp, Homo sapiens
atttctcatcctgtgacccaaaggagttatttctgcagttcttaaaaataaactggtggccgagcgcggtggctcatgcctgtaatcccagcacgttgggaggccagggcaagcagatcacc

SEQ ID NO: 84827 - DNA, 122 bp, Homo sapiens
aatccggctgataatctcctcttgcctgagaatcgggccaggcgccctttactaatttcgcgcgctggggacctggggctgccgcctctcggccgcgcggggcaggtgctgcgtccccagcg

SEQ ID NO: 84828 - DNA, 122 bp, Homo sapiens
gctgcgaggccttgctggctcaggagcggagccagctctctgagctccagaaggaccttgcggctgagaagagccgcaccctggagctgtcagaggccttgcggcacgagcggctcctgacc

SEQ ID NO: 84829 - DNA, 122 bp, Homo sapiens
ccgagcccggctccagtcctatttgccctcttctaccctggcctcagaggacggccatgccgattgcccattgatgcctagaccccccactagtcaaagcagtctctggtgaaccctccaga

SEQ ID NO: 84830 - DNA, 122 bp, Homo sapiens
gccccgggagcgcataagattgcgctgtgtaggcagcggagctgctgggcgcgtgttccccgcagattccccgctcagggcctttcgcgccccggcccttcgcgagccacggccccagcacg

SEQ ID NO: 84831 - DNA, 122 bp, Homo sapiens
aaccactcaactctgccttgcagcaaaaacagtcattgatatcaagccaacaaatgggtgcggttgtgttgcaataaaactctatttaggccaggtttggtggctcatgtctataatcccag

SEQ ID NO: 84832 - DNA, 122 bp, Homo sapiens
cgggacggacgccactcattcagccctaccgggggcgctgtggcagccggcattggttgccgtgccctccgcttgtctcgctcagctctcgagccacacgccctgggctccgcccactccct

SEQ ID NO: 84833 - DNA, 122 bp, Homo sapiens
gcctggactcaaagccggccctgactcgggggccgccatgttcgccgaggactcaggcagcggaggagtgtctctacggaatccctcacaggacaagcttctctatccgcggccgcttttgt

SEQ ID NO: 84834 - DNA, 122 bp, Homo sapiens
gaacactagcagcacacagcgctccttaaacagcgctacaccagcagacgaccacacacacggtggaagatcagacgccacacacggaaacattttcattggaggtagaagagaggacgttt

SEQ ID NO: 84835 - DNA, 122 bp, Homo sapiens
acaggggtccgagacaggttgtagatatgatgcggcttatcggctttaccccgatcctagcggagttaggacttgctgatgtaattggccagcacctgcctaacaatgaaggtttagttatg

SEQ ID NO: 84836 - DNA, 122 bp, Homo sapiens
tgggtgttagatgttcagacacaggaatcagccctgtcatcaaggagttcttacactggtcggggagagagagaagtaatcagactattagtcatgctgagtcatggtgataacacctgtag

SEQ ID NO: 84837 - DNA, 122 bp, Homo sapiens
cttacaatcagggagaggagccagtcacaacaggacaaatgctgcccgagtccactcccacgtggtccctaaagacgtcaaatctgtcaggatggagaggagaatggggctgcggggggctg

SEQ ID NO: 84838 - DNA, 122 bp, Homo sapiens
ctttttattgtattttcaagcaagtttgattttcatgcacatttttttgctgagaaacatcgatctcagtctgtttacgcagtgcagctgtgctcctgtgatttattgccaggatactgaaa

SEQ ID NO: 84839 - DNA, 122 bp, Homo sapiens
gcctttggagaggcagggctctcaccaacatctctcacccccacccactccccctggctgcggcagtcccagcgggaacccgacttaaagggacagccgccctccagccagccaaggctgca

SEQ ID NO: 84840 - DNA, 122 bp, Homo sapiens
aggcacgtgcgcaggcacgatcttgatcgtggacgcaggtgcaggtgtgggtgcagtagccggggccggggctgcagagtttccaaaagtgaaagagctgccaaagctgggggtaagggctg

SEQ ID NO: 84841 - DNA, 122 bp, Homo sapiens
ggatgggtggggtgggcgtccagaggcggtgccaaggtggcccgagtcctgattggtaggcgcaggcgggcgggcacgggcgaagcgcactgggctggccattggctgcgtgggtctcggct

SEQ ID NO: 84842 - DNA, 122 bp, Homo sapiens
cacgtctcctcagagtttgtgggtcgaagaggccatggcatgggactgcagtgatggctgcggagggaggtggccttatcggcctctgagctctcacggctttaaagactatcggtgctgag

SEQ ID NO: 84843 - DNA, 122 bp, Homo sapiens
tcctgccagatacaccagttatcacaggccgctcccaggcctgcgggggccctgagaattcgcaacaagccccgggcagcagggctcggctggcgctgaggccccgcctggccatgcccatt

SEQ ID NO: 84844 - DNA, 122 bp, Homo sapiens
ttattgcttgttacgatttaacaggcaaaatacgacaccagggatgtaatacctacaaggcggtcttcctgaaatgcctgcccggaacagaatgctgggatgcactcaactgtgaatttttc

SEQ ID NO: 84845 - DNA, 122 bp, Homo sapiens
aaaagagccagaggagaagacagggactagttttacgcacagtggcttaacaaacagcgccgcatccctgtcagttctgggattcctcgggagtggttttttttaagctgcagaagtctacc

SEQ ID NO: 84846 - DNA, 122 bp, Homo sapiens
tttttccttccttcctttctctcttgccttttacaaatgcggtgcctcctctttgcctcccgcccggctcgcctctcctcgctggcaggctgttactgagggtgagggaagcccttccagcc

SEQ ID NO: 84847 - DNA, 122 bp, Homo sapiens
gaccctttctcaccggatgaagatggccgtcgcccgagctttctcttgtccatcttctcccgctgctgaaatttcagttgcaggcgctgtcacctcaggacccctccggcttggagagggag

SEQ ID NO: 84848 - DNA, 122 bp, Homo sapiens
accaggcgcgccggggccgtgtgcggctccactgagtgcccgatcctgggctgggggcaccgtccccccaaacccaacgcccgccccaacacggatccgactcgagctaaggcgctctcggc

SEQ ID NO: 84849 - DNA, 122 bp, Homo sapiens
gccagtagcgcccactgagcggtttttcagttgctgcaccgttcttagcgcccaacggaacgtttcccgtacgcggagtccataagttgtctgtgtcgtcactttctcggttctggcaccgc

SEQ ID NO: 84850 - DNA, 122 bp, Homo sapiens
ggtctgttagaaaggtgaactaatttactctgcacgcacttgtccatggctgtcaacctccgcagccccttctacacttccaagtcggccaccaactccgcctcagtgagcccaggcccgcc

SEQ ID NO: 84851 - DNA, 122 bp, Homo sapiens
ctggagagggcacacatgctctacgtggagactcagcatagatagggatactggagcaaccgcaaacctgaatatagtgaaaaaggaatctgatacaatgaaggtggcaaatcagtatgtgg

SEQ ID NO: 84852 - DNA, 122 bp, Homo sapiens
tctctcatgggtctcaagtgaattccaacaaaagaatcactgtgattataatttacaaaccgggaaatgatttcatggaagatcttactgattcaaaattaaggactcggtatgcttttact

SEQ ID NO: 84853 - DNA, 122 bp, Homo sapiens
gggctgcagactcgagggctggtggctctgcccactttatgcttgcacacacgtgcttgccggggcaccctgagcccaacggcacgaagtcaactaacacagtcccaattgggtggactctt

SEQ ID NO: 84854 - DNA, 122 bp, Homo sapiens
tccctccgtgctgtggggcttagatcacctccctccctgagtctgtttctccatgcgcgccggaatttctaaacggactcccagaaagaaacggaaagaaagaaggtaaagaaaagaaaaac

SEQ ID NO: 84855 - DNA, 122 bp, Homo sapiens
tattttgcatgacgatgcacacgcatgtatactgtattgaatttttagagcattcctattcgcatatgagatgcataatgctaatacagacacccgcatgtttccacccattctatttcctg

SEQ ID NO: 84856 - DNA, 122 bp, Homo sapiens
agagcggaggggaagggttccatactctccgaggatcccgcgggctcgtggcgtgtggaacgcttttcatcgctttcagttcccgtttccttcgccccgactgcctactcggtcgcagctaa

SEQ ID NO: 84857 - DNA, 122 bp, Homo sapiens
ggaactggagaggacgcgagtggcgggtggcgggggcggtgtgtaggggtgacgtccacccggcagagagggttccttgtcccctggagccgaacacaggaaaatcagctggtgagtcaatg

SEQ ID NO: 84858 - DNA, 122 bp, Homo sapiens
ctggctcaaccccaagggtgcattctgcgtcaccccgggtcagtcccctccttgggaacacggggctgatgacggagcccccttgagagggtggcctcagttagtaactcccgagtttagag

SEQ ID NO: 84859 - DNA, 122 bp, Homo sapiens
ccctgccccaaccctgggattcagctcatcccaagaagaatcttctggaagcaaagacaacggtggggaagaggccatggttttcgtttcagaactatgcaaggatatttgaggagaggtta

SEQ ID NO: 84860 - DNA, 122 bp, Homo sapiens
atcaaaataaaaaataaacaaggaaccacaaccccaggactatgccaggcatggggatgccgaaatatatcagcatagatccaacctcagggagtggcccaaaaagtacagaaaagggcgtt

SEQ ID NO: 84861 - DNA, 122 bp, Homo sapiens
ccaacgtgctccgtgacgtcagagcaggaagtgtttgaggaagtcgcgccgcgctgcccgcgttaagattcccgcattttaatgttttcaggggggtgtcatagccccgggtttggccgccc

SEQ ID NO: 84862 - DNA, 122 bp, Homo sapiens
tctctcccccaggaatccacaggatcatttctaatggggcattaacttgagccaggtttccggggaagggctgtccttgccccctcactgccctcctcactaacacaagaagaccattacac

SEQ ID NO: 84863 - DNA, 122 bp, Homo sapiens
cacagtgaaaatcagcagcctgacaggcaataagggtggcagaacaatgctgcagctcctcgaaagcctgatttccagagaactgtctttatctgatctgtgtggtgagtcccagtgaggcc

SEQ ID NO: 84864 - DNA, 122 bp, Homo sapiens
ggtatatctcagtgaatttttgaagcatcaagtaaatctctagcatttgaatgcatgtgtcggtgtatgatgaatgatgtgaattggtaatgattacattatttaaatttcaactttacatt

SEQ ID NO: 84865 - DNA, 122 bp, Homo sapiens
gatggtggcagtggttaactaaccacatgaatgtacttagtgccactgaacccgtgcactcgtacactaaaaacagctaagatcagctgggtgcagtggtttaggcctgtaatcccagcacc

SEQ ID NO: 84866 - DNA, 122 bp, Homo sapiens
atgcacccgacaccacacacccaggcctgcacccgacaccgcagccggcccttcctgggacgccaccacagagacaaaggcgggaggaggctggcacacaggtttggcccatgggcgccggc

SEQ ID NO: 84867 - DNA, 122 bp, Homo sapiens
accagtgatttttttttccatgaatacgaagaaccccgattgcactttgcgaagtctgcgcgtattcctttatcccgcaactagcttgctcccgggtggagtgggcacagtggggagcggtc

SEQ ID NO: 84868 - DNA, 122 bp, Homo sapiens
cacggtgcgcgcacccactgacctgcacccactgtctggcactccctagtgagatgaacccggtacctcagatgaaaatgcagaaatggcccgtcttccgcgtcgctcacgctgggagctct

SEQ ID NO: 84869 - DNA, 122 bp, Homo sapiens
actatgcctaagaagagatggctcaccttgggaggtgccaggctgaaactaggtcctttccgggtctggatgctgccgctcaggagcaggggcgtggcctcagctgcctctgggagcttccc

SEQ ID NO: 84870 - DNA, 122 bp, Homo sapiens
gggcgtctgcggcccactgccccggccctggttctgcaggtgtccccagccccgcggtggcgagatgagctgtcaccttggatcacaaacgtgcgccccagctttggggtgcgggttccctg

SEQ ID NO: 84871 - DNA, 122 bp, Homo sapiens
gccctcttcttcccccaggctgaggggcagggagaactgtgcccaccatgcccggactcccggcggcattctagacaggccaccgcccactctgggcaccaacctccttaagggagggagac

SEQ ID NO: 84872 - DNA, 122 bp, Homo sapiens
cgcatgtggccccacaggtggtgactgcggcagctcggctgggcgggggcggttaccatgcgtcacctcagagggagtggcagaggtggggtcgcggtgcctgccacctgaggcggcacgtc

SEQ ID NO: 84873 - DNA, 122 bp, Homo sapiens
tgcaagttgttttaaaaggaagctcattggcaccagcagcaacttacaggagcggactggcgagcgtcaggggttgctgagtgccacttgtgaccctggagtgcgttgccccgacgggcgca

SEQ ID NO: 84874 - DNA, 122 bp, Homo sapiens
aagcctggccagtgagaaggacggacttgacctcttaaaactccaagtctcctggccaggcgtggtagctcacgcctgtaatcccagcactttgggaggccaaggtgggcagatcacctgag

SEQ ID NO: 84875 - DNA, 122 bp, Homo sapiens
ctgcgtacagaactcctccgtcgcgccagggccggcgggaagtgaggttctcggacgagccgccagaagtgtacggcgacttcgagcccctggtggccaaagaaaggtccccggtgggaaaa

SEQ ID NO: 84876 - DNA, 122 bp, Homo sapiens
cacccagtggcggagtcttctgaggggcgggtcgtgggcggggcctggaggcggagccggcgccgtcagtagtcggctgaggacggaggcggggctgggcctgggatggggcggggcctgcg

SEQ ID NO: 84877 - DNA, 122 bp, Homo sapiens
cgccggtgccatatattatagcagcgccagaaatgtggtggtcgtcgccacgttagggtccgcggggtcctcctgaggcagcctggtgccaacccgcaggccccggctggggctcgtcctgg

SEQ ID NO: 84878 - DNA, 122 bp, Homo sapiens
tgtaagagttgggaccaaggatcgcaaagcttctttcattcctaaaattctatggttccacgattatgtaagctgaaacaggccattctgttgatttcctaatctccaggaggaaagaaact

SEQ ID NO: 84879 - DNA, 122 bp, Homo sapiens
ctcggacagcgtgtggttcttgcggagctgaaggccgtcggggaagggctcctggcacagcgggcagcgggccgcgcctccgggtccgccggctccactcgcgccacgatgcggccagagcg

SEQ ID NO: 84880 - DNA, 122 bp, Homo sapiens
cgcctccagccaatcggggtgcccgtccttaatacaaccagccagtcagtgcccggcgcgcgacaccagcagccagtcaggaagccctgcgttcatgcttccagccattgtcggagtgtcag

SEQ ID NO: 84881 - DNA, 122 bp, Homo sapiens
ctagattcgtcacaatgatgttggtattgccttcctccccattgaactttttgactctcacggatgagggtttcagtggtatcctttcctcgcatctgaaactgcagaacatgggcctcagt

SEQ ID NO: 84882 - DNA, 122 bp, Homo sapiens
gacatcacaattgctgccgtaaggatcaccattttttttttttttttttaccccagaggccgaacagcccagataatatatgacctagcttaatttgaggattagactcttctcagcttcct

SEQ ID NO: 84883 - DNA, 122 bp, Homo sapiens
atagttaatactttctgagcgcttttactatggtcaggcattatatttacacctaatcctcgcaaaacactactgggaagatcctcatttgacaggagcaattccgggtcacaaaggctgac

SEQ ID NO: 84884 - DNA, 122 bp, Homo sapiens
attctcattctccaactccttatcaaactgtgtctcaggtgggattgtctgggaagcagacgctgagacggagtgaggggtgcaatagcgtaacggggagcaccacctgtaagaggagaggg

SEQ ID NO: 84885 - DNA, 122 bp, Homo sapiens
tcccagcctgggcatggaactcagctcctttttattaattttcctaaaaaagatcactcacgcagtgtgaatgtgcggggcagaccttatggaaggctgagggagagggggtgcattcatgt

SEQ ID NO: 84886 - DNA, 122 bp, Homo sapiens
gtccctttccccttcttcttctcctccccaaagaggttttgtgctgtgactggcttgccccggttacttactccaaggtgtaggggtgaagaacggaagaggacgaaataactagctggagg

SEQ ID NO: 84887 - DNA, 122 bp, Homo sapiens
tttcgcgacagttcaaacgactactatggggccacggtttgttctgggccaggaaacacacgtgcatcctgcgcatgcgtccaaaaggaacccactgcccctcctgctggacctctttagcc

SEQ ID NO: 84888 - DNA, 122 bp, Homo sapiens
agaggagtcctgcatctgccatggaatctgggtcagtacaacctctggctgggagcagcccgtgggaggcctggctgcagctgggcccatgggcagctgctctcccggcagctggagtgctg

SEQ ID NO: 84889 - DNA, 122 bp, Homo sapiens
gggctgggtcagggtatgggggaccccaccgggcctctctggatttgccccaagcccaaccggccaccaaaaccatgccccgccccagcctcaggggaaggtggagtccagagtggcactgg

SEQ ID NO: 84890 - DNA, 122 bp, Homo sapiens
tctctagagcagacagatccgggtggggtggttttgttttgcactggattttctctagagcggacagatccgggtgggggtggttttcttttgcaatggattttctatagagcggacagatc

SEQ ID NO: 84891 - DNA, 122 bp, Homo sapiens
aggtcttaggagccaaattccttgcagaggcctggggtgaagcctgggcagctctatccccgggagccgcccttttgcctccagcagctgccggtccagccacagcccctccaggagaccca

SEQ ID NO: 84892 - DNA, 122 bp, Homo sapiens
ctgcagatgaggaaaccacatcccaggaggccgaggcggcttgccccgcatctcagaagccgggcaggccctgagccttctgacctcacatcctctgccacaccacagtggagaaaccagaa

SEQ ID NO: 84893 - DNA, 122 bp, Homo sapiens
tcacgtcttgtcgtcttatcaatccctgcggggttcaaagctgacacgtgccactgaaggcgccgcgccactccatgctggtgaatcttccactgcagctaccgagctcgtgctgccctggg

SEQ ID NO: 84894 - DNA, 122 bp, Homo sapiens
gggcgatcttcttgcacattttcacgtgcatctggggatcacagtccattctccagccggcgccaccgtcggctttggagccctggcaagtgccgggcgggttaattttgctgttgagagca

SEQ ID NO: 84895 - DNA, 122 bp, Homo sapiens
ttcattatgaccccttcgcttcattagagtaaacatttattgaacaaacgcaaagcttggcgcttgtcactcatgttttattggcgttttccttttttttaatttttttttaagctatctcc

SEQ ID NO: 84896 - DNA, 122 bp, Homo sapiens
aagtgctcacatggttgccatggtgaccatgggccgaagcccccatcccgtgtcacattccgcacctgaagacacacatgggagacagtacccctattacccaagccaagggcagggaagtc

SEQ ID NO: 84897 - DNA, 122 bp, Homo sapiens
tcttaagagcttctctgtcatatgtcctatattcctggctttcagcttcctttctgcttacgtgttgcaggtgatgcatgtcctttgtaataatctggacacttttcagttgtgttttaaaa

SEQ ID NO: 84898 - DNA, 122 bp, Homo sapiens
ggcactctaccaagatttgatgagaggacatgaaatggacccttgccacctctcggtgggcggggaagctgggagaggggcctggggagagggggtcttcagctgtcaggatcaaaggaagt

SEQ ID NO: 84899 - DNA, 122 bp, Homo sapiens
gggaggccggggctgcgcgtggtgaccacaggtgggccgccccttccctcctctccgccccgctttcttgtatgcgactgtcatcctctgccattctagagctctctgacttcagtcatcga

SEQ ID NO: 84900 - DNA, 122 bp, Homo sapiens
ggctgtcagccatgatgaccacgctggggtctgtcagagcgctgagcagctgccgtgtggcgcgcttcttctcctgccggtagttctccttctgcgcctgggcccggggcacccgcggtggg

SEQ ID NO: 84901 - DNA, 122 bp, Homo sapiens
ggctcaggggctcctttggcctcttggcagggttctcaggggcaccagcagtgagctgcccgcagtacccagtggtgcccagcagggaggtggcccctgccacccactggcttacttggcca

SEQ ID NO: 84902 - DNA, 122 bp, Homo sapiens
cataaagagcagaccagaatgccaaggagaacaatgcatcctgcctccacctctcagctacggtctctcaatcttctacctttcccaaaccacaggctgaagttcccttatctgcctaatgt

SEQ ID NO: 84903 - DNA, 122 bp, Homo sapiens
aagtgcctctgagatctgagaagggtcattcatgggtttgacaaatccttttacctacaccgcattttaaaaggtacaaaaatgaccctagccccaatcagatttcctccagatggttggta

SEQ ID NO: 84904 - DNA, 122 bp, Homo sapiens
cagcatgccgggcgaagacgatcgtcgattagcaagtactttcataaatccagagtgaggcggcaacagaaaaatggctgaaatggcctcactgactcactgcccctttattcaacaacatc

SEQ ID NO: 84905 - DNA, 122 bp, Homo sapiens
ctttttgtacaggaaattataatctgtaatctcatcttctgccacctccctcagaagtttcgatctagacatacatgtattcagtgagtggcaattcagcctggggggtggagtgtcaggat

SEQ ID NO: 84906 - DNA, 122 bp, Homo sapiens
taacatgtagccctgacaaaaggaacagcaataaagctatttattacatacacgcgtgcacgcacgcacacacacttacatacacgcgcgcatgcgcgcacgcacacacacacatacacgtg

SEQ ID NO: 84907 - DNA, 122 bp, Homo sapiens
tacggtgctcggcccgactctgtggctctcttctctccatgtctcaccctctcccctccccgcactccccattcaggcctccagttggcccctggctttgcaggtcctccattctcacgcag

SEQ ID NO: 84908 - DNA, 122 bp, Homo sapiens
ctagcttcaccaaaaggatcgaacttcccagcaccctctctggcccgtaacgtcaggtgacgcgagacccagccggaagtgaaggaaaaagcgcttcagcccgcggcgcctgcgcagaacgc

SEQ ID NO: 84909 - DNA, 122 bp, Homo sapiens
caagcgctaccgccgctatctcgcgagagccgtagtttcttccattctgttttggacatgcgcggggcgtaaggcgctttggccagagtggtttgatggttttgtgttagtcttcctgcagc

SEQ ID NO: 84910 - DNA, 122 bp, Homo sapiens
cacttggggcaggaaaaaggaatcacaaaatacaaccctctcctttacccaggaggagaacgtggattcccagaaaaaagaaaaagtgtatatatatatatatatgcctactgttttcttat

SEQ ID NO: 84911 - DNA, 122 bp, Homo sapiens
agagctgagccctaggccgggagaacaggactctcattagggccctaccactggctctgacgggtgactcactccccttccctgcgcctcagttccttcatccagaaaataaagatataagc

SEQ ID NO: 84912 - DNA, 122 bp, Homo sapiens
ggacgagaggaggaattactctagggtacaaggcctcgcccaggagtggggggttgcttccgggtcgcgctcccggaaacaggaagttgcccatcctcctcgcccggcggcagctgtccccg

SEQ ID NO: 84913 - DNA, 122 bp, Homo sapiens
cctcctgtgacccgccccctcgaggggcagagatgctatcgtttgctgggttgcggaacgcggaggtgcccacacctaccccgtgcgtgcgtgagtgtgcgtcacactcctggccactgacc

SEQ ID NO: 84914 - DNA, 122 bp, Homo sapiens
cgagtagccacgggcgcgatcgggaccagaagtctcctcctccatgatcactttggaagccgggggaagactttgccctgccctgagagctggtctgcgtttcccaggcgcggcggcggcgg

SEQ ID NO: 84915 - DNA, 122 bp, Homo sapiens
tgctcaggcgtcgcccttcgtgctgggactgcggcctgctgagccccaggtaggagtccacgcatcgcctctctctccaggtgcacccgcacagctggcgaacttggctaaggtcagcggga

SEQ ID NO: 84916 - DNA, 122 bp, Homo sapiens
ggccagggttgaaaggtgcaatgagtacacggcagaggtcagagaggttcccactcagcccggcgtctggaagcagcgtggggtaggggccgctccagtaccccctcctccagtgtcgaagg

SEQ ID NO: 84917 - DNA, 122 bp, Homo sapiens
cgatgcccccgtggggatggggaccagctgcgtgaggacctggtgctgagcaagcccagccgttaacacgcgcagcacacatgcactcagaagcagacgtggcagcgtctccgttcactagt

SEQ ID NO: 84918 - DNA, 122 bp, Homo sapiens
cctacagcatcgcggcgggccaggctcgggcaggggccgtgctcaggtgcggcagacggacgggccggcgcctctgaagtcacccggctcctttacgaactgagcccgttttggctgggagg

SEQ ID NO: 84919 - DNA, 122 bp, Homo sapiens
gccgggactggctacgattgggagcggcggggctgctgctgccagggcggcctcgtgggtcgggagggtgcaggggccggggacccggcgggccacggggagggcagagagcctcccggagc

SEQ ID NO: 84920 - DNA, 122 bp, Homo sapiens
tgctcttcccagtaagccccataacctcagggacaactcctcatcttttacagggcctcacgcaacatgctgtcataagactggaaccagccatgctccagattcaagggtatttttataag

SEQ ID NO: 84921 - DNA, 122 bp, Homo sapiens
aagggcctcctcgtcctcccggtctccggtcgctgccgggtctgtgcgccggtccgcgcccgccctcgctctgccatgggcgcttccagctcctccgcgctggcccgcctcggcctcccagc

SEQ ID NO: 84922 - DNA, 122 bp, Homo sapiens
gtagctggaattataggcatgtgccaccatgctcggctaattttgtacttttagtagagacggggtttctccatgttggtcaggctggtctcgaactccccacctcaggtgatccatccacc

SEQ ID NO: 84923 - DNA, 122 bp, Homo sapiens
caggcgtcgactattcaaagcattgtggcttccagttctgcactgtggtgatggaggtcccgggggtggcctactaaatactaaagtggcaccggtgctgcgctgggaggagctgagaaggc

SEQ ID NO: 84924 - DNA, 122 bp, Homo sapiens
gtgcgggaaggaggggcatggcggcgagggccggcgcggtgcaccccgggagttgtagttcgggactgagaccctgtcggggttgggggatcccgcggcagggcgaggcagtcggataagcg

SEQ ID NO: 84925 - DNA, 122 bp, Homo sapiens
gtgggagaggccgacctgagatgctgggaccaccaagagatggtgggggagggcgacccgcgttgctgggtcaaaggcagaggctgcaagccatgggcagccttgagaagctggaagcgtgg

SEQ ID NO: 84926 - DNA, 122 bp, Homo sapiens
gccataggccccaggaaattctgggtcattggtgtcagcttgaggcacttgaaaccatagcgcccatgtcttcctcctgctgagggatcctggggcccgggactgcctcaggtttccccttg

SEQ ID NO: 84927 - DNA, 122 bp, Homo sapiens
tgtttctgtctcatcgccctgtgttttctttacagcatggattacaaccttgctctttatcggccatgcaagattcagaaacatcctctattatctggggcatcatgactctggtgaacaca

SEQ ID NO: 84928 - DNA, 122 bp, Homo sapiens
atgctccaaaatgagggggctcctacctccctggaaaccgtggtactcacggcagctctgcgtgtgactgtttcaaaggttaaaggagccccgtgtctgtaaggcccctggcatgtcacctg

SEQ ID NO: 84929 - DNA, 122 bp, Homo sapiens
tggcactgtcgtcccccaagagcacatgcaggcagcctgtgtctttgaggctgtagggggcgacgacaagacggacagtgatgtccaggcgtgcgcccggggggccactggagaccggcccc

SEQ ID NO: 84930 - DNA, 122 bp, Homo sapiens
ggccctcccaacaccaaggcggagatggaaatgtccctggcagaagaactgaatcatggacgccaaggggaaaaccaagagcacctggtgatagcaggtgaggatcccctaaaataccccta

SEQ ID NO: 84931 - DNA, 122 bp, Homo sapiens
agaaaagctgtctgtcgttcctgaaggaacaggacctccgcactccaagaaggaatcgggcgcccagtgggggctgcaggagcagaggacggtggcggcagtagcaggagaggcaggagtag

SEQ ID NO: 84932 - DNA, 122 bp, Homo sapiens
aaggactaacagcctagcgacgtcgtcgcatattgataagggcaacagaccaaagaaaaacgaggaggggaagaattcaaacagccaaaggtacagccacaaaagagattcaactgcagctc

SEQ ID NO: 84933 - DNA, 122 bp, Homo sapiens
gtaggtacgtataggtaatacttgggaagttaagggagcccaatacaaaaatgttgaagacgtataaataagaaagtgcataataagttaagggacaggttgctgttagcgattgagttcta

SEQ ID NO: 84934 - DNA, 122 bp, Homo sapiens
ctgcccctgcaatccttccgcgggatctcttggaccctctccagggtcctggctctgagacgttgctagaggacaaatccgcgggatttagagcgcggccaatgggacagcggtgcctggct

SEQ ID NO: 84935 - DNA, 122 bp, Homo sapiens
ggggtcagggcgaagtcctatggccccaggcgtggctctcagggtttcaggccccgaaggcgatgtattgattggggaggcccagggttggggattccccatctccgcagtttctcttctcc

SEQ ID NO: 84936 - DNA, 122 bp, Homo sapiens
attgcagcctgacagctgtgcgcagtgaggatgggtgagaagagagcgtgaggctggggccggggactggacgccctggcacctctcccaccagcccacggccccacctctccgtccacact

SEQ ID NO: 84937 - DNA, 122 bp, Homo sapiens
aaccagggctgactcctagcccaccagccccacctttggagtggcttgggactgacaaaccgtgtctccatctccaaggccatctttgctccccaagaagcacagaagaaacccctccagca

SEQ ID NO: 84938 - DNA, 122 bp, Homo sapiens
ttctagaaaaagctagagggggctggatcaggtgactgaagaagaacagagctatcacagcgaacacatttatacatcccatgggagggtcaactttccttgatcttggtgggcaatacatt

SEQ ID NO: 84939 - DNA, 122 bp, Homo sapiens
tgtgggcctccatcctcctgtgaggcagtggaagaccactccttgttctccggctgactccgtttcttgtgcagttcttgctggatgccttctttaatcacctctcaggacagagagtttct

SEQ ID NO: 84940 - DNA, 122 bp, Homo sapiens
ccaggctctgcagtagcccaagcccaccgctgcccggtttcttctcagagagcaagccctcgcccttcgtgagcgccaaatccccgcgctcggccccgcccatccactgaggggtgtgggta

SEQ ID NO: 84941 - DNA, 122 bp, Homo sapiens
cacatactcaggcaatcatggtgcatgagcaactaacactaatatttgactgttaaaccacgatgtacacccagatatcccaacaaaaataagctgatgaccataatataggagcagatgaa

SEQ ID NO: 84942 - DNA, 122 bp, Homo sapiens
cgcctccccgctccctgctcccgctccctgctcccgctcgccgctcctgctccccgcccccggggtgcagacatcttagtacagggctcccctgcagcagctctgggctcacgctgccgtgc

SEQ ID NO: 84943 - DNA, 122 bp, Homo sapiens
gtatttataattttatgtacattgttgtacaccagatctctagaacttcttcatattgcacgattgaatctacctaaattgaacaagaactctcgcctcacacccagcctgttggtgaccac

SEQ ID NO: 84944 - DNA, 122 bp, Homo sapiens
gcagggatagctggtgtgcgtgcagcggaaggcgctaactgccctggatgtggagacccgcggactggacgtgagaggcgggcaggggcagttggggcagctgcccctacaacactgaagaa

SEQ ID NO: 84945 - DNA, 122 bp, Homo sapiens
taggtgtccaccaagatgatgcactccttcgtgatagaggcaggcattaccgagcacacgcgctccagggcatgggtgatcatgagctcagagctgttggacatgagccagtggtccagctt

SEQ ID NO: 84946 - DNA, 122 bp, Homo sapiens
aagcatatttgagaacccttcctttcccaagtattgcgaatgtgcagaaagcaacagttacggagggaggacatcataaggaagttattaacgggcatgtattatcacatcaagcatgcaat

SEQ ID NO: 84947 - DNA, 122 bp, Homo sapiens
ctcttattggcttctcaaggatacaaccatatgaaagatatcttcacatgctggatttaacgggatcaccagtcaataagactgatgccagcaaatgactagtgtccagaaccctcttgtgt

SEQ ID NO: 84948 - DNA, 122 bp, Homo sapiens
gtgaaactactaatgtattaaagaacctcagctgggatttgctgaggacaaatgctgtaacgtgttagtcatccattatctgcttctatttttgcaggttctgaatgatgactgacgcgggt

SEQ ID NO: 84949 - DNA, 122 bp, Homo sapiens
aaagcaacggaacttctcgccaattggagttgttaataagctttgacccatcctttttcccgtgaacactgctccaaacatacagccacaataaacaatagacagagaaagtttagaaatat

SEQ ID NO: 84950 - DNA, 122 bp, Homo sapiens
tcatgtgaacgggaggtcatcgcacgtcacgacgttgcttcaaacacagttttccagccccgcccatcactctcccgcgggagcaagggaaatgggagctgtcggctccacttacccttacc

SEQ ID NO: 84951 - DNA, 122 bp, Homo sapiens
cccagacccgccacggaacccagatttgagcacgcaagataaagacgccagaggcgagtgcgcggcggagaactggccgcgacacgggaagcttctggggcgcagaacgctggctccgactc

SEQ ID NO: 84952 - DNA, 122 bp, Homo sapiens
gggcgcagtggcccacgcctgtaatcccagcactttgggaggccaaggtgggcggatcaccgaggtgccaggagttcaggtccagcctggccaacatagcaaaactctgtctctactaaaaa

SEQ ID NO: 84953 - DNA, 122 bp, Homo sapiens
cgccccccgctccccatcgcggtggggtctcaccttgcactggaggtaggtggtgtgcagcgcccccgtgccgtcctgcgtcaccacctgcatcacgtggggcagttggaaggcgccctcgt

SEQ ID NO: 84954 - DNA, 122 bp, Homo sapiens
caggggagggggtgggacggtcaggtgagtgccctggtccccatgtacatgtgggcattgcgctgccgaggggtggggctctcacgggaggggtgggacggtcattgtgggcattgcgctgc

SEQ ID NO: 84955 - DNA, 122 bp, Homo sapiens
gactcgagctccccgcggccgcgctgccccctttaactttcctgccagctctcgggaccccggggtccatcccaggccccctgccacgtgaacgccccccgcagccaatgggcgcgcccggg

SEQ ID NO: 84956 - DNA, 122 bp, Homo sapiens
gcacccgcgatccagaggcggcccagggcatgctccaccacctgggcacacagcttcaggcgccgggcgactcccaagctggctggcgcgcccagcctcgcagaactggggctagatgtcgc

SEQ ID NO: 84957 - DNA, 122 bp, Homo sapiens
aataaaagtatatcacccagagaaagctactcttgagtccctccatctatcaaaaatgcccgagaaaaggtcgagactgatggagggatggcgtagctttcacttttcgcgaactccaggat

SEQ ID NO: 84958 - DNA, 122 bp, Homo sapiens
tggagccccaggcttccatcaaaactgataagattggcatgcgcagggcggctgggaacgcgccaccctgggtgtctataggctcatctggccctgctgataggccctgcccaggacgggcg

SEQ ID NO: 84959 - DNA, 122 bp, Homo sapiens
cccgtgccctcgatcacatcgccagttcacaaacacacatgcgcacacgcacacgccgcccgcccaccaggcagacacccacacacctgtgcacgcacgcgcacgccaagccagcgggccct

SEQ ID NO: 84960 - DNA, 122 bp, Homo sapiens
tctctcgccgggccgaggcctccttctccgtagccaaaagtcgccctcccgggcgggtggcgccgccgctgccggcccccaagccggcccccccacagtagaggttgagtccgattaccgcg

SEQ ID NO: 84961 - DNA, 122 bp, Homo sapiens
tttgtgactggatgagtggggccgagcagcacgcactgtcttcgacctccaatcaggactcggggtctcggagctgtaccaatcggagatgaccgtggcctcaacagggccaatcgggggac

SEQ ID NO: 84962 - DNA, 122 bp, Homo sapiens
ccgcattcccggccgtcagtggatcgggaagcaccggcggccgcggttcgtgtcgttgcgcgccaagcagaacatgatccgccgcctggagatcgaggcggagaaccattactggctgagca

SEQ ID NO: 84963 - DNA, 122 bp, Homo sapiens
gcctaaaactcgaaaaccaaggcgcccagggttgtgtgagggtttccgctctgcgccccgcggggttccatgggtcctgcacagcatcaggcctgagccgccggtccaactgctccaggtaa

SEQ ID NO: 84964 - DNA, 122 bp, Homo sapiens
gaggataattttaaatgactgccaggatgcgagagctgactgcgggcaacatgctccacgcgcgttcattcacttctcttcataacagccccgggaggcaggtgtgaccagccccacggtgc

SEQ ID NO: 84965 - DNA, 122 bp, Homo sapiens
ggaaatggtcgctgcataccaatgggagagcggggcgcgcacctagcgcggcgatgccagcgacagggagctcacgaccacagctccctatgccctcgatggttggtaggcaggcaggcaga

SEQ ID NO: 84966 - DNA, 122 bp, Homo sapiens
ccgctggggccgcgaagtggggcggccgggtgggctacaagccgggtctgggctgaggggcgcggcttcgcggtggaccccagcccggcaacgggaaggcgagctctcctccaccgtccaaa

SEQ ID NO: 84967 - DNA, 122 bp, Homo sapiens
tttccttaaatcagagccccgtggactccgccggagaactacattacccagcggccttcgcgcccttcgcaggaaggacgtctgcgcactaagatactcagttccaagtttggagcttttag

SEQ ID NO: 84968 - DNA, 122 bp, Homo sapiens
agggcgggcggtgggggccgttgccgcagtgacagtgctaggggagtccgaagatggcggcgtcgcgtcgctctcagcatcatcaccaccatcatcaacaacagctccagcccgccccaggg

SEQ ID NO: 84969 - DNA, 122 bp, Homo sapiens
acctgctgagctggctctgaggctcaggagacgtggccctctgtggtcccattgtctccacgtctgtggtaacccggtgcctttctagagcaggcaggctcccggcatgggtggaaacagag

SEQ ID NO: 84970 - DNA, 122 bp, Homo sapiens
agcaaaaacatcaggttctggcaacctgtggggacaaagtgaccatcagcacggggaggtcgctgtcagagccgcgtcacagctcttacgcctcccagaatggtttttggtgtgaggattgc

SEQ ID NO: 84971 - DNA, 122 bp, Homo sapiens
ggcatactctccacagctcataggctttgcatgcatttgcactgaggcgcgtgcccaggtcggggttggaagaaggagaggaggaaccaagcataagcatttcctttcagagttttccctct

SEQ ID NO: 84972 - DNA, 122 bp, Homo sapiens
tagagttcctgtatacccattgcctccatacacacacagcctccccaactatcagcaccccgtaccagagtggtgcatttgttacaatcagtgaaactacattgacacatcattatcacctg

SEQ ID NO: 84973 - DNA, 122 bp, Homo sapiens
ggtcagccttggacatcagcctgaaactcagtcacagcatttctccttctctcgcatcttcgggggtctctgacatgagcctctgaacctggcgttggacgctggcgggtggcacgtttctt

SEQ ID NO: 84974 - DNA, 122 bp, Homo sapiens
tggtcctttgaatagcatctaatgttgtcattaagtgctgctctgtgcaaggccttgagacgatagaagaaccatatgacccgggaatggtaataagttcagtgatcacacagcctaggttg

SEQ ID NO: 84975 - DNA, 122 bp, Homo sapiens
gcgcgcaggcctgtggttttctcgctctcgcaaccctgctttaactgccggtttatttttcgacaaacaggatgcctccatctgaggctgtcagcatcccaggctctttgaaagaaaagaag

SEQ ID NO: 84976 - DNA, 122 bp, Homo sapiens
cttactgctgtgtcttctgtaccaaacacaaaggatttaacataaagtaagcactcaacacgtattttctaaataaatgaaagaggcaaggagttaggaggaacatcaggtaataagtaatg

SEQ ID NO: 84977 - DNA, 122 bp, Homo sapiens
gtggcggtgggccaaagctgtttggcctcattatcctcccggtctctgtccttgccttcacgcccatggccagagcactggagtttttttttaatcagtaatgtgggggacctggagccacg

SEQ ID NO: 84978 - DNA, 122 bp, Homo sapiens
gccgcccggactccgctggcgcgaggtccctgagtcagcggcgctcccgcccgcgcgaatcgctccgccccagcccgcgggctcggctcctcgcacctgcccactgtcccccggcctcgcac

SEQ ID NO: 84979 - DNA, 122 bp, Homo sapiens
gcaagagagaagagagggaagcctaggccaatcggaatgaaaatgtaaacgccacaaccacgttttcagctttacaaatactgaatcttgtagtgggtctagtgggttaggggttagcatga

SEQ ID NO: 84980 - DNA, 122 bp, Homo sapiens
ccccgggtgtgtggagcccccggctggggaggtgttgcatccccgggtgtgtggagcccccggctggggaggtgtcggatccccgggtgtgtggagcccccggctggggaggtgtcggatcc

SEQ ID NO: 84981 - DNA, 122 bp, Homo sapiens
cccgcagcggaacccgagagcgtttcttggcaccttgaggtgctggaggctttctggccgcgcaagttctgccccactgagatttgatcagtgaataagtgcaatcctgaagcagcagcatc

SEQ ID NO: 84982 - DNA, 122 bp, Homo sapiens
cctcgcagacgggggtccctgggtgcaggacgtggcctatgacctctggcgagaggagaacggctgtgagtgcaccaaggccgtgaactttgccatgcatgaacttcagctcatccgggtgg

SEQ ID NO: 84983 - DNA, 122 bp, Homo sapiens
ttgcagggtcctcctcattcattcctcaaacatttatcaagcatcagtgatatgcccaaacgcttagaatatagtgctaagccagatgggttctatgggaaaggaaactcaatagtaatgat

SEQ ID NO: 84984 - DNA, 122 bp, Homo sapiens
cagcctgatccaggattagccatttattatctaaaagtcagcaaatcaaggggtgtttgccggcctgcttgatgcctggaagatatctatccttttcagctctgtaatccaatagagcatag

SEQ ID NO: 84985 - DNA, 122 bp, Homo sapiens
ttatcttaagcactgtgttcaattcagattttgaaggcatgttaacaaactgtagaacaacggagtccagaactgctgtagaggaccagttgaaggaactagagaggtataactagaaaaga

SEQ ID NO: 84986 - DNA, 122 bp, Homo sapiens
cggcggggggcaagagccccccctccaggtagaggcctaggaaggccccagaactgaagccgaagcgctggcggatgagactaatgagatctgtgacgactcggcatctgttcaagtcgacc

SEQ ID NO: 84987 - DNA, 122 bp, Homo sapiens
gtccatccagcagaaggtaaaggggcacctgagcccatgggcaggctctcatgggaccaccggcaacatctcagccttggagatgagagggcagccttggctgggtcagggagcggggcaca

SEQ ID NO: 84988 - DNA, 122 bp, Homo sapiens
cagctggcttcaattagtagtagcagaatgcaaatgaagcatgctgcagctactctgggtcgggctgctccaaagtgaggggaaattcaactcccagatagggaagaggaagaaagtcagaa

SEQ ID NO: 84989 - DNA, 122 bp, Homo sapiens
atgggaagacagagagaatgaagtgatagattcctttacctcaggctctgtgagtgagctcgtcagcctcccaggctccacatgtgaatacaggaagcacctgcacagcccaaaacatcctg

SEQ ID NO: 84990 - DNA, 122 bp, Homo sapiens
tccagaatgttagagtagctttccatttccctagaaaggaaaattatggccctaaaccaacggcaacagaagctgcacagagggccccgtagatgaagggcagactccccatctgaataaag

SEQ ID NO: 84991 - DNA, 122 bp, Homo sapiens
ttttaaacagtttgtagcatagggcagactgaaccacaacagctaaaactaacagaaacccgaccttggttcttagtggcaaagaaccagaggactgagttaaagagaccacagctgctgaa

SEQ ID NO: 84992 - DNA, 122 bp, Homo sapiens
gtgtaggggagggaagtcggagctccaggggcaggttctgggcggcctgggtggagaagacgacaactgaacctgaaggaaacgaggaggaggtcctgtgaaagtctgcagagagagttcca

SEQ ID NO: 84993 - DNA, 122 bp, Homo sapiens
acgtgaaagggagctggatgaggtgaccacagcgcaaggcccagatgagaggtcggaagacgcagacccaggccacccaggggcgacacacttgaccaggtgacacctggtcaccgggagtg

SEQ ID NO: 84994 - DNA, 122 bp, Homo sapiens
ctgagaggttgaaggaagcaggaggaggtggcacttctgtgacctttctgcagcccttgccgtgggccttcagtagccacagccacttgtcacttgctgatctattttctgagcaggccata

SEQ ID NO: 84995 - DNA, 122 bp, Homo sapiens
aggacaagtgtttagaactcaaaatgcatatttccatgaaaactcagttctaaaaggtggcgaggctacattaccaccacactaagcctatatatcctgcgacacactgaaattatagtagc

SEQ ID NO: 84996 - DNA, 122 bp, Homo sapiens
gagctctccctcactttctgccttcttcaagaattcttccctgattggtccaaccagaagcgctgattctccccacctgatttcctgtaattttataatctatgtccttcacttttgtgtta

SEQ ID NO: 84997 - DNA, 122 bp, Homo sapiens
ttgactgcttcacgggcggccacgacagctacctggccatccctggcagcgtccccaggccgcccatcagcgtcagcttcccccgggcccccgacggcttctaccgccaggaccgtggactt

SEQ ID NO: 84998 - DNA, 122 bp, Homo sapiens
gtgaccactactggggccagctctgcttctcttccatagagtgaggatcatcattttactcgaatcacttcagcctaacaaggtatgtcatgcaggaagcagtcagacacagtggttaaaat

SEQ ID NO: 84999 - DNA, 122 bp, Homo sapiens
ccccaacttcccaggttgaactacagcagaagcctttagaaagggcaggaggccggctctcgaggtcctcacctgaagtgagcatgccagccactgcaggaacgccccgggacaggaatgcc

SEQ ID NO: 85000 - DNA, 122 bp, Homo sapiens
gtgaccacagaccccagtgccggctggccgggggggtgtaccaggctcagcagccctccacgctcggggcaaccgcagaccccagggagcctggccctgctgttctcagtctcccactggcc

SEQ ID NO: 85001 - DNA, 122 bp, Homo sapiens
ctaaaatggggaattatttcactgattaatactcgtactaccttggagaccctctctgttcgacatggaaatgcttccacccagttagtgaaggtatccattcacatcaggaggtagtgagt

SEQ ID NO: 85002 - DNA, 122 bp, Homo sapiens
actctcggcgaagaacgtctggccctgcgggtcgcttgtggtctcttatagccgcgtcggcgtcaggcccgccccggccaatcagcgccgcccgccccgagcccgctccttccggtgggcgc

SEQ ID NO: 85003 - DNA, 122 bp, Homo sapiens
tatggtacctgacatctcttcctgttctgctccaccacaggtaagccagtgcttgcatctcgtctctcctgggaaagatctgtctttccttggattttaagcttatagttgtcctgtaaccc

SEQ ID NO: 85004 - DNA, 122 bp, Homo sapiens
gcccgttgcctctgaaccttgcactttgtttacttactcattttgagacggggtctcgcccggtcgccctggctggggtgcagcggcccgacctcggctcgccgcggcctctgccttcctag

SEQ ID NO: 85005 - DNA, 122 bp, Homo sapiens
ctagccgacaggctagcggcatttctctggggccgaggaattccacgaagaagatctctgcgaggcccagaaggccgcacaactacttcttcagaaacaaaattttttaaaaaagtaaaaat

SEQ ID NO: 85006 - DNA, 122 bp, Homo sapiens
actaccctctcgctgtctccaaattttacacaagctgctccatctgcctcgaaacaatgccgctgcctctgcgccccctctcctgacacccactcattcaggtgcacccatgggaccagctc

SEQ ID NO: 85007 - DNA, 122 bp, Homo sapiens
agagcagtgagagttatcggaaccagtaagagctcgtccgagggagttcaaaggaactgccgcgaggtggaaagggcgaggacagaggcggcagctctgagcgggctggatcagccggcgac

SEQ ID NO: 85008 - DNA, 122 bp, Homo sapiens
gcccggccgcttccggcctttccgggtcgcccatcgcgcagactccgccgaagctacgggcgctgagggaactgagctcctcaggccacctccaactacgacagcacccaggtggtccgctg

SEQ ID NO: 85009 - DNA, 122 bp, Homo sapiens
tgatttcctgcacactcatctgttttcttgtccacttccttcctgttgggtctggctccacggtctatctccctgtctccagtttatctgccctaccactatggagttacctgagggcgtac

SEQ ID NO: 85010 - DNA, 122 bp, Homo sapiens
cgcggctcctgcgcctgcgcagtgggcgaagccggcgtttcccctgcgccgctgggtgtacgcactggagtcgggaatttgcacgtgaccacggactttttttcatatccgccgaccatgct

SEQ ID NO: 85011 - DNA, 122 bp, Homo sapiens
ccttttcggtgacacaggctgttgctattccaagcagcctatcacaggcagggggagggccgtgagtcagaggattgtttttgcctttagatgcagagttggaagcaaggggttaaaagaaa

SEQ ID NO: 85012 - DNA, 122 bp, Homo sapiens
gatgggccaggctcagttcaaagacattcatgtgctcaaaggcattgggtcctagagcaacgttttccagatcttcgtgaccatgatgtactaaaagaaaaacattttatgttgccaggtgc

SEQ ID NO: 85013 - DNA, 122 bp, Homo sapiens
cagctgtggaccggattcagcttggaggctgcctgcttgcaaactctgtcctctgtcctgcgcaattgggaatcactcggggttcttttgttctcttaaagaaacatggctccttcaaccag

SEQ ID NO: 85014 - DNA, 122 bp, Homo sapiens
atggagctccagaacctgggcgctgtggtcggccggctggaggcggagctcagggaaatccgagcggaggcggagcagcagcaacaggagcgcgcgcatctgctggcccgcaagtgccagct

SEQ ID NO: 85015 - DNA, 122 bp, Homo sapiens
taccccggtgggaagcggggccggcagccctggcaggggaatgtggggccagcagcgggccggggaagtgggctgattgcacagcctgtgctctggaagagagcgcacgggcttgcccacac

SEQ ID NO: 85016 - DNA, 122 bp, Homo sapiens
tttgcggtcgcaaccgccgatgaccacgatcacttcagctaggtccatgaatctggcgtgcggataagcccagtgcctgttgggccgcacccaagttcggccctctcttaccctctcgacca

SEQ ID NO: 85017 - DNA, 122 bp, Homo sapiens
tccgtggaggcaaagacggtccttcgttaacctaaacaccggcccaaagacccaaaagaacgtcgtctgtccccttgcaccccaccacgcggccttacgaagcgcggcccgctgcgggtcgg

SEQ ID NO: 85018 - DNA, 122 bp, Homo sapiens
tgcagcgcctgtggggtggccgcggcaggccaccaccagcctaggtggctgaagaggtggcggtgccaagtcacttttggggagcctcttagtttatttctggttgttaacaattgatgagg

SEQ ID NO: 85019 - DNA, 122 bp, Homo sapiens
tgatgaagcagtgatggcgtggaattagctggggcagaggacgcctgtggccttacaactcggatggcggtgactggccgttcccccaccgccgcccctacccccagcggcgcgagctctaa

SEQ ID NO: 85020 - DNA, 122 bp, Homo sapiens
gcagtgctctgagtcagctggggtctccgctctgacaaatttgcatctctttgaatgtgacgcttgaaaaaagccggagccgctagattaaatttttttttccgtcgagaaaatgagaaaag

SEQ ID NO: 85021 - DNA, 122 bp, Homo sapiens
gtgctgtgggcactcggactgctttgcctttggattcctggtgatgagatcctgggtgggcggggacagcagggggtgaggctgcgcttctgcaggtgtcctggcggcaggtgtaaaatctc

SEQ ID NO: 85022 - DNA, 122 bp, Homo sapiens
tggggcgtctgctgccctaacccgcgaagcgctttctcaggccccgcccccggtccgacccggacgaccctctgagtcctccacaacgaagtcgtctgcctagaagggccggaagtacttca

SEQ ID NO: 85023 - DNA, 122 bp, Homo sapiens
tgaggagacgccaccgatgtggagggagcctgctcagccgccgctgggtgctctcggctgcgcactgcttccaaaagtgagtctggggggcggccggggcctcagacttgctaatggcctcc

SEQ ID NO: 85024 - DNA, 122 bp, Homo sapiens
tctatgtagtttgtcctctgaataaaattgcaagatccagtgtttctcaaacccatgtgccgactctaacctgtttctatttcactttttcctgtcttgacaaatggcatcctcaaccacct

SEQ ID NO: 85025 - DNA, 122 bp, Homo sapiens
ttgtgaccttttctccacttgagtcctcctaagaaaagcacaagagggccacaatttgatcgtcttggcctggattcagctgcaggagtgttcttatgcattctgacctcagcatgttggct

SEQ ID NO: 85026 - DNA, 122 bp, Homo sapiens
ttcttttgctgggctgaaaagggtccccgaagatgtctacattctaatcaccgggacctacgtgacaaaggggcctccagatgtggttaagtcgaggcacatgggatgggagattgttctgg

SEQ ID NO: 85027 - DNA, 122 bp, Homo sapiens
aagctgccttgttattttatttcatcagtaaactgtgccaagccctgttagctgatctgccgggtgatttgtgaaagttatgtaacagcattactcactatgctgctacggggctcatctca

SEQ ID NO: 85028 - DNA, 122 bp, Homo sapiens
gaggtctcaaagggccaccatttatttgatcttctccacaaacatccacaaagcactgggcgcgctgccttcgggaagctcttcccgggtgtcaggagaggctgcagtcacagctgttgtct

SEQ ID NO: 85029 - DNA, 122 bp, Homo sapiens
ccgccctccttgggctcctggggcagggctgggcctaggtgctggcatcctgagctcatgcggccaccagaggccgctgcagccttgcccaggcctgcagcgcccgagctgccctgctaggt

SEQ ID NO: 85030 - DNA, 122 bp, Homo sapiens
ctgtgcactttctcaggcccctcaaaggagaactgcatcctcatgttggacagcacaatccggcgtgacatgcggttctctgacatggagctgcgcaagcgctcgaagttcttgttcatctg

SEQ ID NO: 85031 - DNA, 122 bp, Homo sapiens
ggttcctacattgcttctcagctgtcagctggtcagaccaggaaaactgtggcctcagttcggaggcagaatccctctgccctctattcatggcccaggctgctctgtgaccctagccatgt

SEQ ID NO: 85032 - DNA, 122 bp, Homo sapiens
aaatttgaaagatactagatggaatcctagtcgatagggccatgtttttgttcttgaaaacgtacacttaattctgggaaggaagttgacatggttaaagcagggatcagcaagccacagtc

SEQ ID NO: 85033 - DNA, 122 bp, Homo sapiens
agcctgggtacgtgcgctccacaacgcctcccccagccagggcccggggatccccgggagcgtccccggctacctggcgccgctcatcctgggtagggtcggccccctgaggctgcccggca

SEQ ID NO: 85034 - DNA, 122 bp, Homo sapiens
ctccaaacccggactgagagaggcaggaaacacccagctcacgccagccgggggcggaggcggggccggagcgataacttccgctgtccgcaccccacttccgccccgcagagggcaacgtc

SEQ ID NO: 85035 - DNA, 122 bp, Homo sapiens
ggcttcaccaccagaatttgcatgcacctttttataactctaaaagcagagacccacaggcgggaactttatagccaattagggtaaaccaaagacacaatttataaatttttattaatctt

SEQ ID NO: 85036 - DNA, 122 bp, Homo sapiens
ctagcccccaaagggtcaccaggcaggcactcagcagaaccaaggctgccttctgggccccgtgacccctgggacacgggatggatggatgcaggctggagtggggcatctgtgggcaccaa

SEQ ID NO: 85037 - DNA, 122 bp, Homo sapiens
gctgcacttgaaaacaggcatcttcatttgcagttaattagattaactcagctgcgattacgaatggaattccttgctccagcaacagcgaacgtttgttgaacatgtgttgtaatcttgcc

SEQ ID NO: 85038 - DNA, 122 bp, Homo sapiens
tctcccttggggagctgcaccaggcaccaactccccctccccggcctgcgcgcgcctcctcggaatggaagacccttccgggactgtcggtcttacctgtgggtctcatgcatgcagcttcc

SEQ ID NO: 85039 - DNA, 122 bp, Homo sapiens
ttcggccaggaggagttggatcctgacagcctcagcgatgccagtgggtcggacgggggccgaggccccgagccaggggtggagccacaggacagcagacgcaggagcccccaggaggggcc

SEQ ID NO: 85040 - DNA, 122 bp, Homo sapiens
gtctctggcctgctttccagcgcctggcctgcctttcccgctcgctggcctgccggcggccgcccgcacctccgcgcaagctggccacatctggaaatgtttgatttgatatagtgtcgctt

SEQ ID NO: 85041 - DNA, 122 bp, Homo sapiens
tgcgcacggggagaatgagccctttgttccccctcccccccgcggcacccgggcgcctgccgagagaggctcccccggggcagcgtgccagcttcccagccgccccaccctcccgtgggccc

SEQ ID NO: 85042 - DNA, 122 bp, Homo sapiens
ctcgggaagccccaggggtatctctgtcctcgacacagcaggggccctacaaacccaacacggctgtgcacccgccaaagtgcccacgcccaccgtggcggggcgtgtcctgcccgccccca

SEQ ID NO: 85043 - DNA, 122 bp, Homo sapiens
tcctcgtgcccctctgggtgtgcgttctagtgggcgtcgggtgcgggtgtgcggaggcagcgggcccacaggaacattcacatgggtcacaaaattatggcaaaattccttcgactgcccac

SEQ ID NO: 85044 - DNA, 122 bp, Homo sapiens
ttcgccttttgcaggaaaactcccgccgctagcgggtgctgtggggcgtcccaggtctcgcgcagccacgccctctgtgtgaccttgggcttcagtttaggcttctgtaaaagagaataatg

SEQ ID NO: 85045 - DNA, 122 bp, Homo sapiens
tgcctccggaagttactctttcagtaggcgtttgggggcggcactggtcaattttgttctcggttgcttggttgggctagatttcggttctgccgggtgggcgttttaagggctgtgggcgt

SEQ ID NO: 85046 - DNA, 122 bp, Homo sapiens
cagataacgggaagtgtgagccgattggccggacttctcactccacggcccagccgtttacggatcgcggaggccatccatcaaaagaattacaccaatcagcggcgaaaatgcccccttct

SEQ ID NO: 85047 - DNA, 122 bp, Homo sapiens
caggaagagtacagtactgagtgacaaacgacccaactaaccagcgccaaagcagcatgtcgtgttgaagctcacccagcgtgacgcaaaaagtggccaacccctgcggagcctgagaccat

SEQ ID NO: 85048 - DNA, 122 bp, Homo sapiens
acagctcccctgcgacccaggtgctggtaaagggtaacaacgtaggaggcccaatcccctcgcgcttctcagggtccccggctttccgcccctgtgccagacgacggcgtcctaacggccac

SEQ ID NO: 85049 - DNA, 122 bp, Homo sapiens
ggcgccgggcctcctgattgggcagcatccaaccaatcagggcggcgggcgagggcggggcgagggcggggcggtgggcggggacggggcccgcacggcggctacggcctaggtgagcggct

SEQ ID NO: 85050 - DNA, 122 bp, Homo sapiens
acagaaggcataagccataaaagcctactgaggctgggtgcagtgcctcacacatataatcgcagcactttgggaggccaaaatggaaggaccacttgaggtgaggagttcgagaccagcct

SEQ ID NO: 85051 - DNA, 122 bp, Homo sapiens
acggccatgagacttttctaatgcttcaacaccttccatgggttcagctgaggggtgtgtcgagactgccttgcagcccagcttctccctgtgagcaagtctgcttccttcccttctgtagg

SEQ ID NO: 85052 - DNA, 122 bp, Homo sapiens
aaagcgcttttacactgattcccaggaaggcagggcaggcaccattagccccattcacggcgtgggggataaagtgacataaagagacaaaagtctacaggcaagactgaaactcagactgt

SEQ ID NO: 85053 - DNA, 122 bp, Homo sapiens
ctgttgctgtgtttggttcttcagcattatataagctagcatgaaattgagtcttcaattcgatggggaattgaatttgaaccctccaaatagtaagcagtccttaaggttgacaagaattc

SEQ ID NO: 85054 - DNA, 122 bp, Homo sapiens
aaggatgcatctcttcagcccccagagcgactggaacatcggctgaagcattctgggaagcggaaaagggggggctccagtggggccaccggggagccaggggacagctctgatcgagagcc

SEQ ID NO: 85055 - DNA, 122 bp, Homo sapiens
gtgctaagaaggctgtgaaggttgaaggacctgggttaaatcaccccttccactcactagcggtatcaccttggccaagtgtaaaaccctccttcctaggctggtgtgaggagtcaggaact

SEQ ID NO: 85056 - DNA, 122 bp, Homo sapiens
ggcctgcagggctgcattaggatggggagtttgagctcagttagagaccagccccagaaacgcagagagagggtgcagcgccgtccacagccctctccccgctctctctcctcccctgcccg

SEQ ID NO: 85057 - DNA, 122 bp, Homo sapiens
gggagggtgaggaggaagcctggggttgcattgtgttgcgggaggaccatgctaagcactcggatgttttcccatggggattcccagatttctggacagtcactcttctcttgatggcatct

SEQ ID NO: 85058 - DNA, 122 bp, Homo sapiens
cttaggggagtaaagtaactctcccagtcacacggctagtgagcagcaggtctgggactccgcagcctccgctctttcctctcttggacacccatgctgattccctgcctctatgccacctc

SEQ ID NO: 85059 - DNA, 122 bp, Homo sapiens
attcacatataatgcgtctattctcctccattagcgcaggcaggaaatgcccctgagtgccgggcagggctttggaaagcgcaataaatggcggacagacacatggcgggagggcggcagct

SEQ ID NO: 85060 - DNA, 122 bp, Homo sapiens
ccaccggaaacctgtgtgcacatgtgggagttcatgtgtatgcatatgtacacatatatacgtgaaaagtgtgtggtttacagctgttatttctctgcacacacagaaaaccaaccacagca

SEQ ID NO: 85061 - DNA, 122 bp, Homo sapiens
cgaatgaatgacacattggttgcaagcctgcacccagctggatgggagagtaaatttccacgcacttgtggttttctgtgcttgcagccaaagtgagtgctggcagtgtgagcctgcccatg

SEQ ID NO: 85062 - DNA, 122 bp, Homo sapiens
tttaaaagcctttcgtaatgagtcacatagcctcatgatcaacaattgtttagatgaagccgtaagagctcctggtttctcttctaaccagttttctgtagccagtgctcctgcccttaact

SEQ ID NO: 85063 - DNA, 122 bp, Homo sapiens
ccccgggcgccgaggggggacacgaggccgggggcacggaccaaagatgtcctcggatgccggctccgcgtccttcgccctcttcctcctcctcctcctcctccctgagtggcgcagtgagg

SEQ ID NO: 85064 - DNA, 122 bp, Homo sapiens
gtctttgaagaacagtttccctttcaatttcagtcactaactgctgcaacaaggctgatacggtttggctgtttccccacccaaatctcatcttgaattgtagctcccataattccacatgt

SEQ ID NO: 85065 - DNA, 122 bp, Homo sapiens
ggggatgtcatactatgaactgagagcccgcgagctggaaaaaacagtgccagtcctgcccgcgcgtcgcgggactcagtaattcccggctccgcagcgctcgagcctgttctccgcagctt

SEQ ID NO: 85066 - DNA, 122 bp, Homo sapiens
agaagcagcccggagctaccgtcatttcatcttcacgcggggtctccagcgcgcctggatcgttccctagccaagccaagccaggtctaatcaatcacgtgcgttatttcgtgcatcaccca

SEQ ID NO: 85067 - DNA, 122 bp, Homo sapiens
gccacatgggcgtggcctttttcctccgcttttcaaactttcgaaactttattggccactcggagaaacgcgcagtcggccacgcccacgcccctactgccagagtccggggcctggggtta

SEQ ID NO: 85068 - DNA, 122 bp, Homo sapiens
ccgcagggacctctctgtgcatagggtcaggctaattgaaaagcagggcctctaggtccgcggggactttccgggttgcacctgcaaattctgaatttgaccctctctaagtactcacctca

SEQ ID NO: 85069 - DNA, 122 bp, Homo sapiens
agcgggtggcgttcccagcctgctttcggagcagcacgggtttcgtgcagggtgttatcccgaccccttcccccatccctctaatctggcttgagaagcccgtgctggagagaaaaacgcgg

SEQ ID NO: 85070 - DNA, 122 bp, Homo sapiens
ggcaggcggggtgggctcacgccttgtgctgtttgctggtcttgaaggagacctgcagcacgcgctcgcccaggcgatagccgttcaggctggcgatggccatggccgcctcgtcatagttg

SEQ ID NO: 85071 - DNA, 122 bp, Homo sapiens
ctcctttcagcagccgcatctcaatgccagatccccttagagtaaagggcagcggaataacgctagggggttttcacatgcacccctgggccaagccgacttgcccttgccgtggatccctg

SEQ ID NO: 85072 - DNA, 122 bp, Homo sapiens
ctgtcgcagacacaggctgtggcgaatccgagtgctggcgggcagcagtgcctgcagctgcgcccgcagactctttcccgcctccgccggcatttccgtgtccggccgatgtcatgcggtcg

SEQ ID NO: 85073 - DNA, 122 bp, Homo sapiens
accctcattgtatggaggaggaagataacatagggccagagaatttgcccaaggtcacaccgctggtataagtggcagggtcaggactcaaagcctggttttcctgagtctctgcactgcac

SEQ ID NO: 85074 - DNA, 122 bp, Homo sapiens
actccaggtcgttgttgagggtctcggtggcgcagatctgccaggcgctgggctgggactcggtgcagctcagcgcctgccacctcctcacggacgtgctgcagcgctatctgcagcagctg

SEQ ID NO: 85075 - DNA, 122 bp, Homo sapiens
ctccttattcttccattcttcctctggttcacttctactcctgtagttcttggtaacaaacggaacatttgtggagtgagggggggggatccatttccttcaaggcgcagtttggaggtcac

SEQ ID NO: 85076 - DNA, 122 bp, Homo sapiens
ccaaaggagagtgatgaagggttataatctgggaggaaagtcggttggatggccctgaggcgagataacacattagaggcgctgaaagaaatagaaagtggcagggctttagggataggggt

SEQ ID NO: 85077 - DNA, 122 bp, Homo sapiens
agcgaaactccatctcaaaaaaaaaaaagtgtcttgttcactgcagcatgcccagtgccacgcacaggtgctgacctatagtaagtgcttaacatttgttgaataggggaaagaaatttccg

SEQ ID NO: 85078 - DNA, 122 bp, Homo sapiens
cctgcaggttgccacgttcattgcaaagtgtccacagtaaagataaaggagaaattcccccggcaatgaaaacgagaatgagataaattaccaaattacattaaaagcgtgctcttatgtta

SEQ ID NO: 85079 - DNA, 122 bp, Homo sapiens
cagggctccgggcaaggaggtctggatgctgagggcggtccctgaggggcgggcggggcccgaccggcgctctgtgtggccgaggccatgaagccgcagccgcccggctaggccccgggcgg

SEQ ID NO: 85080 - DNA, 122 bp, Homo sapiens
cagcactgggcgaggggaagttggtgggccaggggtccggccttgtccctgctctgcctccgcaacagcgaccccgatccctttccccagggaccaccccccaccccattccgcaggccaag

SEQ ID NO: 85081 - DNA, 122 bp, Homo sapiens
atcaggcagtggtgtggggctgcaattcacacaaatggccactggatgatgccagaggaccggctctggatgcttaagtcctcactgcctccctggagggacctctcttggggcctgcagtc

SEQ ID NO: 85082 - DNA, 122 bp, Homo sapiens
caatttggataggttgtgattcttgtcttccccagtcagatacctacagccgctgagagccggtattccaacgccatgagacgccttctgtcgtgagcagttgacaagaaagacccagcact

SEQ ID NO: 85083 - DNA, 122 bp, Homo sapiens
cccgcagcttccggcccgcgccctccgctcgaccgccgattttctcgccccagccagccccgtagccagaggaaagtgggagttttgagaaccctctgaccccagccgtgacccctctccgg

SEQ ID NO: 85084 - DNA, 122 bp, Homo sapiens
actacaaatcaggtgtttatttattttctcagaaagttggctgttaaacatttaccagcacgccactggagggaacccaaatcctaggcccagctcctttggattaaggaaagggggagaag

SEQ ID NO: 85085 - DNA, 122 bp, Homo sapiens
cagactttgaagcggaggcattactttattcaggcagggactagccaggcagggccacagcgtggcagggatggggggagtcagcacatgggagtgccgtcacctccattagccacaggcca

SEQ ID NO: 85086 - DNA, 122 bp, Homo sapiens
gtgctgagattacaggcatgagccactgcgcccggcctatttacttattttttctacagacggaaggctccctatattgcccaggctggtctcaaactactggcttcaaatgatcctcccac

SEQ ID NO: 85087 - DNA, 122 bp, Homo sapiens
tcatggacaataagtgagaaggagcaacatagctttttgccctctgaactttttccctaacgccccttcacttgataaccaactggcctctctgtccaccaagtaccacactcactccactc

SEQ ID NO: 85088 - DNA, 122 bp, Homo sapiens
agggtacagttctacttttccttatcatagaggtaaactgtttaaatatcaattatgcaacgaccctctatgtactctagaaacagatacaggctgttcaacttacatccatgactctactt

SEQ ID NO: 85089 - DNA, 122 bp, Homo sapiens
ggcagtttgtgcgtccgactggctggtttgcaggctcaacttcacattgagacacttggacgtcacatgtgaagcctacgatcacttccgctcctgcctgcacgcgctggagcagctcgcag

SEQ ID NO: 85090 - DNA, 122 bp, Homo sapiens
tcctaaagagcatgtataaagtcgatttcctagtgtcgacatgagattcaactgggtaaccgatggaaatggtcagcattagtcagaatctatgaccccttcgtttcatgctttaaattata

SEQ ID NO: 85091 - DNA, 122 bp, Homo sapiens
tcacccgcatcaaaagattctcggggtctcgggacttgggagccggaggtggcacaagagcgtcacccccaccgaaggattcttggggtcttgggagaaccttgtacttgacgagggaggcg

SEQ ID NO: 85092 - DNA, 122 bp, Homo sapiens
agaagccgcgggtgtggcggaggtgaggtggccgggcccctgctccctcgcgctgggctgcgtgctctggatggggtggtgtcagggctctgcgcctccgcccggcggccttccagacctga

SEQ ID NO: 85093 - DNA, 122 bp, Homo sapiens
tttcttacaacttgcccaggaagacaccttttgcataaaaacaggcaggtctgctgtacccgggagagagctttccaaatccccagatggagaatgtgtgtttcctggatctggcaggaggc

SEQ ID NO: 85094 - DNA, 122 bp, Homo sapiens
cgccccagcccgtgctgggatgtgcaggtgctgggggctacacagagctgaggaggctgtcggggctcccagacagatgcctgggctgggtttgcaccccaaatctgtgcctagaccgggct

SEQ ID NO: 85095 - DNA, 122 bp, Homo sapiens
tagttctgggttcggtgcccttgtcctctttcctgggcctggatggccctctatctgggccggtcccttagaggccgggcaagcgtctcctggagaccgcctctcttcgccaggctgggctc

SEQ ID NO: 85096 - DNA, 122 bp, Homo sapiens
cttgctcttcccatccctgactccacactagccacatccttcatcacagcagacaccgctcgcaaagctttggctcttgctgttccttcagccaggaatactctgcccttaggtacggaaca

SEQ ID NO: 85097 - DNA, 122 bp, Homo sapiens
cccgggccagcctcaggtcccaatcccttctcccctactttcctagacacggtaagagaccgggaggtgtcctctacactgcccccagacccatcctatctgacacccaaaaccccgctcca

SEQ ID NO: 85098 - DNA, 122 bp, Homo sapiens
tgagcaaagaggaggaggggtgctgggactgcctgccttgctcctgcgacccagtcccgacggtgcctcccgcctgcaggtgcccgcgctgcgcggcgacgacggccgctggcgcccggagg

SEQ ID NO: 85099 - DNA, 122 bp, Homo sapiens
gaaagccacagcgaagcacctcctagcccaagtctagctgctgtgtggcagctccagcggcgtgaactgtgactgccctgcagacacctatcaagcgctgcgtcagctattaataataaaat

SEQ ID NO: 85100 - DNA, 122 bp, Homo sapiens
tcaccgcgcgccctcagccggacaaggtgggcgagggccaggggggccgctgctagaccccggggccccgcccgtgcccccctacccattcccgctcccccagcacccggggcgtcccccgg

SEQ ID NO: 85101 - DNA, 122 bp, Homo sapiens
ctcctcacctcccagacgatgggcagacgggcagaggtgctccccacctcccagacagggcggccgggcagaggggctcctcacctcccagatggggtggcagccgggcagaggcacccctc

SEQ ID NO: 85102 - DNA, 122 bp, Homo sapiens
ggctgagcttagcgacaggccggcctcagaagtgacattcacccccccacccccgccccccgcccagtgtccttacgctttgtgcagaaatctggcgtgatctaagatattggtgcagaatt

SEQ ID NO: 85103 - DNA, 122 bp, Homo sapiens
gagcctccgggttcttctccagccgctgctgagggcatgaagccatctgggggtggggggcgcaggtgtggaaggaagaagcatatccagtcccttggacgtggcagactcccagtgtgtgt

SEQ ID NO: 85104 - DNA, 122 bp, Homo sapiens
ctgctgttgataccttacatggttccatgctggccccaaggacgtgcccttcgttggtgccgaatgtcatttggtcatagaggctgaaagtcattctggagttgatgtttccaaggtcaaaa

SEQ ID NO: 85105 - DNA, 122 bp, Homo sapiens
ttttagagagacacacaccgggagccgaggctccagtctccggccgagtcttctcgcagccgcaacccacctggggccagcccagagctgccagcgccgctcggctccctccctccctcccg

SEQ ID NO: 85106 - DNA, 122 bp, Homo sapiens
attgtgccaggcactattgcagaggttggggttgcaaaaagaaaaaaggacaaaaatccccgcccttaaggggcttgcctcttgataaggaaggaaaacaaatcaacaaacaagttagcaaa

SEQ ID NO: 85107 - DNA, 122 bp, Homo sapiens
catcagctactaatatcaggtggcagaaaaggttttacatatgtatttgacctttgtcaacgacaacagaggcagcttttccagagccatgattctcctgttaaagccgttgctgttgatcc

SEQ ID NO: 85108 - DNA, 122 bp, Homo sapiens
cgtgccttgctcactttgtccccaccccatcctctcacaaagaagaggccctgttcccagcgggtccccatggggccatcactgccacttaggagacgccttccagagcttgccttggcctt

SEQ ID NO: 85109 - DNA, 122 bp, Homo sapiens
gggtccgcacgcgctgggtgtccagctctctgtcacagcttctccaagtgcctagtgaaacggggaaaggccctctccaatcattttggtaccttcctttccaatcctgaaacgattttccc

SEQ ID NO: 85110 - DNA, 122 bp, Homo sapiens
caggcgcggccgctcggctgcgccctcgcggcaaagtcacacacccggcggggcgcggggcgccggccccttcctggcccgcgctggaaacctggaagtctgttgctaaaatgcacgcgccg

SEQ ID NO: 85111 - DNA, 122 bp, Homo sapiens
cacgccagccacagcacgctgaaggcaccacacagcacaggcaccagcagacctggggaccggggagaagagccggtgggcaatgaggcctgggcacctgcggggcactagccacacaccca

SEQ ID NO: 85112 - DNA, 122 bp, Homo sapiens
tcccagccctgactgatccctctcctggtcatcacttaagtgagcaaattcatctttgaacggttccttgaccttttgcttgacagatgcacgcatgctttagaaagcacacgtcatgcagt

SEQ ID NO: 85113 - DNA, 122 bp, Homo sapiens
tctactagtaccccaaagggcaaaaaccaaacagggtcccccatgcagtttatgtagtggcgttgctgacccaatcgcgcctttcctaacaccgctgcccaccagttacctcctcctaagac

SEQ ID NO: 85114 - DNA, 122 bp, Homo sapiens
ccacccaccagggtttctgaactgcaacaagtgatgggcctgttcctcctgcctggacagcgcctcggggcacccacgggctggggcagggccatggccaggcaggatctgggtcagggaag

SEQ ID NO: 85115 - DNA, 122 bp, Homo sapiens
tgcctgagtctgagatgagccatacatggggcctcctcagagggtggatggaccccaccacgctctgagcttcccgacctgattgaattctctctactgttgattgagttccttctgtgggc

SEQ ID NO: 85116 - DNA, 122 bp, Homo sapiens
tccagccccagctcagtggagggccacctcaggtccgtcagccttctgtagggagggctgcgagggcggggtccatccaggagggcccctcccggctgcaacccaggaagtcctttcagaga

SEQ ID NO: 85117 - DNA, 122 bp, Homo sapiens
cctggagggcggggaggccgttccggaccccgtggagtatcccgctcgtgcgagtgtcctcggcgcaggtgtcctccccggcacatgtgtcccccccaggcgtaggtgtccccttggcacat

SEQ ID NO: 85118 - DNA, 122 bp, Homo sapiens
aatgtctctgaaggacagggaaaggggatggcctgagcctctgctccctggatgtggcaccggctaacctggatgggagagggtggctgactgatcctatactgaggaatgccggcaggaga

SEQ ID NO: 85119 - DNA, 122 bp, Homo sapiens
tcaatttaaatccaaatgatggaaagcataggagttatttaaaacataacctcaatccaccgtcaagtccaccctctctgggtcttggtcattccccgtgctctttccggagccagaatcaa

SEQ ID NO: 85120 - DNA, 122 bp, Homo sapiens
tcagaaacattaagtaacttgtccaaggccatggggttagtaagaggtgaatctgggactcgagttgaagtcaaacttccaagtgcatctgcagacacaaaatatgggaagaattcacctaa

SEQ ID NO: 85121 - DNA, 122 bp, Homo sapiens
gcacagggcaagccccccccaggcgcccaggctgggaggcccaagtcccggcagctgctgcggtggacttagaggcagcagctcctgcttctgccccaaacgttcagtgtagtcggattccc

SEQ ID NO: 85122 - DNA, 122 bp, Homo sapiens
aaagactgctccgtcccctagcaagggacaggcacttcctgctcctccagcagggaatgtcggactgctggccagaacagcagtggcccagggattgggtgctggaggcctagtttttcacc

SEQ ID NO: 85123 - DNA, 122 bp, Homo sapiens
gaacaagaggcagttaatcaaacaatgaacagctattttaggaattcctttaatattattcgctggcaagtataagcagcagcagagcaaatgaatattaagaaaattcaacttctacatgt

SEQ ID NO: 85124 - DNA, 122 bp, Homo sapiens
ggttcgtccaaggcgaggctggaggctcctcggcgcccgcctgctcgtgggggaggggggcgagtttgtcaagggcatcctggccaggcctgttagggcccccagagaaatgcacgtgtctc

SEQ ID NO: 85125 - DNA, 122 bp, Homo sapiens
gcatttggaaggagtgatcaaataccgaaattgaactttctaaaacctacacatagcatgcgtttaaattctattatataaagccccaagtgctttaccttctaaaacatgcttctctatag

SEQ ID NO: 85126 - DNA, 122 bp, Homo sapiens
tgacgtttcctcaagcaccagctcgacctcagcacagttttactattgcctcccactgcacgcggcactgcccagaatactgctgcaggcggctccgggaggctggtggtgcatccctaact

SEQ ID NO: 85127 - DNA, 122 bp, Homo sapiens
ctcagaactcagggtacctccagctgcaggggccagaactgccgactatcccaattttgacgtttcctattgttgccggaagtgacgttaggctccgactcttaacggagacgcatttttat

SEQ ID NO: 85128 - DNA, 122 bp, Homo sapiens
ctggctgctttagtgaactcctatcttaaacacatgtgcctagctccatctccatggagacggctgttttaactgactaggacattccacttgtgactcacaccctctggggcacaccagtg

SEQ ID NO: 85129 - DNA, 122 bp, Homo sapiens
tggggtttcgccatgttggccaggctggtctcaaactcctggcctcaaatctgcccacctcggcaaaagtggtgttttaatacaagaattctgcatgttcaaggtggggaaaaggcttataa

SEQ ID NO: 85130 - DNA, 122 bp, Homo sapiens
ttcgtgcttgcttgggttactgtctggagtgccttgagcctgctaggtacccagaggacccgcaggccaggctcccttgacctccacactgcctgccccaggacgctgggccctgacagaga

SEQ ID NO: 85131 - DNA, 122 bp, Homo sapiens
cacggaggagtggggcggtgccgcgcaagggaggcaagggggcggggccaagtcgcccagcggcagatgtcagggtcttcaggcgaggtctgacctagctagcgccactctacatacggata

SEQ ID NO: 85132 - DNA, 122 bp, Homo sapiens
gtggtgggtgcctgtagtccccgctactcgggaggcttaggcaggagaatggtgttaacccgggaggcaagctttcagtgagccaagatcacaccactgcactccagcctgggtgacagagc

SEQ ID NO: 85133 - DNA, 122 bp, Homo sapiens
taaactgtaccccaatgcttcccaacacatgtaagtaacaaactcaactctgcgacctgccgaacatgcctttcccttttctcctcatcccactcctctcctttaccccgtttccttccacc

SEQ ID NO: 85134 - DNA, 122 bp, Homo sapiens
acggcagggcagtcagggaggcggtggcgttgggggcggcataggggaaggcaacggagtcggttgtgccgggtctgaatcgctgctccactccgggtcttcgtcaaactttgtctctctgt

SEQ ID NO: 85135 - DNA, 122 bp, Homo sapiens
cacagttctgcaggctgtacaggaagcgtggctgggaggtctcaggaaacacaatcatggcggaaggggaaggggaagcaggcgcttctcatcatggcggagcagaggaagagagaacgtga

SEQ ID NO: 85136 - DNA, 122 bp, Homo sapiens
tgttgcttgatgtgaacttgtggctgacctctgggaaagcggtgtgggcgggcatggggacgagaggagggagcaaggctctgctccagcaaagcgagatggtgcatccctgagcagctggc

SEQ ID NO: 85137 - DNA, 122 bp, Homo sapiens
cctgtatttcttaaaaggggagccaaaattatgtattttggtatccatctagtttactaccgtgttcccagtattttacactgggcattgtatacagtagacacccagaaaatctttgaatt

SEQ ID NO: 85138 - DNA, 122 bp, Homo sapiens
acgtccaacccaggcagcctgacttcagagctttgcttttgatcatgcttacgagtatcacgggatttagtaccgaccaagcacacagcagtgtgacagccccgagctcgcctgtgcagcct

SEQ ID NO: 85139 - DNA, 122 bp, Homo sapiens
agctgaggaggaaatgaggtcacagggtcatgcaaacatcaagccaagttggtcccacgacgtccagggaggtggccaggcttccagtgccggaaccgtaggtcctaaagacgggaaattga

SEQ ID NO: 85140 - DNA, 122 bp, Homo sapiens
cactatcctggttttcctcactgattattcaattttttatatcccaagtgtaaacataaccgcaaattctgtgatcattttctcttttctctatatttcctttcacacagaagaatctattg

SEQ ID NO: 85141 - DNA, 122 bp, Homo sapiens
tctcttttttttttttttatctaaaatatgtcactccaggtgactgtcactcagtaatggcgcctggtagagaggctattttttcagtctagctgagttacaaacaaagaaaatcattccca

SEQ ID NO: 85142 - DNA, 122 bp, Homo sapiens
ctggcattcaaggcctgtcatcattttcaacacagcctgaggattcctgccttaactttccgtgctccctactttacccccatgttccagagacgctagatatatcactccttaaatgcatc

SEQ ID NO: 85143 - DNA, 122 bp, Homo sapiens
gcacttctgagagggaaagggtgtgctagcaatggttataccgggacaacaggcgtaacccggggctgactcaggcagtatggatgtgtggtcaccccatccgagcttctccaggaagtgac

SEQ ID NO: 85144 - DNA, 122 bp, Homo sapiens
acttttcagtgttcgtgcgtcgggacggcgcgtccgcccgcccttaaagggcccgcacctcggaaaactcgcagcccagcacggcgtcgggtagctaccacctatcacgcccctcactctgc

SEQ ID NO: 85145 - DNA, 122 bp, Homo sapiens
cccgcctcccaacttcgcaattgcgattcccagcccaggaggtgtacagattgaatgactcgctacttggtgggtggaggggttggggaagggaggaaggagggagatgtggggcggaggag

SEQ ID NO: 85146 - DNA, 122 bp, Homo sapiens
atgacataagccagtggcagggctgaatttaaaggcacaaagcagtgcgccccagagtcacgcgggtggactctgacagtgatagtgtccatttcccacatctgccaggagtgtggctcttt

SEQ ID NO: 85147 - DNA, 122 bp, Homo sapiens
ctgcgcctgcagcccactggctcctcaggatcccgatgggcgtgtcaggataacccaaggcgcaggcgcggcggggccttaaagggacccggcggcctcttctgcacaacgggttcgagcag

SEQ ID NO: 85148 - DNA, 122 bp, Homo sapiens
gctccccgcctgggcacatggcggagacatgcaagccacaggggagggctctgacctcggcgtggctcccgccagggacctggcagctcttccgcttgttctctctctcattcctcatgggg

SEQ ID NO: 85149 - DNA, 122 bp, Homo sapiens
gcgcagcctgggcgcggcctgggcgcggcctgcagtctggatgccccggactgcctggctcgcggctcgccgctctcggcctctgctagtccgcacccctcccaaagcccacagcccgcggc

SEQ ID NO: 85150 - DNA, 122 bp, Homo sapiens
cacccgtgggaagcaccagatggggctgtctcccgagacaaagcctaaaaccaaatgtaccggaatttttggaaactgaaacacaacttgtcctagataggaatgtcaggaagccagcgaga

SEQ ID NO: 85151 - DNA, 122 bp, Homo sapiens
ggcagaagacaatgaagggggggccactagaccggaggctctacgggaggaaacaatccccgcctcaaggagctggacgccccctggggacccggcccgctggccattccgctgaggccggg

SEQ ID NO: 85152 - DNA, 122 bp, Homo sapiens
ttagaaacggaaaattattaaaagctcaagcctttttccttctacctcttacaacaccagcgagcattccactgggggaggggtccttcgctccgccacctggcctatttgttggagttact

SEQ ID NO: 85153 - DNA, 122 bp, Homo sapiens
aaagggcggaccttggagcccactgactgccgggaattggagtcacagagggaggaaggccgaaccgcgggagcctacagatcccagaagacaccgcgctaccgaggactgcagtctggagt

SEQ ID NO: 85154 - DNA, 122 bp, Homo sapiens
ccatccattttcatgggttcaccaggtgacagccaggggaaggagatattctgcaaggttcgctgccggattgagaaagcatctcttactgggtgcgcttggttgagactcacaggagttgc

SEQ ID NO: 85155 - DNA, 122 bp, Homo sapiens
tcttggagaagggaacatgtcagggttgtttgtgttcaggcagcaggagttcccctaactcgtgggaaaagcaactgcacctcactcctgtgactgcctccccaaagaatcctggcaaatgt

SEQ ID NO: 85156 - DNA, 122 bp, Homo sapiens
ccaacaggctatcaggcgtgtgtgcagggagcttacttggggaactggctggcgtttcaacgcgacgcccagaacaggccgcacagaagctgcagggctccgccacgtcccaggcccccaaa

SEQ ID NO: 85157 - DNA, 122 bp, Homo sapiens
gcatgatcaaaatgtaagatggttcctttaccttcaaaagcttttccatccccttttgtccgagttcagttatgagacactggattgggtttcacagccttttctagcattgactggggtga

SEQ ID NO: 85158 - DNA, 122 bp, Homo sapiens
ctgctattcagtggtcagtcgccgctggagcgaagacatatctgggtgagaacagaagaccgggattaacagaagactgtgatgagctgggggaggggagtgggtagtgacggtgctgagtg

SEQ ID NO: 85159 - DNA, 122 bp, Homo sapiens
accccagtgtattgtgggaagggtagtcccatgttccagtcgcttgagcacagaaaagcgcgtaggaaactacaactcccaagaggtaaagaagcgggactatttcccagtctggcggtagc

SEQ ID NO: 85160 - DNA, 122 bp, Homo sapiens
ggttcgtgtcgctaccccttggcccttcgctcttgctgccttaaccccgccggcggagcccgctcttctggcctgttgagcccgctccctcactgccacacagcaagttccgagaccatgga

SEQ ID NO: 85161 - DNA, 122 bp, Homo sapiens
aatcacctgggaggaaccatctatcatcctgtcctgaaggaagatcctcctaggtctggtcggacctttgtatggtaattaagatgtaaatcccctgttagaaaatctgctgggttaaggga

SEQ ID NO: 85162 - DNA, 122 bp, Homo sapiens
tgtttggaaatgaatgtctactctttcttggatttcaaataagagataaacatttcaaaacgattcttttaaaagatgccttttcttgatcacaggacagtcgtgtatgtgcacaaaaataa

SEQ ID NO: 85163 - DNA, 122 bp, Homo sapiens
caacccactagcatcctagagtaatgggctgagtcaaaagagggacgccctcgtcagggccgctcccctctcaccggaaacgaagtcacatccgacctacctgaccccggggtcagaagctg

SEQ ID NO: 85164 - DNA, 122 bp, Homo sapiens
ctgagcggggaacctgactcccacgggcttgcaaaatccaagactagcaaaaatgtgactcgaccagtgtgcctgtgccggacggcccttctcgccatgtgcaaaagccacgccggcgcgga

SEQ ID NO: 85165 - DNA, 122 bp, Homo sapiens
agggattctctgtcacattccacatctggatcagttcctccccattttgttggtcaaatccgatctgccatatcctgtgtaatgacaagtgagttgcattctcaccgtcactcctggggtct

SEQ ID NO: 85166 - DNA, 122 bp, Homo sapiens
tgacgccacgggcgcgcgccggcggccgcgcgggaggggtggaggtgagcgggtttgcgccgtgatctgcagccccagatcgccagccatgctcagcctccagtcgccggccgcggttggat

SEQ ID NO: 85167 - DNA, 122 bp, Homo sapiens
ggaaggcacggtcccatacgacttctctaggcggggaatggggcagggaggagcagatgccgcaaggcagagcagcacagaagggaaggtctgtatgtcagcgagactgagttaaatttaag

SEQ ID NO: 85168 - DNA, 122 bp, Homo sapiens
aaaccacagcttgtgagataatgtggctatgaggcaatgatctgaaatctggaagaaaatcgatcttaaatctttatattgatccaaatatttgaaagtggtaggaaggaatatgcttgcta

SEQ ID NO: 85169 - DNA, 122 bp, Homo sapiens
cagcgtgtacctgcaggagtgggacatccccttcgagcaggtagagctgggcgagcccatcgggcagggccgctggggccgggtgcaccgcggccgctggcatggcgaggtggccattcgcc

SEQ ID NO: 85170 - DNA, 122 bp, Homo sapiens
tgactgcaaaaagctgatcaggggagggtgttgcaactgggagagccatgtttgtaaagacgttcagacataaagtagcatgatttatgcttagggacgacctatttctaggtcttaaaggg

SEQ ID NO: 85171 - DNA, 122 bp, Homo sapiens
ttctaagagctaaacgttaagatgtaatgttccagaacaaagaggcccagagtcactgaacggggccccagggctcctagcttgagtgtaatctgagtcagcttatgaaaaggccccaaaga

SEQ ID NO: 85172 - DNA, 122 bp, Homo sapiens
ctctggagccgtctggcgcgcaaggaggaggctacaggccggggtcgtctcgctggcagtcgctgtcagaggggttttctaactggatgccagtgtttttgtgatttttgtttttgtttttg

SEQ ID NO: 85173 - DNA, 122 bp, Homo sapiens
ggggcggctgcctggcggaggggctcctcacttctcagacggggcggatcccagacggggcggcggggcagaggcgctccccacatctcagacgatgggcggctgggcagagaccctcctca

SEQ ID NO: 85174 - DNA, 122 bp, Homo sapiens
acacttgtgactattgagcttgtgatgtgaaattacttgttccatgtctgtctttcccaccgggcagtaactgttaccagggaagggaccaggctggtcttgttcacttgtgcctaggagag

SEQ ID NO: 85175 - DNA, 122 bp, Homo sapiens
acctgaagccgtggtcattcaaaacaaatgagaggacagggggaggagagaaggaacaagcgcagatcaggtagctccttcttgggatctgatagacagggaaggtttcctttcctcattag

SEQ ID NO: 85176 - DNA, 122 bp, Homo sapiens
ccgccacttcttagatagagagcggccgcctccccgccctcctttcagccactcgctccgcgcagtcagctctgctgactcttccggaggattctggaaggttccagagggtgtgccgccga

SEQ ID NO: 85177 - DNA, 122 bp, Homo sapiens
cggtgagaaagagcaggccagccccgggagtgggtgggcaaggagcgtccggtccgagagcgcccagggcgtttggaggctcgaggggcagacaagtgctccacagagcacttcttaggcag

SEQ ID NO: 85178 - DNA, 122 bp, Homo sapiens
ttgtgcgccgaacaaaatggcaaagcggccgggtaatcaattcaatttcgatgggcaacccgagcaaccgcagcggctgtcgcagctgattagggaggaccgggctggagctttcaatgcga

SEQ ID NO: 85179 - DNA, 122 bp, Homo sapiens
gcccgaagacgcgggttagcatacagctcagctccaggcaggcgatgcgggttcccaatgcgggcctacagattacgcggactgagctgggaacggtccctgctggacagttccgtgctctt

SEQ ID NO: 85180 - DNA, 122 bp, Homo sapiens
ctcaaaacattatgggaactgtaatgtcccatggaccaatattggaactgggccacacagcgggaggcaagccataggcaagcgagagcgaggtttcaactgtatttagccactctccatca

SEQ ID NO: 85181 - DNA, 122 bp, Homo sapiens
gtatataacttcttgacgttcacacagttagaaagtgcctagccaaggctgttagctctgcggcatcatctctccttctggcaaataggcctcggaccttttctcattctcataaagtaggg

SEQ ID NO: 85182 - DNA, 122 bp, Homo sapiens
ttagtggtggtaagtccaggctgtagcttctttgcgctcctatgtcccaagaaactgcagcgggcacccggcggctctggctgcgccagggcagggcgcgctccgctccgggccgtcgggtc

SEQ ID NO: 85183 - DNA, 122 bp, Homo sapiens
aaaacccagtcatcccaacacgcctgtatgctctttgcctcgaggggacaagctccccatcgcggcaatagggaacggaaaggctttatcaggtgctctccaaggtccttcccatctcaagg

SEQ ID NO: 85184 - DNA, 122 bp, Homo sapiens
gtccaagctcctggcctggctaggcctcatgcccatgtctgcatggcaagtgcctggaaccggatggccatggcagcttttgctctgtgaaagcccaactgctcccctggactgctcccatg

SEQ ID NO: 85185 - DNA, 122 bp, Homo sapiens
acacgcctgccaaaactgcccccttccgggcccaagagtccaggattctgtgccaagccgcgtggccagatgccacttggggatggcgcctgtgagcaccaaagcctgcccttttcgggctg

SEQ ID NO: 85186 - DNA, 122 bp, Homo sapiens
aggacgaggctccacttcacactgggcccgcctgcgttttcccacaaggagcagagatggcgtgtgcagagtgaagacggattatgaatgaaggaaggaactgcgcacagatcctcccccca

SEQ ID NO: 85187 - DNA, 122 bp, Homo sapiens
tcctggtgctggatctggatgagacacttattcactcccaccatgatggggtcctgaggccgcagtccggcctgttaggcctcctgacttcatcctcaaggtggtaatagacaaacattctg

SEQ ID NO: 85188 - DNA, 122 bp, Homo sapiens
tgttcgggtgtagagtggatggcaaggcggcctgggctgctcgggacttttatgcgctagcgccatggcctcatggagagccatggtccccaccagcgtttgccttgggcaggagcagttgg

SEQ ID NO: 85189 - DNA, 122 bp, Homo sapiens
gaagcagctcctgcagaggcggggcggctctccaggcctggagcgtgggccaatcagagacgaggcgcagaagttgaatgtgcattgggtgcagcaggggtgagagggtggagtgcagggag

SEQ ID NO: 85190 - DNA, 122 bp, Homo sapiens
ccgcctgaagaatagattctctggttcacagccgtctgcaggctcaggaacagatctgggcgggcagaacagagccctgaggccaagagcccagcagtctgcgagtgactgcagccctaagg

SEQ ID NO: 85191 - DNA, 122 bp, Homo sapiens
tgagttctgatcccacagcaaccacctaataatcctggaaaaatctatttctctctgagccgcaacaatccagtctctaaaatatggacaatggccaggcacagtgggtcacacctgtaatc

SEQ ID NO: 85192 - DNA, 122 bp, Homo sapiens
gtaaccacagccctaactcaggaagctggtctctaagccacctggcaaggcgctttcccccgcctcccgcggtcctcaccctgcagctctccttcccgcctggacttcttgagttcgaattc

SEQ ID NO: 85193 - DNA, 122 bp, Homo sapiens
tgtgttctttcttgactcttgtgttacagaggctcgaatgaagcctggcttctacagtaccgcacccagcacctcgctgcgatgcagcctcctgtaccctttccgtccggcagctggagtta

SEQ ID NO: 85194 - DNA, 122 bp, Homo sapiens
ccgccctcacgcgggaaccctccagaagtcttaatatccgggaccagaggctggttgcagcgcacatttccggcaacgagcgcaaaggaagggatccggtgacgcctcttcccgtctcccca

SEQ ID NO: 85195 - DNA, 122 bp, Homo sapiens
gccgcggacgagtcccttcgtttcagccagtttggctcgtttattgagaaaagtggggggcgaggggttagtatgtaagaaagtcttaaagtttccacatggttaaggtaattttatcaact

SEQ ID NO: 85196 - DNA, 122 bp, Homo sapiens
gcaggtctgcaggctggacattcaggtaagagttgatgttgcagtcttcagttcaaaattcgcaaagcagcgggttagaaacccagggtagatttttacatttcagtcttgaaaagaacacc

SEQ ID NO: 85197 - DNA, 122 bp, Homo sapiens
gtttggagttttctgttggaaccgccggcgttggctccgaagacttagcgacgccactggcggcaccttctcctgcgcccagtgatgtttccacggtgcctgtacacagccgagcagcattt

SEQ ID NO: 85198 - DNA, 122 bp, Homo sapiens
gtagctctcaggttgtacaaacacaggtggaatgggtccatgggctgtactttgcttacccgtgctttaatatttgaaggattgttatccacagaagttaaaagcatcatactgtttgtttt

SEQ ID NO: 85199 - DNA, 122 bp, Homo sapiens
tgcaataatttaatgcccctcactataaattcggagctgcctcctcgccgatgattccagcgcctgacagccaggaccccaggcagcagcgagtgacaggactttttaggtacatgcaataa

SEQ ID NO: 85200 - DNA, 122 bp, Homo sapiens
cagtcccaagtcccgctggagagctggtgatgggggtccctgggcagggtctggcatggccgaggggccccgtgccttcagcggctgcgcgtccaacagcgaggccgaggccttgaggttgc

SEQ ID NO: 85201 - DNA, 122 bp, Homo sapiens
aggccaggccgccattgggatcggtcaggcccagcaagtcctctgccaggctggtgagctcgttctcctcgagtgcctccaccaggcgctgcagcgtggcgcggcggccctcggcctgcacg

SEQ ID NO: 85202 - DNA, 122 bp, Homo sapiens
tcctggatgtttgggagtctgggggctggctctgggggactgctaatccagagatttgcccgactctaagaggattctggcttcctagaacccttcctgtgtttcccaggctggcctgcatg

SEQ ID NO: 85203 - DNA, 122 bp, Homo sapiens
gggccggttggggccccgctcgccggcgggagccaccggagccccggccacgaaggggtgcgaccccccgccggccccgccctcccggctgcggcctggccaatcagagcggctcttactgg

SEQ ID NO: 85204 - DNA, 122 bp, Homo sapiens
agggaactccctgaccccttgagcttcccaagtgaggcaatgcctcaccctgcttcggctcgcgcacggtgcgtgcacccactgaccttcgcccactgtctggcactccctagtgagatgaa

SEQ ID NO: 85205 - DNA, 122 bp, Homo sapiens
tggagaaaaggccgccgacgtggggacccagcgcggggtcggtggagaaaaggccgccgacgtggggtctccaggactgctgtgccctcctggcccacctgcactgtgtgaaggaaatgcct

SEQ ID NO: 85206 - DNA, 122 bp, Homo sapiens
atatcatcagtttgtaatccagcccatggtttcctagataccgtattgtctattctgttccgctatgtgaaaaatgttgaatatcaacaatgggtttcagtgctgtattgttgagttttgta

SEQ ID NO: 85207 - DNA, 122 bp, Homo sapiens
cagcaggctcaaaggcataagtcattccaatcagccaactaagttgtccttttctggtttcgtgttcaccatggaacattttgattatagttaatccttctatcttgaatcttctagagagt

SEQ ID NO: 85208 - DNA, 122 bp, Homo sapiens
cgtgtggtcaggaggctggtggtgcaacgccctctgcggcatgaagccacactgcaagagcgcttcaggagggagccccaggaggatgcctgtctgaatgcacctccgcaccccaatcctgc

SEQ ID NO: 85209 - DNA, 122 bp, Homo sapiens
ggcagaagctgtaatctcggcaccctggggggccaaggcaggcggctgggaggcggaggccgtagccagctgagatcacaccactgcactccagcctgggcaacattgagcactgagtggac

SEQ ID NO: 85210 - DNA, 122 bp, Homo sapiens
gtaaagtctcttaataatatagcagcaaatattagctcttcattcaaaattgttattattcgggagtactatacatggtctcttacattaggatttatgaaagtaggaattaattatgttta

SEQ ID NO: 85211 - DNA, 122 bp, Homo sapiens
ttgcttctccagagaccctttttcttgcctcactggaagccctggaatttcttctatgaccggcacgcccccctgcccaccccagccgattccctcgccacctccaccatctcttccacccc

SEQ ID NO: 85212 - DNA, 122 bp, Homo sapiens
tgcaggagtttcaattctcaaacatgagctcctgtagttgctaagtttgtttctacatatcggctcctgatttggcctgagatgaccaagattctggtcctagagccatccatatgacttaa

SEQ ID NO: 85213 - DNA, 122 bp, Homo sapiens
tgtgcctcatctccccaagccacgccagccctccaacctgcccgtccccaggactggacacgggaacctggtcccagatccctttcggcagccagatctttcatcctcatcattccttcctt

SEQ ID NO: 85214 - DNA, 122 bp, Homo sapiens
atcttgagctcccgggagcctcagagttcggccagtgttgccgctgccctctcgaagacgcggacctgtggtccccagcctctcccaggagacctgcgccctgttccttttctcccagagcc

SEQ ID NO: 85215 - DNA, 122 bp, Homo sapiens
tggagctcgaatacaacgattcaggaagacacatccggtcaccgtcccaggcacaccccacgccgctcgcaaccccgtcagctctgatccagggcctacacccggcattcccaacccacaca

SEQ ID NO: 85216 - DNA, 122 bp, Homo sapiens
ggttcaataagtgagtgaagaatgatccagcctggcacccggcagcatgtggggagtgtccggagactgaatgggtggtagggccctcgctgagatggagcacacaggcggagtagccagtg

SEQ ID NO: 85217 - DNA, 122 bp, Homo sapiens
caaaatcacgcaaaacttggtttgctaagaattgtcagctcttctaaaggaggcgcttcacgcatctcagtctgtgaaatgggacccaggacccaggtagaggtgcgttctcggcctgggga

SEQ ID NO: 85218 - DNA, 122 bp, Homo sapiens
ggcctggagacgtggcagagcctgaggggaagccgctgtctcctgaaacaggatttcggccgctctggccctggagaggcccaggaggctcgagagtcatcacaccaggacctgcaatgaaa

SEQ ID NO: 85219 - DNA, 122 bp, Homo sapiens
gcctacataagcatgaccctttccctcgaaaccgatctctttctcctagttccacggccgcgctgtcccggcccgtaaaggaaggcaagcaacagaggcaaagaaccttctaccttcacgct

SEQ ID NO: 85220 - DNA, 122 bp, Homo sapiens
gaatcaaaatgctaatttaaaaggtcaagtgaagctgctcctcacgttttggcgtgcctgcgctctctgcaggcagaagcgaacaaagacccagcaagagaaggcagaggctaagacccatc

SEQ ID NO: 85221 - DNA, 122 bp, Homo sapiens
gcagccgggtactcaccttgggggcgcggcggcaggagagcgcgggcggagaggtgcgggcgccctgggacgaccagccgaggacgcctggtgtttggacggctgcccccgcgctgtccccc

SEQ ID NO: 85222 - DNA, 122 bp, Homo sapiens
ggacttcgccccctgcctacccgaggccttgtgccaagaagtacctccctcagcctgcaccgtggtctatctactggagaccccagctgtcccctcaaaaccttcgctcccctgagacagtt

SEQ ID NO: 85223 - DNA, 122 bp, Homo sapiens
tggtcattgccgagcgtattgcggttctccgggagggttatattggttcccattccacagcggccgcaacgtgtcgagagccgtaagtaaagtgtcgcaaagcagaaggaaggcgggagtcc

SEQ ID NO: 85224 - DNA, 122 bp, Homo sapiens
gtctcaggctcctggagtttaggattcctgccctctgcaacctcctcacttacccacctccggtggtctacttggactcagaacaagccccagtttcccacttggggcccccactgagtctc

SEQ ID NO: 85225 - DNA, 122 bp, Homo sapiens
cccaaggcatgctgtggagagacttcacctgccaccatttccaggtcaacaggactagagcgttgatggttttcaaaccctgttggaagaaagtgcccatggtttctctggttctgccagtt

SEQ ID NO: 85226 - DNA, 122 bp, Homo sapiens
gaactcacaggagttcacaaataggagtttatttaatcatgcgcccagaggctgccctttcgccagaaggagcttttcaactgcaattaccacagaccctgttctgaaagtttcccccaccc

SEQ ID NO: 85227 - DNA, 122 bp, Homo sapiens
ggttctgtccccgctgaagggatctctgccaccatgggtggtggggcaactgagggaggccgggggatgaatcggcgaaacttacgtaggttgggggcataacagctgcccttcacgggcac

SEQ ID NO: 85228 - DNA, 122 bp, Homo sapiens
cctcttttgcctcctctaggttaccagttctgcttttcctggacctgttccaagctctcacgttccacatcacacatgggacatctagtgtcaggctcccagagagcaggaaccaggtgaaa

SEQ ID NO: 85229 - DNA, 122 bp, Homo sapiens
gaggaggagagaaagtgggggcgttatgggcttaggcctgcctcccacctccccacctcccgcctccgcggccaccctccgctctataattggctgccggcgggccttcctttcctcttatc

SEQ ID NO: 85230 - DNA, 122 bp, Homo sapiens
atcctagagatccctgtgcacacggatggggcgtccacaccgcctgtctgtagtggaccccgaggaaaccactaggctgccgtcaaaagtgcatggacgagtaaagcctggcatcaccaggg

SEQ ID NO: 85231 - DNA, 122 bp, Homo sapiens
gagcaactcctcttatggcgagcactgctgatcaccggagaacatgatctcagcaaatcacggcaactctgaacaggctgccagggcaggtactgcccggggtgatggtctgcccccccccc

SEQ ID NO: 85232 - DNA, 122 bp, Homo sapiens
tcacttccattaaacgcttccagaaaacatctttgctctctttgcgccctctggtggtgtcgactttgctgcacgtctggttaaaaaaactcccaacacattttctgtctacagtttagata

SEQ ID NO: 85233 - DNA, 122 bp, Homo sapiens
gggatggagcctgtttgtaggtgaggtcggatacagcttggttcctccttcacttgtgagcggttcattttcctcatgatcctgtaacttgggggcatttccttttgggaaggaagatggtt

SEQ ID NO: 85234 - DNA, 122 bp, Homo sapiens
gctggtgtccacagtgtgaggacgctgaccccgggcagccgctgctctgaagagcttccgcgccttccccctggtctcgtccgttttcctcctcagctctcgctggtttgttcttgggttgt

SEQ ID NO: 85235 - DNA, 122 bp, Homo sapiens
ccttctggaaaacgggttaataaataaatcaataaagaaccttcaagtttctactacttccgtgtgcctctgtgtcttgcatgatggatcttggctaggtcagctcctgatccaggtcctcc

SEQ ID NO: 85236 - DNA, 122 bp, Homo sapiens
ggagagggagcaggctgcaagctcccacagccccaagctggggccaccctctgcactgggcgcagcagtaacatgggcgtagaagacagaagctgacagaggccaaagttcctcccacccac

SEQ ID NO: 85237 - DNA, 122 bp, Homo sapiens
ggttgtgtgaacaagccttcattgtgcaagcgtgagcccaacaaacaaacaccaggtctgcgctggccgaagacgaagcgtcctccctggaggtgggaacaagtcacctctgaccacacctc

SEQ ID NO: 85238 - DNA, 122 bp, Homo sapiens
ccttatttggagctgatttagtcaccattactgcagttctgcagcagaggcgccgggtgccgctcttggctagtgctgtgcaaaatattggctcctcccgctgcagccagctcggaagaaaa

SEQ ID NO: 85239 - DNA, 122 bp, Homo sapiens
tgtaaaacacgccgcccggctgccatcgttgaaacagcatcacatgtagatgacccgtgacgaaccgaccagtgcaatcccagtgagcagcggctcagaaacagcctgccacacgtgggaag

SEQ ID NO: 85240 - DNA, 122 bp, Homo sapiens
ccaacttctacgccctggcgaggcccagggagagcttcccagacccggagggactctgaccgcaccgaggagaaacaccaggacggcagggcagcgggctacggtgcacttgggacaggcac

SEQ ID NO: 85241 - DNA, 122 bp, Homo sapiens
tgtggctgggtcaccaactagccatgtgacaacgctagtccctgtgagcccctgggctgccgtcttccattctttataagaaggggaatgcgacatctcaggaccatgaaaattctaggttt

SEQ ID NO: 85242 - DNA, 122 bp, Homo sapiens
acgaatttaagagccgcaagggtgaagggtcacagggagcatttaattcacaatggctggcgggaggtgctgccgcaatggaaaacaccctagcccagtgtctggggccccgcacacgcacg

SEQ ID NO: 85243 - DNA, 122 bp, Homo sapiens
agctcctgggaaggctactcaccttgaacaccacgcttgacaggacagcatggtgcatgccgctgcatccgtgagcagtgtgtctcctgcatgcagaaagggagcagagaaggccaggggct

SEQ ID NO: 85244 - DNA, 122 bp, Homo sapiens
ggaccccaacatctcctgccacaggctatgatgggcatggtggctaagagcaacaggccgcgtggtgaggctggctttttgtggctctgccctgccattccccgaggcatccccatgccagt

SEQ ID NO: 85245 - DNA, 122 bp, Homo sapiens
tgtgtgcggggcgcggctgactcagctctcccgggctgaggacaccccagccaccgtctccgggtctccccagcctgagcaaacattggctatccagggcaacccggcagccctcgccctgg

SEQ ID NO: 85246 - DNA, 122 bp, Homo sapiens
ctagcccaccaccaggtttcctctgtatccccgcagcacttggcaaggtccaggggcttccgtggggagcgagattgttttggatcccgccaggggagcccactgagaggagcctgcatctc

SEQ ID NO: 85247 - DNA, 122 bp, Homo sapiens
cgtcttgtgtgccccatgcacctgtgcatctgtgctgtgtgggtgttggtggcccttttgcgcatgcatggggcatcccctgcccagaccagcgggacaaggagcgggaacggcggctgcag

SEQ ID NO: 85248 - DNA, 122 bp, Homo sapiens
ttagataagacacctagagcaccaggcccccagccagcctcctccagactgtggggagcccgtaagccaggaggcctggctcagaatgtgctggagacattctgggccaagcgaggatccca

SEQ ID NO: 85249 - DNA, 122 bp, Homo sapiens
aggctgtcatggagcagttgcatgtcttagcagtgaaagggaccaggaggtgggaggtgacgctggcaaggcttgtgcagtgcctctaccggcctctctctggacctcccctgcttatctca

SEQ ID NO: 85250 - DNA, 122 bp, Homo sapiens
agtgatccgcccgcctcagcctcccaaagtgctgggattacaggcgtgagccaccgtgcccggccagcaattatttctttattgaagacttatgtgcaaggcacaaagggagctccaggact

SEQ ID NO: 85251 - DNA, 122 bp, Homo sapiens
caggcagcagcttccaagaagatggccttgcaattccaggtcacgactgcgtgctgccttcggaggaacgactcaccacaaatccagattctgctgtgcgtggccgtcaaatgtgaggccat

SEQ ID NO: 85252 - DNA, 122 bp, Homo sapiens
cggccgctccgctgggtgcccaggtgccaaggctgaggctggtccacctgccggggtgcacgggcccccagccagggcagcccgggacagtggagcagccaggctgggtggtgggagggtgg

SEQ ID NO: 85253 - DNA, 122 bp, Homo sapiens
caggcggtcgcagacgctccggatccctagagaaagggggtcgagcaggcagtgtctgtgcgggatgcttgagaacgtcttccctgagtcggttccggccgcaaaggctttaacctcttcct

SEQ ID NO: 85254 - DNA, 122 bp, Homo sapiens
ctctctttactctgccttgtcttcttgtcctggggcaagaagttagggttcaagacccttcgggatgtgaggatgtttctgccactctggacattagttttctcccctaagtggctctatct

SEQ ID NO: 85255 - DNA, 122 bp, Homo sapiens
gcaggccttactggtgttttggttttggtcttaaatttctccttttagtcgaaattcttccgatctctttgagatcttctgagtccagagtgagcagtgtaaccaggcggcagactccagct

SEQ ID NO: 85256 - DNA, 122 bp, Homo sapiens
tgggtggaactcgggaagcccccagagcaggggcttactcgcttcaagtttggggaaccccgggcagcgggtgcaggccacgagacccgaaggttctcaggtgcccccctgcaggctggccg

SEQ ID NO: 85257 - DNA, 122 bp, Homo sapiens
taaaacagcgcttgctcaggtccaggactccaaaagaaactgcgccgtgagctgcacttccgacttcggcgcgggccggggcgccgagcagagcgacgccgacttttggagcagtttgcgcc

SEQ ID NO: 85258 - DNA, 122 bp, Homo sapiens
ggggcttgtccaggccccagacaaccaaatacgtttgtgctgcttgtaaagggctgggtgcgacggggcaccaggccatagaattcccaggttctttcctccctctgttttgggagcggtcg

SEQ ID NO: 85259 - DNA, 122 bp, Homo sapiens
ctgtggcctcagaggccgcttgcaagagttcagataaaccgaggcccctttcagcgcgtccgtctgctctgatcggctccactgaataagacgatttgaggatgtgcaggcccggccgcgca

SEQ ID NO: 85260 - DNA, 122 bp, Homo sapiens
cctcaaacagctcccgcaccgtcatgctggccacgatggtgatggcatagggcaggcagccgtgttgtcggctcagtgccagcatcttagcgtagcggggtgccacggggaatgtggccatt

SEQ ID NO: 85261 - DNA, 122 bp, Homo sapiens
tgggggcttcatcagaatcacacccaactagctccttctctatgccttgtcttcctccagcgtcttgtagagctaaaatgtgatgactcttttagtttgtatggaggagggtaaaaatgtgt

SEQ ID NO: 85262 - DNA, 122 bp, Homo sapiens
gtggcagcacacgcaggcgcagtgggctctgatcgctggaggtgggggttcggaaagtcccgtgggttttagtgcgcaggcgcagaccgggcgaggcctcccggtggatggcttttgcggct

SEQ ID NO: 85263 - DNA, 122 bp, Homo sapiens
ttggccattcctggacctggtttgtgagttcttgtctgcattggtggatcctggaaatctcgaaacagtggaagtgggtgtgtgaatccactgccaagtgcctctgtcctgaagaggatgct

SEQ ID NO: 85264 - DNA, 122 bp, Homo sapiens
gctccttgagggcaggggttgtatcttttgtttctatatcctcaaccctaagataaattgcgtataaagcaagaatttgcatgtaaaatatttctttagtttcatgttttactgaaagttca

SEQ ID NO: 85265 - DNA, 122 bp, Homo sapiens
catcaggattctgccaggtttccatcagtgaaagcaaatgcttctggttgcgaaatccaccgaggatgccaatttagaggtgctattcaaatgtacagcagtttatccaaccacagataaga

SEQ ID NO: 85266 - DNA, 122 bp, Homo sapiens
gtagatgttcctgtcctgaaagtccagtctgagagaatggcatcaccagctaccactctccgctagagtcattctggatttctccctttgcttagcctcctgtgcattgagttcttggattc

SEQ ID NO: 85267 - DNA, 122 bp, Homo sapiens
caaggatggcttagttgcttatcagccccattaaacacagagataatagtttgagccaggcgtggtaggttgctcctgtaaccccagctactcatgaggctgagacaggaggattgcttgaa

SEQ ID NO: 85268 - DNA, 122 bp, Homo sapiens
cccaagccccgcccccggccgctcgcccgcacacaccccctaggctccgcgctccgcggccgcctgctggcccacgttggatgctttgcaacagcgccccgccacgcctccccgcctgctgc

SEQ ID NO: 85269 - DNA, 122 bp, Homo sapiens
tgtaactgtctatatgacacagtgcacacgtgatgtctgtagctgcttgtctatatgacacggcgcacacatgatgtaactgcttgtctatatgacacggtgcacacgtgatgtctgtagct

SEQ ID NO: 85270 - DNA, 122 bp, Homo sapiens
ggcacacctcactcaggtggcaagagagaaaatccaggaaagtcacttgcatagagtgcacggatttcaagaagtctttgacggtgcaaactggacttctaatcatgggatctctccaaaca

SEQ ID NO: 85271 - DNA, 122 bp, Homo sapiens
tgtcatttatgacaaagttcatatgctaaagatttctcaaacaccactgatgccagagaacgtgtgtgacaagctcctttaattgagattcctggagttctgcattggaactagtttttaca

SEQ ID NO: 85272 - DNA, 122 bp, Homo sapiens
cttagaatctttatctcttgagacaagcttggaaattacaacatatatgtaccatgaacgcgaagtacctgagctcaaagcagttgagcaatcttaagtgggggtgcccgaaagtggtgcgt

SEQ ID NO: 85273 - DNA, 122 bp, Homo sapiens
gacctcgggtcatgtgaggacgcgctagggttagtccccgacactatgggcccagcagcccggtgtcagcttctggaattggcttggctcctggcgagagcacctcggcctcgttctcaggg

SEQ ID NO: 85274 - DNA, 122 bp, Homo sapiens
ccgggggagggcagccagagaagctattagctctgcccccctaatactctgagtcccactcgcctcttaacacctccctgagcctgggcctctaagccccatctcactctcgtctccctcta

SEQ ID NO: 85275 - DNA, 122 bp, Homo sapiens
acccaagtcctaccccctgaaccacttctctcctccccctctccctctcctaggctggaccgggatctccatggctcaggagggacatagcacaggactggataaaaggccttagaaccagt

SEQ ID NO: 85276 - DNA, 122 bp, Homo sapiens
taatttgctaagagaggagataaatccactctagcattcccatagcaacacctcccaggccgctgccgccccgtataggaggaagctggggaatttcggtctcgggatttttacggggaacc

SEQ ID NO: 85277 - DNA, 122 bp, Homo sapiens
gcagcgaagggcctgggcgtccgtcagggaggaagagggcaggtgccacttcatgcaacgcgcctttctgccctgtaggagctcgatgccctccagcaaatctgggagatcgcacgagactg

SEQ ID NO: 85278 - DNA, 122 bp, Homo sapiens
actgcctggggctggtggtgctggccggtcagccgatctgagtgtggggcccgcggagcccgtgcccacccggaactcgcgctggcccacgagctccaccaccctgcagccccggttcccgt

SEQ ID NO: 85279 - DNA, 122 bp, Homo sapiens
cacgcccagccgtcattctgcagatgtttgcagagggcctgctctgggccaggaagggaccgggagctagggagagcacagaaattaatcaaatgcaagtgcaccctcgaggagctcactac

SEQ ID NO: 85280 - DNA, 122 bp, Homo sapiens
aggtaaaatgctctattcactctgaaaataatttagcaattactcaatctcacatgtctgcggcgtgacccctcctgcttctttaaatatcagctggggaagaggtctgagtaatacctaag

SEQ ID NO: 85281 - DNA, 122 bp, Homo sapiens
ttggtcggtgctagggttcaagtcaggcctttgttaggggctctgttgaaccaagaataccgtctgcaagtttcctgtgtcacccactatgtttagggtgagagctggtcatcttcctgtgt

SEQ ID NO: 85282 - DNA, 122 bp, Homo sapiens
gcttaagtccgagcgctgcgtcccgtcctacctcccggtgaaagcgcgctccgctcgtagcgggtgcgcccctaccgccctggggcagtgggtcccatctactaattgcaaggacggcgacc

SEQ ID NO: 85283 - DNA, 122 bp, Homo sapiens
agctcaccaggggagactggctctgacatagcgctgtgtccctcttcctgaaacgaaagccgtctgtctgacgaggacattgaggacccgtaatttactacctctgctacaattctaaatgc

SEQ ID NO: 85284 - DNA, 122 bp, Homo sapiens
gcagcgagccccgggtcagccgagccctccgcctcaccgggctgggagccctttctccaccgcgggcatccgagccctggacgcatccgccgccccaggccttaaagcctgaagaaagccac

SEQ ID NO: 85285 - DNA, 122 bp, Homo sapiens
agctgcaaacctctgtgttttggggagttctgttagcaacattcttggacttgctctctacgagaaaagctagaagtcgattattaaaatggagtccacaggaagcctgcagggctttaaga

SEQ ID NO: 85286 - DNA, 122 bp, Homo sapiens
ctgactcagctccgcaagctgactcggtttcagaggaacaaggtagtctctccttgctgacgttagcggcaggcagtcctccccttcaggaaaaatctgtacagcagttctgattccttctg

SEQ ID NO: 85287 - DNA, 122 bp, Homo sapiens
atcatgaaaaccaagaattgtgttatgtcactttgtgctgcttgttacctgaatttcacacgaggctaggatcaagggttgaatctttcatgatttgctccataacctctgtgcttcttatc

SEQ ID NO: 85288 - DNA, 122 bp, Homo sapiens
gccctaggacttcttggttgggggaataggacccgtcagtcagccctgcacagcttcctgcggggcacggatggggcgcaaggaaggggctggagatgccttctagggagtgaggctggtga

SEQ ID NO: 85289 - DNA, 122 bp, Homo sapiens
taatgagggttctgagggttgagccctggtatgaaggtgctggccacagccatggggagccgggcatttccttttgtttgcctttgagccaaggctctggtctgtgtgtaccgtgtccaggg

SEQ ID NO: 85290 - DNA, 122 bp, Homo sapiens
agccccttaagggtattttgtccactgcatgtggccctagcctggcacaataagggcatccgatacatacttggtgtgggagtggtttggcctgcctaggctagcacagggctctttggaac

SEQ ID NO: 85291 - DNA, 122 bp, Homo sapiens
ggagaggtctccggctggctccccaggggactgcgttgtggcgtctcgaggagggcgacacgcgtaattcatgaggtaggtgagcgtccctgcaggagtgacagaacgcacagggatagtta

SEQ ID NO: 85292 - DNA, 122 bp, Homo sapiens
gcccccttctggcggccgggcgcaggcgcaggctccagagcgtatataagggcagcgtggcgcacaaccccagcgcgagtgccagagcccagccggcgcggagcgggagcggtgcaggctga

SEQ ID NO: 85293 - DNA, 122 bp, Homo sapiens
gattctctaagcgatggctgtatacatggagagttttaagggaataaaattccatatctacgatctccttatgtattattttaaaaacaaatttgcctgaggccgggtgcggtgactcactc

SEQ ID NO: 85294 - DNA, 122 bp, Homo sapiens
ggggcgccccgggccgggccgggcggggatcctgtgtggggcggttggatccacatttggcgtgggagcgtcatgtgtctgtgggcggggtctgcttgcctggcggcacttgggatccaggg

SEQ ID NO: 85295 - DNA, 122 bp, Homo sapiens
ggggatacgcggccggcagggcggaggcacttttaaaggcgattatggtgccgtctgactcgacgcttagtttcccctgaggagctgctctggcagccacaggccactgctgaatatcccgt

SEQ ID NO: 85296 - DNA, 122 bp, Homo sapiens
tgcatcataatctcttccccggtctatttatttctcgtggttttgtcagtccattacaaacggttgcaaaattgtggtactagaagggatcctagaaataatctaatttgaacctttgattg

SEQ ID NO: 85297 - DNA, 122 bp, Homo sapiens
gggagcgccttgtgctagacacccagagacccgcggcagccctgggtcaggtgcggacgccgtccgcacccctgaggaccttccattgcaaccccatcctgcgtgcctgcggaagctgccct

SEQ ID NO: 85298 - DNA, 122 bp, Homo sapiens
gttgacagtatttatgtaaaacatgtaatactgtatctgtatgtatgctcctcttccccacgctcattcacatttaccgtgattaatacacatgttaataaaaccctagacttagaactagg

SEQ ID NO: 85299 - DNA, 122 bp, Homo sapiens
atcttcaccagggccgctagccgcagcgccccgtccgagcgactgggcgcaaggctctcccggcaccccaggactatctgcctgggactctgctaagatgggagtgggccaggcagcccctt

SEQ ID NO: 85300 - DNA, 122 bp, Homo sapiens
gcttggggcaggaagcagtggggggcgctcgaagagcagggcagctacggccaccgtggccgccggaccggccatgtgctaaagtttctggggctcggcgccccgctgggcgcgcagcgcgg

SEQ ID NO: 85301 - DNA, 122 bp, Homo sapiens
tcctctccaccacccccacccccctccctccggtgtgtgtgccgctgccgctgttgccgccgccgctgctgctgctcgccccgtcgttacaccaacccgaggctctttgtttcccctcttgg

SEQ ID NO: 85302 - DNA, 122 bp, Homo sapiens
gggtcagccctggacgccagaggacacgggcctggctcccaaggagcaggggcccagggacggaccccggcagggcgccaagggagaggctgggtggggctgcgggggcctacccggttcgc

SEQ ID NO: 85303 - DNA, 122 bp, Homo sapiens
ctcgccaagaccatcgtggcagacgccatgcagggcccggctgcctactcagatctcttccgcagcctgaagcaggtccacctggtgtccttccagtgcagcccgcactccaccccacaggg

SEQ ID NO: 85304 - DNA, 122 bp, Homo sapiens
tgccaggctgagggacagacgccggggctcgaagctccgggcagattcagaaagaggcgtcgctgcagaaaggacgcatcacagttttcagatcttaatgtggccgaggttttacaactccc

SEQ ID NO: 85305 - DNA, 122 bp, Homo sapiens
ggccacctgcaggttgaaggcggtgctggccatcgtgaaacagtggaggaaggactgggccgacacacctgcagaaggtcccagtgagtgtgggctcgacaggactagcgtgccccgcctca

SEQ ID NO: 85306 - DNA, 122 bp, Homo sapiens
ttttcagtcaaagcctcttcctgtctcagggaacatgcctgttgcttctttaaaaaggaacgtactccccatgtgtcctcatgtctctgacgggaacgtgctccccacatgtcctcaggact

SEQ ID NO: 85307 - DNA, 122 bp, Homo sapiens
gaaagtcctacgatgtgctggaggtaacgcagatggtgagtcacagtgacaggatttgaacgtgggttcatgggcgcccctgcgggcccacccacgcagcatctaggtggctggctaacgcc

SEQ ID NO: 85308 - DNA, 122 bp, Homo sapiens
tcagacgccggagactggtccgactctgcaacctggcgggcctgctggggtccccagacccggaacatacacattagaaaatggaaagccgtgactcgctctcagaggctgcaaggggcacg

SEQ ID NO: 85309 - DNA, 122 bp, Homo sapiens
gccagttgtttgcacagacatctttgctgccatccaggaaaatctgagcacataccttcccggtgcttccctgccctgagccaatgctgtccttatttgacaaggaagggcaggacagcctg

SEQ ID NO: 85310 - DNA, 122 bp, Homo sapiens
agggttagtgttattacatgaagagacaccagaacgctagctttttctaccacatgagaacgcagggagagggtggccatctgcaagccaggaagaaggtcccctccagaactgtgagaaaa

SEQ ID NO: 85311 - DNA, 122 bp, Homo sapiens
cccattcttccagcacggtgacccggctcagacagagcctcagaagccttctcaacaccacgttccaggcccccgccccccagcaccatagcgccacccaccgggaatgtagttgaactgca

SEQ ID NO: 85312 - DNA, 122 bp, Homo sapiens
cacctttcctcagtacaaccgcgaaggctacgggaatgcgcctgcagagtgtgggaactccgggcgcgggtgcccaccccgccgactcccagggcgaccccagaacgttcgtttcaggcggg

SEQ ID NO: 85313 - DNA, 122 bp, Homo sapiens
gaagaagtctttatacttgcagggtctttgtacctttggaaatgagccctgtttatttcacgatactaatgcattactagcatatctggtgctttatcagttttcagttgcttttgcatacg

SEQ ID NO: 85314 - DNA, 122 bp, Homo sapiens
ggcattgtgactgcattgaacacttgcaactgtgaggtgaataaagtctgtactggctcccggttgcaacatatagtaacgcagtgtgctactttatattgaggagatgtcttggactcacc

SEQ ID NO: 85315 - DNA, 122 bp, Homo sapiens
taatgcacggcgttcagcactgacgatgtgtttagcagctgtggctgtgtctcagttcaccgctcattctctgagcccttcctgcaagacctgccctggcctcagaacacggagggaagcag

SEQ ID NO: 85316 - DNA, 122 bp, Homo sapiens
aaaaagttcttagcaaatattgacaagccattagtgcagtttcctgagaaaacctctgagcgtcgctgttggtcaaaagaacgaagagaagcgtttgggagcctcttagaggggaacttcct

SEQ ID NO: 85317 - DNA, 122 bp, Homo sapiens
tggaactgagcagacatgactcaacagaaactctcatcacgatactggccctgatgatgacgtgtcccagaaacaggagctactcttcactctgcaccgtagaatgaaaaagaacaaagatg

SEQ ID NO: 85318 - DNA, 122 bp, Homo sapiens
gataaactgccctgtgaagtagacttgccctccaaccccaatctgcctgccctcagatgacggtaaacagaccagcttttttttttttttttctgtcttccaatcacctgccctcatgttta

SEQ ID NO: 85319 - DNA, 122 bp, Homo sapiens
agccagattaatagcaaatctagacttcccaagggaatatgctagagaaaatgaccacagcgttccactgctagggaaaggctcccctatgaacaagaccagggcactcacccacccccggc

SEQ ID NO: 85320 - DNA, 122 bp, Homo sapiens
ctactctttccgcggctcccggccgggaccctccacccggcggctggcggctcgtgaccccgccccctcggcccgctctgggcccgcctcccgccggctggctccacccacaatagcgtccc

SEQ ID NO: 85321 - DNA, 122 bp, Homo sapiens
aaataggcagctcaccctgccacctgtgcacacatttttcttcaatgtatagttcctcggcgcgcctctgaccttttcccggagctcttcaatcccagaagctatagcacaacggctgaatc

SEQ ID NO: 85322 - DNA, 122 bp, Homo sapiens
tttaccagggtctgtggatgaactgcgcaggtaacgcgttgggttctttccattgccgaccgcattttactatcttcaaagtagcaggtaaatataatggctttgtttggggtggaggtaaa

SEQ ID NO: 85323 - DNA, 122 bp, Homo sapiens
tgggtgcctgggcccagcggaggtggaggctgcaggcagtttgagggctggaggctgtaacggccagtgaatgggacatttggatgtctgtgcctgtgctggaaggagagtgagtgggacac

SEQ ID NO: 85324 - DNA, 122 bp, Homo sapiens
catctctgcggccacgcccgccccttcccgccacccaatcctagcgcttgtctctgcggccgggccccgcccccacccgccccccgcccaatcctcgcgcggactcatgtttgcccgctcgg

SEQ ID NO: 85325 - DNA, 122 bp, Homo sapiens
gtaaacagagattacttggcagaatatgcccgtaagagagcccctgcagaacaggagcaacggttctatcgataagtaagtgtggaattttgtgttcagtgttagagtaaacatatgttaaa

SEQ ID NO: 85326 - DNA, 122 bp, Homo sapiens
tgacatgggcgggtccccaggcagctctgccggtccccaaggcaggggctcctccaacaccgagcccctccctggagacacctgcatgggccttcaggattcgacccctgggcaccgctact

SEQ ID NO: 85327 - DNA, 122 bp, Homo sapiens
tcgaccgctgggggtcaggataagcttgcagagtggccccgccgccgtcctgaactttctcgggaggggaaggcggctgtgtacagaacagcacgccctgggaagcaaaggcctgtcggaga

SEQ ID NO: 85328 - DNA, 122 bp, Homo sapiens
gtccaggagcttcaacgagcgttccagcttcttcgtaacgttcccacaccgtgcagcaagcggagggaagagaacttccggcgcccccacctaccgctccccagccgtgtcccgctgctcta

SEQ ID NO: 85329 - DNA, 122 bp, Homo sapiens
agctaggcgcgctcgccagttccgggcgccatgttcccgctgtgctgctcgccgccgaggcgaccctcactgccccccagccacgcgcgcccccgcgggcccacacacgaaccccgcacgcg

SEQ ID NO: 85330 - DNA, 122 bp, Homo sapiens
ggggcgggggctgcagctgcgagaccgaggctgtggtcgccatggaaacgcggctagaggcggggcctcgactctggtcccgcaccctctacccccacccaccgccccggctagggagccgc

SEQ ID NO: 85331 - DNA, 122 bp, Homo sapiens
ccgtctccccatccaggctgtggatttccatgcacgcttcacaagcagctgtgaggaccacgtgggagcctctgagccagcatggcccaggtctcagcacacagcaagcgactaatccatgt

SEQ ID NO: 85332 - DNA, 122 bp, Homo sapiens
aacggacttgggtccactttggcctgagaaaattacaatttctttcgctgaagtaaggagcggcctctgcccgctttctcggatccctgcgtgtgtagtgagaggtcttggaaggatccttg

SEQ ID NO: 85333 - DNA, 122 bp, Homo sapiens
ccttggtttatgggcatttcttggagggctgggggaccacagtcaagttgaggtgatccccgctccggggacggagtaaggcaaggaggcgggatcggaatgttggaggcagaaccgcaagc

SEQ ID NO: 85334 - DNA, 122 bp, Homo sapiens
atgtctgcaatgattttcttctcctgggtctctagtttctgtcgctcgcggtccagctcccgcatggcacggttcagggccctctggttctgccgcagtagctcctctggcgtcttccggcg

SEQ ID NO: 85335 - DNA, 122 bp, Homo sapiens
cgcacagccaggccaggcgccccgtcgcgccccacatacgcggggtgcactcggcggggccgggcgggaacatggcgcctgccctccactcgggaccgccacagaaaaatcgggggtgcgtg

SEQ ID NO: 85336 - DNA, 122 bp, Homo sapiens
ggtccatcgcgcctgcgcacaacgatccggggcccggggaggtgggtcagacccagggttcggaggaggagttccagcgcgccggcatgacgtcactccccgggggcgggctcagtaagtgg

SEQ ID NO: 85337 - DNA, 122 bp, Homo sapiens
aagaactgtttctgtctgtttgccttgaatatgggacagacaagatcagagcagcgatgacgagagaatcgcgcacaacacttagagtctggggccgaggaatggctctgtttactcttaac

SEQ ID NO: 85338 - DNA, 122 bp, Homo sapiens
tcaccttggaatgagcagtgaggggaagctgaagagggagagcttcaaggtgaaacctaacggatgaagtggagtcagccacgaaaagctccaggagacacactttccatgcaaagacacca

SEQ ID NO: 85339 - DNA, 122 bp, Homo sapiens
cctgcaggaagcgctgcgtattgtccttgtcacgcaagatgagtgcgcggttctcagcctcgatgcgtgccttgagcttgctcagctcctccatctgcacgcgcaccgagaagagctcctcc

SEQ ID NO: 85340 - DNA, 122 bp, Homo sapiens
attattttataaaacaaaaacccgagagtacataaaaatgtatccacagctcatcatatacgctatgtgaaagagagaggctcttggctaaatttcaaatgcctatgagcacaagaaaatgg

SEQ ID NO: 85341 - DNA, 122 bp, Homo sapiens
tcggccggtcccggtgatccctcccacccccggtccctccactcccacctcgggccgtcccggtcccgtcccaccccggagtgccctcaggacacccctcggacggcccctcactcgccctc

SEQ ID NO: 85342 - DNA, 122 bp, Homo sapiens
gggccaagctgaggttcctctcctggggctgggcagggtttgggctaactcttctcccgccggcattcgggtttgggggccgaggctgcccaagagttaacctccaaaagggccctgcaggg

SEQ ID NO: 85343 - DNA, 122 bp, Homo sapiens
cagcggagcggaggacggcggggcggaggcgcagagcagcaaggaccagatgcggaccaacgtcatcaacgagatcctcagcactgagcgggactacatcaagcacctgcgcgacatctgcg

SEQ ID NO: 85344 - DNA, 122 bp, Homo sapiens
gggaggcgagtggcgagtggcgagtggcgagtgtcaggggggcggccggcgggggcggggcggccggaggaggcgttggcagcgggctcggacccacgcggcgccgcggcccgcctggcctg

SEQ ID NO: 85345 - DNA, 122 bp, Homo sapiens
caaacccccaggctcaaacgatcttcccacatcggcctcccaaagtgctgggattacaggcgtgaaccaccaagactggccagttattaacattttaatgtgctactttccagtaagatatt

SEQ ID NO: 85346 - DNA, 122 bp, Homo sapiens
gtggctgcggggccagctcctctccagcccccacggggatcccaggctggcccagcctggcgaagcccctcctggcgctctgccctctgcgcgagtggcggatgcacttgtgctcctgcctg

SEQ ID NO: 85347 - DNA, 122 bp, Homo sapiens
cagatgcagcaaaaccatgcagaggccgagggttggaggtaagggacacagggccggatccggcttcccgagacagagggaaggaagtaaattcggattcctactgacatttttttaaaggg

SEQ ID NO: 85348 - DNA, 122 bp, Homo sapiens
tgtgagagacaagactgacacgtcaggtactctattagttcataagagacataaaaagatcggcatgtaaaggagattgataaagagaaaccaaagaactaggacaactaccaagagactct

SEQ ID NO: 85349 - DNA, 122 bp, Homo sapiens
agattgaggccctagggaagacaatgatggagccaccaaaacacaggggagtctgtgtgccgtgtcctggggacagtctggaaattcagcaagggtttggggattttctttcacagatcaga

SEQ ID NO: 85350 - DNA, 122 bp, Homo sapiens
tcctctattctgaattgcttccccttcccctgggacacatcatgctttcttacaacttgacgcttctgaacatcctatttcttccacttggaatgtcctaacctgtctcgcctaacttgcaa

SEQ ID NO: 85351 - DNA, 122 bp, Homo sapiens
gccgcccctggggacaccccaaacccccccaagccgcgctcaccggtcccccctgcggaacggagaccctggactccactgtcgctgctccacccccgttgcttcccggccgagggccccgc

SEQ ID NO: 85352 - DNA, 122 bp, Homo sapiens
ccgcacataccccggcagatgagggtgcgcaggggtgagggcgcagggctgggcgtcccccgcccccaccgtgcagccctcgcccccgccccgcccctccgtagttgcccgcccgccgcccc

SEQ ID NO: 85353 - DNA, 122 bp, Homo sapiens
ggaaagtcagtcaccacgacctgaagcagagtatccccgtctgccactgacaggccggcccgtgtgtggtgcccgctagctgccatctgtcttgtggtttcagattaccagcagcccctcat

SEQ ID NO: 85354 - DNA, 122 bp, Homo sapiens
aggacgggtgcgtcctcagaactcgctgaagaggtgtgaaagttttgtttgggttttgcgcgcgagatgaaactctataagcatttactcctacctgacacgcactgcgtggggaggaagaa

SEQ ID NO: 85355 - DNA, 122 bp, Homo sapiens
tcttgtttcagggacacgttcactgatataactgaggcttcagactcctagggtgtggcacgaacgagcgcgctttcatccagccacagggtccgacccacggtgagcgtgggcagcatacc

SEQ ID NO: 85356 - DNA, 122 bp, Homo sapiens
gccgctggacctggccctgcagcagggacacctggagtgcgcgcgagtcctgcaggatctcgacacgcggaccaggacccggacccggatcggggcagagactcaggagcccgagcctgcac

SEQ ID NO: 85357 - DNA, 122 bp, Homo sapiens
ttctggataacacggcagccatacatctgtagtgccaatgacaggacgtggcctcgaatccgttctgccaaagccagcttctgttcaagactgccaaactagacataatgtgtgggtaaaca

SEQ ID NO: 85358 - DNA, 122 bp, Homo sapiens
ggcgccctgtgatccactttcttcgtattcttttctttggtcttgggtgcagatcctaggcgagtccataaattacctgtttggatgagatggcatttcactttcgcagtcagcgctaagaa

SEQ ID NO: 85359 - DNA, 122 bp, Homo sapiens
cctcttttccccatttttatttgtctcaggtctcccttggcccacataagggacaggcatcgggtaccaaggtaccttttcccctacttccttccctcactttcaagaatttatcaatatca

SEQ ID NO: 85360 - DNA, 122 bp, Homo sapiens
cagccccaaatcggccatcccctcctcccccacgtccccgcgctgctcgtcccccaacgccgggcgccaaccttgctccatcccagagagggtttggggctccccgggtcagagcgctccgc

SEQ ID NO: 85361 - DNA, 122 bp, Homo sapiens
ggagagaaacgatatgaatgtaaacaatgtggtaaagccttcagttggcacagttctgttcgaatccatgaaagaactcacactggggagaagccatatgaatgtaaggagtgtgggaaatc

SEQ ID NO: 85362 - DNA, 122 bp, Homo sapiens
tgtgcgcaccccagaccgggaggagcctcgagcctgctcattagtagcacgggcagctcgcgcgctggaggagggaggcggaaggacagcgctgcgccaccacccggaggagggagcgcggt

SEQ ID NO: 85363 - DNA, 122 bp, Homo sapiens
caaaggacttgagattttgcttcaacagcaagtagaagcgtggccagctctgagagactccgtgacctgagtctgcagccctgggcttttctcccctcggacacaagcagcctctgcagcct

SEQ ID NO: 85364 - DNA, 122 bp, Homo sapiens
aagaagagatttcacctgggccgtatctatgtatggggagccacggggacggacagtgggcggggatccccttttctctggggacagagggctccctggcacccctggagattctccttcct

SEQ ID NO: 85365 - DNA, 122 bp, Homo sapiens
agacgccgcggttcctgagtctgaactggaggtaacaatattcctgctctgaggagctcccggagctgctccggaaatggagaaggtggctggaactctgtcgtctgaaagcgagagctcac

SEQ ID NO: 85366 - DNA, 122 bp, Homo sapiens
agttcctccccagagctgcttcccactctaattaggactccctctcaggggtctccaccacgcacaggtggttggtcgctcgaggatggccccttcccttgatccctgaggtcggcacttac

SEQ ID NO: 85367 - DNA, 122 bp, Homo sapiens
ctgtacattagttggggacgagtggattaccagctccacatatagactagggtcatcaggcgcccgctcgggccgggcacctgggccagttccctaatcaaacaggaaaggccctgtatctc

SEQ ID NO: 85368 - DNA, 122 bp, Homo sapiens
cgcatggacacgcatatggacacatatggacacacatatggacacgtgtggatatgtgtgcgtacacgtcgctgggacacatgcctgccactcggggcccagctgccctctgtgtttgtcct

SEQ ID NO: 85369 - DNA, 122 bp, Homo sapiens
atttgaattttttttttttttcagactgggagacaagacttgaaaccaaagagccaactccgaagccgggtattactgaagatttatgccatggggtaacaatggaaagggaaggtatctgg

SEQ ID NO: 85370 - DNA, 122 bp, Homo sapiens
cggcgctggggcagggtcatggcccgggaaccgaaggggagcgctgcgtcccctcctcggcgcccacagcaggtccacatctgacctgtccgcggtggcacagccaggaagttgcgcggggg

SEQ ID NO: 85371 - DNA, 122 bp, Homo sapiens
gttcctggagcagctgggcggtgaggtgggcactcagcgcaagaagatgcggctggccaacgaggaggagatcgaccgcgccgtgtacgcctggttcctggcgctgcgccagcacggggtgc

SEQ ID NO: 85372 - DNA, 122 bp, Homo sapiens
gcggcggcgcgcggatggggggctcaccggcaggtgtagctgaggttgcggcggatgcttcgcttgaaaaagctcttgcagccctcgcaggtgaagacaccgtaatgcttgccgctcgactt

SEQ ID NO: 85373 - DNA, 122 bp, Homo sapiens
attctagcagctgttccctttatttctgccctggaattgactcaaatgtaggatgcagcccgtttcttctcccaagaaaccgtggataccagactgctctgtaagcagaatttcactaagat

SEQ ID NO: 85374 - DNA, 122 bp, Homo sapiens
catccctgacgtttccttttggaattagagctcgaaaacgagaactggtgaagggagggccgcggaatcagatcatgtctggatctgatggctccgtgctgtgctcaagcgtgctgtgcctt

SEQ ID NO: 85375 - DNA, 122 bp, Homo sapiens
tcagcgcgggcagcgaaccgggggagcgaggcacggtgagtgtgaggagccaatatccagcggcccagagccggccccagcgccccgattggcgggtctcgctgaccactcaggagaggccc

SEQ ID NO: 85376 - DNA, 122 bp, Homo sapiens
gcgcacggagggacggcggggcctggagcgagcataggggcgcacggaggggcatctgggcgtggggcgagcacaggggcgcacggagaggagcatggagggacatggggcgtacggagggg

SEQ ID NO: 85377 - DNA, 122 bp, Homo sapiens
gcgcgtgcgcactgcgccaggccgcggccggggaggcgggagcatgcgcaatagggtgtgcgggcctccccgccccgcccccagttcctgtgacgtcagacttccgcgtcccccgcggcgct

SEQ ID NO: 85378 - DNA, 122 bp, Homo sapiens
agcagccagaacacaagggccactgtctatcgagaacgtaagaaacagtgagcccagcctcgttcacacttgataaagccaactcagtgatccctctcggaggggataacaccccattttgt

SEQ ID NO: 85379 - DNA, 122 bp, Homo sapiens
tgtgggcgcctcggtgcctcggtggagcccggctgcgcccctgtccgccagcccagctgccgactccagagcttccgtgtgtccggcacccacacgctcccggcaaccgggtctttggctca

SEQ ID NO: 85380 - DNA, 122 bp, Homo sapiens
ctccgcccgggggggacagttttgtttacagcgaaggtggttggaagagtgggggaagggcgcagagagaaaggaagtggcctggaggtcatccagatcccctaagcccaacctcgtgggcc

SEQ ID NO: 85381 - DNA, 122 bp, Homo sapiens
cggtggggctcccaggtctgagaaggaggcatccagcactggcagctgctccagcacaggcgttcgcacctccagcaccgtccggccttgctgtgtcttcagggggagacaaggaagaaagt

SEQ ID NO: 85382 - DNA, 122 bp, Homo sapiens
aatctgtttttctttttctcactctgtcactcaggctggttttgaactcctggactcacgcgatcctcctgcctcagccttccaaactgttgggattacaggtgtgagccatcgtggctggc

SEQ ID NO: 85383 - DNA, 122 bp, Homo sapiens
taaccccagagagtcaacgtctattttggggggagctgggaatatttggagttctacatgcgacctggaggaatttatcctggggccggggtgacatctggggtcccctagtgagtggcagt

SEQ ID NO: 85384 - DNA, 122 bp, Homo sapiens
cccataaacaatgtgctttttaaaggggagccccctcccagctccggcctttttctccagcgtgggcagccaatcagctgcgcagagctgcatagctggaccgctttccattctgagtagca

SEQ ID NO: 85385 - DNA, 122 bp, Homo sapiens
tgctgacatttggcagcccttgcttaggagaagcagcaggcatcacctgataagatgtggcggaaacacaggtcaccaagttaagagcatcagaactgctgagtgacctcagccttgtaaac

SEQ ID NO: 85386 - DNA, 122 bp, Homo sapiens
tcatataaacatttctctccaaatctcatgtcactaccagtaattcacattattgtggggcggggtgggtggggaaggagggagggaatttagaatgagtgttggccagccttgtgttaatg

SEQ ID NO: 85387 - DNA, 122 bp, Homo sapiens
ccttacgggagatagtgcacagtgagcgctcagtgaatatgaactattactcactcccagcgcggcagtctttctactctgtgctgagacagggagatggaccgtgaagtgttcaggcttac

SEQ ID NO: 85388 - DNA, 122 bp, Homo sapiens
ccgcagggagccgggagagggggcgccgggcgcgtccacagtggccaccagcccaggggccggtcacatggaggagcaagctgtgggctcaggggacgctctttttgatttctgggaccgag

SEQ ID NO: 85389 - DNA, 122 bp, Homo sapiens
cagaccctgagcaccgtgtaagtaggaacaaagtattatttcaaagacccaagtctgaaacggtttatctgtttatacttaatggctaaggtatacatgtacacgtattctatttgactaac

SEQ ID NO: 85390 - DNA, 122 bp, Homo sapiens
aactcggccaatcggtgtcaaaacagtcctgccaacccgacaggaggaggcggtgggcagcgtgctccacagcaacacctaaaaagggctgggtttggaaaaaagctgaactcagatttgaa

SEQ ID NO: 85391 - DNA, 122 bp, Homo sapiens
gccaacatggcaaaaccccatctctactaaaaaattataaaaattagctgcgcatggtggcgcgcacatgtaatacaagctactcgggaggctgaggcaggagaatctcctgaacccagaga

SEQ ID NO: 85392 - DNA, 122 bp, Homo sapiens
tttgcgatgctgagtttactgttttaaatggacttcaagcatagccctgaagtgttgtcccgttgttcccacctcctagagggcctgacagaagaggtacatatgctatgtaagtttccctc

SEQ ID NO: 85393 - DNA, 122 bp, Homo sapiens
cctagcctacatttcccatgaggatgggagcttcctctgatttgcacaaagcccccctgtcggttagtggtggcctgcaacccaacaacctcccaagtcagcctcctgggatagggaggatg

SEQ ID NO: 85394 - DNA, 122 bp, Homo sapiens
ctgcgggtccaaccccacttcttcttgggcccgtgcgctccggctgcgccgcagggaccgcggacagcttcgccaaggcactgcctgcccgcccggctccgggtccccgctcccactcccag

SEQ ID NO: 85395 - DNA, 122 bp, Homo sapiens
gcgagccgaccccgggagctgggcggggggctcccccgccagccctgcagccgcgctccgcgcccaccaggtggcgcccccggccgccctgcccgcgtcccccgctttgttcggcggcggag

SEQ ID NO: 85396 - DNA, 122 bp, Homo sapiens
cttcacccaggttatggtggcaccttgggaccgcttctgagtctgcttgtcactgaaggtcggcgtgaggcaggcagcgttccctcccagatttagaaaatgtcaagtctcccgccgcaccc

SEQ ID NO: 85397 - DNA, 122 bp, Homo sapiens
agtatgtccagttcaagaatttgctgagaatcgttttgcagccaaaaatatggataagttcgaacacctatgataagagtcattggggcatacaaccacaaatccccactcttgtgatacag

SEQ ID NO: 85398 - DNA, 122 bp, Homo sapiens
aacagtgaaggatattttgaccagaggtgtagaagcttcaaaatcaagtgctgggtttagcgattacccaatctcaaccaaggaaagaatgggaacagtccagttccaggattcattatgcc

SEQ ID NO: 85399 - DNA, 122 bp, Homo sapiens
aggctttgaagtcctgagagggtgtgcttaccaaggacatgacatttcaaacagctttgacgcataagtaggagtttatgtggtagagatgtggaaagtgacattaaaggccagggacaggc

SEQ ID NO: 85400 - DNA, 122 bp, Homo sapiens
caggaagttcattgctcacccaagatgcctccagaagaaagcagaaacttccgagaggagcgtgaatgctctgtttctgtgctgcagaaacaattcctagtttatttgtttcctaaattaag

SEQ ID NO: 85401 - DNA, 122 bp, Homo sapiens
gtggcaggagctcggcatcttcccgtggctccgtcagcagccaaaaggagaagcgtccatcggaaaaatggcatattacaaattttgctttgggaagcaaagctcggttcagaccattgtca

SEQ ID NO: 85402 - DNA, 122 bp, Homo sapiens
cagcggcagcggcacaaaatggctttgagacgagagtgaagagactcccgcaaccttggccgtttccccggatccaggggcccgacgcgctccacctgggcgccgccatcttacaaggaagg

SEQ ID NO: 85403 - DNA, 122 bp, Homo sapiens
tttgcccacataatgcgaacctgacatgcccaaatatctaactcaataaaatttgaactacgtgttaccatgtcttgccaggaaaaaaaatcatcatctttattttatttctgatttttaat

SEQ ID NO: 85404 - DNA, 122 bp, Homo sapiens
aggcagttctgaaatctaagaccagggaaggatagagggtgggctaaggacacatcacggcgtaaagtttccaaaaaggaacctcaacccaaagacattctgataaggtgtctgtgcctagg

SEQ ID NO: 85405 - DNA, 122 bp, Homo sapiens
tggcaggagggccagcctagggccagaagggcccttccctccctgaggtcagaggccccccggggtgtggtacatagacccagcaatcactgttttaggctccaggccggtggcttcctggc

SEQ ID NO: 85406 - DNA, 122 bp, Homo sapiens
tttattatatgaatactaagggaatctaaagactttgtagcttgctaaggtattgaatgccggaatccgctcatcaacagctctggcaaatcattgttactgcatgcttgaacatcaccagt

SEQ ID NO: 85407 - DNA, 122 bp, Homo sapiens
ctgggcaggagacttctccccagaggccccgggctggtctgcccgtgtcacaggaggactcgcctctggtccctcagtggcctctgcaaaccctgagccagcctgggggaggctgctcagtg

SEQ ID NO: 85408 - DNA, 122 bp, Homo sapiens
gcaccggcctcaggaagtcgatctgggccctcccggttcgttggcggtgggcgtgggagacgcagcctgcggatagctcagggtcaggggagaggtggaggaatgcgaagcttgtgggtagt

SEQ ID NO: 85409 - DNA, 122 bp, Homo sapiens
gcccagacccgggggaccaagggcggcgagcactctctctgggggtcgacagcagccccacgcccgccctcagggatgcaggcggagcgctctgccattcctcctgggtttcctaactctac

SEQ ID NO: 85410 - DNA, 122 bp, Homo sapiens
gtaccctgccttgcacccatagagccccggagagggagtaacttggtcagggtcccccagcgagcagacgtccaggactcctcgctttgggatttgggccccctatggccaacctctccccc

SEQ ID NO: 85411 - DNA, 122 bp, Homo sapiens
tagcagcggcctccattggcgcctaaaaatggtcaggattcacattcaggtggattattccgcgccaggaacattctccacctgaaggctttgccggggtgttacaagataatactgaaggg

SEQ ID NO: 85412 - DNA, 122 bp, Homo sapiens
ggtaagcccaggagccgtgggggccgagagaatctgctctgggaccctcttttgtcgaatcgccggcgaggttgtgcaattgggaagccaagaggagtgtccagctcctcgttcactattgt

SEQ ID NO: 85413 - DNA, 122 bp, Homo sapiens
ttggagttaaatgattttttttctcgccccgttcgcatccataatagacgcgaacagagtcgtgattgttccctgttgcgggacattctgcgcctgaatgagcgggggctgctgtgtcgacg

SEQ ID NO: 85414 - DNA, 122 bp, Homo sapiens
tcaggggcctagcacccgggccagcagctgcagagggtgcgccgggtcccccagcactgccggcccgcctgcaccccgcttgaattctcaccgggccccagccgccctgcacagggcaaggc

SEQ ID NO: 85415 - DNA, 122 bp, Homo sapiens
tcggcgcccccgaggccgccggctcgccgccccacgcccgcttcgtgcgctcagctgccccgggacccgcctgcctcctcgcgaacttgggacgagttggaaaatcctccctgagagagccg

SEQ ID NO: 85416 - DNA, 122 bp, Homo sapiens
cggagccgctttaaagtgcagtaaccatgtggatgtgctgctgaagcgtttcctcaagctcgctggggtgggaggagaggaggaggaggaggtggtggtggaggaggaggcagggggtggag

SEQ ID NO: 85417 - DNA, 122 bp, Homo sapiens
tcggtttcgtgtggcccaagccaacttctgaggaggggctgtttcttcaccccaagactgcgtccctctgagccgcccctcctgttctctgcaatccttccagttccttctgcctgaggaag

SEQ ID NO: 85418 - DNA, 122 bp, Homo sapiens
aagagcaggggtgggcttagagagcttccaattaagctattggcaggagtatccctgcagcgggtgaatgccgaggggcgtttgctcaaatttggggaggggaaggatttgtggatatgggt

SEQ ID NO: 85419 - DNA, 122 bp, Homo sapiens
ggtgatgtcagcgcagctgcccctttcccagggactggggttgtctggtagagagccaggcggggctctgtctccacttattgcccaaggtccctgggtaacagggagggtgggctcaggcc

SEQ ID NO: 85420 - DNA, 122 bp, Homo sapiens
gatcaccagaccgtggagcttcaaaaaggggctcagctttgcctcctgcgtgaaggcttccggccggaggggtggcggccggcctgggtggcgtcaacttgtatcaagggttggtggagaac

SEQ ID NO: 85421 - DNA, 122 bp, Homo sapiens
gggggcgccgccgggatgtttagaggaacccacccccgtggcaggccaagggccaaggatcgctatccttccctgaacccgggcgctcagctggcccgggtagggggcaggctccggccgcc

SEQ ID NO: 85422 - DNA, 122 bp, Homo sapiens
actcacaatggcctatattattcctgcttctcatccactgcttccccgtggctgctgtaacgaaatggcgtttgtaagtagctgaacaaacagtccagaactcataggacaagtgtaagttt

SEQ ID NO: 85423 - DNA, 122 bp, Homo sapiens
taaactcgagacaccaacacagcaccagggcctccttaagccagtgctgccacggggccacgaaagtaccaggcaaatgactgcaccaacctgaaaggggtgggactcaggggcaacagtcc

SEQ ID NO: 85424 - DNA, 122 bp, Homo sapiens
gggcgggcgccctccaggcggccatgctgcaagaatcagaagtgattacacgagcacacacgaacaccgtggcctgcagtggttcgcatctctgtcagggtggccacggagcccctcaggtt

SEQ ID NO: 85425 - DNA, 122 bp, Homo sapiens
ggtgcagccaagatgctgatgggaaagaaaagtctaggttttgccccctgcgtcgttcctcgtgacaggattatgctgagggagggcacattagattgactcacacatactgaaatggtcat

SEQ ID NO: 85426 - DNA, 122 bp, Homo sapiens
gtccctcaggtcccagaagctacgtcaccctttctcccagcctccgcgtaatggctactgcgtgcctaagcgttgctgtcacctgggccagggtcattcctctgtgtttcctgcagtacctt

SEQ ID NO: 85427 - DNA, 122 bp, Homo sapiens
ttttgtacttgatttcaaatcatctttagtaaccttaaaaatgaattgttttctcaatggcggcaatactgacccatcttctccatctatcaggaggcagtaggtctcaatttctttttcca

SEQ ID NO: 85428 - DNA, 122 bp, Homo sapiens
aatcaagacagaagcagtgcaacctcttggagttggcctatttccagtggtacagccaaacgcaatggcattatttacccaaattgttgggcaaccagcatgcactggaagcagatgccagc

SEQ ID NO: 85429 - DNA, 122 bp, Homo sapiens
ctccactcgcccgaggtcttgctgtggcccaaagcaggagtccagggctggcgagacctccggctgcagaaaggcaggcccaggcctcacgatggagaaagtctggatgtcctggtctggcc

SEQ ID NO: 85430 - DNA, 122 bp, Homo sapiens
ttaacgcagaatcaggagatcaaactttagctgaatttgagcgacctcttcccagtgacacggcggggggttttccaagcccttttaaggaaaggaaagggatctggcgaaccccgagaccc

SEQ ID NO: 85431 - DNA, 122 bp, Homo sapiens
ggctcaagtgatccacctgccttggcctgccaaagtgctgggaataaaggcatgagctgccgtggccagccctgttctgtttctttccccaggttcattcagggctcggtggtgcagactcc

SEQ ID NO: 85432 - DNA, 122 bp, Homo sapiens
gcccccccacccccagctgcctgctccggtgggttccggggcagtcgaaagaattacttccgctgggtcagagccgctttcggcgacgcgcgggagatccgtacctggtgaggcgaggacgc

SEQ ID NO: 85433 - DNA, 122 bp, Homo sapiens
agggccctgggcatggagggccacaagacgccccttgaaaggacggagagcagctgctcccggccaagccccgatggactccccctgctgccaggcaccgtgctggacctgtccacgggcgt

SEQ ID NO: 85434 - DNA, 122 bp, Homo sapiens
cgggcaggcgggaggcttagggtgggtcgcggtcgcggcccccgccgcaggccctggcggcggcatggtgaacatagacgtggagttccacatccggcacaactacccctggaacaagttgc

SEQ ID NO: 85435 - DNA, 122 bp, Homo sapiens
aactcctcacctcaggtgatccacctgtctcagcctcccaaagtgctaggggattacaggcgtgagccaccgctcccagccgttaactcattttttaatttggttttgcctttcctacctga

SEQ ID NO: 85436 - DNA, 122 bp, Homo sapiens
ctgtctcttaaaaacaaaacaaaacaaaacaaacaaaaaaacccaaagttgaaaaccacacgccttgatgtcagcaaggccaccacactagaagtgtaaattggtttaaaaaacaataataa

SEQ ID NO: 85437 - DNA, 122 bp, Homo sapiens
acctcttgatccacccgcctcagcctcccaaagtgctgggattacaggtgtaagctaccacgcccggccttgtgtgcatttcaatggctgctgttgactcacacttatgtgtcattaataaa

SEQ ID NO: 85438 - DNA, 122 bp, Homo sapiens
tcccagtcatctagctggcggctctgcccaagggcatctctgggagaggattgtgggccccgggcatggccgtccggagtgtcaggcttggcggtcacactgatgcggggcggactctgcgg

SEQ ID NO: 85439 - DNA, 122 bp, Homo sapiens
attatacagtcataggagaaagatatgggacatttctataatctatattctaatttgattcgattattgagtcgtaagtattaattattgccaccatccaactcattgagtcttatggttca

SEQ ID NO: 85440 - DNA, 122 bp, Homo sapiens
ctgggacgtcatttccctgggatgcctcccttgagcagaccaagccggtacctagtgtggcggtacctccgtgcaccctccggctgttgtcatccctccaatccctaggataggcgcaccac

SEQ ID NO: 85441 - DNA, 122 bp, Homo sapiens
agggtgtgctctggagcctggcctgggttctgtcccggctgagcaggtgacgataattcacgaatcggcagagctctgtgtgggcagtgctgtcacctgagccagtggttgggctgggagtc

SEQ ID NO: 85442 - DNA, 122 bp, Homo sapiens
atgctgcatggttcccacctacaccacatctgcgccggggcctccctcagggaggagactcgagctggaaccaggctgtgaccctgcaccctgctgcgtgcccccgccctgagacgggaccc

SEQ ID NO: 85443 - DNA, 122 bp, Homo sapiens
ctctcccagccagctgcctttctttctgtaaggaaaattttactggaatgcaaccatgcccgttggtttacatagtagccatgctttttacttggatagaaccatttgtatgaaaagcttaa

SEQ ID NO: 85444 - DNA, 122 bp, Homo sapiens
tcaaatatgtaacagtattaaaaatataatctgaatttaatattgtgatggtcaatttaacgtgtccacttggccaggccattgttcccagatatttggtcaaacactagttgtaaaggcat

SEQ ID NO: 85445 - DNA, 122 bp, Homo sapiens
ccctgcccacagctggaggacatgaaccagaagctatttgatctgcggggcaagttcaagcggcccccactgcggagggtgcgcatgtcggccgatgccatgctcaaggccctgctgggctc

SEQ ID NO: 85446 - DNA, 122 bp, Homo sapiens
gtgtcaggtctgggctcacgatgaatccaagaatcatatggggcctgaaggccgagacagcgtgagcatgcgagtgaccccctaagcctgatttgcctgggacttttccagttttagcactg

SEQ ID NO: 85447 - DNA, 122 bp, Homo sapiens
ggtttcgccacgttgcccaggacggttttgaactcctggggccaagcgatctgccttcctcggcctcccaaagtgctgggattgcaggtgcgagccactgctcctggcccataagtctttca

SEQ ID NO: 85448 - DNA, 122 bp, Homo sapiens
aaagtaaccagattatctgccctctgattatcattggtacactcttctttctaagaacaacgaggggaaaaaaaaaccaacaactaagtttttagctgcacttctgggaagcatacatgaag

SEQ ID NO: 85449 - DNA, 122 bp, Homo sapiens
taaactccctttttatagaaataatgtgcatggagaaaagtgcacatgtcatatgtgtatcgatagcttgacgaatgttctcaaactgaacctgagtgtggagccagcacctggatcaatag

SEQ ID NO: 85450 - DNA, 122 bp, Homo sapiens
acagctgcacctcgcgcaggctgccctgcagcaggcgctgaatgagcgtgatgggctgtacgggaggctgctccagatcgagaggtttccccaggccgctccactggcccatgaaataatgt

SEQ ID NO: 85451 - DNA, 122 bp, Homo sapiens
gccggctgtgtgcggagctttccagttctttccctgccagccccctccggtctcccggctcgcctttcctgcaaagtcaggcaggcgggggaaatgggctccttgtcctccgatcgattgcg

SEQ ID NO: 85452 - DNA, 122 bp, Homo sapiens
gcaggttagaaagtaaggtgggcacggtgcccacgggacggagaggccccgcgggacccccgcccccaattaccgacctgaatggagggtccaggcaggttataaggggaccacaccagcct

SEQ ID NO: 85453 - DNA, 122 bp, Homo sapiens
agatcctcctcttcagcaagccaagcacctttgaaaggcagcctccacccctcagtcgtgcgcttgcatcaggctgaggttggcttgctctagtgtttccatgcacttttgaacttcccctc

SEQ ID NO: 85454 - DNA, 122 bp, Homo sapiens
tgcctccacctcccctcctttgcctttatgacttacccttggcccccacaaccctctctccgctcccttggtcctattctggttggaaatgctccagaatagtaatgcttgctcaattattt

SEQ ID NO: 85455 - DNA, 122 bp, Homo sapiens
cacatccttgctcccacaaataaaaccttccacggaactcagggctgcagaccagcccttcgcaagccaacgcgccccgtgggcactcggtcccccggctccgcgtctctgccaccttccca

SEQ ID NO: 85456 - DNA, 122 bp, Homo sapiens
tcagccggcgggaaggcgttctctccctacccccaccttagctttcgctcagcccgtctgcgcttgccccagtcactccctctggaaggggctcccgttcagcaacatccgggacctttcac

SEQ ID NO: 85457 - DNA, 122 bp, Homo sapiens
ggacatgccagagcgctgcctgggcctgggcaataatgaggcctgagtgcgcggccggcgcggagggaccattatctcccaaggctcttaatggccactggccgagagtacatgtgatgagc

SEQ ID NO: 85458 - DNA, 122 bp, Homo sapiens
agaagggcctgaggatgggttttcagaaatgtgggaaaccttgcttgaaatgggtttggccgggaaacagcatggtggaaggagtgtggctttggaattcaaccgacctgtgccatgtccag

SEQ ID NO: 85459 - DNA, 122 bp, Homo sapiens
aaaccaaaatgatttcctcttaccaagttgaaaacggtttatgttaaaattgtttgccggcgggttggacccagtcctgctagggagtctgctgcagctcaggaacggggatctgggaatcg

SEQ ID NO: 85460 - DNA, 122 bp, Homo sapiens
tgggctgttttatcagtccagtaagattacctacctctgtagtactggaatagtgaaccacggaagactccagaatatacttttaaagtcaatgaagatgctgggatgttcttgctcagctc

SEQ ID NO: 85461 - DNA, 122 bp, Homo sapiens
gggttggggtagaactgcctaagtaatgttggaagaggggagggaaaagactttagtgagcgctgacctaacagtctaacaaaatgtaggcaaaggaggcctcaggccagccccaaacactt

SEQ ID NO: 85462 - DNA, 122 bp, Homo sapiens
aagaaatatgccacattccgcaggaataaggagaaaagaatggtgcgaaaatcagtgacacgaagttgaatatgtgaacacatccagacaaatgtgaagccagcccgattaggacgactgaa

SEQ ID NO: 85463 - DNA, 122 bp, Homo sapiens
tcctgagcctggggagcgtgacttccgagcctgtccgaaaacaccaaacgccaaagacaccgaagctgttccacagaagccgcagccgatcgaaagccattgctgcacgggattttctttgg

SEQ ID NO: 85464 - DNA, 122 bp, Homo sapiens
tgctccccgcttcgttctgttttggctgcagagagtggttcatccatactctcattccctcgcctccccttgtggacgggggtcttgccttttcaattcctgtgttttggtgtcttccctta

SEQ ID NO: 85465 - DNA, 122 bp, Homo sapiens
attaccgcctagcggtcccatctgaaccttcaaagccgacacgcatttgctttcacagaacgaggagggatgactacacacgcagccacaaaagcttcctctatcacacacttgagcgaact

SEQ ID NO: 85466 - DNA, 122 bp, Homo sapiens
ccgctcaatgccgccatgtttcccgcaggaagtcgcgtgggaagtgacgcctgaagctggcgcggccccgtaccccgacttccggcctgtactgagttcctggtatttctctctctgcgcca

SEQ ID NO: 85467 - DNA, 122 bp, Homo sapiens
ttagaggcttgtgccactacaccaggctaatttttcatatttttcatagagacagggtttcgccatgttgcccaggctggtcttgaactcctgagctcaagtggtctgcctgcctcagcctc

SEQ ID NO: 85468 - DNA, 122 bp, Homo sapiens
aaaatgacaggacagcctattggctagaagctggtggcgaaattatgacattacggcaaccgttgatcctggcgacgtagacagggacagacagctgggtctgaaacctaagcgagcctgcg

SEQ ID NO: 85469 - DNA, 122 bp, Homo sapiens
agttcgctcacccaaaattgtggttttaggaggaatgtttgaaaagataatgagatgaaacgaagatgttggttggagtggccaaagttattaatgttaacagcattattttcagccttgga

SEQ ID NO: 85470 - DNA, 122 bp, Homo sapiens
attcttatgttgcttttgaaataggttttgtaaatttgtttctccctttcagccttatatcgtagaatagaacagtgttttgcaaacttgagcagtttttttaaggagcaaagttttgtgta

SEQ ID NO: 85471 - DNA, 122 bp, Homo sapiens
gacttaccctgcaaagacgaaggtgggcacgtcagtgttaaagcaagctttcaagcaagacgtggtgtcccggaggtgagactcgaagcctgccaggaagagcacaccggagtgggtgcctg

SEQ ID NO: 85472 - DNA, 122 bp, Homo sapiens
gggttcgctgcagagctccacgcgagggtcctgccggaaggaaggattttctagccgctgcgcttgggccctgccgcctctccttaagtgcttgagggacgttgcaaagagcgccagtcccg

SEQ ID NO: 85473 - DNA, 122 bp, Homo sapiens
tccaaatttaatgcaatgatcttggtttaaattactttgccttccactgctatcgaaaaacggaatcttctcatttaccatcaagtaatgaggggtttcatagagttaattcagccctgata

SEQ ID NO: 85474 - DNA, 122 bp, Homo sapiens
tgagaaacgctgccacaggaacctgtctgggttcccagattctggggctcaggtcctcaccgtcctccccgggggccaacactccacccacgtcccccacacaaaggcaaagaaggggcctg

SEQ ID NO: 85475 - DNA, 122 bp, Homo sapiens
gctggtctggcaggtcctgtggagcttggggccaggcgggggcgacttgggggagccatgcgccgccctcgccgtccttgggctcccagacggagtaggttcagttctgagtccggataccc

SEQ ID NO: 85476 - DNA, 122 bp, Homo sapiens
ggaaaagcaggctgggagagaaaccgagacttcggctcggttaaaacgcgtaaaaatacgcgtttacggaatgaatgaaagcagccgccgaatgctgggcacccacccttctcacgctcttt

SEQ ID NO: 85477 - DNA, 122 bp, Homo sapiens
ctcaattttcaagagccagttcaacttgttctgctttagttcctggttcctctagaggaacgggaagaatggaacttaaagcaaatgtgaaaacagacacaattttagtgaacaatggagag

SEQ ID NO: 85478 - DNA, 122 bp, Homo sapiens
agctggtgcgggagacagacggggtgatggcagaggcggtgctgaagctacgactgcccccgctccggaaggacacacttgactggcgagacatggtggcttgttcctggtggagcaagaga

SEQ ID NO: 85479 - DNA, 122 bp, Homo sapiens
cagcagataaacacgagcctgggctggggcccaagtcagctgactccaaatcaggggcctcgaccattaagcaacaaaaataatttatgacgaactctgtccgggaggacttggagaaaggg

SEQ ID NO: 85480 - DNA, 122 bp, Homo sapiens
gtcaggttgaaaggactcccgcgacgtcgagccctccttcgcctgggtttcagagatgagcgacccagctgggaacccccagataaagcggtttttggaccccagccactttcagcagtccg

SEQ ID NO: 85481 - DNA, 122 bp, Homo sapiens
cgcccccttaaggcattgccccttcctcacccacagctccgcctacccccgccccgcgaccgctgggcttgtggccaaagcctaggttccaggaaacacctgctgtgggtagcaatgcaggg

SEQ ID NO: 85482 - DNA, 122 bp, Homo sapiens
ggtgcagccttgagctggggtctgcgtcgctgtggcctgagacgcttttcttaaaggtcccgatgacaaggacttggggcctggaagcaccactttcattaaccagcaaaaaacaaggccga

SEQ ID NO: 85483 - DNA, 122 bp, Homo sapiens
tgagatgcctaacaagagtggtgctgaccttccaaaagctaagacttcatgtttccaaatcgtgactgtccctctataaaaaaccaagctctaatagccttgggctgagccatcagaacctt

SEQ ID NO: 85484 - DNA, 122 bp, Homo sapiens
cgctgcggggcgctgcaccgtgcacagtcaggccgggccatacctccagacgctgtatgccgccgactccccgcctagccgccgctccggctcataaactagtagacgataaaattgccttc

SEQ ID NO: 85485 - DNA, 122 bp, Homo sapiens
atctgaggtcgcgggttcaaatcccacccgagcacccaagtccctcagtgcccccggccccgggccttttggccgcttcaggcccgccagccaggcccagctccgcatccatctcctcggga

SEQ ID NO: 85486 - DNA, 122 bp, Homo sapiens
tgcagcggaaggagcccgggaggttctcgcaccagccaggcgagcaggggctgccctcggcgcactcgttcacgtctgcggcggaaagacctagcctcggactctgccccaccggaaggcgg

SEQ ID NO: 85487 - DNA, 122 bp, Homo sapiens
ggattgattggaaagtttatttttaaaatcatctttgggataaataggaacccttgattccgatcgaatttgtggcaatagctgcaaattccaggagtgtgctttgtcatcattaaaccttt

SEQ ID NO: 85488 - DNA, 122 bp, Homo sapiens
cgctccggtctccctggctgtggcccactgtcctaaggcgagtgggagcttgggttcccccgccgggggcggggcggggaggggggtttccttcccaggcagtgacacaccctcgggtggtt

SEQ ID NO: 85489 - DNA, 122 bp, Homo sapiens
tgccccactctgcctaaggaaacgtagaaactttcccgattcggatggggaggggtagggcggagagtcccagagaccagctctggcttcgtttgcattggaaattagcacaaggtagtgtt

SEQ ID NO: 85490 - DNA, 122 bp, Homo sapiens
tggttccgagggtgagaggaggttaacctctaagcacttccttggccttaagtgccagcccggagcacaggtgtcagcgccgtccttgggtgggtcaccatcctcccgctctcctctttcac

SEQ ID NO: 85491 - DNA, 122 bp, Homo sapiens
agaatggctgagcattaggatgcacctgacactctccataggaccccattctccatactccggaggacatctgtttttctgccttcatctcctccccttattcggagcacactcttattcct

SEQ ID NO: 85492 - DNA, 122 bp, Homo sapiens
gaaggggaatggatcacggcgtggggtggagagagaccagggcggacgctgtaattaactcgcattggcttgcagagaagcggggagcctggatcatacttgcaaacccatgaaattatgaa

SEQ ID NO: 85493 - DNA, 122 bp, Homo sapiens
cagggtttgccagcagacaaattcaggcttctttctatgtgagggcccatggcaggccagcgtgggaggacgtgagatgggaggggcagccaggtgctgggagggttgggagagacatgggg

SEQ ID NO: 85494 - DNA, 122 bp, Homo sapiens
agggtggccgcgtgatgggcgggggtaatgacagctgtcgggtctggtttgacgtcagcacgggccccctgacagatttcccggttctgtcagcttcgcttcagcagtgctcttcctgtctg

SEQ ID NO: 85495 - DNA, 122 bp, Homo sapiens
ttcatcagctggcaccactctcagttgatacctttttcttggtatgtttgctcagggctccgaatccaaaagtcagcagcacacagtacccaacgctggggaggtagaggacacgctctgcg

SEQ ID NO: 85496 - DNA, 122 bp, Homo sapiens
gaaatggttttcgagggtactctaaattaagtatgaccataaaaatagagacaatcaggccggctgggatttgggtaaggtgagtgcacacctccttaaactttgcaccccaggtgcctcgc

SEQ ID NO: 85497 - DNA, 122 bp, Homo sapiens
agctcccggcttcaagagcgcagtagcggccccacagggcagaagtgcccttgttggagacgggtgcctggggcaggtgggggtacccgagggtttccagccacaaggaggggtgtggacga

SEQ ID NO: 85498 - DNA, 122 bp, Homo sapiens
ttgtgacccggagtcctcatcaagatgagcgcgctccatgagggagctgctcccaccctgcggacgcaggcggccggagcctctggtatctcagcttgtgtcaagcttgttatcatgtaaat

SEQ ID NO: 85499 - DNA, 122 bp, Homo sapiens
ctccgctgtgcagagactgaggcggcccctgctggcggcggtcagtactgcaggaggcgccgagggcccgggagcccccaaagccgggaggggcgccccagagggaggtgagcggcgccgag

SEQ ID NO: 85500 - DNA, 122 bp, Homo sapiens
tcgattgctttcgccccttcgtcaaggtgacaggcgttgtggccactgtcttgcacatgccggacgcgctctcaggaaagccagggctcccgagggcagctccacaccatttcatgtatttt

SEQ ID NO: 85501 - DNA, 122 bp, Homo sapiens
cccttaagccccatcagacgccgtcagacattctgaccacgacccccattctccccaggccgggaagttcagcctgattcccaccattattaatctggccacagctctgacttccgtcgggg

SEQ ID NO: 85502 - DNA, 122 bp, Homo sapiens
ccttaaaagggacaggaattgctcacttgcggagctcggtttttggagacgtgagttttgcggaagctcccggccaaatgaagcccttccttctttaactccgtgtctgaggggatttgtct

SEQ ID NO: 85503 - DNA, 122 bp, Homo sapiens
tgagcactgctcggtgctgacctccgccaggcctggaatccccgctgctgcgcttcccgccgcagacagctcccggccggccccgcctcccggcatggccccgcctcccagcatggccccgc

SEQ ID NO: 85504 - DNA, 122 bp, Homo sapiens
ttcctctgcataccaggccatgttctgggacgtgtggtctaagttctgcccctcagaacccggccatcagccatcttcagcgatggaatgctctcaatgcatgtctgagaagctagagcgcc

SEQ ID NO: 85505 - DNA, 122 bp, Homo sapiens
cagggctaagggccacccgagcggattcggccccgcggtcagggccaagctgggctccggcgctgctgctcccgcggcgccgactggagctccagagcccctcccgtctctacctgctcgag

SEQ ID NO: 85506 - DNA, 122 bp, Homo sapiens
ttccacacatatgtcttaagaatctcagaatgggggaggtaatttaaaatataccagtaccgtaccctcctgggtgtcttgattatgctggggcatccagtatatgaaataaaattaggctg

SEQ ID NO: 85507 - DNA, 122 bp, Homo sapiens
tggatttagggctaagcccacaatctgtcacaaattttgcatagaatattaattctggaacgaatgagtccagttcctctttgaaaacacttctacagaagttcctgtgtagatgagcgtta

SEQ ID NO: 85508 - DNA, 122 bp, Homo sapiens
acgctagcccactctctgtctcttgttggctttttggcctgcatggtgtgtgtgtgtgcacgtgtgttgcacttcacagcttggacaggacacacggctcaactttgtagtgttcttggctg

SEQ ID NO: 85509 - DNA, 122 bp, Homo sapiens
aacgttactaaacaggtcgtatagtacctcactttccaagtgtgtatgcaaagaaacaagcgtggaaggtagacaccaagatattgacaatggctttctctggcaggttattttaattttct

SEQ ID NO: 85510 - DNA, 122 bp, Homo sapiens
catcacaagggtttcataggaaagatgtctgcacctgtgttttcaggctaccggggagcccgcgttcatttccagtctagtcgtacttccctgagtcctgtccatgaatactggatgagccg

SEQ ID NO: 85511 - DNA, 122 bp, Homo sapiens
tgggccgcgggagacctcggagaggagcaacctcggggcgcgggagatcggctctaactgcgctcccgccgcgcccgaggctctgagcgcccagcgcgcggtgtgctggaggcagccgtgtc

SEQ ID NO: 85512 - DNA, 122 bp, Homo sapiens
gcccaagggtgtggccatttcacctccacagcagagttccaaacattctccaacccatggcgccatgaagagtcctaaatcacattcttccagaaagtaactgaagtcagattcttccccca

SEQ ID NO: 85513 - DNA, 122 bp, Homo sapiens
gagtttcatcatcagagatgataaagaaacatgactattcagcctttctcgtacatctaccgaatacctaactaatgatgttctcaccatattgaaaaaaaaaaaaaaaaccatccaggatg

SEQ ID NO: 85514 - DNA, 122 bp, Homo sapiens
gtccggggtagggacgggcggccgcgagctggggcagaggacctgcgggagcccgcgcagcgcctccgctctgccaggcccctccgcatcgggcacccaggctggagccctgcagtttgtcg

SEQ ID NO: 85515 - DNA, 122 bp, Homo sapiens
ccagtctgatgcgaacagggcagtgcacgtgcagagacagtgccctggggcctggaggcccgggcgagggaaacccagtctgatgtggacagtggagtgcaggtgcaaagacagcaccttgg

SEQ ID NO: 85516 - DNA, 122 bp, Homo sapiens
ttttccttctggtgggtttcgcggtctccgccggctcaggaacaaagctgcggaccttcacggttagtgttagggctcttaaggcggcacgtctggagttgttcattcctcccggtgggttc

SEQ ID NO: 85517 - DNA, 122 bp, Homo sapiens
gacttgtccttgggaaacagcaaggccatttctctttctgtaagtatcagcaggaagccccgcagcttcacttccttgtgcttcaagctgtcctccttgatcagtaggttgctgagagcaac

SEQ ID NO: 85518 - DNA, 122 bp, Homo sapiens
gcagcccaggccatggacatgtgcaccagtatgtacctgcaggcatgggggggaggggggcgtgtttctgggcctgccccagacactgcccttggctgccagcctaccctgcctgcactcct

SEQ ID NO: 85519 - DNA, 122 bp, Homo sapiens
cagagaaccacagatctcacttaaaaacacagatgccaaaatacagaacagaacagtagccgattgaaatcaacaccacataaaaaatgtacaaagctttggcagatacgaaaccaagttga

SEQ ID NO: 85520 - DNA, 122 bp, Homo sapiens
cctctcaactcaaatgcaggcaaagacgtgcttaaaagcccatgtgcccaccgatgcacacgcgtgtccacacacacactgtctcaaataggtaagagtttgcatggaacaaaaccctatga

SEQ ID NO: 85521 - DNA, 122 bp, Homo sapiens
gctgtagtctgtgccctccactgtccttccacccccagccctgtgcccatccaggtaacgcggcatggctcacctcagagagctcccagtcagacccaggaggttgtagggagcacctcctg

SEQ ID NO: 85522 - DNA, 122 bp, Homo sapiens
ttgggttggggagggagggtttcagctcctgtactccagcgttccgaggcccacgtcttgcgtcacgtgtcccgcaacgcaggagcgctttctctggccagcggagaagcgaggagaaagac

SEQ ID NO: 85523 - DNA, 122 bp, Homo sapiens
tggaggggaggaggcagaaaaacccacatcttctcttcttttgtcctgggagggccttaccgataggtggcatcaattgtgcgtttgttcatagcagttttactcctgggtctgagggagga

SEQ ID NO: 85524 - DNA, 122 bp, Homo sapiens
aaagaaaatacacctttagtaaaacaaaattaccctggtatttccacatctcaaaagcgacgtcattcatgtagttttaaaactaagcaatgaagtgattccttcttccctgtagtgttttt

SEQ ID NO: 85525 - DNA, 122 bp, Homo sapiens
agggatccgcctcttgtgagaggaagcgcgagttaaatagtcccggccattcagcgcttccgcttaacttgccgcaaagtttttctggagaagtcggggtttttttgccgagcgcttttgcc

SEQ ID NO: 85526 - DNA, 122 bp, Homo sapiens
cagaacaattgaaaaggaccaccagtttggggttttttttaaattttgttttccattattcgtggatcaagtgggaatggtcttctgagggtaggagtcaccacttgtctctcaccaggctt

SEQ ID NO: 85527 - DNA, 122 bp, Homo sapiens
tctgagggctccagacacatggcctgtgcgtctgtcctgcccagcgtctcccacctgacgcggccaggtgcccagttgctcttcaaggccttttcaggtgctcctttccaggaccagggtca

SEQ ID NO: 85528 - DNA, 122 bp, Homo sapiens
agggagcttggaccctggacgggagaccccagatccccggatcccagacgtcggggtggccgcctaatcgccggatctcagagacccagccctcagatcccggggtgccacactcccagggg

SEQ ID NO: 85529 - DNA, 122 bp, Homo sapiens
acacagggacagggaaggtgtgcagaggccacatgcccgtggtccacctgcaaaccgggacgctctcacgtggggatgcccgggagcgttgatgactcaggctccaggctctcctgtcctca

SEQ ID NO: 85530 - DNA, 122 bp, Homo sapiens
aaaagatgacacccgactcatattggcctagcaacaagttaccattgcctcggcagagctcgtctgtcagctgtcggaggtaggttcccttttaagtaataacatgcaggaagcatctcacc

SEQ ID NO: 85531 - DNA, 122 bp, Homo sapiens
tgaatcctatatttgagtttagggagaagcaaggaggctatgaactaccaggggcgtttccgtccaatgaggataaggaagctctgtgggacctaacgaacaaacaaccttccaaggcctgg

SEQ ID NO: 85532 - DNA, 122 bp, Homo sapiens
gtctggagggggcggggctatctcagggctagtggcaacttgggcagaggtcaggggtcacgcgaggtcagtccgtcgggagggctagggagatggtcacgaaacctgaagtcaagagttaa

SEQ ID NO: 85533 - DNA, 122 bp, Homo sapiens
gggcggggcggcgcagggggcggggcgcgcggcctcgcggagcccgcccctccctcccagcgcgaaatctgaaacaatctcggagacggattttggaaactcctctcggtgcatatcctaag

SEQ ID NO: 85534 - DNA, 122 bp, Homo sapiens
caacatgtataaatgtgtcccaggataggaggccatcagatctcccacatgaggcattttcgaccctctctccgtcttgttctccagttgcccctcgccatggcctgcagagtctcgggaaa

SEQ ID NO: 85535 - DNA, 122 bp, Homo sapiens
tcgcccctccttacctatggaaacacaggaagtgacctatgctcacacttctcatggcctcggccctagtgggagcaactcgctgaagccgagggcagaactggcggaagtgacattatcaa

SEQ ID NO: 85536 - DNA, 122 bp, Homo sapiens
gctgtgatccaataagagttcatttgaaaaacaggcagtgggccaaatgtggctcacagacgatagtttgccaacctatgctttaaagttttactctacaaaattaaagctcaaaatacatt

SEQ ID NO: 85537 - DNA, 122 bp, Homo sapiens
tcgagagtattctgaggacaaggatgtgcagcaggctgtcttggcctctctcccatagcccgagtgcccagtggcagcatcaagttgggcaggtctgactttggttgggcactccactcact

SEQ ID NO: 85538 - DNA, 122 bp, Homo sapiens
gatccagaaagacagccttggaaacaaattactactcctgtagccagtaccttacaattacgtatttttgaatgattttatcggatttgattgccaaagaatcttgcaaaaacaattttttc

SEQ ID NO: 85539 - DNA, 122 bp, Homo sapiens
cgacccggcagccgctcctcgagttccgattggttccacatgaggggcgtggctctctgtcgtcactggggagcgccttcgctgacgtcacaggcgcgggccctcggcgacgcaatagcgcc

SEQ ID NO: 85540 - DNA, 122 bp, Homo sapiens
tcttgttcaggtatttgacttttaaatgtcttcagcatcgttgccagcagctggttcctgcgatagcctgttcgggctcgtacgttttcatcacctcactacgtgttttcatgtttgtgcca

SEQ ID NO: 85541 - DNA, 122 bp, Homo sapiens
ctgtcaggactcgggccggctccgcagcgtccccgcaggggctgtgcttgggctgggccccgcctctgttcaccctgtgcccggctctccgttccaggtctgcagcggcggcgcctgattcc

SEQ ID NO: 85542 - DNA, 122 bp, Homo sapiens
atttttggttcctcagcctttctgtctgcctgatgtcaagggcttcttggacagtttggacgttacagttcgtcaggccgtgatcagtggcctgcagtgggactgctcctttgatatctgaa

SEQ ID NO: 85543 - DNA, 122 bp, Homo sapiens
acaacaaatttctaaaataaatattgtactttgatctcccagcattgcatttttaatggacgctctcaacattacttcattaagaactttttccaggagctccgagggccaagggggttggg

SEQ ID NO: 85544 - DNA, 122 bp, Homo sapiens
agtaggaaactggcttccctacccaccctcttgccagtaggctgcatgatcctgggaagacgcttcccctttccaatcccaattttgttcatttgttgggatccattaactgagtgagagag

SEQ ID NO: 85545 - DNA, 122 bp, Homo sapiens
gatcaatatgtatttttttgaaactattctttttaattatagtttaagttctggggtacacgtgcaggacgtgcaaaatatgtacttctttaagatgtttccacaggtacaacagcagaact

SEQ ID NO: 85546 - DNA, 122 bp, Homo sapiens
tccgtatcctcactaacactcagtactttcagtcgtttatgttttagccatcctggtgggcggagcggtgctcattttggtttaaatttgcacttttccgatgaccggtggggttgggctcc

SEQ ID NO: 85547 - DNA, 122 bp, Homo sapiens
ctgtctctgtccccaagcactgggccaggaggcaaccagactttactaagggtggatgtccggggatcgatgagcggaagcagatcgtgtttgataatcagattattgccaggaaagaaatc

SEQ ID NO: 85548 - DNA, 122 bp, Homo sapiens
accactactatctcttctcatgcctttaaatattctccaaacctagtgagtagcactatacgtacacgaacacacacagctggcctgccagagatcactaacttagacccactgcttctcaa

SEQ ID NO: 85549 - DNA, 122 bp, Homo sapiens
caccagggttggcaggggccagcggggaaagcgccaggctgaccctctggggtgggtctccgggtctctgctcacgggcctctctgtctcctcttcagactcactgctcctaagatcccaga

SEQ ID NO: 85550 - DNA, 122 bp, Homo sapiens
ggctcaagccatgtgcctgcgtcggcctcccaaagtggtgggattacaagtgtgagccaccgggcccagccagcacattctttatgtttttctgcaccatttgagtcagctgcccattttgg

SEQ ID NO: 85551 - DNA, 122 bp, Homo sapiens
cgggagagtccacagctgcgctccatcagccagaggagcacggaacgcggaacccaggaacgcagacaaagccactgtggggcacggggcaacagacaaggagaggctccatcagctgaaaa

SEQ ID NO: 85552 - DNA, 122 bp, Homo sapiens
tgtgatttgctgcctgtgtccctctccgagctggagtttccacctgtgaaaggaagattgcgccacctgtgcggctgccaagctaaggagtatctgacagattcactggaagcaggaagtgt

SEQ ID NO: 85553 - DNA, 122 bp, Homo sapiens
atgcagcgtagccggccccgcccccctcccgcaggaagctcagagagggtgcagagacctcgcaagtgcaggctcggccatcatcggagctccaccagtagggtcaaggagtacgcggctgg

SEQ ID NO: 85554 - DNA, 122 bp, Homo sapiens
tacgcgtcagggccactgcagggagtctgcgagggaagcccgtgggggtgcgggtccctgcgggaaagtctgcgggtgcgggggtctcggcgcgatatccctaggcccgcccccgctccgtg

SEQ ID NO: 85555 - DNA, 122 bp, Homo sapiens
ttggcagcccgtctgttgagggccccatgacagcagaggcagtgccgtggaacgaatcatcgcacagcagcaaaggtaggagggaggggcccgagccgcacagacggcgcagttcagcggag

SEQ ID NO: 85556 - DNA, 122 bp, Homo sapiens
acccacggaggcgggggaaaggctcaggcatggcaggctgcagtcccgaggcctgtcccacgggaaggcagctaaggcccggcgagaaatcgagcgcagcgccagtgggctggcactgctgg

SEQ ID NO: 85557 - DNA, 122 bp, Homo sapiens
tagtttgaacagttcagaagactttgttaaattctaaaacatgatgttttcccgttccctcggcatgctgcatcgggcagtgcatgtgcaggctcaaacctgcctttggcatctctttaatg

SEQ ID NO: 85558 - DNA, 122 bp, Homo sapiens
aaacgactagggatggaagcacttggcactccgggtctcggagcaggctggggacgcccgcggcaggaacctggtcctccactccgggtgcggaccaaagtctgctagggcttccccgaagt

SEQ ID NO: 85559 - DNA, 122 bp, Homo sapiens
gcggctgtaaaggaccaggcctcggcatccagcgtctgggggcgctgggggatcgaggcgcgaagcttgtctgtggctgggaaagaccggcaatgccccaccaggccgtcccattaaccctg

SEQ ID NO: 85560 - DNA, 122 bp, Homo sapiens
aagggaacaacactgactgagtcagagctagactcaaagctagagtctactggctgatgtcgtgggagaggaagaagagatgagcgggccttgaattcgtttaacattcagcaaaaatgtat

SEQ ID NO: 85561 - DNA, 122 bp, Homo sapiens
agttgaccatcacccaagccctgtccctatggtctaacaaacctctccttggcaaagcaacgacctgaagttatctatcccattcaggagatcgtatggcaagagcttcactaagcagtcaa

SEQ ID NO: 85562 - DNA, 122 bp, Homo sapiens
tttgacccagggcgtccttgcacacgtggggaggctctggcctcagccggctctaggccccgccctctgcctgacacccacttcagggcatctgccctttctgaggactcacgccgatgtcc

SEQ ID NO: 85563 - DNA, 122 bp, Homo sapiens
ttcctttggtgagtttatggacacgcatgaggtaagctgcgccgttcatgttctactgcgcgtgactttgtactgcccctgagtggaaaaggtatttgggattcgaaagaagttattattaa

SEQ ID NO: 85564 - DNA, 122 bp, Homo sapiens
ggtgaccccttctttcaaccccctcaggcgtcttaacctacacaagtcatgagtgggaaccggggcgttttgtgtgtgtggggaaaaggcaagccccttcgcccctcagcccacccgccccc

SEQ ID NO: 85565 - DNA, 122 bp, Homo sapiens
gggagccgctgtcacggccgcaaccacccgcgggacctctcggcggcgctctcccagctccgcctctccctgatgcctcaactctagtcggagtagggctggaagatggcaaggggcaccga

SEQ ID NO: 85566 - DNA, 122 bp, Homo sapiens
cccgtgagtgtgtgtgtgtacgtgtgcggggtgcgccggcggggcggctcgggagggcgccgcggcgggcccggcggcggcggcggcggcggcgacggcggagccggctccctcctccattg

SEQ ID NO: 85567 - DNA, 122 bp, Homo sapiens
gtacaagctggggagcaaacatgctgagagcgctaactccttgtgagccactgttctaggcgaggtacacacatgaactcacttaattctcacaacaaccctacgaaacaggtcctattagt

SEQ ID NO: 85568 - DNA, 122 bp, Homo sapiens
tttctttcatgtggcattgttttatcttttttcccagaagcttgcattcattcattgattcgagacagaatttcactcgtttccctggctggagtgcaatggtgtgatctcggttcactgca

SEQ ID NO: 85569 - DNA, 122 bp, Homo sapiens
tcccacctgctgccccagggctgcgagtgctgcatgagctgtgccgtgcagggctcgccccggccccacgtcacctggttcaagaatgaccgcagcctggaaggaaaccccgcggtgtacag

SEQ ID NO: 85570 - DNA, 122 bp, Homo sapiens
ctgaaatgactctttccaatctcaaagccagtggtcaacatcctggccttgtcttcctgacgttctcagcagctgtcatttgctcctaagccacgccccatgtttccagcttttgagctgcc

SEQ ID NO: 85571 - DNA, 122 bp, Homo sapiens
cgcccccagctgggccagccactcaccctgagcctgtggttgggcagcctcggcagcaggcgctcctgtggggtcagcggccggccgggctctcgccgagctatgtgcgttggccaccaggt

SEQ ID NO: 85572 - DNA, 122 bp, Homo sapiens
gagctgaccagcctcttctcctccggccgcagcctgctgcgcaagtcgtccagtggccggcgctccaaagagcctgcagagagtaagtgtgcagggcctgcctgagccccagagcccagtgc

SEQ ID NO: 85573 - DNA, 122 bp, Homo sapiens
ccctgggcaagagtgaagtgaggcactcatacaggggtgccttgtgagtatggggtcagccgaggatgctgaggggctctcgaggttcagccagagtccctgacgctgggctcgtgctgctc

SEQ ID NO: 85574 - DNA, 122 bp, Homo sapiens
attttaaaaagagggagaggaagaaggaaagcaggaaggatggacacaaaagaaggaaatcgaaaagagaggaaacaaaaagaattaaaggaccactctaattcttgaagggacaggaaaaa

SEQ ID NO: 85575 - DNA, 122 bp, Homo sapiens
acttgagtaggttattgctgtttcctgccatcctcaagtgccaaataagcagaagtcttccgagcttcttatctctttcactttcttctcgagatctctgtcgctttaatccggcgtgtctg

SEQ ID NO: 85576 - DNA, 122 bp, Homo sapiens
tatgttctctttttcttcttgcagtagtccccagaaactcagtctgctttccttttctctcgatggctgtcagcacccatctaatgaaattgtcttctccaaaagactgactttaggatcag

SEQ ID NO: 85577 - DNA, 122 bp, Homo sapiens
gctgccaatgtggcccaggagcctgagctaaacgcctggactgcttcaggcaagtaaaaccgtcagagtcggcgtgggggggagccagaatggaatgaatggtatccaccaggctgtctccc

SEQ ID NO: 85578 - DNA, 122 bp, Homo sapiens
gcaattgctgtgccaggctgagcacacaaaatcaatggtgcctgctaatgaaggggccgccgccaccaggggtgctggcctggggtgctggactgccaccagggtcctgccctgggcactcc

SEQ ID NO: 85579 - DNA, 122 bp, Homo sapiens
taagacactaagcggaagaagccagtgtgaaaggacagcatcccgtatgttggacatgcccgcgatggtgaatcttacgtgtctacttgtccgtctgtggggtggccagatacccagttatg

SEQ ID NO: 85580 - DNA, 122 bp, Homo sapiens
ctcggtaacattttgacttgatctgtcaaggcgctttcgtcagtgcttctgggccgcggccgccacctacagcctccacagtgcccggcgtcccggagctggctccactccagttcctgagc

SEQ ID NO: 85581 - DNA, 122 bp, Homo sapiens
gggccacgcctgtcctctgagatacagctgacactccggagcgccccagtgagatcaggccggggctgtcctccagaggacactgtccaggatggtgccactgcatggctcttgccctttcc

SEQ ID NO: 85582 - DNA, 122 bp, Homo sapiens
tggcatctcgccaacttcagagccgaatggcctctagccacactgcttccagaccccagacggggcagcagcagcagttcccagaggagcacccattgttgcagctaggacccaccaaggat

SEQ ID NO: 85583 - DNA, 122 bp, Homo sapiens
gtcccctattccttcctccctaggccagagggtggaggtgtcagggctgggcccatggatcgctgttggcccctaactcggcaccaaagtggctgaagcagacgtttgacgaggccgacaag

SEQ ID NO: 85584 - DNA, 122 bp, Homo sapiens
gtagggggaaaaccgatcctgaaccagtaaataaacagccccctttcggccagcagatcacgtctatggccttggccaagcctcttctccgaggactagttttcttctttgtaaattcaacg

SEQ ID NO: 85585 - DNA, 122 bp, Homo sapiens
gcgcacagggatcagggactgtgcgcatcactggaagaagcggcagaacggcgcgcgcctcgctgagctttctgggagatgtagtctcatggcaactcccagccttttggccacaaggctac

SEQ ID NO: 85586 - DNA, 122 bp, Homo sapiens
gggcaggaggctgctgagggatggagttgggcccggcccccagacaaggcccgggggctccgccagcagcaggtccctcgggccccagccctcgctgccacccgggcctggagccccacacc

SEQ ID NO: 85587 - DNA, 122 bp, Homo sapiens
ccagccttgcccaaccgggccaactcagcgtcggctgtggggcggggccccgcccctaggcgcgtcatccaagggagagcggtccctgccctgtgaagttgccaaggagggaaagggtggga

SEQ ID NO: 85588 - DNA, 122 bp, Homo sapiens
atcgcacatccaaagggcctttccttgtttgctttagtggcaccaccaaacccaaggcaccggctcatcagcagagcaggggcctctccgcacagcctagggagcttctgccctctggaagg

SEQ ID NO: 85589 - DNA, 122 bp, Homo sapiens
agcctcaaccctcctctacttgagccattcctgcaccacagtccaacctaacaggaggggcgcggcttcggacttagcttctgcccagtgagagagggtctccccgtgactgtgctgccagg

SEQ ID NO: 85590 - DNA, 122 bp, Homo sapiens
ggctggtgctgaagctgaggctgccggagctaggcgaggctcagctcggctcagccctcgcgccccagcgcctcccctcggctgccctctgttggccagaaagggtctctccccgtccgctc

SEQ ID NO: 85591 - DNA, 122 bp, Homo sapiens
gaaaccacgactggagaagttatatgattggctaaaccatgaatgacgcaacataacccacgcccactgagaatcgtcctttcccagactggctcagattccgctttccgattggtccctac

SEQ ID NO: 85592 - DNA, 122 bp, Homo sapiens
gttcaagactggcctgggcaacatagaaagagccccatctcgaccaggtgcggtgactcacgcctgtaatcctggcactctgggaggctgaggtgggcagatcataggaggtcaggagtttg

SEQ ID NO: 85593 - DNA, 122 bp, Homo sapiens
gtcaaacatttctctaagaatgtttggtttcttttgaaaggaaatcgcatttagaggccacgatgtaggagcttactgctactgggttgtcagtttctaagccttttcaatggatagagcta

SEQ ID NO: 85594 - DNA, 122 bp, Homo sapiens
ccgcgaccctctccctgacgtccctctctgtcaccaaggaccctctttgtgctgcttgaacgcccgtttcgttactgctgtttagatggaggtaggaacgggccattaggcaagcagttggg

SEQ ID NO: 85595 - DNA, 122 bp, Homo sapiens
tgcttgaaggtgggggcttctttgaggatgaagacactagtgagggcagtgaactgagcccggcctccagtctccgatcgcagcgccgctacagtactgacagctcctcttctacttcctgc

SEQ ID NO: 85596 - DNA, 122 bp, Homo sapiens
aggcgggacttcctgagcgaggcgtccatcatggggcaattcgaccatcccaacatcatccgcctcgagggtgtcgtcacccgtggtaggtgccgggcaaagacagcctccccctgcagtgc

SEQ ID NO: 85597 - DNA, 122 bp, Homo sapiens
cacccagccaatatcttgcatttgaatcaagtagtggacatttattggatcccttggggccgatgccatttctaaaagtgattgagtaaatatcacaggtgggcaaatcaaagagaaggata

SEQ ID NO: 85598 - DNA, 122 bp, Homo sapiens
ccgcagccccgcgcccggggacgcgaacctgcaggctggggactggaatccccgccttgccgcttacgcgccatagattcctcatctgtcagcaccgcagaaaggccccctcctcgctgggg

SEQ ID NO: 85599 - DNA, 122 bp, Homo sapiens
cctgacactgggtgggctgaccctcccagggtgggggacaggggtgccaacagcagagtacgggcagggctgtccaggagctctgagtggtgggtggccaaggcttcctctggatagagggt

SEQ ID NO: 85600 - DNA, 122 bp, Homo sapiens
agggaggcaggggaatgagccaggctggagctgagccagcagggcagggcccccctgctgcgacagtggcatcctgatagtgagatgctcagatgctgctgccctctagtggccgccagttc

SEQ ID NO: 85601 - DNA, 122 bp, Homo sapiens
tttttaaaatgtcagttttgatggcagatggatttcaccaattattcatggaatactttacgcaacaagaggtttaagtgaccaggtggaaaaagcatgtggcccttgaagagagagggact

SEQ ID NO: 85602 - DNA, 122 bp, Homo sapiens
gctggtttctctttttcacaaaacagactttgttttcaaatctcacttttctgatctgtacgaattcttaacagttccccaatatcaaagctgattaaatcttcaaaatggttagagcaaga

SEQ ID NO: 85603 - DNA, 122 bp, Homo sapiens
ggccgcgcgcgcttacgggattggggcggggccgcaagcatttcctggatggggcggagccgagcggatttccgggatccgggcggagccgcaggaggaggcgggtggttcctgctaaagaa

SEQ ID NO: 85604 - DNA, 122 bp, Homo sapiens
agcaggtggatctctacgactggtacaggtgcggccaggccctcttccctgcccgccccacgtgggaaagcatcaccctccttgggccaatttttgctctcagcacctagtacatgaggcct

SEQ ID NO: 85605 - DNA, 122 bp, Homo sapiens
ggcacacaggagtaaacagtgaatgatgcaaactaccccagacttcaggaagcgaagcctcgctccggggcagggtcctatgagcatacccgaaaagtgccaccaaatcaagtttcaaagca

SEQ ID NO: 85606 - DNA, 122 bp, Homo sapiens
ccattgatttactattttagcaaatgtataacctgatatctgtactctaaatattagagacgtaaatttgtcagaggaagcttggtgtacgatgaatgcttgcattggaaaagacgcaactt

SEQ ID NO: 85607 - DNA, 122 bp, Homo sapiens
ggtgaggtttactgttttccagttggctgattaactcacagatggaaagtgctggtaagccgccagagcttgtgtggcctggctgcttcattttatagaggaggcccaaagaagacaagggt

SEQ ID NO: 85608 - DNA, 122 bp, Homo sapiens
acagagaggaatttctcataaccccttccagcaaatgtttccggagtataatgctccttccgctctagagacccatagaacaggcatcaagggttaaggggacgaaaagttagttacactaa

SEQ ID NO: 85609 - DNA, 122 bp, Homo sapiens
cccctcactcctcctgagtcctctcagctcactgccatgaggtgttctatgtttcctccacggggctgggggatccgaaggcaggcactactttgactttctgcatctggaggccacagtag

SEQ ID NO: 85610 - DNA, 122 bp, Homo sapiens
tgctttttaaaaagggaactgtacatgatcagatcatggaaggatagctccactcctccccgaccttggtcacaggccgccatgaggagggactgctccagtcctccggtggccactgccat

SEQ ID NO: 85611 - DNA, 122 bp, Homo sapiens
tacacttccacggggcctacaactcccaaacacccttgggccactgacgtcttccggaaacgtgcacttgcaagctgcccgcaatacgtcatggcgaccaaacgccttttcggggctacccg

SEQ ID NO: 85612 - DNA, 122 bp, Homo sapiens
ctaggctctactagcagagccttatttattacaacataatgactgcagtgctacagccatcgagagtaggctttatgatacatggaatatgtttcattaagactaaagaaaaattacaagca

SEQ ID NO: 85613 - DNA, 122 bp, Homo sapiens
ctcgtggtgcgccgttttttaagccggtctggaaagggcaatattcgggtgggagtgacccgattttccaggtgcgtccgtcaccgctttctttgactgggaaagggaactccctgacccct

SEQ ID NO: 85614 - DNA, 122 bp, Homo sapiens
ctcacgagatcaacaggtttaacatccgaggcacacaatcaattagctgaagcaaagccccggactggccctcggagcggcccgcagcgggactctgcgggcaccggctagcgggcgaggtg

SEQ ID NO: 85615 - DNA, 122 bp, Homo sapiens
cccctcccagagttgacaggtgggaagtagcttctctggactgcgggaatcaagttctgtcggagagttccatctccaggctcaaactcagtttggtctgcctatagcataagcataatcag

SEQ ID NO: 85616 - DNA, 122 bp, Homo sapiens
tttgattttagttgtgtggttctgtgtgtgcactgccaggacaggtaagcatgactgtggcggttagagggatccgggaaatgggggtgcccacagaccacggcggcgtggggagacctgga

SEQ ID NO: 85617 - DNA, 122 bp, Homo sapiens
aagcgctggtattacagtcgtgagccaccacgcagccgaatcttgaatttcactgaagttcgttttactccacctcccaggacggtttcaccgcccttatctgaccaccccctggttctgcc

SEQ ID NO: 85618 - DNA, 122 bp, Homo sapiens
agggtggaggcagcccacccaggcttatggcctgaggacacaatgcatgcacggattttccgctcttaagaggtgagagaacagcagcccaagagcaccctgcggctcttaggacgtgcgaa

SEQ ID NO: 85619 - DNA, 122 bp, Homo sapiens
aggagcccgcagggaataggggagcgccacctggggaacccccagtccccaagtatacaccggagatccgctgggacaaatgcgctcgtccggtcaccctttccccctcttcccttcctcag

SEQ ID NO: 85620 - DNA, 122 bp, Homo sapiens
tgggattcccgctcactgagattcccgctcactgggattcccgctcactgggcttggtgtcgcggaaaaaacgaaggcagagaaagaattagaccacggtgcagccactgcagcttctgggc

SEQ ID NO: 85621 - DNA, 122 bp, Homo sapiens
ggctctcagtattttaatctgcaaaacagggatgaccggtaaggtgatctctaagaggaccgtacagctcccaaatgctttaatcctgctagatcctcagaatacttgagtatgaaatcttc

SEQ ID NO: 85622 - DNA, 122 bp, Homo sapiens
acacatacacactagtaaaatgaccaaaatttgtgttaacacagtatattttgttcccaacgtacaggcaaaggaaaaagtcctacttgcctctaaaatttactatttaaagtacattttta

SEQ ID NO: 85623 - DNA, 122 bp, Homo sapiens
gggctccttgggccacccccaaagatcatcctaaaagaccatccccaaagactggcctctcgtggtggcttgggctgcagtcctggttctgcttcttattcctgaaactgcctttgcaaaaa

SEQ ID NO: 85624 - DNA, 122 bp, Homo sapiens
taccggagaggctgacgtgggaggatcgcttgagcccaggaggcggaggctgtagcaaggcgtggctacacaactgcactccggcatgagcaacagagcaagactctgtctcaaaaaaaatt

SEQ ID NO: 85625 - DNA, 122 bp, Homo sapiens
gcggtctgctagagggggtggggcattcccctgcagcaaggggcggggccaccccaacgccgcttctgcggccaaagtaggttgggagtggaaggtggtggctgctgctccgcagtgtcggg

SEQ ID NO: 85626 - DNA, 122 bp, Homo sapiens
tgctgtcgcagtgggttccggagagtgcaggtgatttcgcagcaggtttcttgtgctggccgcgctcgccggacgaagaagagaagggcagttgggcctgcggccttggcgttcatgaggcc

SEQ ID NO: 85627 - DNA, 122 bp, Homo sapiens
gcggccctgcaagcggttggccttatctccggacttcgctgctcccgaaagccctcagcccgcctgccaggctacacctaacttgcgccaagttcctccagcagttctggaaatactcccag

SEQ ID NO: 85628 - DNA, 122 bp, Homo sapiens
tggtcgcaaaagcagccctttcaatcgcaccgaatttcccctggtgtgaaaaggcgccatcgccagcattttgccggggtttatgcctcaatcccgcattccagccacttccacgaattact

SEQ ID NO: 85629 - DNA, 122 bp, Homo sapiens
agtaggtgagtcctgctgcagaaggagccactgcttctgacgcgtgccttgcacttcgaccgtagcaggccatgatcctcctcagtgtggactttccttctgttgcaagagggaggcctggt

SEQ ID NO: 85630 - DNA, 122 bp, Homo sapiens
tactgacacttttttttctgctttttgtgggtggttttgctttctaaaatggcccccaagcgtagtgcttaagctctgcccagtgttcctaagcgaaagaagaccgtgatgtgccttacgga

SEQ ID NO: 85631 - DNA, 122 bp, Homo sapiens
gcctcagcactggccccacaaacccatccggccctgctcaccctcagccgtcttccacatcgccaccctgatgcccaccaaggacgtggacaagcaccgctgcgacaagaagcgccacctgg

SEQ ID NO: 85632 - DNA, 122 bp, Homo sapiens
cttcacaccagacccacgttccccgggcagacatggccagcattctggaatttctgaacacgacctatatttctgttcaaaagaatcagacacaagtgcccatgacttctctggctccccac

SEQ ID NO: 85633 - DNA, 122 bp, Homo sapiens
ttttttatcaggccatcgttgacatatgtatgaattaaatagaagtgggctatatcagaacgaatgctgaatgtgaactgagagcatgcaggggcattgaccaattcacatgtgcaccttta

SEQ ID NO: 85634 - DNA, 122 bp, Homo sapiens
tgctgggagagccgaacgcacagcaccccgtgtggggttcccaggggagtgacctggcctcggagtcagcagcccagggggatatcttgcaggccgccttccaggactcctaccgcaacctc

SEQ ID NO: 85635 - DNA, 122 bp, Homo sapiens
ctgcacgttgccaaggggagaaactgaggcccagagtggggaagggaggctttcagaagccggaagggcaggcaggtgttccaactccccactggctctctggttaccaggctgcctttgtc

SEQ ID NO: 85636 - DNA, 122 bp, Homo sapiens
atcccattcattttttctgtcatcgagttcattcaacaaatgagaactgaacgcctactacgtgccaggcactgtgctaggcggtcaccgtttcagaggacctcatcgttcccctgacggtc

SEQ ID NO: 85637 - DNA, 122 bp, Homo sapiens
cccacgtcctgaccggctgggcagcgactacctggtctaaagaaaccctctcctatgttccgtgctctgcccctactgcattgtgaggactagccaatcagcacccagcttggcccccccaa

SEQ ID NO: 85638 - DNA, 122 bp, Homo sapiens
ttcaattctcctgcctcagcctcctgagtagctgggattacaggtgcccgccaccatgcccggctaattttatatttttagtagagaccaggtttcagcaagttggtcaggctagtctcgaa

SEQ ID NO: 85639 - DNA, 122 bp, Homo sapiens
ggtgctggggagcacctggggggtctgagggaggtaccagcattcagccctctccagaatcggcagccactctccttcccacagacatgggatccgctgtaactctgtcctcccagggttca

SEQ ID NO: 85640 - DNA, 122 bp, Homo sapiens
tgacacccctgggtcctagaatgctgctgggggcgggagaccggagaagaagcaggtgcacggggaggtgggtgtcctgccctctgcgaggagcccaccccctggaccttctcctagcgcta

SEQ ID NO: 85641 - DNA, 122 bp, Homo sapiens
aacactgaggtcaatagcaacaatttaagcaaagagtaatagggcttgaattaaagcaaacgcaatagagaggacgtgacaaaactgtgagccttttaggagggagaattggcagactttag

SEQ ID NO: 85642 - DNA, 122 bp, Homo sapiens
tgatagggcctctgaaatacattgtcgtacatgcctcctgaaggggctggctgtttctatcggcgtccctgatagggcctctgaaacacgttgtcgtacctgcctcccgaaggggctggctg

SEQ ID NO: 85643 - DNA, 122 bp, Homo sapiens
ccaatccagagggggctttccagcgagtccccgcccccttccgacccaccaatcacgcagcgcctctggccgcccaatctcctattacccaggctgagttggcgggtcgcagctgctggtag

SEQ ID NO: 85644 - DNA, 122 bp, Homo sapiens
acgctgggcccgggcgcgggagaagaaaagagcagcggcccgctttgtgcggcggattagcggcccatacagctccggggttggaaggttacgctgggcaatgaggtttttgttccgtgatt

SEQ ID NO: 85645 - DNA, 122 bp, Homo sapiens
ctgatgacgaggaactgctgtcatccccatcttacagatgaggaagctgaggctcggaggcggaggggggtcctccaccttgtttggggtcccctggtcagaactggaaggtgaacagcaca

SEQ ID NO: 85646 - DNA, 122 bp, Homo sapiens
ggtctgcaggagcaggcgccggcctggcagcgggcttggtgcccagaacccagccacagccggaggtcccaatgtggctgcccctcccgccaaagccgcctcccgaagtaaacaggacagcc

SEQ ID NO: 85647 - DNA, 122 bp, Homo sapiens
gccatggaggcgtcggagaaagccaggttcacaaggaagtagttggtgacagtcctcatgcgcttgtgggccaggatgatccagatgacgatgagatttcccaaaactgccactgccaccac

SEQ ID NO: 85648 - DNA, 122 bp, Homo sapiens
tcacattggcttgaaattatgtggccacctctgtgttcatcaatcaaactatgaagtcatcgtgaaccactctgtgtgtggtatgcgggtgtggagaggggattataacctgacactgaagg

SEQ ID NO: 85649 - DNA, 122 bp, Homo sapiens
ctgtctctctcgtgcatatgtgtctgtgggtctccctgtgggttctccccagcctctctccgcgccagctcttttaagcatggtgagcctctgcgattgattggctgatctctaagccactc

SEQ ID NO: 85650 - DNA, 122 bp, Homo sapiens
agcccagcgccggaacgggctttttcatgatgttcctgcgttgtgtttacagcctccctgcgaggggttcgcacgcacaggcggacctcgttttgttgcgccttgctctattgtgcctcgca

SEQ ID NO: 85651 - DNA, 122 bp, Homo sapiens
tcttggcttccgagagtcctccttcgtcttgggggcagaacgggagggcagttataccctcgctgtttctacaagaggctgggctcctggcctcctgctttaggtgggattgatgagcatcg

SEQ ID NO: 85652 - DNA, 122 bp, Homo sapiens
acacagaccccgctccgggccagccccgcagggagactaccagggctggcggtagctgggcgtggtcgggtcgggggcggctgtgggcggccggcaggcagcgcgcggggcagccctcggca

SEQ ID NO: 85653 - DNA, 122 bp, Homo sapiens
tgctgtggtgggagggtgtgtgtggtgacactcaggaacacggtcgggccagtcctgctgcggtgggagggtgtgcgtggtgacactcagaaacacggtcgggccagtcctgcagggttgag

SEQ ID NO: 85654 - DNA, 122 bp, Homo sapiens
cccttcctgctcatcctggtgtgcacggctccggagaacctgaaccagagaaacgccattcgggcttcgtggggcgggctgcgcgaggcccgggggctcagggtacagacgctattcttgct

SEQ ID NO: 85655 - DNA, 122 bp, Homo sapiens
cacccagggacagggaggcccagtgccggctgtggagttacccagaccttacggtaaaaacgcatcaccctgaatgggggccaggccaggcatcggcccaagccggccctgcccagcggctg

SEQ ID NO: 85656 - DNA, 122 bp, Homo sapiens
cgccgtgccctctgcacagacgtgccaccacgagggtgcgttctcctgctgagggacatgcgagctacattgcatcttcaccacgacctgtaagctgctacccatatttttgcataagtgca

SEQ ID NO: 85657 - DNA, 122 bp, Homo sapiens
gcagcaagaggaggggcgggcgctgcggcggggcttgttcggtgcggacaactggattcccgagtccgtaacttgggccccggagcgacgcaagggtcgggccccagccagccagggcaggt

SEQ ID NO: 85658 - DNA, 122 bp, Homo sapiens
actcacaggcaacagaagagaggcaacgcccactcccaagtcccttcaacaaaacacccacgcaggaggtggcagctctaggtgcacagtcgcagcctcccactggctggagggcctgtgag

SEQ ID NO: 85659 - DNA, 122 bp, Homo sapiens
tatcagaacattcttgtatacaaaattccagaccagttttgttgccaacataattctcatcgttttacccagttcagaactagttgtgtttgttggatgtaaaactgagaaaaagagttagt

SEQ ID NO: 85660 - DNA, 122 bp, Homo sapiens
gaggtctcactcgggttgtgggcacctccgggtaggtgacggcccactgggaaggggcgccgaggtcggggctcatgttcttcatcttgtttgcttttgtcagtatttatctgactggacac

SEQ ID NO: 85661 - DNA, 122 bp, Homo sapiens
gctgaagatgatgaccttcttccaaggcctctagagccatcagcctgtgccaggcaccctcgacttgcctagaggcccccaaaagttgcagtccacatcagaggcagagtcagaggcctcca

SEQ ID NO: 85662 - DNA, 122 bp, Homo sapiens
cttatgcaaataaggtgaagagttgaagtcttgtgtctgattggtagttattcagggtaacgtcagaggtcaggtctgcccaatcaggattcgcaaatccagaagacgcactactattggtt

SEQ ID NO: 85663 - DNA, 122 bp, Homo sapiens
ggacgtaggaaatccttctaagagcccccttgattgtcagaggaattagcggggatctgacgtcttcgagataaaatgggggttcgccccctccttgggcacccctcctctgccctgaggaa

SEQ ID NO: 85664 - DNA, 122 bp, Homo sapiens
gagacccccggacttaggctccggccccttgtctcatccccctcccaggtcttctcattgcgggggggactttccctaacaatggggctcagtgaggcctctgtgtctcacagctccccttc

SEQ ID NO: 85665 - DNA, 122 bp, Homo sapiens
ctggggcttaaggaggaaggagctgggggcctgaactccaggtcctgagggaggaagaggcgggcaggagctcagaatcctgggccccagtttggagcatatgccaagggcaggcaaacagc

SEQ ID NO: 85666 - DNA, 122 bp, Homo sapiens
gcagcatcttggccgtcccctgaggagagcgttagggcctggtgacggggggaggtggtgcggtccccactgtgcggcctgccctcgttgcatcccccaaccttggccccagcttctcgagc

SEQ ID NO: 85667 - DNA, 122 bp, Homo sapiens
ccaaacttcagcaggcttttctgtggacaccagcactggccttcatctgcttgtttgctacgtatttcttaacttatacgtattatttatggttactataggttgtgcaactttaaattgtc

SEQ ID NO: 85668 - DNA, 122 bp, Homo sapiens
tctggaagctgggaagtctcaaggtgccaacagtttcatttcctggtgagggctctcttccgggcctgcagacggctgtcttctcactgtgtcctcacatggtggagagagagatcatctct

SEQ ID NO: 85669 - DNA, 122 bp, Homo sapiens
tgaggacaccatccggcgcatcgaggagctcaacgacctggacatgcagctgtatgactacgccaaggacctcttccagcagcactaccagtacaagcggcagctggagcgcagggagcagc

SEQ ID NO: 85670 - DNA, 122 bp, Homo sapiens
ggaggacgccgcgggagcccgggttcgaggctgggctgtggggctgcgggggcgcacgggcgaggtaggcggggcgcggggcccccgcggcggcacaaagaggccggccgcggcagttttga

SEQ ID NO: 85671 - DNA, 122 bp, Homo sapiens
acctagggcgcaatggaatattccattgcccctcctgtcctgggtctgtgttgcggggaacgctcgcgcggttgccagagaaagccccggacgtgacggatttgcgcgaccccaagcagccc

SEQ ID NO: 85672 - DNA, 122 bp, Homo sapiens
tccggcgctgtctcggaggcctcccgtcccctcccttgtccgtcttctaactcttccccacgccaggtccgtcaagcctaagtccttgagttccgggtccgggcagcagagaaaggaagtcc

SEQ ID NO: 85673 - DNA, 122 bp, Homo sapiens
agcagagcctgtttgtaatgcttctttacaccgtaccctaattggagcttgcggtggggccgttcgcccagcctagaactgccctaaccccgcagcgcgggtcctcttaccagagccctggc

SEQ ID NO: 85674 - DNA, 122 bp, Homo sapiens
agacctgtgaggccgcggccgccgccgcccccgcggggccatggtgccgctctccgctctcgagcgactggaagctcccgccaagcccctcgccgctccgaacagccaatccgggccgagca

SEQ ID NO: 85675 - DNA, 122 bp, Homo sapiens
ggcttgtatccaactaaaaagattacaataatgctgctagaagtcatactatattctggccgtcagctacaaagtaggaaaagtcagtaaccatgaaaatatcctggaagttagaggatctg

SEQ ID NO: 85676 - DNA, 122 bp, Homo sapiens
ggctgaattaaaactcccaccaagagcagacaactaccttgcctcttccccactcgttttcgggtcttccacagagcagccagagcctcagaggcccttgagagtttcctccactcctccct

SEQ ID NO: 85677 - DNA, 122 bp, Homo sapiens
ccatgggtgacagcagctgggtcccttgggtgagagctgtgggccacctcctacagctaccgctctggctgggttcccctaactaacagggccttcctggcccatttaggactgaagatggt

SEQ ID NO: 85678 - DNA, 122 bp, Homo sapiens
tcatctgtttcttgcatgtgggttgtgtctcaactcaagtttaagttagatttggaagggcggaaactataggagttgcagcttcagtggagaaaagagcatttcctactagttatggcttc

SEQ ID NO: 85679 - DNA, 122 bp, Homo sapiens
aaaaccagtccttgatgccaaaaatgttggggacctcttatctagagtcaaatacctcaccgaaggactggcagtggaaatattggagcaaaacagttacagtaaaaggcactcaaatttca

SEQ ID NO: 85680 - DNA, 122 bp, Homo sapiens
accgctacaccttgcttttttcacttcatagcaaatttttgcaatctttgcatgttagtacgtagaaagcttccttattcttttttcataactgattacgcctagctttagaacattttcag

SEQ ID NO: 85681 - DNA, 122 bp, Homo sapiens
ccattagctgtccccgcgcgacagaggcggtgcgcggactacgcctcccggcgtgcatcgcgcggaccccgccccatgtgtcccattggcttctgggaaaccgagtgcggttgccttcccgc

SEQ ID NO: 85682 - DNA, 122 bp, Homo sapiens
ccttactgtccagcctctcctgatctctgttggcaccttagcccagccaatcctgtaccacgtgcacagggaacctgcctgcctaggttttttccacaggaagctccctggtcctgggtgga

SEQ ID NO: 85683 - DNA, 122 bp, Homo sapiens
acccgccacgcatgcactgtcttactcctgcgggctacccgctacacacgcactctaacccgccacacatgcactgtcttactcctgtgggctgcctgctacacatgcactctaacctgcca

SEQ ID NO: 85684 - DNA, 122 bp, Homo sapiens
gagcatcccagggcagctggtgagcctgccccccggtggtctgctcgctgggctggaaagcggacctggagtgggagggagctcagcctcctgcgtgttccggggggtccctgctacccctt

SEQ ID NO: 85685 - DNA, 122 bp, Homo sapiens
gtatttgataagaagcgttttcgagttgggcacacgatgtggattcgattcttctaacaacgtggttgtggcgcagtctctcccctcgtcgcgggattcagaatcctggcgaaaacccgaac

SEQ ID NO: 85686 - DNA, 122 bp, Homo sapiens
gggccctcctataagtgatctactgaggatggaactgagccctggcaggatgagaatgaacgggcagcttaagaggcccagagcctctcctcaagagaaaaaggccaggccacagttagaag

SEQ ID NO: 85687 - DNA, 122 bp, Homo sapiens
cttctctccctgttcccttctctgccctccacaggtgagaacaagtgtccggggccgccccgtggggccccaggctgcccgccctgaaactgcctcgctgtgtgcccttgggcaaccccgcc

SEQ ID NO: 85688 - DNA, 122 bp, Homo sapiens
gggactctgggaactcggagcctgtaacctactatggcatccagtaccgcgcagcgggcacggagggcccctttcaggaggtggatggtgtggccaccacccgctacagcattggcggcctc

SEQ ID NO: 85689 - DNA, 122 bp, Homo sapiens
atccctagcagggtccagtgtagaggtgtaaaccaaagagcgaccgcagcaggtctcaatcgattcacagtttatttatccaaggacacaccctggaaaaacaaacacaaatcgcaggagca

SEQ ID NO: 85690 - DNA, 122 bp, Homo sapiens
agccccgtggtgcttctctacgggagggagggagggagaatccggccggacagatctgcgcgtatcctggagccggcccagttgtgaactaggagagctttgggacctctgtcccaagcaag

SEQ ID NO: 85691 - DNA, 122 bp, Homo sapiens
cagagtccagggctctgcggggcggggttcccccatgccagagggtagggcgctttcaggcgagggtcttggcgtgcagtagttcagggtgcggtggggcaaggatagtccagatctccatg

SEQ ID NO: 85692 - DNA, 122 bp, Homo sapiens
aatggctgggagtcaggagacccaggttccaattctggcctctggccctttctggcccctcggcctttcctatgaattaagagggtcagcaggtgatctagagggccctcagacttgggaag

SEQ ID NO: 85693 - DNA, 122 bp, Homo sapiens
caccatctcagtaacttgtgcatcatatttaagattacagccctaccagctactcccacccgcaccacatacattgttctcccctccccgcagcatcttctaacatttgcttattacatcta

SEQ ID NO: 85694 - DNA, 122 bp, Homo sapiens
gttaagtcacaaggcaaaagggagttaaaactagaagagcaatttaagttgctaatcagtcgatcttgagatgggaagaataccctagattacccatgtgggtgcaatgtaatgacaagggt

SEQ ID NO: 85695 - DNA, 122 bp, Homo sapiens
aaattgtggggcccgcggcctcggaacttaggccgggccggcgtccatgggacttgccggcgggcaagaatcattttgttgtcccagcgctggggccacgaagtccggctcctggggaaata

SEQ ID NO: 85696 - DNA, 122 bp, Homo sapiens
tgcaaaagtaattgctgtttttgccattgaaagtaatggcaggcagggcatggtggctcacgcctgtaatcccagcactttgggaggccgaggtgggcagatcacgaggtcaggagttcaag

SEQ ID NO: 85697 - DNA, 122 bp, Homo sapiens
caggaagctctagcagctggcggcctcggtcccagaagacatgggtcctgagggggaagacgggacactgggagctgagccagcccagccctccaaggcagcctggaagctcaggcctcttc

SEQ ID NO: 85698 - DNA, 122 bp, Homo sapiens
gtcctggccgctgggaaggctcccggggaaagtgggattcacaaaataggaactcatttgcgcgcccctctgcaggactgtgatttgttgtgtattagtacatctggctataactattagta

SEQ ID NO: 85699 - DNA, 122 bp, Homo sapiens
gtcctttagtagaagtcagggcaggcaccgcggctccacgcttactttcgagggtgctggcgggtgtggctggagctcactctcactgccggaagtgaggagcctctccaactcactcaggg

SEQ ID NO: 85700 - DNA, 122 bp, Homo sapiens
caataggggcggggaggcgtcccaaggcagaaggaattctgtaagcggcagtttggtgagcgcgaaggcgcagctgcgagtggcatctgctggggtgaggcttgaagagccgcgcacagcca

SEQ ID NO: 85701 - DNA, 122 bp, Homo sapiens
cgggataacgtggggctaggacactgacagcctttgatggaggaacccaagaaaggcgcgcgacaatggtagaagtgagagctttgcttataaactgggaaggctttcaggctacctttttc

SEQ ID NO: 85702 - DNA, 122 bp, Homo sapiens
tggggcaccgtccccggcccgcccggccccgccatggcccggccgcagaggactccggcgcgcagtcccgatagcatcgtcgaggtgaagagcaaagtaagggctcctccggcctcggccct

SEQ ID NO: 85703 - DNA, 122 bp, Homo sapiens
tgtcctttgagaaagaaataattgtttgagcgcagagtaaaataaggctccttcatgtggcgtattgggccatagcctataattggttagaacctcctattttaattggaattctggatctt

SEQ ID NO: 85704 - DNA, 122 bp, Homo sapiens
ctgggcctctcctgggtctcgatctgccggatgatgctctccatccaggagaggaggtcacgggccatgctgaagaagcggaatttatccgccgtgtccactagctgggtccggcgcccggc

SEQ ID NO: 85705 - DNA, 122 bp, Homo sapiens
cacttccgcagttgagactgactctgcctggaagtcaaggggttggcaccagccccctgtcgcctgcccaggtgtcgtcccccaccacaaggcggtacctggttcctcctccaaaatgcctg

SEQ ID NO: 85706 - DNA, 122 bp, Homo sapiens
atgcagactggtctcctttgagtaggagattttcatctgatttatgacagtcaacctccacgttagatttactctgagcctaagtcacagcctaatgagttttgaacaaatgggctgccttc

SEQ ID NO: 85707 - DNA, 122 bp, Homo sapiens
ccgtctcttgccggaaggtgcgagttagtgcgctcgattgtgggcgggggcggaaagaggcgcgttttaaagtggtaacagatggttttcttatccaataggattaaaaaatttgtccttac

SEQ ID NO: 85708 - DNA, 122 bp, Homo sapiens
ggactgaggctggaggggacattcctgccagcccggggcccatcccctggtgccatcattcggtccccacgtcccctgctgttccctgtgctctggctcagggtgggattcacagtgagggt

SEQ ID NO: 85709 - DNA, 122 bp, Homo sapiens
gcaaatggaaatgtgacccccagcactagcccgctccaggaagtcctgcgaattcgaaatcgactgttgcagagaaagaagactgctggtgggctctcttttgctgccttcgcaaggctctg

SEQ ID NO: 85710 - DNA, 122 bp, Homo sapiens
gtggagccctccggggacagggtaaggttgggtaaccgtgggcgggggctcctccaggggcgggggtggggtaacggcgggcggggggcactcaagcgacagggcaggggcgggaaggccgc

SEQ ID NO: 85711 - DNA, 122 bp, Homo sapiens
ggaggccgagcctccggggccgccgccgcctcctccgcctccgccgccgggctccgcgaacgagctagtccgcgccctgcccgagcccccagggccgcctcccgaaggcccgccgccgctca

SEQ ID NO: 85712 - DNA, 122 bp, Homo sapiens
ggtcacacagctaggatgttgcagggacacatctggatcccgtgtgcccggtgttcaagacggcctacctggaccatggcccccacgatcttccgggcttcctggtagagcctctccccatc

SEQ ID NO: 85713 - DNA, 122 bp, Homo sapiens
aaatgtttcccagtgggctagcagcttcttagagggactgggagcgcctcccctcagctccgccccccactccagctcccatgtatggaaaataggggtggagcgcgctctgccatgctcgg

SEQ ID NO: 85714 - DNA, 122 bp, Homo sapiens
gacagatatggtgaaaatgaagaagactctaaattgggctcaagtttgagaagagagaaccgctaaacaggggagtaaagactccagtaaccctcaagcaaagaagagttgagcacaaggag

SEQ ID NO: 85715 - DNA, 122 bp, Homo sapiens
taaatttaattgaagtttctgatataagagatgtgactattggccgggcacagtggctcacgcctataatcccagcacttcaggaggccgaggcaggcggatcacctgaggtcaggagtttg

SEQ ID NO: 85716 - DNA, 122 bp, Homo sapiens
aggcagtcgaagctctcgcggctgccatccaggtgaaagcggccggcctgaaagtgcacgcggatgctcgtgggtcccgaggccatcttcacgctaagggcgaaaaagcagttccgctggcg

SEQ ID NO: 85717 - DNA, 122 bp, Homo sapiens
atctggccagggggacttatccagggtaaaaccccaccctctccgccttccccactccctcgcccctgtcagcagtgactctctccacagccactctgctctgggctgtgttgaaagtagaa

SEQ ID NO: 85718 - DNA, 122 bp, Homo sapiens
agagtaaaggcacatgtaatatgtctgttgctacaggaagttttatgatctgaccatcaccggtggcattttctcttctcatctcttctgtcttgcagctcacaaggtgacaaacttgctga

SEQ ID NO: 85719 - DNA, 122 bp, Homo sapiens
ggccccgccctccggcatctcattaaggcagtgtgttcctctcgccctgtcaataatctccgctcccagactactccgttcctccggatttcgatccccctttttctatctgtcaatcagcg

SEQ ID NO: 85720 - DNA, 122 bp, Homo sapiens
gcggggccggcgcgttgaggcaggagtgagcgcagcttcggcggtcaacgcgctttattccgaggggcttcagatacagatgaccccagccctgcatccgcccggaaggcgtccccttactc

SEQ ID NO: 85721 - DNA, 122 bp, Homo sapiens
tttccccaaattttgcgttgtaggactactgttcgaagatttttggaagaatactgagaacggcataaagtgaagatcgacatttaaaaaatgaggtgaaagaaagctatagtggcatagaa

SEQ ID NO: 85722 - DNA, 122 bp, Homo sapiens
tcggctggccgctgctggagccgcagagcagctgccaaactgcagtccttcgagtccctgcgagggcggccggagctgcaaggaccccgccgccagggggcgcccgccggccgcgccctcac

SEQ ID NO: 85723 - DNA, 122 bp, Homo sapiens
ctttcccatggggccctggtgtgcccagccccccacttcatgtctgacccacgtgctctccggctgacctcctgggactcgcacctggcccccacttggtatctgagccacgtgcttcccgg

SEQ ID NO: 85724 - DNA, 122 bp, Homo sapiens
tccacgtgtgtgtgcccctgcctgaggtggaggcagctcttgggtgcttgttctaccccacgctttctctctgtgattcagtttcagtatctctcgacctggctccaaaggccactgactca

SEQ ID NO: 85725 - DNA, 122 bp, Homo sapiens
aggtcctgcaggtctatggtggtgagggctgcgcggggagaccgggagacacgcgccgggcgggccctgagcctctccgccaggctcgcagctaggacgtcagagcccgggggagagaagct

SEQ ID NO: 85726 - DNA, 122 bp, Homo sapiens
tctcgggaactgaagaaggcgatgcgtggaaatcgcaggtcttggtgcagcatgaagacccggacgggaatgatgttggggtcacacaggtggttgatgaagcggctgatgttgccatagta

SEQ ID NO: 85727 - DNA, 122 bp, Homo sapiens
ggaactcatgattgatgaagcactattccaggcagcaaggacacagtggcctacggaagacgctcttgaggaactcatgattgataaagcactgttccaggcagcaaggatgcagtggccta

SEQ ID NO: 85728 - DNA, 122 bp, Homo sapiens
aattgccactacccatgtacagcacacagtaatgatcagagtcatcatctactgagtccccgtgatggtgagggcagctttgttcccaaggatggagccagagaagcgaccagggaccccag

SEQ ID NO: 85729 - DNA, 122 bp, Homo sapiens
tcagcttcctccttggtcaaccttgactcgttggtcaaggcaccccaggttgcaaagacccggaaccccttcctgacaggtaagatatgcccttgtccctcaacccaggggctcctgctttc

SEQ ID NO: 85730 - DNA, 122 bp, Homo sapiens
agaaccaggggtatccccctgggcaaattcactcgatttgcattttagagggccatcagacgtatctatccccatccaactgcagacattgatttaaaaaggcaaattcccagtttcccgca

SEQ ID NO: 85731 - DNA, 122 bp, Homo sapiens
tccgggggttctgaacacgaatgccgtgtgggggttccttaaagagaccagagaccggcccggcgcggtggctcacgcctgtaatcccagcactttgggaggccgaggcgggcggatcacgg

SEQ ID NO: 85732 - DNA, 122 bp, Homo sapiens
atttgacgcaccagctctccaaatgaccctggccctcccatttgctgttcagcccaagtgcggagattggctatgaaccctgtaaacaggcctctgacccccagaggctgatggctggccaa

SEQ ID NO: 85733 - DNA, 122 bp, Homo sapiens
ggcgccgcattagcatctccgaagccttcctgtgtgttcttttgtgctcattttccagcccgaatgctcggcacatcccggaccgcggacggagccgcaggagccaccgcggccgaacgtag

SEQ ID NO: 85734 - DNA, 122 bp, Homo sapiens
tgcccgaagttcgatcttgttggctccagaatccctaggacatagtgcaggagtgaatcccgagctggagctgggtgggctgtggggtcattccagattgattaacctccgacctctgaagt

SEQ ID NO: 85735 - DNA, 122 bp, Homo sapiens
agggggcagaagtgtagggcaacttaaatccgcaactacccgctgttgcccaggctccaacgccaggccgagcatttcagaagtcataagttccatctctctgccgcagccgagacagattg

SEQ ID NO: 85736 - DNA, 122 bp, Homo sapiens
tcctccttgtgttacctgcccagacatttcagcggccccaagggccccacaacatcatcacggagcttcaaagttaagtggtggcagagagaaactctaaagtccgcgagatctgtcccctc

SEQ ID NO: 85737 - DNA, 122 bp, Homo sapiens
ccctcctcccctctcgattccccttgagcgggctggggcgccctgcctggtttcagcgcccgttccagctgggagattgggattcagccctgatgtggattctccagccatcatcctgccct

SEQ ID NO: 85738 - DNA, 122 bp, Homo sapiens
gtgcgaggtcagggcagagccaccgaattgtctgctcaaacttcaagtaggacccccaagcgggctggaagtgcgtgagggcgcgcaggacctccgcccgccgtcgctcccggcgcggcgcc

SEQ ID NO: 85739 - DNA, 122 bp, Homo sapiens
tcgcaacgctgcctggtcgcacccaggaaccatctttgtgggtggggttcctcgtctccgcggacaggctgctagtgagccgcagctcctccatccggaagccagggatcttcatcttgccg

SEQ ID NO: 85740 - DNA, 122 bp, Homo sapiens
cccccgccctccccagcccgcctcagggaagcgagcccgggcgccggcgggcggccgtcgcgtctgacagaccactgcagaccacgggccgaggcccagcgcccgtccgcagcgcggccggc

SEQ ID NO: 85741 - DNA, 122 bp, Homo sapiens
aacataacttatttaaaaacatttatatttactcagaacttttccaattttgcagtttcacgatcagcctccaaaaagttgtgctagtgtgtgttcagaattcattaaaatctatccagcat

SEQ ID NO: 85742 - DNA, 122 bp, Homo sapiens
taagtcaccatattctgggccagggcaagcaggggtctccctgaccccacgctgttcccacgcccagctctcgggctgaaggcgaattaaggaagcctcctgcacaggctctgagagaactg

SEQ ID NO: 85743 - DNA, 122 bp, Homo sapiens
gagagtgagtctcccttaactttgccatttccctcacaccatttggggataaaacttgggcgtctctctgcctcgactggtcactccacttcctggagctccagaaactccctcagcacctg

SEQ ID NO: 85744 - DNA, 122 bp, Homo sapiens
aggcgacagacagcagagtttgtgtagaacatccctaagtacttcactcaactaagacatcgcttttagagttaaaattcttagaatagtccaacttctgtgaccttgagcaaatctttctg

SEQ ID NO: 85745 - DNA, 122 bp, Homo sapiens
gcgcggggaaggagagaggtccccggagctcgcccgggacaacagggcccccggaggcggcggtgaggactgtgcctgcctcactctgcagcccctattggggccactggggaaaaggccca

SEQ ID NO: 85746 - DNA, 122 bp, Homo sapiens
ccagcagggatgcagtctgtcagtggctgtttacaggaaagttcaggcagggttgagcagcgtacttgctgtttctaggaagtatttctggtccacgtgcctcgctcccatcctccctccca

SEQ ID NO: 85747 - DNA, 122 bp, Homo sapiens
tccggtccactcagcggggcctgggaaacactgttctggaagtggacaggctggattcctcgctggtcctgccacgtctctctgagcggaggcccgggttcgctcagttcccatccagggta

SEQ ID NO: 85748 - DNA, 122 bp, Homo sapiens
atccgccgcggggcctacgccttgcctgcaggcctctcggcccctgcccgctgtctggttcgctgcctccttcgtcgggagccagctgaacggctcacagccacaggcatcctcctgcaccc

SEQ ID NO: 85749 - DNA, 122 bp, Homo sapiens
gagaaggagcagaggtctgagtcagagagaggtttgaagatgttacattgccagatttaacgtgtgaggaagaggcaacttctagaagctggaaagggcaagaacataggttgtgatctaga

SEQ ID NO: 85750 - DNA, 122 bp, Homo sapiens
aaagaaaaaccctaccctaccctcatttctataactactatagagcacggtgcttactaacgtggtgttcaacagatgaatgaatataatcttatactgatgttgtattaaggcagaactct

SEQ ID NO: 85751 - DNA, 122 bp, Homo sapiens
aaatctcaactgcacgacccctactatgccccaattcagcaggaagcagttaagagctgtcgttggccaacgtccccaacagcacttgggttttcctgttgagagggggtactgagagacag

SEQ ID NO: 85752 - DNA, 122 bp, Homo sapiens
cccgtagggacttgcagatctgccagacctagcagtgagaccactgctcccactgaatggcgccgcctgcgggctggcccaagctctatgcaccggctttatctcattttctcctcaccgtt

SEQ ID NO: 85753 - DNA, 122 bp, Homo sapiens
gatctgtgtggccagcatctactctcctgtccccaaggagctgtggagcacagctggccacggaatgagaacccagcttccggcccagggccacgccagtgcgtgggggcagagcggaggat

SEQ ID NO: 85754 - DNA, 122 bp, Homo sapiens
aatgaccccatgaaagccagcacaggggacaggtttgatctggactcctgtcttattgttcgttaatttacaataaaaaccttcttttctcaaaaacccaaattgggcagtgagcttctttt

SEQ ID NO: 85755 - DNA, 122 bp, Homo sapiens
gcccggcccagcccgggtgggaaaaaagggaaagaaggaggtgatggcggagttttcggacgctgttacggaagaaaccttgaaaaagcaggtggctgaggcctggagccgcaggacgccgt

SEQ ID NO: 85756 - DNA, 122 bp, Homo sapiens
ttgccggtgccctcagagtcttccagactgttctctgcacccacaaggggtttccagtagcggcccttaccctgtccccacagtcctccctgccctctgccgcacacactcaccctccccgc

SEQ ID NO: 85757 - DNA, 122 bp, Homo sapiens
tgacgttacgtactggaagtcccaggaggaatgcccagcaagtggaatccaagacgttctcgccttctcggggacagggccatcaccaggattcggaaaggaacagggaggttcggtttgtg

SEQ ID NO: 85758 - DNA, 122 bp, Homo sapiens
gctcggagctccccagagcctcccaggtctcactcttgtgggagggcttgaggcaatccccgggtcccctcgccggctgctgactcacggggggctcagcgtagggtgggagagtgggccga

SEQ ID NO: 85759 - DNA, 122 bp, Homo sapiens
gcgggtctcgggcgcctccactgcgcacctgtgaactgggacgggcgctccttgagcaggcgtggcgctgctgtgcagctgctgtgtgtcccactgcccctggggacttgcgttgtaggaga

SEQ ID NO: 85760 - DNA, 122 bp, Homo sapiens
attccaaacatagcctgttttagagaaatgaatggcgttgtcatcgaaaaaacacagactcgattgtgacagaaataccgccacaaacgcaggtacagggacagccgacaccgagaaccaag

SEQ ID NO: 85761 - DNA, 122 bp, Homo sapiens
ttgggcggcaccgtctgcaggtatttcctcacccgtcagcccctcgtagagcaggagaaacggaacaaacacggaacaaatagtggctgcttctcgccagtccgtttgtgacataacattcc

SEQ ID NO: 85762 - DNA, 122 bp, Homo sapiens
cgcgccgttggaacccgccaggctgttggacaggcccatggagttgggcggcggaccggccgccaggctgcactgggacagcgactgcgccatggcctgctgcctgcccagcgccggcggca

SEQ ID NO: 85763 - DNA, 122 bp, Homo sapiens
ttatcaagtttaaacacaaggatttgccagggagggcactcaggaaaccacagacgcggccgttggcaccaccaggagctgaggggtttctcgggcacaggatccccccagcggctcttgct

SEQ ID NO: 85764 - DNA, 122 bp, Homo sapiens
agtccctgggagaccccaaccgctttctcctctgcggccaagagtccaggatgcatcttccgaagaggctcgtgcactggtctcagcgaccctgttcggatccctgcagagtccgactgcag

SEQ ID NO: 85765 - DNA, 122 bp, Homo sapiens
aaggtggggcgctggggcgcaggggcgcagcgggcgctggggacacacctgctggaactgcgcgcgggatccgcctcaccccaccttactccgccttctcctccctttcctccggcatcttc

SEQ ID NO: 85766 - DNA, 122 bp, Homo sapiens
gagagggttagggagatgtgctgatggcatgcacgacctcccctagatactccaagaccccggcttgtgaggggagtgtgtgtggagagggtactagtcctgccttcacctcacctctgggg

SEQ ID NO: 85767 - DNA, 122 bp, Homo sapiens
ctgctgaggggaagagggggtctccgctcttcctcagtgcactctctgactgaagcccggcgcgtggggtgcagcgggagtgcgaggggactggacaggtgggaagatgggaatgaggaccg

SEQ ID NO: 85768 - DNA, 122 bp, Homo sapiens
ttcatctctcagccctactttaacttaaactgacctaattacagcccacaccagaagaagcggaagagctgaaggagcgcttctgccacctagtggaaagatccttgaactgtgcatggaga

SEQ ID NO: 85769 - DNA, 122 bp, Homo sapiens
ccaaccccgggctctgggagtggtgggcggggccagggcagctgcgctggggggcctggccgcagaggtggagacacccgccaggggccaccctgccccgccctccgcatttgcggcgtccg

SEQ ID NO: 85770 - DNA, 122 bp, Homo sapiens
aacaaggctcctatttgacccagccaaaactaagtgaataaatacccaaactcaaattgtcgtttgagagccaatcagcttttctttttttttttaggatacttttttctacttgttctgaa

SEQ ID NO: 85771 - DNA, 122 bp, Homo sapiens
cgggggcttgggacgcgaggggggggggaggggaggggaggggaggggaggggagggaggcggctgcagcggatcctcctagccattccgggaccagtcgaggctgctgggagccagggcgg

SEQ ID NO: 85772 - DNA, 122 bp, Homo sapiens
cacgtgttaaaaattacaaggtcccttcttgcactccatgggtataaattcctgtcttcacgtcgggcatggtggctcacgcgtcatcccagcactttgggaggccgaggcgggcggatcac

SEQ ID NO: 85773 - DNA, 122 bp, Homo sapiens
gggtcaccccggagcgtgctcggctccccccgccctccccagtcgctgcccggggctcagcgaccgccgaccccgagagctgcagccttcacccagtggaaagctctagggcccggctccca

SEQ ID NO: 85774 - DNA, 122 bp, Homo sapiens
ccttcgtggagaccggcatcagcgtcatggtggcgcgcagcaatggcacggtgtccccctcggccttcctcggtaatctggggccctgggacagggagctagccctaggcaaagtagccgtc

SEQ ID NO: 85775 - DNA, 122 bp, Homo sapiens
catcttcaccaggggtccacggcagcagcacccagacacctgcacatgtgggcagttttccgggttgtggccccatccctccagatgctgccggagatccaagattcgcgggcctggagggt

SEQ ID NO: 85776 - DNA, 122 bp, Homo sapiens
gagcccgggacggtgggggcgggcggggcgggagtggcccggacaggacctttgtgtccgcgccttagactggcgggagagcggaacgcagagcgcgggacgtaggggccggggcggggcgg

SEQ ID NO: 85777 - DNA, 122 bp, Homo sapiens
gtcgtgaactgaactcaggaccctcctgtctgttgcggtgtgtgctgggggttagtgggtcgtgaactgaactcaggaccctcctgtctgttgcggtgtgtgttgggggtgggtgggtcgtg

SEQ ID NO: 85778 - DNA, 122 bp, Homo sapiens
ggcgcctgcaggatgggttaaggaaggcgacgagcaccagctgccctgctgaggctgtcccgacgtcacatgattctccaatcacatgatccctagaaatggggtgtggggcgagaggaagc

SEQ ID NO: 85779 - DNA, 122 bp, Homo sapiens
gccccaagggagggcggtggggtggctcgggcactgacctcttcccgtgtttgtccttcccggaaggcgggggcagggcccccatggggtcagggcaaagggtgaacttctgaggcctcagg

SEQ ID NO: 85780 - DNA, 122 bp, Homo sapiens
gcactgtcattagaatgttcagggcccaaagatttctagccagggttcttgctggtcatccgagcaccctcttcctcccacccaaaaggaaaaaaccattttaccaagagcttactatttgt

SEQ ID NO: 85781 - DNA, 122 bp, Homo sapiens
tctacaaatggtttagcgccaggttcccaacaagcgttacatgacgggtaagggggaagccgcctttctggccgcattccgtttcccaggaccaggggctctctgcactggggtcccagcgc

SEQ ID NO: 85782 - DNA, 122 bp, Homo sapiens
ggggcagagaccagccccccacagccaagagttattcagcccaaaacaccagcggtgccacggtcaggaagccccgatctggacaatgaaagtttcgcttccttggccccttccagctgcgg

SEQ ID NO: 85783 - DNA, 122 bp, Homo sapiens
ggggccgggtgctgggggcggggcctctggattgggcggttgctgggggcggggcctctgcggatggggctgggggcggggcctctgctgatggggccggcggctgggggcggggcctctgg

SEQ ID NO: 85784 - DNA, 122 bp, Homo sapiens
agtgagaagcgacacaaagctctcacaagtgtcctgctgatgcaacgccccatggcgcctcggctagactcctaccctctgtgcattagtcacgttaagattgacctagcaccgccgtcccg

SEQ ID NO: 85785 - DNA, 122 bp, Homo sapiens
tgttggttaagctggtcttgatccacctgcctcagcctcccaaagtgctgagattataggcgtaagccactgtgcctggtgtaatcttaactgctttttaggaaatggtgtaagaaaaggct

SEQ ID NO: 85786 - DNA, 122 bp, Homo sapiens
ggaattcagttcccccaaaggggataatcacacttctgttttgacaatttatcatttgtgcgtcctttctatgtaagaaaagtactcaaacataccttttagtcaaactcccaaactgcata

SEQ ID NO: 85787 - DNA, 122 bp, Homo sapiens
ttcatgttcttccagccttttttggttccccgaaatttcctgtcaggaaatttaccaacgcggaaatttacccacttctgtcagaaaactgatcagccatgtcttcgccacacgtgatgcca

SEQ ID NO: 85788 - DNA, 122 bp, Homo sapiens
tgaggcctgggtctgtctcctgggcctgtgaagtcattctaagggcagatggcctagcagcggaggggaagggcgctgctgggggacgggggagtcccccaagcctactggaggtggggtca

SEQ ID NO: 85789 - DNA, 122 bp, Homo sapiens
ttcggaagtcccatttaacaactgctcccagtacagcatgagaagtgacccagagcacagcgatcgcacgcgcagcgtgctctacagaaggtgcatccacagatggcgggccagccggctcc

SEQ ID NO: 85790 - DNA, 122 bp, Homo sapiens
aaaaacatactaaacagtgaaaatggatgacccagtccttagcctatgttatggagttagcgaagcaagctccagtgccctgtggcttagtcatacaataaatacttactgtcacacagtgg

SEQ ID NO: 85791 - DNA, 122 bp, Homo sapiens
cagacaccggaccgagtaggtgggggccaacttcaaagaaagtgtgagcgcccaggcgcgcgagtggaacaaaacctgtagcaagtaataaggaagtgcttgctcccgcccgcccttcccat

SEQ ID NO: 85792 - DNA, 122 bp, Homo sapiens
agacaaaggagggtggcaaagagaagggaggcccgaagcagactctttggatctgtaaggcgggcacattaccctaagaagtgctgcaagttaaaagtagctcttttttttttttcgtaatt

SEQ ID NO: 85793 - DNA, 122 bp, Homo sapiens
gccccccagccccgcccctccaccccccctcgcgtttccggtcccaggctcggtggaaggcggatggcggatgtccgagttagtgctgcctcactcactgcaaccgtaaaagggcaggagcg

SEQ ID NO: 85794 - DNA, 122 bp, Homo sapiens
caatgcattctaaagaattttattctctaaactctagaggtattctaaatgtaccagggacgcgccataggggtcatctatttgaggaggaagaaaaagcgggtgtgtgtgtgtgtgtgtgt

SEQ ID NO: 85795 - DNA, 122 bp, Homo sapiens
ccacgcaggtccacacccctccctctttcctgccggcatcctcaggtgactggcaggcgccgtcccggctcaaagaccgcagagcccgcgggtccccagctcatacattaaatatgtggagg

SEQ ID NO: 85796 - DNA, 122 bp, Homo sapiens
acctcccggactcaagggaccctccagcctcagcctcctgagtagctgggaccgcaggcacgtaccgttacacctagctaagtgtgtgtaagttgtgtgtgtgtctgtgtgtgtgtgtgtgg

SEQ ID NO: 85797 - DNA, 122 bp, Homo sapiens
agtcccgaatctgagtgttacataaagtaccgggtagtactccgctcggggtaggtcggccgcccccgcccagccccctccggccctcacttggagctggacaccgagtaggggccgactgc

SEQ ID NO: 85798 - DNA, 122 bp, Homo sapiens
cgccaggaaggtgtgaagaagaaggcagctgagtacctgaagcgggcagaggagatcctgcgcctgcacctgtctcaactcccaccctaacagggagtgggccattccctgggactctcgct

SEQ ID NO: 85799 - DNA, 122 bp, Homo sapiens
tcttcctgacagagatgaattagttacgggactaactccgcaaaggaagagattgggctccgttccctgaggctccctgagcagaaaccatgttacagagaacaagtaggggggttgtggtt

SEQ ID NO: 85800 - DNA, 122 bp, Homo sapiens
acaggcctccagcagcccatgcactccaggctctgaccacaaggccagtctggagtgatgcgtgtgggcagagtgaaggggcaggggtggagcagagcatggatccatagaacaagaaagaa

SEQ ID NO: 85801 - DNA, 122 bp, Homo sapiens
cgagaacagctcggttcagcagtttaaggaagcgatttcgaaacgcttcaaatcccaaaccgatcagctagtgctgatttttgccggaaaaatcttaaaagatcaagataccttgatccagc

SEQ ID NO: 85802 - DNA, 122 bp, Homo sapiens
cacgctttcctcacagccaatcgcccactggtgccccaccccttccgttctgggaaaactcgagcacccagaacggcttccggcgggagctgtgcagctccttatcatggtgagttggctgt

SEQ ID NO: 85803 - DNA, 122 bp, Homo sapiens
acacagtagcccaccaggacccacatagggtgatatctacataagactccagggcaataacgtcaacagctcggtaacccctgcgacaccctgacagtcctgccgtctggaagtgcctttgt

SEQ ID NO: 85804 - DNA, 122 bp, Homo sapiens
agcacacaccacccctgcagcccaagaagagtcccagccccacgccggctaccaccatggcggagaccaacaacgaatgtagcatcaaggtgctctgccgattccggcccctgaaccaggct

SEQ ID NO: 85805 - DNA, 122 bp, Homo sapiens
caccattctccctgcaaactctggagatgatgacatcttcccaatggtttccatagcatccgttcctgaagagcccccgtatggtccttggtcagggcgatccgcccagctcccctagaaag

SEQ ID NO: 85806 - DNA, 122 bp, Homo sapiens
tgcaccggacaggagggccacacaaggcagtgtgtgaccgagcacgcgcctgcaggcgtccgccctgagcaggctcaccacgtgcctggccatgtgatatcccaaacagtggggcctgccac

SEQ ID NO: 85807 - DNA, 122 bp, Homo sapiens
ggagcatgcgcagggccggctgcagccattctgccatccggcgcttgtgcaggtgccttccgcggagtcagtctaggaaacgtttccaggcgcctagtctttgcaatcaaaagaatcagaaa

SEQ ID NO: 85808 - DNA, 122 bp, Homo sapiens
agccacccgggaaggcctgcccagcgtagctgggctctgattggctgctttgaaagtctacgggctacccgattggtgaatccggggccctttagcgcggtgagtttgaaactgctcgcact

SEQ ID NO: 85809 - DNA, 122 bp, Homo sapiens
ctcggcttttcctccggtgcccctttgtctgccgattcaggggcttgctgggcaaacctgcgccaccgcgggctccggggaccggggtggagggcggtggcgggatttccccgctgttgggg

SEQ ID NO: 85810 - DNA, 122 bp, Homo sapiens
tcagcagcagcggtagagcagtgaccaggcgtctccgcgatgggccccggggacttccgccgctgcagagagagaatttcccaggggctccagggactcccaggtagagcggagctttggtt

SEQ ID NO: 85811 - DNA, 122 bp, Homo sapiens
ggagggtgggatgagcctcacacacgggatggggagcaaagccggttacgcgcacgggtgcgccccggcctgagccctgtggctggtgtccagtgcccccgccgggttccagccctgtcgca

SEQ ID NO: 85812 - DNA, 122 bp, Homo sapiens
gtcactgctgacgtgagtgcggcctgcaggcagccagtgtggatggactctcaggccctccgttgtgtgttaggggaccggaggagcagagaggttgcagcagccggccggcctctctcggt

SEQ ID NO: 85813 - DNA, 122 bp, Homo sapiens
agttttaaggctttttaaacaaccacgatgcacatcctccgggaggaaaggtggttaaaccgcttctggctttgagtctgggtggccccggtagtaagtttacgtgacaaccatggcaaggg

SEQ ID NO: 85814 - DNA, 122 bp, Homo sapiens
ttcttctccagagggggtcctcgaagggccgtctgtgctgaccaggtggccgtgctttgtcgtgggaggcctagggtctgcggatgggcgatgatggggtggggcttggaggagagtttgtg

SEQ ID NO: 85815 - DNA, 122 bp, Homo sapiens
aataactcaacctaaaaatcctttaggtgttctctgggggctggaaacagaggccggtggcgtggtgtgatgttcagcgttggccaggatcacttgcttcacccaggtgttgggcctgcaca

SEQ ID NO: 85816 - DNA, 122 bp, Homo sapiens
aagcactggcttcatggaagacaatgtttccacggacaagggttgggggaaagatggtttcggaatgaaatttccaccacaggtcagatattagactctcataaggaacatgcaacctagat

SEQ ID NO: 85817 - DNA, 122 bp, Homo sapiens
ctcagggaggcatctgcatgggaaaatgcaaaatgaaatgatttccatccacttctcccacgggcaccctccagagcctcatacgcacgtgaccttgtttgatacggtgtccggaatgtggt

SEQ ID NO: 85818 - DNA, 122 bp, Homo sapiens
ttcccacttgacgttgggggacacatttccattttgaagtattatgtagccctgagtaagcggctgagactagtttagactgtctctacctaaaggctgtcctgactttgtatcgtggcggt

SEQ ID NO: 85819 - DNA, 122 bp, Homo sapiens
ttcccagagcgagaggcagtgacactgagcgggcgcagggggccgagtcggagaccgtgccggagttcgggagcggcaacagagtgggcatagacactccgagcagcctcgccgtcgtctct

SEQ ID NO: 85820 - DNA, 122 bp, Homo sapiens
ttatgcactgcactcggggaatcaaaggtggagacagaaagaactatggctgttgtgacacgtcccccacggctccccggttggcagccactgccacccgcagggacttttctgtggcttcc

SEQ ID NO: 85821 - DNA, 122 bp, Homo sapiens
tgaagaattgagagagaatgaaagtgccacaaaaacaaaagaaaaaaaattgaggcgagtcgtggacatgatagacatgattttgcaaacaaggcacatctaggagaaaaggcgggagaaaa

SEQ ID NO: 85822 - DNA, 122 bp, Homo sapiens
tattgggcaggacaccgccctgcgcgatagtaactttgcccaacagcttgttgagcttctcgtcgtggatggcgagctgcaggcgtcggggggtgacgcgggtcttcttgtctcgggccgcg

SEQ ID NO: 85823 - DNA, 122 bp, Homo sapiens
gctttgactggataaggcccgggccatgctagctcataagaactaggaaggtgacacctccgggagttgggggcagagcagtgaagactcctagttctgccttatctgaatagcatttgtgg

SEQ ID NO: 85824 - DNA, 122 bp, Homo sapiens
ggtcccttggggaacccggggcaataatgcccttctctgcccttaatccttacagtgggccgggcacggtggcttacgcctgtaataccagcactttgggaggccgaggcgggcggatcacg

SEQ ID NO: 85825 - DNA, 122 bp, Homo sapiens
ctagagatccggaggaagccgcgccggtcttcccctgacatgcgtggcatgccggggctccgtaggaggtttgctatacctgggaggaccctggcattctaaatttcagctccgggaaagag

SEQ ID NO: 85826 - DNA, 122 bp, Homo sapiens
aagcagtctcggaaggatgtccggacctggcctggggacaaggtttacttaagaatcccacgataccgggagctgtcgccgctcactcagagttcagttcccactggatgccctttggtctg

SEQ ID NO: 85827 - DNA, 122 bp, Homo sapiens
cgaatgtgggaagagcttcagtcagcatgcgggcctcagctcccaccagagactccacaccggagagaagccatataagtgtaaggagtgtgggaaagccttcaaccacagctccaacttca

SEQ ID NO: 85828 - DNA, 122 bp, Homo sapiens
tcccttctcatttcatttggcgagtagtagaattggggtgggggatagcaagagatttggcgcttgcgctgcccccatttgcgcaccgatgataaaagatagaagagtttttttcttccctg

SEQ ID NO: 85829 - DNA, 122 bp, Homo sapiens
acttgaatgtgcacagggattacctgagatggagatcttgtcaaagtgcagactgaagcccgctgcagcagagcccttgggagggcccgtcaccactgacctgtacagaccctccgctatgt

SEQ ID NO: 85830 - DNA, 122 bp, Homo sapiens
aaggccaaggctgggaactgctatatttctacccacagatcattgaccagaacaattacacggccgaacccaaggcaaggggcggggaggcccactccacccgggagggggttgtggtgagg

SEQ ID NO: 85831 - DNA, 122 bp, Homo sapiens
gcagcgagcgctgacgtcaccagatctcgtgagagcagaagggcgcgatttggaggctcccgcgcttcggagacgccggcccttccgctcggagaggtactccctgcctctaactggtggcg

SEQ ID NO: 85832 - DNA, 122 bp, Homo sapiens
ctccaatggagctggccccattttcaaacatcttcccagatgactgtgttgtgcaggcagcgctgagaactgctgttctccacttcagcttattcctgtgtttgggactgagccagtgtggg

SEQ ID NO: 85833 - DNA, 122 bp, Homo sapiens
ccgcggccgcacccgcgctgccgacccggggcctcaccttcggccaggacccgccgcacccgcagccgcagctcgcccagttccaccgtctgccccacgaagtcactctggtcgcggccgga

SEQ ID NO: 85834 - DNA, 122 bp, Homo sapiens
gctgtggagttgtaatattttatgtttttgtagcctccacaatttaaatttgtctttgtacggtatctgagtggatcccttagagacagattggaacccagagggagaaaattatttgcatt

SEQ ID NO: 85835 - DNA, 122 bp, Homo sapiens
cctccaggatctctagacggaccctcagggcctgtacctctgaagcaaggactgggggctcggtgcctgggggacagccacagccagtggaagggggcaggttaatgcggtgggtgaatacc

SEQ ID NO: 85836 - DNA, 122 bp, Homo sapiens
gtttctcccccagtgggtgtcagcctcgcgggctaaatgaaaatgcggttccaggcatcccggtttggacccgtctccacccgggcacacggaactttctagcttgtagctagaactgagct

SEQ ID NO: 85837 - DNA, 122 bp, Homo sapiens
cttgcaggtgcctggaggtgtcaggcaggggaggaggaggccagtgatgacctttcccctcgtgccagccctcagaagaggtggaagtgcctgccgtatgcctttgatttatagtggagcag

SEQ ID NO: 85838 - DNA, 122 bp, Homo sapiens
tcaggaggcatcaggggcagagttgggggcccaggttaatcccacacagtctaccacctccgtcttccacaaggtcaggagataacggggaacctgggaggcgtcccagacactggacttcc

SEQ ID NO: 85839 - DNA, 122 bp, Homo sapiens
tcgtgcagatcttccaggcagcactgtacgcagcctcctgtaagtccgacttcctgaaagcgctctccaaggggcagaatgtgacggaggaggagtgcctggaaaagatccgcctcttccta

SEQ ID NO: 85840 - DNA, 122 bp, Homo sapiens
aggggcggccccaggcaggtgtgagaacctcagcgggcccaggatggtgctcagcaggggcggccccaggcaggtgtgggaacctcagcgggcccaggacggtgctcagcaggggcggcccc

SEQ ID NO: 85841 - DNA, 122 bp, Homo sapiens
ctgacatccatccgtacaatgagggccagtgtccactctagatccctaagctctgcaaagcgcagggcctgttatctgttttattcaagataaaaacgttcttcttggcctgaacgtttaac

SEQ ID NO: 85842 - DNA, 122 bp, Homo sapiens
ctggcctggggcaggagctgcccatgccatgtggctgccactggtgttccccgcctggcccggcccacagcagccagtgctcattcctgcacacactggtcctcctcggctgcccccaggac

SEQ ID NO: 85843 - DNA, 122 bp, Homo sapiens
tgcgggtctcaagtgcatgtggggcaagcccaaccccatcctggaccctcggcctcctcccgtccccaaaggcagacagacacttccctcggccttaagatcttgtagtttcttaaataagc

SEQ ID NO: 85844 - DNA, 122 bp, Homo sapiens
agggagagggggcggaatcggggcggtcccgggagcgccccgccccctccgcctccgcagcgttgacagccgcccgccaccgagagatcagctgtcagagatcagaggaagaggaaggggcg

SEQ ID NO: 85845 - DNA, 122 bp, Homo sapiens
ccagacccctggaggtcagctctgccgccacctgcacaaacacattccttcctagcaacacgctgggccacgggccaggcagggaggcagagcttgtgccacttctctgcccgctcagtgcc

SEQ ID NO: 85846 - DNA, 122 bp, Homo sapiens
actgtgcaactgcactgatatagccgagaacggtctccagcaacctgaaacacagaggctcgctcagcaaacggcagctgaaggcactcagagaacttgttcatgtctaccttatgctaaat

SEQ ID NO: 85847 - DNA, 122 bp, Homo sapiens
cagataatggtaaatgcttttgcacaaaaccccataagacttagaggcaagcagaaatgacgcaagtatgaaactcaagctggctgcccgctgtgctttgagtaatgaagtcccttgtctct

SEQ ID NO: 85848 - DNA, 122 bp, Homo sapiens
gcacaatatcccagcgacggcgacaagattaagcacaaggggagagtgcaaatgcgcgggcggttcacacgcccttcgcggtgctgaattaaagcgtctgaatggggatttcccctcgcgcc

SEQ ID NO: 85849 - DNA, 122 bp, Homo sapiens
gagtgcacgaatgtgggcgagtggtgctcgcaccctttgttcaccaacagttactgatcacgcacctcctggggatgcagcgggcagtacttgagccatgctgcgctgctcacagcccagcc

SEQ ID NO: 85850 - DNA, 122 bp, Homo sapiens
ccacctctggtcaccccctccctcctcctcccgagcctggtggtttagactgcagattctcgggactgacaagacaaactgtgtgaccttggacaagtgacttcccctttctgatctgttgg

SEQ ID NO: 85851 - DNA, 122 bp, Homo sapiens
ctctctccagcccctctggaaaggaagactgtggcccgctgtggggagccgagtggctagcggagaactgtggcatcccaggcccaccgtcttcaccagtagcagcccgctttcccccaaag

SEQ ID NO: 85852 - DNA, 122 bp, Homo sapiens
ggacagaagtctccgtcgaaggccagtgtgtggccatcacaccgcatgggacgcaagaaacgcatctgggagcagttcagctggagccccgcacaggcagtgccacggtctaggcggggcag

SEQ ID NO: 85853 - DNA, 122 bp, Homo sapiens
gagatgcgtgcgccagacagagtggcccgtcggtggctccatcgccatctgccggcacctcggtggaagtttggccaggagcgtggggctggccccagtttgatgggatatttagtaattga

SEQ ID NO: 85854 - DNA, 122 bp, Homo sapiens
atttaagttaaatagaaagatctcttccatctcgacctgcctgtgtccacggagcagaaccgcgaacctgtcgtcttcagcgcccacggctgagtgcgtggagacctcccggctgtgcttgt

SEQ ID NO: 85855 - DNA, 122 bp, Homo sapiens
gaattttaagttgacaaagggaaagccaggaaacaatttgatttatgctgcaaaatcccccggaaccaaaggaagtggctgcaaaagttactctggtaagtggagtgaaaagtgaggctaaa

SEQ ID NO: 85856 - DNA, 122 bp, Homo sapiens
cggtgagtgagcggcgccacggaacccccggccacacccctgggagcgggacgcaccactcgaagttggtgatgtactggtagttggactggctgcagatgtcaatgatcttggtgagcagc

SEQ ID NO: 85857 - DNA, 122 bp, Homo sapiens
caccctccgggtccagcacgactgtctggaaggccctgaagtcggtgagcgtgacttcagcgttctccggacacacgtcgatcttgtctaccaccttgtctgcatcaaagtcgtcctggcac

SEQ ID NO: 85858 - DNA, 122 bp, Homo sapiens
ctcaggtgatccacccgccttggcctcccaaagtgctgggattaaaggcgtgagccaccgcgcccagccttaaatgttgtttaaaacaaatttgtgaaaagaagtgaagaggccctgcctgc

SEQ ID NO: 85859 - DNA, 122 bp, Homo sapiens
tgagattggggctccctagccagaaagaccaaggtacatttcagtgttggaacttttagccgtaccctcatcccaccttacctccggaaaggggagagggactagaggttgagttattcacc

SEQ ID NO: 85860 - DNA, 122 bp, Homo sapiens
gggcacgtcggcgcctcggcgaggatgggagtccccaggacccggagctgagcagcctggcgcgcggcgggcagggcgcgcaggacagaagcctcgctgttcctccgggagcccaacaccgt

SEQ ID NO: 85861 - DNA, 122 bp, Homo sapiens
gttgattgattgatattctgaatggttccagtcagacccatttctctttactgggagcatcgcagtgctcacaccggggtggtcgggtaaaatgtgcagttagtcatggccgagctagtggg

SEQ ID NO: 85862 - DNA, 122 bp, Homo sapiens
cggcgcggtctcaggcagctctcggttcattggcctctcgtggggcgcacatactttttccgctcgcggtttctgatcctttcggaggagcgagctcccgctaggcttgcggggagctggaa

SEQ ID NO: 85863 - DNA, 122 bp, Homo sapiens
ccgccgctgcccgttagtgcactcaggttttctcgccttctcacgtgcacgtctcccacccgtgctggaggcagagctcttccacctacacccagcaccaggcggacgcagggggccttcag

SEQ ID NO: 85864 - DNA, 122 bp, Homo sapiens
cctcaaccagtttctgtctctgcttgttctgcagcccgctgaactacatttcccaggaggcgtcggggctgcgccgtacaacttccggctgtaaagatggcggcttcctagtgagtcggcgg

SEQ ID NO: 85865 - DNA, 122 bp, Homo sapiens
cttgttctctgtaagccatgctggtttagccaaaatgctgcagttgtgtatggccagggacgttgaggctgcagtgagccgacggctgtgttgccgctctgcagtctgggggacagagcaag

SEQ ID NO: 85866 - DNA, 122 bp, Homo sapiens
cgctggttgcgggtcgtggcacataggtgagtagggaacccagcgtgccgagaatagtggcgagggctgcccagacttgcccagctgggctgtgtccagtcacttgtgaccaggggtcaggg

SEQ ID NO: 85867 - DNA, 122 bp, Homo sapiens
agaaggctcctggcagcgagcaaggccgggagtgggcccagtgcgcacgaagtcgcgccccgaattcccactgggaggaacgcactggaattgaaatgtctgagatcaagccccgctgagaa

SEQ ID NO: 85868 - DNA, 122 bp, Homo sapiens
tcgccacacagcattgtacccagagtctgtccccagacattgcacctggcgctgttaggccggaattaaagtggctttttgaggtttggtttttcacaatcatttgtctgtctgattttctt

SEQ ID NO: 85869 - DNA, 122 bp, Homo sapiens
tggttagagtgcattttatcacaagagcttgcctgtgtgtgtgagtagattacagcatgtcggctacccactttcccagggaggctggatgcactggatatgcacagtaaggacaccctggt

SEQ ID NO: 85870 - DNA, 122 bp, Homo sapiens
tgcgagcacatgatggcgatacgggagctcaaagtgtgccttctcggggtgagtcctggccgccacccgccggcggaccccggcccgcgctctcgcgccccttcgctcccctattccctgcg

SEQ ID NO: 85871 - DNA, 122 bp, Homo sapiens
cagtatgctatttcaaaagttctctagcctcctgatagattcagggtaaaaaaaaaaaaacgagataactttattcaaatagaggtaggacatggcactttaatggagcctaactattctga

SEQ ID NO: 85872 - DNA, 122 bp, Homo sapiens
tccttctggagtttaagctggtggaggcggggtgcagtggccgctgacctctgtcggttgcgctgggttttgagtagccatttatttcattggggagttttggaataggacatcccacatcc

SEQ ID NO: 85873 - DNA, 122 bp, Homo sapiens
tgttgtgacttgagcgcttgtgagctctgattgtggctgtcgtgttggagatgcagtccccggacgtgagacctgtgcctgggggtgcacagctgacccagccctgctggggtgtagcctcc

SEQ ID NO: 85874 - DNA, 122 bp, Homo sapiens
aattggggtggcctgttacacggtctaagggagtaaatgctaaggcttaggagtcacctacgtaggactcttgagagggcaataatcccctttccacctctcgagacccctcactgcccaac

SEQ ID NO: 85875 - DNA, 122 bp, Homo sapiens
attccctctgaagccagatcactgctactaaacagcaaaggtgacaaattaatctgtttccgtgtactcagtggttgctaatgaagcttactcttactttgtcctttagaaatgggaaagga

SEQ ID NO: 85876 - DNA, 122 bp, Homo sapiens
cctccagggggcgacgtccaagagcatattgtgtggctgcgtgcactgagtagagctcaacgcccgggacctaaaaaaaaaaaaaaaaaagggcgtggagccggagggtcggtcccagctcg

SEQ ID NO: 85877 - DNA, 122 bp, Homo sapiens
ggagggctggtgagaagcgcaaggggcgagccctggagccgccgaggggactaggccgagcgggcccgtcggggcctctgggcgcggcggcggggttgggaggagggcgcgcagccgggagg

SEQ ID NO: 85878 - DNA, 122 bp, Homo sapiens
ccctctcctccacaattaacccattcatccttcaggttttggttctgttatcctctgcagcgaagcttcacctgcccccttttaaagccactcatcgcccccgcctcccccaccttccgagc

SEQ ID NO: 85879 - DNA, 122 bp, Homo sapiens
gggtgccagtgggcggccgccgcggtgtggagggcgccagggcggtacggcgcagcgggccgcactcttgggacgccccgcctgctctgcggagcctgcctgggatgccctttcctggtcac

SEQ ID NO: 85880 - DNA, 122 bp, Homo sapiens
gaagacaatatattcgatgaaggcagcctagagctattttgactcttagatcgtcagatccgggagggcattcgtcctttccagtgcatgcaggaggaagctgaggctctgaggtttggaaa

SEQ ID NO: 85881 - DNA, 122 bp, Homo sapiens
ggcccgagtcctcagtgagagtgaccagagggtcacacctgccccgagccagcctgtccccgtggtctagccggcctgtccccgcggtctcggcatctgcgcccatcttccatcctcaaaga

SEQ ID NO: 85882 - DNA, 122 bp, Homo sapiens
ctattactgggtatatacccagagcaacacaaaacattctaccataaagacacatgcactcgaatatttgttgcagcactgttcacaatagcaaagacatggaaccaacctaaatgctcgtc

SEQ ID NO: 85883 - DNA, 122 bp, Homo sapiens
gggtcggacgcgtccggctgtggaagagagcggcggccgctcacaacatgcacagcctggcgacggctgcggtgagtggctgggcccccaggcttggaaccagaatcctttctcagacccac

SEQ ID NO: 85884 - DNA, 122 bp, Homo sapiens
gagtgagccaagtttaagtttcaagcaggtctagagtgtaaaaccagcttatgaccatgccgggattaaagtagattttagcagaggacaatttgaaaatgacgctgaaacaaaaatttcta

SEQ ID NO: 85885 - DNA, 122 bp, Homo sapiens
ccaaggccatttagagaaattcaagaggccatgtaaactgagtctgatagcatccctgcccgggaagggaaggccggcctctcaagcaggtaggttagtttaaaactgtgttggtaaattgg

SEQ ID NO: 85886 - DNA, 122 bp, Homo sapiens
agatggtaatatacatgctccggcccaggaagctttgcagaaagcatacatggggaggggcggaggtaggtgccaggcaggggcctagtttggagctgctgttttaacaagaagaaagcagg

SEQ ID NO: 85887 - DNA, 122 bp, Homo sapiens
ggtctgaagggggccgggatccgggtagcagggagtgaccctggtgcagattccagtccccgaatccctcccatgcggtctctgctgcccagccgggatggccctaaaggaaggttgctatg

SEQ ID NO: 85888 - DNA, 122 bp, Homo sapiens
cctatcctggtgaccttggcgtgcccccctggagtggcgagccaggggcttatataggtgcgactaggatgttgcctcgtttttcactcggggctgcgaagagggcattgctctttctgatg

SEQ ID NO: 85889 - DNA, 122 bp, Homo sapiens
gtcaaagcaaacattacagtagaaatgaaaggtttgccctttcagaacctcttataaatgcgcggacagcttgtggcccaggaaaacatccattgctgcctgcattgtgtaatcctgcagtg

SEQ ID NO: 85890 - DNA, 122 bp, Homo sapiens
aaaccagaggttaactgcttgggatttggggtgggtgtgtttgaacctgtgtggcatccccgcgtcggggcggctaaagcgtcttgacgtttttggctaagcctgcgcgcttctccgcttgg

SEQ ID NO: 85891 - DNA, 122 bp, Homo sapiens
gaagagtgaatcatcttcttgtggtgttttatttgacttcagataacagatttctgccaccggaaaagcagccgttcatatgaagtggatgaacttcctgtcaccgaacaagagctgcagaa

SEQ ID NO: 85892 - DNA, 122 bp, Homo sapiens
tcaccaccctcgtgtgtgaccgggaaggctcatgatgatggtttcatccgttcttctccccgtccctgccctgtgtgtggtgtgcagaaagcatttcttcagctccttcacctccgtcttct

SEQ ID NO: 85893 - DNA, 122 bp, Homo sapiens
gttgcatccttgagctcgagtcgcccggttggaggcttctccctcctgcactcgctgatgcggcagccggaggaccccggtccagccctcaccttgggcaggatttctggggcgggtgcgtg

SEQ ID NO: 85894 - DNA, 122 bp, Homo sapiens
aagtgaggccgcttttgcgacgcggtgacagccaaatggtgcgacaggaggagctgcagccgcggccgcagcgcccgcacggagaggcttgaggcggctcctggcgtcgcccagagggagcg

SEQ ID NO: 85895 - DNA, 122 bp, Homo sapiens
gcctcacagcacccccctcccccgcccttggctgttgttctttatttacccagtgcaacacgaaaccttagccagggtagactatatgttaggtgtattttttggcttgggctaccatacaa

SEQ ID NO: 85896 - DNA, 122 bp, Homo sapiens
aggaagaaagcaattaaaggggcgggggggacttaaagtttgcacctcagcatgagtcaccgaatcaaagttcagcaaccacatgcaaaacaaaccctccgtgagggcagcaagtctccgtg

SEQ ID NO: 85897 - DNA, 122 bp, Homo sapiens
tagaaatcggctctgagagctcaccgaaaccacaaagctttcagaaaacaaacaggatctcggaaccggaagcggaacttgcaggactgacctttgacctctcgcttgagccgtgacggagg

SEQ ID NO: 85898 - DNA, 122 bp, Homo sapiens
tgccggcggcatcggcctgcgcacgccaggcacgcatcaagctccctcctgccgccggcccggaacagcccaactgccaggagcctcctcacgctggtcctgtgggcaactgccaggagcct

SEQ ID NO: 85899 - DNA, 122 bp, Homo sapiens
ggccgggacctgggacagtggcccggatggcagcgccaggttgcaagggactaggagagccgggcgggccgggcgggggcggggggcggggccagcgccgggggcggagtcccggcctcacc

SEQ ID NO: 85900 - DNA, 122 bp, Homo sapiens
ggtcctcaagaactcactaaagggcataaaatatgcacacaaataactgtaataaaggcacgctatggggataatacatattaagacagctgctttgagggaaaaatgtcttttaaaaatgt

SEQ ID NO: 85901 - DNA, 122 bp, Homo sapiens
caggaaggccagcgagatccagcaaggaggatgtggcttgtgtgggggctgttgtcgccacgtgttagccaaccatgtgcatgtgaaagaggctgacttacaagaatctgctcctgtaagcc

SEQ ID NO: 85902 - DNA, 122 bp, Homo sapiens
cggggacgcagcttgacacccatttcctttggctcgcatcgcggtcgcagagcccaatcgcggggaaacgggccccccagaaaaacaggcaacgacccccagctctttgctacagggatcgg

SEQ ID NO: 85903 - DNA, 122 bp, Homo sapiens
gctagggaggccgggggttttcttgggccccagacaagggcacaccccagaaaatgatcacgccggctccctccagtgcattgtccccaccctgcccccacgtcctcacttacctgtccccg

SEQ ID NO: 85904 - DNA, 122 bp, Homo sapiens
aaacctacttcaggcatacttgcacatgtacctctcacctgcaccttggcataaccttaccgtcttggacagcttgggccatcataacaaaacaccagatgacttaaacaacaacattttat

SEQ ID NO: 85905 - DNA, 122 bp, Homo sapiens
gcattcgtcggggaaacctctcctcgaccaggggcacctctactcgaccaggggcgacggcgtactttgggcttcatcatggaggactacctgcagggttgtcgagctgctctgcaggtaac

SEQ ID NO: 85906 - DNA, 122 bp, Homo sapiens
cggaaggctccgagtgtgcgggctggcagccagaggcccacggctgcaggggcgcctctccgggctggtaacctcattatctctgctgtcagggcaggagccccagggagcacagctgctct

SEQ ID NO: 85907 - DNA, 122 bp, Homo sapiens
gcatgaggacagatgagaccacttaagaagggtgtgttcagaggagaagccggcctagaacgaggctgtaaagaattccagtgtttgggaatttatagagttgaaactgggattttgatgtt

SEQ ID NO: 85908 - DNA, 122 bp, Homo sapiens
ccagaccgggggccaaggggagacgccggcgcgtgctgggaggggcatgagttacacccgcgacccttggaacttggaacggcttccccagccccggcggacgccggcccccaggccgtgcc

SEQ ID NO: 85909 - DNA, 122 bp, Homo sapiens
tgtgtacacggccctgggctctgtgggctggggtcctgtagcagacaggaagggaaggagcggccttgtgggctgaggcccaggccccatctgaggcacaggccctccctgttgggggcctg

SEQ ID NO: 85910 - DNA, 122 bp, Homo sapiens
gggagctcaccccactgcagcagggctggatgcaggtggccagggagctgtgctggagcccggctgctcaaaccacagatttggcccagccaatgcccctcagctctgcgctgccctagctc

SEQ ID NO: 85911 - DNA, 122 bp, Homo sapiens
gggcctggctgggggcagaggtaagggagggcgcagactcggagttggaggtcagcgggccgggcccagccccacgtcctcctgttttgcccgtttgtgtgactctgggtccggtctcggtc

SEQ ID NO: 85912 - DNA, 122 bp, Homo sapiens
ctccgcagcagaaccgtggctcctaacgggaaggggaggtatttacgagggggcgaagtccggctgttggccgccagccagctcacatcctttgcagaaggcaaggtttttttcagacttcc

SEQ ID NO: 85913 - DNA, 122 bp, Homo sapiens
cagcccgcccatgtgcaggaggggttccggggcagccgggttacacgcgagagccccacgcgccggaggttccggggcagccgggttacacgcgagagccccacgcgccggaggttccgggg

SEQ ID NO: 85914 - DNA, 122 bp, Homo sapiens
actttgtcacccagtctggagttcatggcgctatctcagctcactataacctctgctgcccgggttcaagtgattctcctgcctcagcctcccgagtagctgggattgcaggcatgtaccac

SEQ ID NO: 85915 - DNA, 122 bp, Homo sapiens
cggcctgccgtccgggcaccaagtgaacctttgcttgtgcaacatgaagctggcttctgccggattcagaattttgcctggacttgggagcttgtacactccgcggttctggctctgacctc

SEQ ID NO: 85916 - DNA, 122 bp, Homo sapiens
ctacttgtgcttgcggtggatagcagaagaattttcccctaaaggtggtggtgggggtggcgggaggcagtccatgtatacttttactgaaaaggcaggacagtgccctggatggcttctga

SEQ ID NO: 85917 - DNA, 122 bp, Homo sapiens
ccaagggccccaggagtctggcctcaaacctgtccaacctgtaggatcccaggccagggacgagacctggggctgcttcttcaaggtctgagccccaggtgtgggccaagagggccccaact

SEQ ID NO: 85918 - DNA, 122 bp, Homo sapiens
cctgggaggagccggggcgggcgggggtcacctgaacaagggagtcacgtgagcggggggcgggggtgggggggcggtgccgggcggctgtcacgtgacgcggttccggggccgccgctgcc

SEQ ID NO: 85919 - DNA, 122 bp, Homo sapiens
aattaccatgagaaataaaatgcggccttgtgtggtggctcattgtggtgggtcagaaaacgcgtgcaagtttccgtagtgtagtggttatcacgttcgcctaacacgcgaaaggtccccgg

SEQ ID NO: 85920 - DNA, 122 bp, Homo sapiens
gaaaggagaggcagagggccagggagcctcgctttcaatgctgctggccttcccttctaccggtactgggtgccccctgcacatgcgcatggaaggggaaggaacaggtgcccaagtcctac

SEQ ID NO: 85921 - DNA, 122 bp, Homo sapiens
ctgccccggagccatgagccccgggctgctgctgctcggcagcgccgtcctgctcgccttcggcctctgctgcaccttcgtgcaccgcgctcgcagccgctacgagcacatccccgggccgc

SEQ ID NO: 85922 - DNA, 122 bp, Homo sapiens
cgtagaatttggggggagggaggggtgccacagtttgttccctgtaatagccacatgtcccgaattgtgcagacatttatcaaatgactagagaaaagctggcacatgaatgctggggtaca

SEQ ID NO: 85923 - DNA, 122 bp, Homo sapiens
ctaccctgccccgcccctgccccacccctttctcccccgggctccacccctcgcgcgcgtcgcctcaatctccgcccgcagatccggcctccccggcggttgcgcactccgcccccaccctc

SEQ ID NO: 85924 - DNA, 122 bp, Homo sapiens
gctgccctgcccgccccttccaccaggctcaatgccctcttgccatggggtgtctatgtgcgtggggcgtggcctcctgttcccttggcatactgccccaccaaggggcaggtcacggtggg

SEQ ID NO: 85925 - DNA, 122 bp, Homo sapiens
agctctgcaggctgaggtgggggtgctgggggagcagatgagagatggacgtggtctgtgcgggagccacccatgggtgctacagctctcctggcctggggtcttcccacagtgctggctct

SEQ ID NO: 85926 - DNA, 122 bp, Homo sapiens
ttacttttttcctttaggagcattatgagcattatgtcagaatagaatagaattggggttcgatcttaacaggccagaaatgcctgggtttttttggtttgtttttgtttttgtttttttat

SEQ ID NO: 85927 - DNA, 122 bp, Homo sapiens
tttcctattagagaactcactgtcctccaaatatcaaaattcaattcaactctacatttgcggggctgtgacgtgagcaggaagacactggttcctagataatgccaggctaaggctggtat

SEQ ID NO: 85928 - DNA, 122 bp, Homo sapiens
gtggcacacagaggttatgaaatatgcctatacttgcaaggcccatccgtggtaacactgcgatttaaacctgggcatcctggctttagactctgtgctcctaaagcacactgccttccaca

SEQ ID NO: 85929 - DNA, 122 bp, Homo sapiens
ggcgcagcgggcaagctgccgcacctcctacttctgttgcctggcttggggccaggagagcggcaacccggggccggctccggagctggacatatccggcgtctccggggccagggtctgcg

SEQ ID NO: 85930 - DNA, 122 bp, Homo sapiens
gcctccactcaggtcaggaccagaagtcgctgttccctcttcagggactagaattttccacggaataggagattatcccaggtgcctgtgtccaggctgttgtctgggttctgtgctccctt

SEQ ID NO: 85931 - DNA, 122 bp, Homo sapiens
tcagtgtggtggttaatgggggtctggggcaccagcatactcaggcaggatggagtagaacgagattcttcctggaaggcctttggggctctggaaccaaacaactcagaatgagccacatc

SEQ ID NO: 85932 - DNA, 122 bp, Homo sapiens
tcacctcccaaccgtatggaccacgctgacatcctgccatcaagaagcaaagctttccagcgtcccccaagcgctagggccgccttctgactcttccgccccgcctccgccccctgcactct

SEQ ID NO: 85933 - DNA, 122 bp, Homo sapiens
ttcagctttttctcagggtcctccatcagcagaaagttgaccctgtggtctccagccttccgtgcagccggtgaaacttgggcctctgagaaaaaggcattttattttctctcctcctgcat

SEQ ID NO: 85934 - DNA, 122 bp, Homo sapiens
cattgatctatccccaaatgttcacttccttcattcttcaagcttttgttaactgccagacgctatagaaaattacatttttctaaaaaatgaaaagtcatagtccctaccttgaaagagct

SEQ ID NO: 85935 - DNA, 122 bp, Homo sapiens
gaggagacaagggctgagaatgggggcagctcctcgcccaaaaggctgaccagggagccccgaggccgtgctgggctgaggttgggcagcaggaggggccgtcggggcctgggaccaccccc

SEQ ID NO: 85936 - DNA, 122 bp, Homo sapiens
ggcagttcacagagtctgcctgctggctctggctcgaatgcagtgagccctccccccacccgccagctccacactcctggctgaaaggataaacagtctgcaaagaaattttccctagaaag

SEQ ID NO: 85937 - DNA, 122 bp, Homo sapiens
ccgcgagcgacatgggggaccgggagcagctgctgcagcgggcgcggctggccgagcaggcggagcgctacgacgacatggcctccgctatgaaggcggtgagcgcgccgggagcccgggcg

SEQ ID NO: 85938 - DNA, 122 bp, Homo sapiens
taaatcaggaataatacctacctcagacaggtgtcataggattgacagccacgcccttggcgttctcattaaatgaagattccagactctatagttgggagtttgtgacttaggtaagaaac

SEQ ID NO: 85939 - DNA, 122 bp, Homo sapiens
cagtttccttttatgttccctttggtccatggtaagtaatgagtctagcattatttgggacgctttggcctttgggaccttgatgcacctactgtacacaagatggttgataaggaaatgaa

SEQ ID NO: 85940 - DNA, 122 bp, Homo sapiens
actccttgatccctacccaccaaattctccttaaaagccctggtctccaaatgttcaaggcgaccgatttgagtaataaaactctagtctcccatttagctggctgtctgtgaattaaattc

SEQ ID NO: 85941 - DNA, 122 bp, Homo sapiens
agagacaagccaaaggcggcacccacatgcctggactattagccctcaaaaggaaggaaacggcgacacacgccaccacctggaggaaacttgaggaccttgtgctaagctaagtaagccgg

SEQ ID NO: 85942 - DNA, 122 bp, Homo sapiens
actaatatgtcagatttttacatttacctgttcacataatacaggtctacatcttgagtacgtctttgattactatcatgattccacaagatggcagtgtgttcttagggaccctgaggaaa

SEQ ID NO: 85943 - DNA, 122 bp, Homo sapiens
agcgctcgaaagcacgcccggccagctcaaaaactacggcgctgatggaccccagtgatccgacgtaaaggtgcaaacgtaaagcgcacacggccaatttaaaagcagcggcgctgataggc

SEQ ID NO: 85944 - DNA, 122 bp, Homo sapiens
ttttcagaaaataactagggtcacagaatgaacaagtggaattagagagccagtgatggacgtgaggaaacagctgtgtaggttttgaccagtgagcaggtggtggtaatagtatcacaggg

SEQ ID NO: 85945 - DNA, 122 bp, Homo sapiens
gggcatcgctaaggaggaccccatccagggcgtcgctaacgaggttgaagtccagggcgtcgcacacgaggacgccgtccagggcatcgctaacgaggacgccgcccacggcatcgccaacg

SEQ ID NO: 85946 - DNA, 122 bp, Homo sapiens
gagtgaccagaagaagcgggccgaagtaaaaggcggggctcaagatggccgccggggcctcgcctcagccccgcccatatgatgccccgcccctccggtcccactcactctcgcttttaact

SEQ ID NO: 85947 - DNA, 122 bp, Homo sapiens
tcgggagtagtagtttgtgtaatatcgcgatccttctctggtgttccttgttttagctgacgacactcgagagcgccaattttcctagattcgattttgtggtttggaactgtggttttgga

SEQ ID NO: 85948 - DNA, 122 bp, Homo sapiens
agaagaccagaaaacccttgctgtgcagtctctgtagactggcccgaaccattccgtggtcggtggtctcttatgggaaaaaatgctggtcagttatgcgaaaaccgcaaaagggagaagca

SEQ ID NO: 85949 - DNA, 122 bp, Homo sapiens
agtagggacctctcatggcctacaggctttgacatctgagaatcaaactggagaacattccgaagccgttcttataagtgtctccatctctacctgggctgaaatggaatgtgcaaatgtag

SEQ ID NO: 85950 - DNA, 122 bp, Homo sapiens
cgggtgaaagcaccgtcttgtccccaaagattcctctgccctcagagactaacaaaaatacggtgtcctgcgtttcgcagaaggacgggaggcgtcccagagctctcccgggagaaaaaccc

SEQ ID NO: 85951 - DNA, 122 bp, Homo sapiens
ctgtgtgtgcacaagatcgactgtttgaggacacaggcccgccgatgtgcagggggtgtgcggcaaccagacaggcacagagagtgtctgagaggtggagggacccctccagagaaacaaga

SEQ ID NO: 85952 - DNA, 122 bp, Homo sapiens
caaagagcgcaggaaaggtgccaagtccaccggctgtgaccgggaggtcccaggcccagccggccctggcagccacatccaaccttctgctctaatgtggacccaggaagtgggagagaacc

SEQ ID NO: 85953 - DNA, 122 bp, Homo sapiens
ggcgtgttctatgtattttcttctctggtgctttgtaaaatctgttgccttggcccagaacgccccctctgccaacaggctgtatccagagagctgggttagaccccctcctaggtgtgttc

SEQ ID NO: 85954 - DNA, 122 bp, Homo sapiens
acacttgggcttctcaacacttgtgtcccatgtgttttttaaaacctttgttttaggaaacgttctgcggcagtcgtttcttcaatctgcatctggttccatcactgtggctgctgcttgca

SEQ ID NO: 85955 - DNA, 122 bp, Homo sapiens
tgtcctcgcctgtgactgactctgcccctgccctgtgactgtctcacctgtgactgactccgtcctgcctgtgactcagcctcttactgactctacccctgcctgtgactgactctgccctc

SEQ ID NO: 85956 - DNA, 122 bp, Homo sapiens
gagcttgcgccatgttcctccccccacccccccgccagctttctgcgcagacgcagctcgcgcctcctggcagtattaaggtcggaccaaaccactggccaggaatggagggggtagaacct

SEQ ID NO: 85957 - DNA, 122 bp, Homo sapiens
caaccaaccaaccaagtcgtccctactccctccacccccacccatcccggacctggtttacggctccaggctcaggctccactgcgggcgctgattggttgttgaaggcttggtcccatccc

SEQ ID NO: 85958 - DNA, 122 bp, Homo sapiens
cttccctagcgcctccctccccgccctgtcccctactccagcacccaggggactcgttcccggcaggcaggcaggcccttggtctctgcctctgctcgtgttttctgcctttgcgtcctcca

SEQ ID NO: 85959 - DNA, 122 bp, Homo sapiens
tgcagcactggctttctttgctcttccacctatgcaagctccttctctcttgtggcttgccgagcctggttagctctgagaccggaagttctgaagtcagctggcatcctacatctgtgcaa

SEQ ID NO: 85960 - DNA, 122 bp, Homo sapiens
ccagccaggcggcagcggcattcagctcgtgcactgggctggcagcaggctgagaagaggcggcgcaggttctccgggtcagccagtgccctgctcctaagggtagagatctagctggggac

SEQ ID NO: 85961 - DNA, 122 bp, Homo sapiens
ggtgtgcgacgaccactggaacatcaggaacgcccgtgtggtgtgccgcctcctgggttgcggccgtgctctgggcgccccgggccgcggccgctttggccagggcaccgggcccatcctgc

SEQ ID NO: 85962 - DNA, 122 bp, Homo sapiens
ccagcacctccttccatgcgtaccccgaggtcctttgagcccctccccctgcagccccgccgagccacccggcccgtggccgctgtttacaaggacacgcgcttcctgacagtgacgcgagc

SEQ ID NO: 85963 - DNA, 122 bp, Homo sapiens
gtgtttctggctcctgccacctggggatttgcttctggagtgacttttctgggattggcacgtgggtgggaggaggctatgggtttaggctgaattcttgtacctgtcctgtgctgctcaac

SEQ ID NO: 85964 - DNA, 122 bp, Homo sapiens
cgctcattggccggccgggcacgaattggctggtggtggccggccccgccccggcaggggcgcggtgtattttggttcgcctccgcgccccgccccgccagccgctccctccgcggccgccc

SEQ ID NO: 85965 - DNA, 122 bp, Homo sapiens
ctcgcacctgaaaatttcctctgtagccattcgcaggaggtttctcagatgccccgggctcgggggccagtcagtctcatgaggacggggtgggtctgacttgtggcatcgcggcctctcca

SEQ ID NO: 85966 - DNA, 122 bp, Homo sapiens
tcaggcccttcctggccccttgatctcctgcactgagctgtggtgagcacatccgggtcccgctggatgtatgtgtgggcagggggggtgccctgggttgggtcaatgatgagaaccctata

SEQ ID NO: 85967 - DNA, 122 bp, Homo sapiens
cgcggagcctgcacgaccgagaggtcgcggagagaagccagagacaggccagcgacctggcgaggcaagaaaataagataaccgaacgcgtagggggagcttggctttcccgaaatggaagg

SEQ ID NO: 85968 - DNA, 122 bp, Homo sapiens
gcaccccggcgggcactggcgcgggcaaggacgctggcggggagaacgccctgggctcaacgtactccagaatcgaatgttgagagaagcagtgctctgatccagctcaggagaaaaaggag

SEQ ID NO: 85969 - DNA, 122 bp, Homo sapiens
cctgctggtggtgatggcatttgaccgctacgtggcagtgtgccggcccctccgctacaccgccatcatgaacccccagctctgctggctgctggctgtgattgcctgcctgggtggcttgg

SEQ ID NO: 85970 - DNA, 122 bp, Homo sapiens
agtagtgtggtggtgacttgggtgtgttctcctcctgacattcacctgcacctttttctgcgcttttcagtatgtatgtatttaatagtatcactcaacaaaaaggagtttatcaggccggg

SEQ ID NO: 85971 - DNA, 122 bp, Homo sapiens
cgtggcacgtcagaagcctgcagtcctttcaacttccagttcccagggcatcatcaatcacgtcgcagcgattcctatttcacgtcatggccattctgacaaaacagcaggtttccttcgct

SEQ ID NO: 85972 - DNA, 122 bp, Homo sapiens
tcacttgggagaggcggctcccaagcggacacccaggagtcggccaacccctttaacgcccgcatcccctgctctccacgacctcaaagggcctgtaagtggtcgacaaaaaggggcgggga

SEQ ID NO: 85973 - DNA, 122 bp, Homo sapiens
acctttttatacaatgactcattcaccttcttgacacaaaaatcatcagcattctttgaacgttcatctcttcaactgtttcctaataatagtcaatctagttattacatatctttttattt

SEQ ID NO: 85974 - DNA, 122 bp, Homo sapiens
ggtttactgaatatcgcggcggaacagcgagactctggactccaggagaggaagcagccgcgaggcggtcacttccggtgccttatccagagaatccgacctacgggtgctcgggccctttg

SEQ ID NO: 85975 - DNA, 122 bp, Homo sapiens
gcactattttaacagctttcgtctgggaaagtggtgccttcagggcaaatgcacgcactacgtaatacaaagaggtctggtcagtttacgactctgaactgagaggcagattcaaattgaaa

SEQ ID NO: 85976 - DNA, 122 bp, Homo sapiens
caatttctatgtttactcaaaaaaaaccccataaacatctgttctatggggaaattgggccggtttcatcctcacttcagatgccagccacacatctcaggggctgcctgcatgtctgactc

SEQ ID NO: 85977 - DNA, 122 bp, Homo sapiens
gcggagggccacattcggagcctccgtccactccagttttatcagcttttgccttttgcacggagtgctaaacaaattctagctctgtgtttttttcccattcccagatttactatcagttc

SEQ ID NO: 85978 - DNA, 122 bp, Homo sapiens
ggacaggaggaaaggccgggagagccgtgcgggcttgaaggcgacttagcgccacctttccgtctgctggtcgggccggccttccccagccctctggggctgggggtgcagctgcctgccga

SEQ ID NO: 85979 - DNA, 122 bp, Homo sapiens
gaattccgcaggtccagaaagccgggaaatcgcgagcggaggcggagttacctcggtgagcgtgaaggcggagcccgctccgaggggcgggctcgaggcggggagaggggcggggctccagg

SEQ ID NO: 85980 - DNA, 122 bp, Homo sapiens
ccccggacggcgggaagcgaggtcagcgctggcgcgggctccggcagcgggactaggaggcggggcaggggtgcgggctgcggggtttcagcagcgggagccggaggggtcgggccctgatg

SEQ ID NO: 85981 - DNA, 122 bp, Homo sapiens
gcttctgtagtcctttctggccctgccctttgtcgatggcgcagcatggctttcactcaccggaaaactcacacacagtaaaatgagcttgaactgagttttagaaaagacactttttttgt

SEQ ID NO: 85982 - DNA, 122 bp, Homo sapiens
cccctaagtcctaaaaggaaagcaccagtgcacatgcaaaccactgggaggagtgcggaacgcctggtacagataggggtggggatttgggtgacgcatttaaaagacagcgtgagactcgc

SEQ ID NO: 85983 - DNA, 122 bp, Homo sapiens
aaataccacgccctgccttaaattattattttaaattaaaaaaatgatgtttagatgccacgatgtaggtggcagtaccttaactatatgcgtgtcgtcaggcccaagggcctcttccatcc

SEQ ID NO: 85984 - DNA, 122 bp, Homo sapiens
cagctggcccagtagaggcagtgctggcccatggttctgccggaggcgcctccatgtttgcgggtgcaccgcacgccttctccctctctgtccccctccccctccctgtccttatctttccc

SEQ ID NO: 85985 - DNA, 122 bp, Homo sapiens
ttgtcaccctttcgggaagtacgcacgcggctgagaggctgctgtgcctgcatcgggcatcgcgaacccagctcctctgttcaaaggggaggaaagtgcggcccaagggcaggaagagctaa

SEQ ID NO: 85986 - DNA, 122 bp, Homo sapiens
tctgccagatctcaaagtgagaaccttgagggatgactgaaccgctcctccctcatcccccgccccactagaatccggttccgcccctgttgtccacccaggtgagccctgggtggacggat

SEQ ID NO: 85987 - DNA, 122 bp, Homo sapiens
gtcgcgttgcagaaccaaggaaagccagggtgaacggggcgcccgggttgtcttctggagcgttccgaggagcccgcgctgctgaccctttgttggagcggggtgcattggctctcctccct

SEQ ID NO: 85988 - DNA, 122 bp, Homo sapiens
atgggatggatgggggtggatgggtaccagtctccgcagaggccggggtggaattcgctgcgccccaccccttccacccgctccccttcgccccgtaggtctttccactctcgctcctcccc

SEQ ID NO: 85989 - DNA, 122 bp, Homo sapiens
cagtctagggaagagccagctgtgtccaaactcaggaccgtgggtatgggtgagctggctcgccagccacaggaggcagctgcccagtgttcattttctggctacctgctcactctgtgctc

SEQ ID NO: 85990 - DNA, 122 bp, Homo sapiens
tcaagcaagcaggtgcttcagcaagcaagtaatccatctcaagaagccgtaaccagcgatcgttcaacaattcttaggagtcttgtgaagtctgcaagctccataaacgagggctcttgcat

SEQ ID NO: 85991 - DNA, 122 bp, Homo sapiens
cgacttttataagtcttatctatagggaacacaactattcgagacatactctgtgcctggcgccgggtttacaagagggggtcgtgtcccacttccctggcgaactcctacgaatccttcaa

SEQ ID NO: 85992 - DNA, 122 bp, Homo sapiens
cagcgatctgggcctcgcggtccgagtccggctcccgggccgccgcccagcccttctccgcgctctcctgcgcctgggccacttccgactcctgctgtccggtccccagctcctcctcaccc

SEQ ID NO: 85993 - DNA, 122 bp, Homo sapiens
cctttcctagtcaaagaaagggatgacggacagcacctggaaaatcgggtcactaccacccgaatactgtgcttttccacgggcttaaaacacggcgcaccagtagattataacccgcacct

SEQ ID NO: 85994 - DNA, 122 bp, Homo sapiens
tggcagtcctgttgatgagggccaggagtcctaccctagtccgccttccgcctcctaaagcgaccagagcctggagtctgaagttactgttaatgattgctcgtaaagataaaaataaaggc

SEQ ID NO: 85995 - DNA, 122 bp, Homo sapiens
gggccccggacagaccgaccctgggtgggtgcgcccggcttctgccgtcggacggagacgcgcgtgtttgttcctccagctgcgaccacctttgaggaacggttcccactttgtgccccaac

SEQ ID NO: 85996 - DNA, 122 bp, Homo sapiens
ccgggtgatagtggaggtgtgtgaagttactcgtgtcaaagccgttaggatcctggcttgcggagtggctaaagtgctttggatgcagggatcccagcagtgcaaacagacttcggagtacc

SEQ ID NO: 85997 - DNA, 122 bp, Homo sapiens
tcagaggagggaaagcccaacaaccaagaagcccaggggttgttttcaaactgggtggggcggcacaggtgcttttctgttgagctcatctctccaaatcccccaagcctctcccattgtgt

SEQ ID NO: 85998 - DNA, 122 bp, Homo sapiens
tttaatactctgttaaacagtaaatgtgatactattctttatcagcctactcaataactacgaatgaaacctatatacattatccacccactgaacgaaaaaagagacatccataaaattta

SEQ ID NO: 85999 - DNA, 122 bp, Homo sapiens
cggtgaacaaagagaacgccaagggccagggtctggtgcggcgcctctttctgggtgccccgcgggacgctgccccgagcagcccggcctccacagagcgacctgcggcttcagggggttgg

SEQ ID NO: 86000 - DNA, 122 bp, Homo sapiens
gtgataaggagggcggggggaggccgcgggaaggcgtcggggtttgaggtccccgcctggcgacccgggatcggggcaggaaaggcggctgggcggggagagggcggggcggggcgtctggc

SEQ ID NO: 86001 - DNA, 122 bp, Homo sapiens
cgggagagctcgttcgaggctccctggtggaaggctggtgccactgcgcgagtgagtaatcgcagccaggcaccggggaaaggggaacgcagagggcctcccagtggctgaagaggtaaatc

SEQ ID NO: 86002 - DNA, 122 bp, Homo sapiens
aaggcgcaggtgggagccgttctgcggcacgggaggcttattattcacgtgcatttccaccgtgcagttgagaactgatgatatcacagcagtgatatctctgtggtttctatgagcagaac

SEQ ID NO: 86003 - DNA, 122 bp, Homo sapiens
tcccctgacaccactgaggacccgccgtccactccagttggccgctcgggcgccggccaccgtcccacaaatccttacagagggtctagaacacctcccagggactctgccgagggacttgc

SEQ ID NO: 86004 - DNA, 122 bp, Homo sapiens
aaagcagcgggaggggggtaaaaaaacacaaaaagccttggcggctggaggaaaaagccacgttggcagggggcaaaaaagctgcagtgacaggggcgaaaagctgcaaaaagccaaggtgg

SEQ ID NO: 86005 - DNA, 122 bp, Homo sapiens
ggtcatccactgcaagctgcgcgccatgaaggagctgagcgaggcggctgaggcccagcacggcccgcactcggcagtggcgcgcatttcgcgggcgcagtacaacgcgctcaccctcacct

SEQ ID NO: 86006 - DNA, 122 bp, Homo sapiens
catgaacactgcccgcccgactccagatgccctggcctttgctgcctgccatgcaagaggcggtcttgcagatgaaaggagatcatttgagagaagtttccagctccctgtgctcagtcatg

SEQ ID NO: 86007 - DNA, 122 bp, Homo sapiens
aggggcacttcatggtccttcacctctttagcttctgcggctctttttctgtttctactccgttttgactggtattttccatctgttgctttttcaacagattttagaatatttttagagcc

SEQ ID NO: 86008 - DNA, 122 bp, Homo sapiens
ccaccgcccgaaccaccccctcattcatccatttatgagtagtttatcccagcagtgcttcgttcctgcctctctaggagaggagcattcagcaggtgtcgatactggcaaacccctgcttc

SEQ ID NO: 86009 - DNA, 122 bp, Homo sapiens
cgcagcggccggggcgcccctgccccggctctgctgcctggagaagggtccgaacggctacggcttccacctgcacggggagaagggcaagttgggccagtacatccggctggtggagcccg

SEQ ID NO: 86010 - DNA, 122 bp, Homo sapiens
cgaaagccaggctcccaggagtagctgcacggcctgtcaatcagcgggggcaggggcgggcgctgcctgggtttggagggtggagggggaggggactcccgggggcagggacccatctggta

SEQ ID NO: 86011 - DNA, 122 bp, Homo sapiens
gaatctcgcggcagttgattcctagaggtggaatccattaaactgacaaagccccagtcccggggtcctaatagtcgggactattaggtcatcctgggtactcaggcctctagactctagac

SEQ ID NO: 86012 - DNA, 122 bp, Homo sapiens
tagggcaggatgaacgctgctttccaagatggcgacggagggaggagggaaggagatgaacgagattaagacccaattcaccacccgggaaggtctgtacaagctgctgccgcactcggagt

SEQ ID NO: 86013 - DNA, 122 bp, Homo sapiens
aaataaaaaatgttccatgaactcactaccataataaaccctgctgccgctgaaaatgcacgggattagacaattcaaatggtatagaaagatgcacaatgccctgttcgcccagtccacca

SEQ ID NO: 86014 - DNA, 122 bp, Homo sapiens
cccttcttcactccccactctccacccattcccttgtacatgctcttctctccagtccagcgcatccttgaaggcttgaatacaatttgtccccttatctgtgaggtgtttcctgtacccat

SEQ ID NO: 86015 - DNA, 122 bp, Homo sapiens
cacacacacacacacacacactggagttcgagacgaggcctaagcaacatgccgaaaccccgtctctactaaatacaaaaaatagctgagcttggtggcgcacgcctatagtcctagctact

SEQ ID NO: 86016 - DNA, 122 bp, Homo sapiens
gtgaggtggcacgcagcgtcagtcgtctgcaggaatttgtgctggggtaaatgcgcgcttcgtgcagaccgcagagctggaggcggagggctggggtccctgggccgcgggcgggttccgcg

SEQ ID NO: 86017 - DNA, 122 bp, Homo sapiens
gagaaggagggaggcaggcccaggtccagctgccaggacttatgatggcggcttctgcttcgcggaggcggtgtcggcaatcacgtggagacggggcggcctcgccgcgcagccgccgcgtt

SEQ ID NO: 86018 - DNA, 122 bp, Homo sapiens
tctccagatcaccacactttccagcagaatctgttgtactacattcagcccacttactcacgtaacctcattggtcccagtaggcactggagcttgcgactgcctggtttgccaaggaagca

SEQ ID NO: 86019 - DNA, 122 bp, Homo sapiens
gcacacgtacacactacacacaccgcacacgtacacatgcacgcacatgcgcacacaccccggaggctctctgacctgctttcaggtcctgctgctgtttctccagcttggctcctagggat

SEQ ID NO: 86020 - DNA, 122 bp, Homo sapiens
atgtccgaagagaccacacaggtaacatttgccaggttgaatttacctctgacagggacacgggcctgggctttgcagactccaaagctggatcttggaaataatcattcatgccaacaaag

SEQ ID NO: 86021 - DNA, 122 bp, Homo sapiens
gtagtccatcttgcagaagatctccttgttcttgatgtagcagctgttctgctgcctcagcgacgtgcgacacacggagcactcgaggcaccgcacgtgccagatgaggttgttgacctggg

SEQ ID NO: 86022 - DNA, 122 bp, Homo sapiens
aggtgtttctcaggtggattccaggtgtgtcccaggtgagccccagctgtattccatatgcgtccctctgagtggggccttggtttgatgtagctccggggatcttctgctccctggtcctg

SEQ ID NO: 86023 - DNA, 122 bp, Homo sapiens
tctctgagattacagccttggctgccaagagcagctccatgggggtggtgtggaacaaagcgaacggcccttttgtgattctgggttcctaagaatagcttggctgtgtgtggggaggtgtc

SEQ ID NO: 86024 - DNA, 122 bp, Homo sapiens
gcaggcttgcgggggcaccttcgcccacggacacgccctttctgcggaggcagcccccagcgaccctctgcccagcttcggcgcctcactcgcgacgctcccaaactgctcaaggcctttca

SEQ ID NO: 86025 - DNA, 122 bp, Homo sapiens
ctccgcgttgcgctttcaggataaacacagctgttttgaccacactttatcccaagggaacgccttgaggtccccttgggcacactcccgtgtgtaactcgcccattagcaccgcctggctt

SEQ ID NO: 86026 - DNA, 122 bp, Homo sapiens
gatttttacattaactttttaaaagcaattacattgaatgttttacattcaacttttgaacgtgagttcaaaaagtgaactcacgtcaacttttttctaagttgttttttactcatatatct

SEQ ID NO: 86027 - DNA, 122 bp, Homo sapiens
gatatttcagtttcttacaagcccacctcagggcctgaattagccaactaattaattatccgtaacagcctgggactccctgggtggaacgtgcgtccctcccagcgcagatgcaggcttgt

SEQ ID NO: 86028 - DNA, 122 bp, Homo sapiens
aaacaaagttccaagtcaattttatctagagaatacaataagcagttcaagtaagatccacggcctctctaaactggagtaaattcataatataacaaattcatagtgcagatgtgaaggtt

SEQ ID NO: 86029 - DNA, 122 bp, Homo sapiens
actgcggagggaatcccccaccccaccccactggggatagggtggcacgtcgcagagtgtcgcagctgtacaaatttggaagcccacagcatcgcctgacctcttgtgcaatcccgaacgct

SEQ ID NO: 86030 - DNA, 122 bp, Homo sapiens
cccctgggaggactggcctgcggatctaccagatgagtctcagtagaggaaaaaagtgtccggacagcaggaacgcgactgcacactctcacagctccctggcgttctccacgtgggcgaag

SEQ ID NO: 86031 - DNA, 122 bp, Homo sapiens
gacgcaagtggcgagtcgtcgagaggacattgaggggagcacactggtagaagggcacgccggcagggcacaccgaaagatgccagcacgcaggacagactggcgggatgaggcggagtttg

SEQ ID NO: 86032 - DNA, 122 bp, Homo sapiens
gaacttcaaaacaacaacagcaacaacagagtagcctttttccggagtcagcaggaggagcgagtgatatagcttgggagtgcaggattagggataacgttcaacaggtggcctacagaagg

SEQ ID NO: 86033 - DNA, 122 bp, Homo sapiens
agcagatagcttgtggcggggtaatcctcggtccggccccatacaggacagaaataaaatcgccatttcagctccgggcgcagctggaggaggctgacgccccctagttaggggaaggctgt

SEQ ID NO: 86034 - DNA, 122 bp, Homo sapiens
ttcccgccctgcgtgtattgggggtggtggggtcccccctgctggccgcaggtgctctgacgaggttgcactactgtgctctgagaagcagtgcaatgatattgtcaaagcatctgggacca

SEQ ID NO: 86035 - DNA, 122 bp, Homo sapiens
gacaagggagccccagacaggacgataaggtttggagattcccagggcgatctgggactccgtggcgtgggggcttggaagcgcgtggaggggctgagagaggggagagggcgcccttcctc

SEQ ID NO: 86036 - DNA, 122 bp, Homo sapiens
gagttggtggaaagagaacccgtggaggtgcagagtagccgtggggtcctcggtctccctcgtgtgagccgacattagcgagtagctgtagggtcctcggtatccctcgtgtgagccgacat

SEQ ID NO: 86037 - DNA, 122 bp, Homo sapiens
ccgtagaaagacaacttgcctttgttcccggacacttggggtgttgtttactttctcctgcggccagcggccgaccgggcgctgctggctacccggggaggggctgagggctgcggcaccga

SEQ ID NO: 86038 - DNA, 122 bp, Homo sapiens
caggacagagaaccaggtatatttctaaagctaaatagtaacagtaagaacgttaacaaccgtgaagaaccaagaccacaagagcagccctcacttgcagaggcctcccagcacctgccctg

SEQ ID NO: 86039 - DNA, 122 bp, Homo sapiens
tgttggtgtgcttggtgacggaacagtgaccgtttgtgcgcttggtgacacggcggtgaccgtgtgtgcgcttggtgacagggcggtgaccgtcggtgcgcttggtgacgggcagtgactgt

SEQ ID NO: 86040 - DNA, 122 bp, Homo sapiens
gtttcctccaagaaaagtaactccgggaatcagcgcaataggagcgggaacgcgatgctccgagagcggcgagccgggccctggagttattctgctcggagtttcgaactgcgccccgcgct

SEQ ID NO: 86041 - DNA, 122 bp, Homo sapiens
gggctattggccagagtctttgtttaattacgtttccttggagccgccctggcagtgaggcgcccaggcctgcccccagcacttggctccaccccctgactgtcccttaactcgttgagcgc

SEQ ID NO: 86042 - DNA, 122 bp, Homo sapiens
ttcttctatgtatcactgcttggctccgaatgctttctgttggctgttatgtcttatgaccgctatattgccatttgccaccctctaagatacaccaatctcatgagacccaaaatttgtgg

SEQ ID NO: 86043 - DNA, 122 bp, Homo sapiens
ttccatcgtgcacgcccgcgttttccttatccatttacccccggtggacactgggtctgtcgccatgttttgtctgcagtgaactgtgttgctgagaacacaggtgtacagataactgagtt

SEQ ID NO: 86044 - DNA, 122 bp, Homo sapiens
tctccgcccagatgccaaagccctaaggtcagccccaaatgacctgtgttctgctttatacgtctatgccactgttggggttaaagccctaggcacgcaggtcttgcctcaactgcgcctgc

SEQ ID NO: 86045 - DNA, 122 bp, Homo sapiens
gaagctcgtagcaaagtttctgggtcagcagacctcataggcaaggggcccctagctggccgcccccagccctgccaaggcaccaacgcaagaaagccgggggagcctcggtcgcattgctg

SEQ ID NO: 86046 - DNA, 122 bp, Homo sapiens
tgaaaacttcattcttctttcgagtgtatcatcctatgggctgcagaaggccttgtgcctcgagaaatgtgaaattaaatccagagaaaagcagacacctgccccagaaaggtgggggagaa

SEQ ID NO: 86047 - DNA, 122 bp, Homo sapiens
gattgggatgaacctgggcacttagccgtgaaggaacaatggcgagcctctagcccgatccgcagcggcgatgggcgcctcgctgggtcagaaacgcagtgtacaccctgccggatccagag

SEQ ID NO: 86048 - DNA, 122 bp, Homo sapiens
gaaatacgccccggttttgcgcgcgtgtgcgtgcgtgtgtgtgtgcgtgtgtgtgtgtgccgtttctctaaaattctgactcatagtctggaggacaatgattgacttttttccacttcaca

SEQ ID NO: 86049 - DNA, 122 bp, Homo sapiens
cggggcgtgttgcgtgcggaggtcaggctgccaccctctgtagttccctaaccccaaactcggagacttctaagagccacaccaccaaggaacttctagtcctggaggtcaatggtggggca

SEQ ID NO: 86050 - DNA, 122 bp, Homo sapiens
agtgtgttttccagccacccacacactgggtttgcattggagattgtttcaccctgcaaacgtcaacgtcagcagactcgtcggtgcgctgtgctatccggttgggaggtctcaccaggagc

SEQ ID NO: 86051 - DNA, 122 bp, Homo sapiens
agcgttttttttctcttacacacctgcctggctgtgcttttagtgacgacttaaaacctccgaagggttgggagacctaactgatgtagctttttagtgaaaaatgaaacaagaatgtatgt

SEQ ID NO: 86052 - DNA, 122 bp, Homo sapiens
tatccacaggccctctgtatcctgcatccgttcatttaaccaacgtggcccgcgagggggcgcgagtgggtgccagggcgcagtgggaagggggccgcggagcccgcgaggcacatgcgcag

SEQ ID NO: 86053 - DNA, 122 bp, Homo sapiens
gcgggagcgaggggcgccggctggggtgtgtgctcctggtgagtgacaccgaggggaaggcgggcgggtcggcgggcgggggcagcctgcgaggggcgggagtgtccctgcgtggggcggcc

SEQ ID NO: 86054 - DNA, 122 bp, Homo sapiens
aacagtcgccgaggcgattcccgcccaggtagttcagcgccccagtccagctcccggtaccgttccccacatggtctgttttgtgggaggctccttctcaggtgtctccggtttaagcgctt

SEQ ID NO: 86055 - DNA, 122 bp, Homo sapiens
accctgcctttgtgttgcttcctctgcagaggagacaataaataagtcaaatacataactcgtttagtagtgataaatgctaaggagaaaaataaagtataaataaactggtatatgatccc

SEQ ID NO: 86056 - DNA, 122 bp, Homo sapiens
agagacaatcttggagagaggcagacataggacgcggggagacgcagggacccacggacacgcaagcagggacccagatgcgcacagaaagccccatgctggagtacaccaagacacgcaca

SEQ ID NO: 86057 - DNA, 122 bp, Homo sapiens
cgaactcctgacctcaagtgaccggcccgccttggcatcccaaagtgctgggattacaggcgtgagccactgcaccggtccgtccctggtatttctatcaagtcatttcctttgaacacacc

SEQ ID NO: 86058 - DNA, 122 bp, Homo sapiens
tttctgtaaaaccctgggggccagatgtgctttggaagttaaagcaattccaatttaagacggtaatatgatgcacatactggatatgacacccccagtggggtttatagatagagttaggg

SEQ ID NO: 86059 - DNA, 122 bp, Homo sapiens
gccctgtccaattttttaccagattttgcatgtcagtcataatgtatcacctcccgactgcgatcagccgctctccacttcccgcaccttcacttttcaaagattcccaggtgatgccaacc

SEQ ID NO: 86060 - DNA, 122 bp, Homo sapiens
cgccccgccccttcccccgcccggacggccatggccattcccggcatcccctatgagagacggcttctcatcatggcggaccctagagataaggcgcttcaggactaccgcaagaagttgct

SEQ ID NO: 86061 - DNA, 122 bp, Homo sapiens
aagagacgcttccccactaagcttcccgggctcttcccgccgcgcgctgattctcccaggcgtcctctagcgctactgttctgctacttccctgggcctgtttcctaagtccaggtcttgtc

SEQ ID NO: 86062 - DNA, 122 bp, Homo sapiens
acggtgggggggtggggggtgctcaggcatggcgggctgcaggtccggagccctgccctccggggaggcagctaaggccaggagagaaatcgagcgcagcgctggtgggcgggcattgctgg

SEQ ID NO: 86063 - DNA, 122 bp, Homo sapiens
ctagtggcccgacgcgcaccctgggcgccaacgacggatgccagggtccctggggaccagcgcaagggctgatgggaagacattttcgtcagtagatgacccagaaacctcttggcaatgca

SEQ ID NO: 86064 - DNA, 122 bp, Homo sapiens
tggggggtcagcccctgcccggctagccgccccatccgggaggtgaggggcgcctctgcccggccaccgctactgggaagtgaggagcccctctgcccggccaccacccggtctgggaggtg

SEQ ID NO: 86065 - DNA, 122 bp, Homo sapiens
ctccatccacgcacgtacctgccatcccagctcggtctaactctagtccaacttgctctacgtgcccacacctgcccagggaaaaaaaggaccagaggagccagacccacagcctagcaact

SEQ ID NO: 86066 - DNA, 122 bp, Homo sapiens
ctgtatgtaaatccctgctctctcctttgaattcctgactgctatgcccatgcccagcaccggcacccccacgcacactgctgcctgcctctgtaaccatcagctgtatttctgaggacttt

SEQ ID NO: 86067 - DNA, 122 bp, Homo sapiens
ccgtactcacctgtcaggaagtggtcgcccagcagccatcttaggaccccgtcaacatcgcgccttctcattggctcctgcgtctcaaccaatgggctggggccgttctggccctagggtcg

SEQ ID NO: 86068 - DNA, 122 bp, Homo sapiens
taaaagctataattagctcccttaatagagaattgcacttggttcggcgtcagctaacagcgggctcccttccctggctgtgggattattaatgggtgttattttgctaatagtccgcccct

SEQ ID NO: 86069 - DNA, 122 bp, Homo sapiens
acagaccgtggtcccacattcgctaccactctgttccacgtcatccaggtacacgagctgcgtgtaggccgtgctgtctggggctcgaggctctttctgctggtgctcttggacgggcgggt

SEQ ID NO: 86070 - DNA, 122 bp, Homo sapiens
tgggcgacagagcaagaccctatctcaaacaaacaaggaaacaaaaacaaaaacaaaaaacggcctaaagatctaaaatgcactgatgggggaacctcggttcatctatagttagaaaggga

SEQ ID NO: 86071 - DNA, 122 bp, Homo sapiens
cgcaggtgccagatggtgccggctgaggcacccgcccactgcctgtgcttgactccgactcgcctgcgttggatttctagtggagtggaggtgatctgagaatgtttcttacaaagcaatga

SEQ ID NO: 86072 - DNA, 122 bp, Homo sapiens
gctgggatggagacatcggacgagctcggagatcccgacctctcaggggtcactcgcagccgaacagcctggaatatggccttgtgggcccttcccgcccaaccccctaggaccccactgct

SEQ ID NO: 86073 - DNA, 122 bp, Homo sapiens
ctggcgtctgcacacgtctctgcatctgcgtgtacgtgggagtatgaacatgtctgtgtgcgcccaggagggaggcgaccgggcttgtgtgcccagaggaacaataataactagcatttatg

SEQ ID NO: 86074 - DNA, 122 bp, Homo sapiens
cgctggtcttgcggcggttctggctccggtcttgcggtggttctggctctggtcttgtggcggttctggagctgatcttgcggcggttctggcactggtctttcggacctgcagggattcca

SEQ ID NO: 86075 - DNA, 122 bp, Homo sapiens
accacgcacgttccgccgccggatcgcctaggaaggagggaagcctgagcggggtccccgcgatgccacccagccccgccagcccccacctgccagtgtgaactgaggttcaggggctcatc

SEQ ID NO: 86076 - DNA, 122 bp, Homo sapiens
actcccttatttatagccctggcgattgacagccgcaacatccaatgacgactccgccaccgagaggcgggcttcctagactctaaaaggtgcaacaacctccggcttgcaaaaccgcttgc

SEQ ID NO: 86077 - DNA, 122 bp, Homo sapiens
accggcgccacgtgtgcctgaccacgctggtgatcatgggcagcatggccgtcatggacgcgtacctggtggagcagaaccagggcccgcgcaagatcggcgtgtgcatcatcgtgctggtg

SEQ ID NO: 86078 - DNA, 122 bp, Homo sapiens
ctatccctacggccacagctcgccccaccccccaacccccggccgaggcggcggaactcacgatcatcttcttatagagaccgtaatgcaggaccaggctatgggtcaatgccaggcgatgg

SEQ ID NO: 86079 - DNA, 122 bp, Homo sapiens
aggctgtggtgagctgagattgtgccactggcacagttccagcctgggcgacagagactccgtttcaataaaaaaataaataaataaactctcagtctttgcatattgcaagatgtattttg

SEQ ID NO: 86080 - DNA, 122 bp, Homo sapiens
gcagtgcacaagcatgggagacaaatgaggaaacaggctctgctttgaaaggcactgcagcgaactggagattcccatgcttttagcactcaccagccacctgacttccagcaaggtggccc

SEQ ID NO: 86081 - DNA, 122 bp, Homo sapiens
gaacctcctctaaacttttctgtcctttccttctcaaattgtatgctggttgtcagtccccgctttatttattatctttaggtgttagtacccttctcttgatttggttagtagatttgtct

SEQ ID NO: 86082 - DNA, 122 bp, Homo sapiens
ggaggcgagcgcggagggctccagcaagggagcagcaccatcagactcccagttggcgcccggcaggcggaaaaggtgtggagaggaaaagggaatcaagcagggagcccggtgaggaggct

SEQ ID NO: 86083 - DNA, 122 bp, Homo sapiens
ccagccgtccccagggccccggggggaagctgcaattaccgggtgcgaggccggcggggccgcagcccccacttcaaaggcgcgggaggagccgagggaggcggagctgtaattagtgcggg

SEQ ID NO: 86084 - DNA, 122 bp, Homo sapiens
aacttctgtcacgaacgaggccatggccaagacgggaaccaacgctgactgggtcactctcgtagccagcgccgcagctcccgtcccgccggccgtcttgacgcgaggcctgccgggaaacg

SEQ ID NO: 86085 - DNA, 122 bp, Homo sapiens
gacgaggctttgaaagtagggcgcagcctgagaggccggccggaccccgagtgctgtaggcgggctgggagatgggggccgccgccacccacattcccacacgcacccggcgccggcgcctc

SEQ ID NO: 86086 - DNA, 122 bp, Homo sapiens
gcaatttttctcaaaggtgcggcttcatgcatatctattaccaagcacacgtagacaagacggtgttcggaaagcacagccccgagtgggaaacaggagctgtcagcaaatcattttcacag

SEQ ID NO: 86087 - DNA, 122 bp, Homo sapiens
cgtcaaccctcgtttcctggttgtttgaaaacaatgacttgagggtccaaatttgagacacgactgtccttttctctaacaggtgtatctacgtcaaccggatctaattttaaaatgtgatg

SEQ ID NO: 86088 - DNA, 122 bp, Homo sapiens
cgtggcaatctgatacaccgagttcccttgggacaagtccaagactacgacgtctacccccgcctgggtgagcaagtccaggcggtatttgtcatcctcaggggtgcccacagctgccccac

SEQ ID NO: 86089 - DNA, 122 bp, Homo sapiens
tgcccccgccacgtcctcctgtgaggggctcagtcgaaacaggcagcggtcgcagggaaacgaagcggcacccgtcatgcctcaaggtggcccaaaagcctcttcactcccaggagacgccg

SEQ ID NO: 86090 - DNA, 122 bp, Homo sapiens
ccgctcctccattgccgcccagcggggatcgcggcgcgctgccctcccttcctgggttcccggggctgagcttcctgggaggtccgcacacccccaaccgcccgatgcaaattaaggagatt

SEQ ID NO: 86091 - DNA, 122 bp, Homo sapiens
tcgcccttgataggcagtgtatggggtgcgcagctgcaatctgcaaacccttgcagggcgcggggtttcgtacacccgctcaaggacgcaaagaacctccattctctgccatacaaagcact

SEQ ID NO: 86092 - DNA, 122 bp, Homo sapiens
tcatatctgaagagacccagtgaggtgaccaagaggactcaataagttagccacggagcccgataatagcccaggtgtttcccttcccacttcagtggtcttttcatttcatctccttgtag

SEQ ID NO: 86093 - DNA, 122 bp, Homo sapiens
gactcacttaaccttgcccagcagcagacagatctaccacagcctgttttcctgaggccacgctccagggagccctgtaagatcagtgaggctctgggtctgcccaaaccatgggcaatggg

SEQ ID NO: 86094 - DNA, 122 bp, Homo sapiens
ggatccagccagggccgtcgccgccgccaccgggacgcgaccccacaatgcatttcttttcgcacccccaccggcccacactgccctgcggcatgccgctgagggaggaagggcgggcgagc

SEQ ID NO: 86095 - DNA, 122 bp, Homo sapiens
gggatctccgcgcagcgcggccccgcgaggcgggcgccggggaggggaggggaggggccgcgctccccgcctccccgctggcccgcgcggctccccagcccggagcctactcacctcctcct

SEQ ID NO: 86096 - DNA, 122 bp, Homo sapiens
accacctggagcctggcctggcggtgtcaaacgcattctggtctcatctttttagaaacccgtggatgctcaaggaatttccggataacgtgatcccggatgcgcttgactgacttacacgg

SEQ ID NO: 86097 - DNA, 122 bp, Homo sapiens
ctacctgtctcctacggttaatgtgagaactggataaaataatgcacagagcctggcactcgataaagattattattactgcttctactaccaaagccatatccttgcccccagaagctcca

SEQ ID NO: 86098 - DNA, 122 bp, Homo sapiens
gtaccaggttcatctcactagggagtgccagacacggcgcaggtcagtgggtgcacgcgccgtgcaccagccaaagcagggcgaggcgttgcctcactcgggaggcgcaaggggtcagggag

SEQ ID NO: 86099 - DNA, 122 bp, Homo sapiens
gccaccgcgctccttttgcggcggaacaaaatcctctggctgtggttgactggctttccccggcatcgataacaacgacccatgaggggcgagccgggtagggggcgtgggggtagtggtgg

SEQ ID NO: 86100 - DNA, 122 bp, Homo sapiens
tgcagcggggatactaaggccgggacaacaaaagtacgtcgctgactcgaagctgggcggcgggtttcagaggctgagttcttaacaccagggcacttccttgtagccaccacgcccggctg

SEQ ID NO: 86101 - DNA, 122 bp, Homo sapiens
aactttccgaacctcagcggtccccatctacaatatgggggttaatgataatgccttctccgcatgtaggtggattaaatggacataaagcgcctacccccgcccggcacgtccaaaactct

SEQ ID NO: 86102 - DNA, 122 bp, Homo sapiens
attctggggacagtcacacagcattgacgaagggttagagctaaaatagccctaaaccatcgtggttgataacttccattcctgtgactaatacttctagctcacagggatagactgtctgg

SEQ ID NO: 86103 - DNA, 122 bp, Homo sapiens
ctgggcagccgggggccggtggccagagcgagggcaccagccacgaaggacggaggcgggcggggccccggagaaccctgtccctgcgtgtggccactcctcagcatcctccccacccacca

SEQ ID NO: 86104 - DNA, 122 bp, Homo sapiens
ggaagatctctgcaaagctgtttacagcgggttgtttggaggccagcttctctggcacggcgcggtgtccccgtggagcgtttccagggcgcggaggccctgggtcaccaactcgaatgaat

SEQ ID NO: 86105 - DNA, 122 bp, Homo sapiens
agccttgactcaccggcccaggccacccgaggggccattgacaactgagccttggctcaccggcccaggccacccgatggaccattgacagccgagccttggctcaccggcccaggccaccc

SEQ ID NO: 86106 - DNA, 122 bp, Homo sapiens
tgcctcagtcttgggaatcctggtgtctgcaacaaaaaaacttgaggctgtccttgcaaacggtcctcatggtgctgggggtggtgccaggcccggcgtttgcctggaacacagagcatgcg

SEQ ID NO: 86107 - DNA, 122 bp, Homo sapiens
caggtagataattcagccaatattccttcctattttcttcaactttcttgtccaaggacacgttgcaattaagtggagatgaaagagcaggaatacagacttgtcatacccagttgcatgat

SEQ ID NO: 86108 - DNA, 122 bp, Homo sapiens
ctggccaggtccgtgcgcgtttgtagtttgtaaagaaatgttctaatgtgtatatttccacgtttatctgtatattattcacttgggttgtcttctgtttgtgtttaatgtgaagcctagag

SEQ ID NO: 86109 - DNA, 122 bp, Homo sapiens
gtcagggagaaaggccgatgaggctccaagggttaaacctagagttccctcacgccccagcgactccactcccaggtatatccagccaggagaaggaaagctcacgtccacacagaaactgg

SEQ ID NO: 86110 - DNA, 122 bp, Homo sapiens
tccagcaaggcccgggccagtgtggtgccgggacagggctgggctgccccctggtggatgcgctgagcaccctggtgctgtcagcccaggagggagggcgccgtcccttgcctggtcctctc

SEQ ID NO: 86111 - DNA, 122 bp, Homo sapiens
ctccaacctcgctccacgcatggggagatcagggttccacattttcgggtaagcattagccgtcctggcgctgcacgagcgtattctacaattccgaaaactactaacttttccgtctgcaa

SEQ ID NO: 86112 - DNA, 122 bp, Homo sapiens
taacacaactgcacttgtacccctaagtccccccaaataaaacaatttttgtggcgggtccggaaccctttctagaccaacagacctcctcccgggctcggcggcggtctgctcgcacttac

SEQ ID NO: 86113 - DNA, 122 bp, Homo sapiens
cgtccgagcagcctctgtcgtcccactactgcggcaggtgcagggcgagctgtgcccatgcgaggcggcctcagggcagacggggcttctcccagacacgttccttagagcaccgagggctc

SEQ ID NO: 86114 - DNA, 122 bp, Homo sapiens
atgcctccagaggtgactgtgaggcttgaaggagataatacgcatacatcacttactacacgagttagcaattattattgcatattaatactattggtattttattttgctcattctgtttc

SEQ ID NO: 86115 - DNA, 122 bp, Homo sapiens
tgggcttctcagtgtctcgccggcggggttcggcctgagctggattgacatagcccttggcgggtgagtcgccccggacgcccgggaggagggagcggggcggccgagctgggtggccagcg

SEQ ID NO: 86116 - DNA, 122 bp, Homo sapiens
ctcagcgcagctggccggcgcctgctgggcttgatcagaggctgggtcccgtgcgtgcaccgccattccctcttcgcagggtcgttggccagaatggcgggtctccctctctttctcgcttc

SEQ ID NO: 86117 - DNA, 122 bp, Homo sapiens
tgacactctcctcggccacggcagtcccctgggcatgtctggatggcacagtcagggcctcggaagccctctacacacacacactggcctgcccggcacagttcccggggcccgcagcctcc

SEQ ID NO: 86118 - DNA, 122 bp, Homo sapiens
cgtaatgaccatagtaagaccccatgtacgtggctaatgaggcagtgacccgacgtggctcggaagccctgctggggagatcccgccccgtcaccccagaggcgctctccgacctgcagccc

SEQ ID NO: 86119 - DNA, 122 bp, Homo sapiens
ccccggggacaccactgtatcactataaaacccagaggaaacaaggaacaagtgcaagtccggggagagggaccactgtcacgcagagaggtcactgttatcaaaacgctcctggtcgtaca

SEQ ID NO: 86120 - DNA, 122 bp, Homo sapiens
aggtttagtgttatggcccaagatgtcccaccccttccagtaaatggccactggtttgctcgaaggtagttagatcaccatcaagttcctcaggataagaagcactcctacatgacaaacca

SEQ ID NO: 86121 - DNA, 122 bp, Homo sapiens
aaaatgacaagtgtttactgatatagaaacggaataacggcgctgtgggctggggagggccgagctgccttcagggttctggtctccagctgcgcggcactcacacctgccgctgtgaaaat

SEQ ID NO: 86122 - DNA, 122 bp, Homo sapiens
cctcaagacggcctgtggtctgcctccaggcaagcaagaagcccgcagtgctatatgactcgaggcatggactggagccccaaaggcggcgcacaccctgctcctgagcctgctgctcgttt

SEQ ID NO: 86123 - DNA, 122 bp, Homo sapiens
cagcgatggctctccctgctggaggattctggaagtcacctggctggaccaagccctctccgtgttctctgtcagcccactccccagagccgctaggcctgatgtgcacaagcagactaata

SEQ ID NO: 86124 - DNA, 122 bp, Homo sapiens
accctgttctcaggcatctgggtacctgcagctgggggccggcacttgtgtacccggctccgaggaaggaccgacacccaggaggggaggctccaggcaggccatggcttccaggaagcagc

SEQ ID NO: 86125 - DNA, 122 bp, Homo sapiens
tcgccgggaggaaggggtgtgtgtttcgcctgcgcagtggtcctggccaccggctcgcggcgcgtggaggctgctcccagccgcgcccgagtcagactcgggtgggggtcccggcggcggta

SEQ ID NO: 86126 - DNA, 122 bp, Homo sapiens
ttctaactggccacaatccagtcctccctgttgcactgagtcagctccctccaaaggcggcgctttccaggcctcctggttgccctttcccagcagacctttcaagtgctcacccacactca

SEQ ID NO: 86127 - DNA, 122 bp, Homo sapiens
ctagagaaaagttagcccttaacgtttctgacagggctctgatggctgctctgggaagcccgcgggcctcctgcctgcggtgtggctaaggaggggagggcagaaggcagagtgggactggg

SEQ ID NO: 86128 - DNA, 122 bp, Homo sapiens
tctctgtctcagccatgtttgaccgtgagaacaaggccggcgtgaacttcagcgagttcacgggtgtgtggaagtacatcacggactggcagaacgtcttccgcacgtacgaccgggacaac

SEQ ID NO: 86129 - DNA, 122 bp, Homo sapiens
atcccacaggagaaatgtctttggggagtaagccaaagtcacttggggaaaatgtcaggtcggttggtcagaaacacgcttgtaggcactgggaagcattggcacgcaaatgcaagaattgc

SEQ ID NO: 86130 - DNA, 122 bp, Homo sapiens
ccattatgagggtctacaagcaaaagcactagcccaatcatacccaaaaactcatgttggcggagagcccatgcctcagatgaaaggcgtgaataactagagtggagcggacaaagctaaca

SEQ ID NO: 86131 - DNA, 122 bp, Homo sapiens
agcctgggcggcagagtgagttcgtgtctcaaaacaaaacaaaaatagtttccagccaggcgcggtggttcacgcctgaaatctcaacactttgggagtccaaggtggcgcatcatctgagg

SEQ ID NO: 86132 - DNA, 122 bp, Homo sapiens
aaccactccagatatgggactgtggtctaccctctacaacatgcccactgttgggagacacgggacctccgtggctcacctggcctccctacccaccatctgcacctgtgccctggcggagc

SEQ ID NO: 86133 - DNA, 122 bp, Homo sapiens
cagccagggccgttccagcaactccaaggctggctggtgtgcgctgaagctgtcgggagtcggaccagctgcacagttaatacatatgtgtcctaggctcctctctccttccaacgcaaata

SEQ ID NO: 86134 - DNA, 122 bp, Homo sapiens
cgtgtgcctcagtttcctcatttattaaaagaggaggttccagtggtatgtaccccctaacgatgtgcgagcatcacagaaatgacacgagacacacactcagaacatgccttggcgtggca

SEQ ID NO: 86135 - DNA, 122 bp, Homo sapiens
cagggttccgctgggcctggggcggggctttgagcccgacccccgcacttgttcctgccgcgaccctccactcgaatgggccagtccctccagggcccctgctgggagctctggtctcaaga

SEQ ID NO: 86136 - DNA, 122 bp, Homo sapiens
aaatgcaaaaaaccatccttaaagcctcagaagttaagcatagcatgaaaaaaataatcccgggtctcaggtctatcatgacaaggcagttaatgtcaaaggcaaagtgaaaattttccatc

SEQ ID NO: 86137 - DNA, 122 bp, Homo sapiens
cctattgtgtggtgtgatgagtatttgaataatacagcccatctgctgtcatttggaaaccggtgatgatgtgtggtctatttgtaaattgagtgcagcacatctaatatgtgatagtttcc

SEQ ID NO: 86138 - DNA, 122 bp, Homo sapiens
ggaggcgcctgcgcgcggtgaggtagtttttgcgtttggctttgccgccgcggtgtagtccgcgggggcgtctcgcgcgggcagactgccgcccctcaagcgtggttcctgccgggaatgac

SEQ ID NO: 86139 - DNA, 122 bp, Homo sapiens
tccggttgcgctccccgcctggccccgagggtaaacctgcctccgcggaacacatctccgcgagactgggccaaagctttggggcctgcactcctcgcaaaggagagcctccgagaccggag

SEQ ID NO: 86140 - DNA, 122 bp, Homo sapiens
ggttgagagggggagattaatccgggcaagccaaggggaccttagacttgcagccagggccgccacccgaggagcccgcatgcagggacgcgcctgaaggcttagtcaaacccggggaaatg

SEQ ID NO: 86141 - DNA, 122 bp, Homo sapiens
ctttggctgcgcggacttgttgcggtggctgggttgtgggtcctccggcgccgagggacccgagcttcctgggtacccggcaggctgcccgcccgctgggggctgggaaggggcgtgccaat

SEQ ID NO: 86142 - DNA, 122 bp, Homo sapiens
aaaggaaaacaacccaacccaaccatgagtcacgttgtatttaaaaccgagtgaggccgtcggcctgccggtatcgaggctggtttgtcaggccccatccagcccaacagcctgctcgcagc

SEQ ID NO: 86143 - DNA, 122 bp, Homo sapiens
gggcagggagggtggaagagggcctccagtgcccaagaggtgccccacaagcatgggacccgccccctcccctggactgccccacccactggggcaccagccactccctggggaggagggag

SEQ ID NO: 86144 - DNA, 122 bp, Homo sapiens
catggggtgggtgaggtcggaggatggtgaggggggaggtggacggaggtcattgccggtcgccctccacagggtgctggcctgcagttatcgacataaataaaaacttggtggtctaaaaa

SEQ ID NO: 86145 - DNA, 122 bp, Homo sapiens
gtacccagaggtcttctgggaacgcacctaatcacacaactccgtccctgtagtcctggccgcagcctcagcacagccagcaccccatgctgggcaggaggacgaggaccccagggtctgga

SEQ ID NO: 86146 - DNA, 122 bp, Homo sapiens
ccagctcgccggcgggaccatgaagaagttctctcggatgcccaagtcggagggcggcagcggcggcggagcggcgggtggcggggctggcggggccggggccggggccggctgcggctccg

SEQ ID NO: 86147 - DNA, 122 bp, Homo sapiens
tactccttttctcggcccgcagggcccctaacctgctcgaacctgttgtgcagtagaggccgccgagtccctttaaggccccgccgcgcctgcgccttgggttctcctgacgcggcccatcc

SEQ ID NO: 86148 - DNA, 122 bp, Homo sapiens
aggagcaccgatactgtctgcaccgtggccgccccttctcaccgacgacgaggagcactgcgactgtctgtactgtggcctccctgtctcactgacgatgaggagcactgtgactctctgca

SEQ ID NO: 86149 - DNA, 122 bp, Homo sapiens
ccctttccagacccctcctccctcccaccaaagccgaagtagctacagcttcaccctacgcgaagcgaaaagcaaatgacgcacaacctaacgaagcagtgaggggcggagccaacctacca

SEQ ID NO: 86150 - DNA, 122 bp, Homo sapiens
ctctttatattaaaaagtaaggaggtcctggggttaagtacacaaagcacctaagtccttcgggtagtttagtgtcagttctacaaagtaagctttggcttcctggcaccagtgaggctcaa

SEQ ID NO: 86151 - DNA, 122 bp, Homo sapiens
gctgctccaccaggaggcccgcgtctctcatgcggaggggccccactgcctggatcagttcgtgggacggagtgatctcgatccgagggctcaggcccgaggcccctgctggcttggccgcg

SEQ ID NO: 86152 - DNA, 122 bp, Homo sapiens
ggttctataatcagaacaggacaattcctgctggttttccagttaggcagctgatggggtcgcagctgctcccatttttcagcaagtgccaaggaaaggccagatttccagtgggtctgggg

SEQ ID NO: 86153 - DNA, 122 bp, Homo sapiens
aaaaaaaaaacatgaaatgaaatccgtgtcctctttatcctcccctctctctgttctgcgcggcaggtagcaaggaacggtggcggggccaaaggtttcctcaaagaccctgggggccgggc

SEQ ID NO: 86154 - DNA, 122 bp, Homo sapiens
atccccacttctctctttctgtatgtagccgtccaagaacaagtcacctccaagtgtagccggatcaaggcaagccccccatctagcaagcacttgatgccacccagaactgggcttcttca

SEQ ID NO: 86155 - DNA, 122 bp, Homo sapiens
caaggtggaacctcggctgcggtgggcaggaacatgacccagggacggccccccacacagcgacaatagtcagcagacccaagatgccttctactaggtcccatgtgaacactgtgggatta

SEQ ID NO: 86156 - DNA, 122 bp, Homo sapiens
aactgacgctctgagctctaaccaaagctctctcgtgcttgagcggggcagcctgacttacgagaacaccatttcctacgagaccactgccgctgggtgcatattcaattcaagcctcctta

SEQ ID NO: 86157 - DNA, 122 bp, Homo sapiens
cccacctccaacgccctcagctttgctttgagagccctgagatttctagaccggtcttcccgtgcctgcaggttggctgcaaatgtttctgtacacggacaactggtccgggacaagatccc

SEQ ID NO: 86158 - DNA, 122 bp, Homo sapiens
actcacccctcagaggtgtcatggccactgaggccaggacgaactgagggacagtcacagcgtggaggggactaaggcgacagcaaagggcagcctgggaggctggcttgggtcctgggaca

SEQ ID NO: 86159 - DNA, 122 bp, Homo sapiens
tcttctgttcccaccttcaagaactgtgcacaatccgcggagtaagcttccggctggggccggcagaacctggacaggtgggcgggtcaaggcagagcttgactcacctgcggaggcagtgg

SEQ ID NO: 86160 - DNA, 122 bp, Homo sapiens
gaggcagggtgcggcccggagaactcctccctgttccaacagcagctctccagcccgcagcgcttcctgacgttccgttagttcagtctcctgaacttctctgcatgtagattcctctcagg

SEQ ID NO: 86161 - DNA, 122 bp, Homo sapiens
gtcaccccctgatgtatgtttttcctgactcttcgtattttagaacggcccgcagtcaggcgcccttgctcccgctccctcatccttgcctgggcgttggagcgactgtggcatacaggcgg

SEQ ID NO: 86162 - DNA, 122 bp, Homo sapiens
ggatcatttctttttgttcgtgaggtcactgtccaggcctctcatatcatgaccagacggcgggtctccatcttctttcactcctgtggccctggctgctttacacaatctgttctataagg

SEQ ID NO: 86163 - DNA, 122 bp, Homo sapiens
agagatgcttctgagagtcaggggactacctgtcaactaccaaggctgcagaacactgagcgataagggttatgagtatatgggatcctcttacctcactgtaggaggagtgaaaagaaaaa

SEQ ID NO: 86164 - DNA, 122 bp, Homo sapiens
ctggtttttgtggcttgtcgggcatcacggatcctaccaatgtgtgatgtctcccccggacgcccagctttaaaagttctctcttttgtactctgtccttttatttctcaagccagtcgatg

SEQ ID NO: 86165 - DNA, 122 bp, Homo sapiens
ccagtaccggctgcgaggtgcgcaagcaggggaacttgtactgcgccaacagaacgattccgagagccgggcctagtaacacaggggcttttcttcagaacggtgtccagaccggagcttgc

SEQ ID NO: 86166 - DNA, 122 bp, Homo sapiens
atcgcgcctttgtccctccctccgttccttgccccgcaccctcactttcgccgccctgtgcgttgcctgtcccggaactggttccctcaagccgccctcacctgttctgacttcccctcgag

SEQ ID NO: 86167 - DNA, 122 bp, Homo sapiens
gcggtcggtggtcggggctgtaatttgcacacgtgtttgtgatttagtgattccgattgtcgtgcgaggccatggagtaggtgcctggctgctccgtgtatttttgaatgaaggcatgtgag

SEQ ID NO: 86168 - DNA, 122 bp, Homo sapiens
agggcagccctcttcagacctggtagtagcactaacctggctccaccacaggcaggagcccgaggtgtggcttccaacccagacggctgcggtgaggatggagccgcactggggagcctctt

SEQ ID NO: 86169 - DNA, 122 bp, Homo sapiens
gcctgcggggtcgcagctccggagaggacagggccttgctccaggcgaggaggccgggggcgcctggccaggacttgcccaacgggttcctggcaggcatggacctgaaacctgaaaccaag

SEQ ID NO: 86170 - DNA, 122 bp, Homo sapiens
gggattctgcaggatctgaggatctaaggggacccctagtcctgaactcggaaccaactgcgtctctcacggtcccgagcccaggaccaggaaggaccctgtgagtctccgcacataggata

SEQ ID NO: 86171 - DNA, 122 bp, Homo sapiens
aatggtaaaactgaaagataaaactgaagagaacgttctgaaagggcaacatgcacgccccgcctagtggcctgacccagggaagggaccccgtggctgtggggcccatctgggctcaagtc

SEQ ID NO: 86172 - DNA, 122 bp, Homo sapiens
gaagagactgacaactacagtatggagtagtggccatgtacctacattaagagttatttacgatgagtaaataaagggagcaacaggggaccagaggaggtgaaatgaataattttcacctt

SEQ ID NO: 86173 - DNA, 122 bp, Homo sapiens
ctaggagcagtcagcaattacacagacacagctgctgtgtgattcaaagacacatatgcacgtagactcaaatacagagttgcttgaatgtgttcacaaatatacacacccggccgggcgcg

SEQ ID NO: 86174 - DNA, 122 bp, Homo sapiens
tctgaaggtcactccgaggagtcaatgagaaggcactcacagggtgcgtcgcacagctgccgcttggtccgcgggagctgaagctgaatccagggaggagccccttggattccttcaagtct

SEQ ID NO: 86175 - DNA, 122 bp, Homo sapiens
agcctggcaagggggcgaagccgaccgcccaggctctaatcggatcagatctaatccgttcgcagccaaagccactagcctagatctcgcacagccaggcccgccataacgcatcccgggag

SEQ ID NO: 86176 - DNA, 122 bp, Homo sapiens
caccccgcctagggtgcggggttcctgggccttgggaggttctgtgcaggctgcttgggccgcgtccccagggttcagccgcatgtcagggtgaccatggaggccgccactcccgactacgg

SEQ ID NO: 86177 - DNA, 122 bp, Homo sapiens
agcacaggtccagctaggctgggtcatatgacaagcattagccaatgagctgtgaggacacgtgagtacaggtccagctaggctgggacatgtgactggcactggcccatgggctgtgagca

SEQ ID NO: 86178 - DNA, 122 bp, Homo sapiens
gcctgagggaacacactcccccctacgtccttctccaacacagcagagccaggaaggacccggatggaagttaggacaaagaggcccagaattggcacagataccaacagaccattcgttga

SEQ ID NO: 86179 - DNA, 122 bp, Homo sapiens
tggctcagcctcccccctcatcatcctcttcgtcctcctcctcctcatctgcctcctcctcgtccgcgcagctcacccaccggcccccgacgccctcactgcccctgcctttgtccacccac

SEQ ID NO: 86180 - DNA, 122 bp, Homo sapiens
cctaatctcacggctccctcctggggcccgctgggggtggcgctcacgcctgaacatgctcgctgcaaatcttacctgctccagtcctcgggcagtaggactggctgccccgggagaaagtg

SEQ ID NO: 86181 - DNA, 122 bp, Homo sapiens
cgtcccccaccgcccggcgccgctcattctgggcaggatcggccccgtctgaggctacaccgcattagggagctgcacccctcggcttgacctctcatggcctttgcaacaacatcaaagcc

SEQ ID NO: 86182 - DNA, 122 bp, Homo sapiens
gataggggttgacttagaggccaagggcctggagtcccaagcgcagagcctgccaggcggcgggctcctcagggctgggccagggcctgtgccttgacacatgtgtccttgcagcagcgtgg

SEQ ID NO: 86183 - DNA, 122 bp, Homo sapiens
cccagaggcttggggggaaggagggagggaagcaggctcctgctggtgaccaggagcaggcgagagggcttcacacaaataatagtgataataaagagtaaaagcaaagcatttaaatcgag

SEQ ID NO: 86184 - DNA, 122 bp, Homo sapiens
agagggtcacggtgacgcccccgggctgggcaggcggagcaggtgcacagcagagactcacggcagcgccaggcccacgccgggacactcatcgatgaccacaatcccatagcggtcacaca

SEQ ID NO: 86185 - DNA, 122 bp, Homo sapiens
gcgggggccgccccaggcaggctggcttcattcccaggctgctgccgatgcgtgtctggccgagtgatctctgctaaacagaagaatctcaagaaatggcaagggatggaggcagggatggg

SEQ ID NO: 86186 - DNA, 122 bp, Homo sapiens
ggaagaaatgtcaactctttgtttgctcttttaatgtcagtcatgtccttttccttttaccggtcattccggtttactcacaatcctacaaatcaatcctgctcattcttaattttccagta

SEQ ID NO: 86187 - DNA, 122 bp, Homo sapiens
cctcctcttcctcctcggaatctgagaagtccgaaggtttcccgggactgctcgagtgcgcgggcgaggggggcagcggccctggcagccgcgggtcccgcaggtgctgggggtcggaggac

SEQ ID NO: 86188 - DNA, 122 bp, Homo sapiens
tcaaattccagctctaccagctgtaagtttagcagcaagttacttaacatctcaaagtctcggtaaaagactctgtaaaaagaaggtgatgcctctttcaaagtagttcttagtattaaatt

SEQ ID NO: 86189 - DNA, 122 bp, Homo sapiens
atgaggacacatggcatgggctgcctgaccggcccccaccatgtctcctcaaggagaaaccgggcttgtgctgtagacaggaagcctctgacactgcgccagcagacactcaagaaaactgc

SEQ ID NO: 86190 - DNA, 122 bp, Homo sapiens
gcgcctgggcagggccgctgtatatatagagcgcaggcgcgctctgattggtgctctggtcgcccgcctggctggcaggctctgagccgctgcgctgctcccaagttgtgtttgttccacct

SEQ ID NO: 86191 - DNA, 122 bp, Homo sapiens
cagccatttattgagcgtcttctgtgtgccatacacttaggactatgtgatttctgccttcggggattttacagcatagaggagattaaacaagtgactttattgccttccctcgacctccc

SEQ ID NO: 86192 - DNA, 122 bp, Homo sapiens
gcagggacaaggtctcactatgttgcccaggctggaaggctcatcttttgaaaggatacacgtgtaaagctcttagcacagtattttatagctaccaagtactcaaataatgatgtctctca

SEQ ID NO: 86193 - DNA, 122 bp, Homo sapiens
gcgggaccgagcagggcggggcgcttaggtggcctcgggggaggcggggcttggaggctccgcccctcaggccccgcctcctccccggctagtctttggccgccgccgaaccccgcgcgcca

SEQ ID NO: 86194 - DNA, 122 bp, Homo sapiens
gtggccgggcgctacctgcgcccacagggcctggggaaaccttgagtacgaatgccacgccgcggcttgtgggcgacaccaccgctgtcaccatgccccagggccacctggcaatgctgctc

SEQ ID NO: 86195 - DNA, 122 bp, Homo sapiens
tgggcagccacagcacagcagcgcagatggcgccttacacggcaggaagagattctctcacgctcctggcagctgaaggtctgaggtcaaggcgtccgcagggctgctttctcctgaggcct

SEQ ID NO: 86196 - DNA, 122 bp, Homo sapiens
aaaggctatactactaccagccaaactagactaagaagtagtattagaataggccaggcgcggtggctcacacctgtaatctcagcactttgggaggccaagacgggcagatcacaaagtca

SEQ ID NO: 86197 - DNA, 122 bp, Homo sapiens
gctcagtaagtcgctgcctcccaggtcattgggcccattgtgttgaaatccaacttcgaacgacgccccttccttgccaccatcctcaggtccagttcccccgcgcacagccttcctcaccg

SEQ ID NO: 86198 - DNA, 122 bp, Homo sapiens
agattctgtttcgtcttcttctattgagagattgacctcttgagtgatttgtgtgctttccggcaaatgatggagacgcgtaaaccggcggaacggctggccttgccatactcgctgcgcac

SEQ ID NO: 86199 - DNA, 122 bp, Homo sapiens
tactgaggatttggtgattagcaaaatagacattgtccttgcccttgtggtcctctgcagcgggagtcagatgttaaagaaataaacaaataccatatgtgaattataataagttcaagtgt

SEQ ID NO: 86200 - DNA, 122 bp, Homo sapiens
ctggcagctgcaccacgcagacctgttggctgcagctgcccgagttccgcgaggtgggcgcgcacctgaaggagaagtaccacgcagcactcaaggtggacctgctgcagggtgctggcaac

SEQ ID NO: 86201 - DNA, 122 bp, Homo sapiens
aggccgccgagcttgcccgggctgcgctgcgcggctgcgaacgggggctggggtcgccatcgatgtacaggggtccgagcccagactttggggggcattttaaggcacagcgtgggaagggg

SEQ ID NO: 86202 - DNA, 122 bp, Homo sapiens
tgctcccccaaaacctagggatggggcagcctcgggagatgctatctgctttaaggacgtcgcttcatcatgtctaccgtgcacctaacagtggctgctggggaaggaagggaggtgggcct

SEQ ID NO: 86203 - DNA, 122 bp, Homo sapiens
tcccgaccaattttgggcaaagcaggggcggcggcgcgctacgtgccggccatgagtcagcgcgcaggaatgcgcaggacgctttgttccctgcgcggcggacgaacgtgctgggaccgggg

SEQ ID NO: 86204 - DNA, 122 bp, Homo sapiens
ggagctaaatggtagacgtgaaggcagccacaatgacctcacccagctctgggggtctcacgtgatcgacaaagttaactcacggcaaaaaaaaaccccatcgtaccgagcagttcacgtca

SEQ ID NO: 86205 - DNA, 122 bp, Homo sapiens
tgaaagacagaatacaataggctactatgagaagaaacagctctagtgccaaccgtaggccgttggcatcagacacaggcctgggtacaggctgtgactgtctcccagcagcgtccgcactg

SEQ ID NO: 86206 - DNA, 122 bp, Homo sapiens
cctgctgcttccatttatagttacccaagctgcttagatctatctttttccagctgggcacgttggctcacacttgtaatcccagcactttgggaggccgaggcaggtggatcacttgaggt

SEQ ID NO: 86207 - DNA, 122 bp, Homo sapiens
ggtcgaatcctgagttcgggagctgtggacacggagggtcaactgaactccagtgcactgcgttgtaacataaaacgatgcagactgcctggcatctgtgaagttcttttgaaacgtgtgct

SEQ ID NO: 86208 - DNA, 122 bp, Homo sapiens
ttgtaaacttctccagcgtgaccctagaaatgtgtaaaatgctgaaccgtaccagaaagccgctgcaattgtgtatacggtgggggggggcagcaagttgaatgacttttagtcattcagga

SEQ ID NO: 86209 - DNA, 122 bp, Homo sapiens
gtgattgtggtaaggcctgctgatttacgagggcagttgtacatgctaaagtacccccagcggtgccataacgccccacatgccgctggatctcctaggtgtttttcgttgcatgtatatct

SEQ ID NO: 86210 - DNA, 122 bp, Homo sapiens
ccacaggtgggctctggctggtggtggctggagaggcgtccagggggcgtagcgacctggcgcggtggcctggggtgggctgtggagcccttcctagcctgagacctgttgggcaccccctg

SEQ ID NO: 86211 - DNA, 122 bp, Homo sapiens
cgtcaccccgcctacttcccgacagcctccgggcgccgtcacctgcagcgcgactgagcgcgggaggacgctctagccaccctagagacatcgaaactcttcccaggccttgcagcacccgt

SEQ ID NO: 86212 - DNA, 122 bp, Homo sapiens
acaaaagaaaatttgcatctgactgctcttaactacacaagggaatcaggcttaacaacacgctcagcagctgtgtgactatggccaatttgcttaagctctgtgcttcagtttcctactgc

SEQ ID NO: 86213 - DNA, 122 bp, Homo sapiens
tcaagttctgggcccacgacgcctgctctggacaagtgactgaggtggattacgccaactcggatccagcggtcgtgaggtctggatgagtcaagaaagccttagccaacgctgttcagcag

SEQ ID NO: 86214 - DNA, 122 bp, Homo sapiens
ttgggtggacaccaacacttattctactacagaagctaaattgaaccctcaggcagggtacgtgaaagtggcaagagatgtcaagaccactgggcaagttggccagttgttccttaggaatg

SEQ ID NO: 86215 - DNA, 122 bp, Homo sapiens
attatgagctcagggcttcaggctcaagcctcatacctagtccttttttttttttccagacgaacaagactaagcataatgttatttgtgttttgggaaagaaacctcaaatctcaacctta

SEQ ID NO: 86216 - DNA, 122 bp, Homo sapiens
cttccgccgctctaagtgacgcccgagggtgggagagaagggagaagcccttcgggcaggcgataggaaagggcccctgaagaggagaaagcgacagagagaagtgcaactgggagaggccg

SEQ ID NO: 86217 - DNA, 122 bp, Homo sapiens
ctgggcgggggtcgggagagggagtcgggctgctggaggggctggggcctccggggccaccgctcttggaagggggccatctctcatgccagggatgtgcaagatccggggtgcctggggcc

SEQ ID NO: 86218 - DNA, 122 bp, Homo sapiens
tggggcaaaccaacgggcgcctcctccctgcgctggaggaaggatgccctgttgggttcacgggtaaaaagcaaaaactgaagggtcccagacccctgttctctgcattgcctcctccctct

SEQ ID NO: 86219 - DNA, 122 bp, Homo sapiens
ccgcccaagccccgcgtaaacctgggtgacctcggagacatccgttggagcatgagttcccgacatcaggcggcggcggtggtccgggagaaacccggcggcggggagataagcctgcccag

SEQ ID NO: 86220 - DNA, 122 bp, Homo sapiens
agtgttgtctctggttgttggttctaaagctgtaatcaacctaaagccctgcctctctttcgttataaagaaagagattgctgggtcagagactgaagatgctgagaatctatcaagaccag

SEQ ID NO: 86221 - DNA, 122 bp, Homo sapiens
aggcggcccggatgatcatcagcagcgtgtatggggcccagcagagcccaaagatgctcacgatgacggccagcgacttggccactttcctgtcccgagacagccgaaagcgctgggtgaag

SEQ ID NO: 86222 - DNA, 122 bp, Homo sapiens
tcatctctacaaaaataatttaagccagatgtggtgatgcacacctgtagctgctactcacgtggctgaagctgagggatcacttgtagccaggagtttgaggctgcaatgagctatgcttg

SEQ ID NO: 86223 - DNA, 122 bp, Homo sapiens
cctgtctctgagactacatcctgctgagttcatggaggttttgttttcctgggattcagacgcttaggttctgtgcaagaagagtgcagatgccaaatttgtgagatgctgggttaagcaaa

SEQ ID NO: 86224 - DNA, 122 bp, Homo sapiens
acctcacatcctttttctctttatcaaaatagtattagtccaggttcctccagagaggatcgtgtggtgtgggaccttccggtttccagacaaagggttttggagtaccgtggtgtagtcgc

SEQ ID NO: 86225 - DNA, 122 bp, Homo sapiens
ggggactaggctgtggaacacgatgatgacgagccaatcagggtagaactgcacgtgctccgggttcatactggagctgggagcgaaacgggagccgggcgagctgggagaacgtgggctcc

SEQ ID NO: 86226 - DNA, 122 bp, Homo sapiens
gaggaggcagggtgacagtaaccagccgcaccggaatgacgatggggagcgctgcacctacggcttgccaagaccccagcaatatctttcctaataagtctagcagtgcctgaggctcgcct

SEQ ID NO: 86227 - DNA, 122 bp, Homo sapiens
tacactggcggcggacaaaagttgtcctcttcgtggtaggaaaacgcaatcgcgttaatccgttgggccgctgtgaaagcctttcccccaccgggaaggtctgtttcactcggggagaggtg

SEQ ID NO: 86228 - DNA, 122 bp, Homo sapiens
gaaaagcagctcccactccagtccctggcagccccctttcagtgtaagagtgtgctagagcgatgtctgcctcccctccagactgggcactcccgggcacatgcattgccctccaggcaggg

SEQ ID NO: 86229 - DNA, 122 bp, Homo sapiens
cctcactctcgcttcctgccccagctgcactgcacgactgtgcaacgggctccacccccccgtcccctgggctctgagagcctctgaggggcagcttgtcttgggacccaagggaccaccct

SEQ ID NO: 86230 - DNA, 122 bp, Homo sapiens
ttccgggtttgtgcgcgcccaggactgaagccaggccggggcaggttggctggacctgggcggggtagaggcggggccccaggcggagagaccttgccctttagaaccggcagagggagggc

SEQ ID NO: 86231 - DNA, 122 bp, Homo sapiens
attcaataaatgatgtgtaatgggtggttagactgatggaaaggcaggccttcccagtgacggtaaaggacctggggcaaaagagacctgtggttgagtcctgatccccacacattagcaca

SEQ ID NO: 86232 - DNA, 122 bp, Homo sapiens
ttcgtaataactgccatctttaaataacaacttcccgtgacctggcaggagaaatcgtcacgtgaactcagacagtggttgggttgactgcgaatgacactgtgcagtgttgggcctgtttc

SEQ ID NO: 86233 - DNA, 122 bp, Homo sapiens
ccctgcgcgcgcgcccctgcggaccagcatccttcccgcgcggctcctagagagacgcaccgagtggaagacactactcggcttggccaggacgcgctcttcccgccccctccgcccgggag

SEQ ID NO: 86234 - DNA, 122 bp, Homo sapiens
cctccttccagttcctcctgcgcaacaaacaagatgaagactacaattcccagcaggcaacgcccccgcagcctcggcctgtccctatgctggaggaaggatgcattctggaacttgtagtc

SEQ ID NO: 86235 - DNA, 122 bp, Homo sapiens
aaggaaaactagcaaagggggttgtcctaaagacattcctcagctgcactgataagggaccgaggcccaacatagaaatgcctttgtcctttgtgtgaccagcgggcttccaggaaatagtc

SEQ ID NO: 86236 - DNA, 122 bp, Homo sapiens
ggggcgtggccgcgctgtgccgggcggaccctacccgttcattggcgggaggctggagtccgcctctgcggagcttcccactcaatcagttgtgcgggtcgtgttgctacagcgaggaccgg

SEQ ID NO: 86237 - DNA, 122 bp, Homo sapiens
caaggggatgacacagctgctgagaggctagagaaggtagaggagatggcgcaggggacacgggcaaagacttgggggttcctgggaccctcagacgtgtgtcctcttctccctcctcccag

SEQ ID NO: 86238 - DNA, 122 bp, Homo sapiens
ggctctgccctctcggccccgcccatatcggaccctggcccctcctctttctggctcccccggatgctcctggcaaagactcggtccttctggaatcttgtaacggttctaacagctgggtg

SEQ ID NO: 86239 - DNA, 122 bp, Homo sapiens
tttgttttacctggggagcagggctgtgtgatgggagcttggcacttcctaaatccaccccgaagacaataggtcacattcagcggggctcctgccccaccggctcccccaaggcggccctg

SEQ ID NO: 86240 - DNA, 122 bp, Homo sapiens
tgtggccgtgggaacatgtggatctgtgagcctggccaggggccccagtgcaggggcaagcgccccctcctccactggaagagagccttgtccgatcccccagccaagggcctttgcaggga

SEQ ID NO: 86241 - DNA, 122 bp, Homo sapiens
cgcgggctgatgacgtacggaagctgccggcgttgccctctcccaagatggcggccaggtcgcctgctcgggcctcccaggcgactttgccccactgcgcccgcgctctcttctcctttcca

SEQ ID NO: 86242 - DNA, 122 bp, Homo sapiens
ccggcgcggatcttgtgcgacaggctggagactttggcgcgcagctgggtcgtgggtctccggaacggccccagcagcctccactcgcggaaggcgctgggtggctttcgacggctggcgac

SEQ ID NO: 86243 - DNA, 122 bp, Homo sapiens
gtacatcatgagatataaacactcattttgagagcaaaacattacccaatgcattgaagccgctgtgttctcttctgtaattgaatacctgtgtccaccagaggtaatcatgatcttgaatt

SEQ ID NO: 86244 - DNA, 122 bp, Homo sapiens
cacaaaggggaagaagccctcgtcgccgctgggagaggcgccccctgagagcggcccggacgggaagctgggcccatctggagagctcatgtcacctgcagcatctgcggggacaggtggct

SEQ ID NO: 86245 - DNA, 122 bp, Homo sapiens
gcagactggtaagaaaaccagcaagaaaacaagccaagttctcaaaaactcaccccaccccgctccactcccagtcctgttttccaaagtctctgcgatcagctgtttatattacatgggac

SEQ ID NO: 86246 - DNA, 122 bp, Homo sapiens
cacggcgagtcaaggagggtcgcggcggctcacagtggttcccacggtcgcgctgcgagccgccagctgctcctgccctcagctcagagcccagtcctgctgcctggggcgggagggggtgg

SEQ ID NO: 86247 - DNA, 122 bp, Homo sapiens
cgcctctaaatggaaaaccaaacagcccgctctcagatcctcgttccttagcaacacagccgcattctgcaggaagctacactacctgaggttggctggattgtgtcatttagtcctcccac

SEQ ID NO: 86248 - DNA, 122 bp, Homo sapiens
gggagccgcgaggcccgggcgagctcgggcgggaccggaggctgcgaaggctgccgggagcgggactcgcagctcctggatatgccagcgttcctggaagactcctgggtcctgacgaaaga

SEQ ID NO: 86249 - DNA, 122 bp, Homo sapiens
ctagccacattaattccaccctctactgattagtggtgaagtgaccccttccaaaaccggcgcttagtggatctggtgactcagaggcatcaaaagctgctgtcctctctctctctctcaac

SEQ ID NO: 86250 - DNA, 122 bp, Homo sapiens
ctactcgggaggctgaggcaggagaatggcgtgaacccaggaagcggagcttgcagtgagcggagatcgcgccactgccctccaggctgggtgacagagcaagactccgtctcaaaaaaaaa

SEQ ID NO: 86251 - DNA, 122 bp, Homo sapiens
taggcatgagccaccacacttagcccagcctgtgctttcttaaatgaaaatctaagcatacggctgggtgtggtggctcacgcctgtaatcccagcattttgggaggccaaggtgggcagat

SEQ ID NO: 86252 - DNA, 122 bp, Homo sapiens
cccaccaccctctcactcactgccctggctggaaggtgacggcatctccctgaccggcagcgccaggatggcagccccacaacagtgtcctggtcgccccagaggcatgctgagcgcccatg

SEQ ID NO: 86253 - DNA, 122 bp, Homo sapiens
aataagtgcaattcaataagcttttgacttgttctgcccaagcaaatcctgcctttatatcgaccttgcaagcagaacagagaatgctgtttggaaggcagaattcatagtacctagttttc

SEQ ID NO: 86254 - DNA, 122 bp, Homo sapiens
tttgggaggccgaggctggcggataactaggtcaggagattaagaccgtcccggctaacacggtgaaaccccgtctctactaaaaaatagaaaaaaattatccgggcgtggtggcgggcccc

SEQ ID NO: 86255 - DNA, 122 bp, Homo sapiens
ccgggggggagagaaggcatttccgccgtggaaaactgtctgagctgcgtgccttgtgtccgggaagggcccgcagggggcagaacgcgtggcgggcagggacagggagggagggagagctg

SEQ ID NO: 86256 - DNA, 122 bp, Homo sapiens
gtggccgcagcagggcaaaggcggctgagcctttcccggtctgaggtccccagccctccgcgctccaccagcctggctgcacctgaaatccacccatttgggacaaggaggagtttttttga

SEQ ID NO: 86257 - DNA, 122 bp, Homo sapiens
attgaggcttaatcctgagctggtcctttccagccaataaatcaactccagctccctctgcgaggctggcatgattgttccatttcacccagccgctcagtcccttgcctgttacactgtgg

SEQ ID NO: 86258 - DNA, 122 bp, Homo sapiens
tgtgaaggctgcctgggtagccgtagaggacgaggccactctaaagcctcgttttcccagcggaattttaactattctaaggatgtccttacagccagttccccactccgctactcagagtg

SEQ ID NO: 86259 - DNA, 122 bp, Homo sapiens
aggcgtgttagcaggttgggcaccggtgggcgggaggaggagacacgagtatggagcttgcgcagtatctacccaacctgcggctggcccgtgccaaagaggaaagtgcttccggcagcctg

SEQ ID NO: 86260 - DNA, 122 bp, Homo sapiens
caaccacgggcgtttagtggccagctggtgggctggggagggcggccgctgcccccctgccgctggtactctcctcgactacgcgtattcttaagcaataacaacgtaatccgtattatcca

SEQ ID NO: 86261 - DNA, 122 bp, Homo sapiens
tttgtgttattctacatattatatatttatacattgtgatggttaatctaggtgccagctcgtctaggccacagttctcagctatttggtcaaacatatctggatgttgcagtgaaaggatt

SEQ ID NO: 86262 - DNA, 122 bp, Homo sapiens
cacggccgccaccgccagctcccccaggcggggctccaccggcagtggtgtgggcaggggcgctgaaaagagcagagcaggcccatgggtcaggaggcaggaccctgcgcaagggaggcagt

SEQ ID NO: 86263 - DNA, 122 bp, Homo sapiens
ccaccgcgagcggaacgagttcccggaggatcctgagttcgaggcggtggtgcggcaggccgagctggccatcgagcgctgcatctttcccgagcgcatctaccagggctccagcggaagct

SEQ ID NO: 86264 - DNA, 122 bp, Homo sapiens
aagcaagactcacctaacctcttgccttttgtgtctttaccctcactagaatgttatttccgagacacaaacttcatcttgtcacttccctgtttaaaacttttcaatggtttcacattgaa

SEQ ID NO: 86265 - DNA, 122 bp, Homo sapiens
acccctcccataacccccgcgccactccgaaatcgggtcccgtaggctcaggggaccctacgctggcaggaactcagacacagttcacggctagagatgggcgccgactcgggggtcgtacc

SEQ ID NO: 86266 - DNA, 122 bp, Homo sapiens
agactccgccctgtgctcagcttcagagacttccctgaagccaccgcctggaatgccggacggagtgctcaggccgagaaggagtgaggtcaccacctgctgcttaaagacagcagaggcgc

SEQ ID NO: 86267 - DNA, 122 bp, Homo sapiens
tacccggctccccggcctgcgccccacgcgctttcccgccctcctcctcgcggagctgcgcgtgggtccggtggcttcacctcctacgcttcccggcgcccactccgggccccgtcccctct

SEQ ID NO: 86268 - DNA, 122 bp, Homo sapiens
aatgactactgctcccggacaggaagtgactggggcgcggggaggaggggggcacagcggcgcaggcgagctccgagaccagatgtgcggctccaactccagatgttcttcatctccgtcct

SEQ ID NO: 86269 - DNA, 122 bp, Homo sapiens
acctcatcacaaataaggagacacacacactcaaggcctttgaggagattttccccaaaccgttttagaatagatttactctcagcaggctctcctacaccattacacagtctttgcttttt

SEQ ID NO: 86270 - DNA, 122 bp, Homo sapiens
ggaacggtattccgtttccgatttcagttccggttcagacactctggtgggaaaggctcacgctgctgctggagggtctttaatagccaacatgtgttaataccccttttaaatcagtatcg

SEQ ID NO: 86271 - DNA, 122 bp, Homo sapiens
tgatgggaaggaaagaaaattacctttagagctgcgcgccgcggcggcggaagatggctgcggccgagttggcggacactcagctgatgcttggagtcgggctgatcgaaaaggacacaaat

SEQ ID NO: 86272 - DNA, 122 bp, Homo sapiens
ctgttatggcacatcacaagacgctgaatcaaagaacacctggagcatctcagtagccttcggaaaagaacatggaaaagcaagtaacatccttctaaagctcttaccctaaaatgctaaga

SEQ ID NO: 86273 - DNA, 122 bp, Homo sapiens
gtagggtccagcgtcaaagcgaatcatggggtccagggctgagctgtgcactctcttaggcggattctccttcctcctgctactgataccaggcgagggggccaagggtggatccctcagag

SEQ ID NO: 86274 - DNA, 122 bp, Homo sapiens
ccaggctctggtcatgtgggtgacttcacattcctgttggttactggggacagccagctgcgggcaggcggggcccagctctgctccgtgcggaggctgtgttctgccctctccctgcccac

SEQ ID NO: 86275 - DNA, 122 bp, Homo sapiens
gcagatcaatacccagtgttttgtcctcactcacctccaagatctggggggctcccaaagcgggggaaagcagggctgcctcgagctgctcctaggcccccacaggagagcttctcttgcat

SEQ ID NO: 86276 - DNA, 122 bp, Homo sapiens
tggacctgctcgctcgctccgcaccccagaaggccccggaggtggggagggcgacgctgccggtttatagtcgggcacctgtcggaacctatgctctgagaggctgtgacgcgcccaaggtc

SEQ ID NO: 86277 - DNA, 122 bp, Homo sapiens
gcatgcagaagcagccgcgggccggcggggcgcgcagataaggtctgggggcgtgggtttcgggctgtacctgcattatcgcggcttccttaagctcggatgaatatgtaaatctctcgctg

SEQ ID NO: 86278 - DNA, 122 bp, Homo sapiens
gacagtggttttctactcagacccgaagatacaacaccatatttttactcctggacagttcggtgcggacatgacgatccggtctctggcccattagggttcccagaccttggcctggcagt

SEQ ID NO: 86279 - DNA, 122 bp, Homo sapiens
ctgagcgcctggccagttagggattccgcgtggccaggacaacggccaatcgtcgtggagcgcggcgcctccgcggagaggtccggtccgaatatccctccgccttcctccctccctcgctc

SEQ ID NO: 86280 - DNA, 122 bp, Homo sapiens
acctaaccttctcaccaccgagcaatcctgcctatgctggacatgcatcttaggcaactccggatggaggtgggatgagggagcccggggcagataccaggaggtctgggccttagtaggga

SEQ ID NO: 86281 - DNA, 122 bp, Homo sapiens
ctccccggcccggagccggctccgcaggcccccgagcccgaggcgcgtccggctgctcggcgccccaactccccgggctgcaaagaaactttcctatggcccccgccccccgccatgctcca

SEQ ID NO: 86282 - DNA, 122 bp, Homo sapiens
ctgtagcagggggtctccaagctggctgcagagaccctccctcagagaagagactgagaacgcgggctgctacagaatcccagccgggcttctaccatccaaaccccttttggcgaattctc

SEQ ID NO: 86283 - DNA, 122 bp, Homo sapiens
tttattataactggttctccacaggcttgtcggtgctccacgccagcagcacaaacaacccgccctctgtgtcccaccgcagggaatctgagtgctggcccatatcacagcccagtaatctt

SEQ ID NO: 86284 - DNA, 122 bp, Homo sapiens
agaacgagcaaaagcgcatcctgggcttgctggagaacttctagaggcaccttggccctgcgcatcatggactctctcagcttccctcccaggatcagtttctacacaactctgtgtggctt

SEQ ID NO: 86285 - DNA, 122 bp, Homo sapiens
tgggcggagagagaagcgggggccagggccgtgggcggcgggagaacctggggtcagggccgtgggtacagggagaagccggggtcagggccgtgggcggagggagcagcgggggtcagggc

SEQ ID NO: 86286 - DNA, 122 bp, Homo sapiens
ctgccaactggcactgcagcagcccccacctaaattttgaaagaaatatttttcactacccgactacagttcaacttctaattggtgaataacatacatgtggctcaacagttttgaaacta

SEQ ID NO: 86287 - DNA, 122 bp, Homo sapiens
gaagggggaagagttatttcccttacatggtgttttgtgacaatcatattaaatgatgcacgtgaaatgcttagcacagtgctggtccgtcactagtgtacaatacatgatggccatttaca

SEQ ID NO: 86288 - DNA, 122 bp, Homo sapiens
caaaatgtatttcaaatgaataacataaccgcactggaggaaaaaataaaagaactaattcgagtaacttttataggtgtgagccaccgcacttggctgttttgtttttgtttttgtttttg

SEQ ID NO: 86289 - DNA, 122 bp, Homo sapiens
agcctgaaacagtgccgtgcgcgtgagaaggaagagggtcggtgtcttcccgcccgaggccggactgccccagtgaaggatcttggacgttctagtgttgtttgccgaagtcgagagggagg

SEQ ID NO: 86290 - DNA, 122 bp, Homo sapiens
gtacaacgtgcaggaggccgagagctcaggcgaggccgtgtgtctgaacggagcgggcggcggcgctggcggggcggcaggcgcggagggcggacccgaggcggcggggggcgcggccgagt

SEQ ID NO: 86291 - DNA, 122 bp, Homo sapiens
ctgttgtttaggaagctcattaaggccctctacagctgcagcaaaagtgttgaccccacacggtcaagggaaacaaaatcccagaaggctaaggtgttgtaccatgaggctaaatggaaatc

SEQ ID NO: 86292 - DNA, 122 bp, Homo sapiens
agaacatgtgaggctaccagaggctaggagacaggcatggaacagattctgtctcatggccgtcagaaggaaccaacactgctgacaccttgatttcagacttctacctcctgaactttgag

SEQ ID NO: 86293 - DNA, 122 bp, Homo sapiens
gcttttcttctcccaggaagaatccagaatagttcagacaagcttcaggtccgccagaaccggggaaaacaacgtgtagggtttgttttaaagggcttttaaatggggtttgggagatccag

SEQ ID NO: 86294 - DNA, 122 bp, Homo sapiens
gcgggcggcagccagggcgaccgcggaggcggcgggcagggcgcgtgcgcactgcaggggcgccagatttggcgggagggggagtgtccaaagctctttgtttgatggcatctctgtttaca

SEQ ID NO: 86295 - DNA, 122 bp, Homo sapiens
gcctgggctagctcaggaggagggaggggttggggggccagggtgcggctggggcgggcacgggagccggtacctgtcaaacaagagccaaggagcaaactagcttcttagtcacctttctc

SEQ ID NO: 86296 - DNA, 122 bp, Homo sapiens
actgatgatccaatgggggagatagacctgcacgtgtttaataaaaggaagtggctattccggtttctttttgatgggcaagcattttgcaaggccttgggctatgtgtgtgcaaggctaag

SEQ ID NO: 86297 - DNA, 122 bp, Homo sapiens
gagaagggcggggaagggagggcttaaaaagtgggggagagcctgggtagaacagagaagcgagcaagaacaggtgggaagaaaaacagcagcctgatccgtcttgcttttcccttttctcc

SEQ ID NO: 86298 - DNA, 122 bp, Homo sapiens
ccacagcgttcggtggctgaggtataaccctgcagagcatgatgtggactgctttcagcacgtgccacagactgcccttggggtccagtcatcggtccatgggaaccatgtgtgtgaccagc

SEQ ID NO: 86299 - DNA, 122 bp, Homo sapiens
attgactagaaacacgagagaaccgttctccgcagctcactccacggtctgccctgaccccggggcctgggatcacccgaattattcgcagggttcctgttttcgtaatcagggccggagct

SEQ ID NO: 86300 - DNA, 122 bp, Homo sapiens
tgaggacatgaaaggtccattttatgtttctctcctttaaaaactccccagtggcctactcggcagcattgctggggacccactggtcatttttcataaaaataagaccacagtgtggacca

SEQ ID NO: 86301 - DNA, 122 bp, Homo sapiens
acattctcagcttcccattttctatattaaagagaaagatatctttctaagcttgaagcccgcaatgacaacaaagcagaggtgctgagcagaatattaactgctaagggctaaactcaccc

SEQ ID NO: 86302 - DNA, 122 bp, Homo sapiens
tcccgcccctcgagtcacgtgatccgcttcaccttgtcgcgcgcccatcctaaacccgcgcgccccgcctcggctgcaacgttgctgacaggctggcgtgtcccaagctctttcattctgtt

SEQ ID NO: 86303 - DNA, 122 bp, Homo sapiens
atgtttcagaagggcgaggctggatagttcggttagaatggaggtgcgaggcaggagagacgggcggatgagaaagaaatccggcccctgttgaattaattttgtgttctttcaacaggtag

SEQ ID NO: 86304 - DNA, 122 bp, Homo sapiens
ccctggaaaaaaggtgagaaacaaacacacaaaaggcacctaacccagtccaaaacgcctcggcggcgcgcagccaaccctacagctgcgcccgaacccgccactcaccagccgcgcgtgcg

SEQ ID NO: 86305 - DNA, 122 bp, Homo sapiens
cggcgcgcgcccgcactgccaaggaccccaacacctataaagtactctcgctggtaggtccgcggccaggccccggcgcccgggagggctgggagtacggggagggcggcgccgagctcctg

SEQ ID NO: 86306 - DNA, 122 bp, Homo sapiens
actggggctgaggtcggccatcacgggcctgctccctgtgcacaggcagggacagttgtccgagaggcgctgggctgtctctgccgagccccggccccagcacgcgctctcccggctggaac

SEQ ID NO: 86307 - DNA, 122 bp, Homo sapiens
aacgatgaaggaatgaggaccacacggaacacagggaggacacgcagtgggtgggctgcacgccacatcctacccagcaccacgagtgcccggagagcagagcctctgcctgtgttctccac

SEQ ID NO: 86308 - DNA, 122 bp, Homo sapiens
tcatctttcccaaatttatggctctggctcctttcacaccctgacatggggcattttggtcggcaatgccctcccaaccccagtgccacctctgatcaaattccacctggttccttagcttt

SEQ ID NO: 86309 - DNA, 122 bp, Homo sapiens
tgcactccagcttgggcgacagatagagactccgtctcaaaaaaaaaaaaaaaagtatctcggaagtgtcataattgtattgtggttatgcagaaaaatatccttgttcttaggataaagca

SEQ ID NO: 86310 - DNA, 122 bp, Homo sapiens
ggctgtcagccaaagcccatgcccccaaagttaccagtcctcctcccctgcagctgcagacgcagacgccgccatatcttcaccggcccgcagccggaaccggaaatgcccttagggaagtc

SEQ ID NO: 86311 - DNA, 122 bp, Homo sapiens
gctgacttccagctgctcatgggaaggtgtttcactgaggcactctactacaaaactggccgagggaattgccaggggaagctaaggttgatgggtgctgccgccaccatgcactgcagaag

SEQ ID NO: 86312 - DNA, 122 bp, Homo sapiens
gatgagtctgggacgtggggtggttcgtggcgcagacctctattgtggaagtgtcatgatcgcattcttggatattgactcgattctatatgggtctctcgaatggaacccctgcgagtagc

SEQ ID NO: 86313 - DNA, 122 bp, Homo sapiens
gttagacacccgggctggagttccgcatctgggcccgaggttgggactccagtctggggtcgctgtccgcagccggggctggtgaccgcaggcctggaggggggcccagaggtcttacctgg

SEQ ID NO: 86314 - DNA, 122 bp, Homo sapiens
cgccgctgggcagggaggatgcctccaggtagttcttggcgaacgccgcagctccggtgacgcgaggagagccggaaggagacgcggccggcgagaggtgagcgaactgtattgctctgcgg

SEQ ID NO: 86315 - DNA, 122 bp, Homo sapiens
gtggctgcggcccctcctcggccggcgaagcccccgcggcgccgccagcagcgccggcgccggggccgccccggtactggaagctggagtacatgcagatctcccgctcattccgcgggaag

SEQ ID NO: 86316 - DNA, 122 bp, Homo sapiens
gcgtgggccgcagctggcagcacaggaagtccaggtggaagagcggcggcgtgggcggcccggcgcggcgcggcgagtgcgggctggtatcggccgagctcgctttttctggggacagagag

SEQ ID NO: 86317 - DNA, 122 bp, Homo sapiens
ctaaaaattgccttaagagacagtggtgaaggctaaacagtttccgtgacaggcttagcacggggcctgggagacccaagcgcgcggcaagctcgggtcctctctgtcggcaggtcctcacc

SEQ ID NO: 86318 - DNA, 122 bp, Homo sapiens
tcccccaagagttgggcccacaaatgggttggcggagccctgtggatacagggatacacacgtgcagacatgaactaggggagtcacaaacacgggtcttgttccccatgcactgtctgcct

SEQ ID NO: 86319 - DNA, 122 bp, Homo sapiens
gagcccagcgctgactgcgccgcggagaaagccagtgggaacccagacccataggagacccgcgtccccgctcggcctggccaggccccgcgctatggagttcctctgggcccctctcttgg

SEQ ID NO: 86320 - DNA, 122 bp, Homo sapiens
tggcagcgacagtcagcgcagggcgatcagtggcgcggagccttaccactcgagaatattcgaagggaggggctcggcacagatgtaaggcaccgggtctttcttaatgcgaaggtagtcct

SEQ ID NO: 86321 - DNA, 122 bp, Homo sapiens
gaggaagaatatgtcatcagtcaccaaggtttccagaaacagtgaccggtttcattgagccgttctctatttctatttccttggtgaccatattacaagaaagctagctagggtactgggct

SEQ ID NO: 86322 - DNA, 122 bp, Homo sapiens
cagcagaagcgcctgggcgcggcctccgagctcctcagccccaggcaagggggacttcgccgcctggagctcacccccagggcccgtccaggccagcagcgccagtcgcccggccggaaggc

SEQ ID NO: 86323 - DNA, 122 bp, Homo sapiens
aaggtcctgagtgtgaatgttgacatctgtgcaggcatgcttatataccctgacacatcacgtaacaaaacacttgctgcctattttagtgtagttgtgtatgttacacttacctgacccaa

SEQ ID NO: 86324 - DNA, 122 bp, Homo sapiens
tttccatgaaataattatatttcttatgctcttggacatgtacacctctaagcctaaaagcggagaaagatgttttggttttttttacgtgagctgggggagggagaagaaaagtggcagcg

SEQ ID NO: 86325 - DNA, 122 bp, Homo sapiens
ctgtccggcgctttagcttagcaggcgacgttgcgggccctgggcgccaggagagcttcccggagtcgaccttcctgctggctgctctgtgaccgcttcccggctctgccctcttggccgaa

SEQ ID NO: 86326 - DNA, 122 bp, Homo sapiens
cggcatcgccggcttcgacttcggccccagacttagggctcagcgggggccggtgagtaacggacacgtccgccgccatcttgggaaacccggcgccttctgggaccagcgagccggggcgg

SEQ ID NO: 86327 - DNA, 122 bp, Homo sapiens
tcctttttaaataaatacttgggaccacatttctctgctagaaccacagaaatggtgctgcggccccgaccgtcgggggctccggcgtcacagagcctgtcccttgtatctgggagccccgg

SEQ ID NO: 86328 - DNA, 122 bp, Homo sapiens
cgggccggtgatagacctccaggcagatggggcaggtgtactgcgcctccaggccgctgtcgccgcccgccggcccggccggcggctgccgctgctgagccgaggccaccaggctgcggaac

SEQ ID NO: 86329 - DNA, 122 bp, Homo sapiens
gttgttgggagggagcacagcgtggaggcggctccagtcccccttgcacaggatccagggcgtcgtgtcgaacttgaagtgcagcttaggtgagaagtcggtgctgatgaggttgggcatgc

SEQ ID NO: 86330 - DNA, 122 bp, Homo sapiens
ccgcagtatgattacgcagctatcacttgcctaaaatttctaggtgcaaatagattgctgcgtcacctccttccctcccacaactatgctctaatctcatttgctgcaatgtagtgactgac

SEQ ID NO: 86331 - DNA, 122 bp, Homo sapiens
taaatgtggacttggcacgcctatttggacagtctgcgaatctcaaacctgttatgcatacgcacgggtttctaacacagaggtaaggccactttcatttcaggttcaagagaatcaagacc

SEQ ID NO: 86332 - DNA, 122 bp, Homo sapiens
cctctccacagccgaaggaaactaaggctcgggtggggaagtgtccccctggggtctctccgcttaggctgcaggctgggcatcctttttcaaactcttttagcacagcgaagtcgagggca

SEQ ID NO: 86333 - DNA, 122 bp, Homo sapiens
aacagagtcctccatcgctgaagagacttaaccaaggtcaccagcctgtcctcttccactcgcacttacacagtgcatgtaaggagtccaggagctttttatggaactaactaatgaaggaa

SEQ ID NO: 86334 - DNA, 122 bp, Homo sapiens
cccctatgcacagataacacaaacagctaacgagtattgatcttactatgggccaggcaacgtgacagttgctttatacatcaaatctcttgtaatccccactccaacccggtgaggtaggt

SEQ ID NO: 86335 - DNA, 122 bp, Homo sapiens
gaggcaggactggattgtagcccaggataaagagaagttgcgggatgacagctgtgccgtcggcccagacagaaccatctggacagaggacagaggataagggagatggttgaaaatactac

SEQ ID NO: 86336 - DNA, 122 bp, Homo sapiens
gatctgccgcccggctcggcggccgcgcggggggaagctcgcaagtgaaactattattatcgccctgcgaagcatggagctgttggaagatgccgcgtagagacggaaggagccgccgccgc

SEQ ID NO: 86337 - DNA, 122 bp, Homo sapiens
gactgaaattattattattattgttaataacccataacctaataaattccaaagaatgatcgcatacttggcctggaatagttattgcaatttagcgaaggaatatcctggataaaacttga

SEQ ID NO: 86338 - DNA, 122 bp, Homo sapiens
tggggcttcgcctggtctaggagggtccgcaggcccccgagtctctgggagaacagcctccggccacgccgtgcgctctcggtcgcagacacaggcgtccctgggtcccgcaggatcctgcc

SEQ ID NO: 86339 - DNA, 122 bp, Homo sapiens
atgatttgttcatggtctccaaaatgcgatatgcttttttttcatctttggctccttgctcgcatcttttgctctacactaacaactatccctgtaaatcttcacccatctagatgaagttt

SEQ ID NO: 86340 - DNA, 122 bp, Homo sapiens
ccgggcagggcttcagacccacagatcctaacttgtctgcgctcagcctgagagcaggcccgggccaagccaggcaggggccacaactccccagacagggggaaatgggcctaagggatggg

SEQ ID NO: 86341 - DNA, 122 bp, Homo sapiens
attttcagttagcaatgtgagtgaattgcttaatggaggactttggaaatacaattaaatcgctgtgtgctataacaagtttgccattgttttcttgctgttggtaagattctgaggaaact

SEQ ID NO: 86342 - DNA, 122 bp, Homo sapiens
aacccgtagactgcaaacgctaggaaggagaccatgtctcccaagtttggggctgagtttcgttagatagtaaaatctaccagcaggtgccgctccaaccacggcccacaggacccttcccg

SEQ ID NO: 86343 - DNA, 122 bp, Homo sapiens
gcctggatgccctccccggcgcccccggcagcgcggacgctgcaggtggagcccggcccgcgggcctgcagcccggctgcgcccccagaaacccaaagtggggcctctggctgctgcggcgc

SEQ ID NO: 86344 - DNA, 122 bp, Homo sapiens
agaggggaggaggagtccatggagtgaaatccaatctactggaagggtcccaggagggaccgggttcccccagctcctctctccaccattcacccccgggatgctcccccaagaaaagcaaa

SEQ ID NO: 86345 - DNA, 122 bp, Homo sapiens
cttagaagggaccaaccctgataacaccttgttctcagacctctaacatctgaaactatacgaaaataaagttctgtgtttatgtcactcggtttgtggtacattgctgtggcagccctagt

SEQ ID NO: 86346 - DNA, 122 bp, Homo sapiens
gtccctcaccccagcttccccgcccagccagggccagggcgaggggggacgggggaggagcggagccatcaagaccgacttggaaatggtgcttccggagctgcagggaaggggctcagaaa

SEQ ID NO: 86347 - DNA, 122 bp, Homo sapiens
tgctgacatggtgtctcctgagtggagctgccctctgcataaccacaggcgagtctgcatcgcggccacactgccctctggatgcccacacatggggctttctccacgtgccccgtcatgtc

SEQ ID NO: 86348 - DNA, 122 bp, Homo sapiens
gggtgccagcctgtagtgctgccagccaatcagcgttgagaccaaggcgagcccgccaatcggcagtcaggaggtgctaaaggggcggggagtagggcggagccttgcctgtcagtcatggg

SEQ ID NO: 86349 - DNA, 122 bp, Homo sapiens
ttctggaatagacacctcagcttgctacttgctgggctgatctaagatactctgaagattcgctagggacttatgagctactaatgctcagggatttagtgtcctgaagaactctttaatcc

SEQ ID NO: 86350 - DNA, 122 bp, Homo sapiens
tccctccctcacgcccctcggggctgcggaagtgctctacagactggagctgcacgaaggcgaccagcggactaccgttcctaggaggcagcgcggcggtgcgcctacggctcccggcagcc

SEQ ID NO: 86351 - DNA, 122 bp, Homo sapiens
cgggctgcagaggtctcctaagcccaccctggacccccgagagctccctggccggagcagcgcagtgccacaacctcactcactccctgacaacccaggccaggggccctgcaacaaataca

SEQ ID NO: 86352 - DNA, 122 bp, Homo sapiens
tccggccagaggcgccgccgccccgcgccccgccgttgcagcgcctcctgggccgcgcgccggcgagatccgcacaaaatccagactcccggagcggctccctccagcaccgcggcgggccc

SEQ ID NO: 86353 - DNA, 122 bp, Homo sapiens
acaaagcgacaccgctgccgccgccattttgttgggccgaggctcaggcaggagaattggcgcgtcctccctctttctctttccgtcagccattggctacctcctccaaagcacagagtctt

SEQ ID NO: 86354 - DNA, 122 bp, Homo sapiens
ggcgggcgcccgggattcgcgcaggccccgcccctcggcggccccgcccagggagcgctgcggcagtttccatggtgagatggtcaacaagcctgtaagttcctcagctacgactaccaggt

SEQ ID NO: 86355 - DNA, 122 bp, Homo sapiens
acctcccggctctcgctcgctcgctcccccccgctttccttttagcttttgtaagttacacgtcaaaatggccgatctgacatcggtgctcacttctgttatgttttctccctctagtaaaa

SEQ ID NO: 86356 - DNA, 122 bp, Homo sapiens
aaagggcaactctctaactttgtttattcagcaaatcttttactgagtgcgacatgtacccggagcctgagcacctctagaaatctaatctagggcactgttctagaagctgggaatttagc

SEQ ID NO: 86357 - DNA, 122 bp, Homo sapiens
ggcaggtgccgggacgctgggcctggcggtgttttcgtcgtgctcagcggtgggaggaggcggaagaaaccagagcctgggaggtgaggggcgggcccgtcgttactttttatttgatgtta

SEQ ID NO: 86358 - DNA, 122 bp, Homo sapiens
gaaaaacatgggcctatccttcagccctattaacttccccacaccaatactcctgttacccggaacctctcaaagccatgcttaggctttgagtgggggctgagctatctgatattccctga

SEQ ID NO: 86359 - DNA, 122 bp, Homo sapiens
cacctggagcagtgcgtgcagctgcgccacctgcaggcagaagtgaaacaggtgagcaaacgactggatgcttggggaggctgcgctacagatgcttgatacctcatcgacttcccggaaat

SEQ ID NO: 86360 - DNA, 122 bp, Homo sapiens
gggcgcccctgaccttgaatggcccaaagcccagaattcctaccacgcccccggcgtccgcgaaggagcagccaacctaaccctacctgctgtgaccaggtggaggtgtgtggtggaagggg

SEQ ID NO: 86361 - DNA, 122 bp, Homo sapiens
atcttgtatttgcatgaagccttctgtctcaccaaacacgtctccatgcccaatctcattcgtaatgcctctctttcacaccaacagccagtccctcacacatccttttggtcatgtcttca

SEQ ID NO: 86362 - DNA, 122 bp, Homo sapiens
gcgaaagggagccaggaacagaaagaggagcgatgagcggccccgcccaccctaaggccccgccccagcccagtgccagccactcccatgcatgcaagccccttcctgaaggcccgaggcgg

SEQ ID NO: 86363 - DNA, 122 bp, Homo sapiens
ccgccagaggcggctttccaaaggatgctggcgatggagctgcggagccctgaccatccccgagcagaataccctgacttctctccctccccagggccggtggctggactctgaacaactcc

SEQ ID NO: 86364 - DNA, 122 bp, Homo sapiens
accctaagactaagagcctggaaagaaaaaggcaaatcacccaataaacgcctgtcttcgcgactctctaacccggtcgtatcgcgagggatccggatattgaaagcccctttgccggaaga

SEQ ID NO: 86365 - DNA, 122 bp, Homo sapiens
ccctggaccccaccggcaggtccacagggaggtgcagggccgtcgtcacctcatcactcccgacttcacggagtgtctgcacctgacgctgagccgcggccttccctgtctctgacctaacc

SEQ ID NO: 86366 - DNA, 122 bp, Homo sapiens
tgcaccaactcagcaaacaggtgtcctcctacttccccctccgccctcctggccgggtttcgtgccaggcactgttctggaatataagagtgaatgagagatgtattgtgctccagaaagcc

SEQ ID NO: 86367 - DNA, 122 bp, Homo sapiens
cctgtgctctattaagctatcctccatgagccgcaggagccacgcctgattggttcctcccggacaatgtgtgtttccattgctgaaggtgggtgagaaaatcagaaccgttcccttgaaga

SEQ ID NO: 86368 - DNA, 122 bp, Homo sapiens
cggaccctcgccgcgtcttccggctccagtatcctcgggaacctcctccctttcatcactcgcctcgacaagaccttctgaggccacacatctcgaggcaacagctctgtgccccgcctttg

SEQ ID NO: 86369 - DNA, 122 bp, Homo sapiens
atgggagagaatatagaaagagttgagagaataagctgtggggtgagccaggaagcactccgacattgccgtgttgggtagagaagccattaaaagggacttgggagaaaatggctagcgag

SEQ ID NO: 86370 - DNA, 122 bp, Homo sapiens
ctagaggtccctctgctaaatccttgtcctcacccccagaaagcagaaacctccagttcgcgacatcctgtgcaatacaggagaattatggtggagtcagatgttcttgagcaagagggacg

SEQ ID NO: 86371 - DNA, 122 bp, Homo sapiens
taatcccacaggaagtggatagcagtgtctatgaaaactgtggccactaattgatcactgcggacggtgagagatgggtatgtaacattctttacactcttctctctacttttgagtatgtt

SEQ ID NO: 86372 - DNA, 122 bp, Homo sapiens
ggccttgatcctgggctgctggtgctacctgcggctgcagcgcatcagccagtcagaggacgaggagagcatcgtgggggatggggagaccaaggaacccttcctgctggtgcagtattcgg

SEQ ID NO: 86373 - DNA, 122 bp, Homo sapiens
gatcacagatggaaaggagggactgactcgcaaggtggccctccagccagcctcagggcccggctcagagcaagatctgtcttggcacaagtagcccagcatcccagtgccccacccagctc

SEQ ID NO: 86374 - DNA, 122 bp, Homo sapiens
ccgcacctcgaacaccgtattgtcgggtgcaggtacaggggccaccagggctgtgctgaccgcccggcccagcaggaagccctggtctgtgtctggcatcagggaggaggggacggggacct

SEQ ID NO: 86375 - DNA, 122 bp, Homo sapiens
gtgccaagtattgtgccagattaccaaattcctaatcttaggttaccaaatgacctacttcgggaaaacattgaaccaggagcctgtataactaacttacagttctggcaactgctagaact

SEQ ID NO: 86376 - DNA, 122 bp, Homo sapiens
ggattctgctgcggaaaaactggacttggaggaagggcaggagagaagggcgaggtgtgtcggcctgcctcaggtctggggtgcccaattctggttgtgcaaacagtgagggaaaaaaaggg

SEQ ID NO: 86377 - DNA, 122 bp, Homo sapiens
agggtccgggggtggcggtgcacggcctgcggcgccgccgggtgggcccgacgcttcgcgcgtctgctggttttccctaggaaggcggggagtaccaaaatcagttactggctgaagcttag

SEQ ID NO: 86378 - DNA, 122 bp, Homo sapiens
gctgctctggactttgccatggcgtgcgtgcagctcctggaagttgtcccagggtgatgccgactgtctggccgcgccagggcgcataacccgggcccggggtgctcagtccgtggtctccg

SEQ ID NO: 86379 - DNA, 122 bp, Homo sapiens
acacactttttcctctttgctgatggggacattgaggctcatgacgattacaagacttgccgcctcctggcacagacctctttccctctgcctcaaagcctttccatgcatccacctctctg

SEQ ID NO: 86380 - DNA, 122 bp, Homo sapiens
tttggcgtctgagaccttgaggccccaggcggtcgcgcgacggggtcgcgcctctttctgcgactccatggcggacactctggtcaggccttcgatataatatttcaatatagacttaagga

SEQ ID NO: 86381 - DNA, 122 bp, Homo sapiens
gttccgccagttagactttttcccccatggcctcgctaaggctagttcctcgtcacgtgacgtgacaggcttggtcacgtgacataccagctccttccattcccgtgtgcggggggaggggg

SEQ ID NO: 86382 - DNA, 122 bp, Homo sapiens
gctccatctcggcgcgagatcatttccaaattaaattttatggtccattacttatcgctccgacactggtctaatggaatcttaaatggaactgacttgatctgcgtggggctggcctctca

SEQ ID NO: 86383 - DNA, 122 bp, Homo sapiens
ctccaggaagccgctactttgtgtccatttctcttgaggaaacttaccaccttggttgagcggcttcatggcagacagcagcgagccagcggccggactctgtatttcggaccccactccag

SEQ ID NO: 86384 - DNA, 122 bp, Homo sapiens
atttctcatgagtagtttagcatcatcctcttggtgcatccttaagatagtgaatcagttcgcccgagatctggttgtttaaaagtgtgtggcaccttccgtctccctctctttctcgctcc

SEQ ID NO: 86385 - DNA, 122 bp, Homo sapiens
ctctgagatcacgaaccactgaccagtgcacagaacacggtggacccagggagctgagggcggaatgtggtcaggatgttttagtactctcctgatcacgtgggcattttcctgccacacat

SEQ ID NO: 86386 - DNA, 122 bp, Homo sapiens
gtgcgccctgaggtgcgctgggaggccctgacataggaggctcctgtgtgggggagcccgcggctggaactgctccgcttctggggaagacagagggtccaagagactgaaagcctgccctc

SEQ ID NO: 86387 - DNA, 122 bp, Homo sapiens
ggtctccgcggcgaggcgggaggtgccagctgcggggactgctgggacttgtagtccgcgcgttgggggaccgggacggcagtgtcggggggctcggggctggtgcccggcgggcctctgcg

SEQ ID NO: 86388 - DNA, 122 bp, Homo sapiens
gtcatctcccggccccttttctgagatgaaagtggctgtctctaacctctgacaacgcggcgtcctgccgacacgatgtgaatgccagcggcagcagtgcgctgacttccaggagggggcag

SEQ ID NO: 86389 - DNA, 122 bp, Homo sapiens
gcaggaccttccttttccaggaagagccagcttttctcggagcgcagtcctgggactctccgcagccccgccccgcctggccactgcgtctggcattcctgggtcgttagaggacaggcctg

SEQ ID NO: 86390 - DNA, 122 bp, Homo sapiens
ttgtttaactcccgggactaaagactcctagagggggccctctcaccatgagtctaacagcggaggagggttgagctgggagtggaaccagttcttatttagagcagtacaaactgcattcc

SEQ ID NO: 86391 - DNA, 122 bp, Homo sapiens
ccggcccgccttttcccctctccggggctgcggccctcctccccccgcccgcggcctcggcgccgcccccgccgctcccggcccgctccgccgccagctctccagctgcccagcgcggcgtg

SEQ ID NO: 86392 - DNA, 122 bp, Homo sapiens
tgtcccatgctgtgggtcagaacctttcaaggctggactctgagaaatgtcaggaccccacgactcaccagcagtcgagggcaggatgacagccgccatcctgtgactccgacagcaacagg

SEQ ID NO: 86393 - DNA, 122 bp, Homo sapiens
tgagagaggacagaacctctaaccaggaagaggctgtccccgccaagctccggagaggcgcggaagcatgaccctcaggtatgggaccaggtctataggaaacccatgtggtgtgccctaat

SEQ ID NO: 86394 - DNA, 122 bp, Homo sapiens
tccccgggaggaggtgggcttcgagtcacgtgacccgtgccctacgggagggggtgcggtcggggacccggcaggaggcggccgagaagagaggaccgtgggggcgttcgcgtggctcccag

SEQ ID NO: 86395 - DNA, 122 bp, Homo sapiens
ccaccgccccctcttattgttttacccctgccgaaagggccagggaacccccgagcacagcgtcagccaatcacgcatctcctccagagccggacccaaccttcccgtgtccctctgcggag

SEQ ID NO: 86396 - DNA, 122 bp, Homo sapiens
gaccaatcagaagaggtcttgggcgggcgctgccgtccagcgagccaataggcgggcagtcggagccgggcttgcccgggcatgtgggagctgccggctttccggacgccacgtgcagaccg

SEQ ID NO: 86397 - DNA, 122 bp, Homo sapiens
caggccaagcagtggcaaagtggtgccaacagctccatgcgtattggggctcccacgtcacgtgagggtgctgagggcctcaaacgcctttcaccagaggcctgactagtgcggcaggtcag

SEQ ID NO: 86398 - DNA, 122 bp, Homo sapiens
gaaatacccaaggggagtgtccttgatggtgcgtgttctgaatggaaaacctgaaagtgccggaaactgggagtgagcccttagaagggcttgtgcatcttctcttcatacacctattgcaa

SEQ ID NO: 86399 - DNA, 122 bp, Homo sapiens
cctggtgcttgcgagtacaaccccaaattctctcgcacactgcccaagtttcttgaaactcggaggctcagctcagtgtaaaaacatgggggttctcctgagtcggtttccctgaccacagg

SEQ ID NO: 86400 - DNA, 122 bp, Homo sapiens
aggagaggggtccagggctggagtccgggtgcccctgcacttcagggacttcttggcagccgtgtgggcgacgctggcaggctctgctgatcctgtggcttttgtctttagggcgagcgttt

SEQ ID NO: 86401 - DNA, 122 bp, Homo sapiens
gttgggggatccgcctcagagtttctgggcagcgtacagtgacgcggtggaggtcggtaacggctggaaaattgagccttgagcagcgcgtgcttgttgtcatagttacaccactaacattc

SEQ ID NO: 86402 - DNA, 122 bp, Homo sapiens
atctcagggtaacaatgctactgctaccactgccaggcacaactcctggactgtgctgcacgcaccgtcctccttcccctcagtgttttctcggctgcatcccctccgtcaggtgcaggtct

SEQ ID NO: 86403 - DNA, 122 bp, Homo sapiens
ggaccgcgcccggtgtctctttgaggccctgacgtggacacacttcgggtttcacgactccgggtttctccaggggatgggccggccggtagaggcgcgtgagggagacgaagggacttccg

SEQ ID NO: 86404 - DNA, 122 bp, Homo sapiens
tctgcacctccctataaatgaccccagagaagcctccttactcatcctactgagcatcttcgagtacaaaatccatgtcataacatccccataattatcttaatgcttgatccatgtcataa

SEQ ID NO: 86405 - DNA, 122 bp, Homo sapiens
tgcaggtttctccagcggttggtggtggggacaggggtcgcctagggaacttgcaggggccgcggcctctgttgtgctcttctggagagtgcactgtttgtggaacttttctagagtggcaa

SEQ ID NO: 86406 - DNA, 122 bp, Homo sapiens
cagcggtaaaccaaaatccacatatttgggccccagtgcttccctctggccccatagacacgaggagaggggagacacaagtcagattaagccccgccacgtggtggccaagccagctgcag

SEQ ID NO: 86407 - DNA, 122 bp, Homo sapiens
ctcctgcgctgtgagctcagcgcgctggggagggacctagctgccgcgaagctgggggcgcgtggaagggtcggctccagaagccagccattgggaggagagagggggaaaagctccgagcg

SEQ ID NO: 86408 - DNA, 122 bp, Homo sapiens
ctacgctgagcaggactggggtcacatacgctgcctccaccgcgtagcagaactctcttccgaacatggccatgctgtgcatgatgagtctgctggtgggtcttttaggcggctccacagag

SEQ ID NO: 86409 - DNA, 122 bp, Homo sapiens
ggaaatgcttctgttagttacaaccacaatgctttgcagaaaaaacaagtcctgcaggcacgtcaccctccgcacctctgttgtagcctgcggctgggggtacacaagcatctctgaggctg

SEQ ID NO: 86410 - DNA, 122 bp, Homo sapiens
gtcagccccaggtggatgctccagtagatctgcagacactgcagctccttcttcatgccccgcttgcagcggcagtcgtacagcgggctctcctgcaagacctccaaggccgcctggcactc

SEQ ID NO: 86411 - DNA, 122 bp, Homo sapiens
tgccggggttagcccagggtgtcagcctgcctggggctgggattttaggttgtatacctccgggaccctggggatggcacatttagcatgccacacgataggcacctgttggcctgccttct

SEQ ID NO: 86412 - DNA, 122 bp, Homo sapiens
agcaaacgctccgtgctaatggcccagtgtggacagaccctgtccccctccctcctgggccgggctgggcactgcaggcagatcagaccacacacattcatccacagctgcattttctcatt

SEQ ID NO: 86413 - DNA, 122 bp, Homo sapiens
tgtggcttcagaaacttatcttctggcttcgtcgatctggctggtttgccctggggatcccgcatcctctgactaccgtgatgagcagagcgcagcgcccggctccgtgggccaacttttgg

SEQ ID NO: 86414 - DNA, 122 bp, Homo sapiens
cccctttctcgctgcctccctgcacaccgccaccctgaatccacggcctcctgatacctgcgtttgtccctccagcatctgctctggctccatggcggaccctgcaagtcacagtccccgga

SEQ ID NO: 86415 - DNA, 122 bp, Homo sapiens
aaaaagtgggatggataaggaagggcacccaggctgtagaaacggctgctggagagcacccgggcattgcctgcaggttcctctctgcaagggtgggatggccacccttcgtccctcacgca

SEQ ID NO: 86416 - DNA, 122 bp, Homo sapiens
tttttgacgctccagggaccgcagggtctgggaaagttcctggttactccggcgaccggccggccgtcacatgacatgtgagcccgggcggaacgcccaagaggcttccgtagtcgggtggc

SEQ ID NO: 86417 - DNA, 122 bp, Homo sapiens
cggcgttccactgtcacgtgagggggccggtcctcttcggcggcggcactcagtgagtgacgccaagtggccaatcacaggccagcctcgcaggccacgtgaggcgagagctggttccagga

SEQ ID NO: 86418 - DNA, 122 bp, Homo sapiens
aagacaagaccatgtcgaagggccccgggcccggcggctccgcagcttcctcggcgcccccggccgctaccgctcaggtgctgcaggcacagcccgagaaaccgcagcactacacgtacgta

SEQ ID NO: 86419 - DNA, 122 bp, Homo sapiens
tcacatgctcgccctccggctgtcaggagcaatggtgagttctgccacacgtggaaaacacgttggcttctctgggttttaagtgtcctgtcagcagctcggagcctctaggagacaccgtc

SEQ ID NO: 86420 - DNA, 122 bp, Homo sapiens
tggagcaggaccccaccctttcaccttttggaatggctcccactctatttttctgcaggacggttctcgcatgatggtgctggtagacaaaatggagccccgggcaaaaattagtgtttaac

SEQ ID NO: 86421 - DNA, 122 bp, Homo sapiens
ccggagctctcagcgcgcgaaatccgctttgaacctgccccgcccaaaggtctgcggtcgcggctatttctaacagccagtcccaggtttggctgagagcgccccaatccaattgagcaaat

SEQ ID NO: 86422 - DNA, 122 bp, Homo sapiens
agtggcgttacgcgcagcttccggttccgcctgttccggcgcacgtaatcgccgagggcacgtgcatgccccctggttaagagttgcaggtagcggtagcgatggacactctggatcgagta

SEQ ID NO: 86423 - DNA, 122 bp, Homo sapiens
cgtgggccctctactacagattaggaaacaggcccgtagaggggtcacacggccaagtagcggcactccaggcactgggggccctcgaggggaaggggcagacttctgggagtcagagccag

SEQ ID NO: 86424 - DNA, 122 bp, Homo sapiens
taaaacagtaccgtgaagtacggaaaccagggtgcaactcagtacctgtcctcctttctccgacaaaacaaaaggaaataaatccgctcggcacagattatctcaatacagtatttattttc

SEQ ID NO: 86425 - DNA, 122 bp, Homo sapiens
agtcccgtccactaggtaacagacatgccccttcagtgaagtttcatctgaaaatagcatcgacatttaaatagatacactcggtcaacggcgcttctttatacaaagtctaaaataccagt

SEQ ID NO: 86426 - DNA, 122 bp, Homo sapiens
agtccctgatcgcagcagacctggaccatcaagggcatctgtgcagggcagacactggggcgacgaccgtgagaacagcagaacacacagctagcaagcgaacacagggagaaaacggagta

SEQ ID NO: 86427 - DNA, 122 bp, Homo sapiens
cccaaggagggttgcatccaacggctcagagcagacaggctcatagacctgtagactcagcgccaaccctctgtccagcctgcttcaataagtgccttaaaatcatctcttcaagacatgta

SEQ ID NO: 86428 - DNA, 122 bp, Homo sapiens
gaatatccagtctctcattaccttaacaactccctcagaacacccgaactgtgtgttcagcggcccactcttcaactccatttgggggtctctgggacatcacaggctcaacttggccaaaa

SEQ ID NO: 86429 - DNA, 122 bp, Homo sapiens
atgatgagggaataaatattattacctcgttcatagttcatattttaattcgtaaattgacgactttttatctttaagggactgatgtggaagcttttcaacaggaactggctctgcttaag

SEQ ID NO: 86430 - DNA, 122 bp, Homo sapiens
cacggtcccagggagtgatgactcatttcctttcctccgctgacatcatcgtgcccccagcgtggcccggccggggcggcggcctccgccctcccaggtctcctcccagcccctctcggcga

SEQ ID NO: 86431 - DNA, 122 bp, Homo sapiens
ctcacaccatttgcctacctgcagagcttaaaacacttggtctgtaacatctctacctaccgattaaaaatgaaacactaaaagaaagtcaatttgcctcatgagaattttccacaatttca

SEQ ID NO: 86432 - DNA, 122 bp, Homo sapiens
tggcacgagcgcccgtgccgtgtgcggctcccgaaccacctgcactgtttggcacgagagcgcgcgccctatgcggtccctgagcctccagaaccaccgatcactgtttggcacaagcgtgc

SEQ ID NO: 86433 - DNA, 122 bp, Homo sapiens
accctgctcaccagccacgggcggtttaggccaacctccctgcctcctccccagtgcagacgcagcctataaaaccaccctgtgtgtccttgcggatcctggcccctccctggacacccagg

SEQ ID NO: 86434 - DNA, 122 bp, Homo sapiens
tggagtgagtgatggaataggttgccaactgtagttactccactcagcacagaatggctgcggggaaatataatcagacatgcccaaagaagtctgcttagggtgaaacaaatacctttgag

SEQ ID NO: 86435 - DNA, 122 bp, Homo sapiens
gcgttcaacctaaaatgcctagaaacaaagcccaggcccgggaaggtcgaacgagtgcgacgccgctccctcaagctcttccctcggagccgtctcatttcccaaaactcccaaacacatca

SEQ ID NO: 86436 - DNA, 122 bp, Homo sapiens
cctgtagctgtgaaccaactctccagctgaataagggtgtggctgtgcacctcaatgcagcgaaggtatgtgtcaccatgccctgtgagcataagaggtgagaggaggttctgtcaagcacc

SEQ ID NO: 86437 - DNA, 122 bp, Homo sapiens
acaactgagccaagttgatcgtcaccttgcacgggcggctgctctgatttgaacccttctcgtgacgactcaccgtatgccgtacttgggagagaacacaaagggcagaatgatcgcaccga

SEQ ID NO: 86438 - DNA, 122 bp, Homo sapiens
gagataatagaaattcctacctcatagggttgtggtgacggctcagtagaaaccgggtgacgctcctgcttgcagcgtttgacttgtggcttagcgtcattacccgcttacgttggcagaaa

SEQ ID NO: 86439 - DNA, 122 bp, Homo sapiens
gtaccagaagcttgatgtgaaaagcatcgatgatgaagatgtggatgaaaacgaagatgacgtgtatggaaactcatcaggaaggaagcacaggggccactcggagtcgcccgagaagtaag

SEQ ID NO: 86440 - DNA, 122 bp, Homo sapiens
gatgctggccacggcgaagagcgtggagggcgacacctccagaccgagctgtgggcaaggcgggcagtcagcacagagctgtgtctgtgactggccctgcctgacccgctccacccgggcgt

SEQ ID NO: 86441 - DNA, 122 bp, Homo sapiens
attcatatatattgtttcttggccccactgccaaaggaagtcagtcagtaatttcacaaccgttatcagagtttggaagcagaaatagctgttaactaaaatctcccactgctcagactact

SEQ ID NO: 86442 - DNA, 122 bp, Homo sapiens
gccttagagaagttcgtaaactgcccagaaaggaaatgtgtactgtggaaatgagcactgcggtcaatgtgccaagcacattgtgaagtgctttatatacatagccccattaacctctgcga

SEQ ID NO: 86443 - DNA, 122 bp, Homo sapiens
ccatgagggggagttcagcagagcagtaacttggagtcagtggtgacagacatgagcctacgacctgggaaattctctgaaatcctggcaaggacacagaggtcccccatggctgtgactta

SEQ ID NO: 86444 - DNA, 122 bp, Homo sapiens
catacccttctaaacccagcttcctgggctgtgagatgaattagcctagggtaggctcagcggcagagaccaaggagactctaacatttccatggattgaatcaaagtttgttcttgctcac

SEQ ID NO: 86445 - DNA, 122 bp, Homo sapiens
tggggaagatatgaatgacaaagcaatactgtggatttgatgccatcaagtggaagtgaacgggtattttatccatcccaagagcattcgaaggttactggctgtattagtcagggttctcc

SEQ ID NO: 86446 - DNA, 122 bp, Homo sapiens
tgaaagaggagaacgaaaccacgtacgagggttgaacgcctccagccgaagaaggcaaggcgtagaggtgtcttaccactagggaaggtatccgagtcactgcaccatttgagagatccaag

SEQ ID NO: 86447 - DNA, 122 bp, Homo sapiens
cggagtgctgcaagcgcagaaaatatacgtcatgtgcggaggcggagcttccgccctgcgcgtcgtattagacggaaaccgagcgggcccatttttcatgggtttgcggacccaccagcgaa

SEQ ID NO: 86448 - DNA, 122 bp, Homo sapiens
tgtgtaaaacctttgaaatatgccattgctgttaatgatcttggaactgaatatgtgcatcgatatgttggaaaagagccgagtggactaagattcaacaaactatttttgaatgaagatgg

SEQ ID NO: 86449 - DNA, 122 bp, Homo sapiens
tatgaaagattacagaggtgggtgtcttcttaatgctgaacatggcgttatttctagccacggtggtggtcagcaactctgatctataggctacagcctctccaaattttatttccactgat

SEQ ID NO: 86450 - DNA, 122 bp, Homo sapiens
gggaagccgtgatgggaagcgactctgtccagggagtgtccttcaccaccacactcctcacgtccaggcagtgatcgacggcctggcggcaccctcacagcgggcccatagcacggggccac

SEQ ID NO: 86451 - DNA, 122 bp, Homo sapiens
cttaggatccttaattatgatctataaagatgctatttcccaacagagtctcattcacagcgaccggggttaggatgtggacatgtcttttctgggcgatacatttcaacctactacaggca

SEQ ID NO: 86452 - DNA, 122 bp, Homo sapiens
cgtggttgcacagcagggctcaggctgaccgtactagccagctgcgtttgtgtatggggccgaccccgccgttaatcccagaataacgcagaagaggggaaaggagggagggagaacgggag

SEQ ID NO: 86453 - DNA, 122 bp, Homo sapiens
gacttcccactgctcaggaagaacatcagggtctgttcaccaagagttaacagaaatagacgcgatatgtaacaaaccctgttggacctagtctcatattttgccccatttattgtaatgtt

SEQ ID NO: 86454 - DNA, 122 bp, Homo sapiens
cggcctgctgctgttatctttttaactgttttctcatgatgcctttttatatttaaaccccgagatagtgctggaacactgctgaggttttatactcaggttttttgttttttttttattcc

SEQ ID NO: 86455 - DNA, 122 bp, Homo sapiens
gaaaggaagacaagaccccaaaggcagaactaagagtattctaagcccagctggagaggacgccgccgcctcttccccttctcacgcgcttgcctaggacccccagctcccttctcacgcgc

SEQ ID NO: 86456 - DNA, 122 bp, Homo sapiens
cttttcttcccacattcacacacagtttctgatggacccacaggttactagcctgccccacgggtcatgcagtagcaaagttgggactagaatttcagtgttcctccacctgcctaaagtac

SEQ ID NO: 86457 - DNA, 122 bp, Homo sapiens
accctggcggagccttaagggcagaatcccactggagagcaggagcgcgcgggatggcagcggtgctggtgagcactggcctgcttagccctggccaaggttctcaatggctcccttaggcc

SEQ ID NO: 86458 - DNA, 122 bp, Homo sapiens
gcttcccgcctgaggggagcaggtggaggagtgtcaggacctgaagggcagccccggctgcgcccagccccaggagggcaatacctcgtgctgggtgacctcgtgggacacaagctgctgca

SEQ ID NO: 86459 - DNA, 122 bp, Homo sapiens
tgggcgttagaagtgttgcttttccagtttgtaagaccattttcctgattctcttccccacggttgcggaggagcaggtcagggccgccatgagggcaggatcccggtgccggcgccggcac

SEQ ID NO: 86460 - DNA, 122 bp, Homo sapiens
aggagtggtttttcctatccatgttgagctcctattagccccttgaggaaatagtggtttcgcagaaagtgtgaattctcagtgttactgaaatgaccttgtttaatttcctcataaaaaaa

SEQ ID NO: 86461 - DNA, 122 bp, Homo sapiens
ccccctccccagccttccaggccctggctgcggtggatgggggcgcggaaggcccaagtgcgcgaacttcacctggcccggccgtcctccccgtggggggcccaggctgcgggcgcgtcagg

SEQ ID NO: 86462 - DNA, 122 bp, Homo sapiens
tagcgcaggggatccgagctgggcaggacatgtgagatagtcacagttttccagagatcacgacaagatctaaccagtcgcgcgtggtccccggcgccggagcgggccagctcagcccggcc

SEQ ID NO: 86463 - DNA, 122 bp, Homo sapiens
ccagcttagcacagaaacccacttcactagtcgtttttgaacaggctccctcgcagcatccgtagatcattcttcaaagagtaagaggagtaaaatgcggttctggcacttagcacccaaga

SEQ ID NO: 86464 - DNA, 122 bp, Homo sapiens
aaaaatccccgtctggcctgccctgtggagggaagaagcaagtgcaggcttgaggagccacgaaggctatcattattgcagaatggccatggctgggatgtttgccaagggctttctgggaa

SEQ ID NO: 86465 - DNA, 122 bp, Homo sapiens
atttccacaattatctttcagtctgtgatagacctaaaggagccagcaaagtttgtttaccgacctttccaagaagtctcaatgggagatgtggggacactgaaaaaaataaaagaatatat

SEQ ID NO: 86466 - DNA, 122 bp, Homo sapiens
cctctcacctctcctatctgtttgtttgtctgtctctgcgtctttctctctgcgtgtcaacgtaagactcggtctctggatctctctctctttctgtctcccgcccccacaacctctgtatc

SEQ ID NO: 86467 - DNA, 122 bp, Homo sapiens
atgttccgaaaccgccaggtgtgggatctgcgccccgacagccccaccttggccatcggccgcctgaggacggccagccatcggggcgattccccccacacattgtgcctgaattcaccctg

SEQ ID NO: 86468 - DNA, 122 bp, Homo sapiens
agcagggttctctgaaaacaatttataaacaaattgtggctgttctgaaactagggcaaccgatatcttgagtttcatctgtttagtgttttagacctggtcctgatgttagtgttcccata

SEQ ID NO: 86469 - DNA, 122 bp, Homo sapiens
catccagcctgcctgcctcttgctttctttgcctcccagttgtgatcagacacttgttaccgtgtgggatcatcatcccagcttcaggcagacccctcccccggcaggtgtcccttcctctg

SEQ ID NO: 86470 - DNA, 122 bp, Homo sapiens
ctcaggactgtgcctgcacagccatgtgactcgtggggggcggggtttggaatgcctgctcgggggaaatgaaaaccacagcgccaagccctggactgccgaggatgtctgcaaatgccttt

SEQ ID NO: 86471 - DNA, 122 bp, Homo sapiens
ccaggagctgtcgagagtccaggagctagctcctgccagcggggagaaggccaggctgagcgaggcccctggaggcaaaaagagtctgagcatgcttcactatatccggggcgctgcaccca

SEQ ID NO: 86472 - DNA, 122 bp, Homo sapiens
gcgcattctgtcctacggttcactaaacacagtaaaaatttccccaagtttccctaaattcgctgtgtcaccggaaagtacagccactaccagccagacggctttcagcactgcccgtgcgt

SEQ ID NO: 86473 - DNA, 122 bp, Homo sapiens
gaaatgcaccctcatcacatgagtggtccagatggtctagcgccagggtgaggcaggcaccgggtggaggaggggacagaaagctgtgaggaggacccacacaggggttctgggcagctccc

SEQ ID NO: 86474 - DNA, 122 bp, Homo sapiens
cgtggggattatggggattacagttcaagaggagacttgggtggggacacaaagcctaaccgtatcactgatgttcacggttaaccccttcgttgagcaaagaaaatacagatatcaataga

SEQ ID NO: 86475 - DNA, 122 bp, Homo sapiens
cagcttctcgaggtgactgagaccgatgggcggcggctccgcctctcaccaccacaggttcggcggttcctcggccactctgctcttaaataaggtgatctcatccaggtgcaccaggggga

SEQ ID NO: 86476 - DNA, 122 bp, Homo sapiens
agagacagtcaagcacagccatacagcaggggcatccacagctgcctcaggaggcggcagcggtggcctcttttgcagcttttctctcttccagcatcctctgcttgtgtttggcccggcac

SEQ ID NO: 86477 - DNA, 122 bp, Homo sapiens
agaggcggcccgggggcgtgcgcatgtgtgcgggtgtgcctgtgtgtctgcagctcacaccgcgggggtgccgggaggaggggggctgcccgatccttgggagtctgcggctttcagacgct

SEQ ID NO: 86478 - DNA, 122 bp, Homo sapiens
cgtcccccagagccgacagcgacttgttgatgtgctgcgcctcccgcaggcggctgccctcggcccccgacttgcccacgcgctccgagccagccaagtccaccaggttcagcttccctgca

SEQ ID NO: 86479 - DNA, 122 bp, Homo sapiens
ccgttctcacccatgtcacctgcagaggtgaaccttgaggacgttctgcttgctgaaatgcgccaatcacaaacagaccaacactgtgtgattcctcttgcgtgaggcccctagagtccccg

SEQ ID NO: 86480 - DNA, 122 bp, Homo sapiens
ggcggatctggttgtttccaaggatcaggtggcggaggttgcccaggccgcggagctggtcgccgcgcacctccgccaggcggttgctgtccaggtgcagggcccggagggcacgcaggtcg

SEQ ID NO: 86481 - DNA, 122 bp, Homo sapiens
acacacacacatatatatttcacaaatagaaacaatgaatgataattattttaaagtttccgatttcataaccttccgggcctctggtcttttgaccaggcagcctgagctgtggaaagtga

SEQ ID NO: 86482 - DNA, 122 bp, Homo sapiens
tattatgtattttagttgctgaattttatggcacctcttaaatgttgcaccctcactgagcgcctcactctgctcaccctagtcccggccgcagatagtacattattctgttacactggaaa

SEQ ID NO: 86483 - DNA, 122 bp, Homo sapiens
gcgcaggccaatgtcagtttatcctacaacaaagggattttctaaatagtgcgatcaaaacgcagcgaaggccggggagagctggggagacggaatgcggccccccagatcctggctggccc

SEQ ID NO: 86484 - DNA, 122 bp, Homo sapiens
cgctgtcgcagacctcctgccagggccccaggtctcctcccgcctgggcgggctcagtggcggtgaggatctagaaaagtcttcctgtcctggttctgggctgccccggggcctggggtgat

SEQ ID NO: 86485 - DNA, 122 bp, Homo sapiens
ttgcttatctcagaactctgtttcctgccattctctcgggtctgcctctgtctctgttggcgtcattcctcaggctggttgggtgcagatggttgcagcagttctgacccccacatctgacc

SEQ ID NO: 86486 - DNA, 122 bp, Homo sapiens
ctcagctagtgagtggcagaacaaattaaaactcagatctaggcctggcgcagtggctcccgcctataatcccaatactttgggaggccaaggagggaggattacctgaggtcaggagtttg

SEQ ID NO: 86487 - DNA, 122 bp, Homo sapiens
cccccccagggccacgccaaagctgtgctgaagaaaacctgcctgcagggaagtgatcagcgctacggtcagaggaaacctggttcctcctgacctccccttggccctaacctgagacgcct

SEQ ID NO: 86488 - DNA, 122 bp, Homo sapiens
cagaagcgaaatcccgccccgggctcgcccccggcgccttggatctgggccccggcgctgcgccccccacctggactccgccgccggccccggcctccccacggccccgccggccctgcccc

SEQ ID NO: 86489 - DNA, 122 bp, Homo sapiens
gttcgccacccgcagcatccaggtggacggcaagaccatcaaggcgcagatctgggacaccgctggccaggagcgctaccgcgccatcacctccgcgtgcgtgtcggcagcctgggcaggga

SEQ ID NO: 86490 - DNA, 122 bp, Homo sapiens
atagattgcataatggtcaagtcagggctcttaggatgtccatcacctgaataacatacacggtacccattctgtaatttctcatttcacgcccctcccaatccctcctttgcccattttta

SEQ ID NO: 86491 - DNA, 122 bp, Homo sapiens
gcgtccccggccctgggccccaggagcgccggcctgggacacgcagtggggtttcctcggcgttgctttggttttgcccttaaaacgggtccaagtgtcctcccagagcctccccggtcttc

SEQ ID NO: 86492 - DNA, 122 bp, Homo sapiens
tcaccaagtcttaatttcgtcatcaataaaaactaactggattttctcaaaaggcccttccgacttcgaaatgatttggtcaatgtaattgaagaattaactacagtttagcttgacactcc

SEQ ID NO: 86493 - DNA, 122 bp, Homo sapiens
gccctgtccacactggctaagcaccttctagaaccagaggctgtctgaaatcatcatggccgttttagacccaacagcagtccttctggggacctcacggcctatcatgaagatttccacgc

SEQ ID NO: 86494 - DNA, 122 bp, Homo sapiens
ctgcagtttcccgttcctctcgtaacctggtcatgtgtccttcttcctggatactcatgacgcagactcagttctcattcccaatgggtgtcgggtttctagagaagccaatcagcgtcgcc

SEQ ID NO: 86495 - DNA, 122 bp, Homo sapiens
ggacagcctagggggtgtcctggctttccaggggctggggaaccctctctggcccgggggcgggagaagctgttccagaatcggttctggctccactgccacctcagcactttctaattgca

SEQ ID NO: 86496 - DNA, 122 bp, Homo sapiens
gagtgtggctggagaggggccgccccggaagcggtgctgcgcccaacgtccccttctccccgtaagccccgcaaggagcctgccgcctcttgcacctgagccaggagttcagtcgggaggcg

SEQ ID NO: 86497 - DNA, 122 bp, Homo sapiens
ctgtagaagcgaaagcaatcattcatttctatgttaagtgtattctgtttccattcacagcgcttgcaatgttgcgtccaagtaagtaagctcaatagtcaagtaaatggctggcaaagttt

SEQ ID NO: 86498 - DNA, 122 bp, Homo sapiens
cccggggcgactttgccagggctgggccatgacgccaagttcctctgcacaggatggaggcgtcctgcctagagctggcgctggagggcgagcgtctgtgcaaggcgggcgacttcaagaca

SEQ ID NO: 86499 - DNA, 122 bp, Homo sapiens
ttcaaaataagtttcactgtctaaaactggccttgcaaatgttttagaaagttccccagtcggccaggcatggtggctcacgcctgtaatcccagcactttgggaggccaaggtgggtggat

SEQ ID NO: 86500 - DNA, 122 bp, Homo sapiens
ctcgggcgagccggctgcgcggggctgagaggtgatcaatacaagtggaaagtgcggcagcggcggctgcgcttggtgccaggcggcatctggggtgggtgcgcccgatgtggagagaggag

SEQ ID NO: 86501 - DNA, 122 bp, Homo sapiens
ggaggggagacagcacagccagttagaatgcggaaagcggcccccgtattgtcccggggccgagtttgagcaggtcactgccccttcggtggattgcgcgtctttaacataggttagcacca

SEQ ID NO: 86502 - DNA, 122 bp, Homo sapiens
gggctgcggcagaggtcgaaggagtgggactcaatgcgcaagcgcggtccggctcttattcgcgccgcagcacccggatgaagaaggcggggtttcgggtgcaccaaggaagacactcaagg

SEQ ID NO: 86503 - DNA, 122 bp, Homo sapiens
actacgatcctttcctgctcttcagcgccaacctgaagcgggagctggctggggagcagccgtaccgccgcgctctgcgtgagtcgaggctgcccggctcgcgggcgcccgggacgcgggga

SEQ ID NO: 86504 - DNA, 122 bp, Homo sapiens
ctagagattaaagtagaaatcttgggtggcggcttggagcccaggcccgacagcggcccccgcgctgtgcaggcgttcgcttagacgggagcactgcagacgcccccggcggcagcgaccgg

SEQ ID NO: 86505 - DNA, 122 bp, Homo sapiens
ggggctgtgacttcgagcagagcggtcagcaaaggcctcgccgcagggtggccgcagggacgctcccgctcagcccggaaggaggcgagaggcgcggtgcccgtcccggcgactctgggcca

SEQ ID NO: 86506 - DNA, 122 bp, Homo sapiens
gtccaccacctcccactcagatgagttcacaggataaagaattgcgtggaccggtccacacgctacaggaaaagagaggagtgtccgccctattcactctaaggaaggtggcaggccacagc

SEQ ID NO: 86507 - DNA, 122 bp, Homo sapiens
cataacaaccggagcgagggaatcctggagactgccggggcggggggcgggggcggcggtcgcaggagggacccggcgcgggcgggaccgcggcggtcgggggacaccagctgcgtcggagc

SEQ ID NO: 86508 - DNA, 122 bp, Homo sapiens
aagggctggatggtaacagatcacagccaaagaaataacctgaaccaaggcagagacatccgggatggagagaagtggcagaaggcttatgagatatggaagttgaatggacaggatgtgtg

SEQ ID NO: 86509 - DNA, 122 bp, Homo sapiens
cgagccgcgggtacccctcgctggtccgctgggctgccgtccagcgggagagacaaaagtcgcaagggaaggggaaaaacgaactgagtttgtgtcactgtcttggtggacttttcgagcta

SEQ ID NO: 86510 - DNA, 122 bp, Homo sapiens
ttgagaccactggtggcaccttagtgggaccgtttccatggaccacaatggggagcgtgtcgtaggccacgttccggatacgcacacggttccgatcaaactttaaaaccacttcatctggg

SEQ ID NO: 86511 - DNA, 122 bp, Homo sapiens
tggtctgtaacggattggcttggccttacccacgaggctttgcggtggctgttggcttggcggtggtcgcttggcttggcgtggcagtgatcgcttggcttggcatttctggcttggcggtc

SEQ ID NO: 86512 - DNA, 122 bp, Homo sapiens
caaacttgcataaataatccccagccacactgtgacttctatgtgcaagcctagaggggacgatgttgcaggaaccgtgccaaccactaagacactttcaagtttatcctagagaatgccaa

SEQ ID NO: 86513 - DNA, 122 bp, Homo sapiens
gggaaggagggggacggaagacagcctcttaggaaattgctgcagggagaaacctggacccgtcggatgcaggaccacggggaaaacgcgggtcggaaggtgacacaggatttcgggaggag

SEQ ID NO: 86514 - DNA, 122 bp, Homo sapiens
aggaggagtctggcccttgagtaccgggtacgcaggggtgcctcaaccacactccgtccacggactctccgttattttaggaggtgagtgtagtgccagtatctactctccttcttaaaaaa

SEQ ID NO: 86515 - DNA, 122 bp, Homo sapiens
gagcagtaatgtcatgttagttgtgacagtactcaggtgagtaacaccagtaccacctgccgggtgttgtggcctagctgtgtgctaagtgccatgttgggctcctcacacatgatcgtgtt

SEQ ID NO: 86516 - DNA, 122 bp, Homo sapiens
cgcgagagcatagattcttaccgcaaaccctgggagcagtgcgcatgcgtactttcccggcgcccgccgttctccagatgccccctcgaggccgggaagcgccaacgcatctgaaacatccc

SEQ ID NO: 86517 - DNA, 122 bp, Homo sapiens
aaaactggcatctttatttaaccctaactgagacttggcatttcctttcattatcaatgtcggtggcagagctcagtgcctgtgaccgtcaaacatagaaagcactggcatttccatatcac

SEQ ID NO: 86518 - DNA, 122 bp, Homo sapiens
ttccaagtagtctatcatgcaaaaggattgtctttccatgaccaaagggaaaagagaagtcggagtttagacagggttttaaaagtcagctaaaggctcccacattgcacctgtggttaaca

SEQ ID NO: 86519 - DNA, 122 bp, Homo sapiens
tccatccgtgggaccactctgttttccagtactggcccacaatagcctcactgggcagctcgcagacataaccactcctgctggagatagatgctggcccacagagaccagctggaactgcg

SEQ ID NO: 86520 - DNA, 122 bp, Homo sapiens
gctggaggatcttgcgcaggcgcgagaaaaccccgagagaggccagtgcctctgtgcatgcgtcagtggcgagcgcaccgcccccacccgcaccccggcttggctttcccccgtgggcgctt

SEQ ID NO: 86521 - DNA, 122 bp, Homo sapiens
gctcccatttttgtcacttttataaacagcattgctgtcaccattgccacccacacagcccgttcattccctggtgtggggagggaagggagaagagaggttgtcaatttcataaaaaatct

SEQ ID NO: 86522 - DNA, 122 bp, Homo sapiens
tcctagtttgtgttctctacgcgaccacgagctccttgagacaaggggttgagcctgctccggctcatcccgagagccggcgcagcgactggcgcaacgaaagggaaatgaacgaatgaatg

SEQ ID NO: 86523 - DNA, 122 bp, Homo sapiens
gcctctcccaggtctcagctctgggtggggagcagtggccgctaccgacagcgcatgtcccgctcttatccaactcttccaggccccacctccctgcacccctcccctctatagagcagggg

SEQ ID NO: 86524 - DNA, 122 bp, Homo sapiens
tcccgtctaggaagtgaggagcgtctctgccaggccgcccatcgtctgagatgcggggagcgcctctgccctgccgccccgtctgggatgtgaggagcgcctcagcccggccaccaccccgt

SEQ ID NO: 86525 - DNA, 122 bp, Homo sapiens
cctggaacactgggtgcccgagccaggcttgggaagcctgcggcctggcccgcctggcgccgccactggacacactgcatgcacgtcccatgcccgcccgcccgcccgcccgcccgggccca

SEQ ID NO: 86526 - DNA, 122 bp, Homo sapiens
gcaacttcctgccagtgaggaaactctcagctcgagaatcagccctggttctcctttccccgatctggcctcacaggaggagttggcggggagccttgggcccctctggcctcagccggatt

SEQ ID NO: 86527 - DNA, 122 bp, Homo sapiens
tcctggaaaactcactgagggcaagggctgaggaggataaggcggatgatattaactatacgttgtgatggataaacttatgaacaaatgataagcaaaggaaataaaatgactacaaaaag

SEQ ID NO: 86528 - DNA, 122 bp, Homo sapiens
tatatgtgctgaacgtgcaggtttgttacatagggatgcatgtgccacggtggtttgttgcgcccatcaacccgtcatctatgttttaagccccgcatgcattaggtatttttccttatgct

SEQ ID NO: 86529 - DNA, 122 bp, Homo sapiens
ggggaccctggcgggccccgggcagcgcggctgcacttacttgtgtcacaactgcggcgacggggggctgaggaaccggttcttccaaaagcaaaccgaaaatgggtaacagagaggccggg

SEQ ID NO: 86530 - DNA, 122 bp, Homo sapiens
agagttggcctcgctttgtggggaaactggtttggaatcaaacagagataccttctgtttcgggttttatttggccaacactgggagatttcccattaagatcctattttcagctctcttga

SEQ ID NO: 86531 - DNA, 122 bp, Homo sapiens
ccttgagttggcacagccaagtgtgtagccagaactcaagtctaagcctgtctcactccacggtccaggttctttctgttattccacatgtatcaagtcctgtatcaattctttagattcaa

SEQ ID NO: 86532 - DNA, 122 bp, Homo sapiens
atgagcacgccgcgatgctgctacgagctctgtgaagacgcgattttaattccagccagtcggtaggttgtgtgtctgtgtggcggtttagcaccgtttcaaattctgcattgcatggtggg

SEQ ID NO: 86533 - DNA, 122 bp, Homo sapiens
aagacggttgtacacttgacccagggcagaagatgttggttgaagggctggaacccacagcggtaaacttgactcaacatgctgcgatgtggtcactaaccaaagtatctgcagaatacatt

SEQ ID NO: 86534 - DNA, 122 bp, Homo sapiens
tctttccacctccgcggctgtttgccctttgttgtgcttgggttcccattagcttcgttgcgtgagccacggatccgcccttagccccgggcatccccaaatatccacacacaaagtgcgga

SEQ ID NO: 86535 - DNA, 122 bp, Homo sapiens
cacaagaaccgcagttgtattgaaaagcaactcgtccagtcccgacaggttttttttttccgggagtctcagggttccatctaatgcagagcttctcagagtccggtctctgccaatagcag

SEQ ID NO: 86536 - DNA, 122 bp, Homo sapiens
tgggccgctccagagtgattgggcagatgccccgtcctggctggtactggcctgcaagggcgacgctttgcttgctgctgtctcgaggaccagtgagggtgccaaatggcagggtctggcac

SEQ ID NO: 86537 - DNA, 122 bp, Homo sapiens
cacttccgcttccgcctcggctcagccgcccgaggattgtgagtggaccgttgaggagagcgaccgaccatccggctggtgtccggactcgtactctatggttgtccgcgctctgcgcttcc

SEQ ID NO: 86538 - DNA, 122 bp, Homo sapiens
aaaacccacgagagtggcaggagggagattgagatgtttgattcagccatcctgctaatccggaacccatacaggtccctggtggcagaattcaacagaaaatgtgccgggcacctgggata

SEQ ID NO: 86539 - DNA, 122 bp, Homo sapiens
agcaaaggtagcacacgaggtgccgccaggaccggagctcggggtcaggcccaggttccacgggcacctgcttctccaccgctgggctggagggcaccatcctgctcaggccacgtgcagct

SEQ ID NO: 86540 - DNA, 122 bp, Homo sapiens
gtgcagttccgcctgcgccaggtggtgcgcggggcgccggcggagcagcagcgccttctgcgggagctcgaagacttcgccttccgcggctgccctcacgtcctaggttacgaagggcccgg

SEQ ID NO: 86541 - DNA, 122 bp, Homo sapiens
gaatgtcgaagtccttcccgaatatgcccagtcatactttctgaacttttgagcaaacaccgtccggcttcttgtgctttcctcaaagaccccaggcaccggcagggaggacacaggccggg

SEQ ID NO: 86542 - DNA, 122 bp, Homo sapiens
gctggtcggaaggtgagtgatcccctgtcggggaccgggggacttgggaaggacagttcccggactggacggccagaacgctctcagggatttcagctggccggccatatggccctgtgggt

SEQ ID NO: 86543 - DNA, 122 bp, Homo sapiens
tgaattgccatgggaggtcattagggaaagtactgtagcagggtgtgtttttttttccttcgggatatgacggttttactgctattaataacagatgtggccaggcaattacagacttaaga

SEQ ID NO: 86544 - DNA, 122 bp, Homo sapiens
gggtcgtcttgctttgcaatatcgcctatagttgttggcggttttctgctgaggctgagccgtttgctccagcctccgactaaactcattaagttgggagatttttttcaattggacgggtg

SEQ ID NO: 86545 - DNA, 122 bp, Homo sapiens
gtggttactgacaccaaattctgcaggggaagcctggtcagagacagacaggcctaggcccgaggaggggaagacctacagggaaggtggttccttccattcaaagggtgagaggaagtagt

SEQ ID NO: 86546 - DNA, 122 bp, Homo sapiens
ccctcctgggagagcgcttttcacaacattggctgggatgagggtctggagggcccggaacggagcctgccttctccttctcagtcacgcttggcccaggctgccccggaccgggccacatc

SEQ ID NO: 86547 - DNA, 122 bp, Homo sapiens
taacggcagagagcatagagcgcaggaacaagcgcaacgtccaagagggaagggccagcacgtcgggggcctctctggccctacccaggccgtgttctcgatagctttccggaagaaaggga

SEQ ID NO: 86548 - DNA, 122 bp, Homo sapiens
acagagcatctgtctaaagcagatcaaccctcatctcatggttaggagccctcagtccgccgctgcagggggcgagctgtcggttttgggtagaggccggctctgcattctgaggatgagcc

SEQ ID NO: 86549 - DNA, 122 bp, Homo sapiens
tttgtttaactttacaggttctgcgctgcctggagctacccaggggcaggacccgcgcagcgcacctcaacccagcctaaaggccatgctctgcagcgcagtggcagccagagacccagggc

SEQ ID NO: 86550 - DNA, 122 bp, Homo sapiens
ccccctggccctcgcccagtgctccggggctcacccgccgctcctcgccgcctccggaggcgagggattgtttcccacaagggactggagtccagggaaggactcgcctggagcgggaggcg

SEQ ID NO: 86551 - DNA, 122 bp, Homo sapiens
ttacttgactttacatagcacggacacctagtcgaggaacaaaaactatttctgggtaagcggggccaggaacaacagacttagcactgagtcctcgcggcccactcggctcaggattggct

SEQ ID NO: 86552 - DNA, 122 bp, Homo sapiens
gacagccagggatggctggacacagctgaggatggccgaggccggcctgcagctccccaacggcctcctccgggtcaggatgagaggagaggttgccagctttgatgccagccgctcctgcc

SEQ ID NO: 86553 - DNA, 122 bp, Homo sapiens
tagctgggactacaagtacaggccactgtgccaggccaatgccttcaagatttaaaaaaacgcatccagcatttttagttgcttttagtgggaatgttggtctgaataacctagcctgccat

SEQ ID NO: 86554 - DNA, 122 bp, Homo sapiens
ccaccaggacaatgctttcaggggactttatccaaaagactgcaacaatgtaaagagatacgattgcttttattactgtgatatgtttaaagtattataaattttttaagagctttgtaagt

SEQ ID NO: 86555 - DNA, 122 bp, Homo sapiens
cacaggactgtgggttagaagaaggatactaagggtcatcgggctccagccggctccagccgtgtcttcgagtgtctgataatgagttatttaaaaaactgaaacccagaatcacacctctc

SEQ ID NO: 86556 - DNA, 122 bp, Homo sapiens
cacacaaaaataagtgcagtgataacaccttgccaccctggagtctttctgaaattttaacgacacaccagggctagggagtgggagggtaaggggactaaaagttctagataaaaagccac

SEQ ID NO: 86557 - DNA, 122 bp, Homo sapiens
tgtggcccgcctctcattgagctgaccctcggccccttcagggcgccggggcccacgtgtcgcctcttcagggtctcagtgccctggggagttgaagctggaggacccttgaccgcagacca

SEQ ID NO: 86558 - DNA, 122 bp, Homo sapiens
gtttcagtggtgaggtggcagtggtgggattaaaggggcccggctcgtagagcagccacgcgctgaagggcacagcagacagcgtgcatgggctgagaggggccgtgggcctggctctgctg

SEQ ID NO: 86559 - DNA, 122 bp, Homo sapiens
agctggcagcatgggggcccagacccgggcccttccaggaggtgccagggcagtgggacccggccctgagctggagagagcattcctgtgctggtcgtggcagtgcttccacctcactgtgt

SEQ ID NO: 86560 - DNA, 122 bp, Homo sapiens
aacttagatatttacagatttttacctgaggtgcaagcattatatacttttcccccatcccgccccacccaacccaaatgatttcttttcagcagcgctcaagtatgcaaaaattccacttc

SEQ ID NO: 86561 - DNA, 122 bp, Homo sapiens
aatctccggtctcagcgtctgcaccctagctcttagtttgggggcactgtcgacttcccccgtccctcggggatcttgcctgggggatggcgccataagctctgagaagaggctctagaagc

SEQ ID NO: 86562 - DNA, 122 bp, Homo sapiens
ttgagaccagcctgggcaacatagtgagacctcatttttacaaaaaatccaaaaattagccgggcctggaggtatgcacctgtagtcccagctactcaggaggttgaggctacagtgagctg

SEQ ID NO: 86563 - DNA, 122 bp, Homo sapiens
ttggagccaatacctatagccaaaacctatagccaatctgacaggaaattattttggctccgcctataaaatataaccagaatccaaccatttctcacaatatccaagctatgataaggatc

SEQ ID NO: 86564 - DNA, 122 bp, Homo sapiens
catttcactgggaacccagtgcacactttaggctgctggtggacggattacgagggagtgcgtcgctacctgtcagcgccggggctgcccgcgtggacgcggccccctccctggcgtctgcc

SEQ ID NO: 86565 - DNA, 122 bp, Homo sapiens
gcgtctctgcagataaggcattaacagtccctccgcagacgcaccctgcagatctgctgacgactggctccgttctgcccaggtgcctggggcgaggtgccaaaggttctctataaagtgcc

SEQ ID NO: 86566 - DNA, 122 bp, Homo sapiens
aggtgacaacgaccgagaagagtgccaggatgctggccaccgacaggcagatgggccccacgggcgagggcgagggcgacccggtggccggtgcctcgccagggggcgccccgcctccgggg

SEQ ID NO: 86567 - DNA, 122 bp, Homo sapiens
aaaagagtgggatgggcaagggaggagggactgggccaggtgccgtacccggcaagcccgcggtcttggtgacttaacccacagatgtttgtttttcagtcattcagagatttgtgccgaga

SEQ ID NO: 86568 - DNA, 122 bp, Homo sapiens
tcgcgtcccattcccctcgcttcccccgttgccttgctttgccgtccgtggttcaccccacggcagtcactttacctgcgtgccaggccctgtgccgatagccagggacacagcgagcggcg

SEQ ID NO: 86569 - DNA, 122 bp, Homo sapiens
ggggcacggcgcggggcggggctggtaggcgccggcgtggagctgccgcacgtgggagggcgctggccaggcagccactgtggcctctgcggctaggccggctcgagactcccgggcgccca

SEQ ID NO: 86570 - DNA, 122 bp, Homo sapiens
gtgccacttggaagattgctgggtttcctgcttcgaagtcttcaggagcgggctgagctgcgctggtgtgccgcttaggactgcaatgaggagggtgacgttagaaggtctttaaaacgtta

SEQ ID NO: 86571 - DNA, 122 bp, Homo sapiens
tggatgaggtcagaatgaccgcttttggcctagcggtttgtaggcggtgcgtccttcctgcgctgggatccgaccatgcaagaaggacattcacatttaacctgtatacaagttatagctat

SEQ ID NO: 86572 - DNA, 122 bp, Homo sapiens
cggcattgctgaccagtgagagagacctaatgaggagcaggccggggcaaccaatgaaatcggagaagagcgcttgggggcgtgtccgcctgctttcagcctttggcaagttggtgggaggt

SEQ ID NO: 86573 - DNA, 122 bp, Homo sapiens
cggaagcgaacctttcttttccggattgggcatcccggcatctgcacgtggttatgctgccggagtttgggccgccactgtaggaaaagtaacttcagctgcagccccaaagcgagtgagcc

SEQ ID NO: 86574 - DNA, 122 bp, Homo sapiens
cctcccaggttctgtggctgggaccatggacagaggaatattcactaagtggttcccggacgtctgggagcatcatagacccagggagaagggccaagagctgcccacgcccattgattcct

SEQ ID NO: 86575 - DNA, 122 bp, Homo sapiens
cactgccagccactgcagcagcggccaggtctctcagctcaggcccagcggtctggcccacgaccttggaagaacctgggagaaagcttcaccaagcgacagtacttttccactgcactgct

SEQ ID NO: 86576 - DNA, 122 bp, Homo sapiens
cccgaaagacccacttactgtacatcctcaggccctctcggcagctgtaggggtggggaccggggagcacctgcctgtagcccccatcagaccctgccccaagcaccatatggaaataaagt

SEQ ID NO: 86577 - DNA, 122 bp, Homo sapiens
cacaccacttctaggtgattctgatgaagagtcagtggatctggaagctgttagtggagacgaagataccctatgatgagtgaagttcctctggcagagtttcattgtcctgatcatccagg

SEQ ID NO: 86578 - DNA, 122 bp, Homo sapiens
caacacccatgccttggtggggacttcagcctggaccactcagaacagacatcacaaactcggctccatggcaggccacaccctactgatgggtctggaccagagcctgcagaaccaacaac

SEQ ID NO: 86579 - DNA, 122 bp, Homo sapiens
ccacctggcgcctccaaatggctttttcttgcagggcaggcaggctctgggcaggcacctcgccaggcattgcgccctctgcctgcaggtcggcggggcctgctcttcccggctcctgaaat

SEQ ID NO: 86580 - DNA, 122 bp, Homo sapiens
ctgttcatgtaaccatcacctgaataaagtataatttgtccccttaccgggagagagaaacgggatttgcaacagttgatgcaggcaggggaagagtagagactacgttctgaaccttttga

SEQ ID NO: 86581 - DNA, 122 bp, Homo sapiens
tggttgaggatcaaaatcaaaattatagtcgactcttaaagaccaagtaggctctaaccacggaattcctctctacccactgattcccccaaaagaggaagaagcctcttctctaagtacac

SEQ ID NO: 86582 - DNA, 122 bp, Homo sapiens
taaaggcaaaaaggtaagggaaagtttccaagctttaggaagaattattttttttcaagacgctgtcttccgtactttcgttattaaacatacggctcaagtgatcaccggtatagacagtg

SEQ ID NO: 86583 - DNA, 122 bp, Homo sapiens
gggtctgcccaacgttgagcctccgaggacctcattgaacaagaccttgcctgcaggtcccggccagcctgtgctcaggaataactaaggagtggagccgcatcaacctccttcccaaatcc

SEQ ID NO: 86584 - DNA, 122 bp, Homo sapiens
tgcatttactgaagctccattaagggaacaggataaacctctgtgttggttttctgccaccgagacttagaaatcttcactcctgggccctgctaggggttcccttagagcagtagttctca

SEQ ID NO: 86585 - DNA, 122 bp, Homo sapiens
atgcaaatataaaatgtccttggcctctgcaaaaaaggctcaaaattaaccttgtctgaacgtgtgcgtacgttgcttccaacatctgaaaaaaacttgataaaatggagactccagccaag

SEQ ID NO: 86586 - DNA, 122 bp, Homo sapiens
aataactacttattttatttgaaaatatagttatatgttcatcatacaaaatttgaaaaacgggggaataggaagaaaagccaccatcccattatcctaaatcaatcactactaacatttag

SEQ ID NO: 86587 - DNA, 122 bp, Homo sapiens
gacactactttcggcatgattcccaagagcaatctgaaaactctacgccaagaagagggtcgccccgaaatgacgtcacgagtgcgccttgcaccttttccttgtggctacgctggtcacgt

SEQ ID NO: 86588 - DNA, 122 bp, Homo sapiens
ggtctcccggcaaggctgaggccccgcccccgtcatggcgcccgaggagaacgcggggagcgaactcttgctgcagagtttcaagcgccgcttcctggcagcgcgcgccctgcgctccttcc

SEQ ID NO: 86589 - DNA, 122 bp, Homo sapiens
cgggccccgtccacaggtgtcccgaacaggtgtgtccccccgagtgcttctaagtgggcccggcgggatcccccagcacaccgccggggccctcgcactacgagcaaatccggagcgggcgg

SEQ ID NO: 86590 - DNA, 122 bp, Homo sapiens
gcgccgctccccgcggacccggcctcccgcctgtgtccagccaggtgttgggtgatggagcggggctccctaaggacaaggagcacagtgtctgctttctttgcaagcacagtgctgacaag

SEQ ID NO: 86591 - DNA, 122 bp, Homo sapiens
agaggctgagcccagcccgggggtgcagagcccccagcatggcgagaaccatctcctacacgggtcctggctcctgtcgtccctatgctggcaggacggaacccgttgccggctcccagggc

SEQ ID NO: 86592 - DNA, 122 bp, Homo sapiens
gcacagaacagaagaagggcaatgaccggccaagcttcagatggtgtaagaaaaagaagtcgaggcatggagacagcctttgggggaagaataatgagtacttaccttgacagaggggattt

SEQ ID NO: 86593 - DNA, 122 bp, Homo sapiens
tgacgcgatgccgctgcccggggtcggggaggagctgaagcaggccaaggagatcgaggacgccgagaagtactccttcatggccaccgtcaccaaggcgcccaagaaggtgcgggggctct

SEQ ID NO: 86594 - DNA, 122 bp, Homo sapiens
agctgggattacaggcatgagcccccacgtccggctaattttgtattttcagtagagatgcggtttctccatgttggtcaggctggtcttgaactcccaaccttaggtgatccgcctgcctc

SEQ ID NO: 86595 - DNA, 122 bp, Homo sapiens
tgggacgagttggaaaatcctccctgagagagccgtgcggctcaggggagcggtttaactcggaaaaggaaaaggaatccagaagtaaggacctcggatttgagtgcccccagcgcctctgc

SEQ ID NO: 86596 - DNA, 122 bp, Homo sapiens
gggagaagacgggtgtgagacgcgttccagaacctgggagtgaggttcaaatgggggaatcggcaggaagccgcccagctgaagatcagtagcgtgaccgctggctcacctctgtgcctttc

SEQ ID NO: 86597 - DNA, 122 bp, Homo sapiens
cgtgggtcatcggcgtggcgacttggtggcttgtactctgcggaatctctggggtcatagcgtctcgggctggttcctgcggccttctgcttcctccttcccttttcttctggtcagagttc

SEQ ID NO: 86598 - DNA, 122 bp, Homo sapiens
tgaaagttcaagtttgtgttcaggtaaacaaacctcgtgaggaggcaccttggttgcagccggactcacacttccatctccgtgtgtaggtgtccatcagcggagaatggtctccgtggcag

SEQ ID NO: 86599 - DNA, 122 bp, Homo sapiens
ccctcctcctgtccccccagatggtgagcctggaggaagacttgcactgggccttctgtgcgccggccagaggccatcaaccaggtgcccaggtccttttgtactgaagcttgggcccttcc

SEQ ID NO: 86600 - DNA, 122 bp, Homo sapiens
ccctcccgttactgtcaccaattccgggggctgctcccggtccagtaagtggaggggtcgcgtccctgctgcccgggcgtacacgatcccggggcccccccgatgtcgccccgcgccctggg

SEQ ID NO: 86601 - DNA, 122 bp, Homo sapiens
acgctttgggtaaagggctccctaccgcccagggtgcttcagaagggctaccacaactcccgtaggtcccgtgctccggggctccctcacctgccgtcaaggtgacgttgccgtcgaagcag

SEQ ID NO: 86602 - DNA, 122 bp, Homo sapiens
gctcacccttccgccatcttgcctgcatgacatcaccactatttactgacctttgacttccgacacggcaccgccccctcaaggaccgcccccgaggcgctcggcccaatcctcgcgccggc

SEQ ID NO: 86603 - DNA, 122 bp, Homo sapiens
gtgccggcggggatctggctgcactaggcggctgcggcgcctgcccctgagttttggttgcgctgccggggggccgcggggtccagaggcctcactgcaaaaagacattcataccctcccag

SEQ ID NO: 86604 - DNA, 122 bp, Homo sapiens
aggatgtctgagaagcccggggtcctcaccgctcaacggccttctccggcacccagatctcgggctccaggccccttccgcagttcacctgtcccgggccccccacccagcaggagtgccgc

SEQ ID NO: 86605 - DNA, 122 bp, Homo sapiens
tcatgagccctgcgcttacagttatgacgaaaggctttcccacactcctcacacctgtaacgtttctcttcagtgtggatccttctgtgtttggtgagttctgccttgatgctgaagtcttt

SEQ ID NO: 86606 - DNA, 122 bp, Homo sapiens
tctgccctcggccctccgagaccttgaggagctcacccggccgccggggcacacaagacacgattcattgctgccttgactcctcgactgacgccttggcgcgccgtgatagcgtcacttcc

SEQ ID NO: 86607 - DNA, 122 bp, Homo sapiens
attctctcacgtgaatctaaaatccgtcccagacctcgctttcctggagttctctctctccgctgtcctataacctagacggtgacatccgtgggtgtttcttgaacacacgaatgaatgat

SEQ ID NO: 86608 - DNA, 122 bp, Homo sapiens
gagtctttggagctataatctgggtgaagcaacccagcgggtgtgggtacattcagccaccgttaggtcaccctatagccatggttctcctaatgccacgaattctgggcaagttctttgaa

SEQ ID NO: 86609 - DNA, 122 bp, Homo sapiens
ccagtgactcggggtcggggacagagagagccccaggatcccggaccagcggggtgtctgcgtgcccgggattccgtgtctcgcgtctcccgagggggcttcggcgacggcttctctcttta

SEQ ID NO: 86610 - DNA, 122 bp, Homo sapiens
aagacacaggcttcatagatgagaagtaggtcagtactaaacagtattgtaggtgttctacgttcaataattcacaggcaaactgactgtcacaggctacagaccagatagggttttgatcc

SEQ ID NO: 86611 - DNA, 122 bp, Homo sapiens
ggaggccggaagtgcgtcacgcttgtggggcgcttggaggccagaagtgcgtcatgagcacggctgctctttctacggtgcaacttttccgcatctcggtgtttccgattgggagacatcct

SEQ ID NO: 86612 - DNA, 122 bp, Homo sapiens
cggaggccgggacggagcagcgcgtaactagggagaggataggccgggctggtggagatgcggggagagaccagccaaagctaaagagccaaagcaaaggtgctgcggggaggacagaggag

SEQ ID NO: 86613 - DNA, 122 bp, Homo sapiens
gcgcgccgtcggggacgcagctgcagacgttcaaccttctcgcgggattttcatttctcgcgtctgccgtacttggtttcgcttcgctagtcccagaggcccagagtggctcgcctggagtc

SEQ ID NO: 86614 - DNA, 122 bp, Homo sapiens
cagtcactaacgaacgtgtgcagagaggtgacagcatccatgcggccacaggcacgttcccgctgaggttggcaggctggctgtcttggctccgtcttctcctctcagccccgcaccgtaaa

SEQ ID NO: 86615 - DNA, 122 bp, Homo sapiens
caggactcacgtacggactcacatggctttgtgtgcaaaagacgactacacggtcgtaaacgaggcggcccaccccagctctccctcaggtgaggctcagctgggggcagaccaggccagcc

SEQ ID NO: 86616 - DNA, 122 bp, Homo sapiens
acctcaggtgatccacctgagccaggcatcagccaccgagccaggcataagccaccacgccgggccaatgtaacaacataataacataataataacaattgtggctgggcatggtggctcat

SEQ ID NO: 86617 - DNA, 122 bp, Homo sapiens
gggagccagggctgcgcgtggtgctcgtgggctggcacgggttctgggtgggcatggggtcggccggccccgcactcggcgcggccggcgccttctgggcttgatccagggacgagctccct

SEQ ID NO: 86618 - DNA, 122 bp, Homo sapiens
tcatgagcagctactgcggcgttggcaggactcgctgctgctgctgctgcttgtgtaggtcggggagccagagatccccgaggacgcgcgccggacagtcggcactgaccggcccacctggt

SEQ ID NO: 86619 - DNA, 122 bp, Homo sapiens
gaggactcttcatgtccacaacggtggacccagtctggcttcaccagcaaaccagaagagcgcctgctggctcgcaggacgcgagtgtagagatgcggctggctctcctttcctcttctagt

SEQ ID NO: 86620 - DNA, 122 bp, Homo sapiens
aaaagtttgaaaaccactgacttgctctctacctgtggcctgaaatgttacagaacagtacgattgtctaaactgcagccaggaatgtgaggagaagaaggagagtccttaataacctccgc

SEQ ID NO: 86621 - DNA, 122 bp, Homo sapiens
ctcctctgtgctctcaccccaggcttgcctggcggggacagcagacaccaagtgaggtggcgacagactggtctgctgagcggattagtggggtagagtttccccagggtggaggtgtgaag

SEQ ID NO: 86622 - DNA, 122 bp, Homo sapiens
ccagcccctccggtatgtcaccatcatgaacactcaattgtgtgtgggcctggtagtagccgcctgggtggggggctttgtccactccattgtccaactggctctgatacttccactgccct

SEQ ID NO: 86623 - DNA, 122 bp, Homo sapiens
ccgagtgaggcttccgccctttgaccaccagcccaggtttccagatggaaggcttcgaggcgggggccgggctggggcctgcggggggtcccgggcctggggcaggtacttaccatcctcgt

SEQ ID NO: 86624 - DNA, 122 bp, Homo sapiens
acaaggttcagagagcttctgcattgctcaatacatgaggagtggtgagcccaaaggggccgtggaagctccgtgccccttcccccaaacctgttcctgtgcctccatctggctgtttctga

SEQ ID NO: 86625 - DNA, 122 bp, Homo sapiens
ctctctcagaatgacaattctaggtacaacttttggcatggttttttctttacttcaagtcgtttctggagaaagtggctatgctcaaaatggtgagtcatttctaagttttcttatggatt

SEQ ID NO: 86626 - DNA, 122 bp, Homo sapiens
cgccaatcctgtgggtttggcaaagcagctggcagggacattagagcccattagtaaaggcgaggttgccaggagtgaggggagggagcccgcagccaagaggcactgtgtgtgtgggaggc

SEQ ID NO: 86627 - DNA, 122 bp, Homo sapiens
atgttccgcggcccgcgctgcagctgcgggaactgcaggctgtttgttccgagtggagaacgggagggaggccccggcggggggaaagaagccctcggttctgggtcgcattgcccgagggg

SEQ ID NO: 86628 - DNA, 122 bp, Homo sapiens
ttttaatattatttactgctttccagacttactgatccagagtatataaatacacacacacgcgcgcacacattaactgtataccacaggaaggtatctgatgtatctgtaggttcatccct

SEQ ID NO: 86629 - DNA, 122 bp, Homo sapiens
atgaatcatcaagaagtcagtgtcatcagcagcaaactcacagccaacagcgctagaactcgtgcctggggatagcttctctaacacgtggatttcctcctctgtgaggctcatcacggcct

SEQ ID NO: 86630 - DNA, 122 bp, Homo sapiens
ttgatcagggaggggtgaggcattctgggctttgtagtccgggcctacttgtgacaaaggcgtgttcatcaggggagcgcagctaattagcatccgggctcagattggctggggcggggacg

SEQ ID NO: 86631 - DNA, 122 bp, Homo sapiens
cgcaacggggccgcttaacttttaggccattgatgaaaagtcaaacaagcgcacagtactcggtgtaatcaggggcatttttagcgagatacctgggatgaaaacgggtgaccacctgaatc

SEQ ID NO: 86632 - DNA, 122 bp, Homo sapiens
gcctccgagcctcagaggccctcagtcgtttccgtctgctggcgatagtcccggccgggtcgctggtgttgccagttccgcccaaagcagcttctaatagcatcaactgaaagagacctcct

SEQ ID NO: 86633 - DNA, 122 bp, Homo sapiens
tcgcaagtttgcgaccactgtccctgcaatcacggactgacacatctgccagggacaccccgcagtagccccgcaagctcagcgcggtaaagaccacgctggcctctccgccgagcaacgag

SEQ ID NO: 86634 - DNA, 122 bp, Homo sapiens
taaaagtttggagaatatctcatggcctgaccctccatatttggcagcatgcacagggcgcgggctattaattaagcagaaatgattgactgggggctgcttgttcagagttccagcaaagg

SEQ ID NO: 86635 - DNA, 122 bp, Homo sapiens
tctcttagacttgggaatcgtctcgtggaaatatacacttttttgttatttacaataacccggttctttgcttggtctggattatttatttattcgagatagggtctcactccgatacccag

SEQ ID NO: 86636 - DNA, 122 bp, Homo sapiens
tcccaaaacaagaattaaccggcccaaaatgcagacggtgcagagccgtggccgagacaccgtcctccagccccaggctgtggtgtggacgtttcataattgattcaatgatttccttattg

SEQ ID NO: 86637 - DNA, 122 bp, Homo sapiens
tcgtgctgtgatgcctacatggaaacagaagataaagatttcccctcattcaaggcgggacgttagaaccaaaaaccccacatgatgctgggaccctctaagaattggaccctcaggaaggt

SEQ ID NO: 86638 - DNA, 122 bp, Homo sapiens
ttttcatttgattctcttttgaatggcgctttttcctcctgttgcctccagtgttcaccacggcaaagtgagtccatctccagcaagtgacaggtgccaagatgaagggtccagtgactcgc

SEQ ID NO: 86639 - DNA, 122 bp, Homo sapiens
aactccttgcttggttcagagccttgaagaggcggatacaagaggccctctgggcaccgccgcccagtcccgcgcagccccctgcagttcccaggggcgcgagagagggcgacgtagagcag

SEQ ID NO: 86640 - DNA, 122 bp, Homo sapiens
ctgggccaagctgaggcctcctccccttctcttcctttcagagactggcctatggcatcacgccagagaacgagcaccacctggtggctcagagggacatcagacagttccaggtgggtgaa

SEQ ID NO: 86641 - DNA, 122 bp, Homo sapiens
gggtggcggactcgacctggcctgcagccaggctactgcacgaaagcccaaggtcgtgtccggccactgaagggcagggtggtccttgctgacgccaacctggaaggtcagacccggcccca

SEQ ID NO: 86642 - DNA, 122 bp, Homo sapiens
ctctcccgtcaaacaatatttttatgaaacgcgatgtaaggaagccaggccggtcaaaaacggttgcaggggtattgatgataaacactggaactctcagtgcaaaacatcccaaacctacg

SEQ ID NO: 86643 - DNA, 122 bp, Homo sapiens
agttaagtgcaggggtctggggaggactggaagcatccaattcactcgtgaaaaaaacatcgagccagccaaaccgaacacgtgttgggcccctttgctactgatggattcaacagccccaa

SEQ ID NO: 86644 - DNA, 122 bp, Homo sapiens
tttgtttctttaaatgtcccactcctgaatctccctccaaagcatcatcctggcagcctccgcagggtctggaaacaaactgcacatttcaacggcctctattgcttgcgaaaaggtctggt

SEQ ID NO: 86645 - DNA, 122 bp, Homo sapiens
ttttccctgcagcggcagtagcggcagcggcagcgcttcagccatgtttgacaaccgaggcgcgctctgcgcttgcgcggcgcctagtgcccgctcctcccccgcccccacccgcgctggct

SEQ ID NO: 86646 - DNA, 122 bp, Homo sapiens
ccgtcgttgttgttggcttagcacagagctgcactcaggccttgggggcggggtctcctccggggaacttctccgacggtcccctcacctgcctggaacgcccccggagtgacccagcaaga

SEQ ID NO: 86647 - DNA, 122 bp, Homo sapiens
catcatttctgtattataagtcatcacacttcctctgttgacattcattcattggttcatcgctagtggccataatttaataatctgccctttagatctcctacatacactgctatttttct

SEQ ID NO: 86648 - DNA, 122 bp, Homo sapiens
ccatggcgaatccctcagcagggcacgcaccgcacaaagggccgaggagcgagggtagctcgaggtcaggattacagagactcaggagcaagagaggaaggcttaaagagccagactgcgca

SEQ ID NO: 86649 - DNA, 122 bp, Homo sapiens
gcaccggggtgaccttggccctttcttcttctggaagacccccccgcttccctcggctgccggaccgggactctgggcctctgctgggaactcacagtcgacaccaggatgcccagagccag

SEQ ID NO: 86650 - DNA, 122 bp, Homo sapiens
tagtgaataaggaggaaataagaggttgaaagataggtagggttggatcacatcggttctcgaagaccctagtaaagagatttttttttaatgtcataggaagccattgaagagttaagcat

SEQ ID NO: 86651 - DNA, 122 bp, Homo sapiens
cactgggacggggaaaagcgaaacagttccgccccaggaagccgtttagggcggtgtgggcggggtagaagcgataagggtagggaggaacgaggaagggagaaggcgtggggtagggagat

SEQ ID NO: 86652 - DNA, 122 bp, Homo sapiens
gactgccatccctgggcctgcccctaggtggaagagcagctgatccacgtacgtgcacgacgggagcaagacactgacagacagttttgtcctgatggctaacccctccgagatggaccacc

SEQ ID NO: 86653 - DNA, 122 bp, Homo sapiens
gcatcaggctctagctgccttcaggcaagtccatcgaggcagaggacacaggtcaggctgcggaggccgctgaggacacgtcaccggtggggtggtccaggcctctgccacgtgttctgacc

SEQ ID NO: 86654 - DNA, 122 bp, Homo sapiens
agactggaaggggcgtgaaagcacaaggtcttgatcattctcctggcattcggtgctgtgcgtagggtgagcaatggacgccactggggaagagtgggaaaggaaggctcagcacgtcggta

SEQ ID NO: 86655 - DNA, 122 bp, Homo sapiens
gagtcgtctctgtttgagaaagagctggagaagtttgacacactgcgatttggtcagctccggaagaaaatctggattagaatggagaatccagcgtactgcctgtccgctaagcttatcgc

SEQ ID NO: 86656 - DNA, 122 bp, Homo sapiens
cccatagatttgggaagtcgagtgaaacgcatgtgttaggtttatatgtttcacattttacggaatgcccctcatgcagctggtcagccgcctgacgagggaagcttggccctttggagaag

SEQ ID NO: 86657 - DNA, 122 bp, Homo sapiens
ggttcccccctaccccggggcaaaaggccgtgcgtggtgctcggcgtcctctcctttccccgccagccagtccccctggcccctcaacctcggggtttcttaccgcctgggcacgggctgga

SEQ ID NO: 86658 - DNA, 122 bp, Homo sapiens
atccccggaggatgttatgtctttgcctggtctaatcttccgcatctcgggaaactccaccgcacctccagggacaacttcccgcggagtgagagagctcgtcgcctgttcttcctaatcat

SEQ ID NO: 86659 - DNA, 122 bp, Homo sapiens
tggcccagtccttgtggctcctagcctagaacgctgaatagtctggagatttgctgaaagcgactctcaccaggagatggcagcgtcggctcagagatgctccaagcggtcccaaccgcctt

SEQ ID NO: 86660 - DNA, 122 bp, Homo sapiens
gtctcccggggacggcccccagccccatttcccccttctcttggtctcctgcagagagaacgggcctcagcccccggctcggacactcccctgcccgcgccccggcaccccccagccctccc

SEQ ID NO: 86661 - DNA, 122 bp, Homo sapiens
aatagcccctgtggtccctatgctgaggaggctgagaggtcctgagcacgggtggggccccggccactcttggccacctctggccgtgcctggaattgagccataagtgggcagggtaggtg

SEQ ID NO: 86662 - DNA, 122 bp, Homo sapiens
aggagccccggggaagggtcgagtcccccgccttcacgcaccttccctgccggacgcttccgcctttcccgcgcctcggggatcccgcccccgcttagtaccttggggccacctggcgggga

SEQ ID NO: 86663 - DNA, 122 bp, Homo sapiens
ggcgggggcgggggcgggggcggaaacgccgagatcgggcggggatgctgggatgcggggcggcccggggcgtgcgcctggagtcgcgcggagtgtgggcttccgcgaggggcgcggggcgc

SEQ ID NO: 86664 - DNA, 122 bp, Homo sapiens
agatagatgtaaagaagacaacctgactcttttctgaaacattcagagcatcctctaccccgaggatcatgggaattccctcatgttcctcctgctctgcctcaagcaccccttctttgctg

SEQ ID NO: 86665 - DNA, 122 bp, Homo sapiens
cccctggtggccgcgcccccagggctttcactttggcgaaggccacgtccctgaaagcctcgccaagccaagggagagacacatggaagctcgctttgtgataagccacatccctgggtgag

SEQ ID NO: 86666 - DNA, 122 bp, Homo sapiens
accttgaatcttccacttcatgaccttcatccaggagtagccactgacatctgtatggtacgttactgttttcacagtattctgtcttttgattctcacatcagttctatgaggtaagtatt

SEQ ID NO: 86667 - DNA, 122 bp, Homo sapiens
tgatcctgtcatagttttgtttgcaatcttcaggtgactgtcaattacctgatacatagacgtgttcaaggaacgtggtcgtataaatgaatcaggtgtttgcaaaggagctagatggcatt

SEQ ID NO: 86668 - DNA, 122 bp, Homo sapiens
ccatcccaacctagcgacatttacttttctccacaggatcatttttctcttgacgaaggtcgtcgcctgtttctggatttcccgatggcctgagcatcatccgcgcagtgaacatcctccct

SEQ ID NO: 86669 - DNA, 122 bp, Homo sapiens
gctcgctccctcctccgggagctccgaaggctcggggtcaaccacctgggcccccgaccccggtagctggctcaaggcccgccactacctggtacctctgcaggagttcagagcctcatgct

SEQ ID NO: 86670 - DNA, 122 bp, Homo sapiens
acgtggatgatgtaatgcgtcaaacccaaggagacaggctggccactgtccctaccccagcgtttggttccatggattctaggtggggaggaactggaaagaatgaagcattttaaatagga

SEQ ID NO: 86671 - DNA, 122 bp, Homo sapiens
aggcctcggccacctgcttgaatctcctctccgcttcctccttgttctcagggtttttgtcggggtgccacttgagcgccagcttgcggtacgccttcttgatggcctcggatgaggcctgc

SEQ ID NO: 86672 - DNA, 122 bp, Homo sapiens
ccaggtgtaaaggctacctcctgcttcacacccgggtaacataaaagacagcgctgggaccgaaactcgggtctcctgggtcctggttggctggagagaggggcaatgaacgtcccgaaaag

SEQ ID NO: 86673 - DNA, 122 bp, Homo sapiens
cttcactttgctcttacctaatcaggggaaatctgattaacatatacaacaaagcctcaacggggaataaaaaggtcacaaaagggcagagaaggattcacagaaaaaggaagaggccttgc

SEQ ID NO: 86674 - DNA, 122 bp, Homo sapiens
cctggccgccaagctgggcgagaggccggggccccccttccatcacgaggttcctgccctcggctcggcctagtttccctagccaggagaagtcctgttttcaacgttctagaaatatcccc

SEQ ID NO: 86675 - DNA, 122 bp, Homo sapiens
gagcggcggctgttcttgcagttcaagtatcccgcgactattgaaatggaccaatgaaagcgctcgcggccttgacgtcattcaaggcgacagggtcgcaggcgagtgaagggtaaaccaaa

SEQ ID NO: 86676 - DNA, 122 bp, Homo sapiens
taagggtgggtggggagggagaagagagaaaaaagcaaagggaaagttcaaagtgacactcgctggggctgaaaaccacactcccctgcagatgaggtccttggctttctcttgaaattaag

SEQ ID NO: 86677 - DNA, 122 bp, Homo sapiens
ttacccaagtctgacccaagcgaaggtgcccctggagttctggaaaacgcaggaggcctccgcgggctgggtgcgccccgagcactgccatcccttttcttgtaattacttaatagcctgtg

SEQ ID NO: 86678 - DNA, 122 bp, Homo sapiens
ggtaggtgggcggcagacaaggacacccccagggagcatggcggggccgtgagcaccccacgctgagtactccacactgcgcaccctgaccctgagtactccgaccccaagtactccacgct

SEQ ID NO: 86679 - DNA, 122 bp, Homo sapiens
taagagaacctatgaccagtgctcactcacggagacctctgtgtgatgtagggcacggtgcgggtggccgctctgcgagtttcgcagtgaaagtgtccgccgcgaggccccgtgattcacta

SEQ ID NO: 86680 - DNA, 122 bp, Homo sapiens
ccagtgacacagaggcctcaaacggcacagtgcaccttctgtccgaagcagccggcgaggcggcccgcgaacctctgacgtgctccattgcaatgaggatgaacgagcctcaggcggagggt

SEQ ID NO: 86681 - DNA, 122 bp, Homo sapiens
gctgaacctcctcagaagagcaactggagatagaagcatgaatcttttatccatacgttccgccaggctcgagaggtccagcaggtaactgccaaaggtggaaactgttcacacttgcctcc

SEQ ID NO: 86682 - DNA, 122 bp, Homo sapiens
ggagggagggcgttgccagagcagcatcataaagtacataggtctgcccacgtcgggacgcgtgggtccgcgtctgcaggttcctatcgctccccgttttctgaatattgggagatattcca

SEQ ID NO: 86683 - DNA, 122 bp, Homo sapiens
tgtactccaggccccaggagtcttccaaaaaccacggtggagtctgggaagcctgacttccgccacataacaggacttggctgacaagcacctgggccagcaactgaaccgggagcagcatg

SEQ ID NO: 86684 - DNA, 122 bp, Homo sapiens
ttagcgcggcgtgagaagccatgaggtgagttggtcctgaaagccctatccgcgttcatccgcgccttcaggtgccccgccgagggttcggatcctgtaggccgcgccgcggacccttgcgc

SEQ ID NO: 86685 - DNA, 122 bp, Homo sapiens
gcgaattggggccaggggatggggaaaaagcccctaaaggtggtcccaaggcccccaccccgcctagaaaagtccccccgcctcgcgggaccgcctccgccagaacccgcgcctgggatccc

SEQ ID NO: 86686 - DNA, 122 bp, Homo sapiens
ttgttcagtgaacacacaaccattgataggtgtgattttcagcaaagtgacaatagagaacgtgtaggagctttgtgatggtgtactagtatcattgttattattattattattcaatttaa

SEQ ID NO: 86687 - DNA, 122 bp, Homo sapiens
gtgatggagctggggcggcccataggcgagtacttcaatagccagaaggactttatggaacggaagcgagccgaggtggacaaggtgtgcagacacaagtacgagctgatggagccactcat

SEQ ID NO: 86688 - DNA, 122 bp, Homo sapiens
gctaattttttatttcctgtagagacagagtctcactaggtttgttgcccagactgatctcgaactcctgggctcaggtgatcctcccgcctcagcctcccaaagtgctgggattacaggag

SEQ ID NO: 86689 - DNA, 122 bp, Homo sapiens
gtggagtgaggttggatgggtaaaactcccggtttttcttcttcttctcaaggtcgtaatcgaaccaggctccggtctgctcatcccacaggactgtgttcagggcggccaagcgctgcgac

SEQ ID NO: 86690 - DNA, 122 bp, Homo sapiens
gcctcatggacgtgcctgggggtgtggcttggcttccccttgattttggccggtggatgacgctgtcctgaccacacccactcttgtctcacgcgtgtaggtcttccactttcgccttggtg

SEQ ID NO: 86691 - DNA, 122 bp, Homo sapiens
acaaaacagaccaaaaaatcctttccctcctaataacaggagcgtgcccgtaaaggctgccgagggaccacgtcgtggccgcgcctccgtcccatagtggtactcgtacagacagcccagcc

SEQ ID NO: 86692 - DNA, 122 bp, Homo sapiens
agtaatcccagcaggtgggcagcagagcggaggggtcgaaggggcgcatggccgcccgcgcgtcctgagagaccgagaagccaaggccgtgtcagtcctcaggcgggactaggagcttccat

SEQ ID NO: 86693 - DNA, 122 bp, Homo sapiens
gcgggagctgcagcgcccgggcggcgattgcgcccgaaaggcccgtacgtcctggggcgccgcttcctggagggattagagcacctgccggcttccatctccgcccgcccagagcgaccctc

SEQ ID NO: 86694 - DNA, 122 bp, Homo sapiens
gggccctccctgtggccctgccctctcccctccctcgcttagagccagccgcatgggcctcgctgtccctaactagcccaggctagggactgcctcagggcctttgcacttgctgtcactcc

SEQ ID NO: 86695 - DNA, 122 bp, Homo sapiens
ttctcctgctgcatagatgctgctacaaggcccagagacctcaaggcacttgctcgagtacgcacggtggacactgtccagtaaggctgaacacgcaccctccaactgccctccatccccag

SEQ ID NO: 86696 - DNA, 122 bp, Homo sapiens
acgaggctttgcggtggctgttggcttggcggtggtcgcttggcttggcgtggcagtgatcgcttggcttggcatttctggcttggcggtcctcctttcgcagattggaaaccgcgggctat

SEQ ID NO: 86697 - DNA, 122 bp, Homo sapiens
gtcatcatccgcagaggtgtcgtagtgcacggggtggttggcgtggacctgcttcaacctcgcaagcagcgcctccaccaggctgtctcggtcccggagctcaatgaactggaaggccacct

SEQ ID NO: 86698 - DNA, 122 bp, Homo sapiens
caagcagaaaccttcctgctgggtggcgtgagaaacaggaaaccatgggtgggagtgggccgtggtcttcaagggagccatcagcagcacattcagggagctgtgagcagcccctctagccc

SEQ ID NO: 86699 - DNA, 122 bp, Homo sapiens
acacacaattttgtgggacaccatcagttgcagcctgacacagatttgtggacacagacacgtgaacagatgctcacataaacttcatgtgcatgacttgaaacacacagacacacacacac

SEQ ID NO: 86700 - DNA, 122 bp, Homo sapiens
ccagaggcagcagtatttattttagccagtaacaaacatgataaatgatgtgccaccctccgtcactgctggtcactggaagtgctggctgaccatcagcccagagctcaattcccacaggt

SEQ ID NO: 86701 - DNA, 122 bp, Homo sapiens
caaaacatgcctttgggcacctatcagataactggctgtcctagctccttaaaaatctaccgggtgtggcctgaggtatgggacttgagttccctggatactggcggaaggtctttggtctt

SEQ ID NO: 86702 - DNA, 122 bp, Homo sapiens
gagagagccagggagagacccaggtgacgagacgaggctcccgggctccagttactggcccgcagggccggggcacgtcgtcgcccagcgtgcggcggggcccgggagcgccgcggcccctt

SEQ ID NO: 86703 - DNA, 122 bp, Homo sapiens
aacgctgcagaacacaggaaacgggggctggccgggaaatccgcgcatccggccccagggcgccccagcctccccggctcgttgcagttaccggttgctggctcgaaagctttctcggtacc

SEQ ID NO: 86704 - DNA, 122 bp, Homo sapiens
ccaacttgcagggcagcccggtgtacgtgggcggcaacttcgtcgagtccatggcgcccgcgtccgggcctgtcttcaacctgggccacctctcgcacccgtcgtcggccagcgtggactac

SEQ ID NO: 86705 - DNA, 122 bp, Homo sapiens
ctcctccctccccagtagaaataaaaaaaatctttacatttgttacttttcttttccccccgtaagacacagaattaatggaaagtgagtatcttggatttcaaatctgaagagatttttac

SEQ ID NO: 86706 - DNA, 122 bp, Homo sapiens
ttgttgtgttggcagtggggtgtgtggcctgcatgactatgtgcgagggaaaccgtacaacgcctcggagtaaatagtaagcgcagccagtctgttgtgggttgggagaagaaaccgaggat

SEQ ID NO: 86707 - DNA, 122 bp, Homo sapiens
aggcccgagactcggaacaccggtgtgtttgcattttagcacgggggaaactgaggcatacgttagccagaatcatccggtgtggttaggactggaattttgaaaattattctcatacttag

SEQ ID NO: 86708 - DNA, 122 bp, Homo sapiens
gtacaggctgaatatagggaatagaaagaagtcccaagacacaatgagtgtcttaggaagcggagagtgaataaaggcaatctcatgaaaggaagggagagactggaatcctgcccactccc

SEQ ID NO: 86709 - DNA, 122 bp, Homo sapiens
ggtcagcaccgcacccaggcaggcctgtgtggggacaaacacggctggggcaaagggacccgaggctgggccaggcctgcgccctcctgaagtaagaacacgaaggatgatatacttttccc

SEQ ID NO: 86710 - DNA, 122 bp, Homo sapiens
ctgtctgcctgcccacttgaaggaagacctgtgtgtaggagataaatctgcagagagggccgtgacttttgatgaccagctaaggactgcctcacaggcaagggaggttcaccacagggttt

SEQ ID NO: 86711 - DNA, 122 bp, Homo sapiens
agcaggcgtgcgggccgtgagcggcgccagagggtacctgggtgagtttcaatgatattccggggtgggggcaagagaagaaggggctgcccaagatgcctggggtggagtgagcaatttct

SEQ ID NO: 86712 - DNA, 122 bp, Homo sapiens
ggtgctcaaatggcaggccacagacaggaaacacagttgtgaggaattacaacagcctcccggccagagctggagaggtggagcccaggtcccctctaacaccccttctcctggccaggttg

SEQ ID NO: 86713 - DNA, 122 bp, Homo sapiens
agggcgggatccctatggggctggccaggcggcaccgtgccaggcccacagtgccctgggcgtccatggaagtcgttctgtgtctttaaaatcagaaggaagacattaacctttaggctgaa

SEQ ID NO: 86714 - DNA, 122 bp, Homo sapiens
gtcctcactgagcagcgagtcgtcccccgtgtcctctccggccaccaaccacagctcccccgccagcacacccaagcgcgtgcccatgggccctatcatcgtcccccctgggggccacagcg

SEQ ID NO: 86715 - DNA, 122 bp, Homo sapiens
atccctgaccacagcttccaattgccagttggttgacaattcccaaattgcctttgccagcgcagctctctctgcttccttccaggctacaaattcaccggcttcctgaacatttccacttg

SEQ ID NO: 86716 - DNA, 122 bp, Homo sapiens
ctctgtcctgttcactgatgtctatcacaagcacttagtgcctgacacacagtaggagctcgagaagtattttctgaatgaatgaacaaatttcttgacctgaagattcagaagagtaagaa

SEQ ID NO: 86717 - DNA, 122 bp, Homo sapiens
cccgggccccgccgaggctctggtcggtccgggacagactggcgggcgggcgggcactgacgccgcggggccggagcgggccgcgcggtgggagcagcggcgccgtcggtccccgtcagggc

SEQ ID NO: 86718 - DNA, 122 bp, Homo sapiens
agtgtgaggcctttgttgacgttatttcagtcacaaaagccgggaactgctggtgcttcccgtcactcgggtagtcccagccgcgggcacacaggctcaagccactcctcacatcagtcaat

SEQ ID NO: 86719 - DNA, 122 bp, Homo sapiens
gcactgtgagagagcgaagtctaaagggtttgaataaatttgccaagattgcgcattgtacgatgtctgttgtcatcaatgtgtacatgcaatgcagtactagctcctggacagtcatttgt

SEQ ID NO: 86720 - DNA, 122 bp, Homo sapiens
cgtctgcgccgcccgagccgctgtgctgcgcgtactcctcgaagggagggaacttgggctcgatgtagttggagtttatcaaaaacgagctcatggtcattaatttgtgaagtgcaaaaata

SEQ ID NO: 86721 - DNA, 122 bp, Homo sapiens
ggcccctgcagggacggggacagacgcgcacggagcgggagcccggcagctccgggtctacgggatccatcctcccaagggtgcccgagaacactccatcgtcgcggaatgcccgcgcttct

SEQ ID NO: 86722 - DNA, 122 bp, Homo sapiens
ttcagaggaggacctattagagcctttgccccggcgtcggtgactcagtgttcgcgggagcgccgcacctacaccagccaacccagatcccgaggtccgacagcgcccggcccagatcccca

SEQ ID NO: 86723 - DNA, 122 bp, Homo sapiens
agtgattttcccacctcagcctccggagtagctggggccacagacacaccccaccaggtccggctaatgtttagatatatgtatttatttattgagactctctgtcacccactctggagtct

SEQ ID NO: 86724 - DNA, 122 bp, Homo sapiens
cgcgcgacctccagttcccgcccgcccgtgcctggcgctccagacctgggatcctcccggcggctctgcccagctctgcccgccttctttgcgggcttctggaatctgccttcctacatcca

SEQ ID NO: 86725 - DNA, 122 bp, Homo sapiens
ctcgttcctcctaagtccgggacagattgtcgggaggagcttgaactgagcttcggctcccgactgggcctgggcccggcccccactggtgccacctccctcccttcctggcccggctcctg

SEQ ID NO: 86726 - DNA, 122 bp, Homo sapiens
ctctctccatctcagggtccttggatcccccaggggctggcactcatgggcagggtagcccgagggctcctggccgacgtccccaccagcgcagcaagtagaatcagagggaagggactgcc

SEQ ID NO: 86727 - DNA, 122 bp, Homo sapiens
ggcaaacaaaacacagatctatttcgaatgccattccgaggaaggtaagacatgcacgcacgtttaatcaaatagtaaacaagagtagtaaaacaggaaaaagactaagaagagttcttggt

SEQ ID NO: 86728 - DNA, 122 bp, Homo sapiens
ggcctgtgggtgctttccctctgccccagggaagcggtggtaatcacacctgtgagatgccgacaatcatgcgtgcgaccatccgtctctaggtgcccggggcctggaagcccaggagctcc

SEQ ID NO: 86729 - DNA, 122 bp, Homo sapiens
tgccacagagaaaataggtgtgggggctgcacggggccttgaaaactacccagatacccccgtggagaacgctggtgggagactgggcgttcctcaaagtcccgagtggcacagctgttagt

SEQ ID NO: 86730 - DNA, 122 bp, Homo sapiens
cccaccttcccaattcttgtcatctcggttcaggaaggtgaacggtgttccgattccccgcggcgggggcctgtagtgggagctctgccccttccccgcctctgctgcaggccccgcccctc

SEQ ID NO: 86731 - DNA, 122 bp, Homo sapiens
ttcaaaaggtctctgtggggcggacccaccacagcgcaggaacagaagctcgcccagggacggagactgtctccaaggctaggattcgggtgaccagaaacgtgtcacacagccacagctca

SEQ ID NO: 86732 - DNA, 122 bp, Homo sapiens
gaaagagggactgagggggcggtggccgccctgcgggaggtggagaaaggagtacgtattcgctcattggctagagggagtgtgcgtactaagctattgatgtgagtaaagcccgcctgggc

SEQ ID NO: 86733 - DNA, 122 bp, Homo sapiens
agggaatagtctgccttggcctttgagggtggtgctaggggaactatgccactctatggccgtgctcgagaccatgtcacccatccttcaattctgggcacacgccctggccgacccatggc

SEQ ID NO: 86734 - DNA, 122 bp, Homo sapiens
aacccctacattatatgaccatcatgaaccgggagacatgcaataaaatgttattagggacgtgggtaggtgggttcttacactccattatccaagtggctctggtagtccaactacccttt

SEQ ID NO: 86735 - DNA, 122 bp, Homo sapiens
gggaggttggaatgccgtgggtctcaaagagggcgcgcgagaggggacaccggaagactgcgagccccgctcacctcgagctctcagctcgctccatggatgcaacacccgatccgcctcgg

SEQ ID NO: 86736 - DNA, 122 bp, Homo sapiens
ccaggcgcccgcccacccaggagagcggcgcaccggggagttttgatatcccccggagctcgctcgcgctagggcagtccttttgactttttaaaccaaatttgaacacaatccgagctcct

SEQ ID NO: 86737 - DNA, 122 bp, Homo sapiens
gggtctctcgaggcgcagacaacaagctagatcctgagccctctgcttcaaagcgggtagcgccttcgcccacgccttccctcccaccatccctgcctggctgccacccggaagtccccgtc

SEQ ID NO: 86738 - DNA, 122 bp, Homo sapiens
gtcggctccgttcacggacaggatggcgtcgcccacgtacagggcttgggtctggtccgccgccagccccttgaagatcttgctgatgaggatgggcatcttgttctccttgccccccttga

SEQ ID NO: 86739 - DNA, 122 bp, Homo sapiens
cacctaagaaaggaaacaactaaaggctctctaatctcttagaacgccggttcctccttccgccgggcccagagtcccagagactacctcctccagccctaaacccaatgtccccttaccgt

SEQ ID NO: 86740 - DNA, 122 bp, Homo sapiens
cgtgaccaggctcgcagcgctggggcagccgagacttgtagttcttgtccctctaacagacggcccgggtagctccagaaaaactacaaatcccggaagaaaccgcatccaggcgacgccag

SEQ ID NO: 86741 - DNA, 122 bp, Homo sapiens
ttaaaaaaagacgtatataattcactgcatctagcacagggctaaacccagtggttgctccgcaaatatttgttgaaagatgttcaaaaaagccttatttatattatcaaactccacaaaca

SEQ ID NO: 86742 - DNA, 122 bp, Homo sapiens
acccgttgccgatgggggaacctatgggcaccgtaaaagccgcggggtcgacgtggcggtcgggcctgcttttggcccacagctgcaatctccagaggatatcggcaaaacgctgatccacg

SEQ ID NO: 86743 - DNA, 122 bp, Homo sapiens
gaatgtgttcattcttttgttcaaatggccctgtagcagagctgtttcagatctttgcaacgtcactatttgtcttacttatctccccaaatgaagtttagtggctagcctccttctacctc

SEQ ID NO: 86744 - DNA, 122 bp, Homo sapiens
aggacgtatccccgagacctctcagcctgatgcctgtgcacagcccgctcccccatgacccggtcacacctgccccccagccgggccccgcctgcatcactttctggctatggacttgggag

SEQ ID NO: 86745 - DNA, 122 bp, Homo sapiens
tctgcacttcggtctcaggcgcaaacacgttcaaagtcgctaggccaaagcgctgagatacggtttcccaagccaattagagagcggctctcggatatggggcggaaccctgaaaaggcgag

SEQ ID NO: 86746 - DNA, 122 bp, Homo sapiens
cggcggtgagggggcgtgtctgcccgggccctgcccaccgccctctccgcccccgcgcggcgcccgaggcgcccccttcattgacgtcagtccccagggccagcgcggttttgctggcgcgg

SEQ ID NO: 86747 - DNA, 122 bp, Homo sapiens
aacacttagctcgctagaacaatgttgtttcacatgcagttactgggtcagggttaggaacgaaaatcatgccgtatatttacaaatgaggatgctcctctcccggggccctcacttggggg

SEQ ID NO: 86748 - DNA, 122 bp, Homo sapiens
aaggggggcggggtaaatgcggccggcgcagaggtggggagcaggtgggaaaggtggaggcgggctcgcctctggagacctacccctgctcccattgtcctccgcctgccagcttcacagac

SEQ ID NO: 86749 - DNA, 122 bp, Homo sapiens
tgagtccacaaaaacataactaaacatacataacttacaaaattacctcctggccgggcgcggtggctcacacctgtaatcctagcactttgggaggccgaggcgggcggatcacaaggtca

SEQ ID NO: 86750 - DNA, 122 bp, Homo sapiens
aaccccagaccctgcgcgggagtcgggggtccttccagttcccagagcgagagcgaaagccggaggggcctgtgttttcctgcggggttggggggcggggggtgcccgccccgcgccgcccc

SEQ ID NO: 86751 - DNA, 122 bp, Homo sapiens
tcacgggctggccctctgccctcctgtggtcacgacggccccgaagctggccgtgctcctcgctcgttcagccagaattctgcagacgcatcccaggcctacgctgctctgccaggacctct

SEQ ID NO: 86752 - DNA, 122 bp, Homo sapiens
gaaacctctctgtcaagctgcccattcggggttaagttcaaagacagaggacaaaggaaacggataaagcgtccgatacaagaattacccatttcagaggcacaagacgaagagcacaggcg

SEQ ID NO: 86753 - DNA, 122 bp, Homo sapiens
gaccttcccctatagaaccggcagagggcggggcgggatctgtgagtctctcagcctcggcgtgtttttgggttttggagacgagacctgccaggaaagctgaggcatgattcaaaagccct

SEQ ID NO: 86754 - DNA, 122 bp, Homo sapiens
acgcaggccaagagcgcggctgctgagccccggtcttgctgtgaggctgttgttcccactcgcttcccgtttccactagagttgatttgtctcttgccacctctccccggcagtgtggacct

SEQ ID NO: 86755 - DNA, 122 bp, Homo sapiens
ctgccaaagtaaacgagttcctgtgctggccgtcccgcccctccgaatcctcgggagaagcgggactaaaggatcaagctgaagtgaatgtgtagccctgtgacctcagcgcgcgggggcgg

SEQ ID NO: 86756 - DNA, 122 bp, Homo sapiens
tttaatatccaaagttatagttaccatgaacaactcaggctattatcttaatgccttgaacgccaaaatcttcagatcagagtaactctgatcaggagcacgccagacctacagaggaaagg

SEQ ID NO: 86757 - DNA, 122 bp, Homo sapiens
gtggggggaggcgagaaggaccccgccccgtgcagagagggggcggggcctgtgggatcccgggctaatggcaaacagctgccgctccccacgccggcccagccgccaagcccaggcccagc

SEQ ID NO: 86758 - DNA, 122 bp, Homo sapiens
cgctgcagccagccccgggggctcagccggctccgcgcagcagcgcccccacccccaccacgcctggccccgatcagtccccaccaggaccacctatttccccaagtcggtcacccacaaat

SEQ ID NO: 86759 - DNA, 122 bp, Homo sapiens
atcagatgtcggcttaggtggtttccagcgctctcctggggggccggggtggggggcagccgcttagagaaaaggggaggcttttttccttgaagctaagtgaacctgcaaaactctcttct

SEQ ID NO: 86760 - DNA, 122 bp, Homo sapiens
caaatagtaggtcttattatactttctaattttttgtacctattcaccaaccttaccttccgttctcagacttttaaatttcatcgttcaataaaattaaaacaactacaaaccttgaagat

SEQ ID NO: 86761 - DNA, 122 bp, Homo sapiens
tgaggaaactaaagctcagaaagattaagagattatccaaggtcacacagcaagtggcagcgccagcaaacacaggtatctgacaaatcttgtgccctttccttggaggttagagaaataag

SEQ ID NO: 86762 - DNA, 122 bp, Homo sapiens
cccgctgccagccagttctctcgctcgcccctgcctcacctgcctttcctacctacccgccgccaagtttcccccgcttggaaagttctggagtccggagcccgtggcccactgggtcagct

SEQ ID NO: 86763 - DNA, 122 bp, Homo sapiens
gccccgacgcgccggggcaagtgacaggggtcacccagcagagctcgcggaaatgggaggcgccttctgggcgcgccctatggggctgctccgggaggtggccgccaggggggcgcagtgtc

SEQ ID NO: 86764 - DNA, 122 bp, Homo sapiens
gtctgggttgagccatttagtaaagcttggtcacaaggctcagattaagacctggatctacgtgctgctgttcccagactgctttcagttactcttgtggttactgagtaacttgggagtta

SEQ ID NO: 86765 - DNA, 122 bp, Homo sapiens
gcctggcacttatctcgggccagctgctcatcgtggtcgcctggctggtggtggaggcaccgggcacaggcaaggagacagcccccgaacggcgggaggtggtgacactgcgctgcaaccac

SEQ ID NO: 86766 - DNA, 122 bp, Homo sapiens
cccgcctctctcccccggcaggcggcgctcagctggacactgggcgcccgccagccgcggcgcagactcccaagccgccggcagcagggtagcagggcctgtgttgcagaagattcctcttt

SEQ ID NO: 86767 - DNA, 122 bp, Homo sapiens
gagaggcagactcaggccctccccactgacaggagggctgtcttccatgtacacctaggtcggagtccgcaagggtggggcggtgacggtgcactggactttgctggcggtgctggaatggc

SEQ ID NO: 86768 - DNA, 122 bp, Homo sapiens
ggcaccacgccgcgcccgcgtccccgcccagtgcccgcgcctttgcgggccccggtcctgcggggcccctcgcgcactccagaagcatcagtatcctccgggcggccacgggccagctgcgg

SEQ ID NO: 86769 - DNA, 122 bp, Homo sapiens
cggcccatggccctccctctggcagccgagtctccaaagcagctcaaggggtgaggaccacgggcgtcccggcctagccgctcccggccgaggggcaaatggggccgcacatgggcagggcg

SEQ ID NO: 86770 - DNA, 122 bp, Homo sapiens
gcttcttcaggaacactgagagaatgtaaaatacaggaatcctgataattctgcattcttcgagcaatcattataatcaagctgatgtttttatccgtcatcattgtgtatagttcctttgt

SEQ ID NO: 86771 - DNA, 122 bp, Homo sapiens
attcataacttgagaacaaggaaaaagaagggtcgtttacacttacaaatgaccgaagctcggatagtatgttagatattgttgcattagggtcatcatattcttgaggctgctcaaaggga

SEQ ID NO: 86772 - DNA, 122 bp, Homo sapiens
ggtattctttgcaacattgtttgcaagaataaagcctgattttaaattctattgtgtttacggaggggaaagcccttgatgtaggcaacacacactagtgctcagaggcagtgaagcatcac

SEQ ID NO: 86773 - DNA, 122 bp, Homo sapiens
aaggagagcggctcggggtcactgtttcccccttttcaggctggcccgcttcactatctgcgcccccttcctgccctctatcaggtccggctgtaggccactccctctcagctccacctgca

SEQ ID NO: 86774 - DNA, 122 bp, Homo sapiens
tagcattttccttcctgcggtagcaatgctttgtcagcctcgtgctgggtagaactcccgcgtagtctcctcctcctttcccacttgcaaggaggcttcaccccctcatcccctccaacgag

SEQ ID NO: 86775 - DNA, 122 bp, Homo sapiens
atggtagtgttctggtggcccaacggttttaacagcccgggaatcaaccaccggaagtgccggccctgagaggtggagtcggggtggcagcggcggcggttgccaggagcccgcgttgcagc

SEQ ID NO: 86776 - DNA, 122 bp, Homo sapiens
ggcagggtcatttaactaatgggattttcaccatatcctgtttcttttagtgacattccccggattcctgagagctcccaccctccactggagtccagtgagtataaggtttctttgttatt

SEQ ID NO: 86777 - DNA, 122 bp, Homo sapiens
ccgttggggccctttgaacaaaggactgcctttactcctgacttttctgacaagggacaacggttcctgcgcagatctgcagtttctaaagttgatcgcgcgattggatttgctccccttag

SEQ ID NO: 86778 - DNA, 122 bp, Homo sapiens
agcaaggctctgccgcaggggtcagtgcggagggggcggccgcaaagctggggacaggcccgggggcccacagggtccccacattccatgtagcaaggctctgcccctggggtctgtgtgga

SEQ ID NO: 86779 - DNA, 122 bp, Homo sapiens
ctgcctggccctgcctggtttgccccatcactggagcgccccagtttggatgccaagtgccgagctcgcacgggtgactctacctcgctgagaactgacgaaccgtaagtggtgcattcaca

SEQ ID NO: 86780 - DNA, 122 bp, Homo sapiens
gctgtggaggtggaggcggaggcggggcgcctgcggaaggcctgctcgctgctgagactgcgcatgagggaggagctctcggcaggtcagtgggtcctgggtctgtatcaggaggagtgtgg

SEQ ID NO: 86781 - DNA, 122 bp, Homo sapiens
cggctgctgctgctgctgtgtgctgtctgccgtggttgctcggctctggggcagctaggccggggtcacctgacccaggtggtcctgcgtctgggggaggacaacgtggattggacggagga

SEQ ID NO: 86782 - DNA, 122 bp, Homo sapiens
ccaagtaatgcaacagaggcttagaatccccaacctgccagagtgttccattcgctcgctcgcctgctccggtgtggggctctgtgcctctccctccccctttactgtgtgtgaactcgtcg

SEQ ID NO: 86783 - DNA, 122 bp, Homo sapiens
tagagaggacccagcacaccccaaggtcagtgtggagaaagggacatttcccggttccttcgcctctgcccagggttctgcgggcatggcccacccccccaggggcaggggaggaggtggct

SEQ ID NO: 86784 - DNA, 122 bp, Homo sapiens
ttgaagcccagccgtgggccccggctctggggacaggctggagtcctgagccagcagctccggttaggaaattaataaagaaagagaagctctcgcagccaggcccacggtgagagacgagt

SEQ ID NO: 86785 - DNA, 122 bp, Homo sapiens
cgcgcgctggaggaggtggaaggagggtcgctgccctgccccctctgagcaggcggcagtcgagttttctgatcccaacacggcggagtgggtgcttaaggcatgggccttaagggatagtt

SEQ ID NO: 86786 - DNA, 122 bp, Homo sapiens
ctggcgggagagcggaacgcagagcgcgggacgtaggggccggggcggggcggggcggggcggagctgggctgcacccaccagcagaaaacgcccctgcaaagtgggggaactgtgtccctg

SEQ ID NO: 86787 - DNA, 122 bp, Homo sapiens
gctgccagcggtcggtggcggccgctacggtgctgacaagatggcggctggcggagctgtcgctgcggcgcccgagtgccggcttctcccctacgcgctacacaagtggagctccttttcct

SEQ ID NO: 86788 - DNA, 122 bp, Homo sapiens
cattcggaaccagcacccgggagcctctgccgcgggtggtcgcggggccgtacgcggaggcgatggctctggtgctttgagccgttcctcagcagcacggcacaccccctcctgcggagccg

SEQ ID NO: 86789 - DNA, 122 bp, Homo sapiens
tgaaacgccacggccccagtgcaagacaccatcagtgtgtgctctgtggggaagctgatccgatgcacctggcctgacatggatctttgtggggtccagggcccgggttcttctccaacgca

SEQ ID NO: 86790 - DNA, 122 bp, Homo sapiens
aatccagtgattcatcagtcttgtcaaagctgatacctgataaaatggaaccagattcatcgctaatttaaagtcttttgttcccagcattgctgctggatggttggcctctgttgagaaaa

SEQ ID NO: 86791 - DNA, 122 bp, Homo sapiens
ctgctttctttttaatcacctaagaagcaacattgatgtgacaagctccagaaaaaggctcgtcctttcttatctgcatcttcagcctaatgatgaggaatgggttccataaacttgaaaaa

SEQ ID NO: 86792 - DNA, 122 bp, Homo sapiens
atgccattatcttttgactattatttttcaggttatatctacagccatattgtgatatagcgttaacactcaccttgttgctaagattcaactatcttacataaacaggtcatgtgataata

SEQ ID NO: 86793 - DNA, 122 bp, Homo sapiens
agtccgaagacctcgtcttccaaggccaaatccagcgtatggggcaggagctttcactgacgggaaagaaaagttgcgaggacattttctaaaaggtgaaaaaaaaaggcgtgatcagctgc

SEQ ID NO: 86794 - DNA, 122 bp, Homo sapiens
ggaaaatgccatctgtaacgactacatgacagaaaaactgtggcgtcccatgcacctgggcgctgtgcccgtgtaccgcggttctccctctgtgagggactggatgccgaacaatcactccg

SEQ ID NO: 86795 - DNA, 122 bp, Homo sapiens
agaaaggaaatatcttcacataaaaactagacagacacattctgagaaactactttgtgacgtgtgcattcatctaacagagttaaaccattcttttgatggaaatgcttggaaatggtgtt

SEQ ID NO: 86796 - DNA, 122 bp, Homo sapiens
ctgaattccactgaagagctcactttaagcaaacggggtgaaggtcggattagccactaacggtttgaaaagcacaacagggagggattgcctcaccagcttgctttctatagagtagcggc

SEQ ID NO: 86797 - DNA, 122 bp, Homo sapiens
ctgggcctgcacctgctcattcagagcctttttgccttcctggagcaccggcgcatgcgacgtgccggccaggccctgaagctgccctccccgcggcggggctcggtggcactgtgcattgc

SEQ ID NO: 86798 - DNA, 122 bp, Homo sapiens
gctcgatgaaaagcacccgcttcccctcctgttaccccagcgccaatcgcagagctggagcggaggactttcagggaggcctggtgacgtgacagcccctccgtgctaaactgcagctgtgg

SEQ ID NO: 86799 - DNA, 122 bp, Homo sapiens
aaactcctcctcaccatgggagttacctcctgatggtgccacacggtttctctccaccctcggtccggttttcctgttggttttagatggctgtttgattctatgttagaaggatccaactg

SEQ ID NO: 86800 - DNA, 122 bp, Homo sapiens
cagccataaccaccacggctgttatgggtgcggttactatggcaacagagcaaccggaagcggaagactgccggtttccttgtcgcaagaaatctgttaggaacaaaaagggaccactctcg

SEQ ID NO: 86801 - DNA, 122 bp, Homo sapiens
agggacagcgaggaggagacactcaggtcacaggaggaaggctgcggatctgggcggggacgtggattgcgaggccactgaacaccccagggatggatggatgaggtcctgttaactaggga

SEQ ID NO: 86802 - DNA, 122 bp, Homo sapiens
caaatttctggagtagccatctgcttctttcattataatcttggtataagcagtatagctcggtggttaagaacaaagaatttggatcagacaaattggatttttgcaactttctggttgtg

SEQ ID NO: 86803 - DNA, 122 bp, Homo sapiens
ggctgggaggaatctagggtgtgggggcagctggccttcctcataggacagaccctcccacgcgttcagggaggtggagcacaggtggcagtagtatctgcatcccctgactctctctccac

SEQ ID NO: 86804 - DNA, 122 bp, Homo sapiens
attcaaagttccgcagagaagtggtgaggtaacaagtattgcctagcctggacacacaggcggcttgaaacctcaagtgcaccaacagaaagagctccaggaagaatcagaggagtgggatg

SEQ ID NO: 86805 - DNA, 122 bp, Homo sapiens
gggcgggcagacaatcagacactgttttatcccaggcatcggctccagcctcccgcttggcgcccgcaacgcggggccgccggggaaatgagtctctcgggactccctgggagcgtaagcgt

SEQ ID NO: 86806 - DNA, 122 bp, Homo sapiens
ggttgggggacagtctttggcattctgtcctgagccatccccactgctacagtcaacaaacgtctggatgaatgggtgacgcatgagcggctggacctaaagaagatccagttccccaagaa

SEQ ID NO: 86807 - DNA, 122 bp, Homo sapiens
cgtgtggtttgcaaaggaaaaagttgcaagaggcttgtggaatttctgcaacccaaattccgtggtctcctcatagggcacgagggccattccgcctgcaccccgccctctgctcagacctg

SEQ ID NO: 86808 - DNA, 122 bp, Homo sapiens
actacttttttttctttaaatatttacagttcagaaagattagtccgtgtgaaacgtttgcgaaaagttaagaatgagtgtagagtataagggcacaggccctcttaaatggatcgaatatg

SEQ ID NO: 86809 - DNA, 122 bp, Homo sapiens
gtctggtccctcaatgctgagtgggatgtgcattgatggagggctttgctgttcctatgtcgtgcttgggacagtcggccacaaagctgggctgacctctcgggccgggccgggcctggcca

SEQ ID NO: 86810 - DNA, 122 bp, Homo sapiens
tgcgccaaggagaactcggggccgcggattttggagccagctgcggggaggccagagtcccgccacagccacttcccaccagttccaaccagccccgccccctctctcgggatgtcggaccc

SEQ ID NO: 86811 - DNA, 122 bp, Homo sapiens
accccggacggcggggctcattcagcctgcggggaccgagggactgagccgggcactgggcgcccctcccacgccccctcccgggcgctgggcgggctgtcatctgctgcctcccagggtcc

SEQ ID NO: 86812 - DNA, 122 bp, Homo sapiens
ggcgagtggtcgccgcagccccacccgaacgcccgtggccgagcctgcccatgagagccccgttctgcaccagctgggtcagggtccagcgcagccccaaggcccacccggcccgggcgcag

SEQ ID NO: 86813 - DNA, 122 bp, Homo sapiens
gctgacctcgggcgcaacccagtcaggcttcgtgtccttcaggggttctaggctaacaggcgaaaggaagggcgttgggaccgaggggcatcctggtttttatgtacgccactgagaggcca

SEQ ID NO: 86814 - DNA, 122 bp, Homo sapiens
gctggctagccacaccggcccgaagtgcgcggcgccctgcacctgggggagcggacacagcggacacttggatacctgggcggggactttcagcttgacctgtgcccacgccaagggcgttg

SEQ ID NO: 86815 - DNA, 122 bp, Homo sapiens
gaatttccaggggaagggcctgataacctgtgaactaactacctttccaggtggttctgacggatgttaaagtttgagaactattgatctaaacataaggccatccttagggaataaaagca

SEQ ID NO: 86816 - DNA, 122 bp, Homo sapiens
cttacctctactaaagtacaaaaattatccaggtggcacatgcctgtaatatcagctactcgggaggctgaggcaggagaattgtttgaaccccagaggcagaggatgcagtgagccaagat

SEQ ID NO: 86817 - DNA, 122 bp, Homo sapiens
tcctgtaagcacctgcccggggcccaagcccacagtggatggctcgtccagctcagagagcgcccaggacgcagtgaggaagcagaattgggcgctcaagactcagacccggactgatgagc

SEQ ID NO: 86818 - DNA, 122 bp, Homo sapiens
cccctcggcggaatcagagggcgcggctttccctcgagcagtgcggaaggcagcaggctccgctcggcgtcccttctccgcagatgcggcgctgccccgcgtgcaagacttgcactccgcgc

SEQ ID NO: 86819 - DNA, 122 bp, Homo sapiens
actgcccaagctggagaagcggctgcgtgccacggcggagcgcgtcaaggctctggagagcgcgctgaaggaggccaaggagaacgccatgcgggaccgtaagcgctaccagcaggaggtgg

SEQ ID NO: 86820 - DNA, 122 bp, Homo sapiens
tacgcgactgccaatcgccatagtatttggattcccagcgctttctcgggctgtggcccacgagtctctcctgagctccagatccttgtggtctggactctgtcctcagacgccaagtccgc

SEQ ID NO: 86821 - DNA, 122 bp, Homo sapiens
ctgcggagaatcacggcgggtcagtcaggccccagcacggccctagccccagcccccagccggaccgcacccttcagccgctgccctgacccggccagcagctgcgaaacccgtccacgcga

SEQ ID NO: 86822 - DNA, 122 bp, Homo sapiens
aatgctacttttctacttaatttttcctaacaatttatgatgtaaaacacatggtacattcgggaggaaagcatgttgtttcactttacctgaccaatgttggcatgatcaaagacattcac

SEQ ID NO: 86823 - DNA, 122 bp, Homo sapiens
gaaagggagggcttttctgatctctcccaattagaggattaggcaattggcagtgcagggcggtaactgggggccagggtggcgccagggctggacagcacagtccctctgagctgcacgga

SEQ ID NO: 86824 - DNA, 122 bp, Homo sapiens
tgttcccattcagtgtcactctccctgagaattgaattcttccaattttctaaccaagagcgactccctttcatctccacctaagttctccccttccatcacacctggagagaggacttgaa

SEQ ID NO: 86825 - DNA, 122 bp, Homo sapiens
gggcaccgcagagggaatgtccagctttagccagggtggcttcttgcgctgcaggctgctcgtgctgtccctgcgggcctcactcatggttcctggcagagcaaggcaggcctgcggggcat

SEQ ID NO: 86826 - DNA, 122 bp, Homo sapiens
ctgggcgcggacgcggaggccggagcaagtctgagcagccgaattgacaaggcgctaatgcgccgctggccccgcccggccccgcccccggcccggcccggccccgggggggcggcgggccc

SEQ ID NO: 86827 - DNA, 122 bp, Homo sapiens
acacttggctatcttttatcaccaatcagtcacaaaggtgaacctccatgaactctgtaacgtaataaatgtaaaaatggcctcattgaccaatacacaatattaagccagcaaaaccaaaa

SEQ ID NO: 86828 - DNA, 122 bp, Homo sapiens
cgggcccagggcagcacccaggccgtccccgagtcgacccagcacctgggcgccgacctgcgtcagcagcctccaacccggcatggattagcccgggaagactcgactcacgacttccgggc

SEQ ID NO: 86829 - DNA, 122 bp, Homo sapiens
ttggcgctctgcctagggggaacctgcttggtgacaacagggctggagcttctctgaagccgaagggtgctatgctttgaatgggtgtccctcaaaactcatgcgaaaattcaatccgtatt

SEQ ID NO: 86830 - DNA, 122 bp, Homo sapiens
ctgccggtcagcctgcacctgcccagtacctactccctctccgtgagcaggagggctcgccgatttgcccaggtgagcccatacctattgcctgtctggggaagattgaaaggccaagggac

SEQ ID NO: 86831 - DNA, 122 bp, Homo sapiens
agagagagcagagcttcctcactggcaggggctccccagccccgccccatacctgcgcggcggccccgcctccacccatccattggctagatccgccgcccgtcagacgagcccccggggcc

SEQ ID NO: 86832 - DNA, 122 bp, Homo sapiens
ctgagtcagcctcagagatgaccgtggttgactgtgctgtctgccatctgcttttaaccacgaaagaggaagcagctatgtgggacaccacatcagggaaccttccggacctagggtctcac

SEQ ID NO: 86833 - DNA, 122 bp, Homo sapiens
catgatgttcaaagaatttcaaaacttaccacacattatccccaaggctgtgctaaataccgccatatatccaaagtaaaatgatgtttgaaataagccatacatcctgaaataaaacaaaa

SEQ ID NO: 86834 - DNA, 122 bp, Homo sapiens
ggggcagcaggtcagggagatcggatttccccagctcccactggcccgcgccttgcaagccggagatttcccctgctccgtggaaccctaacagctactctggggccttgcgccccatccca

SEQ ID NO: 86835 - DNA, 122 bp, Homo sapiens
cattccgcatccggccatagtcacaccaacagtcaaacaggaatcgtcccagagtgatgtcggctcactccatagttcgtaagtgttgctgtttttctcaccttcttcgtagccgcagtgtt

SEQ ID NO: 86836 - DNA, 122 bp, Homo sapiens
gggtccgcggcttcattcttgaagtcagtgagaccaagaacccaccaattccggacacaccgggacgactaaccggctctccacaggatatgcatcccctaacacgtgaggcctaagctcca

SEQ ID NO: 86837 - DNA, 122 bp, Homo sapiens
atcagtgccattgggtggtgagggttgtgtctactgattttctgcctcattttggagcaacggaagtttgggaatagttcaagatcttactaaatcgaggaaaaaacatttctaggggctgg

SEQ ID NO: 86838 - DNA, 122 bp, Homo sapiens
gcctgggcaaccccccttcggtataaggcctttaaatggccaggctcccgctccaacacccggtcacagctctgggctgccaactgaggctgccctagcaacaactgacaggcagccagatt

SEQ ID NO: 86839 - DNA, 122 bp, Homo sapiens
ttcccctcacttttttgttcctaaaaatcacgacagcaagtgcagcattgaggaacatgacggatctgaaatgaatctggtgtgaatccaacgcagtcattttcatgttgtgctcacctctg

SEQ ID NO: 86840 - DNA, 122 bp, Homo sapiens
ccccggagggatcggatgttagaacttcactcttggatttttgccctcaggtgactttgacgtttgggggttaaagcggcagaggtcgggggttacgagaagacccccacccagtgtgcgct

SEQ ID NO: 86841 - DNA, 122 bp, Homo sapiens
cggcctccgcgggcccaggggcctccaggccccgtgaccaccggaccgagcaccctggaacggccccagcttggcctcgggacagtccgcgcgctcaccgactccctggtgaacgccgcttg

SEQ ID NO: 86842 - DNA, 122 bp, Homo sapiens
cctgaggcctaaaggtgcccagggccgagcccaaagtgcttgggtcagggctcggtggagcgccgaggtgagtctgaactcccagccggcacgcgccgcccgccggaccaaacacgggaggg

SEQ ID NO: 86843 - DNA, 122 bp, Homo sapiens
ctcgccacccgaaagctaacatgccccttcgcagagcccaaaaatagcaccgccctgggacgttcagctggagaaccagcaaggcccctacacggccaggcagggctaagctggcggagcgt

SEQ ID NO: 86844 - DNA, 122 bp, Homo sapiens
ggggaggcaggaatctgcagattacatgaggcaattgtgaacagcagagtagcattggtacgtaaaagttgaggtatgcagagactaggtcgaaggaggctaaggagcttcaacttaatcat

SEQ ID NO: 86845 - DNA, 122 bp, Homo sapiens
gcagacactgggtataaagcagcatatgactccccagcaccgggcggtgatgaattgggacgcaggcgcggagcccagggaccactccccctgcacagacatgagaccataggggacctgtc

SEQ ID NO: 86846 - DNA, 122 bp, Homo sapiens
tacaagcaattctgggaatggtagtccagacgctcagtggagtagcggtcagcttggctccggcaggcgaatcaggggatttctgggaaatgtagtccagacgctcagtggagtctcggtca

SEQ ID NO: 86847 - DNA, 122 bp, Homo sapiens
gtgggagtcgggccgttgacgctcgctctgcgaggggctccctgggaacgcccaggcgagcgcctcctgcggggccccgccccccgagtgcctacaatggtgccaggcccgcacccagtcct

SEQ ID NO: 86848 - DNA, 122 bp, Homo sapiens
caccagtcttattcagatttccccactttacttgtacacgcgtgtgagtgctcgcgcacgcgggtgcagtcatcccttggtatctgtcgggggttgatttcaggatcccgcgagattccaaa

SEQ ID NO: 86849 - DNA, 122 bp, Homo sapiens
gtgaaaaggtcaggatgatggaaggctgtcatatttagatgatggctcgaagggaagcctcggtgggttagtcacctatgatatgacatcatatggccactcaatatagtaacagctgttgg

SEQ ID NO: 86850 - DNA, 122 bp, Homo sapiens
ggggactgggacctcttggaacctgtctgtgaaatgtagccttcaatgcagtaacgcgcacggtgacctggcctgtaggaagactgccactggtgtggcctcacctctctggagacaatttt

SEQ ID NO: 86851 - DNA, 122 bp, Homo sapiens
gtccgggttctgccctctcctttcccactcagcaggacagtggcattattcctgtcactgcggtaccactcccctcccccataccaccagggctgacttgtagtccccttccccaatgtaca

SEQ ID NO: 86852 - DNA, 122 bp, Homo sapiens
agtttctgtatgacctacctaaaatccctccatgctaactgggatggatggagggctatacgaagacgtcaatcatccctctctcctacagattcctctgctacaccttgaggatcattcac

SEQ ID NO: 86853 - DNA, 122 bp, Homo sapiens
gctgatctgatgcattcatatttgacataccagttaaaggaagtagttagaaatgatgtacgtataaaagaaaagtagaataataatacaacaggcgcctctgtcctcaaccccagaactca

SEQ ID NO: 86854 - DNA, 122 bp, Homo sapiens
ctcaactgaaacccaggaggtttcctgaaggtgaaaccaagacccttctacctctgaagccgcattctgtctaaggtccgtgtttggctgttttgagaggctgggagacaggacaccaaaag

SEQ ID NO: 86855 - DNA, 122 bp, Homo sapiens
ccgtcgccgccttacccccacccggctcccgaggccccaggctccttccgccacccgcgccggctcccgcccgctccccagctcgcccccggccccgcctccgactccgccccgcccccgcc

SEQ ID NO: 86856 - DNA, 122 bp, Homo sapiens
gggggttggggaggactgagaggggctgggccgactgagccgagggacctactgtggtgacggctcccggaacaatgagactgctcctcctgcctccgcgccggtgatgcgccacccgccct

SEQ ID NO: 86857 - DNA, 122 bp, Homo sapiens
ttatggctgcagacatgcccctgctgtgtgtgacccaggtggtgagtcattccctctgggcgtggacagaggaggggtgttcagagacagctgcaggaagagcaggggcaggaggcaggcac

SEQ ID NO: 86858 - DNA, 122 bp, Homo sapiens
ggggccccgggacagcggttgccccacctatgggcgccttacctgtggggacgcccgcagcgccaggagctgccgccttgccaccccacgggacgcgcacctccagccccaatccacccgcg

SEQ ID NO: 86859 - DNA, 122 bp, Homo sapiens
ctgggattacaggtgtgagccaccgcactcggcttcgagagagcgtttcttttcttaaagcgtgttcttttcttaaaggtatcacaggagtgattatgcctttattgattgatggagcagat

SEQ ID NO: 86860 - DNA, 122 bp, Homo sapiens
agtctggggctgacaggtcggtattttcccaatatatgatttttgaggtccacaggggagcggtggggagaggcttacccagggtggtgagcgcagcctcagtggcagaaatccccgtgcgc

SEQ ID NO: 86861 - DNA, 122 bp, Homo sapiens
ctggcgtggattctgcataacggtgatcacacgttccacctcatcatcagtgagttctcccgccctcttggtgaggtcagtgtctgctttcctcaacaccacatgagcatatcttcggccca

SEQ ID NO: 86862 - DNA, 122 bp, Homo sapiens
cgatcacactaggggtgcgggaaaatcaccagggggtggcccgagtcagtgtgcagtgggcgtggacacccactgtgaacagtggacggggctcgggggtcccgggaggggctgcagccccg

SEQ ID NO: 86863 - DNA, 122 bp, Homo sapiens
gggatatacatgggtatgtgggcagccctgggctggcacatgcagccttggaggctctggcgtcagggacccccatgagggctaccagtaagaaccagagagagtgacggttcctggcttca

SEQ ID NO: 86864 - DNA, 122 bp, Homo sapiens
aataaatattttgtaatgacacttttactgtcctaaattgagattcatagatgaggctcacgcctgaaatcccagaactttgggaggccgaggcggactgatcacttgagctcaggagtttg

SEQ ID NO: 86865 - DNA, 122 bp, Homo sapiens
gactcactgttccagatgccactcggaacagtcgtgggttttcgtggagacagctgagcccgcggaaggaggcagctgggacagggccccgcggcaccgcagcgctgtgagagcagagcggc

SEQ ID NO: 86866 - DNA, 122 bp, Homo sapiens
gggtgcggcttggtggcctgcattttcctgcaccattctattccagggcgcttcctttcccgcgcccccttcgcgtaggccctggacgggtcgtctgggtctgtggttgattacttgtctct

SEQ ID NO: 86867 - DNA, 122 bp, Homo sapiens
agcccctcctcactcccttggactcttcacggtgtctccgggcccctgcacaatcctgagcgtccctcacatggaagccgaggtggtagcaggaagctggtggaaggaactggctccgcagg

SEQ ID NO: 86868 - DNA, 122 bp, Homo sapiens
ggcggcgtgtgctggaggctcgcgcgggtgtatacgagcctgtgcttgaatgggaagggccgggattccgggtcgctctggcccctccttcctccggagccagccagtccctcggcagagcg

SEQ ID NO: 86869 - DNA, 122 bp, Homo sapiens
cacagcaggcactgtgaagctggcgtggggaggtgccgggggtgctgccacagtccctggcgctggaaacacgggcagtgaataagctgctggcactggggcgggaaagggcacggctgggc

SEQ ID NO: 86870 - DNA, 122 bp, Homo sapiens
tctcttcgacgacgcggccgccgccgcggcagccctgggcctggcgccccccgccgcccgcggtctcctcacgccgcctgcgtccccgctggagctgctggaggccaagccaaagcgcggcc

SEQ ID NO: 86871 - DNA, 122 bp, Homo sapiens
gcctggcaaggtggatctacgagaaggtgctcccctccacctctctctgcagcctcccctcgagctgagctgatgatgtccaggttgtggttgtctcaccagcaatgagagccaggagagga

SEQ ID NO: 86872 - DNA, 122 bp, Homo sapiens
gcttcccgatgagcagaggcgggggctggcacctggcgctggctgcagacgggaagtcaacgccaccaaagcagaggacctcagccacccaggttagcaagagggtagcagggcgctcagga

SEQ ID NO: 86873 - DNA, 122 bp, Homo sapiens
cgcgtgcttgggggcgcgggcgggccacgcggagaggccacctgcccgggccaatctgtacgctccgtgatcttcgcccgctccccggccccgcgccctggtgtccctgcagtcgctgagta

SEQ ID NO: 86874 - DNA, 122 bp, Homo sapiens
cccctgcctgccccgaaccccccacctgggccccaatccagctccccagcggcgcagccgcgagcctcattattgtgtcttctccgggcccccccaggacaaaatctccacccgctgcggtg

SEQ ID NO: 86875 - DNA, 122 bp, Homo sapiens
tccaggcgcgtcctggagcgggctggggctgtgggcctgatgtgtgggcctgctgtgcctcggtctcctcacggtgtggaggagtgccactgtttctgtttctggggctgggcagccctttg

SEQ ID NO: 86876 - DNA, 122 bp, Homo sapiens
ccccgtgcctgcttgtcttctgagaaactgtgggagcctccccatggtgccttttcatcccggctcagcggctcggcccccggagctgcagggcggcctcagtggcagccaaagctcatggg

SEQ ID NO: 86877 - DNA, 122 bp, Homo sapiens
tctggaccaaagcgccaaggactgcagccaggagagagggggctcacctcttatcctcggcgacccactgcacaagcaggccgctctcccagacttaaaatgtatcaccactaacctgtgag

SEQ ID NO: 86878 - DNA, 122 bp, Homo sapiens
tttccatcgagttttcacatgcgccacatagaggctgggaagcttagagaaatatgacttcgaacagataatgacttcaggctcagtcaatactgcatggaaatctactaaacattagtaag

SEQ ID NO: 86879 - DNA, 122 bp, Homo sapiens
ggcagaagggctcctgtggggcccagatagtttcctcgcgcaggtgcagaagccaggctgcggtgctggagtggcgggttgcgggcccaggaatcttctgggagcagctggggtggattgtt

SEQ ID NO: 86880 - DNA, 122 bp, Homo sapiens
gcggaggctgttttgcctcgggctagtttcgtttccctccgcaccgaggaagcccgggaacggagaggacccctaggaattgcttttatttttatgatcttatattttgttttgcttttata

SEQ ID NO: 86881 - DNA, 122 bp, Homo sapiens
cctggcttcccatttttgttagagtcaagtcccaaatcctgaccacagcctacgaagccccgtgtgatgtggccccggccgacttttggcctccccccacatccctgtctttgcccatcagc

SEQ ID NO: 86882 - DNA, 122 bp, Homo sapiens
ttcaatcactgctaacatgggtgcagagcttgggagcttgcccagggcttccacagacaccgccgttagttatgattcatgctccagcagcgctgggaagtgggccgagggaactgaggccg

SEQ ID NO: 86883 - DNA, 122 bp, Homo sapiens
cattccgcattgcttccccaccctccttttgagtatcacctgggtaggaaactggccttgcggtatcatcccgacaagaatccagggaatgctcaagcagcagaaatattcaaagagatcaa

SEQ ID NO: 86884 - DNA, 122 bp, Homo sapiens
agagcgtccctcggcttctgggccgagtcccactcagggccattcaaacgcggccgcgcgcgcggcctgccgggatagctgggaaaagtcttaacaagccaattagctcctcagaatgccta

SEQ ID NO: 86885 - DNA, 122 bp, Homo sapiens
cgcaaatcctgggtgggaattctggcctggaggatcctgccatcggccagcccagcaggacgtctgcctgcaggactttcttgtccctggaggggcccacctggctttgggcaggtcacctg

SEQ ID NO: 86886 - DNA, 122 bp, Homo sapiens
cccttcccccagttccaagccactcacgaggtgccagcttgcaaaaccggggcgttggcacgagtctggtaaatgcatgaagcccccacagtccccagaatctgaggatggcacccaaggcc

SEQ ID NO: 86887 - DNA, 122 bp, Homo sapiens
gaaaatacattgatagggctttggtgagaattaaattgtcagcttagtaaaataggttatcgtatgctgactgttgtattggctttaacataggaaaaaggagaaaaacaaatgattactta

SEQ ID NO: 86888 - DNA, 122 bp, Homo sapiens
tccctgctggccatcaatacccggctgagggtgagcacagcagaggagtcgctcaacaaccgggtggacaagacgactcgtctggtagacgcctgccagcctctgcccttggtcactccagt

SEQ ID NO: 86889 - DNA, 122 bp, Homo sapiens
ggttcgtgctgcgctaaggtaagtttcgcagctgctcctgataattaaaggacagattcccgaagcatccttgtggcggcgcggctgttttcgccccaggacctgtgcagcctcattcagct

SEQ ID NO: 86890 - DNA, 122 bp, Homo sapiens
tgcaaagctgcctccagctgcggagggcagtatgagtgcggtggcgcgggtgggcttgcacgggtccggggagagggaagttcccccgcctcacccgcctcccggttgagcatggctgtctg

SEQ ID NO: 86891 - DNA, 122 bp, Homo sapiens
tagattatgttttgagagaggaactagaccttcttgtttatttgcaacaccacaggatatcgcgtggtgcctgttatatagtttaaaaataggaattaaatcatggtctctgatagaatttt

SEQ ID NO: 86892 - DNA, 122 bp, Homo sapiens
ctgagtgaaagccatgaatctggtcctgttattcttctcaatgagcttccaggaggaggacgggcctggaacctccctctagacctgaggcagcccagcatagctggacccttctgccagct

SEQ ID NO: 86893 - DNA, 122 bp, Homo sapiens
agaacagagaaaacaaggtgaaaagaaaagtactttgtaaagaaaatcctgatcttaatacgtaagtgcttgaaaacatgttttccagattgaagctctgcaagataaaattaagaatttaa

SEQ ID NO: 86894 - DNA, 122 bp, Homo sapiens
gagatctacaccccgtgtgctctcccactgactctgtgggaggacagagagtccacagcccgatctgctccttcaggtagggactctgcctggtttggctgtgtcttagaatatagtgtagc

SEQ ID NO: 86895 - DNA, 122 bp, Homo sapiens
ggtgtgtggacagagcctgcgtgatcctgatgagtcgatgtggggcggctgactgcagctcgtgcaccacagtggaggggggcactgacggggtcaggggaagctgtgtggtgggaggtgct

SEQ ID NO: 86896 - DNA, 122 bp, Homo sapiens
atctcggctcactgcaagccccgcctcccggattcaagcgattctcctgcctcagcctcccgagtagctgggattcaggcacccaacaccatgcccagctaatttgtgtatttttagtagag

SEQ ID NO: 86897 - DNA, 122 bp, Homo sapiens
gtcagagtcttcgaaaccaggctttctgggaacccaacaaggagtttctgatcgaagaaccgcactgaggacagttagtcttttttccacactgggcattttcagcattggaagtcaatggg

SEQ ID NO: 86898 - DNA, 122 bp, Homo sapiens
ccacgaggtcatgccggggccacaatgccacaccaggccgacggcaccatcctcacaaaccggaggttagctcaccggggcagtgatgaacaagcccctgttgccctgggtctccagctgct

SEQ ID NO: 86899 - DNA, 122 bp, Homo sapiens
gtaacagactggagtgaggagactgaggagaaactgtagagaataatacttaggagtacacgtgctggattctctcattaaggtaatcattcaatatttactaagcagctacaatttgccag

SEQ ID NO: 86900 - DNA, 122 bp, Homo sapiens
ggagccgccccacctccggggaacggggagcaggccacttactggggctcaggaagcactcggtcagccttcggaagcagctcgcattattagaaggtccatcttccatgtcggagccgaag

SEQ ID NO: 86901 - DNA, 122 bp, Homo sapiens
ttgttgagccctaaacctacactgtgatctttaggttctcttgtaccatcactgaaatctcggcaattaagtgtttatgatgttttattttctatttaatatctgtaagtctggttttccaa

SEQ ID NO: 86902 - DNA, 122 bp, Homo sapiens
ctttagcagcttggaatttaaagtacaaataaatgaaggatgtctttcataagcaaatgacgtgtcatttgggacaaatgcgatatgatgtgtgggttcatccaacatatgcatccaacatc

SEQ ID NO: 86903 - DNA, 122 bp, Homo sapiens
ccgcaagctcggcactcacggctctgagggctccgacggcactgacggccatggcgcgttcgaacctcccgctggcgctgggcctggccctggtcgcattctgcctcctggcgctgccacgc

SEQ ID NO: 86904 - DNA, 122 bp, Homo sapiens
tctgggggagtcggggcctctctcctaattaactcttcctggcagaagtttcttgctggacgtgtttgcctaccagtgaaaagccaagtgaggcttccaggggcctcccactggccctgaca

SEQ ID NO: 86905 - DNA, 122 bp, Homo sapiens
ccgcggcgcccaccgcgtctcaggtttaatcccgggttggacctgctggtttgctctccccgctctgagcctcacagccagcccagagaagtggaatctgcactgaaactctgggtggctgg

SEQ ID NO: 86906 - DNA, 122 bp, Homo sapiens
cgccagcgggtttaggggaatggtgtcctcttgccctttacaaatctgccatcaagtaggcgtccaagaaatgtacgccaaatgaatgaatgacaccccgcattaagaaaaaatagtgacat

SEQ ID NO: 86907 - DNA, 122 bp, Homo sapiens
tccatgtctctcactatatttgtggatttgtccatttcttccttcagtcctggcaggtttcgcttctgaattttctcttttttttttttttttttttgagacagagtctcgctctgtcaccc

SEQ ID NO: 86908 - DNA, 122 bp, Homo sapiens
attggtcatctgttgtgaccgaagcttccctgtcaagcgaggggggtgggggcgggggagcgcaggaaactgaacacaagctgggaataaaatttcagactggggccatcctttccacacct

SEQ ID NO: 86909 - DNA, 122 bp, Homo sapiens
acgcctccgctgatgggaaaaactactccctccgctactgcggggtggcagtgacgtcaacgaattagctgacctgttttttcgggcttcgcggacataggagtcccgaaggccgagagtga

SEQ ID NO: 86910 - DNA, 122 bp, Homo sapiens
gctatgcaccgaccgcctcttctagtgccttctctgtctagcggtgcgctcccgtggcgccgtgggaaagcgcgctggtttctgccaaatgcagttagctttgcttcgcttccctaagtgcg

SEQ ID NO: 86911 - DNA, 122 bp, Homo sapiens
cccccctccgaaagggttaactttggggaagggcccggagtccccggatggtgatgtcagcgtgccggagagaaaggacgaggtggcggggggaggcggagaggaggaggaggcggaggaga

SEQ ID NO: 86912 - DNA, 122 bp, Homo sapiens
agcgggcgcccgtccgccctgccgccgccgccgccgccgcttcgcctgccggcctgagagcgggaccatggatgaaaggttcaacaagtggctgctgacgccggtgctcactctcctcttcg

SEQ ID NO: 86913 - DNA, 122 bp, Homo sapiens
aggagcagaacctgaaggacctgcgcgtgtggaccagccagctgaagagcaccatccagacggccgaggcgctgcggctgccctacgagcagtggaaggcgctcaatgagatcgacgcggtg

SEQ ID NO: 86914 - DNA, 122 bp, Homo sapiens
gggctgaggcccacccccccggggccagcctcaatgcacccacccaccacgttttcaacgcgctgatagtccctaggcgggttcgcctctacctacagaccctgcttctccccttagacatg

SEQ ID NO: 86915 - DNA, 122 bp, Homo sapiens
tccgggaaccttgggggagggccgccagaactcaacccaggacgcaagagctcacgctcccggcctgggcgcacgcttaggatccggattcctacttccagggctggtcctgcctgattttg

SEQ ID NO: 86916 - DNA, 122 bp, Homo sapiens
aaaacatgtgaggagggaagagtgtgcagacggaacttcagccgctgcctctgttctcagcgtcagtgccgccactgcccccgccagagcccaccggccagcatgtcctctgctcacttcaa

SEQ ID NO: 86917 - DNA, 122 bp, Homo sapiens
agccccaggcaccacagagcgctcctagctggccgctcccacaccagggctgcctgcacccgactcagcagaggctcgtaaggccccagcacctccaccagggcccgctgcgccgcctcaac

SEQ ID NO: 86918 - DNA, 122 bp, Homo sapiens
cggcagtgcggggtggggtttgggtgttgtcctcagtacccagatccagatgtgggctgacgcccgttttcattctccaggctgcgaagagacgggtaggggaagcgcttccggccccccag

SEQ ID NO: 86919 - DNA, 122 bp, Homo sapiens
ggattccagcctgtgaccgcacagggcccaggggcagcagaggggcatacccactgtccccgtcacagggaaaccaagcatggctgctggaacagatacctctgggtagcacaaacatgaac

SEQ ID NO: 86920 - DNA, 122 bp, Homo sapiens
cccgcgtccgcaaaacggggtggacaacgcagcctaaggcagagccgcgccaaggtccctcgctgtcgccgggctctggcggcctgaccgggcctggggtccgagcgtgcccccgggcctgg

SEQ ID NO: 86921 - DNA, 122 bp, Homo sapiens
cagcgggtagggaatatggggctccctcagcggggtgtgctggctgcccaagctgtggggcgggtgtgtgggcagagcggttgccacgcctcccagacttactgcccaagccgcctctgcct

SEQ ID NO: 86922 - DNA, 122 bp, Homo sapiens
ggaccagaaggtgatccaggccggcatgttcgaccagaagtcctccagccatgagcggcgcgccttcctgcaggccatcctggagcacgaggagcaggatgaggtgagcccagcaccggccc

SEQ ID NO: 86923 - DNA, 122 bp, Homo sapiens
aagccccaggaggtgctgcgggtatggggcggccgaggaacaggccggcggccaagtgggcgcgaatgaatgaacgaaccctcagcccttcctcctcctctggctggggacgtcgctcgcgc

SEQ ID NO: 86924 - DNA, 122 bp, Homo sapiens
tagttatctctggtgatctcattcacacctccacctcatgcacgtgcgtttcaaaccctacggtgccacgggtcacgaatgaactcacagccagttccagacgaaacgttccgtcattattt

SEQ ID NO: 86925 - DNA, 122 bp, Homo sapiens
gggaccaatgtccggccagataaagtgccgactggcatgcaaacaaatgaccagattcaacgaaagttcactcttgctctcttttgtagggtacaaatgttctacaggcaggccttttgggg

SEQ ID NO: 86926 - DNA, 122 bp, Homo sapiens
ctggaaagcctagtgccccccagtccccagcgggccgttttctgagatgcccggtggccgcggcccccaccccacgtacccccgccccacgtacccccacccgcaggcgtgaacatcggggg

SEQ ID NO: 86927 - DNA, 122 bp, Homo sapiens
tttctgcaggaaggttgtctctcctttccgcaggaaggttgtcccaacaagttgagaagacgcacagtgggcagctccttcccgcagctggtacttccgacttcgcgtgactccggctgcgt

SEQ ID NO: 86928 - DNA, 122 bp, Homo sapiens
taacctgaactgatgggtttctccagagggaattgcagagtactggctgatggagtaaatcgctaccttttgctgtggcaaatgggccctctaattaatttcttgcttttgcggaacaatat

SEQ ID NO: 86929 - DNA, 122 bp, Homo sapiens
gtccggaggcgggactaggaggacgtcccggtaacgattgggcagggtcctgcgtaagggcgcatgcgacactggaagtagcgagcaactggattggctgcctccgtcgcaaaggagggtgg

SEQ ID NO: 86930 - DNA, 122 bp, Homo sapiens
ccaaagcagccacctctgcctgaggttggcagggagacctcacagaggcaaaactgaggacgtgcttgagggatgaggaagaggtttgaggggaagacagagggtgttccaggcagagggat

SEQ ID NO: 86931 - DNA, 122 bp, Homo sapiens
taacctccacaatgctcctattggataggtattatcatcctcattttataagcaagggaacgaaggctgagctgactcttgacatgcaaaggtcacacacccaagtgccagagccagacact

SEQ ID NO: 86932 - DNA, 122 bp, Homo sapiens
tgctcagcactgctgagggaggctctggctgagtggcctgcatgctgggccttggccagacgcgctgctgcctccttatgtggacaggcggttctgggcgccggccatttgcagactgggag

SEQ ID NO: 86933 - DNA, 122 bp, Homo sapiens
cgaggttaatgtagtccgtcgaaagccaggagcattcccctgggggagccggcagccttccggagtcacaggtggaggccctgcacgtttcagagaaaatcccctgtagcctctccgtgcct

SEQ ID NO: 86934 - DNA, 122 bp, Homo sapiens
gtccatcaactgatgactggataaacgaaatgtggtccatccatgcgacagaacgtgattcggccttagagaggaaggaagtgctgacacgcacaacggcatagatgaacgctgacgacgtt

SEQ ID NO: 86935 - DNA, 122 bp, Homo sapiens
cagagttttcagggtggaaaggaaacctattatctctactagaaaaaaaaaatctcaaagcgcttgacctactgatgtcagcatcacctttacatgccaggaacaaattattacagaagacc

SEQ ID NO: 86936 - DNA, 122 bp, Homo sapiens
aaacacgtctcggccacgactgccaggccaccccaggctccagcggagcgtgcgtacctgcgcaggcgctcgcatctgagaactgccgaaccgtgccacatttccgttccctctggcctcgc

SEQ ID NO: 86937 - DNA, 122 bp, Homo sapiens
agggaaattaaaaaaaaaaagacccaaacaaaaaaacaaaaaaacaaaaccttcttagatcgcaggttgtgaataaatggatactactataaaaatagttttggctgtagcagcacatggtg

SEQ ID NO: 86938 - DNA, 122 bp, Homo sapiens
tatgtttgtgtccattttaacctggtcgaagaacattccaacaaaaaatccaccatgcaccgagcaagaatatctcaggctgtgaccatctggaggtaagaagcactttctgttttgtgaaa

SEQ ID NO: 86939 - DNA, 122 bp, Homo sapiens
accgggacacctggggcccagcactgctctgcgcctgcagtgctgaggatgcctctgtctcgaccccgccctccaggggcacaggacgacctgaggaaggtcacccgcatcgcctactccat

SEQ ID NO: 86940 - DNA, 122 bp, Homo sapiens
cactccatcatcctcatctgtgccttccctggcgattccctgccccttggtgtgaccctccgtgtcgtttctgctgcagcacagtcacaggcctgaaaactgaaactgagtctatttctgcc

SEQ ID NO: 86941 - DNA, 122 bp, Homo sapiens
gcaagtcattcacgcgctccacagtggacactatggcccagaagacccaggcagtgtaggcgacagcctcatgggccactgtggcccgatgtccccttccttcccggccattctccctcttg

SEQ ID NO: 86942 - DNA, 122 bp, Homo sapiens
tccccagctagacggcttattggtgtatcctcaactgtccagctaataggcttgttgatacgttgattcactgatgaatgaccctttgaataacttggcagcatcatctcatatttgtacat

SEQ ID NO: 86943 - DNA, 122 bp, Homo sapiens
gcatgtctgcgtgaaagggaagcaatgaagtagcgccaactcctcccccgtcccgggcaccgtttagggagaggatcagagttctgccagagaatcagaaccagaaggagatatagattaag

SEQ ID NO: 86944 - DNA, 122 bp, Homo sapiens
atatttttcaaccatgtctttttaaatgttttcattatgaatccccaaaatatagtttgtcggtaaacttgaggtcaaacagcagactgattttaagatgtgttcaatgaagcaaaaatgcc

SEQ ID NO: 86945 - DNA, 122 bp, Homo sapiens
agagttcatgggatgccaacacatgcctaaatataaaatagaaatatcaaaggctcccctcgctccaacagactggatttacaagagggagaatttgggtggttgatccactttatacaagc

SEQ ID NO: 86946 - DNA, 122 bp, Homo sapiens
ggcgccgcctgtcatgtggatgctgccttgcctgtcactcaacttcttaccccgcccccgcgtctggcctaaccgtcgcttaccttggtttccacagcgacgccatcagggggcgtggcaaa

SEQ ID NO: 86947 - DNA, 122 bp, Homo sapiens
acaggccgagttcggttgttgctgtagcctcagaaccacccagagttgactgaagacactcgggggcctccataactgagagcaggcagaggcattgtttttaacccagtgtggacccccaa

SEQ ID NO: 86948 - DNA, 122 bp, Homo sapiens
aagggacaaaactcattacagataagcctagtcctcccatttcccccggacgcctctccccgattgctaaagaagcagccgctccccgggtagctgccaggaaatcagtccggccccgcggc

SEQ ID NO: 86949 - DNA, 122 bp, Homo sapiens
gcctggagccctgaccgctcctgctgtgcccttcctcccgcccgctcactgacagacactcgtggaaaaagcatatgcaccagtctcctgcgacacacctgctgtaactctaatgacaaggt

SEQ ID NO: 86950 - DNA, 122 bp, Homo sapiens
acctagatccaagtgaatcaggacactaacttctctccaagatcttttacacttgtgaaacggcacagctctctaaaccaaacactgacagcagtttaattttacagatataaaaaaaatcc

SEQ ID NO: 86951 - DNA, 122 bp, Homo sapiens
gatgcccccaggtccctgggagagctgcttctgggtggggggcctcattttgtggctcagcgttggaagttcaggtaagccagggctcaggccttgggaggaacttatttcagtcagtgatc

SEQ ID NO: 86952 - DNA, 122 bp, Homo sapiens
gtcatacctgagaatttgagtttttggctctccaattctgctgtggcaatgccctgcccccgacagcaggcaatggtcatactcatttttcagttgcccaaacgggacaatttcagtgtaaa

SEQ ID NO: 86953 - DNA, 122 bp, Homo sapiens
ggccaaagtggttttagcacttttacctcctgccacagggacaggcaggagggcctgggacgaataacctgcccttctacagactgtaagcggtccagcgctcatgcttctgtctctgcttc

SEQ ID NO: 86954 - DNA, 122 bp, Homo sapiens
gtgaccttcacggctctgagcaggaagccccgacgtgagcttcccccggggcaggctggccggctgccttgaggcgccagctcaggaaggcttggcctcactgtgcctccatttcccccgaa

SEQ ID NO: 86955 - DNA, 122 bp, Homo sapiens
ggcaagcactacggccagttcacgtgcgagggctgcaagagcttcttcaagcgcagcgtgcggaggaacctgagctacacgtgccgcgccaaccggaactgtcccatcgaccagcaccatcg

SEQ ID NO: 86956 - DNA, 122 bp, Homo sapiens
gccggcaggcagagagcctcggggaaaccctcaaatgtgggccaccgcctgggccaccggcgggcgctcttcgagaagcggaagcgcctcagcgactatgccctcattttcggcatgtttgg

SEQ ID NO: 86957 - DNA, 122 bp, Homo sapiens
ctcctgcgcagcgagtgcagcagcgcctcggagcggacccgcgtccggccgcggcgccgccgcctctcctgctcgtcgtcctgtgcccctggaacctcagacgcccgggagatattgggcgc

SEQ ID NO: 86958 - DNA, 122 bp, Homo sapiens
agaaagaggctgaggtcctgtttgtctcggtccgcaaacccgattgagttcacctttccccgggacaagtaaacagacttcaaactatgccgactgtagacggcgaggagaagaatgtattt

SEQ ID NO: 86959 - DNA, 122 bp, Homo sapiens
attagagagctgggggtaagcagcattatgctgatcacagcagtcagcccccagaacctgcgctctgaacaacttttctctactgttctctttttcaacatgcttttatggaatattatcta

SEQ ID NO: 86960 - DNA, 122 bp, Homo sapiens
aaaaccgggaagcgacacgttgcacaaaacgtatttggtacgttaaaaaggccagaagcacggtgccctgtaggaatgagactgacatcttcacaaaaggtcatcatcagtctcatgtgaca

SEQ ID NO: 86961 - DNA, 122 bp, Homo sapiens
gcctctgcattccagtgacaacgtccgcagggcctcagtgaataaaccgctgcaaatgcacgttggtgaggccatcagctgccgaagggaagctggggaatctggacggaggagaaagaaac

SEQ ID NO: 86962 - DNA, 122 bp, Homo sapiens
acaccagcaacgtcaacgaagagaagaaattccttccacctgagtccgcgaacacagctgcgcgactgatagagaaactacttacggctgagctagataaaccggaaatacgtgacgagagg

SEQ ID NO: 86963 - DNA, 122 bp, Homo sapiens
gagccggggtcaccggaggcgtcccccaaccgactgggcttcggaaaaccaaggggcgcacgccgccccgccccgccccgccccgcgactacaagtcccatcgcgccccgcgctcgcgcaca

SEQ ID NO: 86964 - DNA, 122 bp, Homo sapiens
ccaagtccattggtcgatgagaaagatgacagagaaaggaggcgaggccaggcagcagcgcgtccaggtgggtgtgaggcgtcacaaggaaagctgagcaggcaattgctgccccgcccact

SEQ ID NO: 86965 - DNA, 122 bp, Homo sapiens
gacatttctctcgagtcataaacatctttaactgtctaataagcatagttccatgactgtcgccccaggcccttcaacataaacctgtctaaaaccaaactctcatttcccttagcaaacct

SEQ ID NO: 86966 - DNA, 122 bp, Homo sapiens
ctcctcgcgctagtgggttcctgatgaaaaggtgggttcacgccttttttcttctgcttgcgcgagcgggttcctgatgaaagggtgggtttggctcccttcttttctcttcctcctccttt

SEQ ID NO: 86967 - DNA, 122 bp, Homo sapiens
cccaaagtgctgggattacaggtgtgagccaccacgcctggcctcaattatattacaagacgacttctgagtgctgctctgatgacctccccgagcctctgcagccttgagtattgccaata

SEQ ID NO: 86968 - DNA, 122 bp, Homo sapiens
agatggcaccaatatgaccctgaaacagcagcttcatcagggttccttccaggctggcctcgtgtcggccgtgaagggaagggccttggagcttggtaggcaggctgagccagggaggcatt

SEQ ID NO: 86969 - DNA, 122 bp, Homo sapiens
aatgcgaggactcacgggcgctgagtcacaccgagaggctccacgcatgtgaattagccacgccagacactgggagccccccaatctcccttcagaggccacttcctgcccaaaccacccca

SEQ ID NO: 86970 - DNA, 122 bp, Homo sapiens
ggagcatgcctttccctatcttcatcttatccttttaggataagttcagcttcttttcttcgaacataaactccaataaagcctaaaaaccaaacacgaaaatttctggtagactatccctg

SEQ ID NO: 86971 - DNA, 122 bp, Homo sapiens
aagcctgagccacatgcccagcctccttcattgtttctaccctgagggaaaatacaattacgatctttgttcagaacttagacctttgaaaatcttccttccccaagagtttcttttctgtc

SEQ ID NO: 86972 - DNA, 122 bp, Homo sapiens
tcgagaccagcctggtcaacatggcgaaattctgtctctactaaaaacccaaaaattagccgggtgtggtggcacgcgcctgtaaatccaggaggcataggttgcagtgagtggagatcttg

SEQ ID NO: 86973 - DNA, 122 bp, Homo sapiens
ggcttacataaaatttagtcttgtaataaatgtgatctattatttatgcaagactttcagcgatattatgaaagagaatgtttagaaactttttacattccaggagggaatgaaattggttg

SEQ ID NO: 86974 - DNA, 122 bp, Homo sapiens
gagagaaaagtgcccagaacttagaaaatgtaacgtatgttcagagctcagctacatcaccgactagtcgcgtgagctctagcatgtcattttcttctccgaatcccattttctcctctata

SEQ ID NO: 86975 - DNA, 122 bp, Homo sapiens
gacatgtcctttgggggacataagtcaaccctctgctgagctccagctgcactgacagggcgaagcactgcattcagccatgctgcggacctgctcagagccttgaaagcaccagagagtct

SEQ ID NO: 86976 - DNA, 122 bp, Homo sapiens
caggaatgggcttctgatgcctctcctgggtgtgatcttcttaaagggcaactctgccaccgaggaagagatctggaaattcatgaatgtgttgggagcctatgatggagaggagcacttaa

SEQ ID NO: 86977 - DNA, 122 bp, Homo sapiens
gcaggagaaaaaagatcagaacagaaattctattgagaacatagccaatgagactgtgaacgtgctgtggaatatatggtaagatgcctaccaaacacagtctcctgctatagcagtaccca

SEQ ID NO: 86978 - DNA, 122 bp, Homo sapiens
tccccagccttcccttcccaatttcttcctccaaaaacggctgcgatcgctcaacatcagcgtgcacagctggacttcacgttcccatttgcagtggattcttcatctgaaatgctggtagt

SEQ ID NO: 86979 - DNA, 122 bp, Homo sapiens
aaaggaatggtttgttttaaattggaggtatgtgcttcacttatccctattaaaataacacgaacttgtcttctttgccttttatcattaggggcccaaatcccagcaaagtgctacagcag

SEQ ID NO: 86980 - DNA, 122 bp, Homo sapiens
ggggagcgtttgggggctccgaccccatggcagtgtctagaggcaaatgtttacagctctcgaagccccactgggcctgtgttacagtgtgctctttcagttttgctgtctgcaggcggctt

SEQ ID NO: 86981 - DNA, 122 bp, Homo sapiens
cagtggaacgaggtcaggggacacccttgttctggctttaaggctgggcagcccatgggtcgcctactcacaaaacaggagtggaatcccccctccccccagcatccgcagtgttgggccgg

SEQ ID NO: 86982 - DNA, 122 bp, Homo sapiens
tcacgtgataccccccagtgtacctttcctgcagcgtgttacgtggcgcacagagaacgtcgcttccagaggaccgttttttcgtaactggcagtagtaatctggcggttgacactctcgtt

SEQ ID NO: 86983 - DNA, 122 bp, Homo sapiens
tgggttggactagggaagcggagttctgggagttctcgtaggattggcgcaaagtgagcccgctccgcccgccggtctacgcatgccggggagccggtgttcggacgaccgtctcccgctcc

SEQ ID NO: 86984 - DNA, 122 bp, Homo sapiens
taccgcagcggttgtcacgacacaacgaccccgacgccagagccaacgccgaacgggtggcggctactcgcgcacccttagccactgccacttgacccgcggctcgcggagagacgccggcc

SEQ ID NO: 86985 - DNA, 122 bp, Homo sapiens
ccgctgccgccatctttcctagcgccgcgctcacttccgggcagaggaacgcctcacttccgaagttttacttccggtaagccctgagcgccgccatggcagcctggactaggaagagccag

SEQ ID NO: 86986 - DNA, 122 bp, Homo sapiens
cagagttaagaaagagaggtaggacatccttttccaggcagagggcattgtgtgcacacacgtatagaagcaggcagcccaccctcatgctttccaggaagcaaatgtggctcaggtgtaaa

SEQ ID NO: 86987 - DNA, 122 bp, Homo sapiens
tgaaaacattctaatacatcatcacccccatccaaccactcccaccgtccttgcctccagcgcagacgaaataattccagccgatggtaacatctgcaatctcacgctaaactaactcacag

SEQ ID NO: 86988 - DNA, 122 bp, Homo sapiens
ggaacggcgagagaggcagtgcaattacagcagacggagcccaggggagaggatcagagacggcatcagccctgagaaggaaaggctctgctgaaatttattcctgggtacagcatcctctg

SEQ ID NO: 86989 - DNA, 122 bp, Homo sapiens
tagcttcttcgggtcgtcatggagacgcccttgcacaccaacagtccttcactccttctccgggtcacgcccccgtgcttttccacgcccaccccaggtcttgcccctctgcgctcctctcc

SEQ ID NO: 86990 - DNA, 122 bp, Homo sapiens
tatgccagagacaggccctttgcctcagactgtggcctcggtcaggaaaggaggcgcgagcgtgtggctggagaactctacaccaaacaccctggtttcctgagtggaaatcacactggctc

SEQ ID NO: 86991 - DNA, 122 bp, Homo sapiens
gccccagtgcctgactccagggttccctggcgtcctttctccgggctgctgcagggagagcgttccctcgaatgcacacctgcccatgtgcatcatctttccgtggctaccgtgataaggca

SEQ ID NO: 86992 - DNA, 122 bp, Homo sapiens
tgggagacggccatctgcgcctgcgcaaaaaagtcgccaatgttcatttccggtctttttcgccccgcccttcaaatgcgaaagcgactgccttcttgggtgagtgcattagctgggtaggg

SEQ ID NO: 86993 - DNA, 122 bp, Homo sapiens
acgacgtggctgtctccacagaggtcagggagtttgccattgttcccctgcatgcggccccgggggacgcagtagccgagatcgacgctctctatgacgtctacctggatgtccaagagaaa

SEQ ID NO: 86994 - DNA, 122 bp, Homo sapiens
cgagccgggcctcgggcgtggtccatgggcgtgaccttgagggtgacccggagcgagctccgcgaagggggattttgcccgttctgatcccgcggaagcgccatcgctggcggcgggtcccc

SEQ ID NO: 86995 - DNA, 122 bp, Homo sapiens
cactctttccagatctttcccgctcacaatggttacaaacactttaagtgttaaaacaaacgtggatatacaggcttttctgtaatcaccctgatgacgattcattgactgtgagcctcgtt

SEQ ID NO: 86996 - DNA, 122 bp, Homo sapiens
ctctagagaccagcgggcaccgcctggaggcgccttcaccacttggcggttccgggtccgcgccccaccgcgccacaagactcacgcccgaaccacgtgatcagggccgtggctccgccccg

SEQ ID NO: 86997 - DNA, 122 bp, Homo sapiens
ggtaatcgctcccggtaggttcctccccaacccccgaggcggggtcaggtggagcgtgggcgccagagcagcccctctgccttgggtgtcttggagatgacttggcgccccccggagccccg

SEQ ID NO: 86998 - DNA, 122 bp, Homo sapiens
gtggagaagcccctggccaggccccggggacactctgggacttgtgtagtggggcagcagcggaggctggctccaggtccagcatcagcatattgagtgtttcgatggactgttcaatctcc

SEQ ID NO: 86999 - DNA, 122 bp, Homo sapiens
gacttttgggggataaggggcggtggagcccagggaatgccaaagccctgccgcggcctccgacgcgcgccccccgcccctcgcctctcccccgcccccgactgaggccgggctccccgccg

SEQ ID NO: 87000 - DNA, 122 bp, Homo sapiens
tcgactcagcgcctccatcttgaatcccagagcctagcccctctggtgggggcggagtcgcggacaggaaagtgccatcgaggcaaaattcccccatctgcgtcagtcccctcaacttccgc

SEQ ID NO: 87001 - DNA, 122 bp, Homo sapiens
gggtttggtggtctgccctggaggcaggcaaagtgatggtaacagaagtgatagtttatacggagagagttgatgaagtgataaagtactataaaagtagacacaagaactacgaaaatgta

SEQ ID NO: 87002 - DNA, 122 bp, Homo sapiens
ggtgtttcccgtctgcattcccaccagcagtgcacgagagcacctgtttccccacagcctcgccagcagaccgagttctcgaactttggagtttttgtcagtttgttagctgggaattggta

SEQ ID NO: 87003 - DNA, 122 bp, Homo sapiens
cgctcgggctcggccgccgcgtccggtccccgcgtccagcctccggcctgacccgctcgccgccgccgccgccctccacggggccccggcccagccaacccagcagccccgcctgccggggg

SEQ ID NO: 87004 - DNA, 122 bp, Homo sapiens
gaaatttcattctaacagcatcctctgtagtgttatacatcaggggctggcaaaccatgtcgggaagaacacagtcatgcccattcatttacaaattgtgtatggcttctttccctgcaaca

SEQ ID NO: 87005 - DNA, 122 bp, Homo sapiens
gttttccaggtggtgaatggggtgcaaagctttccagtacctttggggtcagattcctttcgagaaaaccacccctcttgaacaccgcttgcttttctgctgcttaggagaaagtaggagtg

SEQ ID NO: 87006 - DNA, 122 bp, Homo sapiens
ccccggtccgcctggcccctcgcccgcccgccaggcccgccgaatgcggcctccgccccgcgcgcctaaaggaggagcgtcgcgggggatggaggcggcgcgcggtgggacctggggagatg

SEQ ID NO: 87007 - DNA, 122 bp, Homo sapiens
agtaatttttttcttgctcttttttaaacatgattaaactgttagaataaatgaggcccccgcttgtcataagccgactgcgacagggaggctgtaccggaattggccatcggagggcacta

SEQ ID NO: 87008 - DNA, 122 bp, Homo sapiens
tccttacccccagcagcccgaaactcactccttaattacacaagggaaaccttttacctccgcagccagagtctggggggaaaggcaggcgtgggaaggtaaggggagggaaagctgcgtgc

SEQ ID NO: 87009 - DNA, 122 bp, Homo sapiens
tccaaagctcgaaaacaagaggcgctgggagcgaggttgagagacgcacgggtcccaccccggccccgccttctgccaattctaaaggggaaggtctctccgcttcgcgccccgcccctacc

SEQ ID NO: 87010 - DNA, 122 bp, Homo sapiens
gtggaacgataacttggaaatatactgtcttattatcacaggctgctcctgaaagccacgcgtccccgctcaccagctaccagcgctgggagacccctaaccaccaggcattcacaggtgag

SEQ ID NO: 87011 - DNA, 122 bp, Homo sapiens
gtgggggctgcactggagccccacgtcggccccatgtcccacatggcctccggacatgtgcggtgacgcctctgcacaaaagagactcagagacctgacatgagcggcccaaccactctgtc

SEQ ID NO: 87012 - DNA, 122 bp, Homo sapiens
ccctcccggaagttgttgcacagttgtttccgggaagcgggactccaaatgggtcgcagtcgcagccgctctccacggaggggtgagtcctgtagcaattcggaggatatggggctctgttg

SEQ ID NO: 87013 - DNA, 122 bp, Homo sapiens
cttcctgacaatcccctctcccccagctggctggcccgcacagaccccaaggatgtggcacgagtagagagcaagacggtgattgtaactccttctcagcgggacacggtacaactcccgcc

SEQ ID NO: 87014 - DNA, 122 bp, Homo sapiens
ggacaacacgagggaaggtgggctggggcctgaactaggaacacagggtgctactcacctcgggaagatggggtggggggaggtgtatgggaatcgagatgtcagggccaaggagttaactt

SEQ ID NO: 87015 - DNA, 122 bp, Homo sapiens
acagagggagtagcatgtagcagagccaggattagaatgcaaattcctgcttcccagacccgtgctcagactacttggccatagcgtctcccaggcggcagctcatttatcaactacaaata

SEQ ID NO: 87016 - DNA, 122 bp, Homo sapiens
atcaaaaataattggtctaaatttcctagacttagacttgatttcttaacattagggtatcgcatactcaaatggtagacaatgaccccaactaaatcttcctgatgttacactgctttatc

SEQ ID NO: 87017 - DNA, 122 bp, Homo sapiens
agcagactaaagtcaatcaagaagcatttcctgagttcctactctcctcagcactgaccccgtaatgaggtagaaaacacagtttctctccaattgaaatttgacaattatgtgagaaaagg

SEQ ID NO: 87018 - DNA, 122 bp, Homo sapiens
ggaccaggtcaggttcacggtccacttgctgggtgccaggtccaccaccagacaggtgatcgtgggcgacttgcggatgaacaggtcgaacgggctgggccggcttaggtaggcgctcaccc

SEQ ID NO: 87019 - DNA, 122 bp, Homo sapiens
ctgtacacactgagaagccctgcagcagcagatctgatgagtgggagagctgccaaagtgcgcagccaggctgggcccctggggtgcccgtgagggcatcctcttattttctgtttgaaaag

SEQ ID NO: 87020 - DNA, 122 bp, Homo sapiens
gtaaactctatttcccttattccttactgagcataatgaaactcacaaagctgactctaacgttctactttacataaatgtgtggagaaagaaggtaatgtttactaggctctcgccaaggg

SEQ ID NO: 87021 - DNA, 122 bp, Homo sapiens
ggtagagcggaggactgtagtacttaatgtgtggtcatccttaggtcgctggttcgattccggctcgaaggagacgctgctgttttggggtttacggttgctcttcgtttgtgcaaaaaatc

SEQ ID NO: 87022 - DNA, 122 bp, Homo sapiens
cccgggcccgcccctagcaacaagatcgcggggaggggccgaggcgaaacacgagccccgcgcccaccaccccagctggcgacgtggctccgcggccccggcttcccccggcagctcagcga

SEQ ID NO: 87023 - DNA, 122 bp, Homo sapiens
ggacgctccaaagcgctgcctgacgtcctacgggagggacacagatgataagctcaagcccggctgcgcggccaccttgggcagagtggctcagaggcgaaggtgccctcgtttgttcatcc

SEQ ID NO: 87024 - DNA, 122 bp, Homo sapiens
ttgcgagagtttctacaggaagcaatatctgggctgactcagagaaccaacactggcagccgtaaaaactgtgggttgggagaggtgaggcctgaaagggggacaattagggtctgctgtaa

SEQ ID NO: 87025 - DNA, 122 bp, Homo sapiens
cccatcatctgggatgtggggagcatctctgccccgtcgccccgtctgagatgtgaagagcgcctctgcccggccgcgaccctgtctgggaactgaggagtgtctctgccccgccgccaccc

SEQ ID NO: 87026 - DNA, 122 bp, Homo sapiens
ggattcatgaagaaatggttatatgatccaaaatgattctaacctctttaaactctggttcgccttcagtgaataatgactataacttgcctatgtaacaacacctatgttaatacttctaa

SEQ ID NO: 87027 - DNA, 122 bp, Homo sapiens
gcgggtctggagcgggtggaggagggggcgaggcaggtgcatcccgagggaggagaagcacgcacagcttccccgctggccccctgggatggggctggaatccaggctggcacctggaggcc

SEQ ID NO: 87028 - DNA, 122 bp, Homo sapiens
ccttgctcgggggctcgcagcgaatctgccggcgacagagctccagtccacatgcgcccccgtctgacagcacctcttctgtgccctgccagggacttgtgggctcctgcggccgacactca

SEQ ID NO: 87029 - DNA, 122 bp, Homo sapiens
tctttgacaacttcctcatcaccaacgatgaggcatacgctgaggagtttggcaacgagacgtggggcgtaacaaaggtgaggcctggtcctggtcctgatgtcgggggcgggcagggctgg

SEQ ID NO: 87030 - DNA, 122 bp, Homo sapiens
gagtgcagcgcttgctgcagtggaaatgatcaggaatactgaccgtgtttctcttgcctccgaggttcttgggcacactctatagccatactggacaggaaccaggtgccccgtgtaggcat

SEQ ID NO: 87031 - DNA, 122 bp, Homo sapiens
cggacctggacaggtaggggctctgccaccccagtgggcagcgtgcaggaggccgggaggcgaacccctcacactccaagctgcggccccgtggggggctccctgcctgctccgtgcttctt

SEQ ID NO: 87032 - DNA, 122 bp, Homo sapiens
cgccttcctaaagcagaaccttctgtagctctttcagtctagctcttcttcagaatatggcgagtctgagtctcttctgaccacataagacggggcgattcaaagcgtgcagctggagtatt

SEQ ID NO: 87033 - DNA, 122 bp, Homo sapiens
tcaggaagtggcagcgaagaagactgagccccgacattccagtctcgaccccgagcccctcgttccagagctgagatggcataggccttagcagtaacgggtagcagcagatgtagtttcag

SEQ ID NO: 87034 - DNA, 122 bp, Homo sapiens
acagtgtgtccagcgggtgcttcttggagagtagatccatgaggcgcagtggtgagggtgcggctgtctgcacactgagccatggcacccgggcaccggggaaacgccgctccagctctgcc

SEQ ID NO: 87035 - DNA, 122 bp, Homo sapiens
ctagttcagtctgtgttatttaaattctaatatatgaattatttgaattgaattcatgttcggggccacgttgttgtatgtattgatgtacagccttgaatgtgaataattattgtaaacta

SEQ ID NO: 87036 - DNA, 122 bp, Homo sapiens
ctcaaagtttatcggtctttcccggcggtcggggccgccgggctttgtagttcgccagtccgagctaccccaccaagaccgcgagcccgaggagtcgctgaactacaattcccatgatgcac

SEQ ID NO: 87037 - DNA, 122 bp, Homo sapiens
caaatgaggaggctgaagcctagagagggtaggacagtaaacccttgactgagtattttgcggcaggtgtgtctctaaaatatgctttctactaattgtgtagtacataataattttatatt

SEQ ID NO: 87038 - DNA, 122 bp, Homo sapiens
ctcctcaggtcctcagccctcacctggcccggtcgagctccagacctgaccatctctcgccgcctcagagaagcccagaccgagggaagtgaagcctcacggtaaaaagaattaaccgccgt

SEQ ID NO: 87039 - DNA, 122 bp, Homo sapiens
agagaaagcacgcaacgcgcacctgagagaaagcacgcaacacacacctgagagaaagcacgcaacacacacctgaaagtgcgcaacacacacccgaagagaatgcgcgcaacaaacacctg

SEQ ID NO: 87040 - DNA, 122 bp, Homo sapiens
gaaatggggtaagaataaaagaaaggaatggacagatgtatgctttacaaggcacttccacggcgagtgactcattcatgcttaggacaacccagggagagacataggtatatattgcattg

SEQ ID NO: 87041 - DNA, 122 bp, Homo sapiens
cgcgcccacttcggggcgcccgctcggcccccgccctcctgggcgcgcggcgctcggagccgaggcagttggcgcgggccgcgggcgaggcggggccgcgcgcggggtcccctcctcctccc

SEQ ID NO: 87042 - DNA, 122 bp, Homo sapiens
ggtaagggggtcaggacttattttcttcttcgatttttcataggacaacagaatttgagacgggaatgccaatagctaagtttggggcagatcttggttctgtggtgcctgaatattacaaa

SEQ ID NO: 87043 - DNA, 122 bp, Homo sapiens
ccccctcctccatctactccagctctgagaaaccactggcagtttctaaatcaggctctgcggtttctcctcttggggcttttgcaaataacactatcgtctagaaacacccttccttccta

SEQ ID NO: 87044 - DNA, 122 bp, Homo sapiens
gcggccgttactagggcaatttgcaaaggcccgcctagaccggctttccattggtggaagcgggaacacctccgctctccataggctcacggctgcgcccatcgcggctgctgctagagctc

SEQ ID NO: 87045 - DNA, 122 bp, Homo sapiens
ctatcccactagctacctttcatctggctagttcctatccacatcaaggctcagatcagccgctaacttttctgagagtaattctctgaacccccatgccactgaggatttcttgttgtata

SEQ ID NO: 87046 - DNA, 122 bp, Homo sapiens
aagcgcgcaaggcagaggggaactcggcttaccgtcctcggggtctgattggacagatctcgggaagtggagactctgattggacagtgctgtcgactccgcacccctgattggagaattct

SEQ ID NO: 87047 - DNA, 122 bp, Homo sapiens
aagacaaggacatagatgtctgtggttactacccgggctctggtgttagggcagctgaaccggctgagactaggggccctggacctgggaccctgtccccatcctccctcccttgtggtgac

SEQ ID NO: 87048 - DNA, 122 bp, Homo sapiens
accttcaccccccatctctgtgtgtgagttctactaaatgcctgagcagtgacacagtgccgctgaaattaaacggattccaaaaacgacaggaagcacgaggtggatctccccagaaaagt

SEQ ID NO: 87049 - DNA, 122 bp, Homo sapiens
ctactcaacattttttaaaatatatttctggtactgttcaataaatattagttatcagaacgagtactgttagatgctgcccagatatatttagtactcagttttatattccccacagtccc

SEQ ID NO: 87050 - DNA, 122 bp, Homo sapiens
gcgacagtgagactccgtctcaaaaaaaaaaaagataggtagactcgatgttgtcgtacccgagcaagttagagcaacgccacactttgagacgaatttaagagtcctttatcagccggcga

SEQ ID NO: 87051 - DNA, 122 bp, Homo sapiens
ccaagttcgcgtatgttttcgtgaacaaacaccttggatctttccggttcgccagggcagcgagcaaagcagcagcgaacggaaaccccgcagggctgcgcaccgcagctaaaccgacgctc

SEQ ID NO: 87052 - DNA, 122 bp, Homo sapiens
gtcctcccacttcagcctcctaaagtgctgggattacaggggtgtattagtccattttcacgctactgataaggacatacccaagacttggcaatttccaaaagaagattattggactcaca

SEQ ID NO: 87053 - DNA, 122 bp, Homo sapiens
ctggtcaaagaagcgaaccaagtcaattctcaggcagaagcagcggagattctccgcagccggcagcgcccagggcgcccggaacccagagagcgagaccgcgtgaaggaagtcccgccccg

SEQ ID NO: 87054 - DNA, 122 bp, Homo sapiens
cacttatcttctcttcgctgcagtttctccaatggcaaatggagaaaagaacaccagcatcgcccgctggtgatggaaattcaactagataatacattcaaaaacctttgcctcaactgtaa

SEQ ID NO: 87055 - DNA, 122 bp, Homo sapiens
gtggagactctgcgtgactctgggggcgtggccgagaatgggtgtagctctgtactagggcgtggtcatgcgtaggggtttgggtgaggcgttaacagtgggcgggcgtggctcgggctcga

SEQ ID NO: 87056 - DNA, 122 bp, Homo sapiens
agccggctcccggctgcctcacccatggcagcagcccacgcaagagccacctccattcaccgcttttcctcactggtcacaatcgcctgtcccaagttctggggctgcagccttcaacgttc

SEQ ID NO: 87057 - DNA, 122 bp, Homo sapiens
ccactcgtagcggcaccgagggtcagggccagcccccaaggagggcgctgctaggaagctcgagcccggactgaactgaccgcgctgcggccctgggaccccagccctcctctgagtgctgc

SEQ ID NO: 87058 - DNA, 122 bp, Homo sapiens
tattctgtcttgtcatcagcccgcggtgttccagaagctgccagcagggggcagtagcaccgcatccctgggaccctcccggcgcttcccggccacggccctgggctccgatgaggccacct

SEQ ID NO: 87059 - DNA, 122 bp, Homo sapiens
gtggcacttccaaaagagtttccatgaatgagtgaataatgaagttctaggttaggatctcggctctgtaatttattatctgggtaaaccagggcaaattttttaatcttttaattaatttt

SEQ ID NO: 87060 - DNA, 122 bp, Homo sapiens
ccagtgtctcctgtaccagcagaagctccagaactctcacccgattgcctgcctctgctgcgtctttgcccactgaacagccatgagaaggcaactccggtccagaagggctccatcctttc

SEQ ID NO: 87061 - DNA, 122 bp, Homo sapiens
cttttcctgggcttgatgctgctgcactgttgctgggacccagcttcttggagccccggtcgtgtgcgagtgacctgggaggtggacctgtcggagtgactgtgagggaagctgtgtgaagg

SEQ ID NO: 87062 - DNA, 122 bp, Homo sapiens
gaccaggggtcgctggggtgagtgcgggttgctcctggagttgggcgctccaaacgtcctcggagtcctaactccaaagcagcatgccggggtcccaaatactctcttctcttcagcccaag

SEQ ID NO: 87063 - DNA, 122 bp, Homo sapiens
cggagcccctcggcagtcccgtcacgtctcctccagattaggcattaactcgggtgcagccgcacttccggggggccgcggcgggggaggggcgcctgcgggatccagacccgccccccact

SEQ ID NO: 87064 - DNA, 122 bp, Homo sapiens
agataactactttcctgtattgactcattttttttcccatgaagcttaagcttttaacatcgttgagactttatattagtaaatacctaaatctagatcctaaatctcacgttggcatgttt

SEQ ID NO: 87065 - DNA, 122 bp, Homo sapiens
agccacttccgcggctgctctctggtgagtgggggacaaaggcgctccaggcctgggggacggcggcgcgaggggaccctctgctgggcaccaagctgccggaaagagcaccgctccggagt

SEQ ID NO: 87066 - DNA, 122 bp, Homo sapiens
ggggtgggttctgaacggtgacctcacaggaggaacttcacacacagacactgtcagggccgggtcacccctggaagatccaccgtccactaccccgtccactcctggggaccctgaggcca

SEQ ID NO: 87067 - DNA, 122 bp, Homo sapiens
ttttactggtggcagaggtctgcagctgcctcgcgggttagttatttcattaagaaatagcgtatttgacaaattgtgccataaagaatgagagaaccattccagatcagcttgcgggtgag

SEQ ID NO: 87068 - DNA, 122 bp, Homo sapiens
agactctcctccacctacctcaaaggtgttcttggtcatgccagagaggccatagtaggacgtgcccgtcgcaactgcacacacacacagctccccgatctcatccgttctgcacagctgag

SEQ ID NO: 87069 - DNA, 122 bp, Homo sapiens
cactgcatcggcttcccggagctggcgctgcctgtggtcctgcagctgaagttgttcctccgggagcgcaaggtggccaactactgccggcaggtgcagcagctgctggggaaggttcagga

SEQ ID NO: 87070 - DNA, 122 bp, Homo sapiens
tacagacgctccctcacatcggggacgcggctcctttaagggcgtaggtgtccagggcgccgcctgactggaaagtcgccccccggccgggctcctggggcggacccggggcgcgggcgcgc

SEQ ID NO: 87071 - DNA, 122 bp, Homo sapiens
cagccccgcccgcttgtccagctgcctcgcaattggctgcaccctctgggtccgagcccccgggagggtaattaacgagggattaatgagatttccaaagtcaacagaaaaatcgatgggcc

SEQ ID NO: 87072 - DNA, 122 bp, Homo sapiens
gcactgggcgagtcaccctccctcttgcctcttctaccccgcgtgcttggcgaccctctccgcccagggacccaggggtcctcctctggccaccccgcactgaggaacccctcccctcagcc

SEQ ID NO: 87073 - DNA, 122 bp, Homo sapiens
ccaagcagaatggtcaaggatgcagtcttccacatggacaggacatgaaatgtctgacatcgaacaataacaaataacattttgacatgaggaaaagtatttgtaattgtaattgatagttc

SEQ ID NO: 87074 - DNA, 122 bp, Homo sapiens
tctttctgggcgagagccccaccctgaaaaagcctaatccctgagggccattttaactcccgtgggcgccgggtccacctgctgctgaacgccgagctcgcctcgcggagcccggatggatg

SEQ ID NO: 87075 - DNA, 122 bp, Homo sapiens
aacagcgtaccactctccggggacaaggacagcttctccactgaacccaggccaggctgtcgccccccaggttgggcctggctgggtgaggggcattcactgccggacactgtccatcgtga

SEQ ID NO: 87076 - DNA, 122 bp, Homo sapiens
gctcctaaacccctgcaattctttggtgttgcctctttgttctggaaagtttgcttaagccgacttgcctctgctcctagtaagcttgccatgactagttctcatctcttctgatgctttgt

SEQ ID NO: 87077 - DNA, 122 bp, Homo sapiens
tgccctgcctcgactgttctatgccacactcccactccccttgccctagctgtctgggggcgcttagggtcctgctcccaggaggccagattcctgtctccagccctgaggctccgtaggag

SEQ ID NO: 87078 - DNA, 122 bp, Homo sapiens
gacactcttcaagaccctggggacagaagtatataaaacaggcaaaaatccctagcctcacgaaatgacagctatacacatagcaagtttctgctcagtttttgagccaagtattccttgac

SEQ ID NO: 87079 - DNA, 122 bp, Homo sapiens
agccacaccacaggacactgctcagccacaagcaggaatgagtcttgatacctgctacagcgctggtcaatgaaccctgaaaagacgacactgagtgaaaagagttggacgccaaggaccca

SEQ ID NO: 87080 - DNA, 122 bp, Homo sapiens
ctcagtatatacagacccaacaattcacattatttgaggtgaaaatatgtacagctagatcgagttcaagcattcacaggcaataataaccaaactgccaccaactacaagacctcagtaga

SEQ ID NO: 87081 - DNA, 122 bp, Homo sapiens
gcgtcctggacccgtccaggaagctaagggtgggggacgggaggggagggggccgggagccggcctccctggccccaacccttggtgagaagagggctgggggtataaagtccgaaagtgag

SEQ ID NO: 87082 - DNA, 122 bp, Homo sapiens
gccccgcgtcacgtccttccagccgtgcttgtgatcactgccggggtgggagcctggcctcgcactcgctgcagccccggcccagacccaccctccccacgcccacgagtacatgtggtgcc

SEQ ID NO: 87083 - DNA, 122 bp, Homo sapiens
atcctcatgaagccacgccggctagaaatgttgatttttctaacttctagaatcagagttcgacttcttaatctgggtttagttaaacttccctactgcttaggcacttgtcttcaaatata

SEQ ID NO: 87084 - DNA, 122 bp, Homo sapiens
ttccctggggctggtgcggcggcggagacgtcagcgccaggagacttcgggtggcggctgcgccataggcgggccacggcctggacgcgctgcggggaggggcggagcgagcgggcgggagc

SEQ ID NO: 87085 - DNA, 122 bp, Homo sapiens
agggaaagcgggtgtcagaaccacgtgacccagcaactctccccaagaaagaagaacagacgtgtaggtatggatcttcaatacagcattgtacaagggcaagatagtgaaagtcaatgtcc

SEQ ID NO: 87086 - DNA, 122 bp, Homo sapiens
gattccggcccgggtcccgcacccaggacgtcgcaggtgctcaggaaataccagatgagccggcgtccggcaggtgccttgcaggagggcgcttggagacccctgccccctccacagacggc

SEQ ID NO: 87087 - DNA, 122 bp, Homo sapiens
gcgatggcggaatggttgatgggtggagaactgcctgggatctgaacagccactcccagccggtggcttccacaggcaccacagtcatctagggagttcactgcgcaaagagttcgattccc

SEQ ID NO: 87088 - DNA, 122 bp, Homo sapiens
agaggggagagaggggaaaggaagggggacgggggagggggggtggttccctggcttgcccgctggctgccgtgaacagtctctgggtggcatcttcagatgcagttgtcttactctggcaa

SEQ ID NO: 87089 - DNA, 122 bp, Homo sapiens
tgctgaggctgcgagttccatgtgagaaggcaggaggataataggtgagttccatccatccgtcagccataatggtcgcggacactccacgccttttgtctgctggtttccctgaggatgca

SEQ ID NO: 87090 - DNA, 122 bp, Homo sapiens
gcgcccgcgcaatggtacgggcctgcgctgccggaactgtggagccgttgccctggaaaccgagttcggcctggtcccgtggcccctgatttttaaccctgtgggcgccacgggggagcggc

SEQ ID NO: 87091 - DNA, 122 bp, Homo sapiens
tggttgaagtcctcctgtgaggccctctgccttatggagatcagtgcagtgtcagtggcacgaattggtgcctggccaggagcacgctctgctcctttacaggagagcccctgacaggcact

SEQ ID NO: 87092 - DNA, 122 bp, Homo sapiens
actgggcgctctgagccacacagcagccagcgcctgagtttttatctagggagttagtttcggtttcttttctccaccgcgaggccttttcgatttccgcagttttctggaggtagaatata

SEQ ID NO: 87093 - DNA, 122 bp, Homo sapiens
gggggaacgcggctgtcccgggtcaggggtcttgcggcggcagggcggggggccgaggggcggggcctgggaggaaggcgtggcctttggggactggggctcggactgggggcggagccggg

SEQ ID NO: 87094 - DNA, 122 bp, Homo sapiens
aggcaaccatatcaacttccggcttgaggcacgatagcggttggcgagaggccacatttccgccacgtgacccgcgcatgcgcctgcttgctggagagcgagcgtcttttgccacgaacacc

SEQ ID NO: 87095 - DNA, 122 bp, Homo sapiens
gctcctgcagccactttatttttcttctctgtattttgcagtttttctgtctttagaattcggctctttagatgactcgcctgttttgctggcctttgtaaagagctgcctcttggctttat

SEQ ID NO: 87096 - DNA, 122 bp, Homo sapiens
aattggtgcaaccagcccgaatcaagctcctagagcagtcactggtaggaggtcccttcacgcaccaaggcgcacccgaccccacctctggcactgctgcccgccctgcctgcggccctctc

SEQ ID NO: 87097 - DNA, 122 bp, Homo sapiens
tgaggaggccaagcgcccacgaaccgcattccctgccttgctagttagttctccaacacgcgaaaaaggtagacgaggactggttttctttgcagctaaaatgaatcaagcctctggtaagt

SEQ ID NO: 87098 - DNA, 122 bp, Homo sapiens
ggggatgcagagatcaacaagacatagtgcctgctgtcaagtagctcagagatgatggcacgacggacactaaaactgggtcagaaaacttgggttctaaactcctgtgccattaactcaag

SEQ ID NO: 87099 - DNA, 122 bp, Homo sapiens
cgcgtaggaatccggccttcctagtctcccgagatggacgacgggagccttctgaccggtcgtggcaatcccccctaggagccaggttgagcacgttttcaacctgagtttctggctctata

SEQ ID NO: 87100 - DNA, 122 bp, Homo sapiens
gagatactgtgaagtcacatgaacttgattcctgttggaaagaaccactctgcaatccttcgcgtctacacttcgtcaagaaccgtccaatttgattaaacattctggatcgtcagcgttca

SEQ ID NO: 87101 - DNA, 122 bp, Homo sapiens
agcactacctgaatgtagatttgggccatacgttggaaaataagacatgagagtatgctccgatcaacttttactgttcactggacaactattttgggtaagaaaagcaaggaaacttaata

SEQ ID NO: 87102 - DNA, 122 bp, Homo sapiens
ccgggccggagagggttcggctcagagcagcctgggttctgttcagagccctactgtgcacgtttccgcgaggatctgcggagagacgtgcaggcgacgcaggccccgggaaggaaggaggg

SEQ ID NO: 87103 - DNA, 122 bp, Homo sapiens
ctctattttcttgcttcctctgatggggtatgtgaaataccaccagcatttatttcatttcggcgcacagctatcctgccactggcctgggtacatcatattcctcatgatagtctcctagt

SEQ ID NO: 87104 - DNA, 122 bp, Homo sapiens
gggggttcaggggcgctagctgggctgggggacgctggctgggggttaccgagcccagggcgccttgcacttgacgctggaagcgccctcggctatctttcctcaccgcttcccgcctccac

SEQ ID NO: 87105 - DNA, 122 bp, Homo sapiens
ggccgggcggagcacttagggagcgcggcgcgggggcgcggggccttccaggctctgactcgccagctgcgggtcccgacctggctcgtcccacctctgccccacctccaccacccatcgcg

SEQ ID NO: 87106 - DNA, 122 bp, Homo sapiens
cttcatgccaaaaaccgtgcagctgcatttgtaacaggcagaacgtggagacaacccaagcgtccttcagtggacacacgaatggccacaccacggaacgctactcagccgtgaaaacaaac

SEQ ID NO: 87107 - DNA, 122 bp, Homo sapiens
aactaaccttcgccctggcggctgcgccccgggctgtggtttgtttctgggtcctgtccgcgccaggacaggcaccgaaacttgggggaaatgagttgagggaggcacttggggagttgacg

SEQ ID NO: 87108 - DNA, 122 bp, Homo sapiens
gacccggggcgggagcggggtcgggagccctggggacgtccggagtcaggatgggggtgccgggactacgcagggaagggggatcccgggacgctggacgggccccagggatcagggatggg

SEQ ID NO: 87109 - DNA, 122 bp, Homo sapiens
gcatggaaattgagccttccctagtagagccttgagatgagactacagctgcagttgacacgttgcttgcagaccctgaaaaaccctgaagcagaggatgcagttaagctgtgtctagagtc

SEQ ID NO: 87110 - DNA, 122 bp, Homo sapiens
cccacaccatcctcgcactggtcctgcatcacccacatcccggtgtgggtgggtgatggtcggggaggctggtggctcaggatgctgctgcccttcctgctgcctgcctcgggtcctctgtt

SEQ ID NO: 87111 - DNA, 122 bp, Homo sapiens
ccctaatgtaaaagtccccctgcgagtttccagcacggatctgaaaggcattgtaggcaccggggtagacggaggtcgcctggatctggaacacgtcagcgggcacgctccgctccgaggtg

SEQ ID NO: 87112 - DNA, 122 bp, Homo sapiens
ccacctatgactgctcagtcccgctctcctaccacacccacctttcccggcccaagccagcgcaccccgctgactccctgcccagtccaaactccaaggctgggcaaggcactgatccactg

SEQ ID NO: 87113 - DNA, 122 bp, Homo sapiens
ggaagctgcattgtgaatcagcccttcaggcgactggctgcaggtggtctttggaccccacggtgaaaatcctgccggcctgggaaaagtgccgtgaacaggaagcaccaggactgggtggg

SEQ ID NO: 87114 - DNA, 122 bp, Homo sapiens
tgacggggtgtgagtagaacccggcaggctggccttggtgttaggagagaccagtgcaggcgctgcagacacaggacccagccggagcaagatcctggggcaggtcaggagaggggcgggca

SEQ ID NO: 87115 - DNA, 122 bp, Homo sapiens
ggtccactccccgcacctgggcgctggctggcatagccacagtctaagatctggaagagtcggggctggatgggctgcaaggaccagcctaggaccacctccccaccaaccttaatgctgtt

SEQ ID NO: 87116 - DNA, 122 bp, Homo sapiens
ctgcacacacactgtcctcggcactgccctccgtggggacgtctgcactcacagtgtcctcggcactgccctccgtaaatggggacgtctgcactcacagaatgtcctcggcactgccctcc

SEQ ID NO: 87117 - DNA, 122 bp, Homo sapiens
gaaagcgcgggactgccggagtggcaggatgatgtaatgaggatgtctgtgtgacagactcgggttctcggtggcacaaacctccaagggctctactccggaaagccgtgtcccggacgaga

SEQ ID NO: 87118 - DNA, 122 bp, Homo sapiens
tgaaagaatctgatggatgtctgaggagctttgggaaccctaatcaccaccctacacgggcgccactagtactcacggcccagcttcaccccgggcggcgggaagctagtgcctgcgccggg

SEQ ID NO: 87119 - DNA, 122 bp, Homo sapiens
gcaccaagcactatcctaggggctttacttatgtcatttcattttgttcttacaaaaacacgtcatgcacatgagggagctgaggttctgctaagttataggttgttattttctcaaaatca

SEQ ID NO: 87120 - DNA, 122 bp, Homo sapiens
ttgttttgatgaccttgacagtggtgaggtgccctgggcgggcactttgaaggatgcccccgcggggatgcggctggtgttcttctcacaagcagcctggggttgtggccgtggggaggaag

SEQ ID NO: 87121 - DNA, 122 bp, Homo sapiens
aagctttagcttccattagaatataagctctatgagagcagggcccctgcttgtcttattcgttgttacattctccaatgcttggaactcaataagaattttttaaaggaataaagggtcat

SEQ ID NO: 87122 - DNA, 122 bp, Homo sapiens
aaaacaggagaactcggagtgcatgtttaaatgaactctggcatcccccatagagtggggcgcccgagtcagcaaacccttggctcacgggcccgcggtggggacgctacacgtacctttca

SEQ ID NO: 87123 - DNA, 122 bp, Homo sapiens
tctttgtgtgttctctggaaaatgctgcatgcgcacaatgaatattcaaatgccattttgcgctgtgaataccagatcgccgggcctgaggccgtctgcatgggccgtcggcggagtcggcc

SEQ ID NO: 87124 - DNA, 122 bp, Homo sapiens
cctaggattaagaaaccagctccccctacataggaccacccgtcagcataacaaagacgccgggtctggggtgccaatagcaatggaatgggagcttcactaaggacaaacagcagcatctg

SEQ ID NO: 87125 - DNA, 122 bp, Homo sapiens
cggcacacgcacccaaacagggcacatgcacacaaacacggcacatgcacccaaacagagcgcacacacacaaacagggcacatgcacacaaacagggcacgcaggggctggtacctcggta

SEQ ID NO: 87126 - DNA, 122 bp, Homo sapiens
gtttacagcacagatcgtcaggtattaagcccagacctccacaggtgtagagtgggtccacgtgttctcattattcagctcccacttataaatgggaacatgtgatgtttggttttctgttc

SEQ ID NO: 87127 - DNA, 122 bp, Homo sapiens
ttgcaattttttcccttttgtcctggccccagactgtccatagcagctgctgcaccttggcgagcatcatgggggagtttaaagttggagaaaaagggaggatcttagagtggttcaatcgc

SEQ ID NO: 87128 - DNA, 122 bp, Homo sapiens
ggtgggtctgcggtggcggggacgggggtggggctctggcttgacttggagctcgtgaaacgtgcttgtcacaactgcctgcaagtgtttcttggtctcctcgttaacatgcatgccaccca

SEQ ID NO: 87129 - DNA, 122 bp, Homo sapiens
cggctcttaaagggccctggcagaaggagtcagtgtgatctcgccagtccctgagtccaacgtgggaattctgggtcttgggatattggcctttgaggtggtgacaccagttaggagccaca

SEQ ID NO: 87130 - DNA, 122 bp, Homo sapiens
aaggctgcagtgacccgtggtcatgccgctgcactctagtctggggacacagtgagaccccgtatcaaaaagaaaaatgctgcctatttcaaggttgtagcaaagctaagtttgaacagagc

SEQ ID NO: 87131 - DNA, 122 bp, Homo sapiens
aaggagccatgatccccaggcaggggtggaaccagcctccctcagaggccctgcctgccccgtgctggcccgactgctgcagaccacacctgagcagaggcctgcaccactgcagcggctcc

SEQ ID NO: 87132 - DNA, 122 bp, Homo sapiens
ctgccaagcagacctccacgtcgaacaccagggcccgctcctcggggatggccacgggtacggcctccccctcggggccgtaccgggtccagccctccgcccaggcccaagccgggggcttc

SEQ ID NO: 87133 - DNA, 122 bp, Homo sapiens
ttagtcgcggcttctcaattcagaccaccaacacggccggaagcaactcctgccgcccagcgcgcctgagtccccacgttgcgcatcaggctgcaccaaagttccgcgagtgccggaagtgc

SEQ ID NO: 87134 - DNA, 122 bp, Homo sapiens
gatgctgtgaacagcccacaccgtaaaggcgcctgtaccttgggccgtccacccgtcctgcgcctgtggtccccctcgcacacgtgtgcaccatgtccaggctctgacatggtgatgggcgg

SEQ ID NO: 87135 - DNA, 122 bp, Homo sapiens
gaaaagaaacctgtgcaatattttaaaggtttgcatcgttttttctattaaaaaaaaccacgctttttaatgtttgtgacttaaacagaattgaggtagtttggcaacatttcaatactgta

SEQ ID NO: 87136 - DNA, 122 bp, Homo sapiens
atacatttgtcttctaaacctttaccgaagggagtgaaaagaacacctcacccaaacgcccgcccttatgtgcgcagccccgcctcctgtaggccccaccccaccaaagggtgcgcctgcgc

SEQ ID NO: 87137 - DNA, 122 bp, Homo sapiens
tgggagcagggagacggccttaggttttggaacccagctgtgaaagaatcccctgcgctacggcgttggtgagattaaacgaaactccactcagtagggaatggcaccaagggggcctggcc

SEQ ID NO: 87138 - DNA, 122 bp, Homo sapiens
tgttcacgagagctcgcggcggttggaaggctctcgcgagagcgtcttgagaattctggccgggggcccaagccgctcggtctcctgtcttcagcacgggagttgctgagtgggtctaacct

SEQ ID NO: 87139 - DNA, 122 bp, Homo sapiens
actgctcagggtgtactctcctgtgacgaatgagtcccgcttaatttggcagtgattatgcgggttgctggccctctaaacccctttgaacttgtaattgctgctggtttaaataatgaaca

SEQ ID NO: 87140 - DNA, 122 bp, Homo sapiens
ttcttgtcctggccctcgtagacgatggcctgcgcgagggacaagcagaggctggggttacgcggcgcccgcggctttggcgccaaatcgccccgggcgctgcaggcctggctggcagcagg

SEQ ID NO: 87141 - DNA, 122 bp, Homo sapiens
tccctgcctgtctccaatcctctgattgcttcaccttcccccggctgccattatctgtcgcgacccaccctttcggcatccagtcctcggtccacacccagtgtcacttttctgttcatcag

SEQ ID NO: 87142 - DNA, 122 bp, Homo sapiens
actccatgtttgtattttctgttgagcatctttttttagtcctgctgaggagctctgtcacgagagggccttgttggctctaaattagagatccttgggggatttgagatcccctctaaagg

SEQ ID NO: 87143 - DNA, 122 bp, Homo sapiens
gcagggcctacgagccacacgcgctcctccgccggcccgaggttaccccagctgcacacacggacaggatgctgcaaacgccaccagacattgcaacacgcagccagtctgctggccgctgc

SEQ ID NO: 87144 - DNA, 122 bp, Homo sapiens
gatgggcagagtaggtggcattcagtgagccctcaatttatttgattgcctgggaccatccggtgagcagaaacccttccactttcaactacagagacgataaaaaggcctcctcgaggcca

SEQ ID NO: 87145 - DNA, 122 bp, Homo sapiens
cttaaccttcctggctgttcactgtgttctcaagtgcagcccacagcccccgtgtggccccgtgtggtatgcctccccgcctttcccccaccccccagggctgtgagtacatgtgattaata

SEQ ID NO: 87146 - DNA, 122 bp, Homo sapiens
gcatcaggactcagggtgggaaccagcactcatcacattcaagggtggaagacccagcatcggaggggtgggcaacagacctcacacatactacgggatccagggctgtgtattgcaaagtc

SEQ ID NO: 87147 - DNA, 122 bp, Homo sapiens
cgcggcgcggtcagggggcgctgactcacaggctgactcagctgcaggcgcgctgccaggcgacgcagcgggcgggtggccgggcgccggcgggctcgcagccgggctgctggcaacggtgc

SEQ ID NO: 87148 - DNA, 122 bp, Homo sapiens
ttccaacaaaggcaggcgaaatgtggaaccaattatatctgggtgcctacacgtgacgtacgccagttctttgtagaaagaacgaggcttgtctcagcgatactaatgtacagttcacatga

SEQ ID NO: 87149 - DNA, 122 bp, Homo sapiens
tgtgatggggaacacctgtggccgagccgggggctgagtgtgacggggaacacctgtggccgaggcggggctgagtgtgacggggaacacctgtggccgaggcggggctgagtgtgttgggg

SEQ ID NO: 87150 - DNA, 122 bp, Homo sapiens
ctgtgacagctccgggtggctacgacgctcccgtgctccaggccagccccacagacagcccgggacaggttgctgccggatggacaagcctgtgcctcgctgccttatgtaaccagtttatg

SEQ ID NO: 87151 - DNA, 122 bp, Homo sapiens
aaataccataataaaagtggtcacctatagagggcaatgtcagggtcaagggacagataacgagtagaagggggtaacacatctcaatgtatgccttttaatatggtcattttcttgccaat

SEQ ID NO: 87152 - DNA, 122 bp, Homo sapiens
ccaacttaaccacccccaggtacctgcaacggctcgcgcccgccggtgtctaacaggatccggacctagctcatattgctgccgcaaaacgcaaggctagcttccgccagtactgccgcaac

SEQ ID NO: 87153 - DNA, 122 bp, Homo sapiens
cctgtgggggcctccagccaggcggggacctgggagagggagggagaggataagccgcttcgaaactccagatgcagcagttaaaaagaggacagaggcaatgatccttcaaattgccacat

SEQ ID NO: 87154 - DNA, 122 bp, Homo sapiens
gggtcgggtggtctgtgtggcctggggtcccgctcctccaggccttgcctaggcgctcttcgctgaggcccacgttctaacctggaatggaacctgcgttcccaccctggccgcccgggtgg

SEQ ID NO: 87155 - DNA, 122 bp, Homo sapiens
gggagaagcgctttttcccaagcggctgccgaagatggcggaggtgcaggtcctggtgctcgatggtcgaggccatctcctggtccgcctggcggccatcgtggctaaacaggtactgctgg

SEQ ID NO: 87156 - DNA, 122 bp, Homo sapiens
ccctgttgagtatgagctccttgaggcagggcctcaagtcctggtggttaaccaagtccccgtggctaaccacagtgcctggacatagaaagggcttaatacacgtatatgtaatttctact

SEQ ID NO: 87157 - DNA, 122 bp, Homo sapiens
cctgagcctacaatagagcttgatgtataaccgaaacacagccccagaatttgtggtggacgaatgaataaaaagacaccagtgtctggcacatataatgcaggttactaagtggtaatgta

SEQ ID NO: 87158 - DNA, 122 bp, Homo sapiens
gattgctgaaattcagagtcaccagcagcacggccgaagtgagactgaggagtactcctccgagagcgagagtgaggatgaggaggagctgcagattattctggaatatttacagagacaga

SEQ ID NO: 87159 - DNA, 122 bp, Homo sapiens
ccatttcttaagctcctcctttgtagtaggcacaccatagctatcaacactattcaatctcgccagcaaccccataaggcaggtgttgtaattttttaaaactgtgagtaaatggaggttca

SEQ ID NO: 87160 - DNA, 122 bp, Homo sapiens
gtcaggggtgcccgccgcacggatggatgggtttccttgagtcccgctgcctgcgctctgcggtgtttgtgcttatctgggattacgcttttctgtgcttgtgtgtcagcctccatgggata

SEQ ID NO: 87161 - DNA, 122 bp, Homo sapiens
gatgtaaatcattttaaatgtcttgacaggtttacaacctaagaatgactttcttaaagacgtggaagccatccctttgaaatgtaatcattaagaagataatgccctcatcttccagtctc

SEQ ID NO: 87162 - DNA, 122 bp, Homo sapiens
atacactttctgacctatcatgagtatacacatctgcgaagggaaaccgcgcggcgacagcgtgaggacatcccctgggcgtgagcgtctgtccgctgtctaaacagagcagctacagggac

SEQ ID NO: 87163 - DNA, 122 bp, Homo sapiens
tcaagcacctcgctgcttcctgaagacttgccccggctgcgcccccgtgctgagggcctgcgggcctaaccttgccaccttggcacagctgccactccagagagatggctatgccggtccgc

SEQ ID NO: 87164 - DNA, 122 bp, Homo sapiens
ctggagtcgtaggttgcgggggcaaagggaagggtcgtcgtctgcggcgcagttctaggacgtggccacattcccagagtttggggatcgctcatttcccgcttaagcaggccgaggggcca

SEQ ID NO: 87165 - DNA, 122 bp, Homo sapiens
tattagcagataactgctcatttctgctgtaaatcaagaaaatactcattagaagcccaacgttgagattgtcaggagccggggcttgtaaagaactggggggagggcaaaatctagtgtga

SEQ ID NO: 87166 - DNA, 122 bp, Homo sapiens
tatgggaatgccagctatatgttggctgggtgcggggcccagtcgccaggccacactgcacgcttccacatcctcagagggcccgggacttgggtcctggccccgccccctgcggacccggc

SEQ ID NO: 87167 - DNA, 122 bp, Homo sapiens
aggggctgccctgctgctcaccggtccacccatctgcctggtcttctggagctgaggactcgggaaaccatgcaattgaggcaagccttgggctgctttagaggcgctgacatccgaggaga

SEQ ID NO: 87168 - DNA, 122 bp, Homo sapiens
cgtgcaaatcacttggcatcttcctggcatgtacaaagacatgtagacattgctagccctcgttaccattctaattattatcactagtcctcctcctccaattcatgccttcagcatctatt

SEQ ID NO: 87169 - DNA, 122 bp, Homo sapiens
gaggcctcagaacctgggtacattaaacatcacaaaggtcttgatgtaggaatctcccatcgttttcagaaaaaaacaacaagacaatggatgccaggagctaaatgtccaaaatagttgtg

SEQ ID NO: 87170 - DNA, 122 bp, Homo sapiens
gaggcaataaaaaaatccagaatgtgccgcccggcctctccttaacccttccacggggagcgcctgccggctccggctgaggtcttaatgactccgacgcaaacccaggggccgggagtggg

SEQ ID NO: 87171 - DNA, 122 bp, Homo sapiens
tgaatgacagtctctttttaatgagcctgttttccagtctatgcaggcagaagaaattctcgttaggtgggtcttacttggggaacatcaccacgtctgtgaagctcactgggaactccttc

SEQ ID NO: 87172 - DNA, 122 bp, Homo sapiens
ggaagaggatgaccgggtgttgggatgggtgcacatcgcagagcggcacacggcagcctccggatgggcgcatggcagagcggcacacggcctctgctgtcttttccgatgaactttcaata

SEQ ID NO: 87173 - DNA, 122 bp, Homo sapiens
cgggctgggcagccaagggttaagtgggcggggctcccacgggaggggcggtcccagcggcggccccgtcccgccttcccctcgccttcctcaccttcctcacgggcgggcgcggcagggca

SEQ ID NO: 87174 - DNA, 122 bp, Homo sapiens
ttggggaataagccggggtttttaaacagtagttttgaggcggcgagactggggaatccccggttgcgtcattagtaggcgtggaggggcgggactcgtgaagctgcgctggggccgggctc

SEQ ID NO: 87175 - DNA, 122 bp, Homo sapiens
tttgaggggcttattatttttgattcctctatataaggcaaagtgctttgaagagctgaacgcacacatttattgttctcattaaagaaacctgttgtaaggtaagattgagtccattctcc

SEQ ID NO: 87176 - DNA, 122 bp, Homo sapiens
acactttctgaccctactgagctccagggcggtggcagtgctctgcagggtcggaggccacgaggggacagcgcccccttcccgacgacgggcgtccccactcccggccgcagcccgtagca

SEQ ID NO: 87177 - DNA, 122 bp, Homo sapiens
cctgccagacctgcagcctccagaactatgaggcaagggcttcctgttgctcaagcctggcggtttgtggtgctttgtaaagtgggtagtcctagcaaagccaggcaggatctgcagggtcg

SEQ ID NO: 87178 - DNA, 122 bp, Homo sapiens
ctgaggaggggaagagagacaagaatgacgttgatgagtgaagatgtcggctcaggatgccggaaaatgacctgtagttaccagtgcaacgagcaaagccccacagtttagtcctttggagt

SEQ ID NO: 87179 - DNA, 122 bp, Homo sapiens
gatgcagatggtgaagctgcgtggcggctccaagggcctggtccgcttctactacctggacgagcaccgctcctgcatccgctggaggccctcacgcaagaacgagaaggccaagagtgagt

SEQ ID NO: 87180 - DNA, 122 bp, Homo sapiens
caggtcagaacccaggctaagacctttagacctaagaactgaaaatagtctggtacaccccgcccccaccaaccctaatatagaattcacaataaaagagatctaaactgcaaaatgaacat

SEQ ID NO: 87181 - DNA, 122 bp, Homo sapiens
cagactcctcttgatcgatggaatcgaagtcaggcgcagcagcttagagcagaacagaaacgtgcccatttccccgcttggtgctttcccgcttccacttcgactccttcaacccaatcctc

SEQ ID NO: 87182 - DNA, 122 bp, Homo sapiens
caagtgtctaagtacattagagtcaggaacggcgctttccagcgtccgccatttttgtggcgtcaccgcgtcgctgctacgccatccccagcgcagtggctgccgcgctcctgtcccagtgt

SEQ ID NO: 87183 - DNA, 122 bp, Homo sapiens
ttctcagccgtcgggtgcgggaggaacgcccttgccaacctcagcctttttgatcttccgcgggcagagactcatcagagccaggaggactgtaactacccccggggcgtgtaccgccgaag

SEQ ID NO: 87184 - DNA, 122 bp, Homo sapiens
gcagggaatggtggtgcacccctgtaatcctagttattcgggaggctcagacaggagaaccgcttgaatccgggaggtggagattgcagtgagccaagactgcaccactgcactccagcgtg

SEQ ID NO: 87185 - DNA, 122 bp, Homo sapiens
aacacaatggggcattgcgttttcaaaggcaactgacacgcccagcactgggataggacccgcccgcccagtcctcattaaatatggcagcgagcggggccgacgtactgcggctgcgcaag

SEQ ID NO: 87186 - DNA, 122 bp, Homo sapiens
atgtggctgtactcccaggtcagatgctgcgctgaagatatctgctccagagttgacatgcgtccgtgtccgctgggccacgggcctctcaggtggtcacggtattctgactggttggaggg

SEQ ID NO: 87187 - DNA, 122 bp, Homo sapiens
aggccgccggacactgtcgggtcgtcttaaaggggccgggagctggacaacttggggcctcgccttaaagggacggccgccccgttttcgccgtcgcggccccgccgagcccgcaggggggg

SEQ ID NO: 87188 - DNA, 122 bp, Homo sapiens
aggttttgtctccagccgcagggatgctgagccaatccgcgctgagaaaagggtcgtttccgctttgggaccaatgggtcggggagggacttccggtatcacttcagtggcggtcatttttg

SEQ ID NO: 87189 - DNA, 122 bp, Homo sapiens
tgatgcctcttattttcctcatcctaggggatgctctccatggtcctgaattgcatagaccgcctaaatgtctacaccactgctgcccactttgctgagtttgcaggggaggaggcagccga

SEQ ID NO: 87190 - DNA, 122 bp, Homo sapiens
ggcagagtctccattcacacagacctcccacgcctcgcctcagcagcttgccgttgtcggcgtgctgtggtgttagtgatgcctgcagatttcatcttcagaagagtgaacagaaacggcat

SEQ ID NO: 87191 - DNA, 122 bp, Homo sapiens
tctctaggaggtttttgttcttcccgggaatggcgtgcctcttccgattccccacagcagcgcgggccatgggactttccttcggtattggaaatgtaccgtagctgcactgtccagcatgg

SEQ ID NO: 87192 - DNA, 122 bp, Homo sapiens
gagccgggatgggggtcaccgcccccggggagcccggatgggggtcaccgcccccgcccccgtgatgccgagctgaaaaagacagtctccaggtaggataatccgtcacactagatgcatat

SEQ ID NO: 87193 - DNA, 122 bp, Homo sapiens
caggttgcacctgaaggagctagacagcattttcccacgctctgaatatctcgacgtgttcgctcggtaagcggcttgctctggagcttcccagttcccaggactctggggctcttccctgg

SEQ ID NO: 87194 - DNA, 122 bp, Homo sapiens
ttggcgataggtcttggtcgcgagggttgcagatggagccttggcttagaaggtcgaatccgggcccgtttccccccgcccccgctgcccatggcttctcttttcacctccaggttttcatg

SEQ ID NO: 87195 - DNA, 122 bp, Homo sapiens
gtctagaatactttgtcaccccaagtggaaatgccatcatccccattatcggtcgctccccgttaccccacactcgtcaccacccgtgcacctgcctccctgctgggttccctcatgataac

SEQ ID NO: 87196 - DNA, 122 bp, Homo sapiens
ctgttcagaggacaggcgaggcctgggactcggattggagcccgcccccacgcctccacccgctgggcatcctgcctggagaagcctcctcatgtctgactgtgggaagcaagctgcgctca

SEQ ID NO: 87197 - DNA, 122 bp, Homo sapiens
cccagcccctctgacaaatgccgtagtgttgggggaaccctggggatgctcacccacccgcgtggacctctagttcacttcccacatcttctgggctgcgcctccaggcccttgctcaccca

SEQ ID NO: 87198 - DNA, 122 bp, Homo sapiens
tccgagctcaggccttgctcagtcgaactgacgcccagtagacaagaaagacggaagctccgcccacgcgcctttatgcgcaggctcttcctactcgcacagcccagggagtggggaggata

SEQ ID NO: 87199 - DNA, 122 bp, Homo sapiens
acagtcgcgccttgtgaacgaaccacggcagaaaaagtctttctgctgacgttaaacagccgcaacgggccagtgatgacacagaaaacaaacaatcccaggaaaacaaagcagcagcgaca

SEQ ID NO: 87200 - DNA, 122 bp, Homo sapiens
ggacgctaaaaagacacgctgtttgtcacacaaggcctccaactgggacggcgtccaccgcgccccgccccgcccgcggcaccgtggcatcttgggacatgtagtctttggaggggcagctg

SEQ ID NO: 87201 - DNA, 122 bp, Homo sapiens
gaaaccgcctccccacccccggtcccagccaccagccccttgagaggccccctctccccccggtatttatttatgccactggacagttctagtcacattaaagctccggttcaccttctcga

SEQ ID NO: 87202 - DNA, 122 bp, Homo sapiens
tctaggaccgcggcggctaggtcacctcctccggacgccgacacgcgctgccctggcaaccgtcaccagggaaacaagcgacgtcacttgcgcgttttcaacgctactctacgggggccgag

SEQ ID NO: 87203 - DNA, 122 bp, Homo sapiens
aagctgggatgctgtaagaaaataagtcttcccacaggagtggcaggctggaaatgcgcacgtctcaatcctgacactgtggagggaggaacaacaattctctcctgacaatttgaaccacg

SEQ ID NO: 87204 - DNA, 122 bp, Homo sapiens
tatttttagtagagatggggttttgccacgttggccaggctggtctcaagctcccaacctcgagtgatccacctaccacgcctcccaagttgctaggattacaggcatgagccaccatgccc

SEQ ID NO: 87205 - DNA, 122 bp, Homo sapiens
gtcggggacgctgggagacgcgaaaccttttggcttcagtgcggaaccccaacgtggctgcgacaggctcagtgtcatcctctggaacccaggaccaggaacacagtgcacgcgccgtctcc

SEQ ID NO: 87206 - DNA, 122 bp, Homo sapiens
gatgggttcatgaaaatttgttaatttgctgcctgtcctgccatttgcttcttataaaaacgggaggttgttttgttttgttttttgttttctgactacaggtctgagacaaaaccagaatt

SEQ ID NO: 87207 - DNA, 122 bp, Homo sapiens
ctgcagggaaggccctgggaaaccttctaggcagtttccatccagcgccctgagtgctggcgccacctgctgccgggttccggtagtgtgcggtttcttcaggtcatggagaagcccttggg

SEQ ID NO: 87208 - DNA, 122 bp, Homo sapiens
gcctggaaatccgagcggctcctctagcctcggctgctgccgagctcgctcctccccgtccgctcgcctggctcagctctgcacgccccccagctagctcccgctctagtcacctcttcccc

SEQ ID NO: 87209 - DNA, 122 bp, Homo sapiens
aaggcataccctatttaaactttgtattatgctattcaggaggttgacaaacagccttttcgggaatgggactcgaactcgtaagccacgtctgttcctccatttcccgcctcagctggatg

SEQ ID NO: 87210 - DNA, 122 bp, Homo sapiens
ttatacaacgtgcctccaaaaaaaaaaaaatagcccctgaggggtgctagaggagccaagcggacaatgtcttccaagcaaagccacaggaatgtcagctccaacctcttcagtccttgcac

SEQ ID NO: 87211 - DNA, 122 bp, Homo sapiens
ataaacatccctgggaaaaaggaggaggtgagaacctccacacagccccagtgacaaggacgcggccacttgtgtggcaggaggaggaaattgacaacgtctgccctcccaggttaataaat

SEQ ID NO: 87212 - DNA, 122 bp, Homo sapiens
ccacacaacagtcagtggctctggggctgcccacgcccgcgcccaggggccgggagaaaacggcgccttcagagctatgcgctttcaagctgggaagagcagtttgggagtctttttcctcc

SEQ ID NO: 87213 - DNA, 122 bp, Homo sapiens
gccacagcccgtcctctacccgcctctgctggaaaacaggccgcagaatataggtgttctcgggctcccctgcgttcttctcagcctcaggcaccccgtcgcccaccgagaaggacactccg

SEQ ID NO: 87214 - DNA, 122 bp, Homo sapiens
gggctcaagtaatcctcctgccttagcctctgttaaccatgctggtcctgaactcctggccgcaagtgatcctcctgccttggcctcccaaagtgcaggaattataggcatgagctaccatg

SEQ ID NO: 87215 - DNA, 122 bp, Homo sapiens
tatcaagaggaaaaaggcaagcgtcatccacagccggcctggccgctgacagccaggcaccgtcacatccacctggcctggagaaccaggctcagaaacccaccgtgcagcctccgagaggc

SEQ ID NO: 87216 - DNA, 122 bp, Homo sapiens
ctcttggtgcgcctgtggccgctatgtttgagaggggcaggcaaccatgttcgtgaggggcgcttcccttgaagcctctttggcgccatgtatgagaggggcggacggccatgtttgtgagg

SEQ ID NO: 87217 - DNA, 122 bp, Homo sapiens
tatgcctagagaggggagctcagagccatggaggagcaaggagagccttgggtcctacagcggctaccagacctctgcgtgcagttctcgccctgggcaagccctctgtgtgggtgggtggg

SEQ ID NO: 87218 - DNA, 122 bp, Homo sapiens
ctcgtggacacgggggagcagcgcttcttccttggccacacagacaaggtgggtgctgcccgggcctggggcagctcacacctgcagcccctacaccctccctcacccttctgcctcctagg

SEQ ID NO: 87219 - DNA, 122 bp, Homo sapiens
attctcttcttggaaaatccatgtgacctccccgcgcttaaagtgtttccacgttacaggcgacttaaaggcagccctggagcctgacgtataattcgagcgccgatgcagaaaggagtcag

SEQ ID NO: 87220 - DNA, 122 bp, Homo sapiens
ccggtgaggggcggggcctgcgctgggggcgaggctgggctcaccattgcagggatggcccgaagcggggcctccgtgcgggcggggtggaggtctgccgtggactggcagcccagcctcct

SEQ ID NO: 87221 - DNA, 122 bp, Homo sapiens
aagcagggcctggagaaggtcagagaggccccgccctcctggcactcccagggcaggggacgcagcacagagcgggtgccggtcagccagggaggccgggacgggacgcagcacgaggagaa

SEQ ID NO: 87222 - DNA, 122 bp, Homo sapiens
tggtgggggccatgtcaggaagcaagccggcacacagatggacataggacagacctggatcgggtacggaacacagcaggggctgagccggagactcctgtactgggggtgtggccgcctga

SEQ ID NO: 87223 - DNA, 122 bp, Homo sapiens
ggtccctgggcattgccgaacacgcgtcctttttttcttttcttctttcattattatgatcgggcccataaatcttggtttggctgtgactccgccccttcttgcttgaaagcctggctcct

SEQ ID NO: 87224 - DNA, 122 bp, Homo sapiens
agaactttctgttacctagtttagtcatggcctcatactttctcttcatatacacatagacgattttctccgagactttcatcttttcccactcttccttagagaagtatttggcaatatca

SEQ ID NO: 87225 - DNA, 122 bp, Homo sapiens
ggtgtgtattccgtgttttgacaggtccacgattatagtgtcacagagtcgattcagtgccggctcatccctcacaccagcccccacaaccaccgatcctccgtgtctccacagctctgcct

SEQ ID NO: 87226 - DNA, 122 bp, Homo sapiens
tgaggagggggtgtagacactgcggacacagcccggtcccccgcaggtcgccggcaggggcggggaaaccaggctggcggggatcagaaaggttttctatgcaaagtctgcggccacattgg

SEQ ID NO: 87227 - DNA, 122 bp, Homo sapiens
ccacgggcagggcgagtgcctccgggttcctcactgctggctgacaccctggagtgctcacggagcaggatgggctcgcagagcagaacaaagcagcagaactccaatgtccgctgctgctc

SEQ ID NO: 87228 - DNA, 122 bp, Homo sapiens
ttccacccagggtgcactcagcgggtgtaactccacacccgtttctttggagtcaaggcccggcctctcagtgaggagactgctcctggttgcccaccgtcgggtcatcccagcctgcagtg

SEQ ID NO: 87229 - DNA, 122 bp, Homo sapiens
aaaatgcggtcctgaagtggagcagactcaccggcaaggagcccggaaaatcgtcaggggcggcggcaaagtgagtgatggggattggaggaaggggtaggattggaggaagggcctcatgc

SEQ ID NO: 87230 - DNA, 122 bp, Homo sapiens
acagagcggaggaaggagctcgggaatggtcttgctcaatccttcccggcctctgctcatcggaatcacccagagggcttttaagcttagacaaaacactctgatgtttggaaccctgttaa

SEQ ID NO: 87231 - DNA, 122 bp, Homo sapiens
aactcggagtccagattggggccgaggcaaccacaagcccatggacgccgcagcgggaggcgaaggggcaggaagcgccctccacggggcctgctgcagctgggtgggcgctgaggcccctc

SEQ ID NO: 87232 - DNA, 122 bp, Homo sapiens
gggcgtgggcacggcagagagcacgggatgcgggtgggcctccaggtctggaggggtgagcgaggcgggccctgagcagcagtggctccgggctcgtgggccccgggtggccccgcctccaa

SEQ ID NO: 87233 - DNA, 122 bp, Homo sapiens
gacccttagggtgcgtctgttgggttttgttgggctagaaaaatgaaaattttcagatggcgttttcattcctctgactgatattgagctgctttggtgttaaaggtgtaatgtgtacagag

SEQ ID NO: 87234 - DNA, 122 bp, Homo sapiens
aaggatgcaactcggccaggagtgaactggggccccaagggaggtgtccgggccgctgctcgagcccagcccgggtccccaaaccccttacctccagggtccgtatctcctgctcggtgagg

SEQ ID NO: 87235 - DNA, 122 bp, Homo sapiens
ggagtaacctggcagcctctggagggtgtggagggcccggggccctgggttccgaagacccgctctggccacgtgaccttggcgccccccgcccctcctcgcccacctggctcttcctcagc

SEQ ID NO: 87236 - DNA, 122 bp, Homo sapiens
agacagggcagctctccaaaggctgtcctctgggacaactcaggttctcctcaagagctgcggggacgagggggcgtggaggctcgggcgctgcggggggccggaggcagggacgcgggggg

SEQ ID NO: 87237 - DNA, 122 bp, Homo sapiens
ggaaaatggatgaattaaaaatattaaacagcttagccggcacccacatggatgaatcaccgagatctattttttccccgtttatactataaacatatggcatgaattttctgctctcatta

SEQ ID NO: 87238 - DNA, 122 bp, Homo sapiens
ggaaacgcccacgtttcttccgaccagggatttccgacccgagaaccttacctcaaaggccgggaggcctttgagcacctccagctagggctgctgataaaaatgtagaaagcacagtaaaa

SEQ ID NO: 87239 - DNA, 122 bp, Homo sapiens
cagcctgtcctctgtcagttctgtggttccccacagtggagacaggaacacaaaactgaacgtggaccaggacagcttacccccggaatgtgaatttttctaatgttcattttccaataatt

SEQ ID NO: 87240 - DNA, 122 bp, Homo sapiens
atggatgtccataggacaagggcaacagcacacacatcaaggcttgctacaccatagccccgtcttcctctccaccacccagggggccaggtgtgatgcccgcttcacagatgaggacactg

SEQ ID NO: 87241 - DNA, 122 bp, Homo sapiens
ggcactttgggaggctaaggcaggctgctgggaggtggatgttgtagcgagccgagatcacgccactgcactccagcctgggcaccattgagcactgagtgaacgagactccgtctgcaatc

SEQ ID NO: 87242 - DNA, 122 bp, Homo sapiens
ggattttcctttcctcctgaatttcatcactcaggaaatcaatcaaagctttgtctccttcgcacgccacacccacagccggaggtgcagggcccgcgaggccgcagggggcccggccgcag

SEQ ID NO: 87243 - DNA, 122 bp, Homo sapiens
ggcccagccaggagggcgggagaggcagtgaagatcttccctcagagcctggcgagggggcgcggcccagccaggagagctggagaggcccggaggatcttccctcagagcctagcgaggga

SEQ ID NO: 87244 - DNA, 122 bp, Homo sapiens
ggccgaagcagcccgccccactgcgcagggccatgcagggcggccccgctgggtaccgcgcgggccttgctgccctccgcaccccgccccccgctcccgcgggaaacgcagggacgggaacc

SEQ ID NO: 87245 - DNA, 122 bp, Homo sapiens
gtcacattaaagcaaattttgtttttaaaaaaaccctcctatgctgggcgtggtggctcacgcctataatcccagcactttgggaggctgaggtgggtggatcacgaggtcaggagatcgag

SEQ ID NO: 87246 - DNA, 122 bp, Homo sapiens
ctatctcaaaaaaaaaaaaaaaaaaaaagcatgtcctgcagttccctgctgtgtctagaacgaggtcctggctctttggcctggctcagctcttcacactctggccccaagccccttccctc

SEQ ID NO: 87247 - DNA, 122 bp, Homo sapiens
tcaatgcatgttacctcccagggaagcagaaatttaccactttcctcccttgacaggccacggggacaggacaaggcctgagattacaaaaggggctttgtgacacaggagacataacgaga

SEQ ID NO: 87248 - DNA, 122 bp, Homo sapiens
gaaggaaggggggctggcaagggaagggaggctagaaagaaatatctctgaatctggggacgtggaagaggtagccgctttggatgtggaagagaatttctcttgccatcttcaatcttgag

SEQ ID NO: 87249 - DNA, 122 bp, Homo sapiens
ggtgtgctgaaagtttagatgtcacgtccctaaaacgtcagcctgtctgtttccagcccacgccgccccaggctggactttgggaagttctgaacagccccagcttcgctgcattccccaac

SEQ ID NO: 87250 - DNA, 122 bp, Homo sapiens
gccacctctcacggttcagtacccacgcttcgaacgagggatgggagcaggcgccacggccggcaccccagagccctgctgccccttagttcgagcggccatcctcctgtggggcttgtggg

SEQ ID NO: 87251 - DNA, 122 bp, Homo sapiens
tcttgcctggagtcacttagagatgatgactaaaggataaattcagagtcctccaaatggcgtccagtgtccatttcatcacgatttggaacctgtagtagccttatcgcttaacacttcct

SEQ ID NO: 87252 - DNA, 122 bp, Homo sapiens
gcaaggaggggcctcccaggtggccagtgcagaacccgcaagtgggggggagagatggcccgggaggctgcccccgcgctccacagcaagaggccactgggctgctgcctaaatccccagcc

SEQ ID NO: 87253 - DNA, 122 bp, Homo sapiens
cccagccgcatcgccctgactcccgcgcgggccccgccccctgccgctagccaatctgtgcgtttgtgacttttgggcccgcagccccgcctgctcccacagcgataccggtttgcattgcc

SEQ ID NO: 87254 - DNA, 122 bp, Homo sapiens
ctccagaatgttcctcagggaacctctcactgcacagacaagggggcatgagctacccagcgccccccggcgaggcagtcccaggccccgacatttcagctgcatgtggtgccccacaggtg

SEQ ID NO: 87255 - DNA, 122 bp, Homo sapiens
actcaggggagacatctgggccggtgtcatcagggcgcggatgggatttaaagccacaggcgggacaaggtcactagggaagtgagtgtggacagagcagagaaggccaagggaccctttcc

SEQ ID NO: 87256 - DNA, 122 bp, Homo sapiens
agagttcgttgcccagctccgtgccgaagcagaacaggcagtagagcggccagttgctcacgcgggccagctggccctcctcgcccgtcagcgagttgcggcgcagagcgcccgcgcgccgc

SEQ ID NO: 87257 - DNA, 122 bp, Homo sapiens
ggaatgctcagtagttacataacagtgccactaaaggcaattgttttcagtgatttccatcgagctgggttctgcaaagatccacagcactttccggttgcatgctgggcacttttggaagc

SEQ ID NO: 87258 - DNA, 122 bp, Homo sapiens
actagccttaacaagtcaatttcccctcctttcctcctttgatccacacaaggtaggtgccgctattattccatctgggaggtaggaacacgaaggcagagggggactgagtaacttgctca

SEQ ID NO: 87259 - DNA, 122 bp, Homo sapiens
gactaggaggtcagagaggcagccgcccaccccacgcactccctgcttgtaagccggggccgcattgttgtgttaccacacttctgttttagagcctgttacggttttgagttacacagaca

SEQ ID NO: 87260 - DNA, 122 bp, Homo sapiens
tagaagaatcaaacagaagcacctgctccagcccatcatcttcaggaagctgcctggcttcgccgttcccgtggatagggatctccattgtggctgccttccctaggatcccgtccgtcatg

SEQ ID NO: 87261 - DNA, 122 bp, Homo sapiens
gttgcaaaacagtctcctgtgctgctggctttccttcctttgcccagtcttaaatgttagcgctccccaaggttttgtcttttgacctttgacttctgcctcctctcacttactgggtggtc

SEQ ID NO: 87262 - DNA, 122 bp, Homo sapiens
tagatgtgatggcggccgggaagaggtgcttctcacttcctaggtgagatggcggccgggcggagacgctcctcactttccagactgggcagccaggcagaggggctcctcacatcccagac

SEQ ID NO: 87263 - DNA, 122 bp, Homo sapiens
atttaaatttctacactttgtctctcttgagttcaagaactattccttgaaagtcttccccgcaaacccctttcacagcacctagtccagttccttgcatttaaaactagcttgatacatat

SEQ ID NO: 87264 - DNA, 122 bp, Homo sapiens
ccgtcactgagaaagagcccagagcggtgtgggtgactgacgtggaacggagctgctctgcgctgagcgtcggcacttggagacctcgattgaatctattcggcaggagagctgaattcaga

SEQ ID NO: 87265 - DNA, 122 bp, Homo sapiens
cttctcctcttgagtgttctgaattatgttcaacaattgaagcaaaacttataatcttaccgatatggttctcaatgaatatagacaatatatttaagacaagtataaagatagactaataa

SEQ ID NO: 87266 - DNA, 122 bp, Homo sapiens
accaaggaaaaagcagtggtagtcaacacagctcaaacctaatggatcttatgtacctgccggaaagaataaaaacctctggatgtttccatgtgtggtaggattggggagtccctaggaaa

SEQ ID NO: 87267 - DNA, 122 bp, Homo sapiens
cccgccccgcctcttccccctcccgcgcgcccgcccgccgcctgccgccgccgccgccgccgccggagctctgtagtatggcatcgaggagaatggagaccaaacctgtgataacctgtctc

SEQ ID NO: 87268 - DNA, 122 bp, Homo sapiens
agccagctcacaaatcaagcctcagaaagagctgacatcctagctcttcccggaaaaactcgaatgtcgccctgccgttcctggggttggtgacaggtctggtcatcgcacggcggcagctc

SEQ ID NO: 87269 - DNA, 122 bp, Homo sapiens
ggactcggagggctgctgtggtccggactcaggtggacagcagagggcagcctctcacagcgctggctctcggcaggctcctgcggggcatctggaaggaggaagaggaaacctggctggga

SEQ ID NO: 87270 - DNA, 122 bp, Homo sapiens
tttaaatcaaaggattaaaaaaaacactgtgtagtttgaacactggggtcatttggtgtgcgtgtctgtgttttaaaacaagcattagagggatatttgcccttcagcaggaaggaattccg

SEQ ID NO: 87271 - DNA, 122 bp, Homo sapiens
gccgctctcgcccggcccgccaaggccagcgcgcgccgtctgctgcgggtgtgatccctgcgcaaccagggcagttttcttattttgaacccattttcaagaaatgaagtttaaagtcacct

SEQ ID NO: 87272 - DNA, 122 bp, Homo sapiens
cggcaacagcctatgaggccgcgttctgatggacctgcggccgtgaggcggggacctatgcgcagggcacctctgtgctccagagccgggcgcggggctgggcgtgcacaaagtgctcgctg

SEQ ID NO: 87273 - DNA, 122 bp, Homo sapiens
gcgttctcttcgctgaaaaactcgtagggcagctgctgcgcctgcatggtgcccccggggcgcctctgggcggggagaggggcggcggcggccgggccagggagccgcgagagggcgagctc

SEQ ID NO: 87274 - DNA, 122 bp, Homo sapiens
agaacccgggggtggagagaagaaagcaagcagctaaccggaaaggtctgaaaaagctagcgccggaagttaaactgcagaaagttgttccctagaatgactgcctactcccaagaggaagc

SEQ ID NO: 87275 - DNA, 122 bp, Homo sapiens
gacatttttaaatgattcttaattgcagggtagccaagtggagtaggtctgttgctggcacgtgaatactggctgaacctgtgcaatgtagtaattgctaaagttggcatctgctacatagg

SEQ ID NO: 87276 - DNA, 122 bp, Homo sapiens
ccgcgccgccaggagggggattaatggctgccgccgggtggtgacgtcaccggcagcacccgttgccaggcaacgcgcggccaccagccccgccccgctggccccgcctcctacctgctgcg

SEQ ID NO: 87277 - DNA, 122 bp, Homo sapiens
ctcagctgagaaggcctaccacgagcagctgtctgtggccgagatcaccaatgcctgcttcgagccagccaatcaaatggtcaagtgtgaccctcgccacggcaagtacatggcctgctgca

SEQ ID NO: 87278 - DNA, 122 bp, Homo sapiens
cactcgcagtgtttccatggatacgggaggggcggggcgggaagagagagcgcgggaaaacgtgactcctgattggccagaagtatcccgcgcctcccgacctttggccgctggcattcctg

SEQ ID NO: 87279 - DNA, 122 bp, Homo sapiens
ggaaggtggtggggcggcgactgaagtcgcttccgattggcgttgtcccaaggaagcctgcgcggattgatcggcggcaggcctccaatagagcctgctaggcggattggctgctacgcggc

SEQ ID NO: 87280 - DNA, 122 bp, Homo sapiens
gtcgccgcctgacccgcgtccgctccgtctccagcgggaacgaggacaaggagcgccgcgcgggctcccagtccccggcccgggccccctccacgagcccgccgtcgtcccgggtcccgttt

SEQ ID NO: 87281 - DNA, 122 bp, Homo sapiens
tgtttctgggagaagtcagctttcatatcacaaagacactcaagcagcactgtgaagaggcgcaggtggtaaaactgaagaccttcacaaacagccagcactaatttgccaaccaaatgacg

SEQ ID NO: 87282 - DNA, 122 bp, Homo sapiens
catcttgttacccctcactccactaggcccccacccgcggcctccgcctccaggagctcccgccttaggcgtagagatgcaaggctgaccaatcgttgtcactcttgctcccacgccatacc

SEQ ID NO: 87283 - DNA, 122 bp, Homo sapiens
tgattgttcaggcctgttgcttttgattgaatggagggtcaggggacacgggagccatgacgctcttttcactggttccactggggactgtgaaggaatccccaagcgaactctttaaactt

SEQ ID NO: 87284 - DNA, 122 bp, Homo sapiens
gggtacgtaaccctctgtgctgttgtccagcagggtagaaaagcggaaggtcacagaccccgtgggagccctgaaggagaagtacctgcggccgtccccgctgctcttccacccccaggtac

SEQ ID NO: 87285 - DNA, 122 bp, Homo sapiens
tagcgcaattcctaggtctcgcctgcctgccaccgcagaaatagacatgccaggggaaggcggaagcacccccccccccacccccgccgcctccccgagtgtgcaggcatccttagaagtcg

SEQ ID NO: 87286 - DNA, 122 bp, Homo sapiens
gctggccagactcctcccccttctcctttatctttcctccctagccagcttctcctcccccggaggtggctcaggctccctgggtcactgcttcccgccagctggagaagggaggcagcagc

SEQ ID NO: 87287 - DNA, 122 bp, Homo sapiens
tggggttttgaaaagaggaccaggccacatcttgaaatgaaatcatcttagggtttcccacgattaactcactttttgttttgattaaattacttcccctttttgaggtgatgggggctcag

SEQ ID NO: 87288 - DNA, 122 bp, Homo sapiens
ctccagagtattcttggtctcctgagggatgctgcaaaaccctgcaggttaaattaaacgcgccttcttcagaaccatctttgttaaatatgaaaagacactacctccgacaaacacccaag

SEQ ID NO: 87289 - DNA, 122 bp, Homo sapiens
aatatatttgaaagcggctgggaaaataaagtgttctaacacatttttcgtattttatgacgttctttcccaggacgggtccttctaagttttagaagggaactaggaaaattgcatacatt

SEQ ID NO: 87290 - DNA, 122 bp, Homo sapiens
tatggttaccgttgctatgaaggagggcggccctgctgacccagagccagccctgtctcccgctccactctgacctcacccctgagtccagggctgaacgcacgctcctccgtggcccccgc

SEQ ID NO: 87291 - DNA, 122 bp, Homo sapiens
aagccgactgcccggcggggggtgggcagcccgggagccacagggctccccagagacagccgcttgggctgcaatgtctccaagctacagtcccgctaacccggttggtttcccaagcatgt

SEQ ID NO: 87292 - DNA, 122 bp, Homo sapiens
gccgcctgagaggaggtcgagctgccgccggggcgatgctggaggagctggagtgcggggcgcccggcgccaggggagccgccacaggtcggttcgggcccgcgccgaggggaagggggggc

SEQ ID NO: 87293 - DNA, 122 bp, Homo sapiens
tctcttctcttctcttcctcctccacttctgtgcccgcggagactccggccgcccccttccgcaggggtgtagtaatctgcggagctgacagcagccccgcagccaccctgcccgaagtctc

SEQ ID NO: 87294 - DNA, 122 bp, Homo sapiens
gcgtgggccacgtgcgggcgccacgcccctcaagccccggaggaggacggtccccgcggccgggtccccgaacccagcattcaggcccagacgcgcccagagcctcccgcagtctcgtcggc

SEQ ID NO: 87295 - DNA, 122 bp, Homo sapiens
tggagggtggcggggaggcccggggcgctgcctcgcacggcgccaccctgcacctcagcgcgcccaaagcgcagcgagggtccctgtaaaggtcgcaggactgggcatcccagacctcagag

SEQ ID NO: 87296 - DNA, 122 bp, Homo sapiens
tctctgccaagcggggaggtggccgggggagggccctgctctgtgcagcctcccctcccccggcccgcagagttgagcacagagggacagaggcacggaacccccagaaatgtccctcctca

SEQ ID NO: 87297 - DNA, 122 bp, Homo sapiens
cttcagtcatcctaaatgcgcgtttcctgctgcaactcagacctacccacagccagccaacggcctgtatcaagccaccacagtttgtcacctggactcggacaaaggaggatccctttatc

SEQ ID NO: 87298 - DNA, 122 bp, Homo sapiens
aaggcaaactcctctttatctggttactcttctcccaactcttaaatgtatttcctgccacgttctattttagagcttttctctgttggagcagcagccactttttttgaggcccatttaaa

SEQ ID NO: 87299 - DNA, 122 bp, Homo sapiens
catggccacgggccctggtctctgcgatttgccgcccacctcctgggccctccggcccagcgactgacctgtcaggagcgtccctgtggccacgcactccaggactcgcctgactgcatccc

SEQ ID NO: 87300 - DNA, 122 bp, Homo sapiens
aatcgaaggcaattaggcgctgcttatctgggcattagccgtgtatgcaaaccgggctcccgccccctcctcctgggcttataaacgccgccgcctggcgaggcccgaggtggatcctgcgc

SEQ ID NO: 87301 - DNA, 122 bp, Homo sapiens
caatgtctacttcagccagctcaagggcgcgacaacctggcgccgagcatctcaggccgccgcggggaccccccctaagggactcgggaacacctgcctaccctagaagaggcggagaataa

SEQ ID NO: 87302 - DNA, 122 bp, Homo sapiens
tcctctgtgaaaccttctcccagacaccgtggcgatggtactatactgtctgtactcacacgcatagcattctcgcactttgctgtttacactttacttccagtagtccatgaacttcaaac

SEQ ID NO: 87303 - DNA, 122 bp, Homo sapiens
ctgcaccgacgaggaggcagccgtggtccaaagtgtaagtggccgtattccagtcgtggtcgcggagctgtaactcgagcttaagatcccgcctctgtggtgtgcggggcccgaggctgtac

SEQ ID NO: 87304 - DNA, 122 bp, Homo sapiens
tcacatggtagttctctgttcaactgatggggacctgccaggctgcttcccacgcagccgcgccgtttcacctccccgccaacaccacacgggcctgtttctgcaggtcctcagtgacgcgt

SEQ ID NO: 87305 - DNA, 122 bp, Homo sapiens
cgaccttcaacaggcttaaggcctagagtcacaggtttaatggtggagtgacagcttcagcggagaccagaaaaggaggcatgctgaacttacagcccccgtggctctagctatctttaaga

SEQ ID NO: 87306 - DNA, 122 bp, Homo sapiens
ttccaactttccagtgtttatcccggctcctcgctgccaagtccctgggcaagcctgggccggtggcgctgatttcaaaccagacatgggcaccgagccaagcgccacctcggtggggagcc

SEQ ID NO: 87307 - DNA, 122 bp, Homo sapiens
gatggctgccaggcctcgaggcctgactcttctatgtcacttccgtaccggcgagaaaggcgggccctccagccaatgaggctgcggggcgggccttcaccttgataggcactcgagttatc

SEQ ID NO: 87308 - DNA, 122 bp, Homo sapiens
cagtaggagagaattgtgataaaactcatagccaccatttcttgaatatctactatgccccgggacacagcagactattttagagaatttgcgaaggaaacacagtgacatctgttggacac

SEQ ID NO: 87309 - DNA, 122 bp, Homo sapiens
gccgcacccagagccattcactcctctccttcccattcacaggacggtggcgtccctgagcggacatccaccctggcctgcagggtgggccagccctcccggtcgctgtcatccacttgacg

SEQ ID NO: 87310 - DNA, 122 bp, Homo sapiens
aaccctcacaggccagctggaagtgggcagaaaccctgtgggtcccagaccctccccaatcggccgctgctcccacctctcccgccccaatttttcagcagctcgattcctgcggatcctac

SEQ ID NO: 87311 - DNA, 122 bp, Homo sapiens
taggtgcagcccctggagtcgtggctgtgggcataggtgccagggaggggaggcccgggtcgaaggcataggcagaattggagccctgggttgccaaagcgtcgcagctaagaagccggagc

SEQ ID NO: 87312 - DNA, 122 bp, Homo sapiens
ccgcctactctcgctggcatccacccgctctggagcgcgccgccgctttttgcatctccccgaggtttctggtgcatggatagaagcaacttgactttcagcgatgccaagtgtccaacttg

SEQ ID NO: 87313 - DNA, 122 bp, Homo sapiens
ttttcctgagaagtttaggaagagtactcgggtactcccaccactcggagtacccgagcccggcaagaggagctctcacttctagctctgcactgaggattgtaaatggccccggggagggg

SEQ ID NO: 87314 - DNA, 122 bp, Homo sapiens
aacaatttttaatggctgtatttcatggtatgaatattacataaacattcccctattgttcgacctttaaagtatctaacttttctatgcaatacacattgtggtgctgaacaactttttgc

SEQ ID NO: 87315 - DNA, 122 bp, Homo sapiens
gcgcgtccacacgtgagccgaggagcgcagcttagcgcctagcgttgcgcacagcgggtgcgctggaccagagccctaaggcaccagaccaaatctggagcgtttgttacaagggcagaaga

SEQ ID NO: 87316 - DNA, 122 bp, Homo sapiens
tcagccacccgagctgggggcctcgcaggtctcagaccaagctccccgcgcggcctgcagcgcacccaaacatggccaccgaacccgggttcccggggcacagccgcgcctctgggtgacgc

SEQ ID NO: 87317 - DNA, 122 bp, Homo sapiens
agcgctggggcccaagaggcccatccgcggggaactgccagcgcctgccccaggccgtaccgtcgagggggctgtactggagcgctcacagccccaaccctggctgccctccctcagtctca

SEQ ID NO: 87318 - DNA, 122 bp, Homo sapiens
cctgcgtctctggaatctttgtaactccagtgcccacagggcgcctgccacaaagaagcacgttataggaatgaatgaatgaatgattgctcacaaagaacaatactaacataaaaatacca

SEQ ID NO: 87319 - DNA, 122 bp, Homo sapiens
aggcacagagtaagcccccgctcattaattgccttcccttactccctgaccttgccttttcgcacttcactcgctgccacgtggcctcggagcccagtccgcacccgcagcccccagctgag

SEQ ID NO: 87320 - DNA, 122 bp, Homo sapiens
agggcatcgagaagaacctgggcatcggcaaagtctcctcttttgaggagaagatgatctcggatgccatccccgagctgaaggcctccatcaagaagggggaagatttcgtgaagaccctg

SEQ ID NO: 87321 - DNA, 122 bp, Homo sapiens
cttcactcctcccataagcatctggcctgtctgcaatgtcttcaaggggctcagactggtcgggaaccaaggtcaactaaactgaaatgattgtaagctcctaggatggaaaggttgggtaa

SEQ ID NO: 87322 - DNA, 122 bp, Homo sapiens
ctgttcatggtctaaatccctgtactgtccctctctgcagggccctgagcaccccaaccccgggaagaagttcaccgcaagaggattccctcgccactgctatctacccaacaacgagaaag

SEQ ID NO: 87323 - DNA, 122 bp, Homo sapiens
aattatactctagaaatgtggtcatagaagctgcagggcccctgcgctgggctcggcacccgctccggcctggagagcggtcagaggtcccacccacgtccctgcctgcctgccatggccag

SEQ ID NO: 87324 - DNA, 122 bp, Homo sapiens
tacatgcgggattatggaactctgggtctgacttttccgagcagtgggaagtgctcacttcggatccactttggctcagggctgtgctgacgttttctccgctgtcactcatccaggcacca

SEQ ID NO: 87325 - DNA, 122 bp, Homo sapiens
gggattacaggcgtgagccaccggccgctgatggtattctttcctgagggcagattttcacgccagaagccccgacaattatacctgagctggttccacctaagctcaatcctccttccctg

SEQ ID NO: 87326 - DNA, 122 bp, Homo sapiens
aggttgttgaaggcggcatagtcagagatggggaaagtacagggagaattccagccctcacggggagttgggtcagctctctgaagccttttggtctaatgttttgtggttccttgaattat

SEQ ID NO: 87327 - DNA, 122 bp, Homo sapiens
attgcagggttggtttaagattgccatgaccacatattaatagttgcactgagaaacaggcgtaaacagaggttgtcccgggaaaggcagaatgaatgtcacccaccctggggaaggtggct

SEQ ID NO: 87328 - DNA, 122 bp, Homo sapiens
caatcttacatcaagaagataggccttgctagcaacaaggaacattaaaatatgtctttccgtttatttggtttgtgatgttccttcaatatcttagtacttttaaggctgagagcagttaa

SEQ ID NO: 87329 - DNA, 122 bp, Homo sapiens
tgccacagccacgcacaggaccagcgttagcagagtgcaacaccctccgtttggatccctcgttttcagggtaagcagctagggagctgctgagataatattgcagggaaagcttgccttcc

SEQ ID NO: 87330 - DNA, 122 bp, Homo sapiens
cagtggaagctgagtatgcagcccacttctgcacccggcacgctcagtcctagaattgcacggggatacctctgatcaaaaccttcgggccggtcagctctggttttagcagaagtttccct

SEQ ID NO: 87331 - DNA, 122 bp, Homo sapiens
cagagtcagcgcagccctgaggggcgcagccggctgcctctctcccacccaaccccgacccggccctgagtgcagcctcacctaatattcggcacacatcatcacagttctggttgatttcg

SEQ ID NO: 87332 - DNA, 122 bp, Homo sapiens
ccattggagtatttatgtataatcacatcctggagaggccagcgatgggctcagggattacggaaatgaccttcatgaacaagatagtccctgcaacaaaacaggttttttgatcctccgtg

SEQ ID NO: 87333 - DNA, 122 bp, Homo sapiens
ttaggaggaaccgagaggtgggtatccatcctcgtctgaggactgattcacagtgggagtcgcttagcagggtctgtggcccgaaatccagtggtgacctcgacccgccccagcctagttcc

SEQ ID NO: 87334 - DNA, 122 bp, Homo sapiens
ggcgccggcgctcaggctcggggtgatccgcacggtgggagcggggcacggtgatcgcggcgcgtctggggacgcccggcctgagggaggctgcctgtcccaaggagacgcccatcggggcc

SEQ ID NO: 87335 - DNA, 122 bp, Homo sapiens
gagcagctccctccctgccatctattgaaaatcagatctccacacaagggtctctccacccgtgtgtgggggacccggtgatatggcgtgtccttgtgtaattcaacctttgacgtgtactt

SEQ ID NO: 87336 - DNA, 122 bp, Homo sapiens
ttctgccccttgtaagagaatagtgttccctgagcttggggttcctcggctgtgatgcaacgcctctgcctgcacaacatccatgtgagcccctccatgtcatggctatgggacttgcgggg

SEQ ID NO: 87337 - DNA, 122 bp, Homo sapiens
gcccgaggtgactacgacatccatttactatgacagtctaaattttctaggactcaaccacggtatttcagataacatctttactatatctattacaaatctgtaaatcctgaagtgaactt

SEQ ID NO: 87338 - DNA, 122 bp, Homo sapiens
agtcagcactctaacccaggattaaaccatcccatcaagtagtatgtgaagtcaagtcttcgtactcttgcagaccagacattgaaatggattcattcatatagatttctataaatcctata

SEQ ID NO: 87339 - DNA, 122 bp, Homo sapiens
atgatcaatcccaatcagatgatgctgactgtcttaaactaaaataagctccagtgatcacggcagacctaactgtggggtgggggcggggaatcatgttgaatgcaagaaagactaaacaa

SEQ ID NO: 87340 - DNA, 122 bp, Homo sapiens
tgcatattctgtcacctgtgctagaaaaataacagtgacaagtaacttgtacctggtagccggaggacaaggacaatgtattctattcaacttctcttacttctcaaaactgtttagtacaa

SEQ ID NO: 87341 - DNA, 122 bp, Homo sapiens
gatttttgacccccacttgccattgttccttgggcatattatctccctcatggtgacaggcgaccatgatcaaggataagtttcagaaatccctctgttccccagccaaaataccacaatgc

SEQ ID NO: 87342 - DNA, 122 bp, Homo sapiens
ggtggcgcgctgcgccccagcccggactctgcctcggcggctgccgggtcctcccgaaaccggggagggctcctcggctgcgcccagacggcgtaaatacaaacctcctattttattcctag

SEQ ID NO: 87343 - DNA, 122 bp, Homo sapiens
cgctgccttttgaagtaggtctggtagaggttctccaaggactccggcacgaaagtcagccgcatgaagcgaggcaggcacaggcaggagcccgagttccggaccgagatttcatgggtccg

SEQ ID NO: 87344 - DNA, 122 bp, Homo sapiens
gccccgcccacccggaggatcttggggctggtctgagtccgctcctgagacgtgaccacccgccccgcatggggccccagtcccagctgcttgatccggctcagccccgaggtgtttgcagc

SEQ ID NO: 87345 - DNA, 122 bp, Homo sapiens
agaactggaatttagatttcagttagtaagctgaagtcatatcatagctgtgggattgaacgatgtggggttgagtcaaacacaaggaagtactggcagctccagtagccgaaaagtggaga

SEQ ID NO: 87346 - DNA, 122 bp, Homo sapiens
cagggagaacgacccccagactgaccaaagcccacataacgcacctatgtcctaccacatcgccagcaccatgcccaagagaaaggctgaaggggatgctaaaggagataaagccaaagtga

SEQ ID NO: 87347 - DNA, 122 bp, Homo sapiens
gatgatctgcctgcctcggcctcccaaagtgctggaactacaagcctgagccaccgtgcccggccctgaatcgctttagtaaataaagggtctccaagaataaattcatccgaacatgcatc

SEQ ID NO: 87348 - DNA, 122 bp, Homo sapiens
ccgttctgaggcgcccgctgtgcccggctcgttgaaccttgggcgctgcccgttctgaggcgtctgctgtggcccttaccgtctggcttctctgctggctcttttggccttggattcatttc

SEQ ID NO: 87349 - DNA, 122 bp, Homo sapiens
gggaccccagggccggaggtctgccgccccactcggggcttcctgctgcttccgagctgccgggggcaccaccaaggagctcccggtataagtctttgttcaggtggctggccgcggcttcc

SEQ ID NO: 87350 - DNA, 122 bp, Homo sapiens
gggcagcggagaatggagggtccccgtcctcctccagctccaacgacagcgccagcgccccgccgtcccgccgcccttccttgaaggatgcccgtgtcacctgagccaccgcgccctctgca

SEQ ID NO: 87351 - DNA, 122 bp, Homo sapiens
tgcccagactagtcttgagctcctggtctcaagcaatcctcccacctcagcctcccaaagcgctgggactatataggcatgagccctcacacatggccgtcatccattcttttactcaggta

SEQ ID NO: 87352 - DNA, 122 bp, Homo sapiens
tccccccaagaaccgctgcacttcctagtcaaaagcaaattattgattcgtgaggtcagtcgctcccaacagtgggcggattgcccactggcctcggattctccttacccctccacaaatca

SEQ ID NO: 87353 - DNA, 122 bp, Homo sapiens
gacttggacccgaccggctggggaaggtcatgcctgcctttgctgtttgttgcagtaacacgttgctcacagcaagctgtcttgggggtgtggtagagctgagatgtgagaatgactcataa

SEQ ID NO: 87354 - DNA, 122 bp, Homo sapiens
catcaaaaagtgtgtttggatgaataagtgattaggacagtcagtaagtgcagtgtcttccgaagacaaggatagaagtttaggctgatagcaaaagactaaagctgatagactgggcaaat

SEQ ID NO: 87355 - DNA, 122 bp, Homo sapiens
ccagccctacggaagttgcttttactcattggaggaagaacacgttggcttttctcttgacgtggatggtgagtacctttctatgagggtgataaggatccactgagttttccgtatagaga

SEQ ID NO: 87356 - DNA, 122 bp, Homo sapiens
cgccggcaagagctcggtgctggagaacttcgtgggccggtgagcgggcgcggcagggatcgcgggcgggtggcggcctagggcgcggagggcggaccgggaatggcgcgccgtgcgccgcc

SEQ ID NO: 87357 - DNA, 122 bp, Homo sapiens
gatggggtttcacgactctgccgtcggtggcgaacggtgtccgtggcaaccgccttctgacgtcaagagttcttgacgtcatgccagcatgagatcacccgtggcactccccgccttggttt

SEQ ID NO: 87358 - DNA, 122 bp, Homo sapiens
ggcctcaagtgattcacccacctctgcctcccaaagtgctggaattacaggcatgagccacggtgcctggcccaaactgcatatttaaagggtagagtctgatggctttaggtacttgtcac

SEQ ID NO: 87359 - DNA, 122 bp, Homo sapiens
gaagggctgctcaggcggagccacctcgcaatccaggggtgacctgggggctccccgggacgcgaatgtcccgctcccccgccgccccgccccgtccggattctccctcgcctcttctggcg

SEQ ID NO: 87360 - DNA, 122 bp, Homo sapiens
gcacaaggagtgctatataaatgcaaattttattgtatttcactctagacctcagagactcgccaaacttggttctactctgaagaagttttgccctaaaggggttagggaggcttcctcac

SEQ ID NO: 87361 - DNA, 122 bp, Homo sapiens
gtcccatgagatgaggtgactccaaggacatacctgatggttgcagaggtgggactttcacgcttgtctcctaggctcttcccacccctctcctgttggcttaaaaccaagatctttatttt

SEQ ID NO: 87362 - DNA, 122 bp, Homo sapiens
ggcggacactgcaggacggaaacacacaagctttctgtggagtccctgtaagacagacgccgtacgacatgaaaaggccggatccccctgcgctggcgccaacacaccagattcatccctcc

SEQ ID NO: 87363 - DNA, 122 bp, Homo sapiens
gacaccaggctcagaggggctgactgaccagccaaggccgcacaacagagctgctgggagcgggtccctgccaggccgtgggacacagggaccccggctctcgctgcctctgccccagcccc

SEQ ID NO: 87364 - DNA, 122 bp, Homo sapiens
ttggtcaatatttgcgcctctgtccactgagtctgctgtttgcatcagctatggtgagggcgcaggaggggccggtcttgggcattggtggacagaccaaggccaggagcagggtgtcaggg

SEQ ID NO: 87365 - DNA, 122 bp, Homo sapiens
ccagaaaccttctaaactcagcttcccagaaaacatacgggaattcactgagacctgtgtcgagacctaaatgatcacaagcctgcagacaggaaaaaatccttcacttctcatcaaattag

SEQ ID NO: 87366 - DNA, 122 bp, Homo sapiens
gactcctggcatgtctgaacactcacattccccaggcatgcatgtgcaaccgccgccatgcgtgtactgtgacgctgacccctcctgtagcagccatggtcttggcctctcgcgttgctggc

SEQ ID NO: 87367 - DNA, 122 bp, Homo sapiens
ttaatcatggagatgtacaggccacagcatttaatccacagtacaataaaacctgttattcgttaactcatcaagtatgtattacatgattcttgcgataagagaggtgaaactgcccccag

SEQ ID NO: 87368 - DNA, 122 bp, Homo sapiens
tagcatcaccaatctctcccatgcagaccctgtcccttcctgctacagagtgagcggaaacgcttcatccaatccaggaggcttcagcaaaataaaatgtcatgtccaaaaccaaggtcttc

SEQ ID NO: 87369 - DNA, 122 bp, Homo sapiens
gtcattagtgggacctcactgtaaaatcctgtagctgtgggggctttcccagacacttgacgtagcaatatccacccgaaagttgaaatgcataggtgaagtttaacaatctgcaaccaatg

SEQ ID NO: 87370 - DNA, 122 bp, Homo sapiens
acagtaacagaagggctattttaccgcccagttcctgccaggagggccaatcagagccttcgccgttcccgagacccgcccccttctctcttacagtttgttaaagacacaggcgtgtaatt

SEQ ID NO: 87371 - DNA, 122 bp, Homo sapiens
tgcggatgtcgtcccgcaccaggccgggaccgatttctggctccagtttccccagaattgcggagtgcgcacacctggaaggacccaagtcccgttttatagttgagaaactcaagactcag

SEQ ID NO: 87372 - DNA, 122 bp, Homo sapiens
gcaggggtggccggaaccaggaactggccctgcgtgttggagcagagttgagaaggtggccgctggggccgatagatgtgctgtttttgagcggtggcaccgatgggcaggatgggcccaca

SEQ ID NO: 87373 - DNA, 122 bp, Homo sapiens
cctattttgtgggggatggggaagcccacagaaaagccccctgatgggggaaggagcaaccgccaccccgcccatgtgagaaaagagcccagcagccaaatgccggtgcaagtatttactta

SEQ ID NO: 87374 - DNA, 122 bp, Homo sapiens
acacacacacacacacacacactcccagtcccatctcatgatgcaacttgcatattaaaacgcctctcggtaaccgcgccgggcagtccgcgccccacagcttccaccacattcctccaggt

SEQ ID NO: 87375 - DNA, 122 bp, Homo sapiens
tgcccagctcacagccctgcaggagctccccactgcctccagggccaaactccagcacaccgtcaggcacacagggccctgtgtgacttggcctctgcccacttccagctcccacggctccc

SEQ ID NO: 87376 - DNA, 122 bp, Homo sapiens
aggttctttccggcatttgtaatttccaatccacttaggacacttctactcctcagaaaccgtttctgtcggggccgtgagaggagacagtataagacttcctggacccaagggacgccggg

SEQ ID NO: 87377 - DNA, 122 bp, Homo sapiens
ttagaaaaaattaaacaagcagcaacaggtccagacaattagcaagtggcagagctgggtcgttcccaggctccagactgcccacctgttccagcccaccatggggcgtctcagcctccctc

SEQ ID NO: 87378 - DNA, 122 bp, Homo sapiens
atccagcctagataaagtactcagctttattgagctacagattcctcttctgtaaaagaacgtccacctcataggtagcttaaaattaaatgtgataatgagtgtcaagtgctctgcactgt

SEQ ID NO: 87379 - DNA, 122 bp, Homo sapiens
ggatctgggcgcgtgcgcagcccgagacctcccggcagtcttccgagcaagatggcgccgcgggcatttcttccactgcccgtctgagggaacgctaagtagtgtgtccggcgccgtgttcc

SEQ ID NO: 87380 - DNA, 122 bp, Homo sapiens
ccctcctcccacagccctgatcccgtaccggtcctggcagctcctggcctcagtaggaagcgtgactaggcctggaggagcctttcctcctaagagtctccccaccaccccacctgcgggca

SEQ ID NO: 87381 - DNA, 122 bp, Homo sapiens
cttccctagttttaagactagacaccctctccacatcagcacaaagcgcttttatttaggcgcgtgccgccaaaccaaaggcgctcgcgccgagctaagctcctgtcggtgagcttacgtca

SEQ ID NO: 87382 - DNA, 122 bp, Homo sapiens
tttacaaatgtttataattactatgaagatttacaaaaccctaaaacctatagcaaatatcgaacactcattacaaacattctaagtatttaactaattttagatagaaaaaactctaaaat

SEQ ID NO: 87383 - DNA, 122 bp, Homo sapiens
cgtccatgaaaggtggcacagctgtcatgggcacagagtcgtgctgcaccgtgtaccccacgtatgggggatgcagatactgcccttgatgtggcacaatctgggtggcctgctgacagttc

SEQ ID NO: 87384 - DNA, 122 bp, Homo sapiens
cgtggggtaggtaaagaagggctccgtgggagagggggctgatgacgggacctcgggcagcgtagcagacgcagcttacacagttcgccctcagccccggttctgatccgcggcctcatgtc

SEQ ID NO: 87385 - DNA, 122 bp, Homo sapiens
gtctagcgccagccttttcaaaagcagcccttttgataacactgattacatttccctcaccggagccttgggttaattgagcaacagccaacttctctgggtaacaaagaggaggggaaagt

SEQ ID NO: 87386 - DNA, 122 bp, Homo sapiens
cccccggtagaaaatactaaaaagtgaataaaacgttcctttagaaaacaagccaccaaccgcacgagagaaggagaggaaggcagcaatttaactccctgcggcccgcggttctgaagatt

SEQ ID NO: 87387 - DNA, 122 bp, Homo sapiens
cagtggagcggggcctggaaggacagtgacgcaggagggagccgagccgctctggccccacgcctggcaggcgactcccgggccggcctcgagggggcgtgggcgcggggagggaaggcgca

SEQ ID NO: 87388 - DNA, 122 bp, Homo sapiens
agtgactggagcagagagaagttgcggagcgctgctggaagcttctgcccgggaaggcgtcgcccccgagactgcagccggaggagccgccctcggcttcggagcgccggggagggagccgg

SEQ ID NO: 87389 - DNA, 122 bp, Homo sapiens
gtgcgtgttctctgtccccatctctgtaattctctgcagacgcgcaaccatggactgcgccgcgtccctgggcacccccagcattacccagagtgcaacaacaccatcaggagatcaatgac

SEQ ID NO: 87390 - DNA, 122 bp, Homo sapiens
aaatgactgcataagccaaaaggaaataaaactcaaaattatctgtgaatataaaatgcacgatagcttccagtggatctgcagactggaatcaactaccacaggggtccccaggaattcaa

SEQ ID NO: 87391 - DNA, 122 bp, Homo sapiens
tcttgataccctaatcttgcttctggatctgttctttttttaaaaaaacttccttcaccgcgcctataatcctagcactttgggaggccgaggcaggcagatcacggggtcaggagatcaag

SEQ ID NO: 87392 - DNA, 122 bp, Homo sapiens
atgtgtgtgtttgcagggccgtaggggtgactgcaatgctcccatgtacagttgtgcagacggtgcactgcacaactccaggggacaccattcaggaagcaggcagtatgtgtgaatgatgc

SEQ ID NO: 87393 - DNA, 122 bp, Homo sapiens
tggagcatctgagctcgctgcccacgcagatggtgagggcgcaacccggggacctctgcacgccgttcttgtgcctggcagcttcgaagcccatgttggagcaccgacccggtgctgcgctg

SEQ ID NO: 87394 - DNA, 122 bp, Homo sapiens
gaagctgcagacgttcgcggtgcgtgttatagctcttaaggcagcacgtctggagttgttcgttcttcccagtgggctcgtggtctcgttggcttcaggaatgaagctgcagactttcgcgg

SEQ ID NO: 87395 - DNA, 122 bp, Homo sapiens
tgccagagtggacacatccgtatgagagccacagtcacagcaaatgccacagggtgtgttcgacgagcatgatgaacacctgccttttccccagatgctcagatggcggcgtggctctgggc

SEQ ID NO: 87396 - DNA, 122 bp, Homo sapiens
tccttggaaggtatgtgcctatagtaaaaagcatgagtaagatatcacatctcctaactccgtaacaaccaagcaaacttataatagcattttaacttatatcaccttttttataggagcgg

SEQ ID NO: 87397 - DNA, 122 bp, Homo sapiens
aggtggcagagggtaccgggatgggacaggaacagagaagtccccatgggactgagcacccgatactccacctgggtccgtttgtgtctgacatttcgccacctccggatcctgggcagccg

SEQ ID NO: 87398 - DNA, 122 bp, Homo sapiens
ggcctctttaaaggagctctcaaagaaaggtacccggggtatcccgggctgtggagcaagcgcggggcgccggggacccgggtttcccacgcagccggggacgccgttgcgtcacggcgcct

SEQ ID NO: 87399 - DNA, 122 bp, Homo sapiens
attattttcgtccccagaggaaggcggtgagtaggttacattggaaaaggtggcaattttcgcttgtttcaggtggctttgagatcctgtgtgggctcatttttctgggtgtctgcggctga

SEQ ID NO: 87400 - DNA, 122 bp, Homo sapiens
cgtgatctgcctgccttggccacccaaagtgctgggattacatccgtgagccaccatgcccggcatgattgggataatgttacaaagcaaaaaagcactaaagagcacagaatggaatgctc

SEQ ID NO: 87401 - DNA, 122 bp, Homo sapiens
tttctctcgataaggggtgacccggttcagcaggagagagttgtgcatggagctgtcccacgcagcctcaaattggtaaaaggtcctgaaaggaagcagagacaaagtagaagttgatggcg

SEQ ID NO: 87402 - DNA, 122 bp, Homo sapiens
gctagttttatttgttctatgagttgatcttccatatcattagccagttcctgaatacgtcgagctatggtgtcattggaaagtggtacctgagctaccttctttgctgcagattcacccaa

SEQ ID NO: 87403 - DNA, 122 bp, Homo sapiens
aaaagtccctctgtgggcaaggtctcggagacgtctggagctcttgcccagctcccctctcgcgtggctggatcgtgtttccttgcatcacgatggggagggttcggaggttcacgcggcaa

SEQ ID NO: 87404 - DNA, 122 bp, Homo sapiens
ctgcgcggggactggcggggctggcggggctggcggggctggcggggctggcgggcccggcgcactgcgggtgcgcctagaaggcggtgcccgccagggggcgctcgccagcctccccgcca

SEQ ID NO: 87405 - DNA, 122 bp, Homo sapiens
gcactttctcctccaaactgctgacgcgactctcaccgccttctcagctaagccagctgccgggaaggccagctctccgtaagaacctgccaggggaagggattctctgggccaaggggacc

SEQ ID NO: 87406 - DNA, 122 bp, Homo sapiens
acagaattcctaagacgccgcgttccatttcgtttttaaggagtccgatcacatgcgaagcgcccctgcgtcttaagcccagcttttggaaggcactgtccctttctaagggaactatgggt

SEQ ID NO: 87407 - DNA, 122 bp, Homo sapiens
cttttatgacccttgcagcgagaagttcaagacagtctgtcactgcttgggggtgggggccggggtggtggggagtgtggacttaaacccaggggtgcttttggtccagccttatctctcct

SEQ ID NO: 87408 - DNA, 122 bp, Homo sapiens
tttattcatcactgaattctcctgagagttcagcagctcctgtgagcatggaagtgcccccgtctcaatctttttggacaatgaagatgcatattccaaaggttagatttctctgaaatgac

SEQ ID NO: 87409 - DNA, 122 bp, Homo sapiens
cagttgtgcagtgtatggtaaggatcttactcaaattagtgtctattttgacaataacaccgcagcattaacagaacttgactagtacctagtggtcaggagtatttaggcagtgccttact

SEQ ID NO: 87410 - DNA, 122 bp, Homo sapiens
ccgcttactttgaggtgggctctgacaaccagctgagctgcccacagtccctcagactcccgaggtcctgggagcagggatcaaggtggtccccaggccgtaaacctgacagaggctgcagg

SEQ ID NO: 87411 - DNA, 122 bp, Homo sapiens
atagacaccaagtaatgctattctatttggcaaataaaatgattcattcccaccctcaaccgataggactatgtgggtgttttgttttgtttctaataagaggccaatttctgagtgacttt

SEQ ID NO: 87412 - DNA, 122 bp, Homo sapiens
tggtcggtccaggacgaggcgggcatgcggctgtaggggtcgagcaggatgcgcacgcagcgcaccatcaacagcaccagcaccacgagcaggcagagcacgaaggcgaacaccgtgcgctg

SEQ ID NO: 87413 - DNA, 122 bp, Homo sapiens
tcttgtggtcaggaaagattcctctgatgtgtgcaattaagctgagacctgaagggtgagcgccccaagtctcattcctgggggttcccaaagaattattaatggaccctctcatcaagata

SEQ ID NO: 87414 - DNA, 122 bp, Homo sapiens
gcgtgcaggtgagtctggcggcctcaaggttggctcggaggtttcactgttagccgggtgcggccggagcgcaggaccaggccagagccgccccaagtgatctgggcgtgccggagaaacga

SEQ ID NO: 87415 - DNA, 122 bp, Homo sapiens
tggccactcccccaggggtggagaccacactcctggagtgggcgtgggccagagagcagccggcagcctggacggactcagggctgggctctgagcccttccatcaccgggagaaagctgga

SEQ ID NO: 87416 - DNA, 122 bp, Homo sapiens
ctgaccaggggaaccttttcttggggacccggaggcgagcgctggaaggcgggatagtggcgacccacacgcagcagcttccggcggcgcgtagtcttgattggtggaacctgggagagggg

SEQ ID NO: 87417 - DNA, 122 bp, Homo sapiens
ctactgtcatgtgatgtgagttcctggagggcaggagttctgacctacatgcagcaggcacgcaatcaaagcttgttcaatgaaaaaaaaaatgaatgaatggtcacttgggagaggcggct

SEQ ID NO: 87418 - DNA, 122 bp, Homo sapiens
atggccgttgttccttgtggaatgtgaccctgtgcaggcagggatttgatcttttgtgtacggcaacatcctctgtgctaggacacagcgggggaacttaggaggagctccacaaataatcg

SEQ ID NO: 87419 - DNA, 122 bp, Homo sapiens
cccccgtgcgccccttcttttgcgacatgacggtgatgctgagcttggcgacctcggacacgtccgccgcggagacggccatcttctccgagggcctggccgtggtgttggccccgctgctc

SEQ ID NO: 87420 - DNA, 122 bp, Homo sapiens
cgcatgcacagcgagagggcatgaaggtgagcgtgggggcagcgtcccgcttgttggtcccgcttggataacgcagaagcgtggaagcaggtccgggcatgctggcagccatgtgggagttt

SEQ ID NO: 87421 - DNA, 122 bp, Homo sapiens
tagataacctagttaacaaacatgggattggaactacttttctgtggagacaggaatacgcgccggggctggtcacacctcttccgcgggaggggcggggtcggcggccacggcctagccgc

SEQ ID NO: 87422 - DNA, 122 bp, Homo sapiens
gacatgcgggggcagcggcgcctggggacaggtagagacgcaggctcccctcctgccccacggagcacactctgcacccaccagctgccagagactcccccgcatgctgcagtttcaggagg

SEQ ID NO: 87423 - DNA, 122 bp, Homo sapiens
cctgctggattctcctgcttcagcctgcggagagcctgggattgcaggagcacgccaccacgcctgactggttttcatatttttttggtggagacggggtttcaccgtgttggccgggctgg

SEQ ID NO: 87424 - DNA, 122 bp, Homo sapiens
cacctgctggtctgctctgctagacgggtaacatgaatgtgtgaatccgctggcctgctccgtgctctgcatgctggaatctgactgttggaatcctgggttgcctcagctgcgctctccac

SEQ ID NO: 87425 - DNA, 122 bp, Homo sapiens
ttcatttataacctcagaacggaaaaagacactttcactatgacacaagatctaaaagaccgataaattcaatttttataaatgtatgagccgggcatggtggtacatgcctgtaatcccaa

SEQ ID NO: 87426 - DNA, 122 bp, Homo sapiens
ctaaaaagaggtcagagggtcagggatccaatctccatacagatcaacaagttacagactcggtttccccctgcggtaaaaaggggatggtaacagctggtagggtgttgcgaggcttaaat

SEQ ID NO: 87427 - DNA, 122 bp, Homo sapiens
taaacatttcattgcaattcgagctttgagtgtgtgtgtgtgtgtgtgtgtgtgtgtgtgcgcgtgtgttgataggaaggaatgaaagggggtgcataagaattcttgaatgttttttattt

SEQ ID NO: 87428 - DNA, 122 bp, Homo sapiens
gctggggacggacgagtgacgcagcagacactgcctccctgaaggcatggcaaggtgggacgcttggccgccacctgcaggggcctcacctgaccagtccccagcctcaggaggcggacccc

SEQ ID NO: 87429 - DNA, 122 bp, Homo sapiens
agaaagtccattaggtgaaatcctaggaggcagcaggctggaaaaggttccagcgaaggtcgcaaggaaccccacaggggaaaacgtggtgggagctcagggtctcccagcaccctgccgcc

SEQ ID NO: 87430 - DNA, 122 bp, Homo sapiens
ccgggggaggtgtgacgtgcttggggcacagagaggacacagcattgcgtgtgctcaggacgtggggacgcagcaacgcgtatgcacgcaggtggggcgcacacctcgggggccaggtactc

SEQ ID NO: 87431 - DNA, 122 bp, Homo sapiens
agtgagggttacaactcttaaggcggcgcgtccggagttgttctttactcctggtgggttcgtggtctcaatggcttcatgagtgaagctgcagaccttcgcggtgagtgttacatctcata

SEQ ID NO: 87432 - DNA, 122 bp, Homo sapiens
agaccatgcgatcgttaccatcagtaagcagggcccttcgttttcgtctctgtggcggctcgcactctaccagggctcccgggtgggtcccacagattcctgtgccctaaatgctgcctcgc

SEQ ID NO: 87433 - DNA, 122 bp, Homo sapiens
gccggcgccgccgggagcgctaggcctggtccctcttcctagaatagcgttgcgcgcatgcgccttgacgagtgagccgggtgagggggctccctaagtagcggaaggggtagatgaaaatg

SEQ ID NO: 87434 - DNA, 122 bp, Homo sapiens
atactcacttttcactgtgttcagagggggtgggaaatctcccctaaggaggagatacgacgtgtgcagattgagagctgggaccacacggattcctccaggggcaagggctggtgaccttg

SEQ ID NO: 87435 - DNA, 122 bp, Homo sapiens
cttacggctcagggctggtggtcctgggaactggaagcgactgggagttcagatctaagtcgagagggtgcctccctccttcacggcccataattaccctgcagtatgcagacagttaagca

SEQ ID NO: 87436 - DNA, 122 bp, Homo sapiens
aaaagaaaattgtgacttctgccttcattgttccacctcctttccaccacagagctgtgccgtccccacaagagcacacttccttcttccagtctctaaatgtgaccagcaggggggctgat

SEQ ID NO: 87437 - DNA, 122 bp, Homo sapiens
gtctctgtgcccaaggaaggaaagaagctaagaaactgagcttcaccggaggaacagtcacgctgtcttgatggggcttcccagaaccctgctccaggcccctcctggcagagttcaaaagg

SEQ ID NO: 87438 - DNA, 122 bp, Homo sapiens
gccttggagcgcccccaggatcgcttcagtaaggcgcttccccactccaggcccgacccccggcgcctgagcgccaacttcgccaagaacgctcctaactccaggccatcctgcagcgcaga

SEQ ID NO: 87439 - DNA, 122 bp, Homo sapiens
gttaaagcagagatttaaagcaggaaatgtagaactctatttttttaaagttaataccaacggatcaataaattgtcacattgtttacttcaaaatagatgttttgatctgttgctgctatg

SEQ ID NO: 87440 - DNA, 122 bp, Homo sapiens
tggcgtgtatcagtgattttcatcttcttttttggtatgtggtcatctcaagctgcccaacgaatgttttcacttgacttctgttgatacctccaacttaacctttaaacaaaatgtctact

SEQ ID NO: 87441 - DNA, 122 bp, Homo sapiens
gctgtaggagaggaccagtggcttttcatgcctttgagcccctgtaagtgcagggcacaccgcgtttgccaggcattctctcgggatgacccactgaccgctcgccacccccccgtggccct

SEQ ID NO: 87442 - DNA, 122 bp, Homo sapiens
aggcagggtcagggaggggacatttacttctctgcctcggctaggcgctccagcttgtagcgctccgcttccgctggcttccgcacccgggcctccagctccttctcccgccgggcgatctc

SEQ ID NO: 87443 - DNA, 122 bp, Homo sapiens
aaatacgtgattagcctcaactaaacattgctgactataaagacagtatattcaccatgtcgctggcaatatgtcattgcgtaacaccaaataaccccccagaagtagccagaggccagttt

SEQ ID NO: 87444 - DNA, 122 bp, Homo sapiens
acttcctggcctgtctcccttcacagggttcattacaggcggggagggaggagacagtctcggagaattcagaggtgccagaagccgagttcctagaccccagctggatttttttttttttt

SEQ ID NO: 87445 - DNA, 122 bp, Homo sapiens
tcacatgccgtctgtgcatggccgattctcacatttgctctctggcctcaacttccccagcgcctgctgggcatttcccccaggatgccgaagagatcgatccaaaccgaatgcatggaccc

SEQ ID NO: 87446 - DNA, 122 bp, Homo sapiens
agtctcaggccagatctgcagtgagtgtgctgccccaggcgtggaacactctggtgccatcgggacccaaggctgagtgcacccaagagctgtgggtctgaaacagcggtcagaggtcactg

SEQ ID NO: 87447 - DNA, 122 bp, Homo sapiens
accttgatcaaaatacggcagcgcatccaccacaacctctccagccaccaaacctgtgcccgccattctgaggacctcaggtttgcctgcgttttctgcgtctgcgtaaactcagttatatt

SEQ ID NO: 87448 - DNA, 122 bp, Homo sapiens
cacctgtacatctctttcctcctccctgtgcccttgacagagctacctgttaggtggtgacgagcaaagctaactcttagtggagggacaccgagtaccagagaaattctcccagcctagaa

SEQ ID NO: 87449 - DNA, 122 bp, Homo sapiens
atttggcttcttccaggccctgccccagcccagcacgtcacttcagccaggcgcaggccccgcctccagctggctctgcctccgccagccccgccccaggctctgacaagtctagcttcggt

SEQ ID NO: 87450 - DNA, 122 bp, Homo sapiens
acagattatgtcctcagttcagaccctttggaaagcagacgacaatggctgtgaaacctgcgtttctgacgccctgcttggctgtgctgagacttggtccatttgctagatacccgtggggc

SEQ ID NO: 87451 - DNA, 122 bp, Homo sapiens
cccatccctgcccccttggaggaagtttcctgaactctcccagctcctgcacagggtctccggcacaggggggcttcctaggtgctgctccctctcccactctgcaggcagctgccgcctcc

SEQ ID NO: 87452 - DNA, 122 bp, Homo sapiens
cccacccacaggctctgcaaccgcagactccgagctagatccaacctgtttcccggctttcgccctgaagccagagcgcccctgaacgtttgtctaaaccaatggttctcaagccccccgcg

SEQ ID NO: 87453 - DNA, 122 bp, Homo sapiens
gctgcagcttcttggtgggccggcccacgatgtagatctgcatgggggacaggctaatggcgctgtacaccgccacgtccttggtggagccataggccgcgtgcacgcgcaggtgcagctgt

SEQ ID NO: 87454 - DNA, 122 bp, Homo sapiens
accctcaggtgcccctgagtcttaaccccaccccttcttcatccgtcctgttcctgaagacgaccatgaaggtgactcttcattgagagcctctggaggctgggagcttttagagtaaggct

SEQ ID NO: 87455 - DNA, 122 bp, Homo sapiens
aattccagcactttgggaggggaggcaggaggatcagttgagcccaggagtttgaggctgcggtgagctatggtcatatcactgcactccatcctggacaaacagggcaagaccttgtttct

SEQ ID NO: 87456 - DNA, 122 bp, Homo sapiens
ttcctcctttccttgggggagcttccagaatgaacccagaaacacaacctgaaccatcaccgtcaccacagagggccatggattctgcacttaattccacacattaactctcctgttgaaga

SEQ ID NO: 87457 - DNA, 122 bp, Homo sapiens
ggcgtgcgtcgtctctatggttcccgccggaaggacgcgtctgcgtctctgcggcgagcgcggttgctatgacgcccaggtctccgtaggcacctgcagctagcagctgagcgcgtaggggc

SEQ ID NO: 87458 - DNA, 122 bp, Homo sapiens
tgcgttcagccccgcgccgagctcccgcggacacccgggatcgcaaagacgcagcgccggcgaccactcacctgggcgaggcagcatctacccccggctgggtggcaccgaggccggctccg

SEQ ID NO: 87459 - DNA, 122 bp, Homo sapiens
gttaagcgcgtcgccaccgcccccgcctaggcgagagcccagagagctgaacctgcatcccggacctgcggcgaccgtcgtacaccatgggcctccacctccgcccctaccgtgtggggctg

SEQ ID NO: 87460 - DNA, 122 bp, Homo sapiens
acacgctcagtccagcctgactcacttgcctcaggtcagagaggtcaccactgacgacgccgggccctcaagccgatcctaatccagcttggttctctcagcctcagccagaccatccgttc

SEQ ID NO: 87461 - DNA, 122 bp, Homo sapiens
tttgggcagacagggggctgcgggcttcttgccctggaggctgtgggagagccctttccccggggggaggcatgactgggatgccagggacttcaaggagaggtctgaagatggtgatagac

SEQ ID NO: 87462 - DNA, 122 bp, Homo sapiens
gctctttcagggtcagtgagcctagcaccctgcccacatccttggggagagttgactcaccgtcctggatcctggaaggaggcacaaccagtgggcaacatgcaggagaacatctggtcaca

SEQ ID NO: 87463 - DNA, 122 bp, Homo sapiens
gaccaccccaggagagaagggccacaggttaggacatgtcaaagccaagggttcggggaccgtgtggtggccggggaggctggagtatccctacagacactacagggtcccccatccaggga

SEQ ID NO: 87464 - DNA, 122 bp, Homo sapiens
accacccttgacccccaccagacatggggtgagacactcacgggcccagaatccgatggacgcagggacggatggaaggatggacagacggacggacgcgtggagagccgggtggcgcggcg

SEQ ID NO: 87465 - DNA, 122 bp, Homo sapiens
accttagactctccactgtcactgtcttgtgctcaagtcaacgctgcagaacacaggaaacgggggctggccgggaaatccgcgcatccggccccagggcgccccagcctccccggctcgtt

SEQ ID NO: 87466 - DNA, 122 bp, Homo sapiens
gtgtctacaaagcccgggaacactttgccacgctgtctagaaggcctggcgggaggctcgcgcctatgaaatcccagcactttgggaggcctaagcgggttcatcgcttgagccaagaagtt

SEQ ID NO: 87467 - DNA, 122 bp, Homo sapiens
ctgctaatggagaggaccttttctataatccaagccataatttgtacaaggttgctgatacgagatgtggttggaaacagaaatgccaggtgacagtaaatagtttgtaccctccagattgt

SEQ ID NO: 87468 - DNA, 122 bp, Homo sapiens
agacaaagtcagctgcgtgcgtctcctccggcgccggctctgcaaggagggaggagggggcggggccccacaaccaccgcagcctcttaggtttctccattgtgattggaaatccgagtacc

SEQ ID NO: 87469 - DNA, 122 bp, Homo sapiens
aggccgtgctcgcttgtgctaccggcccagatcctatgcctgcggagagtgaaccaggcgcggagcggcaaggcgtgtgtgagcgagcaagtacggggtccggccactgtacacagcaagca

SEQ ID NO: 87470 - DNA, 122 bp, Homo sapiens
ccacgaacctttgcgagaatcgagcgcagcctgtgctggttgtgtaagccgtgggacacacgggaaagccaggaagaagaggaagagcacccccacaccccacccgcgtgaagaagagcaac

SEQ ID NO: 87471 - DNA, 122 bp, Homo sapiens
tctgtttttacatatttaagctatgcatttagatacaattcaagcattccagggtgttaacggtgtttacaaagaaaactgccagaggcaaattcaggcagtttcttaaattaataatgctt

SEQ ID NO: 87472 - DNA, 122 bp, Homo sapiens
tctggacttcaaggtagaagaggtcctggctttcaaagcaaatcgtgtgccccacctccccgcgcctgcctgcctctgcaaatgcctgtcagttcgaccctcagagatgggcgaagcctggg

SEQ ID NO: 87473 - DNA, 122 bp, Homo sapiens
gtggctcacattatatttctatggggcagttcttcatataatcccttcctgggcaggcttcggttgggcccagttcttgtacctctgcaattggaaactgaccaccttttaagttcaagatc

SEQ ID NO: 87474 - DNA, 122 bp, Homo sapiens
ccccgcccggcctccccaactctgcggccgcgagtaaagtttgcaaagaggcgcgggaggcggcagccgcagcgaggaggcggcggggaagaagcgcagtctccgggttgggggcgggggcg

SEQ ID NO: 87475 - DNA, 122 bp, Homo sapiens
ccttcccacaaagcaccaacttcggaacggctaaacatcaactttcactctgggaagatacgtctgtacaggcgtagcagaaaccgcttggggtcccgggaggaacgggcgccctcgcagcc

SEQ ID NO: 87476 - DNA, 122 bp, Homo sapiens
gatgagccccacgcggtccacggagctgtctagcggtgtgaagtgcacgggcgtcaggtccgacatgcgcaggggcttccctgacatggggcaggtcaccgtgcgggactgcaaggggcaga

SEQ ID NO: 87477 - DNA, 122 bp, Homo sapiens
cgggagcgcggggggcggggaggatggcgggggtactcacctgagggccggcggagggcgcgggcgggacaggcccaggagacgggaccgcggcgggccggggctccgcgccgagggcgcac

SEQ ID NO: 87478 - DNA, 122 bp, Homo sapiens
catagaaagatgccatgaagttctattgggtgcagcaagccgttccccacgcacactccccgtgatacctgcccagagaagcagaagcagtttcgagggctgttgacacaggcagagcgggg

SEQ ID NO: 87479 - DNA, 122 bp, Homo sapiens
cgccaaggatgtgaagcagttctatgaccaggccctacagcaggccgtggtggatgatgacgccaacaacgccaaggctgtggtgaagaccttccacgagacggtgcggccccggggggcga

SEQ ID NO: 87480 - DNA, 122 bp, Homo sapiens
ccgccgctcctcccctcctgcagatgccgccctcggggatggtgcagaagcccgagggggcgaagggtggcacagagaaagtgatgccctcgtccgcctccgtgctcatctctccgggccgg

SEQ ID NO: 87481 - DNA, 122 bp, Homo sapiens
tcggccccgcccatggcagagcgcagtcacgtgacccgggctgcggggcgcagcattgtgcggtcatggtgggccagatgtactgctaccccggcagccacctggcccgggcgctgacgcgg

SEQ ID NO: 87482 - DNA, 122 bp, Homo sapiens
agagactggcgggtgagccgcgccctcggccttcgctgggctaagccgaccccatgcagacgtcaaacccccctaggtcggcacagcctctctgcggggaggcttagtgcccccttgagaaa

SEQ ID NO: 87483 - DNA, 122 bp, Homo sapiens
agcggacagaagcccctcccttcacaggaatgcctcagcccagcagaaggagcagtgccacgtcagccaatcggctcaggccctgccctggaaacgacacctgttcatcctcctcccggcag

SEQ ID NO: 87484 - DNA, 122 bp, Homo sapiens
cgtgtgcgcacatgggcacctgatgcctggtggccgagaggacagcacggcctgaacacccggcaggaggggacggatggtccatccacactggaacattatcccatgacgaaccggagcca

SEQ ID NO: 87485 - DNA, 122 bp, Homo sapiens
ttaaaaatgtttctttggagctgctggaaaaaccacagaaccagcggcatttaatcctggcgttgatattctgagatattgcgaagctgcttgatttatttgggcaccagttttctcctatg

SEQ ID NO: 87486 - DNA, 122 bp, Homo sapiens
aagtgcccaacctccaactcctggcccaacttcccttcccctcccacaccacttcatgggcgatgcagcaggcagactgttcagcttatgacactatgtattacatgccttttgcattttat

SEQ ID NO: 87487 - DNA, 122 bp, Homo sapiens
tggccgcccccgtttccggctatttagcgcggcgggaggtggaactacaagttccggcagcgcccgcgctaccccgctgcggttttcccgggggccgacgggagtcgaagttcagggacagg

SEQ ID NO: 87488 - DNA, 122 bp, Homo sapiens
ggaaatgtgagctctcttctgattggtgggtgacgattttagtccgcaccaatgagctggcggcctcgtctgtatttatttagtgctctgggggagtttttctctttacgcagcgcctgtag

SEQ ID NO: 87489 - DNA, 122 bp, Homo sapiens
agctctgatgcggtgacctgggccggagccctcggactagcctcagctttggtggcagcacgccctgccttgtggagccacggcctcccgggacggactccccggctctcccccagccgccc

SEQ ID NO: 87490 - DNA, 122 bp, Homo sapiens
gaacaccttcctgcgcaaagcgtgagccccaggccacccgagggggagccggggggttcacgtggccgttttcagggtgtgacctcttcatctgccttcccagatacacgaagctgaagctg

SEQ ID NO: 87491 - DNA, 122 bp, Homo sapiens
tcatcccggtatttatagctgccctcgcgttctgattggacagtagactgtgccatgccacgtctcacacacggaattggctcccagtttaatctgctagtgaaagggagacattccgcctc

SEQ ID NO: 87492 - DNA, 122 bp, Homo sapiens
agcagcatttcagaaaggcactcaagagggagtctggacgcggtgagggtgctagcaacacgtgccacggtcatgatccccctttcacagaggtctggaactgtccactctgcaaactggca

SEQ ID NO: 87493 - DNA, 122 bp, Homo sapiens
agacgaattctatcaccagcgtttgggtttcactcctaggctcagagactggtccttgttcgttcccaggccacaggtaaccaggggtcagagaacattagagatggaggaggaggagggtc

SEQ ID NO: 87494 - DNA, 122 bp, Homo sapiens
atgccagtccccgccgccgccgccgctgctaccgccgccgccgccgccgtcaccgcgggacgaagccactgcgagccccggcggggccccgccccaactccgcccaggtccacgcccccagg

SEQ ID NO: 87495 - DNA, 122 bp, Homo sapiens
cgcgcgctaccccctgggaagtgtagtccgaagttgcgggccggggccaagcaggaggcgcgtgggactacacttcccggcatgccacgcggccgccggcgccctcggcccgtccgccccgc

SEQ ID NO: 87496 - DNA, 122 bp, Homo sapiens
ccttctttcctcctcattaagccacacatttcctaaagcctctgctgcatgagtcaccaacgtttctgatgtacataatttacaatagcagatgagagagaacagcaggccagagggggcgg

SEQ ID NO: 87497 - DNA, 122 bp, Homo sapiens
aggtaagtcctgcctcacccctgtgagccgtagccgccctgagagtgggtccgcttgacccgctggacatagtccattgggagctgcagggcctccgctggatctgggcaggacagagcaac

SEQ ID NO: 87498 - DNA, 122 bp, Homo sapiens
acaagccgccgtgcccagcctcagccgctgtttcctttcagccatgcagggccttgcaggcgaagccaggacttttggattttacttcaaatgctgtagggacctgatggaggaacgggatg

SEQ ID NO: 87499 - DNA, 122 bp, Homo sapiens
aatccccccttcatcctggtgctctcaaatgaccttaaagggtcccagcactgggaacggcggttcgtccaagccggacgcctgcagcagccacctcctgggcctcacggcggggccggaga

SEQ ID NO: 87500 - DNA, 122 bp, Homo sapiens
ggtataaacagtgctggaggctggcggggcaggccagctgagtcctgagcagcagcccagcgcagccaccgagacaccatgagagccctcacactcctcgccctattggccctggccgcact

SEQ ID NO: 87501 - DNA, 122 bp, Homo sapiens
ttccgctcggggcgggcgatagagacagcgcgtcgcgcctttagcttctttcccagactccggcccagctcctgcgatctccacagcagcctctgaggccgcccccagagagcatcaggatg

SEQ ID NO: 87502 - DNA, 122 bp, Homo sapiens
agccgaggctcggtgggctgaccttgtcactgaaaatgaccatgggcagcaggttgcagtcggtccggcactcctgcagctcgatgacccaccattcgaggaagccggtggcccccgcaccc

SEQ ID NO: 87503 - DNA, 122 bp, Homo sapiens
ctgtctgaacgggggcgcaggaccctgggacacagagcccaggacagcagtggtcgcgtccgtgtgaacgggggcacagggccctgggacagagcccaggacagcagtggtcacgtccgtct

SEQ ID NO: 87504 - DNA, 122 bp, Homo sapiens
ttgctaaggatgtcatacagagtttcacaaactgggtggcgttaaaaaaaccggaaaggccgggcgtggtggctcacacctgtaatcccagcactttgggaggccaaggtgggcgaatcatg

SEQ ID NO: 87505 - DNA, 122 bp, Homo sapiens
gcgagcgcaccgctcccccccaccccgcaccccgcaccccggcatggctttccccgtgggcgcttttcggcgcatgctcagagcgccagcagggctgttctgcccctacagaggcctcctag

SEQ ID NO: 87506 - DNA, 122 bp, Homo sapiens
taaagaggcttcactgcagctttaggttagcttgcccttctgcctccagccatgtgaagacggcatggaagatgcccaccagaccatctagctggtgcctagatcttgtagttcccagcctc

SEQ ID NO: 87507 - DNA, 122 bp, Homo sapiens
cattttccattctcatcaggccctgcccgtgccattttttctctattctaaattaagtgtcgtccttttctgttaaatgataagaatggttttgcataaggtgtgatcatttataatagaaa

SEQ ID NO: 87508 - DNA, 122 bp, Homo sapiens
tgcccggggcgggtcgcggggtgggcgggtgaactgccagcgaggaggcacctgcttgcgcgggtgcagcctgggctgcgccattgttgggggaggggcggctgctgagggcggcgagtagg

SEQ ID NO: 87509 - DNA, 122 bp, Homo sapiens
caggcaatcagaactaactaggcatatggctgttctctccaaagtctttagatctgtgcccgagtactgtgtgatagtgccaaaggaaggaagttcctgctgaattaatattttttttcagt

SEQ ID NO: 87510 - DNA, 122 bp, Homo sapiens
gcactgtcttctctttgcagcctctgagagccttgtgagtgtcagcctaaagaatccatccgcaggacgggtcttctctccccaccccccttaaaattattaacatccacttaaaagaaagg

SEQ ID NO: 87511 - DNA, 122 bp, Homo sapiens
gcgtgccgtttgctctcagcgtcttcccttgggtcggtttctgtaatgggtgttttttaccgctgcgcccgggccgcggctcgatccctccgcgcgtctcacttgctgcgtgcgtcagcggc

SEQ ID NO: 87512 - DNA, 122 bp, Homo sapiens
gtggctggcgggcgccctgggggagactgagacactcactcttaatgaagacactcgcggcgtccattgtggccactgcactctagtccagaccctcgctggcctggcctggggctcacctg

SEQ ID NO: 87513 - DNA, 122 bp, Homo sapiens
tgcttggtgtcctcagcttccctgccctcaaaattacggtttcaggatgattttcggaggcgctttaggaacagcctgaaaaggcattcttgtccagagaggggatgctttaactccccagc

SEQ ID NO: 87514 - DNA, 122 bp, Homo sapiens
gcagcacaggaattggcacaacctgaagtcagctctgcagctttccaaggtatgaatgcccggggagccagcgcagaccccagcacaccccctgggcccagtgtccctggaaaaggacattt

SEQ ID NO: 87515 - DNA, 122 bp, Homo sapiens
ttctgagcagatagtataaattgtaaaagtactgagaatgaaggagacattctgtgattccggtggtgacatttcagtgaacattcttgcagatacatatgcacagatgcctagagaagtat

SEQ ID NO: 87516 - DNA, 122 bp, Homo sapiens
actccccaggtgctggtaaacccgggagccagcgtttaccgagggtcagggttgtcggggcgccagcctttgtgtgcacccgggaggctgctgttaagggagaccgtcttccgggccacttc

SEQ ID NO: 87517 - DNA, 122 bp, Homo sapiens
cctggcctggccccttcctcttctacccagtcctctccccgaaccaattccgacccctaacgcccacagtcctcactcgcttacggttcgacccttgccccaggggcgactgggtggggccg

SEQ ID NO: 87518 - DNA, 122 bp, Homo sapiens
tatgacgttggatcagtcacgtcccctctcagtttcagttttctcatccaaggggtggggcgcgaggccgggagcggggaggtggactgagccggccggcgggccacctggatcccgactcc

SEQ ID NO: 87519 - DNA, 122 bp, Homo sapiens
cacagtggattaactttcacctatgttaataatcaaattctagttctgacaaaggccccacgccaacagtgattacaatgaccaaaaatatttacttgttggttctcattcagttctataga

SEQ ID NO: 87520 - DNA, 122 bp, Homo sapiens
tctgagatgccggaaatgttctctgtgctgtacaaaagggatgccactagccacatgccacgtagaacagttgaaatgtggccagcatgagatttttttaatcttgccaatttttgatggat

SEQ ID NO: 87521 - DNA, 122 bp, Homo sapiens
agtgcaggaatgaggtgaagcaaagctgtgcggctccgtggggcaggacttgccccagcccgtctggtccagcagccgcactctcagctggacccttagacgggaaatcttagcgacttttc

SEQ ID NO: 87522 - DNA, 122 bp, Homo sapiens
gactggcaggactaagatgccagccaggctccgccccggaggcttggaagtgcgggacaccgagagcagggatgccgggacagccggcccgatccccggtgcggaaccaattgtgacgacgg

SEQ ID NO: 87523 - DNA, 122 bp, Homo sapiens
cgaggtcgctctgaggaccgctgggctgggatagaccacccatcccccgccggggagacccgggtagtaaagaacaagacagaatgggacaggcaggacggtttggaccccacctacaagcg

SEQ ID NO: 87524 - DNA, 122 bp, Homo sapiens
gtgaaattcatctctccagtggagtcctcttgtgatgcactgaaaattacagtcatggaccgtcttccaaaacagaggcattctaccttcccccgtttccatgaaagaaggcatggctttga

SEQ ID NO: 87525 - DNA, 122 bp, Homo sapiens
ggccaagtcggactgcgtgctcttccgcgtgcagttgggggcagcgcagaagttcggcatcgtcgcccgcccgccggccggcccagccctcccctccccgcctcctcagggcagtccgcccg

SEQ ID NO: 87526 - DNA, 122 bp, Homo sapiens
cagggagaagccaaccctccaccagcccaggagagaggcctcaggggaaaccaaccctgacgaccccttgatctcagactcacagccccaaagactgtgaggagaccagtctctgttgttca

SEQ ID NO: 87527 - DNA, 122 bp, Homo sapiens
caccagcccggcggaggagacagtggtgtggagccccgaggtggaggtgtgcctcttccacgccatgctgggccacaagcccgtcggtgagcgcccaggctgcggacgcgcgtgggggcggg

SEQ ID NO: 87528 - DNA, 122 bp, Homo sapiens
acctcgtgatttgcctgcctcagcctcccaaagtgctgagattacaggcatgagccaccacgcccagcctgattttcatagttggctttcacttctgatctttgccataatcaatgacatgt

SEQ ID NO: 87529 - DNA, 122 bp, Homo sapiens
ggaggctgccacatgacctgttacatgccacacgcgctcccgcccccacgagcacgcggccgcgccaagcacacggtatgggtgtagactggacccgccccctaaatccaggagaccatcaa

SEQ ID NO: 87530 - DNA, 122 bp, Homo sapiens
gccctcggagccgccgcgggcgcgggtctttgtctcccacattctctctgccgcctctcccgacccccagcgctgtttcgtctctgaccccgaataacttgttggtttccccccgggctttg

SEQ ID NO: 87531 - DNA, 122 bp, Homo sapiens
tcttaagcaaatcactctgcttcgctgaatttactgtcctcagctataaaatggtgtcctcggcaactggagctagatgccttcgccactttgctgaaagatatgaactgtgcccaaggtgg

SEQ ID NO: 87532 - DNA, 122 bp, Homo sapiens
cgaactcctcacctcaaatgatccgcccacctcagcctcccaaagtgctgggattataggcgtaagccactgcacctgaccaatacagtcttaatagggctatttggacctccttggagaca

SEQ ID NO: 87533 - DNA, 122 bp, Homo sapiens
cttggaattatttggtggactgtacaccccaatgttttcatcatgaaatcttttgggaaacgctatgttccagtcttttcatcttggaatcttttgtagtgccatacgacccagactttttg

SEQ ID NO: 87534 - DNA, 122 bp, Homo sapiens
ttttaaggagctattcccccttgttcttcagagaagcgcttgtattgcccccgttttcagcgtatgtgtgtgtaaaggtcaccattgctggcgtagcggccgttctggatcctgtgctctgg

SEQ ID NO: 87535 - DNA, 122 bp, Homo sapiens
cggcggggtgaggccgggcgggagcgggcaggctgggcatggcccgcgaggcagggtagccggcttggagcgcggggtccgggaggcaggcgcggggaaggaggccgagcgcgcctgccggg

SEQ ID NO: 87536 - DNA, 122 bp, Homo sapiens
cgtatttggagattagccgttttaccaggaccccgctcagcacctgaaggcagacatcagcgtgtgtttaggggcacgaagaggggaggggtcccatggctgcctcagcctggacaagtgga

SEQ ID NO: 87537 - DNA, 122 bp, Homo sapiens
caaaccctttgataaactctgacagccaatgataagggtagagtttaccaagccaggaaacgcaggccaactctgtaagacaacaagctagtgaactgtgttgatacaagaaatgaaaatat

SEQ ID NO: 87538 - DNA, 122 bp, Homo sapiens
ccggggtgctgcccccttccccgaagtgcagccttgcagaccccggggctgggaagggggcgggagagaggcttgcatcttgcagccctccggtcccacggagggcacaagctgctcgctgg

SEQ ID NO: 87539 - DNA, 122 bp, Homo sapiens
gatcatatccaccccaacccccttcagactggttcctgagttgccatttcgggggctgggcgccaggccagtcaggaacaatggccaatggaacttgagctgccaactgcaacaccagcacc

SEQ ID NO: 87540 - DNA, 122 bp, Homo sapiens
tgtgcatgccaggcaaggccaagctggctcaaagagcaacgaggcacctctgcaagggtgcgcctggaccaattgtaccagccaccaacctcacccactgaaggaagcagggatggccaggt

SEQ ID NO: 87541 - DNA, 122 bp, Homo sapiens
cagttaaacttttaagcttaagtgtgacaggactgataaatagaagatcaagagtagatccgactttagaagcctactttgtgaccaaggagctcaatttttgttttgaagctttactaatc

SEQ ID NO: 87542 - DNA, 122 bp, Homo sapiens
atattacacttctggggtttctttttcccccacagagaaacacttttagaacagtggagccgcatgcaaccaggggtcgcacatatgtgcgcagacggtctggctcgtcaggtggcatgggt

SEQ ID NO: 87543 - DNA, 122 bp, Homo sapiens
gccctaaggcagaactcacgcccctggagaactgagaccttggctctgaaatggggactccggcctcctgccccatgtgctcctgctcctagctcagtaggctgggcaaggcagcccagaga

SEQ ID NO: 87544 - DNA, 122 bp, Homo sapiens
gtgggccccaggagtaatgcctgttagtgactgcactgtggatgttcaccggggctcacgcgggccctaatgcattttcggtgcagagacgcgccctacctggcccatcgggctgcgtggtc

SEQ ID NO: 87545 - DNA, 122 bp, Homo sapiens
cgtgggggtgctggcggtgcggcggacccctcggacccggtgctcaaaggacttgtcatacgggtaattggccaccaccgcccctccgtggagattggctgaaagaacaaagttgaaggagt

SEQ ID NO: 87546 - DNA, 122 bp, Homo sapiens
atccttagtgcctgctgtgtgtccccgagacctttctggatctgggccccccaggagcctcgtctgtggctcctgactctgctcggcccctcccagtatgaacactcagcccccacctgcta

SEQ ID NO: 87547 - DNA, 122 bp, Homo sapiens
ccggcaagcccagcgaggagggctgccggggtctgggcttgggaattggctggcacccagcggaaagggacgtgagctgagcggcgggggagaagagtgcgcaggtcagagggcggcgcgca

SEQ ID NO: 87548 - DNA, 122 bp, Homo sapiens
ggcaggggcggtagttacgcagtggaggctacggcggttgcgtcttacgtcatcgaactgcggccatttcgaacccgcaatggaagaaaggggaggggtttatgcggggcggggtctggagt

SEQ ID NO: 87549 - DNA, 122 bp, Homo sapiens
ctcatgcccccagagccttgtaaggaccggctaatgagggcaggcgagtgggaaacgaatcgtctgaacaatgatcagtcattctttcgggcttgcaaagagggtaaaaaaggttgggtctt

SEQ ID NO: 87550 - DNA, 122 bp, Homo sapiens
ggcacgctcgggcgccactgggcctcgaccgcggtcacgggcggggcgtccagatctgctcggcaccttggtttcttggatgacctctcggtgacagccctcagcgtcctcaccctcagcta

SEQ ID NO: 87551 - DNA, 122 bp, Homo sapiens
cctattctaagcagactggtccactattacctgtgagaggtgacagcgtgcgccctcgctcgctctcggcgcctcctcggccttggcgcccactctggccgcgcttgaggagcccttcagcc

SEQ ID NO: 87552 - DNA, 122 bp, Homo sapiens
agacaggaccaggcctgacccacaggtgtttagtgctcaatgaacacctgtagaaggaggcgctcctctatcctgctcgcccccgtcccttctgctcccctagccccagccaaggtccttaa

SEQ ID NO: 87553 - DNA, 122 bp, Homo sapiens
gaggcccgggcgggcggggagcaacggctacagacgccgcggggccaggtcgttgagggtcggcggcgggcgaggagcgcagggcgctcgggccgggggccgccggcgccatgggcaaccgc

SEQ ID NO: 87554 - DNA, 122 bp, Homo sapiens
actctgcaaatgtgtttcttttattgtcatagttcagctttgagcttgtaaatccacctccgggtgcaggggcctgttggcatattttggctaaaagtgactgacaggtatgaaaagtccta

SEQ ID NO: 87555 - DNA, 122 bp, Homo sapiens
tagacgcgcccccaggcgagctggagactggggcactccttgcttggtagaggggcggggcgcgcctagcggccacgcgcgcgggcgtcggagggggcgtgtctcgcgggcgcgcgcgggcg

SEQ ID NO: 87556 - DNA, 122 bp, Homo sapiens
agcccggaacctccgcttccggctccacgtccgcccggaagaagatctgctgcacacttccgtttccggtccgtgcccttggggctccgtgtcctgctgtctttccgtccgctgcctagtct

SEQ ID NO: 87557 - DNA, 122 bp, Homo sapiens
cgatttgtgtgctcgcatttgcctacctgctggacttactgcctggcagacagctctgcacgtgagcacatgtgcacatatggcctgagatggggccttcccaggacaggggagagttctct

SEQ ID NO: 87558 - DNA, 122 bp, Homo sapiens
gccgagtccccggccccacatacttagaaccccgtaatggggctcaaaatcactgaacctcgggctcctaatccccaacggcgcatttccaacccccaggcctgacctgcaggttccgggtg

SEQ ID NO: 87559 - DNA, 122 bp, Homo sapiens
cttatctctactcacagaaacctctgcctttcattcccagtgcaattcctttcaaggcagcgtggcatgctatcacagagggaatgttattctaacttgtttacatccttgagggtgagggt

SEQ ID NO: 87560 - DNA, 122 bp, Homo sapiens
tgttgtgcagccacaggcccgtgtcgctctcccgcatggacgccatcttgggggaaagcgcgcgccgctgccccggcatcttatgaagacacctacgcgtccctcgctaggaccccaacatg

SEQ ID NO: 87561 - DNA, 122 bp, Homo sapiens
gggcgctgagcactcacctaggagcgggaggcgtttcattggcggtggccgcagtggtggcggtggcggagagcgcggcggagtgagtgcggctgtggacccgggaccgggcgccgctgggc

SEQ ID NO: 87562 - DNA, 122 bp, Homo sapiens
ggtcgaagccagttgcccctggagagcgagagactgggctgggccgactcccacctctgtcgcgagaggcctacgggcaggggcaggtgggcagggggactgtgctgggtctctggccgcgt

SEQ ID NO: 87563 - DNA, 122 bp, Homo sapiens
ctcttcctccgcagcctacatgaagcggcggcacagctcagtcagtgacagccagccctgcgaaccgccctctgtcggcaccgagtacagccagggcgccagcccccagccccagcaccagc

SEQ ID NO: 87564 - DNA, 122 bp, Homo sapiens
catcacttctagtccttcaaattagcattttattatcaggttgtcttgtcttgttcaccacggtttcacgtgggttattctggtctccctaagtggattgttgtgggcagggccaatctctt

SEQ ID NO: 87565 - DNA, 122 bp, Homo sapiens
ccccggaaaggggaactcggcggggaccgggggaagcagggtgtcgcgcggcgcagggggcgccgcagccggcgtacgtacccagagcgaacagggcgagctgtccagccgaggggaccatt

SEQ ID NO: 87566 - DNA, 122 bp, Homo sapiens
tctgtctctctgcccaaggcagggctggtcacgaagtagatgttcagtcactgcaaaggacggggacagcggccaccacggagaggtggtgacagagaacacaggcatagactccacaggcc

SEQ ID NO: 87567 - DNA, 122 bp, Homo sapiens
tgccggccttttccacctgtgctcttggtatatggggaagatactaaaaccaaaaacaaacgacgggacgtgtcgggttcccagacaatcacccacctgacagcttctcttcctgcacggga

SEQ ID NO: 87568 - DNA, 122 bp, Homo sapiens
gagccacgcatgagtatgtgccctgtatctgcactctcaatcaggagccccaaaggtctacggggtgggtgcagctggattcggttgggatgtggtctggtgagtagagataggggttacag

SEQ ID NO: 87569 - DNA, 122 bp, Homo sapiens
accaaaactaaacagatcacactgtctcatttaggacccccatacacaaagaatcagctacgtaaagatgaaaatcagcacaagctgaacgtgtcactgatgatttgtgtgtcacacataaa

SEQ ID NO: 87570 - DNA, 122 bp, Homo sapiens
acatggggtcgcgccttcggaaggggatccagtggccccgctgagccccggacatggggtcgcgccttcagaaggggacctagtggccccgctaatcctcgaacgggtctggtccttgctct

SEQ ID NO: 87571 - DNA, 122 bp, Homo sapiens
ggcggccggcacggagctcggggctagcgtgggaccgtgcggtggccagggtcgccagggcgcgtgtgccggggaagaatagccgcggatcgcagggccccggcgcagggacgggggaggcc

SEQ ID NO: 87572 - DNA, 122 bp, Homo sapiens
ggggaggagcagaatcgcgcacacgatatttcattgtcaagcagattttataacccgagacgtcactaagatgtggccctttaagcccggcgagaaacctttgattgcttttctagccgcag

SEQ ID NO: 87573 - DNA, 122 bp, Homo sapiens
ttgggtgtcgtccaggacgccaggcgcggctgcttacaatggctctcagacgacagatggcgggcaggaagggagggggcgccgggcaggtgcgcgggggagacgcgccgcggcagcgccgg

SEQ ID NO: 87574 - DNA, 122 bp, Homo sapiens
cagggaagtgggagatttaaacgcttgtatggtagagggggagacttagggtccctgggccgtctagtctctggaatgttccttgtctgccaggcaaccgcttcatcctgctagcatttacc

SEQ ID NO: 87575 - DNA, 122 bp, Homo sapiens
gggagacaggcaggtgagagaaagggtcccaagtggcatgagaggtagactcatcgagggcggactaggtctctgcgcaacccatttgctgtactccccaacctgcctggggcctagtggaa

SEQ ID NO: 87576 - DNA, 122 bp, Homo sapiens
ctctgtgggcagtgaggccccagataccacatccaaccagcctcctaacacgggcagtaacgccctggatagggcctccaacccaccccaccacgccacgccacaggcagtacggcctggga

SEQ ID NO: 87577 - DNA, 122 bp, Homo sapiens
ggcctagagcccttcctccaaataaggcagggacatggggtctgactcagcaggccaagtcggggtggagacccagatgatcaaatgcacatgaaggaggcaaacccaaggtcatgacaccc

SEQ ID NO: 87578 - DNA, 122 bp, Homo sapiens
gcctgcggggcggggccgggcctgccagctcctacttgggtgcggagaccctggagcagccgcctttccgcggggaccgccccgcctagggttctctccatgactttctccactcccgtttc

SEQ ID NO: 87579 - DNA, 122 bp, Homo sapiens
ggcacccagctggcatttggagtggagccctcagagggggctgggctgggactgggatcccgggggagaagcgaggagagcctgcatgggagcagcagaggctgcccagggaggctgtgggg

SEQ ID NO: 87580 - DNA, 122 bp, Homo sapiens
cccagcacagcgagagcccaacctcaagccatacttcttggtgtccccagggctgtggcacgtagctagggataccgggggcgggggggagatctgtggctagcacttgaacgggggaggag

SEQ ID NO: 87581 - DNA, 122 bp, Homo sapiens
cagctgcgccgtgggactttcgggggagcgcctttgccctctcagaacggctgggcggaacggtgggtttgtgagccctccaggctcagggtgggtcgctcaggggccatctggggactttg

SEQ ID NO: 87582 - DNA, 122 bp, Homo sapiens
ggtaaccagaacagtgcctggcacagcgtaggcccggcttatgtgtttggtgaatgagtacgtgcttaagtatccgcagccgtgggtcagtgtcggtactcgctccctgggagatctcatcc

SEQ ID NO: 87583 - DNA, 122 bp, Homo sapiens
actggactgcattgctctagagtgctattaaagggttaactttgtgctctcgtctgttttcgtgccaacctctgtgactcacaggttgagaactactgcccaaggtctagttctgggtcacc

SEQ ID NO: 87584 - DNA, 122 bp, Homo sapiens
gctgtacaggctgttcttggagccacagttaaaagcgctttgactcaaacacacatgtggcgtcatcctgagctccgtttgcgtggggccggaacaccggactaggaaacctctccctgctt

SEQ ID NO: 87585 - DNA, 122 bp, Homo sapiens
ccagcccgtggcaggcaccaaccaactggacatgctgtttgcggtggagatgcacagcagcgagttctacaagccagcctacctgatccagaagctgtccaatgctagaagacacctggaga

SEQ ID NO: 87586 - DNA, 122 bp, Homo sapiens
ggtttctccatgttggtcaggctggtcttgaactcccgacatcaggtgaactgcccgcctcgacctctcaaagtgctgggattacaggcgtgagccaccgcgcccggccttgtccactattt

SEQ ID NO: 87587 - DNA, 122 bp, Homo sapiens
cctgcccgccccgcgccatcattggctgaagcgcactgccactcaccaaaggcgaaaagacgcaaaacagcgcaaagggtgggactataaggagctcccttccccctcccccgcaggttagg

SEQ ID NO: 87588 - DNA, 122 bp, Homo sapiens
tacctgtgcatcccactttttgtcagtttcattattctatggatctcttttcttcatgtacgttagaccaaatttgcttgaagaaggggataaagatataccagctgcaattttatttacaa

SEQ ID NO: 87589 - DNA, 122 bp, Homo sapiens
tggccagggccgcgtgtttgggatgcttggccgggtatataagaactgcaaaggtgaggccggctcctgacccgaggggggcccccacgcccgctctggcctctcaggtcaggccctcccct

SEQ ID NO: 87590 - DNA, 122 bp, Homo sapiens
tccgatttccctccttccctgacccttcagtttcactgcaaatccacagaagcaggtttgcgagctcgaatacctttgctccactgccacacgcagcaccgggactgggcgtctggagctta

SEQ ID NO: 87591 - DNA, 122 bp, Homo sapiens
gcatggtgtgggtgtgacggaggctggcatggagctggaggcccgaggactcgggggtcacgtcctccaggccaatggcaccgtctagctgagcccccgcgttccacagcgccaggcgtgct

SEQ ID NO: 87592 - DNA, 122 bp, Homo sapiens
atcacggagggcagtttagagccggcccaatgagggcctccagggggcgggtcggactgccgcgggccggggagcgctctgggtggccagctgtgggcccgggccgtcgtgggctccggctt

SEQ ID NO: 87593 - DNA, 122 bp, Homo sapiens
ggagactgtgtatttcaggctggaactttatggggaatgatgtgaggagaactgagtgaacgtgttgcccatctagtgtactcacaagacggggctgatgacagctgccccaaaacaacctg

SEQ ID NO: 87594 - DNA, 122 bp, Homo sapiens
ccgcccgaggctgggaatcctcacccgagtgtgtgagggcgtcgggctggttatctgggccgagctccatctgactaatctcgccggcggagcgtctacgcaaacctcaaggcctgctatcg

SEQ ID NO: 87595 - DNA, 122 bp, Homo sapiens
ttaaaagggctaggaatttctttctcggggagctcggctcttaagacacgagtctgccgacgctcccggccgaataaaaaaaaacctcttccttctttaatctggtgtctgaggagttttgt

SEQ ID NO: 87596 - DNA, 122 bp, Homo sapiens
tggcaacaaaactggccttgcatacagtcgcgcataccgcttgtgcacatctaggagcctcgtggataaacatgccacacggcacagacacccacgcatgtacactcatgtgcacacacagc

SEQ ID NO: 87597 - DNA, 122 bp, Homo sapiens
ttcatctgcagttctatgtgaagattgataaatcagtttttacttgttttattaataaaacgtaatttggatatcttgagttgatggttttgtgatttagctgggtaaactatctttgtaac

SEQ ID NO: 87598 - DNA, 122 bp, Homo sapiens
tgcacggtgcctggcggtcaggtgccaaagaacgagcctcagcccacacctcgcactgcacgcggaagttagctcaaagcagatcacagacctagggggagagttaaagtacagacatttca

SEQ ID NO: 87599 - DNA, 122 bp, Homo sapiens
cgcatgcgcagccagcgcccgggcctcaagtgccccaggacctggcgcagcccgcgagcccgcatcaggcttccagtgggccccgtgggcagtgccagcctttcccacctccgcatctggca

SEQ ID NO: 87600 - DNA, 122 bp, Homo sapiens
gggcgcacctggcgctcctggagaggggcctgttccttgcgttgccccccaaggtgggagcgcgacctgccagagcccaggggagctcgggtctgcccgcactcgggaaaagcactaagagc

SEQ ID NO: 87601 - DNA, 122 bp, Homo sapiens
ggcggtgaacactggctgccagcagagggcactttgaggtttttatatgttagaatttcacgccaatggtggcccaagattctagactatttgtctccaaactgttttcctaaaagacattt

SEQ ID NO: 87602 - DNA, 122 bp, Homo sapiens
tttgctgggaatgttctccatctggaccaggagacagattcctgtgccttctttcagacacgggccaaaggttactgggcagccttgctcaacatctgacagaccttgtgtgacagcacttg

SEQ ID NO: 87603 - DNA, 122 bp, Homo sapiens
gttcacggcttgctccttcccctgcccccagccgcctcagcccaggcctgagtctctccccgtctgggcctctgcttcctgcaggcacagccagggccaagacgcgcccctgggcctccctc

SEQ ID NO: 87604 - DNA, 122 bp, Homo sapiens
cacctagctccccgttcgcccgctccttccccgcccgcccacggggcccgccgcactcaccggctccagcgcaccgcaacaatcccagcgcgcaactgccgcagccgcctcaacgcgcgccc

SEQ ID NO: 87605 - DNA, 122 bp, Homo sapiens
agtctgagctctggcggcgcgccccgacccggaggcggcgttgggagcacgtggctggcccggatgcccaacaaatcttaaatgtgtttgaggcgtgcctgggctctcaggggttcagcaaa

SEQ ID NO: 87606 - DNA, 122 bp, Homo sapiens
cacgttcattgcaaagtgtccacagtaaagataaaggagaaattcccccggcaatgaaaacgagaatgagataaattaccaaattacattaaaagcgtgctcttatgttagagatttaaagt

SEQ ID NO: 87607 - DNA, 122 bp, Homo sapiens
gcggtcttgacagcatagatgtttgcctcctcttggaactttccgatgtttttcttatagcgaatcctcttgttgccaaaccagttggagacctgtggggcagaaaggagggtcaggtagaa

SEQ ID NO: 87608 - DNA, 122 bp, Homo sapiens
cctcttcccagcagtgtgaccttgggcgaaccatttgacctcttgatccttcagtttcctcgtttataaatggggatgcaaagtcttgtatcgaaggactttcatgaagatgaaaagaacct

SEQ ID NO: 87609 - DNA, 122 bp, Homo sapiens
agagagcccacagccaaaaacttcgtcctgtcctggaaaagcttcactggtaagcattcccgacctttagacctgccttggcccatagctggccacgagcccataacgatcacttcccggct

SEQ ID NO: 87610 - DNA, 122 bp, Homo sapiens
gccagcctttccaaggcccctgtctacccagcactgctccctgagtctcatggaaatgcacgtgaagcagcctcaacctttccacctccttggtttgtaaagcaggtagcccagagtggggg

SEQ ID NO: 87611 - DNA, 122 bp, Homo sapiens
tgcagatttcctccgggatgctccgagatgggctggacctctgggaggttcccagagggtcggaagggaggtcctgctctgatccggggccagtttcgtcaggaagagggcggggctcagga

SEQ ID NO: 87612 - DNA, 122 bp, Homo sapiens
tcaggatcggccgggagtcggaagtgcctgcggaagtttttttctttttcgtttttaacacggaatctcgctctgtcgccccagctagagtgcagtggcgttatctcgactcactgcaacct

SEQ ID NO: 87613 - DNA, 122 bp, Homo sapiens
cttagatacctttttaagaaatctgactctgctgcaacatccaaacgtgttcagtgggctcgctcatctctctaaacagagcatgaggtagctcgcgtgttctcaaactcatcatatgaggc

SEQ ID NO: 87614 - DNA, 122 bp, Homo sapiens
cccctcccgcggcccccgctcccccgcccgccccgcgcccgcccggcccctccaccgacgcgctgtaatcccactcacgttccaggcctcgttagcatgggccgaggcgcgccggggccgtg

SEQ ID NO: 87615 - DNA, 122 bp, Homo sapiens
ctctctggtcggtcctcaccgcagccctgtgtcaggccgtcacacggcggcctccagagtcgaaggcgctctgaggagatgcaggttgtgtccaaaacctcccacctcggggtctcctgaac

SEQ ID NO: 87616 - DNA, 122 bp, Homo sapiens
cacttcccagactgggcggctgctgggtggaggggctcctcacctctcagacggggcggccggggagagacgctccttacctcccagacggggtcgcggccgggcagaggcgctcctcacat

SEQ ID NO: 87617 - DNA, 122 bp, Homo sapiens
acaaagacacccattaataagaataacaacagctgccatacatacaggcagccctgaccacgtgcctggcatcggcagcacattattattatttgagacagggtctcactctgtcacccagg

SEQ ID NO: 87618 - DNA, 122 bp, Homo sapiens
gattgtgcaatctgatctcccctctggaccctgggtctcctggcagtgggagatggggctcggccggcgccctctcgaggcccgcggacagttgccctccctggtggccccgggcaggagcg

SEQ ID NO: 87619 - DNA, 122 bp, Homo sapiens
aggtggggtgagcagggaatccgcaggcttcagcggcgggggttgaccggcagctggcgtcgagaggcgcttgggaaatggggtctaatttattttagaccctgtccccgactgccgcgccc

SEQ ID NO: 87620 - DNA, 122 bp, Homo sapiens
tcccaggtcaagggatttagggcctctcacaagacttcatttccctttgctttttctgcccgagggagacccctggctgggagacaggctcctggggctaagcgtcctttccctgtagctcc

SEQ ID NO: 87621 - DNA, 122 bp, Homo sapiens
aggggaagggtaaacggctttgatttcaggctttcagcttcctacggacagggtcagcgtcggcactcagagggtgaggaccttattatgcgggtggagggggggcctggaaagggtgcagg

SEQ ID NO: 87622 - DNA, 122 bp, Homo sapiens
cctgcggctccgcagatgccggatgaagttgaccctccagcggaagattttcccacagttcggacacacgtaggacttcttggaggtctgcacctcgcctccggcctcggtgctgctccggt

SEQ ID NO: 87623 - DNA, 122 bp, Homo sapiens
agagggacccccagactccggaggtggggggtccgagagtaaaaataatgggcagatgatcgtcgcatcctctgggctcctcgtggaacgtcagtgctggccagtggcttctgtccggatgc

SEQ ID NO: 87624 - DNA, 122 bp, Homo sapiens
cgtgagccaccgcgcccggccaataaatctgtaattgttaactgtctctgcagaaaccaacggtaccatcagaaacagaaaaatgaaatgaaataattgattcattgggcgttcgtttgtgt

SEQ ID NO: 87625 - DNA, 122 bp, Homo sapiens
agtttcctcttccttcccctaaaagcaattactcaaaaacggagaaaacatcagctgatgcgtgccctactctcccacccctttatatagttccttcagtatttacttgaggcagacaggaa

SEQ ID NO: 87626 - DNA, 122 bp, Homo sapiens
gcagggggcgtggagggggcggggcccggagggggcggggccgtaggaaacttgagcgcccgcctctggccgcgcgccccgccccggcccccgcctccgggtcccgcctccaggtcccgcct

SEQ ID NO: 87627 - DNA, 122 bp, Homo sapiens
taagcctgaccataagggttgtccccagtgtcccctcccgtgcctggcctcctctgcctccggtgctggtgtttgcctgccagggtcctgggcatggaccgaaagatctcagcgtgggcaga

SEQ ID NO: 87628 - DNA, 122 bp, Homo sapiens
gctggggaggtcccagcggggtgccgggaggctgcaggtgaccagatccgcgtgcgcagccggcagacagcttggagtcggtgggctgaatcttcaccactgtcctgccgggttccgcccct

SEQ ID NO: 87629 - DNA, 122 bp, Homo sapiens
gacctcggcctctgcccaggagcagcgcccagcaaccccgcccacaggggacccggtggacgccctggtggccactttgccaggctccccatctcccagcgaaccagagaggatttccgttc

SEQ ID NO: 87630 - DNA, 122 bp, Homo sapiens
tcgcagagagctcccccgggctcccttaacgttaaccttctccggaaaaaaagtggtcagcgttgagcaagacaaaagaaacgagcaagcaccgcttgggcttggttctgttttgttttggt

SEQ ID NO: 87631 - DNA, 122 bp, Homo sapiens
agttcattcaaaggttctgattttctttcttttcctccgtgtagtctttcccagggcacccggttgaagcccaaggctaactgggaccctcctacttcagcaccaaggacagaaatcgctaa

SEQ ID NO: 87632 - DNA, 122 bp, Homo sapiens
accaacctggggcttggccaacgtagaattgacagctatggtcagctacaatcctgaacccgatactgcatgtggtttcctaaaaatgaaggatttgtgttacctacattataaacctttaa

SEQ ID NO: 87633 - DNA, 122 bp, Homo sapiens
agttccgcccttaaaaactccattcctgagggggcgtggttgctttgctgggccccgccccgagctgcgccctgcgagcctctgccaggccgggccgggtcctgacccgcgctggagcatgg

SEQ ID NO: 87634 - DNA, 122 bp, Homo sapiens
gaggacaaacagcagtgaagacgagaccggagctccggctgcagcaagagacaaaggccgcgccaaacccggaagccgccctgtccggtccagctgcgtgtctgagtgaactgtccccagct

SEQ ID NO: 87635 - DNA, 122 bp, Homo sapiens
gtcggtcccgacctgcctggtccctggagctggggtgggagtcgtgctttgatcagtcaccgggggcggggagactggtcgaccacccctgagggcccgggacttgtttgccacacctgggg

SEQ ID NO: 87636 - DNA, 122 bp, Homo sapiens
tgaggactctgcagctgctgtgcccatcagctctgccctgtgctttctgagagctcagctcggcaggctgcttcctctcatctgaagaatgatgaagtgctccctagacagcctctgggtcc

SEQ ID NO: 87637 - DNA, 122 bp, Homo sapiens
catgatcttggccttccagcctccagactgtaaactaataaattcctgtggtttaagccacgctgtgtgtgacgcatcgtgatgatacccaagcagactgacatacacactcacacaagctc

SEQ ID NO: 87638 - DNA, 122 bp, Homo sapiens
ggcatgttcagctctgggagtaaaactccatcatcacaaagaattttctgaccatgcttccgtttggtttttatatgaagttatttcctttactaccgtaggcctcaaagcagtccaaatct

SEQ ID NO: 87639 - DNA, 122 bp, Homo sapiens
atgcccaccccgaggctccactgcacctgtgtgctgggaagcctggctccatgggaccctcgggctctgggtgcgccgtcgctgcagctgccagcagctcctgaggaagtggctcgaggccc

SEQ ID NO: 87640 - DNA, 122 bp, Homo sapiens
gagaacccagtgtccctgggaaggccggagcagttgtttctggtatgtgtggcctttccccggaaacagtgatgttggtcagaggcacctgccgcacaagacctctttggcgctggcactgg

SEQ ID NO: 87641 - DNA, 122 bp, Homo sapiens
ctcccacattgtttccctttttaaactgttattttttcaatccatggagcagttgagaaacgggtatgcatctctcctcccctccccttctatcaaagcctgtaagacacataaggaaatcc

SEQ ID NO: 87642 - DNA, 122 bp, Homo sapiens
cctgcgattgcaggtgcgcgccatcacgcctgactggttttcgtatttttctggtggagacggggtttcgctgtgttggccgggctggtctccagctcctaaccgtgagtgatccgccagcc

SEQ ID NO: 87643 - DNA, 122 bp, Homo sapiens
ggacaaacagtggcatctgagatgcctgaagtgctgtgaatgtaagctggccctcgagtccgagctcacctgctttgccaaggacggtagcatttactgcaaggaggattactacaggtact

SEQ ID NO: 87644 - DNA, 122 bp, Homo sapiens
ggagagctgggtggttatgccacctcattagacacattggtggacgatgccgcggattagcgggttggctctcagggcggggcgcaggctttctcactgatccgggagcgtgggagcagggg

SEQ ID NO: 87645 - DNA, 122 bp, Homo sapiens
tttctttctttacatagacttctgtgcatctactcagaaaattgaaagcattcagtaattcgctcacactcagtctcatcactgtctactggtttatctagaaccgtattgaccttggagtc

SEQ ID NO: 87646 - DNA, 122 bp, Homo sapiens
gaacctgaaggctcactgtcccggggtttccttcagagctatttccacgttactgctaaccgcctgtcactgtccctcagacgatgccacaacgcagtggttttcgagttttaccaaagcga

SEQ ID NO: 87647 - DNA, 122 bp, Homo sapiens
gcgagtccctgcctgcccggagctcgccctcggggaaggacggacgcctcgcgacggccgcggacgcaccagcgcaagtggttccttggaatctccccatgtaattccacatgagattaaat

SEQ ID NO: 87648 - DNA, 122 bp, Homo sapiens
ccgcccacctcacttgcacgcgtatttttctggcgtaaatcggtgctgatgtgggatttgcgcgtcccaacgctggcaaggtacgccgcggtggtggtattggctgtgccccggtagccctc

SEQ ID NO: 87649 - DNA, 122 bp, Homo sapiens
agctgcatgggaggtctcaaaactggagaccgttgggctaaattcaagtttcagacatttcgtttggctgcattcctccccagcgtggacctcgtgtttgagatctgagcatgactaattca

SEQ ID NO: 87650 - DNA, 122 bp, Homo sapiens
gctgtttctcacccttttccttcctcgggtcagcgtctgcatcaagagtgagtcttcaatcgtctgccggatgttttcatgatgcgggccaattttgaagctcctggacttcgttcgcgccc

SEQ ID NO: 87651 - DNA, 122 bp, Homo sapiens
acgtctttactctgacagacttaaagacagctctgaggatttactttcttaaggaggtgacgtgaaaaactgaaaagtcttttttcttttgtgtttttgtttcactggtgaatgggaaggtg

SEQ ID NO: 87652 - DNA, 122 bp, Homo sapiens
cccttcacccaagcacataaacagggacaaaatgggaaggaggaattgtcctgctgattacggtgaactgaaccggcctgttgtgtagaaagaaccttatctccacttgttccaattcaaat

SEQ ID NO: 87653 - DNA, 122 bp, Homo sapiens
caatggagacaaggcctcggtccgcagcagccccacgctcccaggtacagctccaggccgcgtccacctgtcccctagctgggaatgcagaggcctggctaggtgtggtagcgtggggtgca

SEQ ID NO: 87654 - DNA, 122 bp, Homo sapiens
catagaatatttgctggaagcaggaatcaatgaatagggcccagcccttctggattccaccggctacttctggcttctcaaacacactcaggcacgtacacttgatttcaaggacaaagttg

SEQ ID NO: 87655 - DNA, 122 bp, Homo sapiens
tctaacccatggcttaaacacccgcttcctaagcctgggtaagtgcagtagctcttcgctcgagaggagccacgtggaagagagtcgggaggggccctgcgccctactcctcctctccagaa

SEQ ID NO: 87656 - DNA, 122 bp, Homo sapiens
ggagggtccgcaggcccccgagtctctgggagaacagcctccggccacgccgtgcgctctcggtcgcagacacaggcgtccctgggtcccgcaggatcctgccaccagcccgcgggccccgc

SEQ ID NO: 87657 - DNA, 122 bp, Homo sapiens
cgcagtgcacctgtgcaggtttacaccgtccgccaggctgctcttcacggccgcccgcaacgagatccttgtgtgggaggtccccggcctctgagatgcagcagggactgtggtggtgggca

SEQ ID NO: 87658 - DNA, 122 bp, Homo sapiens
agacagtgtggggaggtgctggacaatgttaattttcaaactcctccaggagactatcttcggtgatggcaccatgccatcatccctatatggcatttcaggggattaagtgaacttgtaat

SEQ ID NO: 87659 - DNA, 122 bp, Homo sapiens
gccgcaggctccctctctccactccctggaacccgtgagtagtagaaaccccagaggaaccgaaatcacgtccggacagcctctccaggctgtctcccactatcccgtttctcccggccacc

SEQ ID NO: 87660 - DNA, 122 bp, Homo sapiens
gctctcggacccggagcaggcctgggtcttgggttcgcccagcggacagggggcggcgggcgccgggttgccggcttcgaggctgggagtgcagtccggggcggcggacgccttgggcgggt

SEQ ID NO: 87661 - DNA, 122 bp, Homo sapiens
agtgaaagggagaaaagtccttttcagctccctttttcccaccattccccgctgttcatccgaattactcatccacacatagccagtaaagggcgccgtagactgaacctgtaggaaaccag

SEQ ID NO: 87662 - DNA, 122 bp, Homo sapiens
actgtttgctgccggcgcctcctccgggctctcccgctgcgcaccggccgcgcgggggcccgcagggcaacgcagcctaggctgtttgtgcaagatgagaccctgcatttgacgaagacctg

SEQ ID NO: 87663 - DNA, 122 bp, Homo sapiens
ttctcccctcccctccctttcttcttccctcccagcttggccagttcagcatcagcatcccgcaccccctcggtaatcccgtactccctctagcggcgggccactgcagcgtggccaccgcc

SEQ ID NO: 87664 - DNA, 122 bp, Homo sapiens
acatgctctgggattaatgggaaccagatgggcaggacagcccctccacctggcctccaccggagaaatgctcagatttctggcattgtgctgaagcttttcttaggagttctctgagactg

SEQ ID NO: 87665 - DNA, 122 bp, Homo sapiens
aatgggttggctaagtgattctctgctccatgtagcatcatatgggtttaaactaggtgacgctcagcctgatgggaggagggtggctgggctgacctagacagtccttgagactctccaca

SEQ ID NO: 87666 - DNA, 122 bp, Homo sapiens
gaggcccccacccagcttggctctgagctctctgcgggtcgggtcagcgccgcgtacttgcgcccggactcaatgaacttgtcatactccacggacatcttgcagcagagggcctgacgagt

SEQ ID NO: 87667 - DNA, 122 bp, Homo sapiens
acaagccaggcggcagctccgagcggggagggcaagtgacccggatgtacagggtaacgacggggagggggaggagggaatgccaggaagtgagggcgccgcggacctgtccggccgtgcgc

SEQ ID NO: 87668 - DNA, 122 bp, Homo sapiens
gggcgcggggcggctcccgggagtcgagctctggcgcaggactgggggctgcgggaggcccggggaggacaaagctctgcctcgggtcgacctccagtcactggagcagctgccttttcttt

SEQ ID NO: 87669 - DNA, 122 bp, Homo sapiens
caaagacacggactcacaagggagttctgggcagaaacggagacggagattggagtgaagcgtccacaagccaaggagtgccaaggagtgccaaagattgccagcaacccccagacgctgga

SEQ ID NO: 87670 - DNA, 122 bp, Homo sapiens
ccggaaagaggaaaggtggggagccgatggggatgctccgggctcgggagaccgagggggcggacgggcgggaccccgcagccccgggggcctctgggaacccgtcccccctcggccccgcc

SEQ ID NO: 87671 - DNA, 122 bp, Homo sapiens
cacaaccccccagtggaacaacagcattaatatccccacttaaaaatgaggaaatggaagcgaggtcacttttgtacagttatttaacaagtaagttgtatagctggggattaagcccagca

SEQ ID NO: 87672 - DNA, 122 bp, Homo sapiens
cgtgccagctgggacccgcgcccgcgccgcccgccaccgtctcgtagtagcccatgtgggcgttgcccagggtcacgttgttcatgcagccctggtgagggcacctggtcgctgcgctgggc

SEQ ID NO: 87673 - DNA, 122 bp, Homo sapiens
cgggcgcgcccggtggagtgaagcgccgcgcggtcgaagggctcacagagttgaagtgggcgggaaaacccggagcggactcgctccgacacgcccagggcctcctgccctattcttcgtgg

SEQ ID NO: 87674 - DNA, 122 bp, Homo sapiens
ggatttgtcctgcttaaaatgtctcccaaccattccagacactcttctcgttgctctagtcggagcgcagtgagatgtggagttatttcaacctcaggatccaatcagcgagctactctatc

SEQ ID NO: 87675 - DNA, 122 bp, Homo sapiens
atgctacctgaaggtggtttgtaaactctaaaatgccgcacacattgttgatgcctgtcacgaaagagctggaaaagccatggcatccgttttcagatccactaatatcccatccctacccc

SEQ ID NO: 87676 - DNA, 122 bp, Homo sapiens
ttttcgaggccatttttagttttctgcccccatttcccagtcctggtataaaatgaattacgggtatccctctaagtccctataaccctttttgggggtcacagatatctttgataatctga

SEQ ID NO: 87677 - DNA, 122 bp, Homo sapiens
acttggtttttcaggccttcatgcctcagcttgaggggctcttttttcaaagggttcctccgggacgcctcgcctaggcaagcagggttttcctccttcacgggacagcccgcgtgccccca

SEQ ID NO: 87678 - DNA, 122 bp, Homo sapiens
agaccctggaaaagaaggggctggtggtctataggggcctgagggtcagctgaggccatgcggagccatcctatgttctggtgcctcaggatttccagaaaggcaagttttttacaaaagga

SEQ ID NO: 87679 - DNA, 122 bp, Homo sapiens
ctgcgatccccccggtgtggatggagctgaatgacacctacaattgcagagcacggttggcgttgccagggctgggaaatgggcgtcgtggctggagagggcactgaagggcacagatgaga

SEQ ID NO: 87680 - DNA, 122 bp, Homo sapiens
tcatttagggtcactttgctgagccttagcatatccccttccttttagtcatgctggtcccgactgaattatcactgggcaccaggaacagattgttttgaaggaaattcaatgagaatgta

SEQ ID NO: 87681 - DNA, 122 bp, Homo sapiens
tagagcccagggctagaatctggtctgcctcctgggggccttggacgtgtccctgcccctcgctgggcctccgttttctgtctgaactgaccgttggccccgttgaggctcctcatagtcct

SEQ ID NO: 87682 - DNA, 122 bp, Homo sapiens
cccagcctttcgtcggaggggcgggagcggaagctgcgcgcggaagcgccgagtgaggcgcggggtcagaggtctaaggtcacttaggggcttcacagtgaatgagccgttgctactactct

SEQ ID NO: 87683 - DNA, 122 bp, Homo sapiens
gtcgcccggagcccgggtgcgggccggccttggagtcccagagctccgcggagggcgcagcgagcctggctccagctccgggtttgacagatgtcagggaagaaaaggttcccgctcggcta

SEQ ID NO: 87684 - DNA, 122 bp, Homo sapiens
gatgtgagcaagtccctgcacctttgatgcaagagtttggatatgctaggtgagggtacccgaggccctgttgattttatgagtctgtgggccagctcagaccggctgccaactcatctgta

SEQ ID NO: 87685 - DNA, 122 bp, Homo sapiens
gaccccctgaccttgcccgatagtcgcgctgtcacctgttcactccttggggtcaggggtcggggagaggggtgagaccgtctcttccctttctggcctcactgcccccgactgtaaaacga

SEQ ID NO: 87686 - DNA, 122 bp, Homo sapiens
aagccctggagaagccctgggctgggcccggcttcagaagctttagagcgctgccctctgcgctcccgtctagaggccgcaccgttcacgccccacgtctgcgcccaggcgaggggatttcc

SEQ ID NO: 87687 - DNA, 122 bp, Homo sapiens
gcctagacaagaggctgcaggacaccacccgctccccccatgctcaggactgctgacacacgaacccctacaaacgcggccgcccttgcccgccagcttggcccctagcttcgccccttctt

SEQ ID NO: 87688 - DNA, 122 bp, Homo sapiens
cagtttcttcactttctgcagctgggcccttcttcacactggagcagctgtggctggagacggtcgagccgctggatgacgacgaggaggactcagactccgtctccgttctctttcttctc

SEQ ID NO: 87689 - DNA, 122 bp, Homo sapiens
gtctggggctggcgtggggttccaggaggtcagcggacacagccagggtctcaggaggcgcgctctgcgcgctgtttcctttcttccctgggtgatctcctgcgtggccaaggtttgcccca

SEQ ID NO: 87690 - DNA, 122 bp, Homo sapiens
ccggtgctgcagaagctgcatggagcccacagccagccctggacacagccgggaggagggcgctgacctcgaagggccgctttctgctgccctgggagctgggtgcttggggtcctaatctg

SEQ ID NO: 87691 - DNA, 122 bp, Homo sapiens
acccgtcagagggcctgggaacggagcatcctgggaaagatagttcccagacgggcttcccgcgctgcttcccggcgccttcggcggcgagaggactccatttcccgacgtgccccgggacc

SEQ ID NO: 87692 - DNA, 122 bp, Homo sapiens
agggggctagcgaggaggaagaggcgggaggtgcggcaggggcacaggtgacgctcctcccgcctgcctagcagagctccaggcgcacatccgcagtcagccacctcgcgcgcgcctccagg

SEQ ID NO: 87693 - DNA, 122 bp, Homo sapiens
tggtgcccacacacatggctccaggcccacgcgggtacacacctccccagcctgcacacgcgtgtttcacatgagtcacacacctgccaggccgctcagggcatctggcttcaaagcggcat

SEQ ID NO: 87694 - DNA, 122 bp, Homo sapiens
agaatattagattcattattacaaaaataaaatacacattgaaatactttaataatgttgcgatggattgccacagtgtgaaggaaatgcagtgtggggataggactattttatcagtgcat

SEQ ID NO: 87695 - DNA, 122 bp, Homo sapiens
aagcaggtgctggcggggcgggggtcggggtggggtgccggggcgtagccaggagcccggcgggggaggccacatttcctggctctaaactgtacttctaacgcctggggacacattaacga

SEQ ID NO: 87696 - DNA, 122 bp, Homo sapiens
agacattctttctgttagcaatttgacaactctttccccagttgtctgtactgaacctggcgctgtgctccgtaatggtgacctagctgtgaataagatagaatcaccttaaactcagaggg

SEQ ID NO: 87697 - DNA, 122 bp, Homo sapiens
gcctcctcccaggccatgttctcaggcttttgaacccgggagatacagcttgcattgggccgagatcgagccactgcacaccagcctgggcaacagagccagactccgtctctaaaaaaaaa

SEQ ID NO: 87698 - DNA, 122 bp, Homo sapiens
gggaatgctcccctctccgcctccaaaatattcatcttctcccctcccgctcggccttgccggggcttctcattgaactttgatgatcccattaaagtccgggatcagaatcacagaaactg

SEQ ID NO: 87699 - DNA, 122 bp, Homo sapiens
cattcacagacgcacactccccccatacgccaaccccagacacacattcataaccaggcccgagagaagtacacacgcaccccctcactgcctactcctgctttcgggagcctgagtcattc

SEQ ID NO: 87700 - DNA, 122 bp, Homo sapiens
accccgcgccgcgccccctaggctgcccgccgcacctgccgccgaaccccgccgcccgcccgggccctccaccaggaaccccccgcccagaacccccgtcccgaccccggccgccgcacgcc

SEQ ID NO: 87701 - DNA, 122 bp, Homo sapiens
cgcagaacatacagcaacctcagggaacgtcgttggtttgtgggtccttcttgacaaaaacgccatccttaaagccacattttatgtgcgtgacccaggccatcaatgatcctcactcactg

SEQ ID NO: 87702 - DNA, 122 bp, Homo sapiens
cttgggtttagtgttgaagaaaggattattttttcctttggatgtgtcgctctgggaacccgcgcttttgtccttctgcgttgaaagacctgtattcagaacatcctcggcgctgataggta

SEQ ID NO: 87703 - DNA, 122 bp, Homo sapiens
ctgctggccattgcttgggtcctgtgttcaccctgggcccagtggcagcctgggctgagccgggggcgtgagagcccagggctctcagtcatgtttccttgacacatagttctggagtttgg

SEQ ID NO: 87704 - DNA, 122 bp, Homo sapiens
gctcctcctcgacccacggtgctctctcccaccaggcctaaggtgtgtgtgctgggctcccgggagcagctgtgcatccatcctgaggtgaagaaacaagagagtaaccatctacaggtagg

SEQ ID NO: 87705 - DNA, 122 bp, Homo sapiens
ctgagcccctctctaccagggtgcccaggtcatgagggtgggaaggctctcctgaatatccggggcactagactgatggcatccatggctcaggaaggtcaggggactgactgtggcctctg

SEQ ID NO: 87706 - DNA, 122 bp, Homo sapiens
cactgggagtccacaatggcctaatgcacgtttcaagctcttggtttctatcaaacggctcgctcaaggtgggtaaccaatggaaacgcataatctatccccggcggatgtcctggaggcca

SEQ ID NO: 87707 - DNA, 122 bp, Homo sapiens
cctggctgatgagagagaggcctggctcctgagtatagaaccacttctcctagcacggctcggaattctggctgccggacacacgtgacaaaccagcgagtcacattattccagatccggcg

SEQ ID NO: 87708 - DNA, 122 bp, Homo sapiens
agggctgcaggggatggctctggaaggacactgcagcgaggctgccagactccttggaaccgcagcgccgacgcagccatttcccagggagatcaatcctctggcaggtccatttcctccgc

SEQ ID NO: 87709 - DNA, 122 bp, Homo sapiens
tcttcctgatacctggtatgcgctcactaaatgcttgggaacgtgaatgaatgaatgaaacgtcttctgacgtgatccttgtatctacatctccttgctgcggccaagtctcaggtgcaccc

SEQ ID NO: 87710 - DNA, 122 bp, Homo sapiens
cctcagagacaccagaacacccagcggcccgcgtccagggagtctagaaccttgggctcccgcgcacacccaggccaggtcctggccgtcattctcccgccggcctctgggggagctgcgcg

SEQ ID NO: 87711 - DNA, 122 bp, Homo sapiens
ttacaggtgcccgcgtggtacttgagggcgctcacgttgcgtctgtgggccgtgaacgtgcgcacacactcccctgtgtctgccagccagcacttgacggtcctgtccgcgctgccagagta

SEQ ID NO: 87712 - DNA, 122 bp, Homo sapiens
aaaccccgtctcttctaaaaatacaaaaattagctgcgtgtggtggtgcacgcctgtcatcgcagctacttgggaggctgaggcaggagaatcgcttgaacccaggaggtagaggttgcagt

SEQ ID NO: 87713 - DNA, 122 bp, Homo sapiens
accaacagggtgaggagtcaggaactgacctagacccagcacctcctgagagccagaccccgcatgggtgatttcacatcctccgtctcatgtgacatctcacactagccctcttcccattt

SEQ ID NO: 87714 - DNA, 122 bp, Homo sapiens
ccctcctcatctcttcaaggggaggggacgcttctggacggagccttggtgctccctggccgggtgtgcctaagggggctctaggaggaatcccagagccaagcattactcagagggcgcct

SEQ ID NO: 87715 - DNA, 122 bp, Homo sapiens
ggtcggaggtcagaggtggcaaggacgtgggaggggcctgcaggctgggtgtgcctgctgcgcagacccagaccctgggcagcagacaggaaggtggcctgaggagatgcagggaacagacc

SEQ ID NO: 87716 - DNA, 122 bp, Homo sapiens
tgtgcgaactgagtgcggggattgccacttctgccgagacatgaagaagttcggggggcccgggcgcatgaagcagtcgtgcctgctccggcagtgcactgccgtgagttctgcccccacct

SEQ ID NO: 87717 - DNA, 122 bp, Homo sapiens
gtgtctttctttatcgacgtgccctctcatccccgcttgcctatcccgggaccttgcccgcgccttcggacaggacaagactaaatcttggctccagaggtcccacaaggctcccccagaaa

SEQ ID NO: 87718 - DNA, 122 bp, Homo sapiens
acctgcaactccttgcgcgtgaatttggtttgctcctgcagctgctccagaccctcaggccggtgacacacggtggacaattcaaattcatcgtccacgctgtctgcgggagcggtgaggac

SEQ ID NO: 87719 - DNA, 122 bp, Homo sapiens
gaactcccaatgtgggttcacttaatgacagcttccatacacttcagattttcttttgatcgaaaatttggaagatgcaaatcaatttaaaaattgttctacccctgggtaaaatgaagtgc

SEQ ID NO: 87720 - DNA, 122 bp, Homo sapiens
gagctacaaaagaggtgctctctgccttggtgagggatggggccaagtccctaccctggacggtagctggaagatgctttcttacagtgaagaaggtgggaagggaagaggctggatctcga

SEQ ID NO: 87721 - DNA, 122 bp, Homo sapiens
agagatcagtggggaaagaccgggtcggggaagttaaggaggggcccgggctcagcaacccgcgcccagattgccttctggcattctgcgtcgttggggaagggccctcttatctcgcggtg

SEQ ID NO: 87722 - DNA, 122 bp, Homo sapiens
cactgaggcctagagacaggcttgttgttcccctcagggcaccccatccaacatcttctccgagtggatgggcggcctggcacgggacagcctgcggagcccgagggaggcaccctcgtgtc

SEQ ID NO: 87723 - DNA, 122 bp, Homo sapiens
tcgcttgcgcgggggccgaggactgggggcttttgcccgcccggctgctgcgagggagcgcgcagcctgcggcctccgggcttcgttgcgtcgcccgcagctctgatcgttcgtgagcgtcg

SEQ ID NO: 87724 - DNA, 122 bp, Homo sapiens
cacgagaaatcaaagccccggggcctgggtcccacgcggggtcccttacccagggtgccccgggcgctcatttgcatgtcccacccaacaggtaaacctgacagatcggtcgcggccagata

SEQ ID NO: 87725 - DNA, 122 bp, Homo sapiens
gaaacctggccggcgggcaggaggggagagctcggcctcgagctctgcctggcggggccccggcctggaggcatccccgacccgcacctggcggcgcgacccacctacctgcccgtccccaa

SEQ ID NO: 87726 - DNA, 122 bp, Homo sapiens
gtcagattggacacatgtacattcaaaatctttaactatacccatgtgtctgccttagatcggaagctactagactagagtaggtattagctgtgtctgatggtgttagtgtgtacagttgc

SEQ ID NO: 87727 - DNA, 122 bp, Homo sapiens
cgcagaggaaatgcttccccacttgtaaaactctctctgtgggccactatcgtgcctggccgccacacttcctctctgctccaactatggcctcgctcttcacatgcaggcagctccccgag

SEQ ID NO: 87728 - DNA, 122 bp, Homo sapiens
gcggatcccggggcctcccgggctgggcctccctgagtgcgccctcaggccccaggggagcggcttctggcaaagcctccctgcagttcgccaggggcagcaagcatccaggccactagggc

SEQ ID NO: 87729 - DNA, 122 bp, Homo sapiens
ttctgacagttttttttatttggcaaaacagttttctcctgcatctggaaccctcccaggcgagcccttcggttgcactgaggaagggccacaatcgtggttcttggcaagcgaggcgtgga

SEQ ID NO: 87730 - DNA, 122 bp, Homo sapiens
gagttctcagtcaggtcctcagagtgagccaggtatgagggtggctcagtaaacaggacccgaataaggcaaatgtccaggtctcactttctcattgctgaaggggtgtgcgcaaagggcag

SEQ ID NO: 87731 - DNA, 122 bp, Homo sapiens
agcgccactgaaatctgcagtacaagaggcaggcaactgctgccctttccatccttcccacggagtcgaactccagccagaggaaggtatgagaccgataaaggagaaggctgacaccagaa

SEQ ID NO: 87732 - DNA, 122 bp, Homo sapiens
tgctggtgggcgacagggacgtaggcaagagtgagatcctggagagcctgcaggacggcacggccgagtccccgtacagtcacctggggggaatcgactacaagacgaccaccatcctgctg

SEQ ID NO: 87733 - DNA, 122 bp, Homo sapiens
tcctagctcaggacagtggcgactgcccggctgcatgcactccgattacccacgtgctgccgtcctggtctcatccacagatagctccagcttttgttggtgggagtggtctccggaggcct

SEQ ID NO: 87734 - DNA, 122 bp, Homo sapiens
ccaggaagcagaggccaccggtgcagggaggcaagtcccccatgggtggggggataggggcgccacacggccggaaactgcagagtccacattcctggacccacactgcggttcagcaccgg

SEQ ID NO: 87735 - DNA, 122 bp, Homo sapiens
agagttgcagaaaatgcaggcggtcaggcgcaggtctgctgcgggagcacctgccgtgtccgacagctgcactggaagaggggcgtgtgtctcccagccgggcggaaccgagaccgcttcgt

SEQ ID NO: 87736 - DNA, 122 bp, Homo sapiens
ccacggggaaagcagcgtctctaggaccaggggctccgagcatggcacagcgccaactctcgtctcttgccgcctcctgagaacctgggtgcagcacaaaacagtcaaatattttcctcttc

SEQ ID NO: 87737 - DNA, 122 bp, Homo sapiens
cgcccatggggggtggggcctgagagccgactgaggccttgtggactgcagtgggccctccggtccctctaaacccccaggcctcctctctgcttggtatctgtttgggattgaagaccgtt

SEQ ID NO: 87738 - DNA, 122 bp, Homo sapiens
gaggaggtgtgaacagagtaagcctccgcactccctggggtagggagcggcagggcaagtcgccaggcttgaggcggggggagatcccaacttcctcacagttcatggaggccttaggtctc

SEQ ID NO: 87739 - DNA, 122 bp, Homo sapiens
cctggggatgctttagagggcctaggagataaagccttgtttcttttataatttgctattcgctgatttcgccgcctcctcgcagcttggcctaccgcgctagtgttccggactaacgaaca

SEQ ID NO: 87740 - DNA, 122 bp, Homo sapiens
caatgggccctgagtgtgtaaggcaggacaagtgacttgggaaaaaaaaaaaaaaaaacccgcccagcctgtgtccccctctgcaagcaggggataagaactgtgcctccctttctttgctg

SEQ ID NO: 87741 - DNA, 122 bp, Homo sapiens
ggggcggctggcgccgggggccggggagcgccaggtaggtgggccgggccgggcaggaggcgacgcggccgccgcgggggccggggccggggacggacagcgggcgcgggggcgcgtccagg

SEQ ID NO: 87742 - DNA, 122 bp, Homo sapiens
cccccttgatgccaagcactttacacacattacttcatatcttacttcagttaatcttcacgatgacctgatgaagtaatacacttaatgcctatgaggtaataaataacagccccaataca

SEQ ID NO: 87743 - DNA, 122 bp, Homo sapiens
gaggcggcgggttagagacggagctctccagttcgagcccctccatggagcaacgtggtccggtgggccttgtgccccgcggccactagggggcagcatcgtccacagggtcctggagcgga

SEQ ID NO: 87744 - DNA, 122 bp, Homo sapiens
caggcctcttggggctggggctggagtctgctctccatcacttctcgtttccttcccccgcgtgtgtttaacaggagccactgtgcccgctgagtcacttgagaggccagggcccagctcgt

SEQ ID NO: 87745 - DNA, 122 bp, Homo sapiens
caaccacatctggctcacttttgtattttttatacacatgggtttacaccatgttgcaggcgctggtctcaaactccctcccaagctcaggtgatcctctgtctcagcctcctaaagtgctg

SEQ ID NO: 87746 - DNA, 122 bp, Homo sapiens
agggggcccggggttccacagctagggaagcttgctcagacaggcagcacacccagggcacggccactcacgcccccgcaccaggagacccatttggaagttagttagggtttgttttgttt

SEQ ID NO: 87747 - DNA, 122 bp, Homo sapiens
gcagcaggagatgctccccgcacccctcctcccattcctacctcccccagccctttctagcgcctcttggaggggaccgggcctgccctgcgctctcaacctaattcggcctcggagggtcc

SEQ ID NO: 87748 - DNA, 122 bp, Homo sapiens
acattttccccaaaacctgacccaattcagatacaaaactactgctcaaatagtagaagccgctaatcttgtctttggttttaatttacatatttttctgaatatcgaaatccgttcctata

SEQ ID NO: 87749 - DNA, 122 bp, Homo sapiens
ttcccaggaacactttccgaagcttcggctccagctacaggtaggggaacggtcctgtcccgccccacagccaaccacgttctcatccgactgctggggacagcctcggggctccctgactc

SEQ ID NO: 87750 - DNA, 122 bp, Homo sapiens
ccatagccccccactaagatcagtgccttcatcgcgcctgcggacgttgagggggtgtcccgggctctgaggtgcctgcagcccgcctggccggtccctgccgcgcactcccaacgccgtgc

SEQ ID NO: 87751 - DNA, 122 bp, Homo sapiens
catgttttcttcaccgttatctgcagtgccttgaacactaatactggttgaatgaacgaacgcattaatggagcggtgatattggggcagagaggatgcagggcttgcttttcaccgccatt

SEQ ID NO: 87752 - DNA, 122 bp, Homo sapiens
aaacctcccacaggggagtccttggcaatcttctccctgctttcaataggaagagttacccgagtattctaaccggagctcttagttcacacaacttcaagagtccccagtctgggctgaaa

SEQ ID NO: 87753 - DNA, 122 bp, Homo sapiens
ggcccaggagggagctgcaccctggtgggcagccatgggagtgtgtcaggtggaagcagccgtcagggtccctctctgctctctgtccggacagacagggctccaaccttcacttcagttct

SEQ ID NO: 87754 - DNA, 122 bp, Homo sapiens
cgcgcctcagccccagacggacgactggcccctccccgcccggcgccccagcgcctcccgcggcggcttggccccagccccggcgcccccacgcctaagaacagccccttcctctcccggac

SEQ ID NO: 87755 - DNA, 122 bp, Homo sapiens
aggggcggacagtcctgacggtgcggggcggggctggcggctgcccaggcctggctgaggcgccgcggccgggtccctctccacctgccgggcggagcgcacgggccatgggctgagccccg

SEQ ID NO: 87756 - DNA, 122 bp, Homo sapiens
gaaaccctacggaaagaggcgtggagcaggcccagccgggagcccagggagagtggactccgcacaccgagacccgcctgagcagcagagaatggcttccggcttccgcacaccgagacccg

SEQ ID NO: 87757 - DNA, 122 bp, Homo sapiens
cacagatggcgtttgttcaggtttgttttccgttctgcaggagcagcagcactggcctgtcgacagtgcaggtggctggcaatggccttgctgacctcgagccgggcccacgtggggacctt

SEQ ID NO: 87758 - DNA, 122 bp, Homo sapiens
aagttaccagggtctttttctttctgactaatggcaatgcaaactattctcagccctgtgcgagctctggggagtgttctctctgttctctggtgattctttccctggcattgcgtagtgtc

SEQ ID NO: 87759 - DNA, 122 bp, Homo sapiens
aaaacacaaccttatttctcaagaattagaaaatttccattctgtaccaaactgtaaaagcgtttcttagaatttgtatgtttcacaaaataattcaccagaaattcttttgtaattctgac

SEQ ID NO: 87760 - DNA, 122 bp, Homo sapiens
atggagaagggagggccagaaggtacgctcgcccccgcggactgcctggcccaccccacgcgccaggactgctggcggcgcctggccctgcatacccacagacggcccgcccccgctccctg

SEQ ID NO: 87761 - DNA, 122 bp, Homo sapiens
cgacgtgggggatggggatggggactttggggccggggtcaacaaggacgggggcagccgcgtggtggtgcagatggaggaggtggcacggacggtgaacgtggtgatggtgctggtgccac

SEQ ID NO: 87762 - DNA, 122 bp, Homo sapiens
ttaggctcaatttttcgcggctataaacactgactgccctgaacatctttgagcaggaggcgctgtatggttttcggatcattctcggaggaggggttcccagacgctggactccacaatca

SEQ ID NO: 87763 - DNA, 122 bp, Homo sapiens
tgaggcacatctttgtgcaaggcacactctcttaaagacgacaaagggatgtgagcttgacgaagggtgtaaataccaagtctcccttcccgtcttctctgactgcgtgaccacggttcatt

SEQ ID NO: 87764 - DNA, 122 bp, Homo sapiens
tgggccccgggcagcccgcggggagggtctgcgtggtgactcccccgcgctagcagcggccgcgtctcacctgtaggagctgctcactgcactcgccacctcctcgcggatttgccggttga

SEQ ID NO: 87765 - DNA, 122 bp, Homo sapiens
cggcccgcgatccctatgggaaccggctcccgccccgggtctgcctgggcggggccgccgcgccccagcttcccacccccggcccggcccagcccggccgccctcccggctgcagggaaagg

SEQ ID NO: 87766 - DNA, 122 bp, Homo sapiens
tacaatgatactatttttagtgaggagaaatttattaaaatatacaaatgtttgaggtaacgttaggtattcaggacaaaaaatgtttattgttttgattatacatgcagtaccttttgtga

SEQ ID NO: 87767 - DNA, 122 bp, Homo sapiens
tggtggcggtggctcctctggggcatgaaggccgagccaggcgctagcctaataaaatgccgggtgtcggaacgctcaaaagaaaaccacaaatgaaatcccctgcgggcgccaggccccga

SEQ ID NO: 87768 - DNA, 122 bp, Homo sapiens
cctcgccccctggcgggcgagcggtaggtgtcgaagcactggggtggggggtgcaaaccccgcgggcagcggaaaagaggccgtggggggcctcccagcgctggcagacaccgtgaggctgg

SEQ ID NO: 87769 - DNA, 122 bp, Homo sapiens
gccttctctgcagagcacagggcacacgtcctgagccctggcgtgggcgtcctgcgagcacggcctcctgtcctggaccctgttcgtccgctgccgtgctcaccaggccagccctcggtaac

SEQ ID NO: 87770 - DNA, 122 bp, Homo sapiens
ccgggggtgaggcagctcggcttcccagcgcggcacagcaagccggcgcccttttattcccggcgctgcgaggcttccccaagtccacgcctcggcacacccccaccctgccccaccccggg

SEQ ID NO: 87771 - DNA, 122 bp, Homo sapiens
ttagcgcacaagatttcttcgtctgtctccaaaggtttctgaagccccaccctttgcccacgcacggtgccaaggagactgtgccctgccttgacaacagttgctaaggggcggagacttcg

SEQ ID NO: 87772 - DNA, 122 bp, Homo sapiens
aaccaagtccattatcaccacttttgctgatgaagtaggtgtatacgagatgactacatgcggctgggcgcagtggttcacgcctgtaaccccaacactttgggaggcccaggtgggtggat

SEQ ID NO: 87773 - DNA, 122 bp, Homo sapiens
ttacctttcttcgtactgtaaacttcctttaaaacatacaaactcataacctggaaaagtcgacaaggacgcctttcactttggcaggggaagaagacgactggcttgcatctgggggtcag

SEQ ID NO: 87774 - DNA, 122 bp, Homo sapiens
cccaccgcggggcggaagtgggtgtggccacgggcggaagcactgggtcaggggcccaatcgtgcagccagcccctcccactcgccaccgccccacccctccggcccagaccggaaatgagg

SEQ ID NO: 87775 - DNA, 122 bp, Homo sapiens
gcccagcccgttccaccggatgtacaccctggagcatttcaacaacagcaaggcctccaccgtgtccaggctgaccaaggcccaggaggagatccgtctgaccaacctgttcacgctcacca

SEQ ID NO: 87776 - DNA, 122 bp, Homo sapiens
ggaggaggccctgcgaaggaggcggcccagagacattgccgggcaagtgtttccatcctccgcatgcgtcggcccgggcagggctcgtcaagacctgcctgggggaggaagagagaggagat

SEQ ID NO: 87777 - DNA, 122 bp, Homo sapiens
aatgatcctctcacttcagcctcccaagcaacagggaccacaggcacgtgctaccacacccggctaatttttaaaactttttgtagatgtggcgtttcgccatgttgtccaggctggtcttg

SEQ ID NO: 87778 - DNA, 122 bp, Homo sapiens
aaccctccttcatggcaggtattcagtgccatatacccctccctcacggtaggtatacagcgccctatacccctccctctcggtaggtattcagcgccctatacccctccctcgcggtaggt

SEQ ID NO: 87779 - DNA, 122 bp, Homo sapiens
cccgcgtctgtaaatgaggctggtttccccgtcctgccctgaggtttgaggtggtgctgccggcgacagtggtcaggggaagaagcggcagccgcctgtgcccagcgccccagcaggagcta

SEQ ID NO: 87780 - DNA, 122 bp, Homo sapiens
caaactgtcacggctccagcagagaacacaccggtaaggcccagcagtcagacaggatgtcgtcacaccaccaactcggcaatgctggctgataaaacagccatctcaccctttctgggggt

SEQ ID NO: 87781 - DNA, 122 bp, Homo sapiens
gcgcaggcgcgggccgcggggcggggcggggcgctgctggtgggcggatctgggggctggcggggcggggcctgctaagggtcgcagccgtgccccgtcgatgagcggggctgggggcgggc

SEQ ID NO: 87782 - DNA, 122 bp, Homo sapiens
gagaaggtagatttcgaagtttccaagggagcaggacttgtatctgaaggctcagcctctcgcccacgttcaaactctgaaccccactgtgcatcctaagctctctgtgcctctgttttctc

SEQ ID NO: 87783 - DNA, 122 bp, Homo sapiens
cggccacactgggcctggcgcccatccaggtggtgggccagcccgtcatggcgctcaacacgcccacctcccagctcctggccaagcaggtgcccgtcagcggctacctggcctcggcggct

SEQ ID NO: 87784 - DNA, 122 bp, Homo sapiens
tcattcactagcccaaagctccacagcaagcaggtgcagggactgggattccagcctgggcgcccctgagcccagggtggggacggaggggtcgctgcatagcagttttcccatcggcgtct

SEQ ID NO: 87785 - DNA, 122 bp, Homo sapiens
gggtttctcatgagctcctcagagtgcagcatgcagctgactggccgactggtgatgcaccgttccccaggaaatgtggccggtctgtattctacacagttgaggtcgtccgtggaggtgtg

SEQ ID NO: 87786 - DNA, 122 bp, Homo sapiens
tttgtatgggaagttggccaggagcagggcagggtctggagcgagggtgccatctttctgcgcccccacatgggaggctcctccctctcttcgtggcaggagtccccgatgactgtgagtgc

SEQ ID NO: 87787 - DNA, 122 bp, Homo sapiens
ggcaggccgacagcacagccgtgtctgcatccatccagaggaggtctgtgtggtgtggggcgggccaggagcgaagagaggccttcctccctttgtgctccccccgccccccggccctataa

SEQ ID NO: 87788 - DNA, 122 bp, Homo sapiens
tggacgagagcaaaggacgccggtggaagggacagtgggctccggaggggcgagtggattcggataatttggggaatcagtaaaaggctagggggcacatcatgatggagtcagcctggaat

SEQ ID NO: 87789 - DNA, 122 bp, Homo sapiens
cagagaagctgaaggatgccggcctgcaggcgcccaagcccgtccaacaccccttgcatccggtgcccaccccacaccacacggtgcccagcctcatctccaaccatggcatcttctctctg

SEQ ID NO: 87790 - DNA, 122 bp, Homo sapiens
tctcaagtgattgacacatgagtctaaaacatctgtgttccagtcagcactacttcaccccgtgtttgttgccttgaatatatatgttcagttatttcaacttcagtttttcattaattgta

SEQ ID NO: 87791 - DNA, 122 bp, Homo sapiens
ctggagataatcactccaaccactgaactcctatacctgtgtatgtggtactgtattagtcggttcttacattgctataaagaaatacctgagactgcgtaattcataaaaagaaaagaggg

SEQ ID NO: 87792 - DNA, 122 bp, Homo sapiens
ttgctcagctttgacaagctaagacaatgaccaaatgctgttgccttcattctcacccaacgggtgcaaaatctgcttacatggaacagtctttccttctgaacatggattgccagttattg

SEQ ID NO: 87793 - DNA, 122 bp, Homo sapiens
tagccaacactgagttttccaggtgccaggcattgccggcattactctctgcccgtgcttcgtgcatgtattaaatcatgtcattctgacaaagcccctattcggcattcatcaccccccca

SEQ ID NO: 87794 - DNA, 122 bp, Homo sapiens
tgcctccaagatgacaaagaaaagaaggaacaaaggtcgtgctgaaaagggccgcggccacgtgcaggctattcgctgcactaactgtgcccgatgcatgcccaaggacaaggccattaaga

SEQ ID NO: 87795 - DNA, 122 bp, Homo sapiens
tcaggattcgctggtgcttttgcatttctaaaatgggaatcccgtggctgagcttttagccggccggaacgactgagggctgcatccctttcccgcaggagcggggctcccgcctccagttc

SEQ ID NO: 87796 - DNA, 122 bp, Homo sapiens
ctcccgccgactactcctccttcttctgctgcttcagcgagaacagcttgatcatcctaccgctgccgccgcggggcccgggaccccggccacccggcccccagccgccgcccgcgtcgcct

SEQ ID NO: 87797 - DNA, 122 bp, Homo sapiens
aacctcacagtttccgtctctgataactacggggcgccccctggcgcagcagtccaggcgcgctcttctgtggcaagcctggtgatttttgttaatgacatcaatgaccatcctcctgtctt

SEQ ID NO: 87798 - DNA, 122 bp, Homo sapiens
ccaggaaggggttcttgccacccatccacgagatgctgctgaagatgaggagcttgtggccgccgaacgcgcgcaccgggtagttgtaggtgatgttgacgcggtaggcgccccgcggcagc

SEQ ID NO: 87799 - DNA, 122 bp, Homo sapiens
acactaggaaagggctataaaggggtcagaatattcctgtccactgctagaccactatcacgcagatactcagctaaggttgtagataccacctttgtctctataaatttctgatcatgtgt

SEQ ID NO: 87800 - DNA, 122 bp, Homo sapiens
accttttggcacaaatcatttggcgctcggcacttcatgaagcacatcgtgtgcctttagcgtgtttctcctgtttctataggcagtctaagaaaaacgctaggtggtaagagcacgcggtg

SEQ ID NO: 87801 - DNA, 122 bp, Homo sapiens
actgagtttaaagattttgaaactaagactatttctgtagcactttcatggaatgactcacgcaggatctacagagacaactgtcagggagtgaagccaagggagctatcctgctgctgtag

SEQ ID NO: 87802 - DNA, 122 bp, Homo sapiens
actgagctacatcccctggcacaagtcggttgtaacggagaattcctgtcatgttaaaaacgcgaagcattttatattacctcgtgctcgaccagggagtgaccaactctgaggatgaattc

SEQ ID NO: 87803 - DNA, 122 bp, Homo sapiens
ccctacctgcagtgggaggccgacaacggaaacgcaatgtcagtttccgcggaagagacccgcgccccgaacctgtagccagaacgccgaagcagttctcgcgataccctgggatgtgctct

SEQ ID NO: 87804 - DNA, 122 bp, Homo sapiens
gtttcttttccccctcttgcgtggggcggggtggtgcgttccgagttcccaggagttcgacgcgggcgggtgccgaggggaggggagtggcggcggcggcgggcggctcccgcttcagcctc

SEQ ID NO: 87805 - DNA, 122 bp, Homo sapiens
acccgcaccgtccccgcggccacccgcaccatccccgtggggctgcttctcctgcctgctcgtgttagcaagcagaaggactcggtgcctgatgttctagaagccaatgccatggcaccaag

SEQ ID NO: 87806 - DNA, 122 bp, Homo sapiens
ataagaagcactgttatccttggccatttcaattaatagaattatcttctcagccgtggccgggcgcggtggctcacgcctgtaatcccagcactttgggagacgcgaagtgggcggatcac

SEQ ID NO: 87807 - DNA, 122 bp, Homo sapiens
cctcttctttttctctgttttctaaataagcctccatttcagagagttggaagaatttctcgtctattatggacttttctcttggttttccatgtcctgtgttttgcaccttgctctgctgt

SEQ ID NO: 87808 - DNA, 122 bp, Homo sapiens
agaggggcatcagcgctcaaggcttcactgtattagcacgtgaagaaatccgtgctgtgccgttacctactccccacatcatcagcctttctcatcagggcactaggctgggccatgacctg

SEQ ID NO: 87809 - DNA, 122 bp, Homo sapiens
tgacattttcatatatatgagtgtgtgtttttatggggacatgggcatatcaagtaatttcgaattgcatttagaacactgtgaatgaaacatcaggttgctcacacagggtcactctctgc

SEQ ID NO: 87810 - DNA, 122 bp, Homo sapiens
ggaggctgaggcaggagaatcgcttgaacccgggaggcggaggttgcagtgagccaagatcgtgccactgccctccaacctaggctcaaaaaaaacagtgtgtggcacctccccattctctg

SEQ ID NO: 87811 - DNA, 122 bp, Homo sapiens
agtgaggaaggcaactgaccttctcaaaagccaacgctccgcctgcatggctcaggctgacgactaaacatgtccacgtgaatgcaggcgtcgaatgcccaagtacatgtgaatacaggtgt

SEQ ID NO: 87812 - DNA, 122 bp, Homo sapiens
gcgccttgcccggactactcgggcttgttggcatgggatcaactcagccgattccctgtccgcgctgcaaagacgagtgggatccgctgggctcgcggactgccctgagagaggggaccagg

SEQ ID NO: 87813 - DNA, 122 bp, Homo sapiens
gcagctcccggggcctctggtgatcagcttcagccttgtgcatatctgctcctccctctccggcctccccccacacctgtgagaccctaggtcatgcttggccaggcctggcaaggaatttc

SEQ ID NO: 87814 - DNA, 122 bp, Homo sapiens
agcgcactgcagtccgcagtcgccacctgagcgccagcacccctaaggcaggcgtgctgacgccaccagacctgggcccccacccaccgccacctgccccccgagagcgccactcctctgga

SEQ ID NO: 87815 - DNA, 122 bp, Homo sapiens
tgccgcggtggaggaggccaaagtggcccgcaaggggggcggtttggcgggcgtggggggcggggcccattaaagacgctgttcctaccagtggaaagtgcctctgtgggcgagcgggacgt

SEQ ID NO: 87816 - DNA, 122 bp, Homo sapiens
tgtctttactatttcctgttgctctagtgagtctcttccagggctccagcgcaggccctccgatggccatcactacccccggctcctctgtgtgcattggtttgcacactcttctgacttca

SEQ ID NO: 87817 - DNA, 122 bp, Homo sapiens
ctccgctcaataaagcctacagctgtttttctctcggtccgatctgtgtctctctctcaccgcgggctgccgccacaccaaatctttggcgtggctaaggcgagaacctttggcattacaac

SEQ ID NO: 87818 - DNA, 122 bp, Homo sapiens
gcggcggcgagctgagggagcagtctccacgagaactgaggcggaccctctggcgccatgcgcgccctccccggcctgctgggggcgagggcgcctacgccccggctgcttctcctcctcca

SEQ ID NO: 87819 - DNA, 122 bp, Homo sapiens
ttcaaaaatttctttcaagtaaaatatttataaagttcactttatgcttataaactgctgcgttgccctagaccgcccgcacaagcccttggagcacaacttggtcagcgcagaatttggtt

SEQ ID NO: 87820 - DNA, 122 bp, Homo sapiens
gggactggcatgatcagctgaactttgtggggtcagcgcttctctctggcttcccctcagcggcgccaaggcgaggggagcgcagaaccccggctcaggacggacagacagacggccagccg

SEQ ID NO: 87821 - DNA, 122 bp, Homo sapiens
gtttgggtggttgagatacccagccctaacctaactaatcctgataccagtgaccaaaagcgggaccttcgcatctttgctgccaaaagacagcccctcctaaagagtaaaggcccgacccc

SEQ ID NO: 87822 - DNA, 122 bp, Homo sapiens
cgggagagagggcgcagcgatgggcgggagacccggggcacatggggcgagggtccggggcgtacgaatggtcaacaccccgcggcagcgccaggcccggggagaaacgtcatccccagggc

SEQ ID NO: 87823 - DNA, 122 bp, Homo sapiens
tcactacctcctccccacagtctccacagagccagctgtgagagggagggcatgccctctcgttacttcagtagtgaagtggagcccagaattccacccacaggcactgcaggggaggagca

SEQ ID NO: 87824 - DNA, 122 bp, Homo sapiens
tacagtgcaagtatcttagttccattgccttcctgaaagatcaataactttgatattttgcggtaagaaggtcagcaaataagtgaaaatagctgaggtgtggcttaatttatgcaaattaa

SEQ ID NO: 87825 - DNA, 122 bp, Homo sapiens
gagacacatcggctgagattagagagatggtccggtagacaaaagtgtaagcatgagacccgaggtaggacaagcagaacttgcagatctattacagatgtaggggtgaggagtgccagggt

SEQ ID NO: 87826 - DNA, 122 bp, Homo sapiens
tgaaacactgccaaactgtcctcgggaaacggtgcagaagtcctctggtttcccccaaggcgcgtgggcaccttggctggaacctcgcccagtaacacgacgtgcctggggccccttcgtca

SEQ ID NO: 87827 - DNA, 122 bp, Homo sapiens
tgtcacccgcccatctagtcaccctagatgctggccccaaagtaaccatggggcaaggcacgccaacaggctatgtaagttgccataatgtctcaaaagaacaatgaaacaggacatatctg

SEQ ID NO: 87828 - DNA, 122 bp, Homo sapiens
ggcgaagcaagttccttagtttctcccaagccagcccgggagctgttggacgagtgggagcgcctggctacctgcaagtcttcgggtttcgcgagcgccgcagagcttttctgcagccgcta

SEQ ID NO: 87829 - DNA, 122 bp, Homo sapiens
agaactgggagacaataaatgtctgcccagtttgttactgaagccccagcaaactaataacgcagttcttctgagggggagggagctatattctcttttctatctcattgtttccagctgaa

SEQ ID NO: 87830 - DNA, 122 bp, Homo sapiens
gcagcgctttacattttgcaaagccccctctctccgagaaattcattttgtttcccaaggcgtgcaggatgcacgaatccccatctcagtatgccacgaggtaattgcaccacccaggcatc

SEQ ID NO: 87831 - DNA, 122 bp, Homo sapiens
caaaggcaacgcattcaaattgctttgtaccatgtaaaacacacactcttgaaaaacagacgcctagtgcggaatcctgtgcacgcctttaactcctccaaacgagcagggggcgtcatgga

SEQ ID NO: 87832 - DNA, 122 bp, Homo sapiens
ggtttcgctatgttgcccaggctggcctcaatctgctgggctcaaatgatgctttcacctcggcctcaggaatacaggagtgtgccattcttcctgctcattttaattttatttacttattt

SEQ ID NO: 87833 - DNA, 122 bp, Homo sapiens
caagtcctgagtctgacgccccccgcctccaccccaaccctgggctgcactgctccgccgcgtccgcacgcacccactcgttggcccgatggccgaaggtgtacagagccacctggctggcc

SEQ ID NO: 87834 - DNA, 122 bp, Homo sapiens
tatgaagtaaaattatttggtgggctgctagttttcattacatgtaacatataacttactcgaattgatacatgaacttaaatagcacttgggtgattgcccaggtgtgatgaatcctttgg

SEQ ID NO: 87835 - DNA, 122 bp, Homo sapiens
cacccttgcctctggtgccgactagcacccaacaccccggtccacttgtgcgagtgagagcgctcggcgaagtcttatatacggggaggcgggaagggggcggagactcgatacgcgacatc

SEQ ID NO: 87836 - DNA, 122 bp, Homo sapiens
agaacagcaagggggaaattcacctccatggtccaatcacctcccaccaggccactcctccgacacatggggattacaattcgaaatgctatttccgtggggacacagagccaaaccatatc

SEQ ID NO: 87837 - DNA, 122 bp, Homo sapiens
acgaccgcccacagtgaggcggctgtagcccgcttccgcccttacagacaccccaggacgcgaccgagacaggtatgacgtcactggaggtcgccattttgcattctctagcaaactttttt

SEQ ID NO: 87838 - DNA, 122 bp, Homo sapiens
ctcaagaaaatatatatatatattggtggattcggtttccctttatgtttctcagaaaaccgtgtgagcccgtttggagtcactccgtctccaagcgacaggcacttccggacgcggggcac

SEQ ID NO: 87839 - DNA, 122 bp, Homo sapiens
gcctccgcaggaggctcatcttgccgtcccgtacagcatagaaggccaaggcacggtcagcgtattccaggcagaccccaaccgtgggcgagaaggggtggggcaggggagcctccagccca

SEQ ID NO: 87840 - DNA, 122 bp, Homo sapiens
tcacgcaattctagctacaacacccaaaccgcaaagtccctgttgcaggggtaaataagccggcgaaacccattcacaggaaggctcccgcgtctcgtcccaagctcttttctcccgagttc

SEQ ID NO: 87841 - DNA, 122 bp, Homo sapiens
gctcaggcagctgtaattctccaggacatcagataaaaggtaaaaaacagatgggagacgcgcctagacagggtattgaataccagcccgaggggcttgggtttcatccaaacagcaaggca

SEQ ID NO: 87842 - DNA, 122 bp, Homo sapiens
tgttttcattacttgcctagactcttcttcctttcccttgctcccaggtgcctgcagcttcgtgtatctttccatagttcacaccttactcaggcttaccctaaccaactcgatcctaccct

SEQ ID NO: 87843 - DNA, 122 bp, Homo sapiens
tatatgggggtaaattctgtgaagtctcaagctgttcattttgtgcaggtgtaaacattacgtgcacctgatactgtcggccattttaaagatgattgtaggtagaagcattttatacctgc

SEQ ID NO: 87844 - DNA, 122 bp, Homo sapiens
gccgccggttccagaggggcgggaccggagcgagagcctgggtggggcgggcgggcgctgcgcgtgcgcagaggtgcggccggggaggcgcgcggaggctggagctggaggcgcggcgccgg

SEQ ID NO: 87845 - DNA, 122 bp, Homo sapiens
tagtgccgtcccctccgatgaaccagtgccttcgaaagcccttgagatttgggaaacaggcggcacagatcttggaggttaccttgttcttaatcagtcctcaggcagtcgcctctaacgcg

SEQ ID NO: 87846 - DNA, 122 bp, Homo sapiens
cggcctggaccccgcatactgccggcggcggcggagtccctccgtgcccgccccgggggacgggagagaaatggagaaacctgagtttgggggctctctttgagtgctcctagtacctgatg

SEQ ID NO: 87847 - DNA, 122 bp, Homo sapiens
ccgcccctctcctcattccaagtcaatcactggcgtgcgtccaggaaacccagtttacgacgacgtctctggtgcgtcacagagcgcgggggaggggcgggatcacattaaaaaaaaaaaaa

SEQ ID NO: 87848 - DNA, 122 bp, Homo sapiens
ccattgacaactcacatctcctgagaagtttatccaaaactttccaactgcaatcatcggcgaacaaggtccctcaacaatgggaccccagttaacgcgaaggaggcagagcgaggtaagga

SEQ ID NO: 87849 - DNA, 122 bp, Homo sapiens
acattccatcaggatgacgtaatcgaaggttggaaccaggcggcctctgcctttgtgttccgggacccctcactcagtgcagagggaaattgacacagccatgatgaggcctggctcacaag

SEQ ID NO: 87850 - DNA, 122 bp, Homo sapiens
cttgaagcagaaagcaagtgaatacgagtcagaaggtgagattaagtccagagttttgaacgagaataaatagaggtaaccaaattttataacactaaagtatacaggattaatttactgta

SEQ ID NO: 87851 - DNA, 122 bp, Homo sapiens
gcgccccaccaatccgcagcggcttcgtcacggcgctcttcgtcgcactccaacccgccgcgtcggcggcatctctcgcgtgctcttgcttgcgcactaatttgtcctccaccgcctcccgt

SEQ ID NO: 87852 - DNA, 122 bp, Homo sapiens
ttggaacgagctctctagcttacaagggcatttgcttgggtgagaggatgttgggaagatcgaacaatcggcttaataaatgccaggcatttgtgaagccgtggagtggaatacattcgcag

SEQ ID NO: 87853 - DNA, 122 bp, Homo sapiens
ccgcttagcaggctccccgcgcaaccctcagtctgtccgtttggagggtgggcgaggcgtcggccagcttgccagggtcacggaagggtcgcctcccaattagaaaccagcttccccctggc

SEQ ID NO: 87854 - DNA, 122 bp, Homo sapiens
cccactgtccccacggtccccacagtagaagcgatgcaggtcccagcggctcctgtgatccgcccaattatcgcgaccaacacataccagcaggtacggctgagctaaggcatgtaagtcag

SEQ ID NO: 87855 - DNA, 122 bp, Homo sapiens
ggccttatctgcaaaattattaagtaagcttttattgtctgccaaccagacaggaatttccggttctagaaatgagaaggctgaaagaacacagcccctgctctcaagaaactcacagtcta

SEQ ID NO: 87856 - DNA, 122 bp, Homo sapiens
cgcatgcgtgcacttacgtgaccccggcctcgtcgtggtcgtctggaaaatgggcctcggcgtgatgctcgccggaccctggcaccacgagggaaatctcaagtagaaccccagctttggca

SEQ ID NO: 87857 - DNA, 122 bp, Homo sapiens
ggtgactggtttccaactctgaggcagcactcagacggcctttgttgaattcattaattacgaatttctctcattcatccccccaagtcataacccccatttctaggcatctaagaggaaaa

SEQ ID NO: 87858 - DNA, 122 bp, Homo sapiens
cttccgcagcgctgcgcctggccctgcttattggcgtctctggaaggagtggctgtggctcgggctctccagataaaccgcgctctaggccgtttcccagataggagcgctataggttttaa

SEQ ID NO: 87859 - DNA, 122 bp, Homo sapiens
aggaaaatgccgggcaccgagttgacgggtgaggggtgtgagccatgtggccggcatggccgccccaccaccagctccatcctgagcacttcacagacatggccctcttcatccacacaact

SEQ ID NO: 87860 - DNA, 122 bp, Homo sapiens
ttctacccatgaatctttaagtctttgattgacagtaggagaaacacacacctgatgtcccggaggaatggtataccctgccacagttttaggaattctggccattctcatcatgatcatta

SEQ ID NO: 87861 - DNA, 122 bp, Homo sapiens
taagagtgacgtgtacaagcacttcatcacagaggtggacagtgttggccctgtcaaagccgggttcccagcagcaagtcagtatgcacacccctgccccggtcccccgactgctggccaca

SEQ ID NO: 87862 - DNA, 122 bp, Homo sapiens
ctggggaaatgcctggtccttctggagatacaggagtgttggattccccgattatggccacgtcctgttcctctggtaccatccacccaccaagtcttgccacggtttccctctgggcctca

SEQ ID NO: 87863 - DNA, 122 bp, Homo sapiens
ctggggaatgcttaacgtttaaaaataggtgctgaagggtccaaagcaaacaacacaagccggaaaagaaatgtttaaaagttagctatatttatacaaggaaaaccaaaagaaatacttaa

SEQ ID NO: 87864 - DNA, 122 bp, Homo sapiens
tatttatttatttttgagatagacttttgctcttgttggccaggctgcagtgcaatggcacgacctcggctcactgcaacctctgcctcccgggttcaaacaattctcctgcctcagcctgc

SEQ ID NO: 87865 - DNA, 122 bp, Homo sapiens
cttgcctcgcggacttggcagccgcgtcctgcgggtctgtccactgaactgctgaggactcgcccgtgtgcggggacccgagtgccacttcccggagcgttaccttgcgctccagcctccag

SEQ ID NO: 87866 - DNA, 122 bp, Homo sapiens
tcgcagcacccgcctggagtagggcccaccaggcgtgcagaaggaagggcaggcagtgggcgtgcatggtgggctggccaggcctgaaagcagcacctccagcccttatatcctgggcctca

SEQ ID NO: 87867 - DNA, 122 bp, Homo sapiens
gccgctcaggagggtgggggcctgctgaaagacagggtcggggcctgcctcctgcatccccggcccaaaagcccgggccaagaaggacacaggcttcaatggctgtcatgtgttgcagacaa

SEQ ID NO: 87868 - DNA, 122 bp, Homo sapiens
ctgggattaatgacacacgggagattcgaagggcagctaatcttggcaagaatgaagacgcgaaagctgatctcttcttcaagactgtggcaggactggaagctgcgtgaaaacgctggttg

SEQ ID NO: 87869 - DNA, 122 bp, Homo sapiens
cattcttcccctccactgggtcctttgaacctagtttggctgggactcgccttcaggcggcgcggaggatttcgaggccctgaggcgcggcccttaatttccggaagtgggggccgcgccgc

SEQ ID NO: 87870 - DNA, 122 bp, Homo sapiens
cccggctcgctgagtgacagcatggccggcggccggggagagccgaccaatcagggagggcgtacgcgacccacgtgcgtaaacggcctcgctattggccggcgccgccagaggcctgcccc

SEQ ID NO: 87871 - DNA, 122 bp, Homo sapiens
tgaaaagcgcctttgctctgcagccttggaggggccaccagctaacgtagactccattcacgctcccattgtaaattccatctgtgtgctatcacttcctgacccagaaacagggaaatatt

SEQ ID NO: 87872 - DNA, 122 bp, Homo sapiens
cctcagttgttgggaatgttgggttacttgtgggttccatttggatactggcccctgtgacggctacaggacatgggacgccacccatccactgatgccacctttctacctcctgccccaac

SEQ ID NO: 87873 - DNA, 122 bp, Homo sapiens
aagtcactttcccgagccatggctaaaaactgacaagaccgcagcacatgagccacaccacggaagccacccaagtgtccctccccagaggagcggatgaacgtgatgcggcctctacgcat

SEQ ID NO: 87874 - DNA, 122 bp, Homo sapiens
tatgtatttatttttttgagacagagtctcgctgtgtcgtcaggctagagtgctgtggcacgatctcggctcactgcaacctccaactccctggttcaaaggattctccagcctccacctcc

SEQ ID NO: 87875 - DNA, 122 bp, Homo sapiens
agacagatcgcgtggtgttggagccaaggctttcagtgcctctgtcacccaaataacgcacggtgtccccatgtgtttggctttttaacaaaggaaagggagcgggagcgagagagagagaa

SEQ ID NO: 87876 - DNA, 122 bp, Homo sapiens
tttttgcccgtctctgggcgcgcggagctgtaggagaggggccactggcgaggccgtgtccgtgctcagtagagtgctggctgcagacacagcccaagagcccctgggcctggagaaggccg

SEQ ID NO: 87877 - DNA, 122 bp, Homo sapiens
gccgggcgatccggggtggttgagttgggaggggggctaccccagtttgtaagcccaccacgtccaaatatcccatccaggaggcgcagagagcaacctcagcatgcataacaaagcagccc

SEQ ID NO: 87878 - DNA, 122 bp, Homo sapiens
tcagaattcctcgggtccctcgatactcggctgaaaattctcatcggactctgagaggagcgctgggctggaggcattttccccagggacagaagcgggctattctctcacttgggccagta

SEQ ID NO: 87879 - DNA, 122 bp, Homo sapiens
ccgccccctctcgcagccctttcatcctcgtcctgtcccctcctgagccttccaagaccacgcctgtgggttctgaactcacgcctccgagttcacgccccccaattctgttccttccccag

SEQ ID NO: 87880 - DNA, 122 bp, Homo sapiens
ccgcgaaggtctgcagcctcgctgctgaagccagcgagaccacgaacccaccgggaggaacgaacaactacagctgcgccgccttaagagctgtaacaccgcgaaggtctgcagcttcactt

SEQ ID NO: 87881 - DNA, 122 bp, Homo sapiens
ttccgtgtagcccctgtttccatgggtgacgacgacttgttgaaaagactcactatcccgcgtggaatgtcctcctgctttttgggttttaggggctagcactgagcgtctttgttcacacg

SEQ ID NO: 87882 - DNA, 122 bp, Homo sapiens
tcgattcagtgctcttgggagcatggcctcatttcacactgtggatgaagccacctcccccgaggagattcagagctgaatgtcacacggggcccagcctgggaaagcacttcatgagcagc

SEQ ID NO: 87883 - DNA, 122 bp, Homo sapiens
aaaaaaagcgagaaagaagctcttagatttgcaacacatcggaaaaccgggggagcaccccgccttatccgatctccatgctccgcaagggccttccgggttttaggacaagcttctcaatg

SEQ ID NO: 87884 - DNA, 122 bp, Homo sapiens
gcgccacccagaacgagctgaggctacaagaatccaaaaacacaaggtaagggcatctcacgccaccagctgacgagggggagaccagcctcacgcccagcaaaagaaaacaagcctccctg

SEQ ID NO: 87885 - DNA, 122 bp, Homo sapiens
acaaaggcggcggaaggtgatcgaattccggtgatgcgagttgttctccgtctataaatacgcctcgcccgagctgtgcggtaggcattgaggcagccagcgcaggggcttctgctgagggg

SEQ ID NO: 87886 - DNA, 122 bp, Homo sapiens
aggccccgtggagggacggacacctgcttctccttctgttttcttggttcagtatctgtgcgctcaggggacgtttggggatgaaacgataatcgtctgagggcagaaccacgtcctcctgc

SEQ ID NO: 87887 - DNA, 122 bp, Homo sapiens
tccatgcccctctccatcctctgtttctccgagaggggaaaaaaccctgatcagtctccccggaattcctggtcccatctcagaaggagctcagctctctaagctgccctctattccccatt

SEQ ID NO: 87888 - DNA, 122 bp, Homo sapiens
ggcctctgtccagggagggcggctcgggtcgaggaccagggtccggactgggagcaatgacggggagcctgcctgacctctcgctggccacaactatgccctgcaccttgcgtgggatgtgc

SEQ ID NO: 87889 - DNA, 122 bp, Homo sapiens
agccaagcaacattataggcttcaggcctacctagcccaggctgggttaaagcagataaacgaagcggacagcggaggaaaagcacgtaaccaagtgcagtgggtctgaagcgaaaggcaag

SEQ ID NO: 87890 - DNA, 122 bp, Homo sapiens
cttcatatcatcatgattttaaaacatgcattgaatgctgctacagtccaagaataacaacgcctgtggcctccaaggagtaagggacccctggaacatcagcaccagcaaaaggaagagag

SEQ ID NO: 87891 - DNA, 122 bp, Homo sapiens
cccaggccccacgtgtgttgtcactgtgtggctgctccctgcttcctttgggttgagtgtcgggactctggctctgggcccgaaatgagcacacctaccctcagcctctgccctgccttgct

SEQ ID NO: 87892 - DNA, 122 bp, Homo sapiens
ccaagagaagagacagacggtgacctgtaatctccttcacggaggtcccagctgctgtcccggtctgggtcggaatccactggcctcccctagtccccactatgccccctgggtcccacacc

SEQ ID NO: 87893 - DNA, 122 bp, Homo sapiens
aatgcctatgtaccagggagaaggagcgggccctcccgcgccctgtgctggccggagcagcgttttcttatggtggagcagctgaggagggcaggaaccgcctctcagcaccgacctcccct

SEQ ID NO: 87894 - DNA, 122 bp, Homo sapiens
caaagggtgtacaccagtctgtgaaaaggctcagaatctccagagggggagatgatattacgcacaatatgataaaaagactgtgagtccaccgcggatcctaagagccaggggggcaagag

SEQ ID NO: 87895 - DNA, 122 bp, Homo sapiens
gcatgaacctccggaactttgattcccagaaagccacaggctggcgcaggcgcaccaagccgctcccctcccccggggagcggcggggagaccaggagccggaggggagagcggaagtgcgc

SEQ ID NO: 87896 - DNA, 122 bp, Homo sapiens
acttgcccaagttcacatcttttatttctttttaaggcaaagcacccgcaggtcaagccccgccccgtcccccagccccgagtccctgtcccaccccctttccccctcgagccccgtcagct

SEQ ID NO: 87897 - DNA, 122 bp, Homo sapiens
ttcagcagtgttggtatttattctcaaatagcattcactgcctgcttcagacctcatgcacgagcaatttggttatgagatgacccagtccagacacactgtgggctgctaccacccttacc

SEQ ID NO: 87898 - DNA, 122 bp, Homo sapiens
ggtgcgggatataatctcgtggtgtgccgttttttaagccggtcggaaaagcgcagtattcgggtgggagtgacccgattttccaggtgcgtccatcacccctttctttgactcggaaaggg

SEQ ID NO: 87899 - DNA, 122 bp, Homo sapiens
tgtacgaaggttgatgccttaggcttggtggctttctgtcctccatgaagtagtggctgccgctgttcctggcagggatttttgtaggctgtatctccttaaggtcgttggtttttggaggc

SEQ ID NO: 87900 - DNA, 122 bp, Homo sapiens
cgtgttccttcctacttgcattgtactcagtcctcatggcttgcatctggaggctatgggcgggggagtgctttgaatatctatacgtggaaagccttgttttttactttttaagaaagggt

SEQ ID NO: 87901 - DNA, 122 bp, Homo sapiens
cggcaggtgtaaacgtctctgtacgccatgtgctcataatcagggagaattttcacaaaacgtcccgacttcacgcgagggtttatacctgaacagacacagcagggaaagggctaaggatg

SEQ ID NO: 87902 - DNA, 122 bp, Homo sapiens
ccacgcaggagtgacggaagagcgtggccataaagactgtaccagccacgacctggtgaccgtagaagtgagtacttcttatcctcacacaagtcacacttgtactgacattatccgttctt

SEQ ID NO: 87903 - DNA, 122 bp, Homo sapiens
tcccctggttgctcacaggcaggtggctgtccacacccacttctgtgtgggggcctctggcgtcacatttcacacccctgttctgtaggcatcgggtttcagatttgctgtatttgcttccg

SEQ ID NO: 87904 - DNA, 122 bp, Homo sapiens
ctcgcgctcctttgctgccgggaaactgagggccagagcgtcttccctggtgtcgggctgcgttgagccagccacagcgctctcaccgctgccctagacattgcaggactgcggccgagctt

SEQ ID NO: 87905 - DNA, 122 bp, Homo sapiens
gaccaaaccgctctgcgctccaagcccccgcgtcgcctccgtttttataggcacgcttcacgctgcgtctctgcgtcatagaacccttatttgcatacaccaacgactttttctattggtgg

SEQ ID NO: 87906 - DNA, 122 bp, Homo sapiens
ttccagaaatgggtcctttcatccttggggccctaggacttgggggattgggggcgggggcgctagcacagtgactccctgcagagccagccctacactgtcaagggcaccctggtgcttct

SEQ ID NO: 87907 - DNA, 122 bp, Homo sapiens
cacaaatcagaagcactgtatttatatatttaataagattaacaaactgactagaagctccggaggagtaaaggaagaaatcatttgtataatatatttttccataacaaaaagataaaagc

SEQ ID NO: 87908 - DNA, 122 bp, Homo sapiens
gtcacgagtgggagcaggagttctgcagtcggatatcgtggattctgtttctgtctcctccgccctggctgtgtggcctcccacaggtcacttaacctctctggggttaagttgcctcatct

SEQ ID NO: 87909 - DNA, 122 bp, Homo sapiens
cccgagagagggaacaaggagcagagggagagtaaggcttccggcccgctgcttttgggccgggccaggagcagtgtccacccgacacagctggtcccacaggccgatcctcgggcccctag

SEQ ID NO: 87910 - DNA, 122 bp, Homo sapiens
ctttctggacctgctccctgcgggctctggtggccactcccatgttccaggaccctgggccgcctcccagctgctcctccaaaaggacaagaaaagagcccctccaagcacctctgggaggg

SEQ ID NO: 87911 - DNA, 122 bp, Homo sapiens
ccatgcactatcctaaattcgtcctatgcattgactttcctaattgtcacagcacccccacgaaggaggtactgtagttacttccatttcacagaagaggaaactgaaacatgaaagtcaat

SEQ ID NO: 87912 - DNA, 122 bp, Homo sapiens
ttaaatgagttacaatttataaacagaatgctggctggaaatattagctgggcatggcggcgtgctcctgtaaccccagttacttgggaggctgatagtttaaaaactatctaaaattttga

SEQ ID NO: 87913 - DNA, 122 bp, Homo sapiens
atgggctaggggtgggccggagaggggcgtctcgcctgggggcagtcaccccactctgcccgcagctgggaagggcctgggcctgcagatttgatttccttcgatactcgcaatgtggtctt

SEQ ID NO: 87914 - DNA, 122 bp, Homo sapiens
tctaatatatgcaaatacaagacacatattgacttaattagaactgtttttccacatgtacgtaaaggtaacatgcacatatacgtgtctatttgtatatacatgcacacatagccatctcc

SEQ ID NO: 87915 - DNA, 122 bp, Homo sapiens
atatgcagtaacataagaccatcaaaagcaatgtcccaggacttacaatgtttgctaagacgcaagagggtgtgacacagacgctaagcgccactggcgaggagatgaaggggtcgtcttca

SEQ ID NO: 87916 - DNA, 122 bp, Homo sapiens
ttcagatgagacaccttgtgcattggaggtggcggcagcttctgcagctgggttcgggggcgtcactggcccttccctcttgctaggagataaacgctgcgcaaagccaatcaccaggctga

SEQ ID NO: 87917 - DNA, 122 bp, Homo sapiens
gtgggcagcaacgggggccccctctccaacaagcgcacctcatttctcacgtgggagccgcggcccagagagctgaggtgacagagcttgggccgcagagctgctccctccctgcagccgca

SEQ ID NO: 87918 - DNA, 122 bp, Homo sapiens
ggagtgccagggccacatggtcagatcggatcactttagaatcatatacctctgtgtgtgcgatgcagagcagatgaaggaaaacaagaatatgtacagatgatgctgaaggtgatggtatg

SEQ ID NO: 87919 - DNA, 122 bp, Homo sapiens
aagtgctgggattacaggcgttagtcactgcgcccggccctagctgtggtttcttaaaagcgtgtcaactaaagtcagacaacttacacttcagaagaaagtaacagtaacctgtttatgta

SEQ ID NO: 87920 - DNA, 122 bp, Homo sapiens
ttccgggaccggcggtagcctgggaggcggggtacggctccgctggttggtggcgctctgcggtcatcgcgccccggcgatcgtagaaacccttttctgaggggcggcgcgcagaatgtgga

SEQ ID NO: 87921 - DNA, 122 bp, Homo sapiens
cactgcagaaatgcgaaaaatgtagtgttaacggaagagtttaggtcctgcctcactgtccgggaaacgcgtgccctcgggggagcctttgccaagccggtttttcccgaaggtgaccagat

SEQ ID NO: 87922 - DNA, 122 bp, Homo sapiens
aacacaaagcgggagcgaaaagtctacttctaggtcaggcactctttggacttcacgcaacgtgtgagcgccacctctcgggaagccaatttgctcgcgaacgaaggaagtgagtcagagaa

SEQ ID NO: 87923 - DNA, 122 bp, Homo sapiens
gggaaatggaagttccgagcaagcaaagcccccacatccctccctgagcatttccggacccgtggagcagcagaaacagctctgctcagtggtcgaggccagcctgagacagtgcctctcag

SEQ ID NO: 87924 - DNA, 122 bp, Homo sapiens
gcagggccaggaagccaaaggctcccacccggtagttcatggacaccagcacagtcctctcggcctgtaccaagaagcggccatcgtacacgtccaaggaggaggccccactgtagaagcca

SEQ ID NO: 87925 - DNA, 122 bp, Homo sapiens
tgagggggatctattgccaccctcgaagaacatctttcccttgctttttagggagcttttcggcgctcccatttattccttatacaggctcagttttgtctagtgtatagggacagcatttc

SEQ ID NO: 87926 - DNA, 122 bp, Homo sapiens
gaattaatctgcggctcaccccaagtcccaagccttctaaagagaaattgaaaccttaaccgaccagcagctctactgtacttgcaaacggtcttggtatttccttcagggcagagcagtaa

SEQ ID NO: 87927 - DNA, 122 bp, Homo sapiens
agccagtggtttgcccaggtctacaaaacatataaaaagattcagataaatttttgtgcacgaagactacaacaaactgaaacatgtttaattcatatagcatagtctgtctctctctgctc

SEQ ID NO: 87928 - DNA, 122 bp, Homo sapiens
tgaaactcacctctatttgatcatctgtatgtttttattttccttttatttgcttatactcggccttgtatctaaaacatgttttacaaaataatacgacaatataacataagtgggaaaac

SEQ ID NO: 87929 - DNA, 122 bp, Homo sapiens
cggaggactggagaggtggggaccctggggaggtggctgctcggagtctaggtgacggggcgagacggggccggtaggtggcgggaggggccgggccggagccggcgggagggccaggcccg

SEQ ID NO: 87930 - DNA, 122 bp, Homo sapiens
gctccaggccccactgtcaacacgacagcccctggggcctgcgccgtgaaaagccctggccgtggcgcccccctgcctgtgccagcccacttacccgctcgatgctgtgctgtagacgcagc

SEQ ID NO: 87931 - DNA, 122 bp, Homo sapiens
tgtttgatcttgctgacgctgacaggaagtcccaggactctgctaggggactttgatccgcgtaatagaatcaggcagagggagtcactaacatatgctgaaaggctttttggctggcttgg

SEQ ID NO: 87932 - DNA, 122 bp, Homo sapiens
ccgctaatagattgggaccactactcccaggagtctgcgcgcccgaccggagcgtccatgcgcagtgggagccactttgtatcctatcaggcgaggagagggtgatgtcacctgcgagttag

SEQ ID NO: 87933 - DNA, 122 bp, Homo sapiens
gtaacactcaccgtgaaagtctgcggcttcactcctgaagctagcaagaccatgaatccacggggaggaacgaacaactccagacgcgccacgttaatatctgtaacaccccgtgcgaaggt

SEQ ID NO: 87934 - DNA, 122 bp, Homo sapiens
aggaaaacttgaacttcaggctgagccatttcctgcaatctgaaaaatgaacgtggccttcggacacagggtggtcccttgccagggactggatggaactggttcaattccccgctcctggg

SEQ ID NO: 87935 - DNA, 122 bp, Homo sapiens
acaaggtgcacgcgtgtctggatccgcacaggtgcgcgtctgctcgtggacacgcagaggcgggtggggctgtgcacgtatgcctgtctgcacaggaggctggaaacataaccgcatgtgac

SEQ ID NO: 87936 - DNA, 122 bp, Homo sapiens
ggagctttgtctgaggcgctgataggtggatcggcggaaggacgcggaacctggacaggtcggaaataaagccgggcgagcagctctgtgcgcgatgtgacttcatgagtggatgctgagaa

SEQ ID NO: 87937 - DNA, 122 bp, Homo sapiens
gtggagagctactactcacatccccgataagccttcgcattcttgccaaaggccacgggccgccaccccatcataccgaatgtgcctggaactggggcgctgcggctggccgccgcccgatc

SEQ ID NO: 87938 - DNA, 122 bp, Homo sapiens
gcacagaaaaccgcacggatgttctgacattgacaagtggagacaccagaacctccgcgccgacaccgggttatctaccttcgccctgccctgtggagtgtggaaagggtgggagtccctgc

SEQ ID NO: 87939 - DNA, 122 bp, Homo sapiens
ctgacttccttcagtaactgacagtgtagcattgttcttgattagtttggcactccattacgtggaggcagcacagtgcagacagacctaatggctctgccacttactagctggtttgggca

SEQ ID NO: 87940 - DNA, 122 bp, Homo sapiens
ctcattattcctgtctcctcattctccctgccaatatacaaacttacctacttcctcctccgagtcctcagccaacagaagcctctggggttgagtttctccctgtactctgggtgtctctt

SEQ ID NO: 87941 - DNA, 122 bp, Homo sapiens
ggagcggcctggcagcgagcgggcgcggctgcgaggtgcgcccggggacgtggagacgtgcgtggagcgccccctggcggtccattagccgccggcctttcagaacccttgatcagcaggcg

SEQ ID NO: 87942 - DNA, 122 bp, Homo sapiens
gtctagcccagccgcccaccgaggctggggaataaggcacgggctgctggctggcggggccgtcttggggatgagaagtctgtacaatacaaaactagtctgctaaaaaaaaatcattagat

SEQ ID NO: 87943 - DNA, 122 bp, Homo sapiens
cgatgtccagcacctgctgcccggcaggtgtggggctcgggctcccagccacctgcaggacgacagcagtggtcagcgggcggcagctcagacctgctcaggacctggatgagaagccacct

SEQ ID NO: 87944 - DNA, 122 bp, Homo sapiens
tcccccaagagcacatgcaggcagcctgtgtctttgaggctgtagggggcgacgacaagacggacagtgatgtccaggcgtgcgcccggggggccactggagaccggccccacaaagcgagg

SEQ ID NO: 87945 - DNA, 122 bp, Homo sapiens
accaaagcagcagcaggaagtccagtccttccccagggcagcctagcagcagaggaggctcgggccagcagagggaggaggcgcagacagtgagagaacacttcccctccagcagagcagtc

SEQ ID NO: 87946 - DNA, 122 bp, Homo sapiens
ccttgcctcccttacccaccctcaccggcccttgtttctccttcccctgggggcagccgccgccatgatcctgctggaggtgaacaaccgcatcatcgaggagacgctcgcgctcaagttcg

SEQ ID NO: 87947 - DNA, 122 bp, Homo sapiens
tatctgtgctatccaattcagtagccactaaccacacgtggctctgggccacttgaaatgcggtgagtgagacggaaggactgaattttaaattttcttttcttttaattcattacatttaa

SEQ ID NO: 87948 - DNA, 122 bp, Homo sapiens
agccccttgctgccttgagcctctgagcacaaagggccggtggccatggtttgcttattccgggactgctgggggaaaacaagtaaaagtctcttttctccccctgccgtgttctgtgctgc

SEQ ID NO: 87949 - DNA, 122 bp, Homo sapiens
gagccacgagaacatgcattgctcaccctgttgctggtctacgggccacgagaaggtggccgtggagctccagacccatttcttggggtgaaggctgcagcagcggagttagagcgacggta

SEQ ID NO: 87950 - DNA, 122 bp, Homo sapiens
cacctggccctcgagctccgaggccgcacagtcactctggtgactgcctgcgggcagcgccgggtgcctgtcctgctgcctttccacagggaccctgcactcgaccctgggggctccttcct

SEQ ID NO: 87951 - DNA, 122 bp, Homo sapiens
atcttggctcaccacaacctccaccttctgggttcaagcgattctcctgccttagtctcccgggtagctgcgattacaggctgcaccaccacacccagctaattttgtatttttagtagaga

SEQ ID NO: 87952 - DNA, 122 bp, Homo sapiens
gtgagaggcaccgacagagtcccagacagatgacccagacaggatgcccagagcaacccccgccccttcccctgctgggggcccccaggacgcggggctccccctccccttttggctagccg

SEQ ID NO: 87953 - DNA, 122 bp, Homo sapiens
taaagcctccacatctcatgatgtgacctaaccatggtctagaagtacagtgacccttcccgttcacgaggctggacacccaggactcaggtaggaacaaggttgatgctgcctccagagca

SEQ ID NO: 87954 - DNA, 122 bp, Homo sapiens
aacggcctcccagcacagggctataagaggagccgggcgggcacggaggggcagagaccccggagccccagccccaccatgaccctcggccgccgactcgcgtgtcttttcctcgcctgtgt

SEQ ID NO: 87955 - DNA, 122 bp, Homo sapiens
ccttcaagtcagctgcaccctcaccaaacaaactaggtatttaccctataagattttgttcggtcggccacccccaaatcacaggtcaaattaaaggtgacctccaagaactaaaggaatta

SEQ ID NO: 87956 - DNA, 122 bp, Homo sapiens
aagcatttgtccacacaccacttagaaagcactgttggctcccacctgtgtgatggggcccgccctgtgggagactctgatctttgacatctgacttcagatcagatgggagggaaggggga

SEQ ID NO: 87957 - DNA, 122 bp, Homo sapiens
tttgcgcggatgacggtggggtgctgaaccagccggtgcgcctctggaaatgtctgggcacggatcctggggccatcgacgactcctccccattcccagcaggcgggagctcttacattccg

SEQ ID NO: 87958 - DNA, 122 bp, Homo sapiens
gatggagggaaattccagggccccattgggtgaggcgggactgggagttttcctgggcgacgtcttctgcatctcgcttgcttcctggccttgcggcagggggcgcgcgtggcaccagtgtg

SEQ ID NO: 87959 - DNA, 122 bp, Homo sapiens
ctccgggagcgaccagtactaggccgccggtcgcaagagcgccccgcgtaggccccgccccgaaaggaggccccgccccggggcaggccccgcctccacaaggacaccaagtcccgcacaag

SEQ ID NO: 87960 - DNA, 122 bp, Homo sapiens
cccgggcaggtgctgctggccctgtcggcacatgtgggtgcactggaggcagagaagcagcggctgcgctcgcaggcccggcggctggcccaggagaacgtgtggctgcgggaggaactgga

SEQ ID NO: 87961 - DNA, 122 bp, Homo sapiens
cagtaatttaattttcagttattttctacatatttacccttttctccctttggtagcattcgttgtcctcaaacgctcttcttaattccataaagactcactccatgcaaagttcatgcaga

SEQ ID NO: 87962 - DNA, 122 bp, Homo sapiens
agggaatgctaacacaacatcagatgatgttcatgaaggataatcaccattatgattcaacgtccatagaaaactgaacaagagatggatacgttcagagaaaagaaattgtgagggagggg

SEQ ID NO: 87963 - DNA, 122 bp, Homo sapiens
gtcaggagtcacgtgtcaggtgtcacgtgtcaggcgtcacgtggctggaggccgttggagcgcctgcgcagcttttccgcacgcgcctcgccggcgcgcggctctctcagcgtcccaagagc

SEQ ID NO: 87964 - DNA, 122 bp, Homo sapiens
gcacccggggagcaaggaggcgcggtgaactgagcggcccctgagctgacagatacactgcgcagctggaacggcgagcgagccgacgggcgagtgaggggcgcagccatgatcacctcggc

SEQ ID NO: 87965 - DNA, 122 bp, Homo sapiens
agaaggcggggttccagtgagccgagatcacgccattgcacaccagcctgggcaatagtgcgagactccttctcaaaaagaaaataaaaaataaattctagttttgaatctgaaataagttc

SEQ ID NO: 87966 - DNA, 122 bp, Homo sapiens
gcaggagcccggaaggccggctgggtatgcttctttcaaggctgccagcttttctacgttcgtgtccttggccctcaagaccaaattccagtcccaaggggaaatacgggcattctggccct

SEQ ID NO: 87967 - DNA, 122 bp, Homo sapiens
tgggttcatgggatcccacccagcctgctacaaggtgctggggcagtgacggcagcaccccgccagcccctccccttgacactgaggccaagtgctggaagcagcagtgccctttctctctg

SEQ ID NO: 87968 - DNA, 122 bp, Homo sapiens
agcccttgtgtcggccaaaactcaaaccagattctgagcctaaaagacttaatgtcacaacgaagggacacagaggagacttttccacataatttttcgctccctccacctaagacacaaat

SEQ ID NO: 87969 - DNA, 122 bp, Homo sapiens
agtcggctgccgtgccgtctggatgattatggcttggcacaggcaaggagcggggaacggcgcccaggatgcagggcacggcggctccacccattcccccgacaggcaagctgtggcccagg

SEQ ID NO: 87970 - DNA, 122 bp, Homo sapiens
ttgtaacagctaagaactaaaagctcaggtgatctttaacgggcaaaggacaacaaactacggtggatcaaaaccactgaatactacttggcaataaaaagaaacaaactgttgatacacac

SEQ ID NO: 87971 - DNA, 122 bp, Homo sapiens
cagactgtagcagctgcctatgcaaagagctgtgatgggtctgagaagcctaagaccccccgccctcaaaccccccactcccgctgcttcccaacgcccctcacccctatatcacatccatt

SEQ ID NO: 87972 - DNA, 122 bp, Homo sapiens
caacggtctgggagccggctgcgaaggtggttatcatggcaagggaggtcggtcctgccccgccccctcctcacctgcgcagacctggggtaggggttccgcggctcccgcccccctgccgc

SEQ ID NO: 87973 - DNA, 122 bp, Homo sapiens
tttttgccaaatgatttggagatcctcaggatttgtgcactctcaatattttttctggagcgctccttagaagcgtatcgtactgttgaagagctttacaaacgtccagatgaagaatataa

SEQ ID NO: 87974 - DNA, 122 bp, Homo sapiens
ccctcaggccttccggccctgcccggctggcccagccccagggccgcttcgtgtagccggcgccccggtaccgccgtggggatcagcctcacccgagccgcacaggcaccctcaggaagctc

SEQ ID NO: 87975 - DNA, 122 bp, Homo sapiens
cacgagggagctcttctgtgaagggccagggtgaaatacgcactggctcaggctgaccaacgtgtgctggctacacacggcccctcgcggctgggccaggacctgcccggagctccagaaac

SEQ ID NO: 87976 - DNA, 122 bp, Homo sapiens
gccccaggaactaggttgcttctgaagagcgacacacgtagaaatacacagacacggccacgcgcacacatgcggagaggctctgcattccctagggtgggggtcgaggcctgccggccccc

SEQ ID NO: 87977 - DNA, 122 bp, Homo sapiens
atgcgaaatgattatataaacttcagttctttactccagcatttcccacatttaactcatcgctgacccatttggcttgcaaaacttacgtcttgaattgagcctacaaatgttaacagaaa

SEQ ID NO: 87978 - DNA, 122 bp, Homo sapiens
tgccaactcgggaggtccccgtcctcctggcctccttgctggagggggcaggctggtcagcgcagctctgaggcgccgcgtctctttcaggtgccggtgagtccgggaagagcaccatcgtc

SEQ ID NO: 87979 - DNA, 122 bp, Homo sapiens
tgtgcaccgtgtgaagcgctttgcgtttgcgtcctggtgtctgatatacaccatgtgaagcgctctgcgtcctggtgtctgatatacaccgtgtgaagcgctctgcatcctggtgtctgata

SEQ ID NO: 87980 - DNA, 122 bp, Homo sapiens
ccttctccctcctccagggcgacgataggagcggggcgaacgctccctcccctccccgtgcgttcctagcatccagtgattctgcctcttgcccacgcaggcctgcagtgaacaaagggcgc

SEQ ID NO: 87981 - DNA, 122 bp, Homo sapiens
aaacagatgatgatctgttttgttcactgttgtatccccggtccctagaatagtgcctggcgtgtggttggcactcaatgcatatttatcaaaggaatgaagggctggctcagccatttgat

SEQ ID NO: 87982 - DNA, 122 bp, Homo sapiens
cagcctcaggcccttgctggctgcttgcgggaagcgtctgtttcttgctacctgagactccgtagggtagatcacagcgcgacagcagcttcccacagagagcgagagaggctgagacacta

SEQ ID NO: 87983 - DNA, 122 bp, Homo sapiens
ttctcttcggtgctgtatttttcagcacacaaacttgctgagagtttgcagctgacatctcgagaagtattcttcttaaaagctgagcgaaaattattcacctcatgtgaaaacaagtgcga

SEQ ID NO: 87984 - DNA, 122 bp, Homo sapiens
acacggcttcccccaggcaccgcagatcctggccctgaacgacaagagtgcctgacctcacgattgccagcagctgcctgtcctgcaaggcctggccctgtgccagggcagctgctttgcgt

SEQ ID NO: 87985 - DNA, 122 bp, Homo sapiens
tgacatgcaccgggcaataacaatttgtcaatccaggattcaaactcaggcaatctgattcgagagtcccagcccttaactacataccaacaaaagaaaaagtaaaaaacaaaacttcttgc

SEQ ID NO: 87986 - DNA, 122 bp, Homo sapiens
tcttcagacctctgtgggctctgtgtggcaggtctctgcttgcaaggaggggaggagcagcgcttcaggcagggctttggagtcacatgccaaggtccaacttccagcttaactgtgtgact

SEQ ID NO: 87987 - DNA, 122 bp, Homo sapiens
cttctgccagataagtgggatcagaaagggctattagtagacaagagtctagctccagcccgccctggagagagctctgaatctcttgggtccctcattgatctgttgaaagagccctctag

SEQ ID NO: 87988 - DNA, 122 bp, Homo sapiens
aggtgcagaccccggccggcgccggcagtctctgcgggcctcgggcggcagggagagctacggtgccggtgtccacatttgcttcgttagcccctccagaaacggggagagggtggcaactt

SEQ ID NO: 87989 - DNA, 122 bp, Homo sapiens
cttggcttgtcctaggagctcaatccacagctatagatgtggtgaggggtcccatcccttcgtgggagtctcattcgtagcctgaaaaggggtctctgctgaacccaaggcatctcaaactt

SEQ ID NO: 87990 - DNA, 122 bp, Homo sapiens
tagggggcggtggtgggtgaagtgcctgagtccctgtgctgagagtggctcccggtgtcacggctccaccttccagatggaagggctgtctgggtctccccagcgtgggttttgatgcgtaa

SEQ ID NO: 87991 - DNA, 122 bp, Homo sapiens
ctttagcaataaatagaatttcatgctgagtggcagactgtttagctcacattcctgtaacgtcccctacatctatttcacgcagcaacttcgctagcagtcaccagccacagcctgaacac

SEQ ID NO: 87992 - DNA, 122 bp, Homo sapiens
aaagacctttgcctcccatagtaccaggaaaggtgcccaagttcttttacacacaaggtgcgcagagcggccagcgcatgcccagagaggtcgtaaggaggacgaccgcccggagagaaagg

SEQ ID NO: 87993 - DNA, 122 bp, Homo sapiens
ggtttgtggccatctctttgccttacaaattttgagctgtaggaaatctcctgagccgggcgcggtggttcacgcctgtaatcccagcagtttgggacgtcgaggcgggcggatcaccggag

SEQ ID NO: 87994 - DNA, 122 bp, Homo sapiens
tctgtggacttcccatcacagcaaacagcaatactgtgctccagccaaaacccatggtgccgtcctgggcaaatttggctttctcaggttggtcctaagttggacctgggggcaaaaattaa

SEQ ID NO: 87995 - DNA, 122 bp, Homo sapiens
ctcgagtccaggaccggcagggttctcgccttaatctgtaccaccgtcccgtaaatctgtcgctcagcccatagccggcctttgatctccaagcggagcagctggacaggtgtcgaactgca

SEQ ID NO: 87996 - DNA, 122 bp, Homo sapiens
cagcttggacgcgggtaccctgggcacttcccaggcatcttcttctgcaggtctgcacagcgggctactgggacaaaggtgtgatgggggctgctgagattagggggttctctgagggtcac

SEQ ID NO: 87997 - DNA, 122 bp, Homo sapiens
ttgtaaccacaaccctgagtcatgaagactcacatgttctgtaacctctgattaaaagcccggaaagcgtgtaatatccactagtgattcctatccaaaatatctctttttaaggtttcaga

SEQ ID NO: 87998 - DNA, 122 bp, Homo sapiens
tcctggaagacagacacgatggtagatggtaattatgcgtttaatgtctgtctcctgggacggtaaacccctgtgagtgtgggctgtgactgtcttattcaccactgtgtttttggcacggg

SEQ ID NO: 87999 - DNA, 122 bp, Homo sapiens
taaaaagaaaagagactggggtgtctctgaagaccctgcttagaggccctgtcctccttgcggcaagcggccattgccatggaaaccggagccgcagggctatctgtccgggattgtgacgc

SEQ ID NO: 88000 - DNA, 122 bp, Homo sapiens
gagaggccagggtagggtaaggactccgcaacctagggtcccaaaaccctggagcgaatgcggactaagggagagcggccggcgcgtcaccggcgctggcgtgtgacgtcagcgcgtggaag

SEQ ID NO: 88001 - DNA, 122 bp, Homo sapiens
ctgggacagttggtcacactgaagtctgtgggctttgctgaacttgcaggtctgcacacacgccaggacagctggtctggatcggggataatagagggagaggcattaactgctgcgtggaa

SEQ ID NO: 88002 - DNA, 122 bp, Homo sapiens
ttccaagttcagggatacatcatcataacccctatcagcgaggctgaaaacctgaatcatcgagcattcctccctcctgaaacttttgtcatcaagtctgcttagtacttctttccgcatgt

SEQ ID NO: 88003 - DNA, 122 bp, Homo sapiens
taacacaagataccagaaggctgggattatgggaaggaatcttatgtatttattttctcacgatggaaaaaaagtgggcatttcaaaatgctaataagaagaagagaaaaagggaaaataca

SEQ ID NO: 88004 - DNA, 122 bp, Homo sapiens
cagacgctcaagaaactttctgcagcaaacgaagaggcagatgctgtgggagacactgcccgggctatggtggggtttgggggatcccagctcctgccctctggccctgtgagaacaccctg

SEQ ID NO: 88005 - DNA, 122 bp, Homo sapiens
ggcgggaggagggtggaggtgagggccgggggtggggcgcctccgcccgccagccgctcccgcattaaaatttcatgggcgctgcagcagctacaaagacgacgccggctgcgctcgcggga

SEQ ID NO: 88006 - DNA, 122 bp, Homo sapiens
gcgacatgctcaacagggcggagttcagttcgttagggtggggggtttcacaggaagcggcgatacccatcctcagggctccacaggcagacggctcccgagcggctgcagatggccagctc

SEQ ID NO: 88007 - DNA, 122 bp, Homo sapiens
cagtgtcttctctccccatagcttggtgatgcacgaagtgtggttctagaccagcaggttcggcctcatgagaatttgttagaaatgcaaattctcaggccgtaccccgagacctctgaaat

SEQ ID NO: 88008 - DNA, 122 bp, Homo sapiens
tggtgctcacagcttcctgaaatatgacccttggggcccaacaccaacaggagttgaggccggggagcagcttcaagctgtaggggatctttggatttgaaagtaggggttggtcatgggct

SEQ ID NO: 88009 - DNA, 122 bp, Homo sapiens
ctcctgcgtgcgtgctgtgggtttctccttcagtttcctctcattgcctgaggttgggcccgaacacggcggtacatttccttgaggttagtaaactgcccctgtgcctctctggattttgc

SEQ ID NO: 88010 - DNA, 122 bp, Homo sapiens
agatggcggtgataatcgccgcactttttttcaaattagtggatcccagaaatcattgcgcgcatttgtaacgaatttccgttcgagtttgtattttaggcgccattttcgagtgaaggacc

SEQ ID NO: 88011 - DNA, 122 bp, Homo sapiens
cttcgttgcccaggctggagcatggtggctattcacaggtgtgatcatggccacaaactccgggtctcaatcaatccttcctgctcagcctcacaagcagctgggaccacaggcacgtgcta

SEQ ID NO: 88012 - DNA, 122 bp, Homo sapiens
gtggaggaacccgggaaacgttatgctagtgaaagaagccaaacaaaaaaggccacatagcgtatgattccatccagatgaaatgtctcgaattggcaaatccgtagaggcgacacagattg

SEQ ID NO: 88013 - DNA, 122 bp, Homo sapiens
agtatagtgggctaagtgcagtatggacaggaaccacctatgtaagaatttatctgaagacgagaagcctgcggttgatgtggatgtcccagacttttggagctagtgtctgaatgagagca

SEQ ID NO: 88014 - DNA, 122 bp, Homo sapiens
gtgaagctaggggggacaccccctgcagatggaaaacgctttggttgcctgtgtgggaagcggtttgcagtgaagccaaagcgtgaccggcacatcatgctgaccttcagccttcggccttt

SEQ ID NO: 88015 - DNA, 122 bp, Homo sapiens
agtgtcccccatctaccagctgaccttccagtcctcccacccacgcccttgtcctgcttgcggctcccgcaggactaagctctgctccccgcgcgcggctcacccaggtcccagtcgctttc

SEQ ID NO: 88016 - DNA, 122 bp, Homo sapiens
ctcggctgaggacaggagcccggggtctgtgtgggagacgggatcccttcctaggatgcccgggctggcctgctgggaggcggcggggtctcctcctcagggtcctgcactcgggtttcaca

SEQ ID NO: 88017 - DNA, 122 bp, Homo sapiens
gttaatcggaagcactcgctggcctctcacctctcctatctgtttgtttgtctgtctctgcgtctttctctctgcgtgtcaacgtaagactcggtctctggatctctctctctttctgtctc

SEQ ID NO: 88018 - DNA, 122 bp, Homo sapiens
aaactagcatgcttacgtggattgcaaggagtctggcatggtgatgtgtgcctgcaatctcgcaatgcgtccgttatgtgcgcttgccttcgtccagcgtggttatctgcactcgcaatgcg

SEQ ID NO: 88019 - DNA, 122 bp, Homo sapiens
gcagttcggcggtcccgcgggtctgtctcttgcttcaacagtgtttggacggaacagatccggggactctcttccagcctccgaccgccctccgatttcctctccgcttgcaacctccggga

SEQ ID NO: 88020 - DNA, 122 bp, Homo sapiens
gatgccgcctctgccaccgcaccaggaaggtgaagcttccgtagtgtcgtagactgagtccggatgatcctggggcggcggaggaaccacagacgcttctgtctgtgaagttgcaagtcctg

SEQ ID NO: 88021 - DNA, 122 bp, Homo sapiens
tggacatgaattatttgcgacagggctgcctggaagatgcggagcggagtttgcgtggcccggagcagctccagtgtctgaggcttctctgtgtcacaggctccaagcaggaagcgcaggca

SEQ ID NO: 88022 - DNA, 122 bp, Homo sapiens
accattcatatggtgaatgagttagctaatgaaccaatgcctgccacgtactcaaaaatccgaggaccgacaatatgtccaaccatcccatcaactgcaacaagaagatgagactatgttcc

SEQ ID NO: 88023 - DNA, 122 bp, Homo sapiens
cagtccacctgcgcaccaggggcaggacacgtggctgggtgcagacgctggcccggatgtcgcggaggactcgcgggccggtagagcgcgcggcggcggcggcggcggcggcggcgggagga

SEQ ID NO: 88024 - DNA, 122 bp, Homo sapiens
ccccagccgcggcccgggaatctacgtcacccgaaaagcgactataaacgccggcgcctccgtccccagccgcggctcgggaatccacccgaagagtggctataaacgtccgcgcctccatt

SEQ ID NO: 88025 - DNA, 122 bp, Homo sapiens
cggtgactccggctccctgggtcattccgggagaggcggccatcccagttgcaggggtcccgctggggcgcggggggcgcggagggggacaaacggcagcgaagggggccgttcacttaccg

SEQ ID NO: 88026 - DNA, 122 bp, Homo sapiens
gtcccttctgagtgctcctacctagagttaagggatacctgagggtaagcaaccgagtgacgaaacaaagaaggcggggcctgaggacagaacgccaaggttaggggaatggagccaggcaa

SEQ ID NO: 88027 - DNA, 122 bp, Homo sapiens
cgacaggaagtgtatacatcgccctacagcagaaagaccggggacagcccagcctcagggcgactttaaacccaaaaggaagcgatatccggactctcatggggacgtctcaatttgtcctg

SEQ ID NO: 88028 - DNA, 122 bp, Homo sapiens
ccaacttacggccggtcagtcagaagcacaggtgagaacctggggcctggggatcagcaccgggagtgaggtgagtcttgtgggactgagcccttggtctcagtggcggcgggggggggggg

SEQ ID NO: 88029 - DNA, 122 bp, Homo sapiens
cgcggtctgggcctgctgggcaggggggcgtttccggtcgcaggatcagtctctggacttcgaggcctgtgggaggcccgcggccgtccagggagtgctagggggctgcggaccccggctct

SEQ ID NO: 88030 - DNA, 122 bp, Homo sapiens
tctctcactaaataatgtgaagatatccttgactgcaatggtcaaacctgaagtgattaccggggccggttggtaaggtaaacaaaccgggtatcaaagagaaggcagtgagcgctgcgtcc

SEQ ID NO: 88031 - DNA, 122 bp, Homo sapiens
cccatgcttattatcttccctcaattgactagtgaggtgcaaatatacagcaggaaaactcgaggccctagaggatggccaagtcactgtgtgaaaggaaccttagttccctgaatgattgc

SEQ ID NO: 88032 - DNA, 122 bp, Homo sapiens
agacaagcatgaaatgtgaccccgaagattatcattattaacatcttgtgtgcttctcctcgtctctcagatagatgagtacttttagttaagcaaaagtgagttgcaaatactattttgga

SEQ ID NO: 88033 - DNA, 122 bp, Homo sapiens
gggggagagcaccaaggtcagattgcaccacggggtgggagagcgagggtgagcagccgtcgcgagggctctcacgccaagcctgcaaatgcaacctgagggcctgggattttcccacatgg

SEQ ID NO: 88034 - DNA, 122 bp, Homo sapiens
attgaacttctgaaagttgtacatgtcttaattcctggaatctataaatgttacatcatacggcaaatattttgcaaatgtgattaaattaaggactttgagatggagggcttatcctggat

SEQ ID NO: 88035 - DNA, 122 bp, Homo sapiens
caataggagtagcactgaaatcaggcatttgtttttcatatgcagttaatacttgttaaccggtaccagtagacccatttaccgttagtcctccaaataggtctgaatttttcctattttca

SEQ ID NO: 88036 - DNA, 122 bp, Homo sapiens
tcctcatcatctggacaggtggaagcgaattcttcccgggcgtaggcattgctcaagtaccgatgcactccccggaaggcctcggggatggtgaatccccggtacttcttacacaccacctg

SEQ ID NO: 88037 - DNA, 122 bp, Homo sapiens
gcagtagcccagggcgggaggaggctcgggcatggcaggaggcaggtcccaagccctgcccgtcagggaggcagctgaggcccagcaagaatttgagcacagcgctggcgggccagcactgc

SEQ ID NO: 88038 - DNA, 122 bp, Homo sapiens
attgaagccaggactcgatgcagattggctacggatccaaaacgcccactaaccttggcgcgtcccagtctccaccccaaacctaactcaggtgaaaatggcgccacgcgcgggggcggggc

SEQ ID NO: 88039 - DNA, 122 bp, Homo sapiens
cattacagcggccgtggacgcagctgataagatcggtccccggagatgggacaaaggggccgccatcggctcgagggctggtcatatcctgcccgaaagggccgagcagggcctgagatgcg

SEQ ID NO: 88040 - DNA, 122 bp, Homo sapiens
gggctgagttgcagactttgtcatgggagccacgaaggtgcgggacccttgctcccaatccgagggagtcttgcacaaatcttgcgccacgccgccgtcaccagcgtaggaaggggctttgc

SEQ ID NO: 88041 - DNA, 122 bp, Homo sapiens
ggatggtgaggcccgttcccgaccctgggtgggaggaacttaaagggctgagttctgaggcgccaggcacagggcgcagcttcataaatgcacccaaaagcttccatggacagacggcacag

SEQ ID NO: 88042 - DNA, 122 bp, Homo sapiens
ggatgtggcacggtgtggagggccgggtggtgacgctgagtgacacgtgaggatgtggcacggtgtggagggccgggtggtgacgctgagtgacaggtgaggatgtggcacggtgtggaggg

SEQ ID NO: 88043 - DNA, 122 bp, Homo sapiens
tgggggaagtatgtggtttgctttttgtctcctaagaaatgatgattcagtttcctcaaacgtttctcacagtcactactggttgcttggaatggctgtctggttttgttgctcagttctta

SEQ ID NO: 88044 - DNA, 122 bp, Homo sapiens
cgggccggcacgtgatggcggacggcaaaaggcgcggctcaaaattagacagaatgcgatcgcctgatttttttttttttttttttttttttttttttcttttccctgctccctctagagga

SEQ ID NO: 88045 - DNA, 122 bp, Homo sapiens
gcgcctgcgcacttcccttggctcacctggcgccgcgagacgaggcgccgtcgcggctgacgctgaagctcagacgctgcagctgctgcacatagcgacccagtccgttgtggagaacgctg

SEQ ID NO: 88046 - DNA, 122 bp, Homo sapiens
ccaccttccagcacaagtggggtcgggggtcccaggcgtgactgcgctctcctgcgtgggcgccctgcactcagggaagcagaagctgcaggtctccactggctcgggggatgtgctcacag

SEQ ID NO: 88047 - DNA, 122 bp, Homo sapiens
tgtgatctgcccacctcggcctcccaaagtgctgggattacaggtgtgagccaccgcacccggcccacaatcagtgacttcctgttggcagtttggaatcagctgtggtgggagcatttaca

SEQ ID NO: 88048 - DNA, 122 bp, Homo sapiens
agacggcaagaactctcaggtctttagaaacccctacgtgtgggactgagtcagcggtggcgaggagaggcgggcggatttggggagggccctgaggacctggccccgggcaagggactctc

SEQ ID NO: 88049 - DNA, 122 bp, Homo sapiens
cccaagttcacactattcataaggggtagagctaaaatctttcctgcccgcttcgtggtgcgccagaaggtttctccatgctgtggagacttcctggaaggagtcacacccgcccttctctt

SEQ ID NO: 88050 - DNA, 122 bp, Homo sapiens
caggctagctgccctctcagcactggggagggtgtcgggctgcacctcatcacgtgttgccgtgggcatgacccgtcccctctgccatccatcccacacctcagacccgtcccgtgctggcc

SEQ ID NO: 88051 - DNA, 122 bp, Homo sapiens
caggcgggtttggaggggtggtcgcggaggaagggggcacaggtatacctggccccacagcgaccccagacgttgccctcctcagggaggggacccccgggaagctcctgctgcggctggcg

SEQ ID NO: 88052 - DNA, 122 bp, Homo sapiens
tggtccctgaccgcgcccctgggagccccgacccctgggagcgccgacccctgggagtcccgccccgtggtccctgactgcgccccgcgcccccgcaggtactgcaatgccttcatcttcca

SEQ ID NO: 88053 - DNA, 122 bp, Homo sapiens
agtcaccctcgttactcagacaaaagctgggtcccaaaggatctgtttcctcagtaccaccggtcctcccaggaacttcaccacccttggcaggaattaatgacccaagatcttgggagaat

SEQ ID NO: 88054 - DNA, 122 bp, Homo sapiens
cggatgggggcaggggctgtgctgcccacagacaggccccttggtgacagtgggatccatcgtgaccacgtgtggcctcatttaatcctcactgtggtcctagctgccatgaccacctacaa

SEQ ID NO: 88055 - DNA, 122 bp, Homo sapiens
aacatttttttctaagaatttgaaatcatcttttgcagaaatgaatgcatcttgccttttcgtcagtgtgagatactggtattccctttagaatgggaatacgtattcctatacatatttaa

SEQ ID NO: 88056 - DNA, 122 bp, Homo sapiens
gggagggccagagaggacatgtggaggacagaattgaagggcttcaactggaaaagagggcgtctctaatcaatagtttagacaagtttgcaagtggaagataaatgatatgacaatattta

SEQ ID NO: 88057 - DNA, 122 bp, Homo sapiens
tcggcctcggttggggcaggggagttctgcgtgtctgtctggggtgcccactcccaaacccgggactcatgggctgcctgggggatcctgggttctgtgcatccgtctgtctgaccatccct

SEQ ID NO: 88058 - DNA, 122 bp, Homo sapiens
ctctgtgacctcaggcaagtttctcttttgtttcattttgttttgtttgagacagactctcgctgtgtcacccaggctggagtacaatgacgcgatctcggctcactgcaatctctgccttc

SEQ ID NO: 88059 - DNA, 122 bp, Homo sapiens
actcttacacactgttcacagcaagggaggccaagcagctattttaataattacctaccacgggtcaagcactgattgtgtagtatggggctctttgctggcaacttaatatccatgatctc

SEQ ID NO: 88060 - DNA, 122 bp, Homo sapiens
tttttgtgtgtgttatttttatttctagttaagttttatctgatcaatgtaaggaatgcacgaagattcactgatgccacagggagatcaatttacatcacaaaagcagttagacattgcta

SEQ ID NO: 88061 - DNA, 122 bp, Homo sapiens
tcggcctcctcgggggtggctgctctgtcgccagcgccgctcccaggggcagcccgcagccggggctcgcagctcacagggcgccaaggacaggccatatagcaaggccccagaccggcccg

SEQ ID NO: 88062 - DNA, 122 bp, Homo sapiens
tagttacttttggtaactggttggattgtcttgttttccttgtcatgatctttttaaacacgtattcttaacatctgaattctctttggttgcaagtgactgcaatgtgcaaacacctttaa

SEQ ID NO: 88063 - DNA, 122 bp, Homo sapiens
tcagcctctaggttccgccaatttcctggttgctaaccggcttctgtaccagaccggaagcggtatgtcttcactgcaagaggaattttattttgctcccctcggcgggtggcagcttgatt

SEQ ID NO: 88064 - DNA, 122 bp, Homo sapiens
ttctgtgatgggtccatcggcgtcttgacacaacactaagcttctcctggatctttgaaacgtagcagaaactgatgacggagcctcaaattgctacaaggtagcccggaaagagcaagagt

SEQ ID NO: 88065 - DNA, 122 bp, Homo sapiens
gcagcaggctccgaagatcatacagacgccattaccactcttggctcccagaaacctctgcgcccagagctagcgcctacgacccggaagcaaaatccaagcgcttcgggggcggaagcaac

SEQ ID NO: 88066 - DNA, 122 bp, Homo sapiens
gcacggaacactcaaagcccactttctggctgtgatggccgaggagagctgcctcccctccgagtggcccatcctaggtacccttgagcctcacaagctcagttgccaacctccctgcttca

SEQ ID NO: 88067 - DNA, 122 bp, Homo sapiens
actccaaacccatgttcctttcacaagtctcccgcactcttagccatgtaaaataacttacgctgccactccagggtgcaagccacccacctgccaagggggttaaaaactcaagtgttggt

SEQ ID NO: 88068 - DNA, 122 bp, Homo sapiens
gtgcggggcattaagtcgagctgctgtcatagaaagcataatcagttgctttagatccagcggtcagggaggtggggaggcacatctaagctgaagtctgattggcaaggtacaaagataag

SEQ ID NO: 88069 - DNA, 122 bp, Homo sapiens
cgtcactgcagtccagtgaggagatgagatgggctggggctggactgtggcatcggcatccgtcgaccccagtttcaacgccgtgtgggcgagatctgtcctgtgtgtcctgggcctccctt

SEQ ID NO: 88070 - DNA, 122 bp, Homo sapiens
caagtcccctcctcaggtctcgggactcccggccccgcacactcaccatttctcggcttacggaggctccaggagtcctccctacggatccctcactacctgcaggtcccagtgagacaaag

SEQ ID NO: 88071 - DNA, 122 bp, Homo sapiens
agaagagtgcccagcacatagtgtgactctttcctattcaagattcatccaggaaactaacgacatggaaaatgaaacccaacgaaaattaagaaaatgcaaacattgtaatagttatgttt

SEQ ID NO: 88072 - DNA, 122 bp, Homo sapiens
ttagtgagaatgctgtggccaaaatatagtgctcattcctcaggcttgaaaggaaccccacgtcgccagtgtgggagatcatttataatcttgatggatacaggtatagcctgcttcataat

SEQ ID NO: 88073 - DNA, 122 bp, Homo sapiens
aacgagaaaagtgggtagaatgcaggctgcccgggaagaagcttgagcaaccctaaagctcggggtcaattcacggagtcccctctccttctgggacccaaggccctccgggtcttctgtgc

SEQ ID NO: 88074 - DNA, 122 bp, Homo sapiens
gctgcagcattgacagaacaatggaatagttttcattcaggctttggcattgtggctaagcggagtgggtgtcaacttgtgtactagaactttgaaatatcaggaagattcctttgttctct

SEQ ID NO: 88075 - DNA, 122 bp, Homo sapiens
gcgcccctcggggcgactggccaagcctgcggaacttgtctgtgtgtgctccgatgtgagcgtccccgtggcgtgaggcggtggccggtgcccagagacgcgaacccctggagaccccctac

SEQ ID NO: 88076 - DNA, 122 bp, Homo sapiens
aagtcgcctctaatggcaggcgcgggaggcgaggctgaggacctctccgcgtttgtatcgcggcgattggcaacataactgccttatttacattaaatacgccacaaggttacagcgcggat

SEQ ID NO: 88077 - DNA, 122 bp, Homo sapiens
ttccagaaacacctccaacagccctgaaggaaagacagccatgaaacagtcaccactgcacgtgccttctgctgaggctgagctggaattgattttgtttattccaaaatcaggcttggaaa

SEQ ID NO: 88078 - DNA, 122 bp, Homo sapiens
ccaaggggccctggaagagactgtcttttccgggccttagtttccctgagtgtgctgggtcgccccgtgccttccagtagggagggtggggacagtggccggccccgcctgccagggcggga

SEQ ID NO: 88079 - DNA, 122 bp, Homo sapiens
gggacctgcgggagtggcgattggctgcaccccgcgtcaatcagcggcgttgccgggcaacgggggaaactgctcttatccccatatacagggcaattgggagctcgcataccttcactgcc

SEQ ID NO: 88080 - DNA, 122 bp, Homo sapiens
ttctgagatcttaccgttgattggaccaaattgttactcccttattttcattggaccttacggcagccggcgcgcgagagttacccaatcagcaagcgctccgcctcctgccttttcccgcc

SEQ ID NO: 88081 - DNA, 122 bp, Homo sapiens
gcgggccggacaatgagagtgtccgcctcctgagccaataaagctgtactggttttgaatcgcggcgcgtttcccgccgctggggtcaggggtcgaggttcgggtcgtggggcggagggaag

SEQ ID NO: 88082 - DNA, 122 bp, Homo sapiens
catggctgccgcggcgcgttcgaagacgccgcgaacagggtggagttgcgcactacctcacgggagaggtagtccacagccctaagcctttccccagctggagaataaataaactacgtttc

SEQ ID NO: 88083 - DNA, 122 bp, Homo sapiens
aagataacatcattaagagtagaacagattgtgctcaaaccctgctgtttataattaacacgttgcttccaaatactccagggtccctggtaaatagtcttctgctcacatccacccagacc

SEQ ID NO: 88084 - DNA, 122 bp, Homo sapiens
aggacgaggtgaaatccctttgctggtcatgaggcggcttcagagacaaacaacacaatgcgagtgcaaataacaaaaggcaaaaagacagtaggaacaatgggggaggcgagggcagcgca

SEQ ID NO: 88085 - DNA, 122 bp, Homo sapiens
ttcctctctctgcagaattgtcgtgactacaatgttgcttcccttttgcaaaataaaagtcggtcgttgtgttgtttgtcctcagaggtccaggggcttggggaaggaggatgtatgtttct

SEQ ID NO: 88086 - DNA, 122 bp, Homo sapiens
gctggtatggtagaaaagagcattcctcttaaaatctccacaaccttcatctgaccttcacggaacaaattaacagaggcttctttgtaacattgagggtcctcattggaggatccttggct

SEQ ID NO: 88087 - DNA, 122 bp, Homo sapiens
cttggcctgaggggagcagagcagggacctgcagggaatgcccctcacccgtggtgccgtcggcagtgagagggccatggcgcttcttgcccaggaggccatagaggaggaatctgtacttg

SEQ ID NO: 88088 - DNA, 122 bp, Homo sapiens
cactattctttggattttgcaaattccctccttttattctggacaaacagtactttcctccgaatttcagaactgagatctagtcttgatcaatatgagttttctctaatatctttgtttct

SEQ ID NO: 88089 - DNA, 122 bp, Homo sapiens
ggtgctatgacaagcgtctgtggcctcgaatggacctgagccggcggaagtcactgaccccgcccatgctcagtggtgtggttcgccgccagccccgtgccctggacctcagctggacaggt

SEQ ID NO: 88090 - DNA, 122 bp, Homo sapiens
ccccccggaccctccggccaccctgctctccccggggaccctccgccacccactctcccccgggaccctccgaccacgttgctcttcccagggttctggcacagcccacaggacatcgtggg

SEQ ID NO: 88091 - DNA, 122 bp, Homo sapiens
tcctcctcccaaggaggaggcagatggtggtggaaactctgcttcctccattttccggagcgtgactcagcaccgcagctgccgcctcggcccccacgcagcagcgcgaagcctgccctccc

SEQ ID NO: 88092 - DNA, 122 bp, Homo sapiens
gcggccgggccttcaccactaagggcaacctcaaggtaagagcatggcaggctccagccccggctgcggtgcggccgagccacggtggctttctccatcacctgccgcagacacagcggccg

SEQ ID NO: 88093 - DNA, 122 bp, Homo sapiens
cagttttgtgaaaagccttgagaatccccaaaggacagtaacataggaagctaaatgtggcggacttgcaggatgaactgatgcacagtaagagctccttgtggtcgacccttctgacttcc

SEQ ID NO: 88094 - DNA, 122 bp, Homo sapiens
agcagtagcagcagcaggaagggttgctgatcccggagctgtcacccgccggagggtgggcgcgcggggggctggtgaggcgtgggaggggcggggcgggaggagagcctcactttctgtgc

SEQ ID NO: 88095 - DNA, 122 bp, Homo sapiens
cctggaataacttttctctctctcattactggggcaggagaagtgggtatctggggtctccgggtgactcccaactgtggaaaagaaagagtcttgttggtaaagaaagggagtcttccatt

SEQ ID NO: 88096 - DNA, 122 bp, Homo sapiens
gggggctcagtccacgttgtagattgctaagaatgaaaaggaaggcatgtttcccagttacgaggaatgacagcacaggcaaaagggctgcatagatcctggtgcacatcttcatctccaag

SEQ ID NO: 88097 - DNA, 122 bp, Homo sapiens
caccactctctctagcccttcctccttcctctacaactccagttataaatgtaacaattacgtaaaagtgatctgtttaatgcctggctcctctgctaccctacacattcagagggaaggga

SEQ ID NO: 88098 - DNA, 122 bp, Homo sapiens
aattagatttacagagaagaatatgaatcgttaaaaccttgacagtgcagtaatgaaagtcggaaagatgaggaaataaatgatgttgtcatgttttataacaacctgtcaaaagatgtcat

SEQ ID NO: 88099 - DNA, 122 bp, Homo sapiens
agcgtagtcctagtggatcccctcctttcacccctcctgactgaggacttcccatgaacccggcacactccaggacccaggggtgcagcactgagccaaccaggccgccctccgaccctgtg

SEQ ID NO: 88100 - DNA, 122 bp, Homo sapiens
aagggccagcgacggagggtctcagatggcggggcttgaggcccacccgggctctcgggtcggcgagtcccgttggggagcccttgtgcctgctaggatatttagcagatgccaggcggcca

SEQ ID NO: 88101 - DNA, 122 bp, Homo sapiens
ccccatcaattctacctttttaggttagactggggagtaactttcccaggtattaaaaatcgtctagagagagcagggcgaaattagagtgccgaagtggcttgagaagcacagtgaatggt

SEQ ID NO: 88102 - DNA, 122 bp, Homo sapiens
caaactcctgacctcaggtgatccacctgcctgggcctcccaaagtgctgggattacaggcgtgagccaccgcacctggcctaatttttgtattttttgtagagacagagtttcaccatgtt

SEQ ID NO: 88103 - DNA, 122 bp, Homo sapiens
gtgattacctaatgcacctcacatggaatggttacataatgtgtggaggggttgtgtgcccgcactccaaagctgctgagtcatgctgcaccaaaaggctgccttggcctactcctgacgga

SEQ ID NO: 88104 - DNA, 122 bp, Homo sapiens
cattgaaaataccaggtattaaagatggagttttaaaaacgagcgaatggaggtgcaccccggaaatgcaagcatagatatcaccctcagcaggcagggggtcactttccctgaacaggggc

SEQ ID NO: 88105 - DNA, 122 bp, Homo sapiens
aatgatgggggtcccaggcaaagctccgaactctttcacgtaacgggaggaatacagacacgtcttagttaagcgtgcgtgggaaccgcggaattaaggcacctagaggccaagggcttgtg

SEQ ID NO: 88106 - DNA, 122 bp, Homo sapiens
caaccactgagctttcaaattagtggtactcaacctagagttcactggatagtagggagccgctgtcttggtttcagtttaattaatgcatatgcaaatgaatcaagatattctggcatagc

SEQ ID NO: 88107 - DNA, 122 bp, Homo sapiens
cctcttttccactctgtgtcccacccctcccttgtgtctccaggtttgagggagtgagtgcgggtcctacagacagggaaatggagagggaagcggggaccagggaggcgtccctcctgcag

SEQ ID NO: 88108 - DNA, 122 bp, Homo sapiens
cgcccgaatcccacatatatgtgtaacgcattggagtctgcacttgcgtgaccctgtcaccgtcacctcctggacttctcaggaatctcctggttgctctctgtagggcaactccagctcac

SEQ ID NO: 88109 - DNA, 122 bp, Homo sapiens
gagcagcaaaacgtggggtccccatctgccttgcctgcaggcgggggacgatcaaatgaacgtgtgcgattcctgcactctgtggtgcacagtatcattattaactctgggatctgaaaaac

SEQ ID NO: 88110 - DNA, 122 bp, Homo sapiens
aaggagagatgtcaaaggagaggagtgcaccgaagtccccagtcagcaatgtctggtgcccgggctgaacattccagcttgcttcaaaacattctgcatttgaattttgaaacctctactgc

SEQ ID NO: 88111 - DNA, 122 bp, Homo sapiens
tgggggacgtgcgcgaatattccagcggctgcgagtcccgggtctggcggatttcccgcacgatgccttgggcccaggcctccggattctcttgcattttggtgctgcgccgggagccagga

SEQ ID NO: 88112 - DNA, 122 bp, Homo sapiens
attccctccgctcctcacatttacaggaaggactcaggtaagcctcggcgccagttcagtcggcccggggccactaaataccaatgggatccagtgggttctacgtggtgagtggggggcgg

SEQ ID NO: 88113 - DNA, 122 bp, Homo sapiens
gcgactttccaagacgtgggggtcaccatgggcagaggacatcggttcggagccagatcacgggccccataagcatcagaccataagcagcgccgccactgagagccgctcggaactcgccc

SEQ ID NO: 88114 - DNA, 122 bp, Homo sapiens
ctgcatacgaccacacacaacccacgcgcccgactgcacctgcagctgcccacagcctcacgtgtgcacaccgacattcatggcacctgcagacaatcgcacccaccacacaatcacgccca

SEQ ID NO: 88115 - DNA, 122 bp, Homo sapiens
aaggcctgactcaagggtacagagaacaccctcccttctagaatatccccttcctgtacacgcccacacatgtgaaataaaccacagaagtatcagctgtaagatgttattaatgaaggcag

SEQ ID NO: 88116 - DNA, 122 bp, Homo sapiens
accttcaaagagctaagtctcagtttatagattgttagttttttaagttccactctctttcgttgtactgctgaactctgggcctctgtgtcctcatctgtaatgtggagtcaaaattatca

SEQ ID NO: 88117 - DNA, 122 bp, Homo sapiens
gcgagggagacgccgagagctaggctcagtgggagggggcgggcgtagaggctgaggcaccgcccagagctcgctgagacagagactgagaacgcccccggccagattccccccggagagac

SEQ ID NO: 88118 - DNA, 122 bp, Homo sapiens
aatggaggcacagcctgtgccgaccgccctttccgaggcaaacagagaccacgaaagtggcgtgacggctggcgtggcctctggagcccacctgcactcaccactgcctctctgctcttggc

SEQ ID NO: 88119 - DNA, 122 bp, Homo sapiens
cccctttgaaatgctccctttcgcagctgcaagcttggcagatcctgcactgcacgaaggcgaggaggctattgtgatgcagatgtgctccaaagtgcatctgcagcaagaacatttccatg

SEQ ID NO: 88120 - DNA, 122 bp, Homo sapiens
tggttagaaaagcgaagtgctgtaaaaacccgggccttcacgaaaagcgcctacggttagcgagagagggatcacggggagaggcgaaggggcggagcgagggcggccggaaaaggagcagg

SEQ ID NO: 88121 - DNA, 122 bp, Homo sapiens
aattgagggggtggcagggagagtgggtgaagactggccagagggtgcagctgtgagactcgaagtttctccaagaaaaagctagggcttccatatggatgagtggataatcactgtttttt

SEQ ID NO: 88122 - DNA, 122 bp, Homo sapiens
tggcctgtggcttgtttttgtaaatatgtgttatgggaacacagtcacaccatttgtttacgtaccgtttatggctgctttactcaactctgctacaatgacagagttgagtcattgcagca

SEQ ID NO: 88123 - DNA, 122 bp, Homo sapiens
ggctggaggccagcacctccttgatctggtgctgccatctctccgagttgttgctgctgccgtccttgtaaggcgaggggatggcgcccgccggccggttcttccgggcttccgccaccttc

SEQ ID NO: 88124 - DNA, 122 bp, Homo sapiens
cctgggcatgggagaagatccgctgggacttggtgatcatctggaacacctgcatctgctcgtggctcacaagaggttcctgcgacttgaggaagagctggcggaagagcggcgaggcatcc

SEQ ID NO: 88125 - DNA, 122 bp, Homo sapiens
ctttcaatatcaatcaattgaaatgtgattttacttaacaaattttgattacataagatacggatatgtttctagtctctgatcacagccttatgttgttggagtcttgctgttctgcagcc

SEQ ID NO: 88126 - DNA, 122 bp, Homo sapiens
ctcccagcccggttcatggctgccctggtgagacgcagggtctgggggtgcaacgggaggcggcggcatgtgctgtgctgtcccgcgtgcgccgtgctgacaccgtcctctcttcctgctgc

SEQ ID NO: 88127 - DNA, 122 bp, Homo sapiens
ctgtaggggtctgatctgattggccagctctccatttccaggcaatttccccacctatcccgcagtgttcaaccctatctcacgcattctcctgcttgaggaatttctccctgtcctcccag

SEQ ID NO: 88128 - DNA, 122 bp, Homo sapiens
ttgctcaccctctagttgtatgtttctcattcttcctggatgcaagacaagaactcaggacgcttcaggactgaaagagctgtaacacaaagagggccgaaacacactcctccttctccccc

SEQ ID NO: 88129 - DNA, 122 bp, Homo sapiens
ggccatccctaacccaggacctggctagcaggctgccctccgagccgaggctgcgctgggcggaaccagggatttatagcccggagtggggctgaaacagagctcctggcccgagcagagag

SEQ ID NO: 88130 - DNA, 122 bp, Homo sapiens
aacagttcgaaaaaagtcttaaaaatgaattgttgactttaaacacacaatcttcggagccgctcacaacgtccgtagaagcagactcctccccgctcctggggaaaaccctgcctaatatt

SEQ ID NO: 88131 - DNA, 122 bp, Homo sapiens
gaactattggtacggggctagagaggaaggctttgggattgccggggagcagcgagcgaccgacttccgtttccagttaccaaggcacgaggatccggtgttccaacccagggggaaaaatg

SEQ ID NO: 88132 - DNA, 122 bp, Homo sapiens
tgcctggctgagtgtcaggcaaaactagccaataaacatgtagtttgggcaaggtgggtccgtcccctaactcggaccttataaagcgcgcccgctgctcccacaaagccgggctgtcccag

SEQ ID NO: 88133 - DNA, 122 bp, Homo sapiens
cctgcggcctgggggccggctccggaggttcccccgcagccgcagcatctacgcgtcaggcgagcccctgggcttcctgcccttcgaggacgaggccccattccatcactcgggctcccgca

SEQ ID NO: 88134 - DNA, 122 bp, Homo sapiens
cgactcgacctggaccacaccctaaggctagaagacagcagtaacactaaaaggatgagacgcaagccattgccagaagatctggaatggccattttccttctcgtaaaaggaaaaactcaa

SEQ ID NO: 88135 - DNA, 122 bp, Homo sapiens
agtagcattgaatctgtcgtcgaagacctggccaagatgaatctggaaaaccggcctccccgctcctccaaagcccacagaaagagagaaagaatggagtccgaggagagggagcgccagga

SEQ ID NO: 88136 - DNA, 122 bp, Homo sapiens
agtccttgagccccagggccaagggctgtggacatggccttgagatccccgggaaagccccgccccccagaatctggttacgtgaggctcagccttctgatgcccggtggtgaacttgccca

SEQ ID NO: 88137 - DNA, 122 bp, Homo sapiens
ggcagcgagtctgaagagagagagggaaataggctctgaacacagtgtctgtaattccatcgaggtgtttggtttcagcttgagtcaaacctttgggggaggtttgagaacaggattccaca

SEQ ID NO: 88138 - DNA, 122 bp, Homo sapiens
ctcagcgtgcagacatatgccctgggagcccacaatctgttaacaggaagcaggtaaacccgagagcgtccgcctgcgttccagtccagtgcccgtcccagcacacacctgctttttcagac

SEQ ID NO: 88139 - DNA, 122 bp, Homo sapiens
ctcctattccatgagcttaaaaccatatcaggtaatttcagatcacttgaactatggttccgtgctgtgtccctcggctctctcccattctccttgccgtgtctctcggctctctcctattc

SEQ ID NO: 88140 - DNA, 122 bp, Homo sapiens
aacaccaggcagggttctatgtgtactctgacgtggagtacctggagcttttgcaaggggcgtgttaggtttcttgcaacttgcacctgagcatccagagtgctctgcaaatcccagcccca

SEQ ID NO: 88141 - DNA, 122 bp, Homo sapiens
ttttgagaggcctcagtcgcctttaagtggcacttccaggacacccatcctgagctctcacgaatggctccaccttcccaagaatgtctaattgtcattggaacagccagtgtctggcagct

SEQ ID NO: 88142 - DNA, 122 bp, Homo sapiens
tttgaatctacaaaaaacaacaaataatttttaaatataaggattttcctagatattgcacgggagaatatacaaatagcaaaattgaggccaagggccaagagaatatccgaactttaatt

SEQ ID NO: 88143 - DNA, 122 bp, Homo sapiens
cactccgcggtttggaactctgattgggccgagcttggcgcgtgcgcgcgatgtttggcgcgtgttcagttgatgggtcgaagcccagagggctgtgggggaaagcagagaagtttatggcg

SEQ ID NO: 88144 - DNA, 122 bp, Homo sapiens
gccaatgtgcactaggtgccaccggcagctttgcagagccctggccagagtggcctccgccgcctgtgggcctgggcaccaggtctcagggtgcgcctggtggtccccggaggtgctgcgga

SEQ ID NO: 88145 - DNA, 122 bp, Homo sapiens
ggctaagtccaaattttggggcctgcctgccctgcatcatgaggaggtatctgagtggaacgtcaatgaggaggaagaatgagttggagacaggcctggagaagaatattctagatagaagg

SEQ ID NO: 88146 - DNA, 122 bp, Homo sapiens
taagcctgtcggaaaagcgcagtattcgggtgggagtgaaccgattttccaggtgccattcgtcacccctttctttgattaggaaagggaactccctgaccccttgcgcttcccaagtgagg

SEQ ID NO: 88147 - DNA, 122 bp, Homo sapiens
tcttggcagccaacctaatttcttcagagccgctaccctggggccaccactccctcctagcgcccctcactgcaaaccctaggaggcccgggtcttgcccactgctcctgcccctgcccggg

SEQ ID NO: 88148 - DNA, 122 bp, Homo sapiens
caccttcttacacggcaggcgcggcatcacgtccagatgggcatctaaggaactgcatttcgggagatgaaactttcatttgggactcaactgaatgcatgaactaacacagggccatggac

SEQ ID NO: 88149 - DNA, 122 bp, Homo sapiens
cctgccagaaaaagtcgttcccaaatgtttgtaaatcctccgttgggcaacccgccttcacgttctgcggtgatcttgtcgagcgactaagcgtgcagtattagcagagaagggggtggcag

SEQ ID NO: 88150 - DNA, 122 bp, Homo sapiens
caattctggctgtgcccacccgacagtgggcaggtgctgggccgccggtcctttgagggccgcatctgcgcctgtcctggccgcgaccgaaaagctgatgaggaccactaccgggagcagca

SEQ ID NO: 88151 - DNA, 122 bp, Homo sapiens
ctcggcacacgtgttgccaacgtgaaggcagacatggtccctggccctaggatgagtccacgctgggcttccgggcctcaggtgcatctccagccaacctccaagggtcttgctccttctgg

SEQ ID NO: 88152 - DNA, 122 bp, Homo sapiens
tgcccatccgctaccggatcgtccagctcggtgggagcaatgcccaggtgagccgatggccgccagctggggtgcctagggcctgggccagggagtctgggcgccccgcagcccccaagttt

SEQ ID NO: 88153 - DNA, 122 bp, Homo sapiens
tgtccgtggccggcggtgccggcctgctggccgctccaagtgtggggcccgccgagcccacgcccacctggaacttgcgctggcctgcgagctccgtgtgcagccctggttcctgcccgtgc

SEQ ID NO: 88154 - DNA, 122 bp, Homo sapiens
ttagcttcctttacaagaaccttctactagataatcactgcaaccttcagtctgtttctccgagtcttcaagattcagctaaaatatgttatcttttcctaaatgcttctcagtctccttcc

SEQ ID NO: 88155 - DNA, 122 bp, Homo sapiens
gactgccccttcctatgctggaatagcaacatcccagagtggaaaaaggagccagcccagcgtcctcagctaacggaggcctccttgctggccgccagataggccaccccgcagatacagga

SEQ ID NO: 88156 - DNA, 122 bp, Homo sapiens
tctgctcagagtcagccaggacggcgcaagttagcgcatccatcgacgctgggagctgttcgccttccagagctcatagtaggaggggcagcaaaggtgtgttcccccaccgccaccacccg

SEQ ID NO: 88157 - DNA, 122 bp, Homo sapiens
actggcactacaaatatcagcagaccctggaggcccatatgaaggagaaacaccctgagccgggtggctcttgtgtttattgtaagactggacagcctcaccccaggcttgcccggggtgag

SEQ ID NO: 88158 - DNA, 122 bp, Homo sapiens
tgactctgaaaagtcagaggctcaccactgtgtctctgacccacgagaaaagtacccgggcgggccacccacagcttcgggatcggggcgcgcagggaagtagccagcaaagcaggtaagtc

SEQ ID NO: 88159 - DNA, 122 bp, Homo sapiens
agccatggactctgcctctcaggccacagaactgtcagatactgtgggagatgtggttaccgtcagggagcacacaataaagaatataaggctgaaacatatcaagcaattctgacagaaac

SEQ ID NO: 88160 - DNA, 122 bp, Homo sapiens
tctcaatgaagctgcccagatagtttttgttcctccccagtgaatgaaatccaattaattcggactccgtgctactgagaggggaggaaaaaaagtctagcggcttctaatccctccctcca

SEQ ID NO: 88161 - DNA, 122 bp, Homo sapiens
cagtgcttctgcggcaggtgctgcccggggccggggactggggactggggactgccggggcggaagacgccgctgcccgcctgccacggagggcagggagggcgggcctgacggctccgcag

SEQ ID NO: 88162 - DNA, 122 bp, Homo sapiens
gtgaaatgcttttgaaagtagaacttaaggagtccactaactccatgggaaattcagatccgcgggctccctgggacccctgcgaccccgccgacgcgcgctcgtccccccccgagctccgc

SEQ ID NO: 88163 - DNA, 122 bp, Homo sapiens
tcaatatatagtttcccctgagttcctggggacaaatctcaatcatggagccctcagaagcggttgatgattgtcaggggtcagtggacctggggtcagtctaccaggtgacaggaccctat

SEQ ID NO: 88164 - DNA, 122 bp, Homo sapiens
aaggaatgcagctaaacagggggctcagatccctgttcagggcccttctcacgatcccaccgtaacagcccagccctgcgggtgcctggctgcagtctccttctccccagcacttccagacc

SEQ ID NO: 88165 - DNA, 122 bp, Homo sapiens
gaacaaaaattagactccacttacaacactctcagatatatcagacccctgttctggggtcgactctgggcaaaaatatctagtgggcagaaacttggatgtgacagagggcacagcctctt

SEQ ID NO: 88166 - DNA, 122 bp, Homo sapiens
cccttcgtctgggaggtggggggcgcctctgcccggccaccccgtctgggaagtggggggcgcctctgcccggccaccccatctgggaggtggggggcgtctctgcccagccgccccgtctg

SEQ ID NO: 88167 - DNA, 122 bp, Homo sapiens
ctcctgtgtagggcatttaccatgaacggagcttgcgggacttggaagttgctctgtctgcgttggggagtgcggggtgcgtggatgtgaaggcctggggcgtgaccgcgcaccactgtaga

SEQ ID NO: 88168 - DNA, 122 bp, Homo sapiens
ccctccctctcccggctgcagagctgggcattgctcagtaggggaatggctgatgctgggcgccggcctgattggagggaagtgatagaattcaggatttttacttccaaaaaggcattttc

SEQ ID NO: 88169 - DNA, 122 bp, Homo sapiens
cgggtggcaggtcacgtgtcgaaggcttgcccgcggggaccccttccaccctggctcccgcgtcacatgaccggctttaagcaacatggcggctgccgtggtgcagcgcccgggctgagcga

SEQ ID NO: 88170 - DNA, 122 bp, Homo sapiens
gaaacgctgaggcatctgtgatgtctgctgtaagtgccaccaggctctccgctgaaatctcgcaacgggaaaatagagaccgtagattctgcttttagaaaggggagaatcagaagtaatgt

SEQ ID NO: 88171 - DNA, 122 bp, Homo sapiens
cagcaggcatgatctaactctggacaactttctgtatctcaggagatttgtgccacaccccggctgtttccagatgacccacgggaagggcaggtgaagcaggggctgctgggggattgctg

SEQ ID NO: 88172 - DNA, 122 bp, Homo sapiens
ggggagaggcatggggctgggtccctgcaggagctcacaagccacagtggggagcagaagcgttacgctgagtacagtgggagccactgaaagggttaaagacccctgggggtgctgagtgg

SEQ ID NO: 88173 - DNA, 122 bp, Homo sapiens
accacttatcctcttctctacccctgctcagctttgcttgtgccatctgcccccatcgaccggtactggacaccctggccatgctgactgcccaccgtgcaggcaagaaacatctgtccagt

SEQ ID NO: 88174 - DNA, 122 bp, Homo sapiens
aacagctgcagccgaggttgggataaggaaacgaggctttcctgtcaaactaaacctggccgccccggaccccgaagaagcagccaagagttaagacgcaatctgcatgactgacgcacgct

SEQ ID NO: 88175 - DNA, 122 bp, Homo sapiens
ggtgctctacgcacccctgctgaacccctacacgctggccgtggccaacaccaccttcaccgtcagcaccgacaaggctcagcgccatttcggctatgagcccctgttctcgtgggaggata

SEQ ID NO: 88176 - DNA, 122 bp, Homo sapiens
gaaaggtctcaggtccaagctttgtcctgaaaagataattctgattgcagaaactccctccgtccagcaggaagcgccagcaccctctgtcggggttgggccgccacggaggcttcacgtga

SEQ ID NO: 88177 - DNA, 122 bp, Homo sapiens
acgccaagggactgatcctgctccaatcctcccctccactggcttttccttgggatgtctcgagccacttctctcactcctatcccccaatcccaagcggacccgacacccctcaggctctg

SEQ ID NO: 88178 - DNA, 122 bp, Homo sapiens
gaggtgttcgtgggcgcagtgaaccgagtctttaagctggcccccaacctgactgagctgcgggcccatgtcacggggcccgtcgaggacaacgctcgctgctacccgccccccagcatgcg

SEQ ID NO: 88179 - DNA, 122 bp, Homo sapiens
gcagctgctgcacctgtgcctgcaagatggtggcagtcctccagggcctggggatctggccgaggagaggactgagttcctgcacagccagaactcgctgtcaccacgcaggtgcacactct

SEQ ID NO: 88180 - DNA, 122 bp, Homo sapiens
ctgcccagcctctccccgcccccaggtgctgctggagagagagctggccgagctgagcgccgagctggacaaggacctgcgggcaattgagacccgactgccgtcccccaaggtaccagccc

SEQ ID NO: 88181 - DNA, 122 bp, Homo sapiens
gtctccgcccggcaaatcgcccccaggctgcgtccctccgcccttccccctctcccttgccgttctgcccagtggccgcagactgagattccctggctgcgggagagcatgtgcctcctagg

SEQ ID NO: 88182 - DNA, 122 bp, Homo sapiens
tctctggacgtgagagcaaatgcacggtgtgcgcaaaggcccagctggccaggggcgtgccgtggagcctgcagcagcaggtcctcaggcagtctcgctgctctcagctggagcagggacct

SEQ ID NO: 88183 - DNA, 122 bp, Homo sapiens
gggccgcacgggctctttccctcttccggtcagcaagggctcaggggggcagaggtgtgccgcggcggggacgagggcagcagcccgggagggctttcccgcgtccccaggcgtctgccgca

SEQ ID NO: 88184 - DNA, 122 bp, Homo sapiens
ctgataaaaatgggatacttcctactgggtgtcagcactgtcatcctaaggcaactcagacgtgatagttttagactatgatcaaatctcacacaaaccattatcagaatcttgtttcacac

SEQ ID NO: 88185 - DNA, 122 bp, Homo sapiens
gtactccagaatttattctccattccccgtttttatacttcatttgttaaacagtattgtcgttctctttaaaaaaaatctccatactccatctcagctcaccattcttaattttctattct

SEQ ID NO: 88186 - DNA, 122 bp, Homo sapiens
ttggggtgaccctcactgcactgaaacaaaggcaatttgcagacaaggccccagatttaccgaaagcaagtgaatacaatgcaaccaattaccctgtttggactggatggcaatgaaggaaa

SEQ ID NO: 88187 - DNA, 122 bp, Homo sapiens
ggggaggggcagcggggagcggttagaggtgggagttggcgctgcgggccgggcgggggccgcggaagctgcgatgcggacagggcagcggcggtgacccgagctgccgcccgacatgaact

SEQ ID NO: 88188 - DNA, 122 bp, Homo sapiens
gcgagcgctgtgcggtcagggcggggctcaggtgtgctgtctggagtgcagggagctggacgccgcctgttcccgccacacctcagccctgctttcccatctcccgtctctttttttttttt

SEQ ID NO: 88189 - DNA, 122 bp, Homo sapiens
aatagcccttgataaaaattgtgtccatttgcactaccaccagcaatgcatgagagtgcccgctttcttctactgtcttctgtataacaaataatctctttgatctttgccaatctgatagg

SEQ ID NO: 88190 - DNA, 122 bp, Homo sapiens
gatccccatatatttttgtgtgctgtgtcataatttcaagctaaaacaacacctggaattcgtagcaaagggaaccagcaacatctgattcagatgtgattttacctgtgcgggtgtattcc

SEQ ID NO: 88191 - DNA, 122 bp, Homo sapiens
tcaaaatgcatacccttaaccactatgctctcacatttttagatgtgggatttctgtctacgacgtcgcccccactaagacctagggcttaggtgtcgaggtgggaaagatcttgaggcttt

SEQ ID NO: 88192 - DNA, 122 bp, Homo sapiens
gcttggatggaccccacgcaagcctcccccatcaccattgtcgactcccttcaccactgtcgacccgcgcaaggccaggtccccaccagtgaggctggtccccaaacacacagctgggtccc

SEQ ID NO: 88193 - DNA, 122 bp, Homo sapiens
aaccggaaccagatgtgcagtgagggacagcagctgggggccatcccccaccccgcctgccgcccgcgctccctcctgcccgtccccgcctgccgcccagcccggtccagcccctacctgcc

SEQ ID NO: 88194 - DNA, 122 bp, Homo sapiens
ccgtgggcaggcgcggccctggggaggtgctcacgccccctccgcgcccgaggcgcccctcgggtggcacccaggacgacctctcaccccgacctaccgccccgaccctcttaggcgcagag

SEQ ID NO: 88195 - DNA, 122 bp, Homo sapiens
cagggcatagggagatggggtgcttctccactggcaatgcagacaccgcaccagacgtttcgggaggcaagtctgccggaaggggtgaggggttaactgcgggggttcgcagacgtggaagg

SEQ ID NO: 88196 - DNA, 122 bp, Homo sapiens
cgttcctgtatatggtagctccatccatcaggtttgtcttaattcagcaactcaaacaatcgtttacaaagacctgcactggaagccggttctcagctgctgaaagaagagaaagggaagga

SEQ ID NO: 88197 - DNA, 122 bp, Homo sapiens
gggaagcccttggcaggagctctcgctggtactcaggtgggagctcttctggggactccccggaagatcccgcagccttccttacccccagacacatacccttgctgctcccagagcctgga

SEQ ID NO: 88198 - DNA, 122 bp, Homo sapiens
aggcgggtaaagctgcaagggaaggaagtaagggcgagcccgtcggactacgaagcgggacggaaactacaattcccagcaggccttgggcctcagtgcggccgcgaagcagagcgggctgt

SEQ ID NO: 88199 - DNA, 122 bp, Homo sapiens
atctgctggctaagtatataaagacacatcttaagagctttctctaaagtaggtttctcacgtgaaaaatgaggctgttatgaggtacagcccctcagtttacccatttccatatagcctaa

SEQ ID NO: 88200 - DNA, 122 bp, Homo sapiens
gctttgttaacaaaagaaatcacccccaagaggccccaaccccttttccctgcctgtccccggcaacttcagcacaggagaccttggtcggatggcagctttacaaacaacacacgaaacaa

SEQ ID NO: 88201 - DNA, 122 bp, Homo sapiens
tacaaaatcttcgtgaaaatcggacctgagggcttatgcccatatagagcctgttccagccgttctgaacatgaagggacctatgaacctcctgctgtccctgcaccgcgtccctccctgtc

SEQ ID NO: 88202 - DNA, 122 bp, Homo sapiens
acaaccccttccccaccgggccccgaggggaccctctaaaaagggcagggccgcccgggtcgcctcatcgggggaccccgagacaattcatccagacccacccgcccctccccaaggaaact

SEQ ID NO: 88203 - DNA, 122 bp, Homo sapiens
ggcccccgtgacatgagtggcccccgtgacgtgagtggcccccgtgacattagtggaccccgtggcgtgagtggcccctgtgacattagtggaccccgtggcgtgagtggcccctgtggcgt

SEQ ID NO: 88204 - DNA, 122 bp, Homo sapiens
gcaccgggcgcgtagttattcctgggaaaaagacgcaggagcgccagctcccggcgccgccggggtccccaagcccctgcatcgcggatgtaactaattttaaaactatttgaaaggcgggg

SEQ ID NO: 88205 - DNA, 122 bp, Homo sapiens
aactctgcgggagctgggactttgagattttgttccctgatgtatttccagcacggagaacgggctcatggaaggaaggcacccatttcttcagtgaataaaagtggcacagcagtcagtca

SEQ ID NO: 88206 - DNA, 122 bp, Homo sapiens
accgcagcccccctgtttcctccccgcctcgcggcccctcagtcgcccctatttccggcgcgggacccccaccccggtacctgcacacctcatgcgcccgcagtttcgagcctgcggggctg

SEQ ID NO: 88207 - DNA, 122 bp, Homo sapiens
gaaggtccgtgttggctgctggttgccctctgtgaccgggtcagctctcctgtgacccatcgtcctcggcagagccagcagtacatttccaaatgccagacatcagaggctcaggaaagatg

SEQ ID NO: 88208 - DNA, 122 bp, Homo sapiens
ttaaactagccataatttagaaaatacaaattaggcaaaaatttaaacacttacatactgcggtagtaggtcttcatctataggtctccttttgtgccattaagctcatttccgcctcagga

SEQ ID NO: 88209 - DNA, 122 bp, Homo sapiens
catcaacccattaagttcttaaatgtcattgaatggagtccttgtcatgttacagaggagcgtaaaattgtggttaaacattttttaaagattacatggtagagccacagtttgttatgcag

SEQ ID NO: 88210 - DNA, 122 bp, Homo sapiens
agaacgagaggttctaggtgccaaaaggcccagcagaaagcagagtgccatctcagagagcggggagccgtgcagcgtgacgcaggctcctgcgtgggcagccacgggccgggacacgctga

SEQ ID NO: 88211 - DNA, 122 bp, Homo sapiens
cctacactagtcccaccccttacacagcttccaaatctgcccctatttttcacaccgctacgcacatcctataacaagccaatatatgtttgtcgaatggatacatgcgtgaacgaattggg

SEQ ID NO: 88212 - DNA, 122 bp, Homo sapiens
ttctcatttgccctttgagcacttttacttaaacttgcttgtagttgcttttatcactgccgcaaaacagccatcaagagccatctgctttccaggtgaacattggaaatgagaatctttga

SEQ ID NO: 88213 - DNA, 122 bp, Homo sapiens
acggggtagtctctttggcgccacctagtgtccagtttggcccatggcggggcccattcacggggcaacactgggcttctgggcacagcgggaatacagaaagatacagcactcctcatgcc

SEQ ID NO: 88214 - DNA, 122 bp, Homo sapiens
ccaggatcccggcgtcccagccccgcccggtcttggcgcggccctcgccagggggcgccgcgcagcccgcccgccgcccgccagtctagcacacaccccctccgccccgcgcgccggcgatt

SEQ ID NO: 88215 - DNA, 122 bp, Homo sapiens
atggcaaacttcatctttggaaataacttcacaccacaggttaaaggatacttgtagcaacgtcgtaggcattggcttgggtttttgtttttatttcttttttttttaatctactactggac

SEQ ID NO: 88216 - DNA, 122 bp, Homo sapiens
ccctccccttctctcctgcgtggaagccctgcagcctccgtttcttttgggactggggtccggggccttctgcctgacccggggtgagaaagggagccctgatcaggacccggtgagagggc

SEQ ID NO: 88217 - DNA, 122 bp, Homo sapiens
aatctgcctcctcagttccgctgcctggctgaccggaactgagcttgtggccggagaccccgccacgctctcagaagtacttgctggctggaaaacccaaaggggtgaaacctcagctacag

SEQ ID NO: 88218 - DNA, 122 bp, Homo sapiens
caaacctctgctcaagtgacgctttcacctcgtgcagctcggaagggcctctggtctcttcgccaacctctcattgtctcagttagtgagcagatgtttatgaggcacctactgtgtgtcag

SEQ ID NO: 88219 - DNA, 122 bp, Homo sapiens
gtcaggctggtctcgaactcctgatctcgtgatccgcccgcctcggcctcccaaagtgctcggattacaatgacaggatgtgagccaccgcgcccagcctgtaaacccttttgaaaaaattc

SEQ ID NO: 88220 - DNA, 122 bp, Homo sapiens
caagtaagtcccggccagccccgcctccgcccggggcgcagtccgcgtggggagggacagcggggcacagaggctccccagggcctagacacccctgtccccgcctcagggggctgcgtctg

SEQ ID NO: 88221 - DNA, 122 bp, Homo sapiens
tacaggcgtgagccaccgcgcccggcggatgatttgatttttaaaatgtaaagtgataatcggtgattgtgtcagcagaattatttgtaaaatatttacttgtatgttgcattttctcatta

SEQ ID NO: 88222 - DNA, 122 bp, Homo sapiens
ggcccggttcgatcccgagctaggcagggagtcggcgccaggctgggtggtgctcggctacgcggagtgggcgagcgagcacgcgcctgcggtggccggcggtcccgcgctggagggcgctg

SEQ ID NO: 88223 - DNA, 122 bp, Homo sapiens
tatgtctttgattttatgtctagaactgaaaaagaacaaagagtcttgtgacaagggatacgttttcctgggctagctagtaagtggcaaccagctacaaggaagtgagctaaagggcaagc

SEQ ID NO: 88224 - DNA, 122 bp, Homo sapiens
gacaggcctactgcgcacacgcgaaagtttcccgctgctagggtgtagttagtccgaggccggaccaaaactgcagagacatgggtggagcctgctgccctccgccaggctgggtgttcttt

SEQ ID NO: 88225 - DNA, 122 bp, Homo sapiens
tatgcagacacccacatcctccccaccctcctttgagttcaagtgcacgagccctccctacgacaatttcctggcttccaagccagccagctccatcctgagggaagtgagagaaaagaacg

SEQ ID NO: 88226 - DNA, 122 bp, Homo sapiens
gctgcccagcccccagtcccaggcgtggaagcctcccaggcggcaaggagctttcgagaccgtggctgctcagcccttgctctctgctctagtcaaggagcgtgcctcggaatgaatgaggt

SEQ ID NO: 88227 - DNA, 122 bp, Homo sapiens
gaggagactagggatggggccagggctgcgtgcgggcggggcacggtgcagacaaaggcgcggccgcgcggtcggggtggcctggccggggacaaaggcctgcccggggggcgggggcagcg

SEQ ID NO: 88228 - DNA, 122 bp, Homo sapiens
gcgccccggccacggcgcacgcgccggcctcagcgctccctcctccatgccctcggcgcacggcgccgcccactcacccagctgcacctctccgtgcgtccccaagctcacccgctctgagg

SEQ ID NO: 88229 - DNA, 122 bp, Homo sapiens
cggtgcaatctgcatcctactcacgcggcatctacagccccgccacgcttctttcccccgcgccccagacgagtccctggccctggtgagagactgaagattgctggggactccacgttcaa

SEQ ID NO: 88230 - DNA, 122 bp, Homo sapiens
ctccccgctccgcacacggaggcagcagccggtgccacgcacacaacacgccgcgccaggcgcgagcccacttggagccacaggctgtctttctgcacactccccactcccgctccccaccc

SEQ ID NO: 88231 - DNA, 122 bp, Homo sapiens
gcccctgtctgggcctcagtttccccatcaagaagggggaaaccccaagaccccagtccccgagttccacagcccacggggaccgaccccggggccggaccccactgcctgtctcgcccacc

SEQ ID NO: 88232 - DNA, 122 bp, Homo sapiens
cctttttctgatgtggcatttgattaagacacaattcatacagacagccggacatttgaacgcgaagcactccgcatatttatggatgcgtcctgagcagtgcaagccgcccggctcggctg

SEQ ID NO: 88233 - DNA, 122 bp, Homo sapiens
aggccgtgaagggaggcgttgagggaggcggccccggccccggcctcggcctcgcagcaccgcccgacattcttgacgtcgttgctcaggctctggagctcccgcgccagcccggccagggc

SEQ ID NO: 88234 - DNA, 122 bp, Homo sapiens
tcccttgtccccgccccttcccgccccaactcaggttctgccccaccccgccccaattcacgtcctgctccgccccgacgtaggccccgccctggcccccgggccccgcccccgtctgacgc

SEQ ID NO: 88235 - DNA, 122 bp, Homo sapiens
ctccctccccccctcccacagcctggaccggggtaggagggagggggggtgtgcgcccggcgccgtccccgccccgccccccgtgattccccctgcatggccggcccgggtggggggcgcgg

SEQ ID NO: 88236 - DNA, 122 bp, Homo sapiens
ccaccctttcccttcactcctttttggggctccctcctcttaggagccctcattgtcccccgctaaggccctcatcgaacatcccatttcccagatgggaagactgcacccaggaggggcag

SEQ ID NO: 88237 - DNA, 122 bp, Homo sapiens
ctgggttcttggccttgtgcttgaggcctttttcgaactcggagtccgtgttgttgccgtcgactgaactggaaggtgcgaaggatggtgcgtcttcctcttctgagctctctgttggaggt

SEQ ID NO: 88238 - DNA, 122 bp, Homo sapiens
ccgtatatctaggagatctcagtctgtgcgccgccggtcatccccgtgcttcccagccagcgtctgcagctcctcatacttgatctggtacatgctctcggcctcagcccggctgcagttgg

SEQ ID NO: 88239 - DNA, 122 bp, Homo sapiens
cgccgtctgccgcctgctgggcgatgtgtgcgcgagcccgtggggcttgcgcgcgccctgcggcgtgtgtactcacaaaggtgtgtctgctaaccccacagcccgggctgcgttccaccccg

SEQ ID NO: 88240 - DNA, 122 bp, Homo sapiens
cgtgtgaccatgtaaggtaaacagggggctcatgaagtcactgaggaccaatggggagcccggagcagagcctggggcggggcttggccctggcggcgggcgcggattggcacgctgcggat

SEQ ID NO: 88241 - DNA, 122 bp, Homo sapiens
ggccccattgtcccgccccgtcgcggcgggaggcccgggcggcggcgccccgcctcttcccgccgacccccaccgctgattgtctggggacccaggatcgcctgggctaccgccgcccccgt

SEQ ID NO: 88242 - DNA, 122 bp, Homo sapiens
ccctccatccgcacggctctgggcttgaccactcctccacggccgcccgagggccgatcccgagaaaggacgaggcggcaccctccgccccgcacccctaggcccattaccggccccgccgc

SEQ ID NO: 88243 - DNA, 122 bp, Homo sapiens
cgccccggaatcagggccttcccaattctgccttcggggagggaggatgggggtgggccgcgggaggccagttccaagagcgtcctgaagtccctcccgccgccccgcgtcgctttaaggcg

SEQ ID NO: 88244 - DNA, 122 bp, Homo sapiens
aggtaagcctgggaggaaggtaagcctgacgctcacatagtggctgtgctaggagacactcgggtttctggctttctgcctggcatgcaccttccttttggatgtggaggaggagtggtagg

SEQ ID NO: 88245 - DNA, 122 bp, Homo sapiens
ggagataaacagaaacgcacatttggtgccccggaactgcctttccgaggaggatcaagtcgtgcctcctgctgagctgtgtcctttacagacaaggtgtgacctggggttggaagagaaga

SEQ ID NO: 88246 - DNA, 122 bp, Homo sapiens
cgggctgcaggcgaggttagccggggacccgggtggccggaggcagcggcgagcggtgcacgtgcttgcagacacgggcgagtgtggagccggggggtgcacgcccggtgggtaggggcttg

SEQ ID NO: 88247 - DNA, 122 bp, Homo sapiens
gccgttggccctgcccagtaagcgccaggtggtggcagcagggactcggtgcagcatggccggctgggggctgacccaccagggcgggcgcctgtcccgggtgctgcgggagctggacctcc

SEQ ID NO: 88248 - DNA, 122 bp, Homo sapiens
ggcaaagaaagtaagtggcccgaacggcggcggcggcagcggcggcctcagcagcggcggcgtcgggaatgagctcctccggcttgtcccgaccacacgcatcttccagggaagcccgggaa

SEQ ID NO: 88249 - DNA, 122 bp, Homo sapiens
tgccctcttcctttttctgtcctatagaatcagcttattttctatctgcttgtgggttggcgggcctagttggttaaaaacatcaggctgaagctagagcttaaactccctatatgactggt

SEQ ID NO: 88250 - DNA, 122 bp, Homo sapiens
tctattccatttattttcactcccaatagatggtgtaatttggaaaagaaaagacactcacggggcttaacagagacccagtaggaaacgcataaacgtctccctgcagcacaatgatgcac

SEQ ID NO: 88251 - DNA, 122 bp, Homo sapiens
tgtttttccttattgtagtagttattactgattgaaatctgtcctttccactttagtgtccggctttgtttatctttgacaaaattcaccagtttgattcaagacagtttccagcccctgct

SEQ ID NO: 88252 - DNA, 122 bp, Homo sapiens
ttccaacagatccatgcttaaatgtacctgatgccaaaagttatttcccaccctaaaatccgaccctctttattaaacaaaagttttagtaattaaacactacttattcaagaataaaaaat

SEQ ID NO: 88253 - DNA, 122 bp, Homo sapiens
gctggcctggagggagaagctaggactcctctggcaatcccccataccccttggggcagacgccctgaagaggaggctgaagacagtggaggccctggagaggacagagaaacactggggct

SEQ ID NO: 88254 - DNA, 122 bp, Homo sapiens
ccgcccagaagggccccacttcgcctctctcaggcctcagggacccgggccctagcgccccgcggcgacgccccccgcccccatccacgcacacccaccggcactgctgccgccatcctgcg

SEQ ID NO: 88255 - DNA, 122 bp, Homo sapiens
gtgggaggaggaatagggacattttaattgtatttctaaaaagtatcttctgtggtgaatcggaaacaaaactcattctttaccacaggcagtttaagcgctgcctgaaagatcgaaggacg

SEQ ID NO: 88256 - DNA, 122 bp, Homo sapiens
gctggtgcccgatggggaagtggtgctgagctcagatcctctctccctttcctgggctctcgtggaggaggacttcagatgggccagtcgagctcttctttgctccctcctctctttttcta

SEQ ID NO: 88257 - DNA, 122 bp, Homo sapiens
gagctcggggtgggagatctgcggtcctcccagtgccggggaatggttgagtgacaggaccgggggggcggagccggcgcggctgcccgaggtggagccccagtggtgcgagtagctccagc

SEQ ID NO: 88258 - DNA, 122 bp, Homo sapiens
ggcgtagctggtggcgggcgggtcgggcgaggccatgctgtcagcccctgccgggtgctccgcggcagctcgcccgcgcgcagcctgtcaaatatcacctcctgcccgacacacccatcgga

SEQ ID NO: 88259 - DNA, 122 bp, Homo sapiens
ccgtactaggtagatggtcaattagagttcccagggtttgaagcctgtaactgctgccgccgctcaagccctccagagcattgctacggctgctgcccttgtactactacctccaaatacgt

SEQ ID NO: 88260 - DNA, 122 bp, Homo sapiens
gccagctgctccgaatgccgggtctgccgaggccacgcccacccggaactcgcgctagcccgcaagcgccacgggcagcccaggttcccgccagcgcctgcctccacacctctttgcaagct

SEQ ID NO: 88261 - DNA, 122 bp, Homo sapiens
gcactttttgatgttgaaaagaattctgtaaggatcattcctaagtccataaaatatcagcgaaagcagcttgttttgcaaggatccccatagaaagcagctgagctcagaaagaagctaat

SEQ ID NO: 88262 - DNA, 122 bp, Homo sapiens
atatcttttcataaagcacacctggtctcataagcacatgagagctaggcccagaagtttcgagccttggagactcacttcaaacaaattccagggaaagacactcaattaagtgttcagga

SEQ ID NO: 88263 - DNA, 122 bp, Homo sapiens
atccgcctgcctcggcctgccaaagtgctgggattgcaaagtgtgagccaccacaatcagcgcgatttcagagattattaagggcaggggaaggaatcccttctaagagaagtttggaggaa

SEQ ID NO: 88264 - DNA, 122 bp, Homo sapiens
cggttctgcctgggctctaatctccatttacttctgttctgtttttgtttatacaagagacggtctggcctggtcatttctcgtcttggtatgttactgctgagtcacagttcagttaacca

SEQ ID NO: 88265 - DNA, 122 bp, Homo sapiens
agggccgcgtcggccttgcaggcgggtctccaagtgaatgagcggcagagtcccatcatgcgcatcagcctgcgtgaaccagtgcgcagcgcgcctttcccgggcaccctctaggtgctggc

SEQ ID NO: 88266 - DNA, 122 bp, Homo sapiens
agccactgggaagccaacaggggagtccacgcctgctggtggggggagcccgggagggcccgggagaagcacaaagggtgggctgtgttgagcttcttcttttcttccagtaaagaggctgg

SEQ ID NO: 88267 - DNA, 122 bp, Homo sapiens
ttgacccctggactcagtttgggaacctgtagcaatgggtttgacctcttctcctggctgcgagtatcaccactagggagaggcaaaggcttgcagaaaccccaactcccgctcaggcagcg

SEQ ID NO: 88268 - DNA, 122 bp, Homo sapiens
agtattagcattgaagatttgttcttatagtgcatgttctcataaaaccaagtctggacacgatcagtttctgtccttggcacaattggagaaagatctttgctgccacaatttcctaaatg

SEQ ID NO: 88269 - DNA, 122 bp, Homo sapiens
gaactagaagcacatcagcacataactgcagccaaactagagccttcatcatgtgaaacacggcaatcacctttcctgaaccaaatatcagactacctgatggatggctgacgaagccaact

SEQ ID NO: 88270 - DNA, 122 bp, Homo sapiens
ctctcctatgtgtcttgtagagcgctagacacggctacttcctggttcagagtctgctctcgtgccctgttcagagaggctcacccggaaggaggcagccccagtcagagaggctcacccgg

SEQ ID NO: 88271 - DNA, 122 bp, Homo sapiens
cccactccaaactacagtgctgacattttcttttcttttctttatttagagacagggtctcgctctgtcgcccagcctggagcgcagtggtgccggctcagctcgttgcagcctccaactcc

SEQ ID NO: 88272 - DNA, 122 bp, Homo sapiens
caccactgcaccccagcctgggccacagagtgagactatcttaaaaaaaaatactgtaagcggaaatcactaagaaagagaggctttggaaaactcttacctgctgaactgacggggtaggc

SEQ ID NO: 88273 - DNA, 122 bp, Homo sapiens
tcacaatctctacacctgtttctttcatcttctggtgatgttaatcttctgtttattttgcgctttaaatctaagcacatgtggattacccagagattgccctctgaaagtcagtctacacc

SEQ ID NO: 88274 - DNA, 122 bp, Homo sapiens
cggacaagaaacaaacacttctccatcttcagtgagacaggaagctggtatgaaagacgccgttttagtatggctaaaaagacacggcaatgccagccaagtaaaatacttagcggaactcg

SEQ ID NO: 88275 - DNA, 122 bp, Homo sapiens
cagaggactgaggagatgccaggagggtatagtggctctgtggggccagcagcctggccccgttcatctgcctctctgtccttccacacagcccggccacacctgtgcagctcagggccctg

SEQ ID NO: 88276 - DNA, 122 bp, Homo sapiens
gacaggctggccgataggcaggccccccacgactcttctgatgttagccctgactgaactcgctgtgcagcgtccaaccaatcctggtttgtgctgggccctggactggaacccagcccttc

SEQ ID NO: 88277 - DNA, 122 bp, Homo sapiens
atgtagaggcttaatttgattcggatttttgtgggggaaaaaggagttcacggcgatgtgcgcccctcaccgtgtcacactggagccacagaattccccttgtttgcctgcggcgttgtaac

SEQ ID NO: 88278 - DNA, 122 bp, Homo sapiens
ccctgctgtcagggaggcggcctacaaacgcttcggctacaagctggctggcatggaccccgagaagcccggcacgcccatcgtgctgaggagggcccagccacgcgctcgcagcagcaacg

SEQ ID NO: 88279 - DNA, 122 bp, Homo sapiens
gtccagcgccaccccggccgcccccgccggccccttcgccggctcacagggcgactatggcgacctgcaggcctccagctactatggtgcctaccctggctacgcacccggcctctaccagt

SEQ ID NO: 88280 - DNA, 122 bp, Homo sapiens
aaccagttgttgactctggcttgtttaaacccccagggcatgattaaccgtgaccctctccgagtgtcataaagaatcacatagaaccacccagctcagctgaaaagccagaaagaagtgag

SEQ ID NO: 88281 - DNA, 122 bp, Homo sapiens
cagttgtgcaggaatcagcagcgcactgggtctggaaatacaatgaagactgcatgtgatcggcagctggtatttccgatgacctacatctcagggacgcagtaggatgttcattgataaac

SEQ ID NO: 88282 - DNA, 122 bp, Homo sapiens
cgctgattggcggcgagtgggccaatgggtgcggggcggtgggcggagaggccaatggcgcggcgggagggggcgtgtcccgggtgcccctggcgccggcgctgggaatccccgtgcggtca

SEQ ID NO: 88283 - DNA, 122 bp, Homo sapiens
tcttaattccctaaaagcgcctctttggacactgaggccctctctgcctttcctggcctccggcaacagttttttacaaagattttttgcagtcgagtccatatgtccacccattgattttt

SEQ ID NO: 88284 - DNA, 122 bp, Homo sapiens
tcatcggacctaccttgaaaaggtgacagcggagggacaatgacaacggccaggcgaccgcgagtgagagcgagggccaagtgatgttccgggagtccgccaggcagagccctggctgtgcc

SEQ ID NO: 88285 - DNA, 122 bp, Homo sapiens
ttcccactgatttgagggttaagcaaacagtgagcacacacagtggataagtgacttctccggtagcacacagtttgtgaggctggggctggaacagaacctagctcttgtgatcccaggac

SEQ ID NO: 88286 - DNA, 122 bp, Homo sapiens
gctgccctgacatgccagtcaaaggtagatgtggccctgggcacagagagtcgtactgaccgagcactggtgaggcgtgtctggggcacccggatacaggtgtctgctggctatcaccaagt

SEQ ID NO: 88287 - DNA, 122 bp, Homo sapiens
ctcctgggcaggtcatgcctccagggtcctcaacctcaggagtcagtgcttcatagaggccgctggacctggggatggcaccaggcagcatctcaggggacgccaactgtgaccatgtgtcc

SEQ ID NO: 88288 - DNA, 122 bp, Homo sapiens
ccaactctggtgtagcgtcagcactgaacaacagatggaacattagcccaggacacatagcggatcctgaagacaggcatttgctcgtgggttgaatttggagaagcacaacacattcagag

SEQ ID NO: 88289 - DNA, 122 bp, Homo sapiens
agtcccactgcgcacgcgccctgtaggccgggccggagtcacgtgcgccaacgttacgcacgccggcgactctcgcctcgcctaggcctcagctccctaggttttgcttcgcggagtacaga

SEQ ID NO: 88290 - DNA, 122 bp, Homo sapiens
tgagtctccagttccttgtctctgggccgtgtgtgcacgccagcgaagcactgtgggagtcgtagtaggggaggaaaaccctataccctctggcgtgcggcgcaggagtttgggggaatgta

SEQ ID NO: 88291 - DNA, 122 bp, Homo sapiens
gaccccgcccctcctggtctgcacacgttgggtctgagcactcaggtgaagtctcttcctcgggctggctccggtggggacccggctgcccgcagacgttcacgcgcgacgaggacctggct

SEQ ID NO: 88292 - DNA, 122 bp, Homo sapiens
ggtgcagttatgaggaagtgaccaggtaaagcatggcaaacaaaggtaaagtttgttatgcgtatttaagtcagagccctctccattgataagagtttccagtaatttagtgccatcctttt

SEQ ID NO: 88293 - DNA, 122 bp, Homo sapiens
ttattgacggggcgagatgtcctgtttctagcagcctccagagccaagctaggcgagaggcgtaggaggcagagagagcgggcgcgggaggccagggtccgcctgggggcctgaggggactt

SEQ ID NO: 88294 - DNA, 122 bp, Homo sapiens
caccgcgtctatgcgaggccgggtgggcgggccgtcagctccgccctggggaggggtccgcgctgctgattggctgtggccggcaggtgaaccctcagccaatcagcggtacggggggcggt

SEQ ID NO: 88295 - DNA, 122 bp, Homo sapiens
acaggcagtccagcacgacgtccttcacagtctgaaactccccttccccgcgcaggtcggcgcagaagatgaggtccaggtccttgtagcccaggccgctgtcctggtgcaggacatggctg

SEQ ID NO: 88296 - DNA, 122 bp, Homo sapiens
tgcccgagtaccgacagccaaagaagcatttacactttgccagataaggaatcggctctgcgaaggtgcgaagaaccaaatcctagcgattaatgtcccaacaacgtgaacacttcctgcaa

SEQ ID NO: 88297 - DNA, 122 bp, Homo sapiens
gaggaagtgaggccgcgcggaaggaaggcggcgagccccggggccccgaggccttggccgcgtcacagcacccacatggcctctggagtgggcgcggccttcgaggaactgcctcacgacgg

SEQ ID NO: 88298 - DNA, 122 bp, Homo sapiens
aagctccaaagctcgtgtttggtgggggttgttgggggcaggatttacactgatggagctcgctgaagactaggagtatggatgactctttgctttgaagacaggccaagggagggaaatgt

SEQ ID NO: 88299 - DNA, 122 bp, Homo sapiens
tctcggaaggcatcctgagccatgagctggagctgctgtcgggggaggccaaggctgtgtcgggcagctgccttctctacagcccgaagcacatccccatagtcagggaaggtatcaggccc

SEQ ID NO: 88300 - DNA, 122 bp, Homo sapiens
acacagacagaagtatgactaatgcatggccatcttcaactgactggctgacttcagcggcgggcacccatgcccatcctgaccccagtgcccacacccccagaggacccaggcacagaacc

SEQ ID NO: 88301 - DNA, 122 bp, Homo sapiens
gcgtgctcagcggagccagcgcagcgtcgggagctggagagacgcggggcgccggctgagcgctcctgccctctgcctctgggctagcctctggcccggcctcccggcctcccccagggtac

SEQ ID NO: 88302 - DNA, 122 bp, Homo sapiens
agaggcgagcctgccacgcgggaagcgcccgaacttgcgggtctccatgaatgcagagggcgccgggaagggggggcatccggccgcgaccctctctgcccctcccattcgctgcccccctc

SEQ ID NO: 88303 - DNA, 122 bp, Homo sapiens
acatggtggccccgccggccacctggttcctcctgcaactccagccgcagatcgtgccaccggccatcactgacagtcacctggtccagaaggagatgggaagcacggcccgagcccctggt

SEQ ID NO: 88304 - DNA, 122 bp, Homo sapiens
aacttgaatccttctgagcctcccccaccttatgctgataacctgcttatctgaagcagccgcagccccccgccctcttttactgatacccacttctaggttacgtgctgggaaacatatca

SEQ ID NO: 88305 - DNA, 122 bp, Homo sapiens
ttcgagggttgttggaaagaccaagtgagtaaaggcatgttgtgcccttagagcctggcacgtgttcatcactgctattatttctggctactcggtgccaggacaggggcctcagctgaggg

SEQ ID NO: 88306 - DNA, 122 bp, Homo sapiens
agttgacttgacgtcgctgagcaacggaagagtgggcagcatttgctctgaacgctcgtgcgcgctaccgcccagacggaagcggaagtgccggtggagcgcgagtaggaagtggtgagttc

SEQ ID NO: 88307 - DNA, 122 bp, Homo sapiens
tgtcgtcgaagggatcttagagatcacctgatctaagtccctgataccacagatgaagcccggagaggagaagtgaattccccagagtcacagagctgggtaatagtgacaaaagctggaac

SEQ ID NO: 88308 - DNA, 122 bp, Homo sapiens
ttaaggcaatatggtgttatgccacaaacagaaggcacagctaacggccagtagctgagacgccacctctgccacaggtcagctatgtgacccacgtgcaaatctcatcacttcctgtctgg

SEQ ID NO: 88309 - DNA, 122 bp, Homo sapiens
gccctgcgcaggctgcaaagatggctgcagagcaatcgggccagcagggcctggcacgtgcgacctccgctgcgtcacagcctctcatgcgtcacgctggagttactgtcaccgggacctgc

SEQ ID NO: 88310 - DNA, 122 bp, Homo sapiens
cgagggagcatctgaatgcacgacagggctcaggagagcatctgaacgcacgacagggctcgggagagcatctgaacgcacgacagggctcggcggagcatctgaacgcacgacagggctcg

SEQ ID NO: 88311 - DNA, 122 bp, Homo sapiens
ggtgatcgtgtggtggtgttagcggcgatagtgctttccactgggctttggcttggtagccgctgaaagagaacaacgctgccgctgctgctgatttcatgccatttcctgacccggcgctg

SEQ ID NO: 88312 - DNA, 122 bp, Homo sapiens
ggttggaatcctgactcttcctaactatgggaactacgactagttacttctctggggcctcgatgttttgtagagtcagcatgacagtttctctctcatagggttgttgagaggattaaact

SEQ ID NO: 88313 - DNA, 122 bp, Homo sapiens
acagtaccaatataaagtgacctccaacgtatacgggtttttttcttttttaaaaaaaagcgaagtttaatgaaggaagggaaacaaaagtatatgtatttgtttttgcattttaaaaacct

SEQ ID NO: 88314 - DNA, 122 bp, Homo sapiens
tcggcctccagggtatggctggggcctccgtgcctggacccaggtcagacgagtcactcacgcatcccgaaatcctgccagaggctggaagccaggtgcattaaatgtgctgagatttacgc

SEQ ID NO: 88315 - DNA, 122 bp, Homo sapiens
tcctccctttttttttttcctttttcttttaatttaatgctgtagagggtgacttgccatcgtgagagattggtacatgatgtgtaaattcagttcagcatatgtttcttcattatgaaacc

SEQ ID NO: 88316 - DNA, 122 bp, Homo sapiens
aaaggcccacttcaaaaatgagagacgtggagagggagaggaatatgcaccggcctttggcgaggggcctgagtttgaatcccagtgtcttcatttcctgggggagtcatttcacctctctg

SEQ ID NO: 88317 - DNA, 122 bp, Homo sapiens
ttctggggcttcgcccagtggtattcctgctatttgtgctatgctttttttccaaccccccggcgcccccgcagtgctctcgctctcttcgcatcagtcacgctgtgtcctcctcacaccag

SEQ ID NO: 88318 - DNA, 122 bp, Homo sapiens
attttagagattccgtcagtttaacctgcctggctgacaggtggtgtcccaaatcgaaaccgttttttcccccgaataaagtgtgcccgtgtagctgtacagatttcgtcccctgaaaattc

SEQ ID NO: 88319 - DNA, 122 bp, Homo sapiens
aagggccctagaaacctgagcagcccctaactcctacttttctgcccctttggccccactcgttaatatctcagcatcgcgaaccaggcctcggatttgctgcgcagcctcagctggccggg

SEQ ID NO: 88320 - DNA, 122 bp, Homo sapiens
caataaatgcttgtagcatgaataaattaatgaatcctacttcgtgaatgaaagtgcgcccggtaagtcctaaagcaacacgccttcgagttcttatgatgctaagagaggctgattgcagt

SEQ ID NO: 88321 - DNA, 122 bp, Homo sapiens
cctgactatgtggtccagggcgccccggtcctctgggccacgcacggcgcccggcgtcagcgcggacagctcgcagttcctgaccctctgcaggcaggcagtttttggagccctcgggcttc

SEQ ID NO: 88322 - DNA, 122 bp, Homo sapiens
aggagaaaccgagcttgcaagggctcatcaagcatccaccggggtggcttaggctgcgcgcggcgctgggcgtgtgcccgggaggagatcgggtcaccgcgtggcagctcccgggactgccg

SEQ ID NO: 88323 - DNA, 122 bp, Homo sapiens
cagaacactgaatattgaaggcttatataaagcaccaccctccaagaatacatgtatggccgctaaatacctccttttttttttcctttaaaagtgaaacaaaaattgccttaatggagatc

SEQ ID NO: 88324 - DNA, 122 bp, Homo sapiens
ctacttgtccacttacctgtctcccctagtagaatataaattcctcatggacagggacctcgtgctctcccacacccagagaaatgaaaattcccttgcacttcaaatgctgcccagaaccc

SEQ ID NO: 88325 - DNA, 122 bp, Homo sapiens
cctgctgcgcgccctctgaggccgtcaagtccgccgccatcccctactggctgttgctcacgccccagcacctcaacgtcatcaaggccgacttcaaccccatgcccaaccgtggcacccac

SEQ ID NO: 88326 - DNA, 122 bp, Homo sapiens
ctcgggccgcaccgccagggactggggtgagcggcccaggtaagactgggccgtgggggccgggagagagactgctgggcgggggttgggattcgggttcagtggtcgcgccgcgccccgac

SEQ ID NO: 88327 - DNA, 122 bp, Homo sapiens
ttcacaaggttttgagaggatttagtgacttgctattcacaaagtgcctagcacagcgctcgcacaccataaatgctcataaatgtgagacccactcctcccctctgaacacttaccagccc

SEQ ID NO: 88328 - DNA, 122 bp, Homo sapiens
aatgagtcggacatcttctgctcttcgttggaaggtgcggcgctgcttgaaggtcttctccgaccgcatggtgcggggatctggcccgcgctggcagcaacccgagggtcctggcggctccc

SEQ ID NO: 88329 - DNA, 122 bp, Homo sapiens
ccgagcccttccccatggggaggtggctggggcccagcgagaattcaagtgcggcgccggcgggccagcagtgctggggtagcctggcgcaccctctgcagctgctagaccgggtgctaagc

SEQ ID NO: 88330 - DNA, 122 bp, Homo sapiens
tcttcctccccttaacctcctcccttccatccactcccaccattagcccaacagagtgcacgtgtaaggaactcacatttggtgagcaaagggacttctgactccgaataagcctaaattca

SEQ ID NO: 88331 - DNA, 122 bp, Homo sapiens
agggaaggcttgccggaaggacgatttcggaggacagcaggtgttagccaggcagcggagcgagcgccaacaggcgcactggggcggagagacgccgtgagcaaggtgaggcagagggcacg

SEQ ID NO: 88332 - DNA, 122 bp, Homo sapiens
ctgtgcgttgaagccggagaccgcggcggcctcagcgaggaccctccgccccggagccgccggccggagccgcagcctctgccgcagcgcccccgccacctgtcccctccccctccgcctcc

SEQ ID NO: 88333 - DNA, 122 bp, Homo sapiens
accatgtgggggtggagggattgtgtctgccaaagtacatccacaaagcccagcctagcacgtggcacactgtgtgtgttcaatacatgtttactgggtttattttattaatttaaaataga

SEQ ID NO: 88334 - DNA, 122 bp, Homo sapiens
cccgccatcctccaataaagtgtgaggttctccgaagctgttgcgtcgagttctgtccttcgtcccctccctgtcttccccgctgagacccttccctgcgtgggggctggagggacgcgggt

SEQ ID NO: 88335 - DNA, 122 bp, Homo sapiens
tcctctgggacttttcacgcctcgttttgttttttttcttcagatgtggctttttcctgacgcagggtccaagcagtcagcttgagcttactcttctgtgaaagcggaaagtctcctctgag

SEQ ID NO: 88336 - DNA, 122 bp, Homo sapiens
agggcctgggtcctgacttgaggatgtactcacgtgggggatgaggcggcaggagcggaccgagtcgctgaggcccatccactgctggtggtcggcatagtcgccgcggcgcaggaagtact

SEQ ID NO: 88337 - DNA, 122 bp, Homo sapiens
catcctccgcaggcagcacagttgccaggagcccggcctggccgcccccaggggcccagccgctgagaccgcccctgcgcccggcccctcagccccgatttcccggacgaggcactggcgac

SEQ ID NO: 88338 - DNA, 122 bp, Homo sapiens
cgcaggttcctgcctgtcacgccacccccttcctgggagcagcgagcagtgccccaggcccgagttggagcacggtctctatggggaaggcttcgctgtctatcagctgtgatttgtaaaaa

SEQ ID NO: 88339 - DNA, 122 bp, Homo sapiens
gggtatttttcgggggtgagggcatctcaggctcgcgttacggggaccggttcgggagaccgtggagccgaggtgtcgaatggagggcttacttcggccgggccagggagcgccaccctcct

SEQ ID NO: 88340 - DNA, 122 bp, Homo sapiens
aggagcctcggagtcaaggggcggagcgccctttgctaataagccaatcagaacgtgagacgctccggtggggcggtgcgcgtcgagcgcggggtggagtctgggtgacttggctggcggga

SEQ ID NO: 88341 - DNA, 122 bp, Homo sapiens
tcggctgagaaacagagagcgagtgagcacagcgctgacagagagggagccgctgcctgccgctgagaacacaggctctgcacccagggcacagaagcaggagaagatgtaattctcgagga

SEQ ID NO: 88342 - DNA, 122 bp, Homo sapiens
gttcgagcctaacctcccaggctcgtcctgacaaattgccctcctaacatgttctgcttccgaagctgcttcccaggggtcctccctgggaaggtgccagaaaaagcaactggctctcagac

SEQ ID NO: 88343 - DNA, 122 bp, Homo sapiens
gccccctcacccgggccctgccctggtgggtgttgcctgggagcaaactcccagaatggccgccgggccccactcggctttggagcttctgattcctgtgggcgcttctcaggtcagggccc

SEQ ID NO: 88344 - DNA, 122 bp, Homo sapiens
gccttcttaagcggaaggtggagaaacactggggttggatttggtgggaggaagacaaaacggaaaagcacggcccaagaagcaacggcaaagggagaacttaaacaagattagattgatgc

SEQ ID NO: 88345 - DNA, 122 bp, Homo sapiens
agtctccgcggctccaggctatggcctccctgagccccaaaagaagagacggttccgatgcgctgcaaagaactatcccaggtgacagccggcttcgccccaacttcaacccttcccgccgc

SEQ ID NO: 88346 - DNA, 122 bp, Homo sapiens
acaaaacctcagttaaacccgtcatcaacccaatatcttcactatccacatgaagtgacacgggaggttatacgacacggccaagcccaccaacttccttagcaccagagatggcatggcac

SEQ ID NO: 88347 - DNA, 122 bp, Homo sapiens
accgctcacccctggacgctgaggctagacactgggtggaaaccggttccttccggcccccgggccctgcaccagagctcgacccccaccgcctcacctgtcctgatggcgtcctccagcct

SEQ ID NO: 88348 - DNA, 122 bp, Homo sapiens
gacctgatgagccgcttcaccagcgccgcttagcttcgcttctttactgtcattggctgtcgctgttccaggtcccgcccacagcgacctcaatcctgattggatgtcagtgtccttttgtt

SEQ ID NO: 88349 - DNA, 122 bp, Homo sapiens
gagaagagaagagcaactgtagccagtgaagtgggaagagacttacatgaaaattgtgtccgagaagccaagtgacaaaggagtgtttttgaaggagggtgatccactgagtcacatgctga

SEQ ID NO: 88350 - DNA, 122 bp, Homo sapiens
ctgattgccactgtcacctgggccctgctctctgaagtctctgccaagcggggaggtggccgggggagggccctgctctgtgcagcctcccctcccccggcccgcagagttgagcacagagg

SEQ ID NO: 88351 - DNA, 122 bp, Homo sapiens
ctgcggcgcacgtggtgagggcgcctggagcgcccagctggagagagggccctccgcacacgcaccagcgagtcccagggcctccctcacactcccgagaggaatctatttccatattttag

SEQ ID NO: 88352 - DNA, 122 bp, Homo sapiens
ggcttgaacagagagggtgtcttttcccttaggggaggaacacccatgctgaagtcccttcgctctgcgcctagcttggcacccctcgggcgtccttagcccgaggtcccagccagccctgg

SEQ ID NO: 88353 - DNA, 122 bp, Homo sapiens
ctctgccagcctcggatgctgaagactccatggggttcaggacgcaaggacaaatagcgacgctgaatcacagagaagggcagagtctgggggcgccccccgtccccattcgcggcttcctc

SEQ ID NO: 88354 - DNA, 122 bp, Homo sapiens
cctccatcacgctacagcagcagctagaagaactcacagccccggatgagaacatcccagcgaagatcctttcttataaccgtgccaatcgagctgttgcaattctttgtaaccatcagagg

SEQ ID NO: 88355 - DNA, 122 bp, Homo sapiens
agaggggaaggaaccacagccggaagaacgggactggacagcggcaaactcgaatgtggtcgcgccggcgacgtgcgatggtggctgctgtggttttggggactgcacggtgggaaacacac

SEQ ID NO: 88356 - DNA, 122 bp, Homo sapiens
ggacggagcggcccccgcccttcccccgactccgcggagcgctcaccaccgcggccccagcgcagttaagtgtggacgtctgtacacggtttccgcctgccctctgctccatctcaatccac

SEQ ID NO: 88357 - DNA, 122 bp, Homo sapiens
gttgatggagaccatcgagggtgctgcggggtgagtgggctgggcccatcctggggttgccggtagcctcagaagtgatgagagtggcttgaaggactggaccaagagcctctctagtccct

SEQ ID NO: 88358 - DNA, 122 bp, Homo sapiens
ggcagtggggctgttgctgttgctgtggctgtcgctgcccgtcaggctgccttcttttgtcgtttcccagcgctgcgcaggacttctcctggcggcgctgcggatccagggggtcggctgcc

SEQ ID NO: 88359 - DNA, 122 bp, Homo sapiens
ggataatggtaaccagctccttctcggcgaggaattcgacctcggcagcgtccatggcggcgcgagctgcaggccagagcctcacggtctcctcgggcccctcagcgtcccggaggagacgc

SEQ ID NO: 88360 - DNA, 122 bp, Homo sapiens
ctgcgagtgattttatgtgcatatatattacatatgtgatattatcctcagaacctctagcgggcaggcgaagaaaggactgcacaggggcattttttttttttaaaggaaggggaaaaaag

SEQ ID NO: 88361 - DNA, 122 bp, Homo sapiens
ttaattttgatgttcccttatgaaaaatgaatctttcttaccactggagcccatgaacagcgtgcacaaactggctctgatggagagaaaaattgcctaagagtggagagtaaaaatatgtg

SEQ ID NO: 88362 - DNA, 122 bp, Homo sapiens
tgggctgttgttcattgacaattgctgtgctctgaactagcgctatgatggcctgttgtgcggggacaggcgggttgtggtgaaagctgcagtcgtgaaaaaggctattgtttaatctaccc

SEQ ID NO: 88363 - DNA, 122 bp, Homo sapiens
ggtttccctgacacactggctgaggtgccccagttccccgagactggacgggatcacttccggtggggaaagtcccacctcttcggggcgagccgggtggcgctggagccgcgccctgctga

SEQ ID NO: 88364 - DNA, 122 bp, Homo sapiens
tggcactgagtgtgtgtttctccgggcaggagctggtataacatgacccttgaaagcactcgcagccctgggcttacataagtaatgtgatgactctctccacagagcccctctagagatcc

SEQ ID NO: 88365 - DNA, 122 bp, Homo sapiens
catcgcgggaacagccccggtgacacgctgcccggggtcttcacgaatgcccggaggcgccgctggccagaagccagcccgaccttccatccccgcagacagccccacgttcctcccggccc

SEQ ID NO: 88366 - DNA, 122 bp, Homo sapiens
cgtgcgcgcgggcccggccgcgattagcataatgtagtattttcagtttcaacaacaccacggcgattggcggccgccccgctgccccgccccgccgcggcccggcccccgcgcaccgccca

SEQ ID NO: 88367 - DNA, 122 bp, Homo sapiens
aagaattagcatcttaaaggtatttgatagttaagctaggaaagagcattccatacataccgtggagctgctttagcagaggaatgaaggcatagatgagcctggaacattcaggacactaa

SEQ ID NO: 88368 - DNA, 122 bp, Homo sapiens
agaaggagcagcaaccaaaaggcctgatgcgcagcgcacccatcgcaagcatgggcagtgcgtttaagactgggtgactcactttttctcctataaaatgggcgcacgcaggccccagctca

SEQ ID NO: 88369 - DNA, 122 bp, Homo sapiens
ccacgtggggatgagatttgctgggctggtagcggcggctgctgcgggaggtcccgcccacgtgaagccagcctaactgagctctggactttggggacagctgtcagtggcctaggccgcag

SEQ ID NO: 88370 - DNA, 122 bp, Homo sapiens
ctcaagagactgaagaaatgctagcaccacaacaagagtaacaaaaacatggagagcaaccgcacagtgctgcccgagccacggagtccggaagggaggccgggcaggcggcgagcgccctc

SEQ ID NO: 88371 - DNA, 122 bp, Homo sapiens
gccagggagcttctgctccctcaattaaacggtgatagacggcctgacaccaccagccctcgaagcctgagatccacaggaaatgttaaaaactggcttggcaatataagtattagaaaata

SEQ ID NO: 88372 - DNA, 122 bp, Homo sapiens
agacccatgctgctggtctggggatcacactgtgagtagccagagactggctcatcctctcgccttgccctacagtttttcataactgaacaggaagtgttgttatctcatgcaaattcagg

SEQ ID NO: 88373 - DNA, 122 bp, Homo sapiens
ggctgcgtctgctgttgctgctgctgctgccgctgctaggcaaaggtgagttctgccggccgccggctcccgcaggggccagggcgaagttggcgccgagcagcggagcgggcgcgttcaga

SEQ ID NO: 88374 - DNA, 122 bp, Homo sapiens
ccccaggaagcgtgctgtaggtttccatagattcgagacggtcaggctttccccaggaagcgtgctgtaggtttccatagattccattgctaggttgaggaggttcactctcatttctggtt

SEQ ID NO: 88375 - DNA, 122 bp, Homo sapiens
ataaacatttacactaagcattgtgaggtatacagtgatcctaacacaaggaccacaacacgggaagcttagggactagttacagaaacaaatgtatacacaggaaacagaaaaaatgcaag

SEQ ID NO: 88376 - DNA, 122 bp, Homo sapiens
gggcgagcgcgaggcggggcacggcgcgtggcgtgagacggggcggggcgcgcgtatcggcgccgcggccgcgtgacgcgttttcaaatcttcaaccgccgcagcccactcgtttgtgcttt

SEQ ID NO: 88377 - DNA, 122 bp, Homo sapiens
aaaattctttaggctcagaattatgaaaccaatgaatgctagagctaggatgtacctcagcgatcatctagtctaacttcctgcctttaccactgaggacactagaccctggagaaactgag

SEQ ID NO: 88378 - DNA, 122 bp, Homo sapiens
tgccctgcggtcagagcaacctgaacacttcctagtgaattgcaatgtaaaggtgaccagcgccgccacttgggtgatcttaacttctctcagcctcagttgcctcatctgtaaaatgtgtt

SEQ ID NO: 88379 - DNA, 122 bp, Homo sapiens
taagcccctcattgcccagggctggcggggctcgccagccgttctgagtgcggggcccaccgagcccacgctcacatggaattcgcactggcccgcaagcaccgcgtgcagccctggttccc

SEQ ID NO: 88380 - DNA, 122 bp, Homo sapiens
cttttttttttgtttccatttaattttaaaaggaagagagggagataaaccacagcaggacgaaccctccctgcactccaggttcctgtggctccacccgagaagccctgcacggggagcgg

SEQ ID NO: 88381 - DNA, 122 bp, Homo sapiens
gcctcgcttttaaaagcatgcagcgtggagggctggtccaggtcaggtggcatcaaagagcggagtacagggcctctccattcccctgatggagtctgggttagtggcctgtgcttttacca

SEQ ID NO: 88382 - DNA, 122 bp, Homo sapiens
cctgccggtacaggcacacagagatcaagctgtgcccaaaggaacaactgtgggtgaaagcgatcttacagagtttgaatgagcagactgtagagatgctatcacattcattttctcttttc

SEQ ID NO: 88383 - DNA, 122 bp, Homo sapiens
aaccgcagccagcgaggggtgagcaatacttcactggcgagtcatcagggtgaggctggccgtgtgtgatgcagtcactggctgggtgacagacccccggaccgctgtggactcaggtgtgc

SEQ ID NO: 88384 - DNA, 122 bp, Homo sapiens
gccaaccttccccaggctgtctaccatgtttttctcactaagtgggaggtctgtgagctccgtccctccagggcctcactgtgaagccgttgctggcgtggttctgcccactggagtttgct

SEQ ID NO: 88385 - DNA, 122 bp, Homo sapiens
taatataaatgagatttattatcctgccggaaaaagcagattatgtttcttattactgaacgcctgaagtaccaacgactcaaccagagcccacagaattcaatatcctgggtggtaaaagg

SEQ ID NO: 88386 - DNA, 122 bp, Homo sapiens
catccctgcttcgttgccatcccaaagcatcatcatagaggggaactgtagagagattggcgtcgttcagtgtgtggactaacacggaatccctttggaaaattataggagacaaataaagg

SEQ ID NO: 88387 - DNA, 122 bp, Homo sapiens
agaccagagctcctcagtgccagtttggcccctgggtcttcgctgccctttttctaagcccggcctcgtctcgccggaggagacgctgcaataaaggttgggagaaggcgcggaaaggagag

SEQ ID NO: 88388 - DNA, 122 bp, Homo sapiens
aagggcaaagaatctgaacacatgcgtccccaaggaagacacacagccgccgacaggcaccggaaatattcagcaccattagtcgtcagggaaatgccaatcacaccaggatgcagtgaaga

SEQ ID NO: 88389 - DNA, 122 bp, Homo sapiens
gttggggacgaactctttgctaaataaacatttaggtgaaacaaagcttccatttccaatcggcctaactctggtattagcgttggcaggggccatgcaggaggggcagtgagcagtggtgg

SEQ ID NO: 88390 - DNA, 122 bp, Homo sapiens
gctcctcccttctcccagagagatctttcgcgaggagggtctcttggggatagcatggtccgggactgggaggggcgctgcgcccaccgagggcggcctgctggcgggggactcagtaacac

SEQ ID NO: 88391 - DNA, 122 bp, Homo sapiens
gaacctcctagatgggcttcctccaaccacaagctgcttacgggtcagccgtaagacccacgggggtgatacattgaatggtagacccaacatagaaagagaagtgcagtcgagaggggaag

SEQ ID NO: 88392 - DNA, 122 bp, Homo sapiens
acactcatagacattcttctacctcaccttagggagaagacagttctgcagtctaccaatcgaaaactggagcggaaagttaaagaactatccatccagattgaagacgagcggcagcatgt

SEQ ID NO: 88393 - DNA, 122 bp, Homo sapiens
gtaaaagagttggatatactgaaaattaactttccctgcctgatcagagagctggggccacggggaaaacagctagcctggaatggagagagaggcccctgcaggggaagcgcgacccccgt

SEQ ID NO: 88394 - DNA, 122 bp, Homo sapiens
acttagaaataaaatcagggcttgctgggtttcacgccggagctgcacgcagagctgatgcgactgaactattctgtggaaagtaaaaatagcccctttctgccgtgggatgtgggcgaggt

SEQ ID NO: 88395 - DNA, 122 bp, Homo sapiens
ctcccgaatgatctgaggctatatctttatttccattctaaatcagaagcaggcgaaagccgtgatggaaacaatagcctcggggcgcccagcaagcaggacacagtccccctaaaacacac

SEQ ID NO: 88396 - DNA, 122 bp, Homo sapiens
ctcccccaccaccgtcagcgagtccgcacacaggtgcctggggttgtcacctgagggccgcgcctgcctcctctcctgatcccacagcagcccaggaagcagggccccgtgtgagctcccgg

SEQ ID NO: 88397 - DNA, 122 bp, Homo sapiens
ccccaggatatttaggtaagtgtctctggtcagaaacagtccattttcctacccttcccgcgtctccccccacccaaaccccagaaccatcctgctccttaaaacccctgctcgggtctccg

SEQ ID NO: 88398 - DNA, 122 bp, Homo sapiens
gccaagcaaccggtaaacgccgccgtttgaggagcaccggagccgcgaccgtggattgaacgcttccccagagacccagaagcagaaggagcggacccagggtaaggggcgggcgccaggag

SEQ ID NO: 88399 - DNA, 122 bp, Homo sapiens
ttcccaaacacctcttatcgctctcaaggctcatatccttccagaagccatgccttatggcgactcagctcacccatactgtcctcttaaattaattcacttaattttctccaaatccatac

SEQ ID NO: 88400 - DNA, 122 bp, Homo sapiens
ctaaactgctgtgttgaaagtattgatgactggctttcatctaaaaagaagagaccaatacgagcacagtatatgaaggtttctcatacttaagttccaggtttttatctggtaaaatgtta

SEQ ID NO: 88401 - DNA, 122 bp, Homo sapiens
gtgaaaatgaatcaggctctattgtaactaagcctgtttagctgacacatgacacccaaacggatttctagcccagcaattcaggcccgttggtatctgctgggaggtgataaataatgagg

SEQ ID NO: 88402 - DNA, 122 bp, Homo sapiens
ttccccctgcctggtcccctctcctagagagcccttcgccaaccctgggacagccccaaacgacagctcccgagcgccacccggaccagactccagtgccgccctgtcccgccacccttttt

SEQ ID NO: 88403 - DNA, 122 bp, Homo sapiens
cgcagtttcgcctgggagagaagggaatcctggcttcctgggtgggtgacttcacctccccgggccttggttttcttgtctgtcagatgaggattgtgaaaacactgccatgtagaggtgca

SEQ ID NO: 88404 - DNA, 122 bp, Homo sapiens
caggattagaagacagcctgagtccttccaggaaattcatgtaagcaggtccccagaactcgctgacaaacactgcagccgaaggcgggtatgaggccaagaaaggccaaggaatcactgcg

SEQ ID NO: 88405 - DNA, 122 bp, Homo sapiens
ggatcgcttgattctgggagttcaaggttgcattgagctgtgatcgcgccagtgcactctcgcttgggtgacagagcaagaccttgtctcaaaaaatttaaaacaaaacaaaaaaaactggt

SEQ ID NO: 88406 - DNA, 122 bp, Homo sapiens
agaaagcatgagaaactacatctgcggggctccgaggctcccctgccagcctggagggtccgtgcagagggacttgggtgggcctcacaccctacagtgactcctctcttggctggacccca

SEQ ID NO: 88407 - DNA, 122 bp, Homo sapiens
atggaggaggcggcccatctctaggcaccttccacggaacactggcccccacacgccaaccgtgcaacagccccgtcctggcagctgatcccttagctgtccgggaattccaagcacatctt

SEQ ID NO: 88408 - DNA, 122 bp, Homo sapiens
gctgaggacttttggagccgctaagggtattcaaagcatgtcacactatgatgagagccacggccatactgggcttagtgaagcctgatcaccagctccccctggggcacacaggcctttca

SEQ ID NO: 88409 - DNA, 122 bp, Homo sapiens
aggggactagccggccttgaggggcggggccggccagaggggcggggccagcccgcgcctcgcctagcccgcctggctcagcaccccgagagctggccgactgccctccaggtgatttttat

SEQ ID NO: 88410 - DNA, 122 bp, Homo sapiens
ccgccggggcgcggtatatagtaaaggtagggcgggcgcagccaattcctcggctcctggcgggagtgccggtggcgccccgcagtccgcttgtccgtccttccctctctgactctcctacc

SEQ ID NO: 88411 - DNA, 122 bp, Homo sapiens
aaagtctgaagtgccagtctgcggcatgtcagtgtcattctgagggtgagggggagttgccgaaggttcagctgggctgaacaaagataaatttggtgatagtgtagacagtggagtagaac

SEQ ID NO: 88412 - DNA, 122 bp, Homo sapiens
acagccaagctactcgggcgtcctgcgttgccatggatgcgctccgccccttcctgcacccggccagcctctgcggcacacacccaacagctacacaggcgcctggggctgcccgggtcgcg

SEQ ID NO: 88413 - DNA, 122 bp, Homo sapiens
cacaagtgctcatggagattcctaaagatgcagacaaggtagagcagattttaattgctgcggaatgaatgaatgaatgaaatgaaagcccatgctaagcactgtgtaggcatgcacttcaa

SEQ ID NO: 88414 - DNA, 122 bp, Homo sapiens
aaatttgtagcaatttgtcaaaaatgtgggttacctattgattcctgaacttgtggctggcgtctgcagtgaggtaagtcttgttagggactgttcccttaacctgtggagtgggctaactc

SEQ ID NO: 88415 - DNA, 122 bp, Homo sapiens
atggattaataggctcaggggcattacaagcagagtttaactttggcctaccgtgatgagcgtctggcagtttccagactctctctccatccctggctgagacttggatggactatggagga

SEQ ID NO: 88416 - DNA, 122 bp, Homo sapiens
aggatcaaaataaattatcagtgaatgtgaatgggaaaactaagaaattgttaaaattctcgaatacattacattttcatccacagaaaagtgtaggctagggatcatgggggaatagttag

SEQ ID NO: 88417 - DNA, 122 bp, Homo sapiens
acagtagggcgggtactgataccagatgcaacgctcttgtatcacttcgaaccctgagagcgcgccaacagcacacgaggtggtgtggagcaacaagaggttttaatgagcgcctgggtgca

SEQ ID NO: 88418 - DNA, 122 bp, Homo sapiens
gtcccggagaaatgattttgaatcccagtaccccccctacttttctttatgtagttggcgcgctttccctaggcactcggacagtttcgttgtctgttggatttggtttttagtttttggtt

SEQ ID NO: 88419 - DNA, 122 bp, Homo sapiens
gccctccccgcggccggctcggctccttggcgctgcctggggtcctttccgcccggtccccgcttgccagcccccgctgctctgtgccctgtccggccaggcctggagccgacaccaccgcc

SEQ ID NO: 88420 - DNA, 122 bp, Homo sapiens
ttggatggggccggggaccccaaacccactccggaagcaccgatttccagcgctgacggccgcgcctggtttcccagcgagtcctcttggcagctcccgcagctccccgccgggagcacgag

SEQ ID NO: 88421 - DNA, 122 bp, Homo sapiens
ggctgggaaacgctgattccctgtgggcaggaacgcttgtctaattgcgacggccctgcacggctcctgcccaggtatgaagtgcagctggcttgcaccagtgcgagggcggagacgcgctg

SEQ ID NO: 88422 - DNA, 122 bp, Homo sapiens
tcttggtaccatatgggggctgtagctggccggcttccctgggctgggcagcatgggggccgcactgcaggggttgatgcgtttctccttctggcgccggttgcagaaccagacgcggatca

SEQ ID NO: 88423 - DNA, 122 bp, Homo sapiens
caaaacaccaagaaattacactattaatagcatcctctgcggtggacagaaaactctttccggggccagcgtggcggcgagatgacagtggcctgtccgctggctggaggggagcgcctgcc

SEQ ID NO: 88424 - DNA, 122 bp, Homo sapiens
catgacaccctttgcagattttctggccttggaaagttatacaaaatctgaggtggagatcgctcctgaagtttgtttgttagcgttagcgcttttcaagtagaaggatttcaggattttct

SEQ ID NO: 88425 - DNA, 122 bp, Homo sapiens
aactccaaatattctagcccctccccaccagcagctgaagatttgtctcctactcaggcccgcctgaggacaagttccctggaagtacagacacaccaaaccagaagagtcacaggaaagat

SEQ ID NO: 88426 - DNA, 122 bp, Homo sapiens
ccattgctagccctaacataggaccgctgtgtgccagggctgtcctccatgctcaatacacgttagcttgtcaccaaacatacccgtgccgctgctttcccagtctgatgagcaaaggaact

SEQ ID NO: 88427 - DNA, 122 bp, Homo sapiens
gctcctttatcttaggtgctatgatctcacggtcactggtgggcgaagccaagaaggggtcgcccttgaggtccacaaagttgagggtgatttggggaatcttgctaatggtgcggtagcgc

SEQ ID NO: 88428 - DNA, 122 bp, Homo sapiens
gcccgcgcccctgcccctccgctccccgcgccctctccaccgccgcagccgcagcgaaagcggcgccccctcattagagggcgtttgttagggaatgttttcccagcgattcactgacgggc

SEQ ID NO: 88429 - DNA, 122 bp, Homo sapiens
tgaggaagttccttactttgatctttggaaatcccttgttcctggtggcacctccaaagccgtgagtagccacagctcaccacccgggactttgctgcattccaagtgtagcgtttggagac

SEQ ID NO: 88430 - DNA, 122 bp, Homo sapiens
ctacgtgctcacggtcaacgagcggggcaaccactgcgagtactgcttcaccaggtagggcggcggcggcggcggcggcgggcgggagccgggggcgccgagcgggaggcttggacggcggc

SEQ ID NO: 88431 - DNA, 122 bp, Homo sapiens
ttgatagaagggtccttcccaccctttgccgtccccactcctgtgcctacgacccaggagcgtgtcagccaaagcatggagaatcaagagaaggcgagtatcgcgggccacatgttcgacgt

SEQ ID NO: 88432 - DNA, 122 bp, Homo sapiens
ggcgggtgcagagtcggagaggctgccccactgacagtcgagagggcagtcccggagactcggggggacccaagggcagcggcggcggcggcggcggcagcagcagcagcagtagcagcagc

SEQ ID NO: 88433 - DNA, 122 bp, Homo sapiens
acacagctagtatgtggcgcgcacctgagcctgggactgagatttgtcttattccaaagccggtcttcccttcttgccctgtgcggaactcttgtccatacttagggcgttggaaccacgag

SEQ ID NO: 88434 - DNA, 122 bp, Homo sapiens
gcaagtggagccagtccccattggctgacagtgccacctggagctggtctctggggtgttcggttgtttattcctgaggaagactagctgctgctgctgctgctgctgcaaactgtactgta

SEQ ID NO: 88435 - DNA, 122 bp, Homo sapiens
acgtacttttactgctgcactcggggacagcctctcagaacccagagttcatcagctccacggactcttggggtagtgcacaaggtcccaagctcacctccggggtccttctcatgagacca

SEQ ID NO: 88436 - DNA, 122 bp, Homo sapiens
gttagcggagccactgtcagagccgtgactttccaggaatttaaagcccaccaggtagcccgaggagccagccagcaggacctgcccggggccgacgtccccagtaactgggctgctgccct

SEQ ID NO: 88437 - DNA, 122 bp, Homo sapiens
agagctgaaaaccttgaagataaaacatgtatttaaaacgccatctcatatcatggactccgaagtagcctgttgcctccaaatttgccacttgaatataattttctttaaatcgttaagaa

SEQ ID NO: 88438 - DNA, 122 bp, Homo sapiens
gaggtgagcccctgtgggatcctgagatgcagaggatgtgtctgaggtctctccctggggcgtggggccaggtgtctggagctaatgacacctgagtgtggttagtcttttaatctccagcc

SEQ ID NO: 88439 - DNA, 122 bp, Homo sapiens
ttggggggggtgggggcgtgttcctgtatccttcgcccaggccgacttcagactgctgagcgtttgcggacaggattatctcgtgttttctattgtttgtttgtttgttttgagacggagtc

SEQ ID NO: 88440 - DNA, 122 bp, Homo sapiens
tccggccggctccgctcgccgcccaccccgcgcgcccggccgccgcacttccagactccgcggactccggcgctcggccgccaccctccgcctcaggccctcaaattgacacataagggaga

SEQ ID NO: 88441 - DNA, 122 bp, Homo sapiens
agaaggcggtggagccagcgtagcgcccgcagagcaacgcaaagaggaagaacagagaaacggctatgagaaaaagggccgaagagtgagaagcagagggccttacccgagggggcggcaac

SEQ ID NO: 88442 - DNA, 122 bp, Homo sapiens
gagacctgcattgaaccttggctctcctgaggatatattcaggggtccccaggaactcctcggtccagagaccaagtggtggccttggaaagcagatgtcaggctttggtgtgcctgtgacc

SEQ ID NO: 88443 - DNA, 122 bp, Homo sapiens
tcttccccatgaggtctgccttatacatgaggcgtgtattataaagtgcaactgccaattcgccaaccccgttgtttcttctctccagaacactaggcaccatctgatctcctatgcctttt

SEQ ID NO: 88444 - DNA, 122 bp, Homo sapiens
aactcaccctggatcacagccagaaagtggcggctctgggattcaaactcaggctggggccgggcatggtggctcacgcctgtaatcccagcactttgggaggccaaggagcgcagatcact

SEQ ID NO: 88445 - DNA, 122 bp, Homo sapiens
tccattaaatgtctgctgctgggttatttaaaaagtagatggaacctttctctggccacgcgccctgataacctccgtgttccccgcaggacaggctgtggtggaggcgcacacacagcacc

SEQ ID NO: 88446 - DNA, 122 bp, Homo sapiens
gatcactggacagaattagcatgcctcaatgaaaatgaactacgtccccaagtaatggcacgattgcagttaaacttatgcaacttcagaaataacggcagataaagggctagagacgtaga

SEQ ID NO: 88447 - DNA, 122 bp, Homo sapiens
acatgtggccagatgcccggtggaaataatattgtctgtagggaccttcatggtgctctccggtgaagagaaaaattaaccttccgtaaataaaaaaactttaaattccatgttggtaaaat

SEQ ID NO: 88448 - DNA, 122 bp, Homo sapiens
tcataggtaaatagataagaattaataactgaaggtaggcaatggttggggcggggggggcggttgtgaattgtgtcagaaagtaaaggttattttaaccgggttggaatacatatacatgc

SEQ ID NO: 88449 - DNA, 122 bp, Homo sapiens
tgccgagtcattgtgacttgcactttttgactagtgcggtcaggctctgtgtggcactgccgtaggcctgggtacctcctagtgtgaggagcaggagctgctttccagcaacgccctacagc

SEQ ID NO: 88450 - DNA, 122 bp, Homo sapiens
gcggggacaggggcgggcgtccgcgactcgggtaggcgggggtcggcgccccgaggagggcggcccccggctcccgtccccactcacctgccgcgtccggagggcgcccccgggtccgcccg

SEQ ID NO: 88451 - DNA, 122 bp, Homo sapiens
actcgggctggaaatgatgctcagaagtttatctatgaatcggatgtgctgtggaaacaccggagcaacattcacgtggtgaatgaatggatcgctaatgacatctcatccacaaaaatccg

SEQ ID NO: 88452 - DNA, 122 bp, Homo sapiens
gaaaaagaatggcgtgagcacaccacagcctggcaaaggctggcattgtgaaagggtcctcgaggaattgccttggaaactgagaccgaaagggattataaaaggtggtaaggcgaagatgg

SEQ ID NO: 88453 - DNA, 122 bp, Homo sapiens
cacctgtaatctcagcactttaggaggctgaggcaggaggatagcttgaggccaggagttcgagactaaccggagcaacatagtaaggccacatctgtacaaaaaaaagaaagaaaaaatta

SEQ ID NO: 88454 - DNA, 122 bp, Homo sapiens
ggacgttttgtctcctgggcctcagtcgcctgtactgcgagagagcagccagtctgccagcgccggagcctccagcaacaagtagcaaagccgtgagtccccagcctctgtgactgctctgg

SEQ ID NO: 88455 - DNA, 122 bp, Homo sapiens
aaaagaggagcccatacagacaaaacacttcagctagatgaggctatccctacatatatccgcatggctaactgcctgacttctctcaggcctttgctcaaatgtcctttttaatgaaccta

SEQ ID NO: 88456 - DNA, 122 bp, Homo sapiens
tctcccctaggccaacatggccacctgggtcccctctacccccatgaggcgacgcatgcacgttgttgatcatgaggtggatgatggtcttgggcatgaggtcctgcatgttcttgttgaca

SEQ ID NO: 88457 - DNA, 122 bp, Homo sapiens
ccctttccgagtcaaagaaaggggtgacggacgcacctggaaaatcgggtcactcccacccgaatattgcgctttttggaccggcttaaaaaacaatgcaccaccagattatatcccgcacc

SEQ ID NO: 88458 - DNA, 122 bp, Homo sapiens
aatgaaccttccctttcacccagccttctagtgtttgcaaagaacttcatagttatccatcgttttcgtcctcacaatgtccctgccagatgggcattattctccccattttatagaagagg

SEQ ID NO: 88459 - DNA, 122 bp, Homo sapiens
gcgtccgcccattcctcactgctgtccccgcctgtgcccgaaacccccgttcacgttcaccgagaaaacagacataaacccagccaggcacatccactagaatggctgtgatttcagaaaag

SEQ ID NO: 88460 - DNA, 122 bp, Homo sapiens
gtccctcgggcccggggcagctaggaggtcggcgcgcagcgggccgggtcaggactgggtcgagcagacagagctgcagcccccgccttgcccggcttctcgcggctggagagcagagcgat

SEQ ID NO: 88461 - DNA, 122 bp, Homo sapiens
aaagcttcctccggctagccgcaagccctccgtttcctaccgcctccacttcgagagctccgggggatgcggcacctctaacctgcaccagcagggctccttctacaactacgggccgaaag

SEQ ID NO: 88462 - DNA, 122 bp, Homo sapiens
cagggcacccatccaaggaacctccgaacagccaggaaaagccatgagttgcaaccaaaacgcggctgaggatggaactcagaatgaaactgcaacccacctgcccccagccctgcccctcg

SEQ ID NO: 88463 - DNA, 122 bp, Homo sapiens
tgttgggcagggcctggcggtgtgtggggtaggcggggggcgtggccgcgattagccgcgcgcggcgtgggggcgtggtcgggttgcgggggtgcgcgcggccggccgggcgcgcgcggcgg

SEQ ID NO: 88464 - DNA, 122 bp, Homo sapiens
agaaaatccatcccactgtatgattttcacactggttaatagcaacttgtctaaagagcacggatctactaaccagtatgatttaaccagtgtgatttgactaaattaaccaatcagttcag

SEQ ID NO: 88465 - DNA, 122 bp, Homo sapiens
tcgcggttaccttcctccactccaccctgcctactccgctcgggcccggacgagtccaggcgcgctccccgtccccgccctgcccaggtctcccgcccgcctgcccgggggtgggggacgag

SEQ ID NO: 88466 - DNA, 122 bp, Homo sapiens
taatgggccaaaagcttaagatctgtgagactcaaggcaagggagttagccaataacttacggaattgtagcaaagtagacaatatctccaattgtttgtataaatgccaacaaaaatcact

SEQ ID NO: 88467 - DNA, 122 bp, Homo sapiens
tggctatccaggggaaagtgcaagaaagagagcactaatcgctgaaccaggagacaaacacgattaccagctccgagccttgagtcagaaagtctcatagactttaagatgttaatccccag

SEQ ID NO: 88468 - DNA, 122 bp, Homo sapiens
gaatcctctgccccctcggagtcaggaggtcctggggacaggagggatcaacggaggggccgctgcctcttctgggggtttactgaagacactgctcgagctttcccgggccacacacaccc

SEQ ID NO: 88469 - DNA, 122 bp, Homo sapiens
caccacagcacctgcgaggcccgctacgaggccgtgtcgcccgagcgcctggagctggagcgccaacacaccttcgccctgcaccagcgctgcatccaggccaaggccaagcgcgccgggaa

SEQ ID NO: 88470 - DNA, 122 bp, Homo sapiens
ggaaggaacagctagagccgggggcgggcgtggcagagcaggtgccgagccggtccgaggcgggatggagaaggctcccccgagccgcgccgttagctcggccgggtgggcggggtggggct

SEQ ID NO: 88471 - DNA, 122 bp, Homo sapiens
ttccagctaggaagggcgtgtccacggcgccatccacactgctctcccagaaggcacgggcgggtggattcctccagggccacctgcaggccccagcgctgggccctttgagctccgcccag

SEQ ID NO: 88472 - DNA, 122 bp, Homo sapiens
cacctgctgttctcaaagcacgcaaggcttttgggctgcgtggaatgcactcttgtctcccgccagctctcaccagacccttccacggtcactttcctctaggaggctgtggtgttatgata

SEQ ID NO: 88473 - DNA, 122 bp, Homo sapiens
aaaaaaaaagaagggaagggaaaacaatcagaacctgaagtgcaagtgtctgctgtgtcacgagtaataaaccgtttgagtcagtcagggctcattgcccacattcatgtgaatgtggcaag

SEQ ID NO: 88474 - DNA, 122 bp, Homo sapiens
ccttctcctatgaaagggccacacaagcgcactgcacatcgtgtgtcctgagcaggaggccgacagcagggtgggtggagaaggctgcggtcaaggcacacccccttctcagtcccccagaa

SEQ ID NO: 88475 - DNA, 122 bp, Homo sapiens
gtgtctatcggaacgactttatttcagtacactgggccccaccaggcaatgtggtttgtgcgaggctgtgcgagggacaggcttgggctaagagaagggaggtgagttggttaagcgcactg

SEQ ID NO: 88476 - DNA, 122 bp, Homo sapiens
cgtcacagcccaggcctcccggagccgcccggcgccgccgcccccgccgccatttcctcgcgctcgccgtcgcctcgtccccgctgtcaggttactccattcacctgggcctgcagcagcct

SEQ ID NO: 88477 - DNA, 122 bp, Homo sapiens
actccgcccccgccgccatcttaggtgtgggcaactctggcttgggttggactagggaagcggagttctgggagttctcgtaggattggcgcaaagtgagcccgctccgcccgccggtctac

SEQ ID NO: 88478 - DNA, 122 bp, Homo sapiens
tctcaattttacatgagatatattaaggtggaaattaaccagagttttaaaggaaactatcggtgttatttgtatgcaaattggagtctactgttatatttctgattccatgtttttgctct

SEQ ID NO: 88479 - DNA, 122 bp, Homo sapiens
gaaaagaatccaactctgtaaaatatttgaagagttttattctaagccaactatgcatgacgatggcccatgacagaacccaggagatcacgagaacatgtgctcaaggtggttgggctata

SEQ ID NO: 88480 - DNA, 122 bp, Homo sapiens
ccggctgaaccacgtggggccccgcggagcctatggtgcggcggccggcccgccggtccgcgctggctgtgggttccctctgagatcagtgcggagctgtcaaagcgagcaggggtggcgcc

SEQ ID NO: 88481 - DNA, 122 bp, Homo sapiens
attaaaagacccaggatgaagggttcaccccaccagcccgtcgtccggctactctaacggcgagcgcagcctcctgggaaatgcagttccaagccgcccacgcccctatgtctggaggaagg

SEQ ID NO: 88482 - DNA, 122 bp, Homo sapiens
gcagcggcgtccccccgccgggccgcgccgtcctccgcagcagcggcgccgcctcctcgtcgtcccggtcccggccggaccaggacaccttcttagagacgttggccatggcccgccgcgga

SEQ ID NO: 88483 - DNA, 122 bp, Homo sapiens
aggcaacctcccccgcgcacggccaccgtgaccccagcgcgggcgccgccgccggacccccgttacctggggccaaacgcgacttgtcgccaccttgcgtcctgggccctgcctccctcccg

SEQ ID NO: 88484 - DNA, 122 bp, Homo sapiens
agaccaggaaagcagcttcaatggtgaagtgaacggtgtcccacaggaaaatactgaccccgaaacgtttaatgtcctggaggtgtcaggatcaatgcctgattctctggctgaggaagatg

SEQ ID NO: 88485 - DNA, 122 bp, Homo sapiens
gcggaaggcacttcggctctgagactccggcccccttgtccattgtttggcacaatcactcggatgtcccccagcccagggggtcatttcctggagggctccagacagccaggctctggcct

SEQ ID NO: 88486 - DNA, 122 bp, Homo sapiens
agaaaaggaaggaggaatggagggagggaggggaaaggacgcaacactcacaatgattaacgacaacatgggaatgatccaccagaatgcgagctccttaccatggtcgtggaggccccata

SEQ ID NO: 88487 - DNA, 122 bp, Homo sapiens
gcggtaagggtttctcatctcacctgagtgtggcgttcgattcactggcagcaggaaagacggggatcagagaagagttaccactggcgcccagcttccctggcctgatccccagccccctc

SEQ ID NO: 88488 - DNA, 122 bp, Homo sapiens
ctacctgaccgggggcgcagggagtgcggaccacgccagcaggactgtcctgggggcccccgcaccctctctctgcagccccccgagcccggctaggcattacgtaccctggaaaggaagct

SEQ ID NO: 88489 - DNA, 122 bp, Homo sapiens
gccttgtgcaaaattattcaactactttgtagaggattttaactagggttcagttagctccgcccacactataaaaggctctttctaaaaaacgaaacatgattaagggcacacggctccag

SEQ ID NO: 88490 - DNA, 122 bp, Homo sapiens
gcactggggaagttttaggtaaatacaacattccacactgatgctttcacagtttaatagcggattcacttataaacattctgataaagatcagaaactaaaatgcattcctgtttaaaaca

SEQ ID NO: 88491 - DNA, 122 bp, Homo sapiens
caggtgtgtggtgctgggtaagtttcacctttgaagcctcagccttccatctgtaaagggcggtaatggtgcccacctttcgaggcattgcgaggctagatggtaacacacagaaagctccc

SEQ ID NO: 88492 - DNA, 122 bp, Homo sapiens
tatccattttctctaggcttttcagtttgtcagagtatagttgttcataatagtctctgacggtcttttggattttggtcttttgtattcctgtaatgtcagttgtaatgtctccacttttt

SEQ ID NO: 88493 - DNA, 122 bp, Homo sapiens
taatttgtcaaagctttatattaattttttctacagtttcttttgtaactttaattagaacgtcatttgtgatactaagtaggagaaagaaccgagaaaagaaattttttaaaacctcaaat

SEQ ID NO: 88494 - DNA, 122 bp, Homo sapiens
gcctcagcctcccaaagtgctgggattacaggcgtgagccaccccacccagcccttcccacgtattctggcagggaatgctgttgtcccccaagcctaccctaagaggaagacttcttctgg

SEQ ID NO: 88495 - DNA, 122 bp, Homo sapiens
ttcatccacattcctaaaaccgtgacaaattgcagctcctcaggaatgggctcagtttgccgagtgaaaggtgactggccgagcaaacaaaccaggacaaatcctcctttttaccaggacat

SEQ ID NO: 88496 - DNA, 122 bp, Homo sapiens
gtgtgagtgggaagtgtgctgcagccacaatgcaggagctgggtgccctggcctcataggcggagtgggaggggcgtggcctgaaagctatggttgctatctccactgggaaagcttatggc

SEQ ID NO: 88497 - DNA, 122 bp, Homo sapiens
ttaaggttgcttcctgcatcggctcttccgtgatgaaaatctatctcatctaggtaagctcggagaagccgaagcgtgcgccggccaagggccctcctttgggctccgggcgcgcccaccca

SEQ ID NO: 88498 - DNA, 122 bp, Homo sapiens
ggaagttgcctctacttccgcccgttccggggcggggcttacttcgcagcgactacttgccgcacttccgggctgccaggcagctgctgtggctccaggatgatggagacagagcgacttgg

SEQ ID NO: 88499 - DNA, 122 bp, Homo sapiens
agattaagtagatagcatacgttgagttttgatcttttcccaggacagtaatcggtggtacgattctctctcggggccaggcagtgacgttgagccacggcttccagtcagccacatggtca

SEQ ID NO: 88500 - DNA, 122 bp, Homo sapiens
ttactgggcactgctaaactgcgaagtcggggcgacacggcagcaactttaaaatcaaaccgcatccccaagggctcggcgtgttttttggcctctgcagcttcacgtacttcgtacgacag

SEQ ID NO: 88501 - DNA, 122 bp, Homo sapiens
aggcactgttgtgggccagtgaatattccgagcctaggcaagtgcctggtacacagtaaacgcaggatttctggagtgaataaataagctagcacgactaatacgacgaactcatacatcac

SEQ ID NO: 88502 - DNA, 122 bp, Homo sapiens
cagggatagtgtcattgtccagtatatgaacccagcagcgatgatcaagtatgaatgctgcgaagttctccagctgagtttgatggtatactatgacgttgaacattataaggaaaaccatc

SEQ ID NO: 88503 - DNA, 122 bp, Homo sapiens
actcctgtctcccaggttcaacaggcacacacagtcacacctgactaattttttatttttcgtagagatacagtcttactatgttgcccaggctggtctcgaactcttgggcccaagcgatc

SEQ ID NO: 88504 - DNA, 122 bp, Homo sapiens
gtcaggcccccgggcgcaccgttgctggtatatgcggtggtcggggtcaggccccccgggcgcactgttgctggtatatgcggtggtcggggtcaggcccccgggcgcacctttgctggtat

SEQ ID NO: 88505 - DNA, 122 bp, Homo sapiens
acggaagcgctaggcgcctggttctgcgcgtactggctgtacggagcaggagcaagaggtcgccgccagcctccgccgccgagcctcgttcgtgtccccgcccctcgctcctgcagctactg

SEQ ID NO: 88506 - DNA, 122 bp, Homo sapiens
ttcaagcgattctcctgcctcagcctcccgagtagctgggattacaggcatgcgccaccacgcccggctaattttttttaatagagatggggtttcacaatgttgaccaggatggtcttgat

SEQ ID NO: 88507 - DNA, 122 bp, Homo sapiens
gtccgcgcggcttccccgaggccggaggcggggcgggcgggcctcgggtggcgcggggggcggacccgccagctgcctgcgctgctcgccagcttgctcgcactcggctgtgcggcggggca

SEQ ID NO: 88508 - DNA, 122 bp, Homo sapiens
cgggctgtgatcgcctgtggcctccctgcagggctgtgactccctgacgcagatccagtgcggccagctgcagagccgcagggcccagattcaccagcagattgacaaggagctgcagatgc

SEQ ID NO: 88509 - DNA, 122 bp, Homo sapiens
ccggctgtaggtgtccttggcgaatgccagaccgcgcgcaccgtcccagcaagtcccgagcgagtgtgggacaggcagcaaatcagtgccccctggccaggcagaacgagtcgaacgtggaa

SEQ ID NO: 88510 - DNA, 122 bp, Homo sapiens
acacacaggtcaccgtgaatcatggtctgactggtgtgcttggggctgtcaggtaacgaacggagggttcacctaaagaccatcacacagtgggtcaacgggactctaaagaccctgtgtgg

SEQ ID NO: 88511 - DNA, 122 bp, Homo sapiens
ctagatcaattatacttgggtgtggtatgactaaggggatgtttcttagcaaagcctcctcgggtgcaaacatcagctacccctaacctctgcctgcggctggtagtacatgccaatctgag

SEQ ID NO: 88512 - DNA, 122 bp, Homo sapiens
ccaaagtcacacctacccccaaagttggccaagcggctgatgcgggaggcaggcaccttgcgttctcgagagcggtcactcagctgggaaatggggacaaggtctgagggtgggaaagtggg

SEQ ID NO: 88513 - DNA, 122 bp, Homo sapiens
ttgtactgacatttgttaaatgtaacacaagacatgcagcaatatatgcaaccttgctttcgtattattctttcaatcttgttttttccccttaaaataccagaagccccccccaaatggaa

SEQ ID NO: 88514 - DNA, 122 bp, Homo sapiens
cattcttgcccaagtgagaattctcacttggtgtaacaggttatctttatcctgcagttccgtggaactggaggtgggatcagtggcaagataaaaggagcatgtgagaaaccttttggtcc

SEQ ID NO: 88515 - DNA, 122 bp, Homo sapiens
aattttcactttttttcttctcctttctgcacactgacacttaaaaatacatatttttgtcgggcgcggtggctcacgcctgtaatctcagcactttgggaggccgaggcgggcggatcacc

SEQ ID NO: 88516 - DNA, 122 bp, Homo sapiens
cgaagacgtaactttgcttagtctcggtttattggccgatctcttgtcaagcggcggaatcgttccgttcgggaggtgggaggggagcggggccgccgggggcgggcgtcttcagtggaccc

SEQ ID NO: 88517 - DNA, 122 bp, Homo sapiens
tttgaacaagcgcaaaaagaaggacggcagcagctccgtgccgctgagctttgcacgcgacggtcttgactatattctgggagccctggagtctgggaaaaatagcggcttgtacgacagca

SEQ ID NO: 88518 - DNA, 122 bp, Homo sapiens
gaaaattgactagcagttaagacactctgaagggcctgagtaatttgatttttgtaggcccggtgctccatgaacccttggaggggtttagagagcatctcattccagtctagcacaggcag

SEQ ID NO: 88519 - DNA, 122 bp, Homo sapiens
gtcgcgggtctctcaaccggggaccgaggagccaggccagggctgcgatcggaagctgcacgtgggtgttcagggccggctgttccggaaccttagtgcagagccacatcttggtgggcgcg

SEQ ID NO: 88520 - DNA, 122 bp, Homo sapiens
tattccttagaaagctggaaacagtcccagtcctctgtgtgacagtgaaccctgaggctgcgagtgttttcatttacaatactgggcttgaatacctgtttttaattccctggagatatttg

SEQ ID NO: 88521 - DNA, 122 bp, Homo sapiens
gcgggccagcgcgagttccgggtgggcgtgggctcgactgaccccgcgctcggagcggcccgctggccccaccgcccggccagtgaggggcttaacacctgggccagcagctgctgtgctca

SEQ ID NO: 88522 - DNA, 122 bp, Homo sapiens
ggcgacaggaggaggtgacgcctgcgggcaaggggcggcgaggtgagcggcctgcagtcccgctcgtggccacaagacggcgggcgagagcagcagacgctccttcaaatcccagaaaaatt

SEQ ID NO: 88523 - DNA, 122 bp, Homo sapiens
gacacagcgtccgggaccaggctctgggaagcgggtgtgcacagcccagcagagtcagggcgcgaccccaaccgcctctcaccatccttgccgtctcctccgagccgagggccggccctcct

SEQ ID NO: 88524 - DNA, 122 bp, Homo sapiens
tgtccctagtagatccgtctcctggagggtccgtgtccctggcggatccgtctctgaccgcgcgtgctcttcaccatggaaggaggtgctggtagccaagccgccctccccaagtgggcgtc

SEQ ID NO: 88525 - DNA, 122 bp, Homo sapiens
gggacgtgaggagtggcaggctggcagccggggcgggagtgggccctgtatcccaattcccgcctccccactggcgctggggccgcacgcttacccctgctttcctaaggaggcttcctgcc

SEQ ID NO: 88526 - DNA, 122 bp, Homo sapiens
gcgtgatttgctttggtctgtggtcactccgttctgcagtggaagctgcgtcgacactctcggtgtcctgcgccccggacctgggctggcggaggctctcctgccgtccagtgcgtctcacg

SEQ ID NO: 88527 - DNA, 122 bp, Homo sapiens
tgcctggtcagatctgggggtaagcaagagttgaggggcccataagggaagagagaagtccgaataaagtttggtcaagacaaagcagaagctaagacatgagcaattgggaacagttggtc

SEQ ID NO: 88528 - DNA, 122 bp, Homo sapiens
aaccccccaggcagacccatcttgcgcaggggcttctgtctggcatctgattcttttcaccgtgttcagatctctgggcttggcttgcaccctggacaccccctctctgcttaccccgacca

SEQ ID NO: 88529 - DNA, 122 bp, Homo sapiens
tcgtaaggaagtagactacattacgggaggccttaagtagccttaaattcaggcaagcatcgttctttgagttggttgcacccaaactcaatctcactctctcaaagctttctggccaggtt

SEQ ID NO: 88530 - DNA, 122 bp, Homo sapiens
agtgtggatctctccgccccacgtcatgagtgatcaacgttcttctgtggagactcctggcgtccagctgaaagtcgtgcggctgagacctccgcggtgccacagagaaaataggtgtgggg

SEQ ID NO: 88531 - DNA, 122 bp, Homo sapiens
tacctgctttatctgtgcagctttaaagccctatgttcaggtgtcctgtggagagtgactcgaaggcctgcaagagactccccagcagggccgacctccaccgttccctagggggcaggggg

SEQ ID NO: 88532 - DNA, 122 bp, Homo sapiens
tctgggggcgagcaggctgggttcccgggtctcagtcgccgcagtggtggctacagactgcgcatgtgacccaggggccggcgacgcaggtgccggagagcgaggaggagggcggcgtggag

SEQ ID NO: 88533 - DNA, 122 bp, Homo sapiens
aggtgactgaggacgctctcatccgcactgtctcttacaacatcctggcagacacgtacgcgcagactgagttctcgcgaacggttctgtacccatactgtgccccctacgccctggagctc

SEQ ID NO: 88534 - DNA, 122 bp, Homo sapiens
tcaagaccggctcggagcgcgtgtcgcagcagtgcaaggagaacatgtacgccgtgcagacgctgaaggacttccagtacgtggaccgcgacggcaaggaccagggcgtgaacgtgcgtgag

SEQ ID NO: 88535 - DNA, 122 bp, Homo sapiens
gtatcccataacatatgaatggtaatatttgtggcttattcaaggtactgtatttccttccgctcatgggcaagagcttattttttggctgatctccttttgcagaagaggccaagttcctg

SEQ ID NO: 88536 - DNA, 122 bp, Homo sapiens
ctaataagatggcacaattaaccgtaaggccaacccgtgactctgattagattcccatgacgcaatgcatccaagcatcacagcccactcttggcagttgggactttcagcatcttaactac

SEQ ID NO: 88537 - DNA, 122 bp, Homo sapiens
ttcccccatgccaggtttttgctgcctttctcacctcttagtctcttgacctctcattttcgctacttctgacctgccttgcctcttttttaaccacacctggaacctataggctgtgttgt

SEQ ID NO: 88538 - DNA, 122 bp, Homo sapiens
cgttcacctgccctcccagattgcaagccacaaccagtgcctggaggcatatatgtgtcccggggctgagaaatgcttttctctcctgagccctgccagacactctaagccacgcacgtttt

SEQ ID NO: 88539 - DNA, 122 bp, Homo sapiens
ctgggtgcctagcaaatgttcattatttgatgactgttgttcttcattccagccactcttcgttagatacggctcacagactccttggcgtcctggtcaactttcttatcatatggttttgc

SEQ ID NO: 88540 - DNA, 122 bp, Homo sapiens
ttcttaaatgagaaaaagaataaccatcctgagacactgggtaaagccccagttacgggccgagttgtgcttccccaaaattcgtatgtggaagttctaacccccggttcctcagaaggtgc

SEQ ID NO: 88541 - DNA, 122 bp, Homo sapiens
ctgccctacgcctggtcaaacctggaaatcaggtaagctattttatccaattccaaagctcgtttgaaccaaagatgcattaggcacctatagctactctatatgaaactaccaacctcccc

SEQ ID NO: 88542 - DNA, 122 bp, Homo sapiens
gtgtttggcttgccttcacatagctggtctgcctgcttttcaaaagagtggttttctcaccgcactttgtcattttgccaatgtggcaaaaaggatgaactctgaaacccagcagacttgac

SEQ ID NO: 88543 - DNA, 122 bp, Homo sapiens
tatcaagtgtgctgaaaggcctatttgtctcttggggtggctccatctctccatcttctgcggcctgtctgcgcccaaccgacggcccgctactgcgcaggcgcggccctcccgcagccttt

SEQ ID NO: 88544 - DNA, 122 bp, Homo sapiens
aaaccaaggctcttgtttagtatattttctttccttttttttttttttgagacggagtctcgctctgttgtttagtatattttcattgaaatgataagtcttgagtggccaaaggaaaggac

SEQ ID NO: 88545 - DNA, 122 bp, Homo sapiens
tgggccctgggcctagattcgaggtccccagggtccaagtcctgggttcagagggcggggcgcgaggggcggggtctccaaggggcggggtcccggggtccctgaaaggcgcggaccaggcc

SEQ ID NO: 88546 - DNA, 122 bp, Homo sapiens
tgtctcaaaaaataaataaataaaaacaagtacaaataaaaagggaaaaataaatcttagcgtgcaggctaatcaaaaataaagggtggttcagttttcaccatgggcagtggtttgctagt

SEQ ID NO: 88547 - DNA, 122 bp, Homo sapiens
taagagtcaggctaaaagctgtcatcctcagcatcttccggaagggagggaggagaggagcggctgctctgggtggaggcagcaggttgcttgagcaagcaggtaccactctaagccttctc

SEQ ID NO: 88548 - DNA, 122 bp, Homo sapiens
agggtaactagggggatatggagggagcatgcacggtgggaggctgaggattgccacattcgattcatgagttattgtttgctgatggggtcctgagattctgactgagatctgtaattctg

SEQ ID NO: 88549 - DNA, 122 bp, Homo sapiens
agaagtgcagacacacaggagtcaggcctggcagggcgggccgagctggtggtctgtagccggatgtggtgggtggtgtttttgtgtagatgcgcttcagcgtggcagagaccctgaggaga

SEQ ID NO: 88550 - DNA, 122 bp, Homo sapiens
agagcaagcggaccctcaaacatctgagccaagtcttgcataaaagcatgatcaggaatccgaatgcctacaagctgtaaggcaaggggaaagggatcatgagaaaggttggaagggataag

SEQ ID NO: 88551 - DNA, 122 bp, Homo sapiens
cacacagtcattaccagcacccacgtgacacacggcagtatacgtggctccagtccccaccgagagccttcctgcctgtctgaccaagcacagcaagccctacacaccgagagccaccgaga

SEQ ID NO: 88552 - DNA, 122 bp, Homo sapiens
actgatccacaaagatctctggggcaacaactaggttctggtctgcctgactctcatcttcggggaaagagcgccctcccacttgagaaggaaccacagagacttccatggtagaagaactg

SEQ ID NO: 88553 - DNA, 122 bp, Homo sapiens
ttccacctgttcctcaaagagctatcaaatggccctgtgaacatctttgcaaagggtcctcgcgaatgccaggcctcaagtgcgattctctgcactgaggtcaggatttaatctgggctgga

SEQ ID NO: 88554 - DNA, 122 bp, Homo sapiens
caggcggattcagcgagatttttcctgggtctccagtgccgcttcagacaatgaaatcagcgtgtccgatcatcaattctcatcatgatcgtgacgtcacaaaagacagcggccaatgggag

SEQ ID NO: 88555 - DNA, 122 bp, Homo sapiens
gggggccgcgccagccctgcgtggggtccgggaccaccgaaccgcggggacccctgatcccgggggggccactgaattccaaggggcccccgcccgcccggccccacccccgcggcgggttg

SEQ ID NO: 88556 - DNA, 122 bp, Homo sapiens
ggctccaggagaaaccatctcccgccctttccagcttccagaggcgcctgcacccttcggcgtggggcctcctcgtctgtgcatcccgccacctctgcttctgccctcacgccctcctctga

SEQ ID NO: 88557 - DNA, 122 bp, Homo sapiens
atgccatggcaatgacctagaagttcccacctgtttccatggaaacaacctggacatcttcgcccttttccttaaaacttctaaagaacctgctcctcaatttgcattgacccaccccttaa

SEQ ID NO: 88558 - DNA, 122 bp, Homo sapiens
gtcgccgcttggatcacagtgaccgccaccgttgcccggggatgggtccctgagactttgcgaagtaggagccctgtgtgatcgtgcgtcagagtcggggctgagaccagtcctggccaggg

SEQ ID NO: 88559 - DNA, 122 bp, Homo sapiens
caatttaaaagcgaacacaacaaaactaacagaccggcaaaatctatctttgaagcgccgcgggaggcacaatttgggaacaggtgaggccatgctgggtgggtgaggcccccctctctcct

SEQ ID NO: 88560 - DNA, 122 bp, Homo sapiens
attccagaaagccagtgtacacgcagacttcggaggcagtaaacaggaaaccatcgatcccgtgcaggaaatgaccttgtttgaaggcaacgaaggtgtcgcggatttccctcgttttcctt

SEQ ID NO: 88561 - DNA, 122 bp, Homo sapiens
ccaagggcggtcctcggtgcagcagcatcagcttcacttgtgggggggtgggggaaggggcggtctcagaaatgcaggttcccaggtcccaccctggacttctgaaggggtgtggcatctgt

SEQ ID NO: 88562 - DNA, 122 bp, Homo sapiens
cctggcgtccctcaccgtagctgtgctcatcctggcctactttaggtgggcggggcggggcgagaggcggcgggacatggtggagggggggcggtggccgaggtctgatgcgaccccctccc

SEQ ID NO: 88563 - DNA, 122 bp, Homo sapiens
cttttcacgcagatccactgggaaatttcccaatactgtgtttatcaaaactaaaagcctcgtagaatcaggattcatccagacagcatgatttaggcccaaacataatatagatatacaga

SEQ ID NO: 88564 - DNA, 122 bp, Homo sapiens
gtgccgacagttggcactcacttctctttggtttttccttaaaggaagacccagacaccccggccccactctaggatgttcagactgaaagctcccagatggtctgttttacacttctgagc

SEQ ID NO: 88565 - DNA, 122 bp, Homo sapiens
ggacaagggcatcctctgggtccttatcacagggtaaggggtccaccagacccggacaagcgctcctagctggaggagggtcgcgttcctgccggatgtggaaaggaagtccaggaatcccc

SEQ ID NO: 88566 - DNA, 122 bp, Homo sapiens
gcgtgcgcagagaggatggctggaaacccgcgtagagggcggggcggggcaagccggtgccggggcggggcaggggcggagccacaccggggtgggtggtggttacggctaaccaaagcttt

SEQ ID NO: 88567 - DNA, 122 bp, Homo sapiens
cggttaagactgaagtacccttaaggctgaagaccatcatccagtaccccatctccctcgcggcatcagtgagttcttccctggaaactaggtctcgtataaacttctgtaaacgcaaccca

SEQ ID NO: 88568 - DNA, 122 bp, Homo sapiens
agaaatgcttttgaagcttgaagctaaaaaaacaaaaaaaaaagaaagaaatagggaaggcgtcctattggggctttctcactagggaaagagtgagctgcagggaggagaaagaacagggc

SEQ ID NO: 88569 - DNA, 122 bp, Homo sapiens
tgtggacccgcgtctggagaacgagctgcatcgccaaggctgctgcgggtcgcacctgggcggttgactattagtcgtggctaagactttcagatcaaccgccccctagtttatcccgaccc

SEQ ID NO: 88570 - DNA, 122 bp, Homo sapiens
gggggagcaccaaggccctttgaggcccagagatctgcccaaccccccaccgaaagcacccgaaaggcccctgaagccacagccaagcctcagcccccacaagcaccagtcgtgttccaccc

SEQ ID NO: 88571 - DNA, 122 bp, Homo sapiens
ccttgagctaaagctccaggcctgaggccaggccagctgtgtagactcagccccctcccacgctccaggcaagacaggccctttaggccaaggtcccctgaccgagacctagacttatcaga

SEQ ID NO: 88572 - DNA, 122 bp, Homo sapiens
tgattaatggaggaccttagcagaaacggctcaccgcgaggtgtgacgaccgcaggagggcgtcaatcaagaaaatgcccccttgccccggaggcgagtggagccgcacagagccgaggcca

SEQ ID NO: 88573 - DNA, 122 bp, Homo sapiens
gttctcctgcccacccgaccgcctccaagaacgctgggtgcgcagcgtgtccccctgctgcgcgtatgaagacagggagggtgaggccatcagatgtgtggatgccacaagctgagacataa

SEQ ID NO: 88574 - DNA, 122 bp, Homo sapiens
ttgttattcttatttagtagtacatatatgcttttttttctctctcctaacgtaacagaacgtttaagccttctaaccaaaaacaattccaagcttacatctgtatcctgaattttaaaatt

SEQ ID NO: 88575 - DNA, 122 bp, Homo sapiens
agacagtgtttctcctagcatttcgctgttgcattaatcaacaagttaaaatataaacaacggctaaccttgggtttcaaatttaacattccttatctcttagaccaggtttatccactgtg

SEQ ID NO: 88576 - DNA, 122 bp, Homo sapiens
gcagattggattgcttgagctgaggagtttaagaccagcctaggcaatgtagtgaaacctcgtctctacaagaaatataaaacttaacatggcttggtggtgggtgacatgatcatggttca

SEQ ID NO: 88577 - DNA, 122 bp, Homo sapiens
gatcggtcgccaaggatgggatccaggagaaaacgtgctgaacgtgcagcttgctcctaccgattacagcccagcagatgacatagttccactgtgctctagtccattgtgggaattatggc

SEQ ID NO: 88578 - DNA, 122 bp, Homo sapiens
gcaagcgcgagaacaaggagatccgcacttacaactgccgcatcgccgagtacagccacccgcagctgggtgggggcaagggcaagaagaagaagatcaacaaaaatgatatcatgctggtg

SEQ ID NO: 88579 - DNA, 122 bp, Homo sapiens
tagcgaggccgagagggtctttgaggaaaatcccgcatccggacacgccttgagggatggcgtcaaacccagaggcttggaaaaggtaagggcggagagcacgcctcttccttgaaagtgag

SEQ ID NO: 88580 - DNA, 122 bp, Homo sapiens
tgcaacaagatatccatatgttaaactttgacttgtgtagatttcctggccctatttcaccgatatctgtagacagtaagctaaacctctcaggcaaagacagagagggatttttcctgagt

SEQ ID NO: 88581 - DNA, 122 bp, Homo sapiens
ccggagcttggctgcaggactcccgcaaaatctccaaatgcccccgatctgcgtggtcaccgagaagcagcccggctcggaacaagcccaggcaagcccaggcagagcccgccgccgggtcc

SEQ ID NO: 88582 - DNA, 122 bp, Homo sapiens
cctcggggaggccggtgctggaggctgggctggcactgtcctggctgcatctctccctcccggcagtcccgtggccccacaggccactgcagcggacgtgctgggccagtccccacctcttc

SEQ ID NO: 88583 - DNA, 122 bp, Homo sapiens
gtggcgctcggctgggggccgcagttggctcccctgggggctctgggcggcggcagctcccgcctgtggggaggagaaggagccggatgggcgggttcaggcgcgcgcggcggcggtcccgg

SEQ ID NO: 88584 - DNA, 122 bp, Homo sapiens
cccggagtcgaggctgctgaaattccacacgaccagcgtctgcagcagcagcaccgtgagcgccgcgagcagcgccgagtgcgagcgccgggccagcctccgggcgcacggcgccgccacca

SEQ ID NO: 88585 - DNA, 122 bp, Homo sapiens
cctgagggtctaattttcttactctcctgatgcctcacggggcgagggactagaacggggcgctgagctggctgtaggcaaaagccaaccgactccatcccctactctcccatcagtcgcgc

SEQ ID NO: 88586 - DNA, 122 bp, Homo sapiens
agcctgcgatccggctctttgaagttttcccccaagcggactcgaggcggcgagaaggagcggggggcggttgggtgggtggagagagatatgaggggtggggggggttggcgacgttaacg

SEQ ID NO: 88587 - DNA, 122 bp, Homo sapiens
gctcacggtgcctgcgctcacgggtgcctgcgctcacggtgcctgggctcacggtgcctgcgctcacgggtgcctgccctcacgagcctgcgctcacgggtgcctgtgcttacaggtgcgca

SEQ ID NO: 88588 - DNA, 122 bp, Homo sapiens
agaaggggcgccagcctctcctggcctgctgtgcgctctgccaaagtcttcgctcgaccccgcacatcttgctccgttccctagtccagatcccagctggaggggccagctgcagccacccc

SEQ ID NO: 88589 - DNA, 122 bp, Homo sapiens
gtttccctgaggaccaacgtgaatgggggccccactggaaagatgcttggggctgcagagcggatggaatgcaggcccaggttgctgggtggtgccctcagctcctggcagggttgacgggt

SEQ ID NO: 88590 - DNA, 122 bp, Homo sapiens
agggcagaggacacgttacacccagtacagaatctcggacagtgaatatcagtaaacattcggcagaaaagctctgccaaattgagtgctctgatgtgactttttcatcaagtcaatgttcc

SEQ ID NO: 88591 - DNA, 122 bp, Homo sapiens
cacagaagcagacgtctgcgctttgtgttttcacaaaggagagaggcattcaaaaggtcgcgtgcacccacacccgagtttccaatgcacagtgctccttctgtacgcgccatcttaaaacg

SEQ ID NO: 88592 - DNA, 122 bp, Homo sapiens
gctggactttccaagtttcgggccgatttccacgcgacgggagcccaaggagcaaggcagcgccaatcgatgacagagcgtgcgaacgccggctgctggatgcccaggggctggagcgcggg

SEQ ID NO: 88593 - DNA, 122 bp, Homo sapiens
tcctgggggcttctttccacgaagcctcacgtcgccggctgctctttcaggggcgccccacgtctgcttgaccccgtagcccatcacacgcaccagcgttctttcatttactcaaccaaggg

SEQ ID NO: 88594 - DNA, 122 bp, Homo sapiens
actaagcagactccgccctccggtccgcgaagtggcgactgcggtattaagtcgacctcgcgatttctcaaatagtgcaggaagaagacattaaatagcgaatgctagagactgcattcaca

SEQ ID NO: 88595 - DNA, 122 bp, Homo sapiens
aaacagctctgcatggggcgtgactttcagggcagggctgggagaggacaggactgtggccgcagtaggatgggggctccagtgcagccactggggttctgtgccccccagagctgcctagc

SEQ ID NO: 88596 - DNA, 122 bp, Homo sapiens
cagcctagttagcactggctcatgtaacctagaccacaggccatagctggacaggggtggcggggcgacctgcccagcttgggtcaatcaggaatttgtaacgggcactcagaaatctcacc

SEQ ID NO: 88597 - DNA, 122 bp, Homo sapiens
tggagtatcccagagcgctagggctgcgggaaggggcgggtgtgcttctggaaacatgagcgcctgttagtatcagtgcctggatagggctggggacaaatcagtttatgccgcgcacaccg

SEQ ID NO: 88598 - DNA, 122 bp, Homo sapiens
aagatggcgacggagggaggagggaaggagatgaacgagattaagacccaattcaccacccgggaaggtctgtacaagctgctgccgcactcggagtacagccggcccaaccgggtgccctt

SEQ ID NO: 88599 - DNA, 122 bp, Homo sapiens
tgcacctcaaaacactgcgtaaaagaaccccctgggactacaactcccagaacccccccacgatgccatgattccggttaggccaccctgcacttccagccacagccatggctgcagtcaca

SEQ ID NO: 88600 - DNA, 122 bp, Homo sapiens
ccccagacactcacctgcgccggctccaggctgggcgcacagccgcctctcagctccgcgcggagtccacaccagagaagccaggcaaaaacggccccggtttggaaagagccgcatggacg

SEQ ID NO: 88601 - DNA, 122 bp, Homo sapiens
ccagctttgagaccttggataagttagctcaactctcagcctgtttctcacctgtaaagtcggaatactggtacctaccacgcaagactgtggagcaaccttttttttttttttttttttga

SEQ ID NO: 88602 - DNA, 122 bp, Homo sapiens
tccagaaggagtgctgccatggggagcaagtgtggcatggccctggggtgcaggccaggccgggggcagggactgaagcaagttgtgaaatttctgattatcaggggcagaatggattccta

SEQ ID NO: 88603 - DNA, 122 bp, Homo sapiens
ggaggctgaagcaggagaatcgcttgaacctgggagtcagaggctgcagtgaagcgagatcgcaacattgcattccagcctgaagtgctgctgtaggtactatggctcctgaagttgctttc

SEQ ID NO: 88604 - DNA, 122 bp, Homo sapiens
tagcactgcctgtttcccacagccagcacagaataattcacccacacacacactctgtgtcgatcaaccactggaaaggtggtctccaagcatcccagcactcaatgtcagggacctcagcc

SEQ ID NO: 88605 - DNA, 122 bp, Homo sapiens
caactgatccatcatactgaaattctgatacttgaaagaacgcacctccactgagcagggcgttttgttcttctatggtggaatacatagaacggagggcgggtgagtagacagcgaaagct

SEQ ID NO: 88606 - DNA, 122 bp, Homo sapiens
tgcctgattctcctgcctcagcctgccaagtgcctgggattgcaggtgcgcgccgccacgcgtgactggtttttgtattttttgggaagacggggtttcgccatgttggctggcctggtctc

SEQ ID NO: 88607 - DNA, 122 bp, Homo sapiens
gtgctgtgccatcacgctggtcaggcctgtacgccgtggagaggggcgctgtgtggggctcgctgcctgagccctgggtggaccgtggctgccccatgagttgtcggggacctccgctgccc

SEQ ID NO: 88608 - DNA, 122 bp, Homo sapiens
tatttatccatgtaattacagttaccggcgttcactcttttgtgtggatctatatctctacgttatcattttccttcttaatagtgcaggtctgctggagatgaattcttccaaatttgaac

SEQ ID NO: 88609 - DNA, 122 bp, Homo sapiens
ggctttgggttgtaaaccagggagtttggacttaattcccagaactcaatcaccactgagcgacctcgaaaaagatcacgtgggcctcacaggacgagggccagacccagatgcgcccgctt

SEQ ID NO: 88610 - DNA, 122 bp, Homo sapiens
gccgtgaccgccttgctgattggctaaagccctgactggcgctgcgcggtgcagagcaggcggtaacccgggtgggagaagagtggtgggagggagccctagtcccacagattgcccgatcc

SEQ ID NO: 88611 - DNA, 122 bp, Homo sapiens
tttaccttaaacaggatgaatacatttctaccatcgcatatgtaccagcattccctatagcgcttattactgacaaacccatggatgtgtatgtttttggaatatggctgctgaaactacaa

SEQ ID NO: 88612 - DNA, 122 bp, Homo sapiens
ctcttcttagcaaggtagtggagctccatgagagctagtcagacatcccccagcagcttccggaaagtctgccaatagcaacagagttagataagaacccaacagaagctaaggttgtactt

SEQ ID NO: 88613 - DNA, 122 bp, Homo sapiens
ggccacatcctcgcttctgcgataacaacacagaaatttctaccgcagcctctgatggaccgcgggccaagtgtccacttcacctctgatggaccgcgggccaagtgtccacttcacctctg

SEQ ID NO: 88614 - DNA, 122 bp, Homo sapiens
gtcttgtctgtgggcaaatacaattgagtagtatgtggatcttagtctgtataggtcacccgttttactgtgatgccagttttaattggtttggtgacttttccaagagcagctcaccaaag

SEQ ID NO: 88615 - DNA, 122 bp, Homo sapiens
aacaagtggacaatatttcctcttcacttttaacaaagagtagcaaaatgtttttccttacgtagaggtgactggcacacgagcacaaatttaggcttttaagcattactgaaagaaatatc

SEQ ID NO: 88616 - DNA, 122 bp, Homo sapiens
acaaggaaaaatcgaattacgaaagttaccaggtgagaaaatgttaagccctggctcttacggcctgtttacctatgcacattagctagaatcatagttattactgagcgggagctctcacg

SEQ ID NO: 88617 - DNA, 122 bp, Homo sapiens
ctatgcagtttgaaaatacatgaacatttttatggggttacaaggaagtataataattagcggtggagttctagaagaatatttttaaaatgtgtgtcaaggcatagtaggggtatgaatgt

SEQ ID NO: 88618 - DNA, 122 bp, Homo sapiens
tggacacactgaggaagaccccccacgagtgggaaccccctggaaggaacacaccggccccggcccccaggaagggagcacaatggaggccgctcatgctaaaaccacggaggaatgtttgg

SEQ ID NO: 88619 - DNA, 122 bp, Homo sapiens
tgatccggaatgggaggaacgcaatgcgtcccgcgcggcgatctgggatagctgcgcaggcgcagcttccggctctgtgtctcgggaattatttgacgccaccggttcagccccgtagaaag

SEQ ID NO: 88620 - DNA, 122 bp, Homo sapiens
attcagattatccgatctactcctgctggataggagcacacctccgctagaacctgggtccggccccctcccagttttctgcagggcgtccagattccggtgctctgccccgcagcagtgcc

SEQ ID NO: 88621 - DNA, 122 bp, Homo sapiens
gggccacagatgtcatccaaaggttcagagcagtccccatttgggttcccaggggcaagacgcaggggtccaaggtaaaatcggatctgggcccttggaaggtgatgataccttggggagaa

SEQ ID NO: 88622 - DNA, 122 bp, Homo sapiens
aatcaattttcatttcccaaacccaagtgtatcccattttgacatctctatatataaatacgctgctttttaaaacattttaaagaatataagcaaggttttctaaaatacatgcctaaata

SEQ ID NO: 88623 - DNA, 122 bp, Homo sapiens
tcaggctcggactccgtctttcttctttcaggccgctgggaggcgctgtggccgaagccccggcctctcccagcctgatgccctggtcctgcagccgcgccgtctttctccgcacccggttc

SEQ ID NO: 88624 - DNA, 122 bp, Homo sapiens
ctttagttagacaaggaaagtgcataacccaagaaaaattcttttgaattattttaatttcgggagttacgatctgggctttgtaagtcaaaagtaatttatcaatataaacattgtacatg

SEQ ID NO: 88625 - DNA, 122 bp, Homo sapiens
cagcattttccctgcagcggcagtagcggcagcggcagcgcttcagccatgtttgacaaccgaggcgcgctctgcgcttgcgcggcgcctagtgcccgctcctcccccgcccccacccgcgc

SEQ ID NO: 88626 - DNA, 122 bp, Homo sapiens
aaattacccttgcttgggtatcaggagctctgggttcaagtcccagctctgccattaactcgcagtagaatctggatattttccttctcacgacctcagcttccccatctcaaacggagtgg

SEQ ID NO: 88627 - DNA, 122 bp, Homo sapiens
tgtcccccaatttgggagcaaggatctctctgcacatttctgcttttctctggacatatgcgcctttttgtatactccttgctctttgattgctggtgtctttgtacccatccaaccacata

SEQ ID NO: 88628 - DNA, 122 bp, Homo sapiens
gctcctccacctccaccgaagcccatctccaccttgtggactctgggtggggaccagacacgtctgctggacgggggcgtggccgcactcgcttcgtcgccgctgcccccgcccactccggg

SEQ ID NO: 88629 - DNA, 122 bp, Homo sapiens
ggcgggcggcggcggcggcagcggcggctgcggcggcggcggcggcagcctccggctttgcgtaccccgggacctctgagcgcacgggctcttcctcgtcgtcgtcctcttctgccgttgta

SEQ ID NO: 88630 - DNA, 122 bp, Homo sapiens
cggtttccggcggcagagacatgttttccggtcgtcccttggctcgattttcttccggggcgggacttcctttccatcattgataggcgccgggcagctgagctggtaggaggaccagacgg

SEQ ID NO: 88631 - DNA, 122 bp, Homo sapiens
gaactaccattgatataaggcctcttccggaccgaaacgcgcagccgcacctctctgttccgtcaggtggaataggcccccgacccgggatctctacccaaaaggaggcggttagaacacag

SEQ ID NO: 88632 - DNA, 122 bp, Homo sapiens
gacttgcttgagcgttggagttattcaggcagttttcaaaaatattgataccccggctgccgctccccatcccagccccgccccaccccaccccaagaggttctgatgaattggtctgggcg

SEQ ID NO: 88633 - DNA, 122 bp, Homo sapiens
ccatgtgatctaagttagagctcggaggaagcacagcttcacaaggcccatcctccccagcggccttcccaggccctccagccagcccacactctgccttcatcccagggttgcttggctcc

SEQ ID NO: 88634 - DNA, 122 bp, Homo sapiens
tcccggaacttacacacacacacacgtgtcccgtaactaacttacacacacacacacacacgtgtcccggaactaattttcctcatttgggtgaaaacttttacagggtcctccaggcttgc

SEQ ID NO: 88635 - DNA, 122 bp, Homo sapiens
gattggtgaagcctctggcgtcggccaataggacgtggctttgttggcgtgtgccgcggccgcgcgagtcctggaaagcgttgttggcccggttgctctggagccgggtctcgggtctggtg

SEQ ID NO: 88636 - DNA, 122 bp, Homo sapiens
gttaggaccagtgaaaaggtttgcaagtagaagtgcatattgagaaaaggttagggttatcggatcccctatctgatacgtgtaacatatgctttagcaattggaatatatggcatagaaca

SEQ ID NO: 88637 - DNA, 122 bp, Homo sapiens
tgtgaggctggcgctggagcggtctgggaatgttaggaggtctagggtatcgcggccctgcgtcctcttgtctggactaaaagtccgggcagttctccccggacctggattgtgggcccagc

SEQ ID NO: 88638 - DNA, 122 bp, Homo sapiens
taaagcaagtatgtggggttggaggcggaggaatgtcaggaatgagatggaggcaggggccgcatagtgagtagtgctttaaaattcatgttagggagtttggtttttatccaaagggcaat

SEQ ID NO: 88639 - DNA, 122 bp, Homo sapiens
ggtcggcgtcgtcctcctggcctactggttcttgtccctgaccctgggcttcactttcagcgtcctgcacgtggtgttcggccgcttcttctggatcgtgcgggtcgtcctgttttccatgt

SEQ ID NO: 88640 - DNA, 122 bp, Homo sapiens
cagccacaccgcaagctggctatgatgccccgggcatcgagtggcaggtgcacaccaaagcgggctttacagtgagctgagggtacattccctcccatgttccgtctttgtcaatacaccac

SEQ ID NO: 88641 - DNA, 122 bp, Homo sapiens
gcccaggaagaaagtctgtcttctctggaatgcaatcaaattacatggggaggggccgggcgcggtggctcacgcctgtaatcccagcactttgggaggccgaagggggctgatcacctcag

SEQ ID NO: 88642 - DNA, 122 bp, Homo sapiens
ccagcctagacgtgtgggccacagggagaaggtggagcgttggactctagggaggcagggcggcaccccagcccaccgggactttcacacaccctggcctgtggggaggcagtgccagggcc

SEQ ID NO: 88643 - DNA, 122 bp, Homo sapiens
acggagccgcttctgcatggagacttgcaggctgccagagagtgggtggctgggcaggggcggcgagcgtttagggccgggcagagaaagttggaagtcgtctccctaacctgttccttgtg

SEQ ID NO: 88644 - DNA, 122 bp, Homo sapiens
tgacaagtggacattaccagccagagcaggagtgctcttccggcagagcctctggcaccacggtggtgcaggcacccggcctcatgcctcatccccaaacactcatggggccactgcaacct

SEQ ID NO: 88645 - DNA, 122 bp, Homo sapiens
ccaagcagaggcgcgggttgaaggcgaagtagatcttgcccacgggaatggtgagccccgcggccacccaggaccctagctgttgtaggttctggttgtccagcacgtagagagtgtagttc

SEQ ID NO: 88646 - DNA, 122 bp, Homo sapiens
ctctttctctgcctcagatccgtcgtctctcggtcggtctcagcgggtcgctgactacctcgccctagcactcggtccgcgccccgggaaggcttcagcatcaccctcttctgctgggatcc

SEQ ID NO: 88647 - DNA, 122 bp, Homo sapiens
atccgcccgcctcggcctcccaaggtgctgggattacaagtgtgagccaccgcccacggccggtagaacatctgaagcttctaaagcgaactctaaggtttcattggcacgagggggctcga

SEQ ID NO: 88648 - DNA, 122 bp, Homo sapiens
tttccactttttccaaaaagcactgaagcgtggtgaagaaacaaacatatcctcaattctcgcgagagctccgtgtgtaaccaagggctgaggcggaggattggtcactcaggatgaggagc

SEQ ID NO: 88649 - DNA, 122 bp, Homo sapiens
acctgagctctccgattccaaagcctgtacatttttcaggagcctcatgaggctgagccacgtcacactggcagcccacactctggaatgagtcagtccccagggagcagaacagcatccgt

SEQ ID NO: 88650 - DNA, 122 bp, Homo sapiens
aatcgaacccagggccatctgactcgagaaaccccatgctttctgcaggggcggcctggccggccctcgcctgctcgaatgccaccaaggatgcaccccagagggcaggccaaggcagccag

SEQ ID NO: 88651 - DNA, 122 bp, Homo sapiens
gcaggggcgtcaccaagggaaagccaatcaccattatttctgaagcccaagggggcgggacgagaagtcaacataatggtggtgctgctggaaatctagcacctggggagagcctgagactt

SEQ ID NO: 88652 - DNA, 122 bp, Homo sapiens
atcaactgtaaggtattgctctattttcaaaattacaaacatctaaacagcaatctgtcacgggaagacctgagttctttgaatttcagtatttaaaggcaatgtttcctccaattcctaac

SEQ ID NO: 88653 - DNA, 122 bp, Homo sapiens
cagttataaatggaaaatatatttgtttattgataagtcatttaacactctatgatagtacgtgccacaaggtgggataaagttgttcataatcagaaaagatgtggcccttgcccacagtg

SEQ ID NO: 88654 - DNA, 122 bp, Homo sapiens
cgctgttgcatctagattttgttttctgtctctggattgtaaaaagctgctctggcggcccgcccgccccggcggggactggggatgcacgtacacggagaagtcctggctgccaggccagc

SEQ ID NO: 88655 - DNA, 122 bp, Homo sapiens
cctcgatgtgttcagtgcctgtgtgggtccaatagaggcttcgggccacccagttgactgcgatgtcatcggggtcgttgatcttggtgttgatcagcgtctgcgccccagacccatccagg

SEQ ID NO: 88656 - DNA, 122 bp, Homo sapiens
tctaagcaggtgttttgtgaatgcctgcattaaatgagatggtggtgtgcacaggcttagcgtaggcctggaatagggcttagcaccgtaagtcttaataaatgttagctactattattttt

SEQ ID NO: 88657 - DNA, 122 bp, Homo sapiens
actgtctctgcttcgagatcaagctccgatgaggacccagggcccctgccctctggggagcggccagcccccagggcccatgtgccctcctccctgaagagcctttccccacgccactggaa

SEQ ID NO: 88658 - DNA, 122 bp, Homo sapiens
cgcggctccggctagctggcaggcaggcccgcagccagctccctcgcgctccctctcgcgcgcgccggccacgccccctaggcaccgcggccaatcctcggccagctctggtccgtctcctt

SEQ ID NO: 88659 - DNA, 122 bp, Homo sapiens
gagacctcctgccaacccaattcccagtgcgcagatggggaggaagaggcagcgaggaggcgcccccagctcaaggtcacccatcaggtctggggcagagagagccagaagcccggaattcc

SEQ ID NO: 88660 - DNA, 122 bp, Homo sapiens
acagcggctcccccgaaatctggatggagctgggcagcatcgtgcccacggctgggcctccgggtacggggccggaacggaggttggtggggccgcgggcggggccggggatagggccgggg

SEQ ID NO: 88661 - DNA, 122 bp, Homo sapiens
ggcctggcgggtgggggcgcggcctggcggtgggggtggaccttcctggggtggagcccgcggctgtgggagcagggcccgccggggctcgggcagggcggtgggaaggcggggccttctga

SEQ ID NO: 88662 - DNA, 122 bp, Homo sapiens
attgcccggcctgggcaaggaacaggcaggatgcaggggccatgtttataagcctaaaggcgtttggggtgctctggggaggggacctcagcccttatctcctatgcgaagaccccaaccca

SEQ ID NO: 88663 - DNA, 122 bp, Homo sapiens
cagagacggtgacgggatccctgcgttgacggtggcatgaccgtgtgtgatgggatgtgccgggggcagacagggcccaccagaccccacgctgctctactccgcaccggcccccctgcctg

SEQ ID NO: 88664 - DNA, 122 bp, Homo sapiens
ctctggtgacgtcccacccaccctgagccctacagcgtggccactgggcatgtgtttcctcggccccagggcaggtgtgcaggcctgagggcagctccatcctggcccagagcccttggcct

SEQ ID NO: 88665 - DNA, 122 bp, Homo sapiens
gacgggggcattccaaacgtgaaagagcaatgaaggaaaatgcagacagagcgaggacgccgaaatttggctaagctattgagaaggctacaatatgtggaagtgtttatcagatatctgcg

SEQ ID NO: 88666 - DNA, 122 bp, Homo sapiens
gagaacgattggtatatgatggagtgaatataaatcatttgctcattagaaattacccaccgttttctaatcaggtcctcacaatgttaatgcacctgagttaatggacaggtccattcacg

SEQ ID NO: 88667 - DNA, 122 bp, Homo sapiens
tctataacggcgcgagagtgagacgtcatcggtgagcgactaacgctagaaacagtggtgcgcggagaggagaggtgagtgtgatggagaccacggggagcgggaggctgggctcctgggtc

SEQ ID NO: 88668 - DNA, 122 bp, Homo sapiens
agctcccccagcaccgaagactgcgatggtgagtgaggacgcatgcgcgagaggacccgccgggggttcagcgtctctgctccccagtctgtgtggtttccccctggtgggcctgcgctcca

SEQ ID NO: 88669 - DNA, 122 bp, Homo sapiens
ctacatactctttaagagcaagtatctgctttgtccactgtcatccaagtgagtggcactcgatatacgcccaataaacatttgctcagtgaacaataatgccacaacccctgagtgatttc

SEQ ID NO: 88670 - DNA, 122 bp, Homo sapiens
agccagggcggggctggaggatggggctcagggtggcctgggcctgagccagggatgaggcgaaacccaaccctggcctggccccgggccgcagccgtgcaggtcactaggcctcggcgagt

SEQ ID NO: 88671 - DNA, 122 bp, Homo sapiens
cctgctgagcatgcgcactggtgtgacccgcgtctcctccgtttgtgaagtctggcgggtcgcgtgtatactcagccgttctctcttcacaggcacgtggacacagtgtcacctcctcaagc

SEQ ID NO: 88672 - DNA, 122 bp, Homo sapiens
ggccgcgctgagataggctgcggagggatgattggcgtcttggcgcccaatgggcgctggcgggcggccttgagtacctgcgctgggcgggcgggaacggcgcgcggcgagctgagggtggc

SEQ ID NO: 88673 - DNA, 122 bp, Homo sapiens
acgcgctcgtggggggagctctgtgcacaagtccatccagggcccggccctggggtggctcgggttgttggaaccacgacgggattccgtgtcgagtgtgaggctctgctccttttactcct

SEQ ID NO: 88674 - DNA, 122 bp, Homo sapiens
ggccggcgataaaaaccgccgctgaaagcccacggagcaatttcccgggaccccgagcgacgccattacaggaatgtaattttgcccggatgaggccccgagtttaattatcctcgcggagg

SEQ ID NO: 88675 - DNA, 122 bp, Homo sapiens
tctgggggacccgggtggacagcttcgtaaaggccaaagccctggggcaagaacaagcaccgccccctttcctgtaaatgctctggagtccgccagacacccattctccggaggaggaaact

SEQ ID NO: 88676 - DNA, 122 bp, Homo sapiens
tactgccagctgtttgatcacaggcaaaattactcgaagccttgagcctgttttctaaaacgaaggtaatatctaccttcagagtttactgtgaaactttgatgtcatcatgtttgtaaaag

SEQ ID NO: 88677 - DNA, 122 bp, Homo sapiens
ttggcacaacctccccaaagctcccaaagactctcggtgcccaccagcgacagcgcacaccgccaccacctaacagcaagaatgcagcggggtccgcacatcagggcgggcactgagcggaa

SEQ ID NO: 88678 - DNA, 122 bp, Homo sapiens
ggcacgaggaggcaaacgcataaggcacaaggcaagaacatgcagagcagaggacaaggccgatggacggggaggctggggacacactgggcagcctaacccaaccctgcagggaactaagg

SEQ ID NO: 88679 - DNA, 122 bp, Homo sapiens
agccacaagaaaatatccatgcaatgaagtatactgtagaaacattataggactcaaactcgtggcatatccctcttaggtttttatcttggctctgggagacccaagactcaaggtaaaaa

SEQ ID NO: 88680 - DNA, 122 bp, Homo sapiens
gtgtgtgtgtgtgtgtgtatgtgtttacctccgccctttggagggagccttctgggtacccgctgatgggtcctgctttgatgtgctttgagctttggttacactgatgaattaaacatttg

SEQ ID NO: 88681 - DNA, 122 bp, Homo sapiens
gcctgcccgcagcgcagacaggaatgtcaccgtggtctcccaggctgaatgacaaaagttcgtggactgccccctccccgcctatcctccacccacgcgtaccgccccgttcccccaccgtt

SEQ ID NO: 88682 - DNA, 122 bp, Homo sapiens
tcatgggcttcacaggccacgtcgctgaggacactgtaagattgcacttagggccaggtgcggtggctcacacctgtaatctcagcactttgggaggccgaggtgggcagatcacctgaggt

SEQ ID NO: 88683 - DNA, 122 bp, Homo sapiens
ccgtttctcggctctttcgcggttgccggcgcgctcgggacaggaggaacccgcagcccgcgggagtcagcggagacccgaccagcactatccagccctctgcaccgcccccgcggcgaggt

SEQ ID NO: 88684 - DNA, 122 bp, Homo sapiens
gaaactaggccaagcaacccaagaaccaggagctagttacaggatgggaaatgtatctgacgcacattttacttatttaaaatatttaaacatgacaacctttgttaaacaacctcaaggta

SEQ ID NO: 88685 - DNA, 122 bp, Homo sapiens
ggaccaggcccaaagttgactacctacctcggggcgtccatgctgcggcagcgtgtgtggcgagtcagccaaggaggactgagcatgtgaactgcgagcgttcccggccgctgcggtgcgag

SEQ ID NO: 88686 - DNA, 122 bp, Homo sapiens
atgctgtagggtggagctagccttcccctaagagctgcctggaaagctgtatttgctgcacgtggaaatctccgttattttccagcacccaacagtagcgtaatgggagtaacggacttaac

SEQ ID NO: 88687 - DNA, 122 bp, Homo sapiens
attacaggcgtgagccaccgcgcccggccgaaaggggggatattaatcattactccaggacgacagagggaaaatcgctttgtactggacaaactggaatgtctgaccaaccattataaagt

SEQ ID NO: 88688 - DNA, 122 bp, Homo sapiens
tcaacacagttgccaagcagtgtgctgttgatagccactctgccacccagcaaaggtcagcgggtctggaagacagctctttgacaaggagatcatgatctaacctccgggccaccaaagat

SEQ ID NO: 88689 - DNA, 122 bp, Homo sapiens
ccctgcaaggtgtcttacgcttccgcgggtgccctaggttgccaagggcaatggggtggtcggtgtcccggccgcaagattttttaaaaagctacaatttgaaagagaaatctcaccgcccc

SEQ ID NO: 88690 - DNA, 122 bp, Homo sapiens
tgcaccactagccctctaccatgctgagctgagcctcctccagttcccctgctgcaagaccgttcctgccttgggacctctgttggccctgctgttggaacctgctgttggcctgcctggaa

SEQ ID NO: 88691 - DNA, 122 bp, Homo sapiens
gcaagaccccggtggcccaggagaggaacgcggccaaggcggcccctgctttcccttccacggaacacctctaaccccaaatacagagcacgatgggtggtgaagggtgctgcagaagtaag

SEQ ID NO: 88692 - DNA, 122 bp, Homo sapiens
aaatcattccactccaaggaataaagtaactaaaaatacatatacctaataaaaccaaaccgctgtgcaccaaaaaggaaattagtaatagaaattaagaatgccggctgggcgtggtggct

SEQ ID NO: 88693 - DNA, 122 bp, Homo sapiens
ctggtgtccctcttctatgctgtggtcacccccatcctcaaccccatcatctacagcctgcggaacacagaggtcaaagctgccctaaagagaaccatccagaaaacggtgcctatggagat

SEQ ID NO: 88694 - DNA, 122 bp, Homo sapiens
tctcgagccgtcgccgtcggactcggaggactcggagagcctgggcggcgcgtcgctgggcggcctggagccctggtggttcgccgacttcccttacccgtatgccgagcgcctcgggccgc

SEQ ID NO: 88695 - DNA, 122 bp, Homo sapiens
acgagggcgaacaaaggagacagcaaactttatactgcccgggaacgaggctgaaggacccggatggaaacggagcttagaatttgaaacgcaaagggaggggggaagtagttcccagtctc

SEQ ID NO: 88696 - DNA, 122 bp, Homo sapiens
cccttgcaccccagaggcctgcctaggaccaccctgggaacaaatgtctcgctcggaaaacgaggtgaacccggaggatgtcctacgcatcatacccctccccttcttgagaaggctttttc

SEQ ID NO: 88697 - DNA, 122 bp, Homo sapiens
ggaacggcctcacgacctctggtcatgccgagtccagctgctcagcctcccggagccccacgccttccagacctatgcatcagcgagggctttcgctgatctctgcctaggctccagggtga

SEQ ID NO: 88698 - DNA, 122 bp, Homo sapiens
aaggcttaggagtcacctacgtaggactcttgagagggcaataatcccctttccacctctcgagacccctcactgcccaactctggccttatgctggatcagggtccgagggcgctttgagg

SEQ ID NO: 88699 - DNA, 122 bp, Homo sapiens
cctaggttccggggactgctggctcactcactcccacactcgctgcccacagacactcctcgctggtggcatcgtggaactctgtgccttaaacgcccgctctggtccctctactcaagctg

SEQ ID NO: 88700 - DNA, 122 bp, Homo sapiens
gccccagcccgcttcactgcccggggtgggcgagtcttcactcccagaggggtgccatctcgccggggccgaggaggagggaggccccctcctcaagtttgcccaggctggagccctccagc

SEQ ID NO: 88701 - DNA, 122 bp, Homo sapiens
gccggggcggggcccactccaagttgccacgaacacgaatccgcagcttgtagatgtcagcgtgctgcccgtcatccggtgagatgggcagtgagtcaggaatgggcaggagctgcaggagg

SEQ ID NO: 88702 - DNA, 122 bp, Homo sapiens
aaagctgggaagggcaggtgacagctgccaccctccttgtgtgggaatttcaggagaactcgggcagacgtggcgccgtctctttggccagagaagaagcaggacatcccatcagctcagcc

SEQ ID NO: 88703 - DNA, 122 bp, Homo sapiens
tccccaccccggggcgggcagcaaaaatgtcttgaccagccgtcctgtgaatcctttctgcgtgagcttggtggctcctgaactgatagagctccttctgggggtggaggcaagcaagcagt

SEQ ID NO: 88704 - DNA, 122 bp, Homo sapiens
ccgtattttccaccgcgctgtattagtgagggctctttgtgtcacttctgtgcataactccgccccaagttaaaaggctcgctgctctcgacaggtcctcctcctcctcccgctaggtcctc

SEQ ID NO: 88705 - DNA, 122 bp, Homo sapiens
ccatggaaggccctgaatgggacgccgggaccacccagcacccatcaagatacaatttcccgcttttctgttctgagcgagcagaacgagacagaaggaagaagagcgtccttcaaagccgc

SEQ ID NO: 88706 - DNA, 122 bp, Homo sapiens
cagtggtcccccaattacgcttcctcactaagtgtctgagggagcatttgcccagcatcgcgattcctttagcccagagccctccctgagcaggcccaggatatagaaatggtccagcgttg

SEQ ID NO: 88707 - DNA, 122 bp, Homo sapiens
ccaggccgcgggtgaggaggcgccaccaggcgtgcggtccgtcaaggtggtcctggtgggcgacggcggctgcgggaagacgtcgctgctgatggtcttcgccgatggggccttccccgagg

SEQ ID NO: 88708 - DNA, 122 bp, Homo sapiens
cgcctgcgtctctgctggggtcggactctgagtcagttctacaggccctgggaaactgggcgtccaggctccgaggatggtactgaacctggcgcagccgtgggagggtgaaccaggtgccg

SEQ ID NO: 88709 - DNA, 122 bp, Homo sapiens
gtgacccagtgtgactgctgtagaatccacctgccctacatatcaggcgattgaaatcaccgaggcactcaatttagaattagaactgaaaggttgttctgactggatgcaaataacttcaa

SEQ ID NO: 88710 - DNA, 122 bp, Homo sapiens
gagcccagtagatggcggccacggaccaggccaggccgatgcccaggaagacattgacggcgttgctgcccgtcacgttgccaatggaggcgtctgcatatacatcctggagggcagcagct

SEQ ID NO: 88711 - DNA, 122 bp, Homo sapiens
ctctcatctgttttgttttgcagacagagcttctaccctggaggaagggaacccaacagacgaagtccccagtacccccttagccctggagccaagcagcaccccaggttccaagaagagcc

SEQ ID NO: 88712 - DNA, 122 bp, Homo sapiens
gtaagtgcgccctgatccaagccaggcagaggtctgaacaccccgatgtccccgagaacacgcgttaactgaaaagtcagggtggagggatcctgcacattccttcaggtccaggatcctga

SEQ ID NO: 88713 - DNA, 122 bp, Homo sapiens
ccactggagcagctcaaatcccatgactgttgatggaggaatatataggtctgcccttcccgcctccccactataattaaggacatttgtgaaggaccattccagatttatatacacctgtg

SEQ ID NO: 88714 - DNA, 122 bp, Homo sapiens
aaataaactcctctcccaagtatctctctataaaacagaatctctccctacaatgtaattcggtttctttgctaatccctaagcataccgttccttccttccaaatctcctgctctgatctc

SEQ ID NO: 88715 - DNA, 122 bp, Homo sapiens
cgagggatcgagggaaggcgccaatgcacgtctgtccctccgtgatccgcgcagaagggacgcttgaagactggggtgcaatgaattgtcgacttccctcagctctcagcccttttcctccc

SEQ ID NO: 88716 - DNA, 122 bp, Homo sapiens
tcttggttgtctaggaaatgatcagttactaagaaaaaagtaagagagtcagttgcattacgcacagacttgtgctcagaaaaggggtacaaggcagccttatattccaggtaagatggtgg

SEQ ID NO: 88717 - DNA, 122 bp, Homo sapiens
gatcgcgccactgcactcctgcctgggcaactgagcatgaaccctcctcaaagctaatggcgcttcaaaattctgcagtgcaaagaagttgctggggttgcggagcggagaaccgccaggag

SEQ ID NO: 88718 - DNA, 122 bp, Homo sapiens
atgctctgttcttcaaagatgttagtcttcaggaaatcaggcagttctttgattctgtgacgagctaagctccattcaaataatttatttcactgggcatgaaagttctataaagttgccta

SEQ ID NO: 88719 - DNA, 122 bp, Homo sapiens
acggaggagccgaagtcccgcagggtggggtccccgcctgcgccgagagggccacctggtcgagagaacaggcgacacggaaacctgagaaactcctctgtctggtgcacctaaccctcttc

SEQ ID NO: 88720 - DNA, 122 bp, Homo sapiens
gattctcccagaacggtgccagggcagtgcttggtcgggtaggctgtgggtggcagtcttcggcttaacacaagaaattgccagaggctggctcagggggaaatgagctgcccagtcctgga

SEQ ID NO: 88721 - DNA, 122 bp, Homo sapiens
agacaccggggacacctgaaaggcagtgtgggacaacggcaggagccctggccagggacacgcacaggaggacccgcacagcctgacctgccccaaggccttggagagtcacttcctcgatc

SEQ ID NO: 88722 - DNA, 122 bp, Homo sapiens
ggaggagaacgcggaggaactgcaaattcctgcctctcccagcaactgtgaagggacctacgttgattgcgtgcccaccacacatctttaccacgtatgttgtattgtagggagagtggttt

SEQ ID NO: 88723 - DNA, 122 bp, Homo sapiens
cagccgcctccctttctggagtgaaccgaaagcaacgcgacctgcctttcatcacgcagccggcctggcagtacccgtctccaacagggctggggattgcatttacattcacacctgcatac

SEQ ID NO: 88724 - DNA, 122 bp, Homo sapiens
aatttcttttcattattcttcacttccatagaataactatgatataatctgaattggctacgcaatagaaacactagtcagtttctcatcatgctccacaacatcaaaaatgttttagtaat

SEQ ID NO: 88725 - DNA, 122 bp, Homo sapiens
cttaacgtgggtagcgctcccagggggtgaggccagaggggtcctaggcttcctaaagaacgcatcatgattccctgccttccacctcccctagatcattgcctaccagccctatgggaagt

SEQ ID NO: 88726 - DNA, 122 bp, Homo sapiens
actataaagtttctctggctgtgtgctattcgctgcgtccacagcagtgaagaagacagacgcagcccctgaccaacctcgccaagcccgggcgccgagccaggacgttgagccaagtcccc

SEQ ID NO: 88727 - DNA, 122 bp, Homo sapiens
aggcgctgccctaggagccaggagcggcagatactgcctccccttcaaggccctcaacggcggaaagagcaatcgctgcatactgatgacagggaacagccacctcttccacaacccagggc

SEQ ID NO: 88728 - DNA, 122 bp, Homo sapiens
gtgtggatcttattttccacgttttgcttgcgagaaaactgattgtgaaaaagtactctgcgggagatggccggtgaaaggccccgttgaccacaggtctgaagtcacaggctcttaactac

SEQ ID NO: 88729 - DNA, 122 bp, Homo sapiens
gggccctgcaggggcggggttggcagggacggcgctggcgggtggcggagacccggggggcgcagggatcggcttcccccgaggcctcggcccccgcccccgccccgcggattggccgctga

SEQ ID NO: 88730 - DNA, 122 bp, Homo sapiens
gctgcgctggcagctgcatcactaactggtgaaatgacaagccaccttgccagcaccacccggcctgagccctggggactcatgatgcctgcatgatgactcttcttggagggagacagatg

SEQ ID NO: 88731 - DNA, 122 bp, Homo sapiens
cggttagagtgcattattgcttatggtgtcaggacatggaaagaagtatggtatttttggcggggtggggatgatcttggtctccttatacacttccatcatgatgtgggtatgtctttgag

SEQ ID NO: 88732 - DNA, 122 bp, Homo sapiens
acgcgggggttctggtgcgcacttacgtgcagtcggatgcgctgggtgagttcccacacccggtagatgtaagggaaaaactgcattacccagaaggcactgccccttgcgtcggccgcgga

SEQ ID NO: 88733 - DNA, 122 bp, Homo sapiens
atgtatttacttatgggatgtgattgtggtattggttacatccgccttggccaatcttcccgcctcggtctcgcgactacaggtgggaaccaccccacccccactaatattttttgtttttg

SEQ ID NO: 88734 - DNA, 122 bp, Homo sapiens
ttaacattatctgaaattgtctgttcatttattggcttgcttattattatatatcttcaccgccactagaatgtaaatttcatgagcatggcaatcttatttgcctcagtcctgctgaatgt

SEQ ID NO: 88735 - DNA, 122 bp, Homo sapiens
gcatgcctaggaattgcttatttatttccctaagttcctgcatgcagggttgttcatcttcgagtatccttagtgccggcacacaggagctaatgaatacatgctgagccaaatggactatg

SEQ ID NO: 88736 - DNA, 122 bp, Homo sapiens
aaattcaacatccccatccccctcccagccatttccgccccacattacagacgcagagtccgcaggccaatgggagctcccagaggcttcaagggcccgccttccacccaatcggcgctctc

SEQ ID NO: 88737 - DNA, 122 bp, Homo sapiens
ggtgccttggctggggcagtcttgggatggccatcgtccacatccctgaatggggcaagccgggaggggttgggtaacacctttattgagatacaactcatacgccatacgattcacccatt

SEQ ID NO: 88738 - DNA, 122 bp, Homo sapiens
aaatgtggagagaggggagggtactggaagttggtaatcacatgtgttcagtgacaatctcgatgtaagggtccaacaattgtattgttcttcacacatgaaagggacattcaagggcccca

SEQ ID NO: 88739 - DNA, 122 bp, Homo sapiens
ggaacggtcaacactcacagccaggggcgcactcgcacacgccggccggacggcgggggccgaagcaacacctgccccccagccgggaactgatggccgcacacgccattcacgtgtctcca

SEQ ID NO: 88740 - DNA, 122 bp, Homo sapiens
tggaaatccaagagaaacacaattcaggtagtggaacaaacaaggcaaagcactgaggaccgagtgtgtctgggatgcttaaggaacaatagggaggtcatgggcagaagcaagaagactag

SEQ ID NO: 88741 - DNA, 122 bp, Homo sapiens
tgcccgctgggacgccgagttctgcggtgtctcagagcgcagcttcacccaggggctccacgtctcctgagtgctcatgaagggaagagaggcctgattgatttcttcaatgtagagaccag

SEQ ID NO: 88742 - DNA, 122 bp, Homo sapiens
gataggcatgagccactgagcccagcctgtcccactgttaatgttcctaaaaaccacaatcgtatggaagatagagtcaggtgtcaagcgtgagcctttaaaggctgtgaattatttttaca

SEQ ID NO: 88743 - DNA, 122 bp, Homo sapiens
gggagcaggaaaacgggggagagacagcaaaacacagacgcgggtgagccgtcgtaatttcgcaggaatccagtgctggaaacttcgctcgggagaccacccacccaccctttccggggact

SEQ ID NO: 88744 - DNA, 122 bp, Homo sapiens
acgtgctaaggtcagccacacatccacccaccgactccggaggacagacacatccagaggcggagctgactctgtctccacacatctggagtagacgggttggccaaggacaacatcctggt

SEQ ID NO: 88745 - DNA, 122 bp, Homo sapiens
tatagacaccgtgttcaggtctgttctagttctagttcctagggggtggctgcaaaaaaccggcactgaccgggagagggcagcagtgagccagccatctccagcacccgccgcgctcggca

SEQ ID NO: 88746 - DNA, 122 bp, Homo sapiens
aggggcatgagccagaggaagatctaggggtcaggatgagtcatcctgggggaagggggacgcagggacagggacagattccagaggtctgtttgaggtaaagcaagggcgtgggtgtgtgt

SEQ ID NO: 88747 - DNA, 122 bp, Homo sapiens
cagatgatgctccagaaggttaatgagggttttttggaggttttatgttgttgttgttgtcgatttatgacagacctttcaggagttaggtttttatttgatctctcagtggtttttcccac

SEQ ID NO: 88748 - DNA, 122 bp, Homo sapiens
cagtgtaattcatgataaaggcctgtttttgtttacctggagtcccagcccatgctgtatcggtttgattccaggcatgcaggggttgcatagagactgagtagccaaggtcagtcacgtgg

SEQ ID NO: 88749 - DNA, 122 bp, Homo sapiens
gcaccaattctgtaaatgacacccgagggcacactcaccaggttcactgcaagccctgagcgttttgcgtttggtgccccgagtgtaagcctaagtattctgtctccgacacgtaaaacaac

SEQ ID NO: 88750 - DNA, 122 bp, Homo sapiens
atccctttccttgaatcccagcaggctagaactaccccctcccagtcttcaggcttgccacgctctccacccgatccttccattgaaaggcagagaaggaaggatgtgcttgggaactttaa

SEQ ID NO: 88751 - DNA, 122 bp, Homo sapiens
ctcagggcctcggctttctccctgtaaagtgaggccacctcccttacctcggggctgcagcgacaatcactcaagaaaggaaaggagcagggtctgaggtggaatttgggccccaccgctga

SEQ ID NO: 88752 - DNA, 122 bp, Homo sapiens
ttggctctagctgtgattcacctttcgccttaggagcaactctccctacagcttctcagacgcatgaagcaggggtcccgcgaagggtggggctgtgtatttcatgagagtgtgcaccataa

SEQ ID NO: 88753 - DNA, 122 bp, Homo sapiens
gtagggacacctgggcagtgactgcatgccctggaggccacttggatcccaagtaaggggcgctttccctccatgtctgtaggaggtagaaatggcactggatttgggactgaggcaaaagc

SEQ ID NO: 88754 - DNA, 122 bp, Homo sapiens
tcttgcacaaaacaggcaatccatgcattgcttacattcacattctagtgggggtagtgacggaccataaaatcagcaagaaaaatgtatgttatgatagatggttatgagtgctttagagt

SEQ ID NO: 88755 - DNA, 122 bp, Homo sapiens
atctcaaaaaaattaataaataataataatagtcacccttccacctccatagcacagctacgtcatgaactgacaccttaaaactttgttctgttttcaattatctcttggtttctgatgcc

SEQ ID NO: 88756 - DNA, 122 bp, Homo sapiens
ggtgttgcacgaatccgggcggccgcggcgccggggcggggtgggcagagcattggtggtcgcggttggcgggttacaggtaggagagaaggcacctcggcgcttctctgaggagaagggaa

SEQ ID NO: 88757 - DNA, 122 bp, Homo sapiens
cagaaaggcagagtggcttgctcatagtcacacagagggttagtaatcatctaatgaacacgccaagcttattgcaggctttaaaattcctaggattcttggatttggcactttcaagataa

SEQ ID NO: 88758 - DNA, 122 bp, Homo sapiens
cgcggacagcgagagagaaaccggctcctccaaacctggtggaggagcgctgcagagaagcgccgggctgaggctctgggggccgcggggcgcgaaacgccgcgcctaccaggttatgcccg

SEQ ID NO: 88759 - DNA, 122 bp, Homo sapiens
ggaaaagaacgggaataagttgtctcttacatttcctcaaatactgtgaatggtctgaggcgcaggtcaggtgtatttaaaaacctttaaacagtattcccccgccccaaaaactggccttg

SEQ ID NO: 88760 - DNA, 122 bp, Homo sapiens
cgcctgctgctgtcgtcgggaggtgggtgaggtgacgcaaacagccccgttgttgccctccgcgtatcccctcaccacctttgcggccatccacgactttcgcaccttccgccattttcctg

SEQ ID NO: 88761 - DNA, 122 bp, Homo sapiens
gagaagcgaggcgagtggaggggacgcagaggggccggaaaagtcacccttctctggcctcgttttcagataaaaacgggagcctggctcggcatccgggcgcccggtgtctccggggcgct

SEQ ID NO: 88762 - DNA, 122 bp, Homo sapiens
gattgcaatgccgggtgctgatgatggcgcccgcctctttgatcatcttcaggatggtcccgcctagacattgcgggccacattagcgtccgcataatccggcagatctggatggcgttcgg

SEQ ID NO: 88763 - DNA, 122 bp, Homo sapiens
aaccagactctgctccagtgtaatatacaatccaggcatggatgcaggcctcatgacacacgagtcactacactatgataagcctcagggtgcagggctgtacagagtcctacaagagccag

SEQ ID NO: 88764 - DNA, 122 bp, Homo sapiens
ctgtcccacttctcactctctctctctctcttttttctttagaaagagctaggagacaagcgatcagaaagtattgacaaagttcgacagttactacctttgccgaaacagacatgtgatgt

SEQ ID NO: 88765 - DNA, 122 bp, Homo sapiens
ccttctggcggccggcacagaagcgagtttgcccacattctgtattcatgataaacagttcgctgtttgatcatatagcctctgtggaatgctgaattggtgacaattctccagcctctggc

SEQ ID NO: 88766 - DNA, 122 bp, Homo sapiens
gacaggagcctccagtctaggctcagctctgactcttcctggggaggtttgctccaccctcgtccttccaactagaacccactcccggtaggcctgtgcacgcccatcttttacagcagcag

SEQ ID NO: 88767 - DNA, 122 bp, Homo sapiens
cagctcctccgcatcgctactgctgttactactttccgaatcgctcactgtgccactgggcgccgccatcttgaaccaccgcaaaggattgtggagaacaccgccgttatcaagcctccttc

SEQ ID NO: 88768 - DNA, 122 bp, Homo sapiens
ggtaaggggtctcgagggaaaggcggagacaggaggggaagaggagccccttcgggaaggcgcctcatatagtctgcctctctgcctccaggaggagctgcagctgctgatcctgtcgccac

SEQ ID NO: 88769 - DNA, 122 bp, Homo sapiens
ggcttgcgcgccgcacagcctcaggccccgggttacttgattgcagctccctctgtttttcgcgcgggcgtggaggaagtcatcagcgtgaccatctttaactctccaagggaagtcacggt

SEQ ID NO: 88770 - DNA, 122 bp, Homo sapiens
gcagaaaacagaagaaccacgagagaaatggatcctgtctattaaggcaacgtgatgcagcgctaaaaggttaggaggttacgattcccggggctaagagaaataaactgctggtggtgaac

SEQ ID NO: 88771 - DNA, 122 bp, Homo sapiens
cactgaagttggccgggcacgtattatgcacagaatctgtgtcggggtgcggggacggagcgaccccccgttaccgggcggggcggggctcagggcaagcctacctgttgttccggatgctg

SEQ ID NO: 88772 - DNA, 122 bp, Homo sapiens
agagcccgtgagcagacgggagtgggtcggggggcggcgggggatcccacgtggaagcagcgtcctggagctgggtggggctgcggcgcggactacaaatcccaggggcgtggggcgggaga

SEQ ID NO: 88773 - DNA, 122 bp, Homo sapiens
aggtggtctttggtcaactgccgcctggaccaaggcaacaggaagtgagtacctctattccggaaactagttatgaaccctccccgccccccgtcgccaacattccttcgttcccctaaatc

SEQ ID NO: 88774 - DNA, 122 bp, Homo sapiens
ttctctggtgctgggtgctgctgagagtcgggcacgtccttctttggaggtttcacaggccggctgctctcccgccgctggcccagcttggtggtcttgggctccgggggcagcgagggtgg

SEQ ID NO: 88775 - DNA, 122 bp, Homo sapiens
agtcctacacgcagttctccaacctgtgccggcacaagcggatgcacgccgactgccgcacgcagatcaagtgcaaggactgtggccagatgttcagcactacctcctccctcaacaagcac

SEQ ID NO: 88776 - DNA, 122 bp, Homo sapiens
cgtggcggccatggtccagcacttcatgtggcaccctctgccccttgtggacagacacagcggcagccgggaactcacctgcctgctcttccccaccaagccttgaggccacagcgaagtac

SEQ ID NO: 88777 - DNA, 122 bp, Homo sapiens
aaactcaccactgtgaacccagacatgtgatatgctgattcgccagcttaagtcacttttcgacatctggggctgagactgccagaaacattgttgaaatggtggagggggctattcgtcaa

SEQ ID NO: 88778 - DNA, 122 bp, Homo sapiens
tttctttaccaaggtattgggagtcatacttggctttacaaggttcacatttattgaagacgtttttggcctggttggtattttcctataacttggcagctctaacccattgtaaccttggg

SEQ ID NO: 88779 - DNA, 122 bp, Homo sapiens
tccatgcttgtgtcccctcctgaagcctgcaggctgtcccccagcgataaaccgataaaccgtttgtgggagccctaggagggccccttatcagtcctggcaggcagcctgaaccaaggctg

SEQ ID NO: 88780 - DNA, 122 bp, Homo sapiens
cagggccgcagcgcctagaggtggggggtcgcccgatggccgaaggctgtgtgtgagcctcgccctcaaaccgcctctattgtgctagagtagggggcgcaaagaagagagtggcgaccttc

SEQ ID NO: 88781 - DNA, 122 bp, Homo sapiens
acaagcactccacacacaattccatgctactgcgcctgagacgcaccttatagttgatgacgacgttgttcttggctgtcatgtagtcggctatgttgtggtccacgatgaggcgcagcagc

SEQ ID NO: 88782 - DNA, 122 bp, Homo sapiens
ggctacgcctgctcgctgaagcgccgtacctggggccatgctggggccgcctcagggggccgcctctacatctcgggtggctacgggatctcagtggaggacaagaaggccctgcactgcta

SEQ ID NO: 88783 - DNA, 122 bp, Homo sapiens
accagcccctggcttcctcttgggccccccaaccatggtgtggtacctcccttcctcttgcggtctgtgagtatagcaagctacctttcaacaacaatcatctcctgatctgctgaccgcgt

SEQ ID NO: 88784 - DNA, 122 bp, Homo sapiens
ggagagtacagcaaaatctgctcatctctttcaatgaatattctccatgactagtgctggcggcggggaggcggagcaagctatcttttctaccagccgtgtcacacccctcctagcactaa

SEQ ID NO: 88785 - DNA, 122 bp, Homo sapiens
tacttgggaggctgcggcaggagaatcacttgaactcaggaggtggaggtcgcagtgagccgagatcgtgccactgcactccagtgagggcaataagagccaaactctgtctcaaaaacaaa

SEQ ID NO: 88786 - DNA, 122 bp, Homo sapiens
atccccagggcagaaggcacccccatccgtggcactccagggacccgccaggaacggcgtcgctactccctggtgaccaccagggggaggcagtgccctacttactggacagcgggggccgc

SEQ ID NO: 88787 - DNA, 122 bp, Homo sapiens
gacataccagaagcccgagcgtgtgtcgtggtagcagctgtgtgagtggccctcagcgcccgagtcctggcgcacacgtaccacgcccaccctccagctctgcagccccccaagggccacct

SEQ ID NO: 88788 - DNA, 122 bp, Homo sapiens
cctccgtctggggtggtcgtggggtccccagcaggacacgtaagtacctgtgtgttgtcccgagcatcacccgctctgtggagggaaccccgaggcgtgggagcagtgggtagtctgcactc

SEQ ID NO: 88789 - DNA, 122 bp, Homo sapiens
tagtgttgcacggtggtggcagtgggggtgcccgaagcaagcagctgcagcaagacagaccggatttctaatggcagctccctccaccctgaacagatgggctgcaaacctggggccttaac

SEQ ID NO: 88790 - DNA, 122 bp, Homo sapiens
aggcagagccacacaggcacgcggggtcctcttaggttgcgggcagccctggtgccaacacgacactctgagaagccctgggtcttccacatgagggcgtaaatatcctacattttaatctt

SEQ ID NO: 88791 - DNA, 122 bp, Homo sapiens
gttcgtcgggttcctacagttgtggacacgagtcgtcgcaatcccttgaaaagaagctagcggttttcaggcagctcacagtgggtaatgcagttataaggaaaagtttcccaacttgaaac

SEQ ID NO: 88792 - DNA, 122 bp, Homo sapiens
tcccacaaccctccagtcccgctctcctggcctctccaggcgcgtgttttgtcttcctggcgcaccaacatatacacttgtttatctgcacagcgccagcctaatatctgacccctgatgtc

SEQ ID NO: 88793 - DNA, 122 bp, Homo sapiens
tcagttcctggcgaagcctctcttctaggtttcagactgccctcttctttgttgtgtcctcgaatggcagaaaaagggtgagaaagccctttggggtctctttcatctgggcactaatctca

SEQ ID NO: 88794 - DNA, 122 bp, Homo sapiens
cgtcatctctccgaacacaaatattgttaaactcttggctgaactccctgtgcatgttggcgctgaaaaatgtgaggccgctgtgtgtgggccgctcgggcctcctgggctcgcaggacaca

SEQ ID NO: 88795 - DNA, 122 bp, Homo sapiens
cgcaccggccgcctgtagacttaccctgagccaagtggttttttcggataaaatctgtgtcgtctggatgtccaccggccaggatgcgtggtgcggcgccttgccggactcctcttttgcgg

SEQ ID NO: 88796 - DNA, 122 bp, Homo sapiens
cagctgtaccggcctcagaccacgacctaccacaacccgccacgctccgtccaatcagagcgcgccgacggaaagtgccccgccgcgccttacctcatgagatattattggtcaaccaacat

SEQ ID NO: 88797 - DNA, 122 bp, Homo sapiens
tccggcaaagcgagctgaaccctgaggggagccgctgaccagcagcatggaggaccccgccgcgcctgggaccgggggcccgcccgcaaatggcaatggcaacggcggcggcaaagggaagc

SEQ ID NO: 88798 - DNA, 122 bp, Homo sapiens
ttcaaaatgggaggggatccgtagggcttgcggaggcagaacctggcaccgggagatccgcgaagaaattattttgtgaaggtccagagaccgcactcatttgaatactaaatgggaaaagg

SEQ ID NO: 88799 - DNA, 122 bp, Homo sapiens
gctgcagctgctgctgctgccgcctccgggagggcccgggatgtgtcacaaggcaggaagcggggggaggggaggggagggtgcaggaccaggaggcgggggaagggaagcgcgctgggagg

SEQ ID NO: 88800 - DNA, 122 bp, Homo sapiens
cacggcctgttgggcgggagcgtggggcctgttggtcactgttgggcgggagcgtggggccggctcactatgcctcgctgggttggaagatatgcacaccagctgccgtctcaaacacgtcc

SEQ ID NO: 88801 - DNA, 122 bp, Homo sapiens
ggagccaacgggactgggttttggctgggtgcaggggaggttgcgtcaggggaacctagccggcggcgggctgggggtggggtgtactttgtccaaacctctcggctcctctggcgggcctc

SEQ ID NO: 88802 - DNA, 122 bp, Homo sapiens
agcccagatttcttttgtgggttcagttgagccccggggtctcggcggccggcggctccccgcggcactggctccctcttgtggctctctgcggtcactgcacacccgctgaacggcagtct

SEQ ID NO: 88803 - DNA, 122 bp, Homo sapiens
caccctactgcatgttgcaaagtattcctttaaaatgaagtgagtaaaatactgggatgacgttatctggagcccaagaaagatggctcatttggaaaggcctaatatcccaagttgcttac

SEQ ID NO: 88804 - DNA, 122 bp, Homo sapiens
ccccctgaacccttcctattggcccgaagagaagcaaggctccacgccgcacgggtcaggcgggcttcttattggacaatccaggctgtcagtcaccaggcgggcgacatgactgatacaaa

SEQ ID NO: 88805 - DNA, 122 bp, Homo sapiens
ctgcagtgtctcactgagcaccctaagcactcacccgtcaccctctggttccttggggcccggtgctggccttggaacactggtcccagtactcaggcagtccaggaaatagtctgtttggc

SEQ ID NO: 88806 - DNA, 122 bp, Homo sapiens
gcgcgcccccgcctcggtgcgcgctcctcgctttcgcggctgggcgcctcgcgcctgtcccgcccgactcgtgcctcttctgagccgcagccccagccccagccccaatctcaatctctccg

SEQ ID NO: 88807 - DNA, 122 bp, Homo sapiens
aagacccaggacataggacggacccctggtacccagaagaggagttcttgctcactaacccggatccgcctcgtgcccctgcctcctggagcttcccattccaggagaaaaggctccacttc

SEQ ID NO: 88808 - DNA, 122 bp, Homo sapiens
ctgctgctgccttcgctaccgcctgcgggggagccgggcgggacccgggggggcgggctacgctaatgaggctactgcataatcatgagctctggcaaggagggctcgcgtctccggacact

SEQ ID NO: 88809 - DNA, 122 bp, Homo sapiens
aagcattgctgcatagcaggaggagctgtgattttcgactgcagtgtaaatgactgacaccgtataccagcagggaaatgtgagacttggttcccaaacattgtcctgactaacagtgctcc

SEQ ID NO: 88810 - DNA, 122 bp, Homo sapiens
cacggggtgcagaggaggaagtgccattgccgggcccgccaagatgtcaccaatgggaaacgcgtgcctgcaggtgcggccccgtggcccgcgcgctgggcccaggcaggaagtgggggaag

SEQ ID NO: 88811 - DNA, 122 bp, Homo sapiens
taactcctcccccctggccccgcctctcaccctggattgcctaaggccccgcccaccaggcgtggccccgctctgggagggccgcaatcccgccaacaatgactccacccctccttccgctg

SEQ ID NO: 88812 - DNA, 122 bp, Homo sapiens
caagcggatggaaggccccgagacagctagtcccggcctactggcaagagctactcaggtcgctgccggatgggccgttgccttgggttacgaccacgctgggggcgggaccgcggcggaag

SEQ ID NO: 88813 - DNA, 122 bp, Homo sapiens
tgtgagctggaacagctcccatatggggcgggggaaagcagcaggagccattcaggtgtacgggtttgaggatttgtaaaggccatgtggaattacaaaataaacagaagggtgcttactgg

SEQ ID NO: 88814 - DNA, 122 bp, Homo sapiens
ataagaagttgagctctccacaatgtctgaggatgaactgttatctgtaatggacagtaacgcccgttctcctttggtgaaagtagatgacaggtaggtgtggtctgtgtggtcgctggaag

SEQ ID NO: 88815 - DNA, 122 bp, Homo sapiens
attcatgcctagcaactaccttatgaggtagtggtatttttatccctgctttatacataacgaaaattgaagtttaaagagactaagcaggggccaggcgcggtggctcacgcctgtaatct

SEQ ID NO: 88816 - DNA, 122 bp, Homo sapiens
ggagcgagggggcgggcagcctcagcctcacctagatagactgtccctggatgccgccggcggaccacggccagtgttgacccccacagggcaggacatcctggtgggccccctggcccgga

SEQ ID NO: 88817 - DNA, 122 bp, Homo sapiens
actcgggcaaggccaccttcgtcactgccatcacgtcaggtgaattcagcggagatatgacggccacagtgggtttcaacacgaggaaagtaactaaaggtcatgtcacaataaagatccag

SEQ ID NO: 88818 - DNA, 122 bp, Homo sapiens
gaagccgcaagccccgcggcctgagtttcaggggtaagagaatgcgggtgcgaggagatgcggcctccctcaagccgggaggcctcttgagaaagcagagacgggagaagagcgagctggtt

SEQ ID NO: 88819 - DNA, 122 bp, Homo sapiens
ttctccgctgctgctctgggaagaaggggcgctcggggtgcgtgaacgaggcggcggcggcggctgcaagcccgggaactccaatgccatgatccgcgcgcccctccccacccccccccaaa

SEQ ID NO: 88820 - DNA, 122 bp, Homo sapiens
atctctggaggaatccggcggagggacctgggccaaagcttcagcatccccttccccctccggctgccagccctggcggccctgccactgtttgtgattgttaggggagtgccgggcggaca

SEQ ID NO: 88821 - DNA, 122 bp, Homo sapiens
agggacttcccttgtcctgtctgtcgaaagacatcccgctaccgcagtctccgacctaatcggcaactaggcagtatggtggaaattgccaagcagctccaggccgtcaagcggaagatccg

SEQ ID NO: 88822 - DNA, 122 bp, Homo sapiens
tgtgcgtcctgctcgtgctggccctgggcctatactgcggccgggccaagcccgtggcaacggcactggaggacctgcgggcccggctcctcggccttgtcctgcacctgcggcacgtggcc

SEQ ID NO: 88823 - DNA, 122 bp, Homo sapiens
caaaggaccaaatcgagaacaacgttgatttgcctttctattgcttcctgtccagagtaacgatttgttccatatttcacttcccctcctcatttaccagtacaagaagatatttaacctaa

SEQ ID NO: 88824 - DNA, 122 bp, Homo sapiens
ctggaaaggacaccatgagcactgaaagcatgatccgggacgtggagctggccgaggaggcgctccccaagaagacaggggggccccagggctccaggcggtgcttgttcctcagcctcttc

SEQ ID NO: 88825 - DNA, 122 bp, Homo sapiens
aggtccgcgcgccgctggcaggggcagcaaatggcagccccttcccgcagcatccatccgcggctgcaccgcaccggggcattgtgggaaactccgctcactcccccgccccggccaatcag

SEQ ID NO: 88826 - DNA, 122 bp, Homo sapiens
gcagggctgtgcgtgaccccctgagtgggggaaggcaggctgttgccatggtggcctgagcgagcagaattcctccagggtgaagtgggagatatttatacccggggtcaggccgcgagcgg

SEQ ID NO: 88827 - DNA, 122 bp, Homo sapiens
ctatacatcaatgagaatgcttgacagttgtgtatcagcccacttcctgccccccttcttcgtctttaaaaacctgcttgtagcaaaggccagacagagctcatatccaagcctgctggtgg

SEQ ID NO: 88828 - DNA, 122 bp, Homo sapiens
cagccctcggtccgggccctgggcagggagcaggccgccaccctgtgctgaccgtgctgccgggtgctgtctgtctgttatatagccctgtcagtctgctataaggccggaccgggggcgga

SEQ ID NO: 88829 - DNA, 122 bp, Homo sapiens
taaggagatgcagggaaggcttctcatctgagtcggtagcagagtacatagtgcaagaagcgtgggcaggctcccagcgcacccagagatcaaggagagtgatgggtgctgcccgcctctga

SEQ ID NO: 88830 - DNA, 122 bp, Homo sapiens
gctaggacgatgggacatgggcttctcttcgaggaggtaacatgtccgcgccctgagccacggctctctgggcgcggccatcttggtagatctgccgtacagaagggaaacagttgttcttg

SEQ ID NO: 88831 - DNA, 122 bp, Homo sapiens
tatcaaaggcctggtgactcccgggctgcaaattggcaaagcgctgctaattgtcgccgccggatgggttttggggggactctttgcacacggcttccctttccaaacgatcgtacaaaagg

SEQ ID NO: 88832 - DNA, 122 bp, Homo sapiens
tatttctgaagtcaacgtagttctgtcatcagaggatgctgtacttttctggcgcaggtgcgagagaagctgccaatctctcctggagcgggtgggactaaggagggccccgggagctgggg

SEQ ID NO: 88833 - DNA, 122 bp, Homo sapiens
catcttctatcaattagcactggtctccttatgggctcctcacctggagggggtgctcctcggcccataggtgggggaggacccccacggccaggtgggtactgggttggagccccggcaat

SEQ ID NO: 88834 - DNA, 122 bp, Homo sapiens
tgacgaggcgctgtgcccgcagtcctgagcggacgcggacggaaactcagcctggccaggcggtgacttaaaacgctgcccaggatttctggggaagggtcttccccatctcgggcggatag

SEQ ID NO: 88835 - DNA, 122 bp, Homo sapiens
ccacttgaacctggcattttccatgcctgttgatgagtgtggcagagccgttttacctaacgcagaataatctgctcctgcatctaacacagcctacggagcccggtgctcctgtcttcgtg

SEQ ID NO: 88836 - DNA, 122 bp, Homo sapiens
agaccacgaactcctcgagagaagcgaactctggacgtgacacttttaggagctgtaacacggcaaaggtctgtggcttcattcctaacgtcagagagacaacaaactcaccgggaaaaatg

SEQ ID NO: 88837 - DNA, 122 bp, Homo sapiens
gccggcgatcgacaccaggaagtaggcgagaaacacgttcttcagcttcagcttcatggccgcgccgccgcccgcgcccgagcaggcggggtctgcaggggacgaggggttcccgccccaaa

SEQ ID NO: 88838 - DNA, 122 bp, Homo sapiens
cgggaggccgcgaagagggtcgggcgggaggggaggagacggcggagcagccaatccgcgcgcggcccatcagctgaccgcctttgcttacaccaggtgcacgccggctgcggggagcacaa

SEQ ID NO: 88839 - DNA, 122 bp, Homo sapiens
gtgtcggagactctggcaaggcccgcgcagccgcagtagagggccagggggcggggcacgcgcacctgccgtagagtgctgaaggtcctgccaacggctctcttggcgtctcaacgttcgga

SEQ ID NO: 88840 - DNA, 122 bp, Homo sapiens
gcagaggtgggcaaacttactgtaaagagccaaaagaattttcggctttcccaaccatttcgtctgtcataattacttaactctgccatagttgcagtgcaaaaccagccatggacaataca

SEQ ID NO: 88841 - DNA, 122 bp, Homo sapiens
atctccagaatttattctgcctacaagaagttcttatttttgaatttcaaactggtcacccgtgaaacatcttaagatgcagattcctggatgggtgcagtggctcacacccataatcccag

SEQ ID NO: 88842 - DNA, 122 bp, Homo sapiens
tcccctttcgggcccgaaaatgtctcaaccccgggactccagatccccaacgctccttcccgttcgcatgagaacacacagctcccacttccggggccctgcggaagtcccgcccccgcgcg

SEQ ID NO: 88843 - DNA, 122 bp, Homo sapiens
tgaaaaaaaaaagagagagaaaagaaaagaaaaagaaaagaaaaatgatatacacagggtcgtgaggattagtgataataatatacagaatggaacagatgacagtcaaacaaaataggacc

SEQ ID NO: 88844 - DNA, 122 bp, Homo sapiens
attgtgaaaactgcataaaatatgaaccagggagtgaaatattagcagaggaggtgatagcgctccaagaagagagagcagtgtaggcaagttaggaaacacaacttcaacatcggacctgt

SEQ ID NO: 88845 - DNA, 122 bp, Homo sapiens
ggccgactgccttgggtgtcagccacatctgttgagatgcgtgtgcctgacgcccgaacgcgtgccagcgttttctgcgagctgtcatgtgaggggcctggggcgtggcctgctgcgagtgt

SEQ ID NO: 88846 - DNA, 122 bp, Homo sapiens
tggtggctgggagggtgatgaggtcggatgagcttctcctagacccctcactgggagcctcggaggccgtctgcgggggcagctccgaatcctcactcttggagcccttgagccctccacgg

SEQ ID NO: 88847 - DNA, 122 bp, Homo sapiens
cctggactgcgctgtcgctcaccgacccgcaccaatcaccatgcagcttgccctcggacccgccccttttagggcgtgtccccagtgagtgatagacggagccgccctgccctgctcagccc

SEQ ID NO: 88848 - DNA, 122 bp, Homo sapiens
tgaaggactggacacgaggcgtgaaaagcactgaggaatcaaggatgacttggaggtttccggcctgagcaaccagaaggctcaagttgccatgacgggaggctgaaagagcaagtggatct

SEQ ID NO: 88849 - DNA, 122 bp, Homo sapiens
ttggtagctgacggtcacgtcggagataccagtagtgttgccgccggtctcaaagggagccggtggtgatgtggtgttgttgccctgaccagggctgagcacatccatgcctgcgcgcccgg

SEQ ID NO: 88850 - DNA, 122 bp, Homo sapiens
taaatttgattgaatttgaaggtataagggaatttcaaatgaaactttagcctctggtgacgttgccattgatgaatatgatgatagacatcttttcagtagcctttctacctcatgggatt

SEQ ID NO: 88851 - DNA, 122 bp, Homo sapiens
tcattagcatctgtaagacccgtgaagggaagctgtgacaacaaactgggtaaagcttctcgaactttcttttgggtttgcaaaacagtacggttatatggggatctccattaaaggagccc

SEQ ID NO: 88852 - DNA, 122 bp, Homo sapiens
acaggtattgtgcttcttacgcttaagttttctgatgaagtctcattcataggatgaagccgctgtatttgaattctggggtgaacacaataagctgcacagggaacagactcaggcgctgc

SEQ ID NO: 88853 - DNA, 122 bp, Homo sapiens
atttttgcatttgagtgaaactactgtgatttctgaagaccaccttccttctttcccagacggtccctgaggaattacagaatggtcgaggctttggttatgtggtggccttccggccctac

SEQ ID NO: 88854 - DNA, 122 bp, Homo sapiens
ggggcaggctggggacttgagcactggacaaagaagttcacccaagggacaatctgcccccgtacccccactgccaccagcttcccatgaagtgggctgagttggggtggtgagctgggcct

SEQ ID NO: 88855 - DNA, 122 bp, Homo sapiens
tttctttgtgggatgcggtggaaggtcggctgatccccccttcggagtcattaattcaaacgtgtactccgcgaacgtttcccggactcccgtgtgcaattatcgacgctaggccttgggga

SEQ ID NO: 88856 - DNA, 122 bp, Homo sapiens
ctcagctcccagccagggcacagacagatcagcacctgcggttgtctccaccccaacccccggcctttgcaggcacagcgccctccaccagatactccggcaaaggaggcctggggaccctg

SEQ ID NO: 88857 - DNA, 122 bp, Homo sapiens
cggctcttagcatctcggtttctagagcgttggcagggacatgcagctctggaagctgaccggcgggtgcccgcgggagacagagcgaacgcagtgctggcactgcgtccctggcctgcgcc

SEQ ID NO: 88858 - DNA, 122 bp, Homo sapiens
ttattatcatttttttgatatggagtctcactctctcacccaggctggagtgcagtggcgcgatctcagttcactgcaacctccaccgcctgggttgaagcagttcttcttctgtctcagcc

SEQ ID NO: 88859 - DNA, 122 bp, Homo sapiens
ctacattatgtgctacctaggaaaatctgggcctgggcccaggacacagaacttggtgaacgaggccagagggtgtgccacacacctccagtgggcactctggacttcaaggtagaagaggt

SEQ ID NO: 88860 - DNA, 122 bp, Homo sapiens
tggcgggtaggtataaggaaagccaaaagcactccaagcgaggctgcagtattgcgcacgcgcagaaggtggccgcggggcggggcctgaggcgaagcaggccccgcctcaaactgcgtggg

SEQ ID NO: 88861 - DNA, 122 bp, Homo sapiens
tatctgcaaaaccaatgtaattaaatctcaagcgaccttctcagactcaagtctgagacacgaacgagcattaccgtctttaagtttctctttcccggacttccggagaaggctacctccgg

SEQ ID NO: 88862 - DNA, 122 bp, Homo sapiens
acttaccacatagggacattgggaacattaaattgtttgatgcagataaagccctttagccgaatgcatggtacagaaaaagttcaacagaggtttaacagcaggagcctggggaggagaaa

SEQ ID NO: 88863 - DNA, 122 bp, Homo sapiens
accctgcagcaggacccgagccccctagcctgagtttctgacccgagtaccacgcattttcgctctgggataaagagaatggaatttaaataatgcaccattcccacctttggaaggactgg

SEQ ID NO: 88864 - DNA, 122 bp, Homo sapiens
tgagaagcggccgccaggtctattgtgatgggtccacttcctccaagacgagccatgatccgaacgagcctccctcacccctctgcctgccgtctcatctaagaccctcagaccctgagtat

SEQ ID NO: 88865 - DNA, 122 bp, Homo sapiens
cttggcgactctccattcaggaagtgccttctcaaaggaagctggtcccagctggccttgcggcatgactcagcttttctctgtgatgtgtcgcggagttgccgatagggttcggtgtggcg

SEQ ID NO: 88866 - DNA, 122 bp, Homo sapiens
taacagctttcacaaggccattatcagtcatcctttatggttaggaaatcggaagtgttccgttctttccacttttgaaagtgggaaagaagaggggaattttttctcctctccagactaga

SEQ ID NO: 88867 - DNA, 122 bp, Homo sapiens
agatgtgccacttccagcctgggccccaaaccccttgccactgctgcgttccacaggaatcgccaccaccgggtcaccgccagtgaccattctagatttaagaacgtcacttactatcaaca

SEQ ID NO: 88868 - DNA, 122 bp, Homo sapiens
aggaagaaaattgccaaaaccgagttgatgaagtcccgagaagcacgaggtacttctctccgttccagataaatttgcacgacacaagaagcgtgatttgaaactaacgatatatgttattt

SEQ ID NO: 88869 - DNA, 122 bp, Homo sapiens
cccacccagcccccgcgccctacctggtcgaccttccgcagcctcagcccggtcttgccgcgctcgtccttgcacaggtggatctcgcgcaccccgggcttgatctcagctcgccgcacgcc

SEQ ID NO: 88870 - DNA, 122 bp, Homo sapiens
gattccggctcccgcggctgcaggcgcgcggctagagtgcctggcgggctccggcttccgcgtccgccccggccccggtccagacttagtcttcagctccgcgcccgctccgccgcggccca

SEQ ID NO: 88871 - DNA, 122 bp, Homo sapiens
cagccacgcccagcccgtgtaaacaggtgagcgacggcccaggggcctcgaggctgggctcggccatctccactgtgctcggtgggctctgggcacccaggagcgacaccgcagacctgtgt

SEQ ID NO: 88872 - DNA, 122 bp, Homo sapiens
aatcctgcccggcacacagcctggggcacttgcatggagccagtgactttttggtgtgtccggggacagactgcactatggagagggatgtcagggctgcccatgctctccggaggcagaag

SEQ ID NO: 88873 - DNA, 122 bp, Homo sapiens
tatcagagtcaaacaatagccatcggcagtgatgctcacacaacaatggtctacaaataacgtttgcaataaatgttgactcttgtacaaattataagctgggttttcctaagatactttaa

SEQ ID NO: 88874 - DNA, 122 bp, Homo sapiens
tctcaaaacaaacaaacaaacaaaaaaaaaaacccgtcataatcttcctgttgctttttccgattagatggcgacttgaatttttagggaatacatccaccagtttgggcacacccaccagg

SEQ ID NO: 88875 - DNA, 122 bp, Homo sapiens
cctgatccccaggaggaggggacccggctgcctcccggttggggccgcgcgagggcggggcgcggaaggatccgggagggccgtgctccgccacccagtatatatctgtccccagtccccgg

SEQ ID NO: 88876 - DNA, 122 bp, Homo sapiens
tcttaagagcaggggcttaggacttgtaaggtcagactgttaggccctttccatgggtgccgagttcaccaagaataatgggagagggaaatgtgagcctggcactgaagtcctggaagaag

SEQ ID NO: 88877 - DNA, 122 bp, Homo sapiens
ggtcggaggctgcgaagagcagggcaaaccagggtgccatttccaggggcagggaggctccgagcatagggcccagggtgaagcccagtgagaaggccaccccaatgaccgcctagggaaaa

SEQ ID NO: 88878 - DNA, 122 bp, Homo sapiens
ccctgccgccgcagccgccgggtgggggaagcccccgcccccggccccggcagccgccgccgctgcagccgctgctgcagccgccgccgccccttccatgttcttgttgagctcgtcggcca

SEQ ID NO: 88879 - DNA, 122 bp, Homo sapiens
gccggtgagtggggcgcagggcgcggcaggggacctggagccggggagacccgcagatggcgaggaaggaatgagcgagagagacggagagagagctggacacagcagcgagatggacagag

SEQ ID NO: 88880 - DNA, 122 bp, Homo sapiens
cttactctgcgtgcatccctggcctggtggacggaagatcgagcgctccgggtggacttacggccacaggacgggggcagagtcggcagggaggcccctccgaggcccagtgggccccgcgc

SEQ ID NO: 88881 - DNA, 122 bp, Homo sapiens
actcgtcctgcagctgccgcaggttctcctgcagagtgcgcacttcatccatgcggcccgcggccttggcctgcctgatgaatgatgtgatgttgtggatctgctggaggagcgggtctgag

SEQ ID NO: 88882 - DNA, 122 bp, Homo sapiens
aagggtatactttacgagtcccacaaaccaggtacacacaaaatccatatacataatcaccgggactaaacgtacagtaggtgatagacaccaaaacacaaataaaattaagacatccaagt

SEQ ID NO: 88883 - DNA, 122 bp, Homo sapiens
gagcacctccgtgccgcccaccgccactgaggagttgagcacctccgtgccgcccactcccggtgagggaccaagcacttccgtactgccaatccccggtgagggactgagcacctctgtgc

SEQ ID NO: 88884 - DNA, 122 bp, Homo sapiens
gcctcgcgggaggggcgcgagggcccagggcccgcccggcctcgctgcctgccggcgcagcgccgccaaacccgcagccgggatcccaagcctgagccggtacctccgcccggccgccgact

SEQ ID NO: 88885 - DNA, 122 bp, Homo sapiens
ccccggtatcattcacctgtttctccgacgcttactgctcagtgtctgattcacaataggcgctcaataaaacattattgtcctgaattaaattcccggggaaggcgcgccctcggggactt

SEQ ID NO: 88886 - DNA, 122 bp, Homo sapiens
gcgcgcttacgcatttagtgagggtttggcggtctccatagttaccgccgccgcgcgtgacgtcatagtggagcgctgagggcttggtggcgtggggtgggggctgtcctactgatcctgaa

SEQ ID NO: 88887 - DNA, 122 bp, Homo sapiens
cctccccagctgcgaagatgacctcctgggcaataccaagcccaggtacttctacacatccgcctaacttgggaatgagtgtgggagaaaatcgccactgccaagatggactccagaagaag

SEQ ID NO: 88888 - DNA, 122 bp, Homo sapiens
gtttctccccaaagaggacagagggtggcgcggagggccccggcggccaggccagccccgcgcctacatccctgtcagctcctgggccggtgggcgcctgtccggctgagtggggtcgctct

SEQ ID NO: 88889 - DNA, 122 bp, Homo sapiens
taataattcttaggtaactctaaataaatcttaagtaacagagtattctctgatgaggctcgtccctgtcagtgccagtaactaaaagccaagatgttgcaaatgattcttttattattttc

SEQ ID NO: 88890 - DNA, 122 bp, Homo sapiens
agcaggaatcttcagtgatccacgggcagatctgccgccattgtgggcacctgtttctcccgcaacctttgtgcccgcctctctccttcccgtacctattgcatgaccccccacgtccgcct

SEQ ID NO: 88891 - DNA, 122 bp, Homo sapiens
ggggcagtagcttcctgtgactgccttgctcccgtcccccaccaggtcctggccttcttccgcttctctggactgctcctaggctatgccgtgctgcggctccggcactggtgggtgattgc

SEQ ID NO: 88892 - DNA, 122 bp, Homo sapiens
gttaaaattttgtttcttattttaaaagtgcatgtagcaacaaagtatgtttgatgtgaccgtgtttgcttaaaaagaaagtgagtattcatttatcactgtgcttgtgtaaggctcacaga

SEQ ID NO: 88893 - DNA, 122 bp, Homo sapiens
tacttcttatggagtataagctttgaagttggattatttgggtgcaaattccatctccaccgctttctagccctagaattatggacaaattacttaacttccctatgtctcaatttccttat

SEQ ID NO: 88894 - DNA, 122 bp, Homo sapiens
gcggcaacggccctgccgccggccgcagcccaggctatataaggaattacacgtacatttcggaccgaggggctcgctttggttcctgcgttatttttaaaacgacttttaagagaggggca

SEQ ID NO: 88895 - DNA, 122 bp, Homo sapiens
gaacaacgtgccctgcaacggcgataatcagcatcagccagagaaccacatgccccacagcggcaataaccagcatccaccagagaacgacgcaccccacagcggcaataaccggcatccac

SEQ ID NO: 88896 - DNA, 122 bp, Homo sapiens
aaaactcttagcaatctgaaagatccaaggtggtgtatgtaagcagtctttttaggcccccgaagatgccagacccctcccggacacccctatctgccctccatcaaatcttgccaaggcct

SEQ ID NO: 88897 - DNA, 122 bp, Homo sapiens
gaaaaaaggattcagcattaaaaggtcaagtaactgcgaccaaccagacacagtcttagtcgggtctggagaggaaacaagttcgcaaactgttagtctagtagtttcttcctaataagaaa

SEQ ID NO: 88898 - DNA, 122 bp, Homo sapiens
gagtctaaagcttccctcctgcttcatgtgcttcagaagctctagctttcattctccgttcgattttaccaaccagccctgagcaaacagacctccgacccttgaagtcaggaacacttact

SEQ ID NO: 88899 - DNA, 122 bp, Homo sapiens
cgcagccggccagctcagcggcccggggttggaaggaacgcaacatccatgcctgcctggcggtctcagcctctgaggagacgacacagggagctttggacgctgcaggtgtcttcaatatt

SEQ ID NO: 88900 - DNA, 122 bp, Homo sapiens
cacccggggaccgctcctagcccccagtgtgggacacagactccctgaggacctcgtatgcgttgggtctgtggctccatccgaatcttcatgaacagggcctgcggtgaatttggggagag

SEQ ID NO: 88901 - DNA, 122 bp, Homo sapiens
ccaaacttctatagagacttaacttctgcttttctggacacgcgtgggcacccagaaccccgaatggggaggaatgctgtagacgccctgctgccctccagcccgcgcggctgcgcgtctca

SEQ ID NO: 88902 - DNA, 122 bp, Homo sapiens
gctttatttgcataacgaggccacgtttttccagccaagccacactcgaagagtaagtgccgtcacctcacgctgcagttcggtaggtagagtccgccatttttccaccaggacagcccggg

SEQ ID NO: 88903 - DNA, 122 bp, Homo sapiens
aggggaagaatgtagggatgggaattactagcacagaaatacgaacaaacatggtttaagcggagatctatgagcagtttggtattattgggaaacaggaggcaggcagtggtggaagaagg

SEQ ID NO: 88904 - DNA, 122 bp, Homo sapiens
ttctccacatctgtgtggactatggcagacaatccataaaagctagttaacaataaggagcggctttgttactatccaaatggaaggtctgcacaaccacactgcctagctctaccacttac

SEQ ID NO: 88905 - DNA, 122 bp, Homo sapiens
gggccgtgtgggggagccctggagccctgtctgcgagttaccctgatggacagagagacgcggcaaaggcagggccggggaggggccgtgtggggcctggtggtcggcagaggaagggtctg

SEQ ID NO: 88906 - DNA, 122 bp, Homo sapiens
catggagaatatgaactggtaggcacttgccagactcacatccgtgcagtttaaccacttcgttttccagaaaatcacattctgaattccgtgaaatcaggcttgcaacaagggctgtgtct

SEQ ID NO: 88907 - DNA, 122 bp, Homo sapiens
gatgaccttggctaactgatcttatcccttgggccgctgtggcacaggatgagtgagctacgcctggtaacaagagtgccactctcgtgtaagggggctgcgaagtagaaaggaggccagcc

SEQ ID NO: 88908 - DNA, 122 bp, Homo sapiens
ttggagtcctgatagagccgcccctactttgctccaaagggatattaagaaaggtcaggccggacgccaggggctcttgcctgtaatcctagcactttaggaggccaaggcgggaggatggc

SEQ ID NO: 88909 - DNA, 122 bp, Homo sapiens
ccctaacgagtttccaggtagtgaccctagagattgtcccagagacctgccgaagaatgccgctttgaaattggggtgcatcaatgctgagtatcccgactccttcggccattatagagagg

SEQ ID NO: 88910 - DNA, 122 bp, Homo sapiens
gggggagagaagtagcagctggggctggaaggcagtagggtcattagtccagagcacccacgtctggagccctattcaggaacaagtgaatgctgagggtgggtgaggccagtgctgatact

SEQ ID NO: 88911 - DNA, 122 bp, Homo sapiens
gtacacacccacgacaaccaagctgcacagtggcctggcatggtgtgtccacagcagcaacgcaccggtgctggaaaccgaatttagactatttggagtgcacacaggctcacgaggctttc

SEQ ID NO: 88912 - DNA, 122 bp, Homo sapiens
acagagctgcctccatccccagggtgggtatgagatccgcagggtcacagggctgcctcccgtggagaggacacagtgaagccctgaagccagagacacctgctgcttacaggccctgaggt

SEQ ID NO: 88913 - DNA, 122 bp, Homo sapiens
cgaagcacagcgatgctgaagggacaggaaaggaagaacggcgctgatttccttccctggcgacctcagggggtcttctggccatggcacagggagtgggaacccaggaaggtgctgcagtc

SEQ ID NO: 88914 - DNA, 122 bp, Homo sapiens
gcttggtgccaagcactgggggagctccagttacagaaaacaagtggaatccacaggccccgggctgaacgtggaactaatttgggaggcaatgagaaagagcggaacataacgcggagccc

SEQ ID NO: 88915 - DNA, 122 bp, Homo sapiens
cttccgggcacgcccctgcccaaaggctttaaaggcgccgtgtgggacgtcactttaatgcgacctcatctttgtcagtgcacaaaatggcgccctacagcctactggtgactcggctgcag

SEQ ID NO: 88916 - DNA, 122 bp, Homo sapiens
tcagcaataaatcgttggagctacaagaatgaacaagatcaccaagggagagaatgtgtccggagaatagaagagggtcaaactcagagaggtcacactgagttaaatagaagggcaaagga

SEQ ID NO: 88917 - DNA, 122 bp, Homo sapiens
tgacagagaaaggagagcggagaagtcagacccgtgggtcagcactagctgctgctcactcggccccacccggttcttgtgtcaagacaaaaagaaaacccaggtggcctcataccttgatt

SEQ ID NO: 88918 - DNA, 122 bp, Homo sapiens
gtttcagattttgtttcctttttgaaaggctgttgcctttcaaacatctggaattaatgccgcggccctcgggcgagtcgccctcggtttctgtagctctgattttatctctgtgtcttttc

SEQ ID NO: 88919 - DNA, 122 bp, Homo sapiens
ttccccacatggaggtcagtttggacacatatcatcctgctgtcccccaaatggtgagaccgaagaagacttgccctgggccctctgttcttgggccagtgtcagtcagccaggtgcccagc

SEQ ID NO: 88920 - DNA, 122 bp, Homo sapiens
aacagaggagaggtagattggcaatttagagatcaaatactctggtggaagtaagaaaaacgtttttgaaaaggaggtattgaggaggagtaacaacaggctatcagttagaaagatactgc

SEQ ID NO: 88921 - DNA, 122 bp, Homo sapiens
ctggcccgggccaggcacaggtgagtcagggtcacggggacgtgggacacagacatggcacgagaggctgcccaccgcactgggcccggagcactgggtgcagggcatgtggcggaaactgg

SEQ ID NO: 88922 - DNA, 122 bp, Homo sapiens
cgttggccaagaggcacatggaggcagcattggcctctgccacaggctggcacccaacatcgataggagagacaaagacatttcttgctccaggagccatggtgcaacccagagggcatgag

SEQ ID NO: 88923 - DNA, 122 bp, Homo sapiens
ttctcagacctgggtgggtggagcgcgtctggctcctcttggagctccaggtcaccacgacgcatccccagcagcataagggaaggctgactgctgggaagaatacagactctccctacgtg

SEQ ID NO: 88924 - DNA, 122 bp, Homo sapiens
gaacaaggtctgctgaccacagttacacacgtcgtgacaccactgtatcacggcgaatgtcgaacactagagttacagacgacaggcaacaagaacatgcagagccggccgccagccagctc

SEQ ID NO: 88925 - DNA, 122 bp, Homo sapiens
ggcccgggccacgacatccccccggcgggagcaggagcgtgaggatggtggccaggggtccggggccgccgcggagcccctcgccgccttcgcagagcccctcgtcgccttcccagagcccg

SEQ ID NO: 88926 - DNA, 122 bp, Homo sapiens
caggagacacagtgaaccgcaaagagccgtgtcacggcggtccacctgctgcaggcacggcgccgcactgctctgaacgctcgctactccaggtactcgctcctggagccccaaggggcccc

SEQ ID NO: 88927 - DNA, 122 bp, Homo sapiens
cctctcattgatgctgaggcctccaatatgagaagaacccattggaagaagggagcaaaacgaacacaatggcgccgaggacaccatcttggattgggtccccccttagcttcccttccttc

SEQ ID NO: 88928 - DNA, 122 bp, Homo sapiens
ctggcggcgcagcggccggaggatgctggcccagtgcagataagggccaggctgcctggccgcgcctgataaggagcctggctgaccccggaggaaaccagcgggcggggacctagcagcgc

SEQ ID NO: 88929 - DNA, 122 bp, Homo sapiens
gtgcctgcagaggggtcagcctgcagctgcagtcacagggaggggcccttacgcggatgccgcaggtggtcccggcattggccttgccggccccaggtagaggacgttcacgttgcttccag

SEQ ID NO: 88930 - DNA, 122 bp, Homo sapiens
gcaggactgggaagagcacaaaaggattctagctagcacatcattgaatgccaaactgggcgcagagttacatctccaagagttagatctccaagagttagatctccaagagttagttactc

SEQ ID NO: 88931 - DNA, 122 bp, Homo sapiens
cgccagctgcgagtctttccctcctcccggccagaggcacggctgcagcaccgcagcccacgcctacctccttgtgcttctccatggtggcatacagcttctgggacaggtcattggacacg

SEQ ID NO: 88932 - DNA, 122 bp, Homo sapiens
tggcccacgggctctgtggcagcgctttcctctgaggtcccgacgccgcccgtgtccttccgctccaacccctgggctccctcagatgggccagctcttctacctggttcttccccgagtcc

SEQ ID NO: 88933 - DNA, 122 bp, Homo sapiens
aaccctacacacgccacccagaaaaacctgggcttttcccaaaaggaagtgaagacagaccgcacgctcacggaaatagcgtttgtgccttcctgccatctggaacaggagcccggcaggag

SEQ ID NO: 88934 - DNA, 122 bp, Homo sapiens
cgctactccgagtcacttcggtaaggcgggagcccgagcaaggtcaaggagggaagtgcgcggtgccacggaccgacacagttcgctctagcatctgacgctcggactccgcgccctcagcc

SEQ ID NO: 88935 - DNA, 122 bp, Homo sapiens
gggtctctctctctctctctctctctctcacacacacacacacacacacacacacacacacgctcctaagtcaactccagctctgagcaactacgccgcacgcctctcccactgggagtccc

SEQ ID NO: 88936 - DNA, 122 bp, Homo sapiens
aggagcaccccggctcctgccccagctctgccaaaaacgccggaggtcggaggcacaaagcgctttcagggactccggtctgggcctcggcctcacagggggctgcagctgggggccagaga

SEQ ID NO: 88937 - DNA, 122 bp, Homo sapiens
tgcccagggactgctgaacagcaggcgcgggctgctgtgaggtctagacaccggcatggccgaggccatggtggtcgtacgtcccatggagaccatcaaagtgaagttcatccactaccaga

SEQ ID NO: 88938 - DNA, 122 bp, Homo sapiens
tggggagcaaggccaaccccaaagtccccgtcagcctttggctggcagctctccgccgctcgtttttcctcggggagtaaaagggggagtctggaagaatgtctccaagctgctgttagtgt

SEQ ID NO: 88939 - DNA, 122 bp, Homo sapiens
catccccttccttgccactggcttagtcctccatggggctagaagagagaaggacggagtcgagtggcaccctagaagacgctctgtgccttcggaggtctttctgcctgcctgtaagccgg

SEQ ID NO: 88940 - DNA, 122 bp, Homo sapiens
ttagagagagcacttgaatgcgggtaggagagattctcaacagaacagggctggcagcagcgccgcagcctctcagggaaaacctgacgatcccttcccgggcgcgccgaccgagcgtcacc

SEQ ID NO: 88941 - DNA, 122 bp, Homo sapiens
ctacctactacccgtccccccaccggcgccggcgcacctgccccagcccagagtgggggtcgctactgtgttgttgtagaacctacagagtgcgcctggcagaaggctgccattcaaagggg

SEQ ID NO: 88942 - DNA, 122 bp, Homo sapiens
caggggccaggcaccggggagtgaggtcacctgcaacgcgggggagtgggactcacccagcggcgaccccgaagctggacccggcagctcaggcggccgcacccacagacggaggagaacag

SEQ ID NO: 88943 - DNA, 122 bp, Homo sapiens
caaaaacaccaatgaagaaagtaaaatcaagggcaaagggagcacaaatcccaagccccacgggccctgagagggacagacaccaagaacatcaataagtttgaagtctaagacgaccaaag

SEQ ID NO: 88944 - DNA, 122 bp, Homo sapiens
ctagaggaagggaatacaaaagcacaatgtctgcagtcaaaggggctcacagcaagattacggtttgtaaatacataattactccacaatgtgataatcgatatctttcaaaacagaagggt

SEQ ID NO: 88945 - DNA, 122 bp, Homo sapiens
tgtgacagaaagcaggggcgagcgtctgggaatagagctgtgctcatggcagaacaaagacgtgctgtgtttctggcctttgtgttctctccagtggtgaacaaacataggaagctttcatc

SEQ ID NO: 88946 - DNA, 122 bp, Homo sapiens
ctccccggggtcccggaggctcctccgaaaggagtcagaaaacttctaacttgccatgatcgccaccattaggccatataagatatgcaaattagtgggaagggcccagctttcggctggat

SEQ ID NO: 88947 - DNA, 122 bp, Homo sapiens
tctccctcctgctcagccatcgaccttgcctgacacctccataaaaagtaggttctaagacgtgaactccctcaaccttcctgcctctcagtctttaaacccgcctgtgtctccttcaccgt

SEQ ID NO: 88948 - DNA, 122 bp, Homo sapiens
cggccttccgcgggccaatcgcaactcgggggcgggtcctcgggctatataaaggagctccgcggtgcgggaggcctttcggagggtggtgagctagtaagtgtggttttagctgtagtagc

SEQ ID NO: 88949 - DNA, 122 bp, Homo sapiens
cacgcaggagtcccaggggtcccagtggccgtccctcggagccgggcacccgttgtccttcggatcctaggacgtgccacccctcgaacctcaggacccgccgtccctcagaccccgggcac

SEQ ID NO: 88950 - DNA, 122 bp, Homo sapiens
cagagaaacgctggacagggagcagagaggtctgggttcaaatcccaggttgaccacgaccgtgccgtgagccctcagaggagccacatcacaagccctgtgaccctatcaacacagcaaag

SEQ ID NO: 88951 - DNA, 122 bp, Homo sapiens
gcgcgacgctccctcctgcctgctgtggctcgctcgcctgctccccactcaccctctgaccggctcctagcagcctccactataagcggacgactcctgctcagtcggcctccctaccccag

SEQ ID NO: 88952 - DNA, 122 bp, Homo sapiens
aacaaagccacagagaggctttcccaggaaaaagaatgcccaacggaccagcacctgccccgtgcagtgcaccatgcctggacttcacacgctctagcttgccaagctctctaagcccatct

SEQ ID NO: 88953 - DNA, 122 bp, Homo sapiens
ttgacctccagccaaaatcactcactgcggaaaggaccctctcggtctcggtctcgatcccgctcccgatccctgtcccgttcccggtctcgatctcgatcccgatcccgatccctgtcccg

SEQ ID NO: 88954 - DNA, 122 bp, Homo sapiens
ctgcttcagattcgatctgttaggctgatcatagtattaactacaattcccagcaagccgcggagccaacctgggcctctgccggcctctgattggatacagtagccagaatgacgactcaa

SEQ ID NO: 88955 - DNA, 122 bp, Homo sapiens
tggtcatgtgcctgttccagatgagcgtcaggttgtacctcccggggatgctgatgtccacgacaaggctcagcgcacccggcgtcaccccgagctgcacgtggggctcctccccggtgacc

SEQ ID NO: 88956 - DNA, 122 bp, Homo sapiens
cggagactggaatcactcagtaaaattgtgcaaattttgctccagaaaagcaccctgacccgtgtctttacctctacttgtagaaagaccacacaaagggagtagctgctgaagagaaacag

SEQ ID NO: 88957 - DNA, 122 bp, Homo sapiens
gacaacctgcttggacttccgcctcccggcctccggaaggcagtgcgcacgcgctcgctgcgactccggcgcggttgacttccgctcccactgtgctctgcgagccgaatcatggatcacac

SEQ ID NO: 88958 - DNA, 122 bp, Homo sapiens
agaggcccgcgccctgggccgggcagtcaggatgctgcagcgcctagaagagcaatgcgtcgacccccggctgtccgtgagtcccccttcgctgcgggacctgctgccccgcacagcgcagc

SEQ ID NO: 88959 - DNA, 122 bp, Homo sapiens
cactgttccatttcatgcaatccgtcctccagacggccgctggcaccactctccgagacacgcttgcaccctgcacgtgctgccctctgactgcagggtgccggcagcctcctccgacctcc

SEQ ID NO: 88960 - DNA, 122 bp, Homo sapiens
gggcggcggcaggaatgcaggaatgcgcacaggctgtgggcggccaggagggagtcccggcgcctgccccggcggaagtgagtctttgtgtaccctgtccaacacctccccccgccagcgcg

SEQ ID NO: 88961 - DNA, 122 bp, Homo sapiens
atttaggaggctgaggcagaggattgcttgagcccaggagttccgggatgcagtgaatcacgatcctactctaacctgggggacagagcaagacctgtctctaaataattagtaattagatc

SEQ ID NO: 88962 - DNA, 122 bp, Homo sapiens
aggtgggtggcttgattggcagctgggcacacgaaagaaggagggaaagggaaggaaaggcgtcaaaggagatctgagaaggaaataagggagagaaagggcaaaaaaaatagggaaagaaa

SEQ ID NO: 88963 - DNA, 122 bp, Homo sapiens
tgtctgagctggccaggagcgcgtctggtctgttaggggaatatgtactcgcatcctgtccggtgtgaggggcaacgtgtgctcccgagctgtggcggaggtcagtcggggtcagtgaaagc

SEQ ID NO: 88964 - DNA, 122 bp, Homo sapiens
gctttccagccaatcccggctatgcgattgttagaccaatggctactcggggacgctatgcgacagcggcgggtttgctgatgattggtcgggaggccgccggcgaggcggatgagggcggg

SEQ ID NO: 88965 - DNA, 122 bp, Homo sapiens
tggcagaagaggtggcagacgtccctgcatgagccggggggagggagaccatggcagaggcggtgtctgagcccaaggtatgtgttcacatccctctggaaacagaagtgcaggttcacatt

SEQ ID NO: 88966 - DNA, 122 bp, Homo sapiens
tatttgccacacgtgttagccagatttgaagtacagacagtggaatgacacttatcccaacgcctcccttcctctcccatcctgacacatgagaaagctgaatccaagagaaatgaagtcac

SEQ ID NO: 88967 - DNA, 122 bp, Homo sapiens
acccaagactcccagacctcaccttgggctcctcatcaaacgggctgtaccctccccctacgctcacccacacggattgaggcaagggctgcacttgggagcaaattgcaaggtgggctggg

SEQ ID NO: 88968 - DNA, 122 bp, Homo sapiens
aaaccccgttttaccccaagggtggatagaagggaaatgctgagttttcatgggatctcacgccaggagaaaatcaggagcatggaaggggtgcaagttcatggcaagacgggacaggactc

SEQ ID NO: 88969 - DNA, 122 bp, Homo sapiens
tggtaggagggcggcagggacgcaagctgggactccgagtggtagggcgagaagcctttccgcagcgtgcggaactctccggagcctgcctgctgcaggggagagaaggagaggggttagac

SEQ ID NO: 88970 - DNA, 122 bp, Homo sapiens
acatccctcagttatctttgaagattagtggggagggaggtacctagaaagaaaggtcagcgatgggatacatacatcccttgacctggagacaacccagaaggaagagcccacaagagcca

SEQ ID NO: 88971 - DNA, 122 bp, Homo sapiens
tggaaaggaagtccaggaatccccttcctgtctttctggtttctctctgggcttcctgctcgggtcacaagcgccagaagcgccggcggctgcggggaaacggtaggcgggggatccagccc

SEQ ID NO: 88972 - DNA, 122 bp, Homo sapiens
ctggctttaacaggtgagaagcctctctggcccactaggaaatctctccaagcccgctgtcgttctactcaaggtgacttgggatgagaaaactgggtcgcttgggggccagctggatttgg

SEQ ID NO: 88973 - DNA, 122 bp, Homo sapiens
gggcgcattcccgggggagggggccctgtaagggaaaccagacaatcccatgagactccacgaacaacagcataagaaacaaacaggtctgtggtaacgtggccctgaggaatcgagcccac

SEQ ID NO: 88974 - DNA, 122 bp, Homo sapiens
aaagttcatactttatactttatcactccaccaggacatcgattgtcccttaagtaattccgagaagcatcccttcttggtgtcaaggtaatgtgtgcagctttgtttttcacagattccct

SEQ ID NO: 88975 - DNA, 122 bp, Homo sapiens
gcctcatccacagaaggtgccttaggacccgtgagccggcctaaacttgtacatggcaggcgtcggggggtggcggaggctggtcctctgcaccgacagggcactctctggggatgtagacc

SEQ ID NO: 88976 - DNA, 122 bp, Homo sapiens
gctggagacagcccagtagctgtgagtcggtctgacaaagccatattgaagtacggagtacggtttcaaagcagtcagaaaaagaacgggaatgctgttcaggaaattcttcaggcatgggc

SEQ ID NO: 88977 - DNA, 122 bp, Homo sapiens
ataagcacagtatgtgcttgcaaatctttacactattgaattagatttttgaccatccctcgctttttgcactttctgtggttgcactcatctctacatgtatgaaagttgtgttttttgaa

SEQ ID NO: 88978 - DNA, 122 bp, Homo sapiens
gttccaggaggtgcgcgcggagcggggtgactaggggcttcaccctggaacaagtgaaggcgatggttagtgctgtcaatcttggcaatcagtgtgagcggccatgtcgtaagtattcaaag

SEQ ID NO: 88979 - DNA, 122 bp, Homo sapiens
ctgggccagggtcaggggagaaacccaggggaaggtgggccagaaactcctgaaggtgggcgtggggtggctctgggaaacaagcagcatcacagccgctcctcttgtccctttcccagggc

SEQ ID NO: 88980 - DNA, 122 bp, Homo sapiens
agcatgaaccatgtgcaccatgcaaggtgaattctgcagggcagggcaggcacccacctgcgtctagcagcggcacactacagagaagcaacatgaaataaggtggctaaatggggctgggc

SEQ ID NO: 88981 - DNA, 122 bp, Homo sapiens
agtccagactcaattgccttcgcagcccttaaagtttccttaggaaggtctgtgggagaacgaggttggtttaggaattggcccctgccttgtactacgtagttttgtcatccaaagtgttt

SEQ ID NO: 88982 - DNA, 122 bp, Homo sapiens
tcactgcatggcaagaaaggctaccggtcatcacacgtgcttgagtgaagactgggcctccggttccctccctgcatctctctcggtgggctggggctgctcttccctggcatccagcccag

SEQ ID NO: 88983 - DNA, 122 bp, Homo sapiens
aaatcactgagcaagacatacctagagttataaaccaatcaaacactgcatttgcacacacggagagatatatacacacatggcattagaaataactgcaaataaactgtctttaatactag

SEQ ID NO: 88984 - DNA, 122 bp, Homo sapiens
cagcccaaagcggttctgggccacacactcatagtcaccttcatccgaagggctgcctcccggctccagcctgaagtgacggatcatcaaggacccattggccagcaaggtggagtgggtac

SEQ ID NO: 88985 - DNA, 122 bp, Homo sapiens
ctctcacaccacaaactttctctctgtgacacacacacacacacacacacagaggagagacgtatttgagggagggtctcaagtgcttgctttccttaacaacccagaccaggaggaagaga

SEQ ID NO: 88986 - DNA, 122 bp, Homo sapiens
cagatagtctgacaacctgattctcgcctccggaacccagaaactgggggagggtaaagccggatcctggcttctcccgcccaaatgcaggcaagtccaggtttcctatgacagctccatgc

SEQ ID NO: 88987 - DNA, 122 bp, Homo sapiens
gtgccacatctgtttcacctttacctccagccctaaaagaatacttgaattgattcattccggtgacaagtcacgtcaaggtttaagtttacatccccaattgtaattcaattattgtgcca

SEQ ID NO: 88988 - DNA, 122 bp, Homo sapiens
tactttggctgcctctgatggttgtcagacatctctgtaagcatatccaggaaaatccaccggttgtgaaagttacgcagtgacattttcacctatggcacacacaagaatcaactattgag

SEQ ID NO: 88989 - DNA, 122 bp, Homo sapiens
ctacgccgatccggggacaggagcaggaggctgtggctgcactcagacttcgggacaggccgagctgaaaaccgtgagaggggtggggtggaggcgaccgaaacgccaaggctgggttcccg

SEQ ID NO: 88990 - DNA, 122 bp, Homo sapiens
aatgaacatcggcaacaatggctgggcaggtctatcctgccacattttgtaatagtgcaacgaagtcacacatggagaatcattccaataactgttggccagcaaggtgattcatcctaatc

SEQ ID NO: 88991 - DNA, 122 bp, Homo sapiens
aggatgggacacaccaccacgccatccggtgtcttcagctggtgtgaggagtagacgtggcgggactccccgttgtgcttgcagaagttgcacagggtccccaggcccccgttggcccctgg

SEQ ID NO: 88992 - DNA, 122 bp, Homo sapiens
tcggacacctcttgcattttcctagttatgaaccctcttggttgctagtgcggttcttggcgggccggtgggaagcaactgagtggctgctgggcggcgggagctccttcggagcaggcccg

SEQ ID NO: 88993 - DNA, 122 bp, Homo sapiens
ttttgtttttgtttttttgcgacggagtctcattccttcacccaggctggagtgtagtggcgcgatctcggctcactgcaacctctgcctccagggttcaagcgattctcgtgcctcagcct

SEQ ID NO: 88994 - DNA, 122 bp, Homo sapiens
gatttggaaaagcagatggaaacatgagttcagatcagtccagtgcccatgaaagtcactcgctgtgtcttcttttcagagtaggtttataaatatgcccatcatctgatctgctgggaaca

SEQ ID NO: 88995 - DNA, 122 bp, Homo sapiens
ctgcagcttcactcctgaggccagcaagaccatgaacccatcgggacgaataaacaactccggatgggaggaacaaacaactccagacgcaccgccttaagagctctaacgctcaccgcgaa

SEQ ID NO: 88996 - DNA, 122 bp, Homo sapiens
gcgccgccgccgcacgggctgaccagcgccaagttcgagggtttgtgcttcttgagcagccgcgtgatcttctcgtcgtccgagttggggtccaggggccggttgtattcgtcgtcgtcctc

SEQ ID NO: 88997 - DNA, 122 bp, Homo sapiens
aggaggagcgggccgtggaggcttcgccgcctaggtaagggcccgggactggaggggaggcgtgccagagcctgccagggaatagccagcagacaggcccgctctagacatcgcaggcccgc

SEQ ID NO: 88998 - DNA, 122 bp, Homo sapiens
accagttcaagtccaggttcctctccttgtcctgagttagggcatgtgacagggcagccacgaagggcctgtcacctgttcctatgctgtgggcaggtgccaccctgtcccgcccttgtgcc

SEQ ID NO: 88999 - DNA, 122 bp, Homo sapiens
cgggactgtgtgctgcttaccggctgggactcaacatccagggagcatttggtcctcccacgcctgtggccttcagtagccagtcccaaggagatgacagccacacacaccacacgtaacca

SEQ ID NO: 89000 - DNA, 122 bp, Homo sapiens
ataaagacaatataaacgtatatgtggtgtgtgtatctttatatgtgatgtgtgtatctacgaatttgcatgctatctatatacatatgtgtttgtaatgtatgtgcctgcctgatatattt

SEQ ID NO: 89001 - DNA, 122 bp, Homo sapiens
agactgactactaaatgaggctgtactgccaaaacacaattccaagagagaaggaatctgcgcgtggaaagcccaggccccttgcccactgcgaggagccagaacgtccctccacagccgcg

SEQ ID NO: 89002 - DNA, 122 bp, Homo sapiens
atcatctccacctggcccaccaggctccccagttcctggagggaggctggagcaggattacggggcagaagaaacaccagcttccccccagtgatcccctccaggaatcagaagacggccgt

SEQ ID NO: 89003 - DNA, 122 bp, Homo sapiens
ccgagtgcctgttgaaggcctggggcgggaaggtgaaaggtaggcccacctcaagttgctcgtggatagcaaattcttctttgataaaagtgctgagaactcagctttatcatgtataaaat

SEQ ID NO: 89004 - DNA, 122 bp, Homo sapiens
atctctctagctctttctctcccctgtgttttcaaacaggaagtgcacggctgtctataacgtgctgccgggtctcaggatggaggagtgaagtctcctgtcgccgtggttccagcctccgg

SEQ ID NO: 89005 - DNA, 122 bp, Homo sapiens
gacggctcccaggctcccgtccctggtggctgctccggagctccaggcccgcacagggagcggccttctctaaggctcccctcagcagccatgagggaaccacaccaagggcaggcctaggc

SEQ ID NO: 89006 - DNA, 122 bp, Homo sapiens
ctaaaagccggcgggccatagggccccgcggaggaggccccagcaggcggaccaggaggccgaagcctcccgacgctcccagcctgttgcttattcattcagagtgggaaagcgccagccga

SEQ ID NO: 89007 - DNA, 122 bp, Homo sapiens
gcagaatcatggcaccagaaagacagacagtgcacgaagcacggtgaaggtggtgtgacacgcaggacgtggcccctggtcccatgtcattcaaaccttcctaagtgcctctgctactctgc

SEQ ID NO: 89008 - DNA, 122 bp, Homo sapiens
tcttgatgccctggctccctgaggcagctcgtgttttcgagtgtttccattttagagacccggaaaagggatccttagagctgctttgttttcctttttcaccagaaacaaatgcctttgtg

SEQ ID NO: 89009 - DNA, 122 bp, Homo sapiens
cggcgagggcgccgaggtccggcccatcccagtcctgtggggctggccgggcagagaccccggacccaggcccaggcctaacctgctaaatgtccccggacggttctggtctcctcggccac

SEQ ID NO: 89010 - DNA, 122 bp, Homo sapiens
aacttttacttacctgctgcatttcgaagagccttgggttaaggcaggcaatttagacaccggcagtggaagcttctgtcgacacttggacctttccatacccctgaggagtgagcaaatgg

SEQ ID NO: 89011 - DNA, 122 bp, Homo sapiens
ggaggcgcgggagagaaaagcccagggctgtacactcgcatccctctgctgccggcccttcgggtacattcaaatactgggcatgagtcccgcagacaaggctttgaaaggatattgttctc

SEQ ID NO: 89012 - DNA, 122 bp, Homo sapiens
ttgaggaaactgaggctcagggaggttgacctctgtgcccaaggtcatacagttgccgggcggcagggcaggctgagcccaggttggaatcccggttctcatattacagctctcccctgcga

SEQ ID NO: 89013 - DNA, 122 bp, Homo sapiens
acggccagaagtgtaagtgggtggagagagggtgaataggggtcagtaggacagacatggcgggaggacaccgcaggacacagactccagagatgcctaccttggctcttcggggtctgggg

SEQ ID NO: 89014 - DNA, 122 bp, Homo sapiens
catcccggagtgaccgtgacatcacgccatgcccaccacggccccgcccggcgccctccccgtgccagcacacacgagtccagcttcctcggaggtgtttattgatgcccagctgccatgct

SEQ ID NO: 89015 - DNA, 122 bp, Homo sapiens
cactgtagtggcttttaccctggccgggcgggcggggctcagccgggctgggctgggctccgcggctggagccgggctctacccagagcaagaccctgatggctgcggtgtttctggtaacg

SEQ ID NO: 89016 - DNA, 122 bp, Homo sapiens
tggagaaaaggtttgagattcagaagtacgtgaccaagccggaccgaaagcagctggcggcgatgctgggcctcacggacgcacaggtaaggcagttctggctccagcgcacagcgccctcg

SEQ ID NO: 89017 - DNA, 122 bp, Homo sapiens
atccatctgcctcggcctcccaaagtgctgggattacaggcgtgaaccacggcgcccagccgaggataaagttttttaaaattgtttttgttattattttttggagactggatctcactatt

SEQ ID NO: 89018 - DNA, 122 bp, Homo sapiens
gcccagtgatcgtggaactcactcatcagcggtacgtgttgactggcggttgctgctcagcgcctcctccagaagccgcaggcagtgctcccgtgcctggcacaggacagtgagactggtcg

SEQ ID NO: 89019 - DNA, 122 bp, Homo sapiens
ggtttattttatttttaaatgccaatagtgccattaggagtcattcttctttcccttagtcgtataaatcccctattatttggtgatgcaaaagtgagctttcacgcaggtcagctgcacct

SEQ ID NO: 89020 - DNA, 122 bp, Homo sapiens
ccccgcccttgcctcccaggggcctctccaggcccagctcttgcccccacggcggcctcccggggccaagtccctgcctgcctcccagcagcccgcgtacggcccagctcctccctcacgat

SEQ ID NO: 89021 - DNA, 122 bp, Homo sapiens
tctggtatgtctggcattgctaaccctcaatccttaaatgctagtagtactccccccaaacgtttgtgaaaggcagaagtgtcccaacaagtttccagagtgttccttttgggcagtacctg

SEQ ID NO: 89022 - DNA, 122 bp, Homo sapiens
ccaagatggcctggaggctgaagatctgtgctaggaagactccaacgatgacgaaaacctcggtcattgttcccaccatgcctctcaggttcttgggggccagttctcccaggtacatggga

SEQ ID NO: 89023 - DNA, 122 bp, Homo sapiens
tcgccaaaggagcaaagactctgccccgcccatcttaaaagagaaaaattgacgcatgcgcgatgggcatacaagcctaaagctaagctagaagacgattggggaaagaaagggtttcccag

SEQ ID NO: 89024 - DNA, 122 bp, Homo sapiens
catagaattggagtttttaaaacacaaaaaacaatagacatagctagtatttaaaacggacgcctacaggtgcgtcccacgggggatggggacacggacgcctgcaggtgcacccccacggg

SEQ ID NO: 89025 - DNA, 122 bp, Homo sapiens
ggtaattaaggcgaaggaaacaaatgtagcaggcacagcgtggggtggacagtcagctgtcggtggcttctgctgagatggccagaggactccaggttcccctgccgcggctggccacagga

SEQ ID NO: 89026 - DNA, 122 bp, Homo sapiens
ctgtttagagaggcgggagcgggagctggtcagggaggctggacagaccacccgagggagcggagcttgggcacgaaagccaaaactgggcggcgcggggcgggtggggaaggccggctgag

SEQ ID NO: 89027 - DNA, 122 bp, Homo sapiens
tggctagagaagccgcagcccgcagtgtccgacccagtcgtcccgcgccggagccggccccgtagcgtgccatggcctgctacatctaccagctgccctcctgggtgctggacgacctgtgc

SEQ ID NO: 89028 - DNA, 122 bp, Homo sapiens
gagcagagggggagcagaggctggagttggctgagaggggaaatccgcaggtacagcctgcggggctcttagagcccagaggtttgttttcctcgggatcagctgccgcccacacaccctgg

SEQ ID NO: 89029 - DNA, 122 bp, Homo sapiens
ggttcccgccgcgccctgtcgggggccgcttttcaggagcacaggtgggacgcaggaggccgtccggaggaagccggcgttgtgcccgttccctgccacccccaccctatcactcccttcat

SEQ ID NO: 89030 - DNA, 122 bp, Homo sapiens
agtcgctggttgacactgctcttcagagagggcttcaaggcttgcccaggaagggacccccggcagcctgcactcctcttggagcttatctctgctctgccacctccctggatcccctctgc

SEQ ID NO: 89031 - DNA, 122 bp, Homo sapiens
gaggaaccatcctgtttcccagagcgcactgcctgtctctgagtgtatgtgtctcagtggcgtccatgtgtatttttctgtgtgtgtatctgtgtgagtctgtgtgtgtggtgtgtttgtgt

SEQ ID NO: 89032 - DNA, 122 bp, Homo sapiens
cggctgtgatatgtgtgttgaaggtgagtcctccacagcctggcctcggatgagtcgagccgtcaccacctgttggtttgtctcttttgttgctgggccgcgtgccccgtccttgggtgttc

SEQ ID NO: 89033 - DNA, 122 bp, Homo sapiens
gcggaaccatgcaggaaggcggaagtggcttcgctagggagcctcccggcgtggagatggcgggagctggtcgcggagcagcggtgtccagggtgcaggcgggtcctgggagtccccggcga

SEQ ID NO: 89034 - DNA, 122 bp, Homo sapiens
gggaaactgttcgaccctcattgctctctgtcgccctctggtggccaggtcctggtgacacgcacaccttgcagccaggcctgtttgtcagtggtaggcggaggggtgaggcagaagtggga

SEQ ID NO: 89035 - DNA, 122 bp, Homo sapiens
tacatgtgtgcctccaggcgaccccagagtgcagccttgccatggcctccaaagcttctccgcatctcagggcaccccccccaactgtctgtggatctggagacctggcatctatgaggatg

SEQ ID NO: 89036 - DNA, 122 bp, Homo sapiens
caggagtgtctcaagcacaggcggccttggaggcggcggcacagacatgggtctcagtgccggacgctaaccccacatgtggaggccccgtgagccccagccagctggaagcacggccacag

SEQ ID NO: 89037 - DNA, 122 bp, Homo sapiens
ccccactttcactcctactaacaggaaagactcggtctctcccagaggattcagggcctccgtagcgggctgctgtcggcctccctcccggcctcctgctcctctgcgcggtccccagccct

SEQ ID NO: 89038 - DNA, 122 bp, Homo sapiens
gacagagctcttacttcttctctgattgctttaatggaattgacttagttttcctaaccacgtgatcacgttgggaaccaagttcttaccttggcatttcccacaatgctgggcacgtgctc

SEQ ID NO: 89039 - DNA, 122 bp, Homo sapiens
acctcccacggatgcgtttctggcctgatgcttggcgctctggcagtctgtgtcattcaccgctctgcctctgccgcctggagacgtgccgggcacgtaccgggtccttggtaactgcggaa

SEQ ID NO: 89040 - DNA, 122 bp, Homo sapiens
ggcgcgggtgttcggctacgtcactggggcgctacggttcctggagctgggcagtcttctcgtcagagtggggactggtaagagcgacctccccgccaggtcctgtgtgttgccggctgaag

SEQ ID NO: 89041 - DNA, 122 bp, Homo sapiens
cacgtcccccacccgggccccccgccgcggctgaggccacatggcttcctgtgggagccccggccggcacccggctggtcccaccccaaatacctcagccatggagaccatgtcatgcagaa

SEQ ID NO: 89042 - DNA, 122 bp, Homo sapiens
aatcttcatgtaaatcctcgacgagattcatcattcactgaatttggaaactttcatcttcgctcaagaaaaatgaaaaagttttagcattcaacttgtgattaacctaccatgaatctgat

SEQ ID NO: 89043 - DNA, 122 bp, Homo sapiens
tccagagcacagggaatgggtcagcaggggcttcctgggaaccctgggttacagaggagccgtgataatgctgaagttagacactgaagtcttagctgtgcccttgggttagagtgaacagg

SEQ ID NO: 89044 - DNA, 122 bp, Homo sapiens
tgcccccagtgtgattcagtaggtctggggtgaggtgcagaaaactgccttttcaagcagcgcatccattgacatgaggccatcttttggaaacactactttctgaagatttccggaatctt

SEQ ID NO: 89045 - DNA, 122 bp, Homo sapiens
cccaggttcagccgatccaggctcaggtggggaaactgaggtccccatcaactcgggcagcgctaagtgggactgcctagcttggcttctgaccttgggcttcagttatatttttctggcca

SEQ ID NO: 89046 - DNA, 122 bp, Homo sapiens
ttctgtcccctgcctccgtttccccaccccgtccccctccccgggtcggcctcgtacctccgccttaactaacccatgtccctggtctgcagcctactggtcggcctccaccttcaccttcg

SEQ ID NO: 89047 - DNA, 122 bp, Homo sapiens
ttcagcctctttctcactccccttcctgccttcgccctctccctgcctcccttccggctacgagccagtcagagaggaaacaccaggaatccggagaaggtcgagtacttccagccccccat

SEQ ID NO: 89048 - DNA, 122 bp, Homo sapiens
aaagcggcagcttggtcaccgcggagaggatagaccgggaggagctctgcgctcagatcccgctgtgtctggtaaaaattaacattctggttgaggataaattgaaaatttttgaagtagaa

SEQ ID NO: 89049 - DNA, 122 bp, Homo sapiens
gtctctgcctgggaaattcgtatgcaccgatgtacaagcacgtgcattgcagcattcgctcgctcctcagtgttatgtgcctagacgtgtcatttctcattatgcagattccagagacattg

SEQ ID NO: 89050 - DNA, 122 bp, Homo sapiens
cctgctcgctaaactgacagatttaggtcccagcctcagttactggcaggacaaaatgatcgcatttttaggctagatcttactaaagcttcaggatgccttttttagaagttgtcccaccc

SEQ ID NO: 89051 - DNA, 122 bp, Homo sapiens
cccagaagtcactttttaaaaagcaactgttaactaactcatgttttaagccctctataccgtcataagacttatcagttccagagtacactcttaagtcctaaggtcaagactctgtacaa

SEQ ID NO: 89052 - DNA, 122 bp, Homo sapiens
gcgtgtctggcagggcctctggacgcgcgggcgctgcagcagaggggcctggactttgctcgccgcggcctcgcccccgcccccgcccccgccccccacgcgcgtccggcccgggaaacgcc

SEQ ID NO: 89053 - DNA, 122 bp, Homo sapiens
cgagggaggtggggcggcctggagcggaacggaggcgtggccctgaacgaatgggcagggcggagccgcctgaagaggctgtggcttaagtctccgggcaggacttcagtgggtggggcggg

SEQ ID NO: 89054 - DNA, 122 bp, Homo sapiens
attaagagtttcccaatgctgtgcgtttatttgggattctgaaagcacagaacccgcaagcgaccaagacttttcttctatcccagagcagatagctccgcacttacccaacctggctctaa

SEQ ID NO: 89055 - DNA, 122 bp, Homo sapiens
cctctacgtcctgccacctcccagaacagtgacctgggctgtgggtggccgggacagcctcggggtaacactcggaaaatgacagcctgggctttatgttaaaaatcacaactctggctggg

SEQ ID NO: 89056 - DNA, 122 bp, Homo sapiens
atagcgatgcatttcatttcagttcttttataaaaatcagtgtgtgacgccattctttcccgtcctgccttttttttttttttttttttttttttttttttgacggagtttcgctgttgttg

SEQ ID NO: 89057 - DNA, 122 bp, Homo sapiens
ctgagctgcgtgcagccggggagcgagaccttgagaggtcatgaagttggtcatttaggccgacagctaaagaactgttctgctcagctgtttcatccattcgacactagatcgtgcagtgg

SEQ ID NO: 89058 - DNA, 122 bp, Homo sapiens
gcaccggaatcgggcggaaggcaggcttctcaacaggtccatcatttacacagagaaagccgcggttcggggacagccccgtgcctctcggcttgcctggcagctgcagcagacccctcgcc

SEQ ID NO: 89059 - DNA, 122 bp, Homo sapiens
gctcggttttgcagtaggtggcgtatcagcctatgtatgcaggagctttctggagtaagacggaaaagagaatttgcatttaactgtatcagggaagggatttgttgtgaaaggattttcat

SEQ ID NO: 89060 - DNA, 122 bp, Homo sapiens
tccaggcgcatctggggctccacagatctttgcccacgtggaaaaggcaacatgcccctccgaaaggccggcctctctccggttctacttttctctctcctcgcatagcttaggttccctct

SEQ ID NO: 89061 - DNA, 122 bp, Homo sapiens
gattctgatgagtgtgtttcgctttgcctggcaggctgcttagtgattgttctaaacctgcgtgtgggcttctccactcccccagtcttctatttctttcttcgcccccaatgcttccccat

SEQ ID NO: 89062 - DNA, 122 bp, Homo sapiens
tggcttgctgagagcaggggacttggttacatctgtgcacactctgtccaacctacccttcgttccaaagggccaggatgtactttttcacaaggtcaatgatattgtccagccagacccag

SEQ ID NO: 89063 - DNA, 122 bp, Homo sapiens
gactcgaggtcacgggaaaccccgacagggaggccgtgctgggacagctcagacctcgaacgtgccatcctcgtggatgagaggcgtccccagcagtgcccaggaagcccctgatgaactgt

SEQ ID NO: 89064 - DNA, 122 bp, Homo sapiens
tccccactccgaccccatctccctgaccagccccgcctttacgctcaggctccgcctccccgccgggtcttgcctccaaatcccggccccgcctccacgcggccccgcctccacgcggcccc

SEQ ID NO: 89065 - DNA, 122 bp, Homo sapiens
agatggttcctgagagggcacaaccctagagctgcctatactgctctatacttctgttaacgctgcagccttggctgtggggagaaaaagaataaagaatagaagtgggggactcacagcat

SEQ ID NO: 89066 - DNA, 122 bp, Homo sapiens
tccaaatccccgccaaaaaataaagaaacgcgcgcatcatgggcctacaatttcttttcccgcccagagcctgcctgggaaagcccctgacccagagagttgggggaaaggcggcccaaacc

SEQ ID NO: 89067 - DNA, 122 bp, Homo sapiens
taagaaaatgtcttaattttggaaatggaaaattatatgtactgaccacagattttacatcggcataggataattcatgcagataaagctttcctgccctaggaattcacacagatattttc

SEQ ID NO: 89068 - DNA, 122 bp, Homo sapiens
gccgccggggccgcccccttaaccctttgctcgccgccgccgccccagccgcgaccggttcgtgggcagccgcgtccactccccggaccagtaaacaaccccgggtccgtgaatcggctccg

SEQ ID NO: 89069 - DNA, 122 bp, Homo sapiens
accactgtgcccggtgtttctccacaggcagggcccaccccggtgggattcccattaccacgttagtcacagaaaacatcccagcccagaaccgggaacacacaccacggagcctgctcctg

SEQ ID NO: 89070 - DNA, 122 bp, Homo sapiens
ctactttcttctctctcctttctttcttcctctcctttttcccctgctgggtagtggctgcggcggggtgggggagactttgaatgaccgagctcgcgtccacctttctcttcatgtcgacg

SEQ ID NO: 89071 - DNA, 122 bp, Homo sapiens
gaggtgctgcaacaaggagtttaactgcctatctgaaagaaaaggggagtctaccttgcgcggttaagtaaaaagaatggtagcagatttggggcctaggctggggtcctggaagaccctgg

SEQ ID NO: 89072 - DNA, 122 bp, Homo sapiens
gtcgcaggtcccaccattctgacagctgcaggagaagctgcagttcttcccaaaggtgtccggaggacaagctacaaagaatgacagggaagcgtcagggtcaccagccagcacgacactct

SEQ ID NO: 89073 - DNA, 122 bp, Homo sapiens
ctgggaggggcgtggcgctggcgctggggagggctgggggtcccggccgccgtggatccccgcccagagtccctgccaccctggaaagcctagtgccccccagtccccagcgggccgttttc

SEQ ID NO: 89074 - DNA, 122 bp, Homo sapiens
cgtgccgggccgtccctcccgcttgtcccaccctcaccggcgccgcgtcagcccccaggccgcctgcaggtgtgcgctcagaactagcacgtgtgccggacactatttaagggcccgcctct

SEQ ID NO: 89075 - DNA, 122 bp, Homo sapiens
ggccgggggtcaatggtggcgggcagccggggccccgggctcgggagctgtggcggcagccgcaggccggggcgctcccccgggatgcccagagcacgcgggggcggggttcggcgcctctg

SEQ ID NO: 89076 - DNA, 122 bp, Homo sapiens
catttaaatatgtaaaaacctttctttgctcacaggccatacaaacacaggcagcaggcccgatttgacccacaaggcatagtttaccatctctagtgtacactaacataaactgctctact

SEQ ID NO: 89077 - DNA, 122 bp, Homo sapiens
gctttccagtggcatcccggtgcctaaacctcgccacacatcatgttcctcagctggcaacgacagtaaaccagttcaggaagccccaagtgttgccagaataagcagcatcccacatgacc

SEQ ID NO: 89078 - DNA, 122 bp, Homo sapiens
tgcgattaggttgggaagcctgcgattaggttgggaagcctgcgattagggtggcactttcgagcgctctggtgtgaatttcacgttcttttacctcatattgtatcatcccaacaaccctg

SEQ ID NO: 89079 - DNA, 122 bp, Homo sapiens
accagcgacctcatagctgcctccggctggcgccacctgcgcaggcaggcgtgagctgggcgctgacagctcccatcaggttggggcggtggacaccgaggcaggaaccaagtgccgcggag

SEQ ID NO: 89080 - DNA, 122 bp, Homo sapiens
gaccccccccccaccccagagcccaatccacggggacccgcttatgagctcactgttttacgtgttgaaagtcaggtgtgtctgggaaggagcaagcagcccggcaatgtaaactcctcagg

SEQ ID NO: 89081 - DNA, 122 bp, Homo sapiens
ggttaaatgggttccccaaggtcacacagtcagtgattgaagccaggaagcttccaactgcgggccctagcactttcagggaaaggccctagcactttcagggaccttcattaaccaccaac

SEQ ID NO: 89082 - DNA, 122 bp, Homo sapiens
aacttcccgacgttgccacggcatttgtagattgtcatggcgctggtgggagtggagcagcgaggatgcccggaggtcactctcgtcaccatcttcgttttggtgggttttgcggctgtttt

SEQ ID NO: 89083 - DNA, 122 bp, Homo sapiens
ggacgatctatgatttgacagcctcactgctgctgctcctgctgctgcttctgcttctgccgcggctgtatggtttgtcattagttggaaagggctgtgagggtttggagaaactgcagttt

SEQ ID NO: 89084 - DNA, 122 bp, Homo sapiens
agctgtccgagcggaagatggctgaacacttgtccttgtcggacatatctggggccaggacgccagcagccggtggacggcctagctcggggctgttgtgggtcgggccggggctcggggca

SEQ ID NO: 89085 - DNA, 122 bp, Homo sapiens
aaggtcagcacgtccaagactaatcaattctcggagagctcctgccgctgccaggggagccgggctccagcagccccccgcccttcccgccagcccctcccaccagccccatcacttttatt

SEQ ID NO: 89086 - DNA, 122 bp, Homo sapiens
gagggctgtgcatggtagtgcacgctcagctgccacctcccgcggctcccccagaaataccgggaaagatggggaaatttaccagggactaatcatatgaaagttagtaactgcagctaaga

SEQ ID NO: 89087 - DNA, 122 bp, Homo sapiens
ggcaggctgcagaggactcatgacaggctataccatgctgcggaatgggggcgcggggaacggaggtcagacctgcatgctgcgctggtccaaccgcatccgcctcacgtggctcagcttca

SEQ ID NO: 89088 - DNA, 122 bp, Homo sapiens
tggatctcattgcttcttttaaactgacagggctgtcatgagctctttctggctgctgtacggttaaacgccacaagagtcctctgtgctgagcctttgttctctccctggggccctgtggt

SEQ ID NO: 89089 - DNA, 122 bp, Homo sapiens
cgagcacctatcacatcctgggtggccgcgtgcatgcctttctcttgtgcgttcatggggcgacgaggggaatcgcagtgtggtaggtcgggcagctgcttcacctcaagacagaagagcca

SEQ ID NO: 89090 - DNA, 122 bp, Homo sapiens
tcaccccatcatgcgtcctgagcgtaagagcgatgtgtaaacctgccttgaattgtgtcccgctcttcgcaggggggccgtctgaaggagcctctccagaagctcaaggaagccattggcag

SEQ ID NO: 89091 - DNA, 122 bp, Homo sapiens
gggcgggctcgcgcatgctcttaagtggcagcggcggggacggggtcagtgccaagatgtcgacggcggcggttccggagctgaagcagatcagccgggtggaggcgatgcgcctagggccg

SEQ ID NO: 89092 - DNA, 122 bp, Homo sapiens
ttcacactgcttgagaggcctgccctgtctcccaagacttcaaataggtaagcaacagaccgtttcgatgtgtgcacatgtgaggtatcatcagtttccacatctgaactaaacctggggtg

SEQ ID NO: 89093 - DNA, 122 bp, Homo sapiens
gctgactctgtggctgaattttcaacacttggccattaatatcacatgaattttcatagccgtggacttccatttgttatgagacataaaacctggaagcactcggagagccatggataact

SEQ ID NO: 89094 - DNA, 122 bp, Homo sapiens
ggagacgtcgggaggagccgggagccagcgagctagccggaggggcggggcgcagggaggcggccgcttcctcgtcgcctcttgagggccggcgcaagggagggacgccgccaccgcctacc

SEQ ID NO: 89095 - DNA, 122 bp, Homo sapiens
cccttacagtgcctcctcctcgaggccaaatgcccggccgctcagcgctcgtggcagccgcgtagttgcagagacacggtctgctttccaggcttgggaagtcccagcacttaactctgcgc

SEQ ID NO: 89096 - DNA, 122 bp, Homo sapiens
ctcctcctgggaggcctctgtgtgcgtcacgtctccacacctgggggcagctggcgagcccgtgctctgttcccctcggctgcttggcacagagctgcagcctgggactctccgtggaccca

SEQ ID NO: 89097 - DNA, 122 bp, Homo sapiens
ggcccacaggacaaagccttgttgcacacccgggtcaagggcaaatcccagctgcacagccgggtgatccagcggccgaccctgcttccctgcgtaggaggcctgagccaaggacactgcgg

SEQ ID NO: 89098 - DNA, 122 bp, Homo sapiens
aaaatctaatcaaagaaatccctattttttcaaacttctagagttgggtgatgggaagtacgagttctgggtctcacacccacttctattagggagctcagcagaaccctcaaactctacag

SEQ ID NO: 89099 - DNA, 122 bp, Homo sapiens
cacttaaactttgaactaaataaaatgcattaacaaacatgaagtttctacatttgaccacgacattaactagggaaagagaacataaaggaaaacaagaaaaagactttgaagtattggaa

SEQ ID NO: 89100 - DNA, 122 bp, Homo sapiens
cccttcggcaccacggaccttaaagcctaggcgttaagacgacggaggcggggcaacaggcggggagctgtcccttcagcaccacggaccttggcgcccccagggaaaccagccggcccccg

SEQ ID NO: 89101 - DNA, 122 bp, Homo sapiens
ggggtccggtatcctggtgccaaggctgtgcgcacctgagaagggcgggaaccggctgcccgcccctgtgtggctcctggaagcaggagctcctggaagctgcaaagggctccgcagtcccc

SEQ ID NO: 89102 - DNA, 122 bp, Homo sapiens
tattgggaaataaggttcaagtagtaggttaggaccaatctagggaaggctgtcaatgtccggctaaaggctaagaacgttattgtctataatgagcccttgcacattgagatcacatgcca

SEQ ID NO: 89103 - DNA, 122 bp, Homo sapiens
gtaaatttagtaagattgagagccatgaacctagacacagtcacagggcacataagatttcggtcaatcacagactacatatatgatggtggtctcataagatgaagacactgtattttgcc

SEQ ID NO: 89104 - DNA, 122 bp, Homo sapiens
atcagttggtcctgtggttctttacccctggtggtcatttcactcaccctcatatgcagtcgttcctgtgtccatcttccttcctggagcccacattcctccaggccaggactgtggcttct

SEQ ID NO: 89105 - DNA, 122 bp, Homo sapiens
ccgcgggctccccagtgccgtcacctgcgcgggaccgctgcgggaaaccggcgggagctgcgggagggtctgcagagaggacaagcgaagttagagcctagtgtacttgcagctgggagctg

SEQ ID NO: 89106 - DNA, 122 bp, Homo sapiens
aagagaaaacgagcataaagcagccccatcagcaattatcacctcatctgcaaaaggtcccggcgctcactgccgtgcccctcccgccgctgtccagttccctgcctgtcacaccaaaattc

SEQ ID NO: 89107 - DNA, 122 bp, Homo sapiens
tctggtgttcctctttctaaaccggaggggggccccaattgtaagccaaatttactgttacggcgatcaccgtctcaaattttctgccctttaaagaataaggtgaagctaggtgtagatga

SEQ ID NO: 89108 - DNA, 122 bp, Homo sapiens
tttgtcacctcctaagatgcccagcaaggagatctgaactccaagtgtcatggaccttcccgcagaggggctggccttatgtgcgcagcaacaaggaactgctcagtggaaccccagtctca

SEQ ID NO: 89109 - DNA, 122 bp, Homo sapiens
gaagcgcccgcagcccagaccggggggcgtggcccaaatcgggaacaacaacgtggagggcggaagcccggccctccccgcgcctggcgaccggcggtgggcggggcgcgggggcggggtcc

SEQ ID NO: 89110 - DNA, 122 bp, Homo sapiens
aatgggcgtgatacttaattcgcctctctggttgctgacaccctcctcgacccccagccgcggaaatccattcctagttccaccgtttagagcctctcctggggctgccgcgaaaattgggc

SEQ ID NO: 89111 - DNA, 122 bp, Homo sapiens
gctttatgtgtgtctgttttgcttaaccggaaccacatttccaagaactccttttgtttccgggtcaggactggccacaaggaaaaaatgaacaagatctggaaggcagaaaagaagcacca

SEQ ID NO: 89112 - DNA, 122 bp, Homo sapiens
gctcagaccccagggcaggcacaggcggtgggcaggaggttctgtagctagtgctgcagtcggcagaacaatgctcccaagatgtcccctttctaatccccggaacctgtgcatatgctttc

SEQ ID NO: 89113 - DNA, 122 bp, Homo sapiens
cagcctggccaacatggcgaaaccccgtctctacaaaaattacatgggtgtagtggcacacgcctgtagtcccagccacctgggaggctgaggcaggagaatcacttgaacccaggaggtgg

SEQ ID NO: 89114 - DNA, 122 bp, Homo sapiens
ctcacagcaggtttctacatgtgcaggtttctacatggatggcaactctatttggctccgcgaggctctttgttgaccccggagcaaacacaccacctttgttatttaccattgttttataa

SEQ ID NO: 89115 - DNA, 122 bp, Homo sapiens
tcgcgtcacaaatcagcgaccgaactctggcggtggtggttaagacggcgaaggcggcagcggcggcgacagctctggggtttgcgtctcggggtgtgtcggccgccgctgctgcttgggcc

SEQ ID NO: 89116 - DNA, 122 bp, Homo sapiens
aaagagaagggctgtgcctccttgcagaaaagagcacagctggtgaagctgccttcacatcgtccaaagtttccagttctggaaagttccagttgtaagagtgaaatcaatgccaagaggca

SEQ ID NO: 89117 - DNA, 122 bp, Homo sapiens
tcctcccgtctgccccgtgactgccaggcacacctgttgcacagccctcccggaagtcggcggaaaaggggcctggaccagcctcagagtctacacctgcagcagcccctagtttaggtttc

SEQ ID NO: 89118 - DNA, 122 bp, Homo sapiens
gcgcgagtaggacaaaaaaattggcccccactcccgggcctcacccagacacaaaagaaacgtcctctgccctcagaggcgcagcctttcctcagccagcagagcggctgggctgcagagtc

SEQ ID NO: 89119 - DNA, 122 bp, Homo sapiens
ccctgcgggatgggaggtgaggccctgctgccgctgcgcccaccctcccggccccacccacgagcccccagcctcaccctggctcttggtgatggaggacacggccaccccggcgatgccct

SEQ ID NO: 89120 - DNA, 122 bp, Homo sapiens
agtgttcaaagtctgcatactgtcattattttgccttccctgcacttgacagcttgctaccgaatcaaacatatctggaaagaagtcaatttggcttagaatgcagctcagtttctctttgg

SEQ ID NO: 89121 - DNA, 122 bp, Homo sapiens
gtggccgctcccgcagcaccctgggagttgaagtcctcggagggtaacctcccaggggcacgccgggagttgaagtcctctctcagagggcggaggggatcgcccacctcacgtggctgctg

SEQ ID NO: 89122 - DNA, 122 bp, Homo sapiens
cagccacttcgcggggcgggccaggacttggggacgcggctcgggaagagccggggcgggcggcggcggcggcggcacgggcgcgagggtgcgcgcactgggactggagaggagtgagtggc

SEQ ID NO: 89123 - DNA, 122 bp, Homo sapiens
cctgcaggctggtctcagggtacacggctccccactggcacctctgaacccagctggccccgttagtaaaccacagatcatcttgtttcagagggagagcttcttccttggccgcccagccc

SEQ ID NO: 89124 - DNA, 122 bp, Homo sapiens
cttcctcccttcccatctccatcaccgccagcagatgaccttgtcaaggctggaagggaccgcaaagatcctcaggttagaggaggagattaagacccaacccgggaagactggggggtcca

SEQ ID NO: 89125 - DNA, 122 bp, Homo sapiens
aagaagtgacctccctgagtcaggatacttgagcatttgacttgactaagagaagtagcccgctagttccaggcgttgaacgcgccaattagctgccgctgagtatctgggatgttttttgt

SEQ ID NO: 89126 - DNA, 122 bp, Homo sapiens
ccgggtcttgctgccagggagcgactctggccccccatcacatgcctgtgacccagagaacggcaggtgagccttgcggcctcactgttgccactggtcaggtgctgatgaggacgggaagc

SEQ ID NO: 89127 - DNA, 122 bp, Homo sapiens
tttaaactttgtgtggcctttttgtagtctttgtgtagcttttgtttttaagtggatcttcgctgaggactcatcaaaaacaccttgtgtaatgaaaaacccagatctataacctctcccta

SEQ ID NO: 89128 - DNA, 122 bp, Homo sapiens
cagagaccgagtccgagccggcggctggagctggggacgtagacctaggccgagccggagcgaagagaaatcccgccgaacgcgagacaccgccgccgcagcttccactggcgcctctggaa

SEQ ID NO: 89129 - DNA, 122 bp, Homo sapiens
cgggcggctgccagagactcagcatttgtctctgcacctggcctggcacttgcaggaatccggctgaagaggctcagaatgaggcctgggaatgagctattgccagaaacggtgggtccaat

SEQ ID NO: 89130 - DNA, 122 bp, Homo sapiens
agccttcacttcctgcttatgtagagcttcaagattagctggaggtaagagactagaccccgttcatttctttcttgagcatactcacggctcttatgtgcttgaccttgtagagtcccagg

SEQ ID NO: 89131 - DNA, 122 bp, Homo sapiens
cacgacccgcccgcgccacgcccctgagcgcgccagagctggagttcggcggccgcggctcgccttttcctgagtagagggtcacgaggggactacaagccccagccgtccgcccccgcagt

SEQ ID NO: 89132 - DNA, 122 bp, Homo sapiens
acccagtgtgcactagatgaagaaggagatgaagacggttacctttctgaaggaattgttcggacagatgaagaggaggaagaagagcaagatgccagttccaatgataacttttctgtgtg

SEQ ID NO: 89133 - DNA, 122 bp, Homo sapiens
taaatacattggccacatccccagagatgatccggtacctcactgcccactgtggctccgcgaggtagatgcccattttctcgaagctctccacataggtcttgggagaagaattttcatag

SEQ ID NO: 89134 - DNA, 122 bp, Homo sapiens
ctccagcgcggacagcggcgtcggcgcctccaaccagttcaagccgtctttgcatcgaggcgtagcccatcctggtggggaaacccagacaaaggtggcacgccctcggccgagccaggggc

SEQ ID NO: 89135 - DNA, 122 bp, Homo sapiens
tgccagttaaacattaattcctgatggtgacaaaggtcaaggaaatcttgagaaatagctcgcctctgggaatcctgagagcacattctgaagagactgtttcattccaaatcctggaagct

SEQ ID NO: 89136 - DNA, 122 bp, Homo sapiens
ggccaggcatggaagcccattcccctcgcccaacaatcctggcacaattcacccaagctgcgaagtgatccttgtcacagataattgagctaaaaacattaatttaaaaaagagaaggaggt

SEQ ID NO: 89137 - DNA, 122 bp, Homo sapiens
agccccccacactgggggaacgtggggacccaagcaggggcagcggcctcaccgggcaggcggcgacctgcatcatggcgtccagcccaccctcgggtgcatccaggtttccggaaatcagc

SEQ ID NO: 89138 - DNA, 122 bp, Homo sapiens
cacgccgcaacccccaggtggagtcgcccccacgccgcgcaggctgcgggaggctgggggcggggacccccactccagctaattacagatcgatgaataaggattaggctgcccaaacactc

SEQ ID NO: 89139 - DNA, 122 bp, Homo sapiens
cagaacaaaaacaagacaccttaatgtttgttcaaagacaaacccacagcgaacggctctcgcacccctgctctaactcctctttctgggggaggaaggagggaagggccaggtccgcgggg

SEQ ID NO: 89140 - DNA, 122 bp, Homo sapiens
gggtcactgccagtgggaccagggctgtgggcgagtgcgccagggttcccggaggccagacgtgggacccgggagtcgagcaggtgaagcggccctgccccgcccccaccaggcactgcccc

SEQ ID NO: 89141 - DNA, 122 bp, Homo sapiens
ggttcacatcagccctcgaatctaaccgaatccaaaaatatgaagccggggcccatctgtcggccaactgatgagcgcaaatgagctctggatttcagacgaggccggcagccggtcaggga

SEQ ID NO: 89142 - DNA, 122 bp, Homo sapiens
ccgggaggatttagggatcacgggagggccggggcgttctcctggtggggattttaaggccgctcagagccacgactgggagctacccttagccagcgccccaagccgggagtacggttctc

SEQ ID NO: 89143 - DNA, 122 bp, Homo sapiens
aaaaaaaagaaaagaaaacatgaaacacaacaatatgaaaacagctctcggctttcggctcggaggaggccaaggtgcaactttcttccgtcgttccgaatccgggttcatcccacaccagc

SEQ ID NO: 89144 - DNA, 122 bp, Homo sapiens
ctggaatatggtggttgttgagaaataatgtgggctttgacgggattcaggtggtgtctgcggtgtgaagacaggagctgaatgtttagaatctaggctgtttttcttgtgatcagctgggt

SEQ ID NO: 89145 - DNA, 122 bp, Homo sapiens
agagacctccgcgcaattggcagcatcttctgcgtgtagctacaggtccctgagagagaccggcgcgcctctcccacaggggcgatcctccctccgcacccttgcgaccacctcggtgccct

SEQ ID NO: 89146 - DNA, 122 bp, Homo sapiens
ctgctccctgcttattgcattctctcagagcagctgtctcaaaggaggctgctcccatgccgatctttttgtgcccaacttacagggaaagaactcattgcctgcccagtgcctgccagcct

SEQ ID NO: 89147 - DNA, 122 bp, Homo sapiens
cccggaattccaccccatccatcctacctctctacccgggggacgaatggagaggccgggcgagggcaggacgtaggtttttcaccgcccttccagattccactgccgcatctcccggccga

SEQ ID NO: 89148 - DNA, 122 bp, Homo sapiens
gctcccgtaccattcactcctaagccctaggttctgccgcctcatctcatccctttgtgacgtagtggccccagtccgggccccggcgcgctaggctcacaaaggcaggcacagactgcaac

SEQ ID NO: 89149 - DNA, 122 bp, Homo sapiens
aattttgctactgttaatgctttgggtccacgctgcttttatgagcagtaacactcaccgcgaagatgtgcagcttcactcctgagcccagtaagatcacgagcccaccaggagaaaagaac

SEQ ID NO: 89150 - DNA, 122 bp, Homo sapiens
ctggaaaactaaaagactcccgaatctaagtattttgaccaaaagcaggtaagattatttcgtaaattctctaattattcatttactcaataactattcatagcccactatgtgatgaaggt

SEQ ID NO: 89151 - DNA, 122 bp, Homo sapiens
cccgcccctcaggggggcgcggaccacgcggccggagggcccgcctcccctccccctccccgcccagcccgcccgcctctttgtatccaacatccgggtttccccgctggctcggctccgtg

SEQ ID NO: 89152 - DNA, 122 bp, Homo sapiens
ccttcccccagtctcctccctccgctccggagactgctcgctgggcggcggggccggagtcgtcgcagccacctcattgcacaacccggcttcccaactgtttacacagcccggcctgtgag

SEQ ID NO: 89153 - DNA, 122 bp, Homo sapiens
ctgggatcttttcttcctgttcaggttaaaaaccccaaaggcttaagattttatcattatcgtttcagaatgtgcacagataagagaacctaacctaacaaacactggtcagaggaaggctg

SEQ ID NO: 89154 - DNA, 122 bp, Homo sapiens
cttgtgattggttgacaacaaacccgacgccttgagtcgcgtttaagggcgcacaccgcgcgcaggcgcacttgctccctaagaacccggaagtggtggagccaacggccagccagacctgt

SEQ ID NO: 89155 - DNA, 122 bp, Homo sapiens
ggggtgggagggagggacgcctgcctcgcccgtgccttttttctgggtcgagagtacctacgtaactgggaggaagcaggcacttaggaatagtagcaggatgaaagcatcttgatggcaga

SEQ ID NO: 89156 - DNA, 122 bp, Homo sapiens
gtttatgtcaagggagcattttttcagtcttgttttctcaccaactggcttactattactcgagaaatagagcctaacacagaagcagcaccctaccaatatctgcagtcacagaaccatca

SEQ ID NO: 89157 - DNA, 122 bp, Homo sapiens
ccatggcaataaccctacagcaagtcttgaacagtactggtttaacaacagtcccaataacgttttctttaacaacagcagttagctcatttaatcctcataaggatcatatgaggtaggta

SEQ ID NO: 89158 - DNA, 122 bp, Homo sapiens
tcctctgggggcaggagggacgccagctctcccggtgaggaccatccctcctacctgcgccgaccacgtgcctctcaggggcccgggcagcagccagactcctcatgccgcgccaggaggga

SEQ ID NO: 89159 - DNA, 122 bp, Homo sapiens
tgtattaattctttctgaattacagctagattctgccctccccagctttgtatctggagacgagggaaaatgtgatcccagttcatattatgagtgaacatctctgactgttctaagaagtc

SEQ ID NO: 89160 - DNA, 122 bp, Homo sapiens
aaggaaagattgtaatctcacctccagatccataggcttctgctaggagcatgttgctgacgaggaatgcttgtacccaggccaacagcatccttgcctccttcgtcttgcaggtgattgaa

SEQ ID NO: 89161 - DNA, 122 bp, Homo sapiens
ccttcccagagcaagggttgcctcatctcatcgcttcagacagacagctgtaacaggttccgtcatcagaaggcggacccacaccttcgttgagttctcaccaggtgctgcaagcttcctgt

SEQ ID NO: 89162 - DNA, 122 bp, Homo sapiens
gactggcgggaccctcggcctctgccggggtgcggaaggtggatgctacgggcaaaggggcggggcttgcggttcccagatccagaggcgggttggggacgtgagccggcgtccatgtgttc

SEQ ID NO: 89163 - DNA, 122 bp, Homo sapiens
cccgctcgtcataccagtagtactgtctgtggagacagagacacggtcagggcatgcgcccgctgcacacccacccagccactgggtcccacccgctcaggtcatctgcgggcagaggtggc

SEQ ID NO: 89164 - DNA, 122 bp, Homo sapiens
cctgtgaggacttgggtgctgccacttgtcccttttgaagtagcggatacaaggtggcaccgtgaaggcactgggtcaggagctgggacacagctttgcatcacttgggcactgttctgctg

SEQ ID NO: 89165 - DNA, 122 bp, Homo sapiens
gcacgcgttaccatggagactgcggaatggaaaagcgttcggtttcttgtttcctagccgcgaatggggtcgtggttccttcgacctcgcctggggagaaaggggacggagggcttcgggct

SEQ ID NO: 89166 - DNA, 122 bp, Homo sapiens
gcgctgatgacgttgcccagcgccaggaggctgctgttgatctggatgctctccttgagccgctcgccggtgctgcccgtcttgagcaccctctctgagcccgccaggtccacgaagtggaa

SEQ ID NO: 89167 - DNA, 122 bp, Homo sapiens
gtagatgattttatttccccactgggttgatcatcactttttctcggaaaatatcagccccgaccttaaatgtatcagggctttccctgttgtctatggaaacatttatagcactcaggtat

SEQ ID NO: 89168 - DNA, 122 bp, Homo sapiens
ccaagacgcgcagcgctgatgctggccccttcctaggtcagtgcagctggaccaggcaatcggggtctccgaaacgtcggggggtcagctggcgccctgcccaccatcgaacgcccttcgta

SEQ ID NO: 89169 - DNA, 122 bp, Homo sapiens
gaagaggcgggacactcttccgccaaaggctgctgacgggaagcgaaagtcggctggagacgccagagggagggagagagggaggagggagaagaaggagggacatggggaggggaaagggg

SEQ ID NO: 89170 - DNA, 122 bp, Homo sapiens
tgaaatggcgcctcaagaccccctccgggaacccacgcccgcctgaccttactatcacctcggccggaagtgtctccggccttttcggaagtcactttcacctaaccttacagactaccgct

SEQ ID NO: 89171 - DNA, 122 bp, Homo sapiens
caagctggagtgcagtggcgggatctcggctcactgcaacctttgcctcctggattccagcgattcttgtgcctcagcctcacaagtaggtgagactttaggtgcacgccaccaggcctggc

SEQ ID NO: 89172 - DNA, 122 bp, Homo sapiens
gcaggaaagcatacgtggaagagaaaccttttctctgagagctgaggctgggagggccctcggatcacgtgacactctagatcactgattgtctccgcggaagacaaggcctagggggcagg

SEQ ID NO: 89173 - DNA, 122 bp, Homo sapiens
agccaggtcccgcgatcagccggagaatgcaagatggaaatccgaatcaaagggcagcgccggacggaggtgcagaatcggccggtcccagatgctggcggcggcggcggcggcgaggggag

SEQ ID NO: 89174 - DNA, 122 bp, Homo sapiens
gtgagaccaagaacccaccaattccggacacaccaggaccttccgctgctcgctcctcctcgtcccttctacccgctggggtcagcctcatcgaccccgtctcaactctgacacagtctctc

SEQ ID NO: 89175 - DNA, 122 bp, Homo sapiens
cggggcgcgccgagggcccagagctggcaggtgccctggcagggacaggtctggtgcccgcgcctgctcgctggaccgcccgccccgcgctctggcggctcctcccgggcgatgcctccgct

SEQ ID NO: 89176 - DNA, 122 bp, Homo sapiens
cacgactaaatccgaggcagagagaaagcgggagggtgccgttgtgacaacccgcagtgtcggggtagggatgcaaaagggaccggactcacctcaacaccaacgtccttcctgactaaagg

SEQ ID NO: 89177 - DNA, 122 bp, Homo sapiens
tgatactaaagtgaaggattgttaggaataatgctcaaaatcctaaggaaattgaacactcgaacaaagaattcttagcaaagcaattttacttctgcgcagaggggtgcctccttggccag

SEQ ID NO: 89178 - DNA, 122 bp, Homo sapiens
gcgggggcggcggcctgggcggtgcctgcgccgaggtgagtgcgggggcgcggagcggagcgcagccgcggcgcgggcgtgggcgggcagaggtgatagcgagcgccggcggctccaggtgc

SEQ ID NO: 89179 - DNA, 122 bp, Homo sapiens
ggccttgcgtccactctgcacactggaagtgggttcggccctgaggccccgcaggagggccgctcacccctgggctgctcagcctcacctgactgttgcctgtttctgagcggccgtgttcc

SEQ ID NO: 89180 - DNA, 122 bp, Homo sapiens
gtgggaacgttctgtgctatctcttggcttgagtcgggggtggaggacggacctcgttcacggatttcttaccgaatttctactttcttttttttttctaattggacactgaagccaaggaa

SEQ ID NO: 89181 - DNA, 122 bp, Homo sapiens
cgctggccgaggccagttccgccgccgatcaaccatgctggccgaggccagttcagctgccgattaaccatgctggccggggccagttccgctgctgattaaccatgctggccgtaatttca

SEQ ID NO: 89182 - DNA, 122 bp, Homo sapiens
gccccctgggaggcctcaagggcgggcctgtccgtcctctctcatgaatgaaagtcctggcgcctccgaccagcaggtgtccccggggagccgcggagagactgccgctgccatggcaaccg

SEQ ID NO: 89183 - DNA, 122 bp, Homo sapiens
gtttcataagggattagggtcactggagctcacgaggccgcacctgttcctggctgggtgcgcttgggcactttgcccgtctacgcctggaacttctctggtgtaaactggaataatatctc

SEQ ID NO: 89184 - DNA, 122 bp, Homo sapiens
agcgcctcctcctgcgccgcggttccggcagcgcgggaaggttattcttggttgcaaaggcgcaggaagccagagtggaaaacagccaggaattatctataatttcagtctctgggtggcgt

SEQ ID NO: 89185 - DNA, 122 bp, Homo sapiens
ttggcacacatgcttacaggcagcactgctaagggttcaggtgccccatggctgacagcccgagttgcttctgtggaccatcatgccgctcggcacgtcctgagacagaagttgctgcagga

SEQ ID NO: 89186 - DNA, 122 bp, Homo sapiens
ctggagctttatgatgtgtcccaccttggactagctgctctcagagattcccttcactatcgctctggaatttccctttaacagtccctgtgtgaattctgcttcctgtatccattgcttcc

SEQ ID NO: 89187 - DNA, 122 bp, Homo sapiens
cagattcctccgcctgaaaaacccttcctcccgcccccaaccttcccatgctatcaatgccgcctgctcagagagggtttcttcagataacacgagatctgccgtcaccagatatgccaccc

SEQ ID NO: 89188 - DNA, 122 bp, Homo sapiens
gaatgcacttgtaaagtgagctcagaggaaggaaaatcagaactgctgagtgagaggagacgccagggtccaaggcccacgtctggcccacttggttgctggactccacacgatgcccgctg

SEQ ID NO: 89189 - DNA, 122 bp, Homo sapiens
aaaacggcaacagagtgacacagcagccattgaagatgccccacttcaggcaccgacaggcgtcacgtgacgggtggggaacgccaaccgcctgggcctagcgcagcttcctccgcccacca

SEQ ID NO: 89190 - DNA, 122 bp, Homo sapiens
tgccttaagaatcttctagcatttctctttccaacacgacagccagggctggactagccccgagagttgcaacggaagatgggctacatacaaagcgggatgtaatcctgggccgccccaac

SEQ ID NO: 89191 - DNA, 122 bp, Homo sapiens
taaatctggcttgtgggcaaccgcaacgctgccgcagtgaactgtgggagttgcggttcacggcgtagcctcagtttttttcctgggggaagttccagaactacaaatcccgtgagccagtg

SEQ ID NO: 89192 - DNA, 122 bp, Homo sapiens
gccagttcctagtactggtgttagcacaaagctgagtaaatactcatggattcaaaggcgcgagatgtcataccatccaagttatcaggaatgtgtttgctgagggctccctgggtgctgac

SEQ ID NO: 89193 - DNA, 122 bp, Homo sapiens
agacgatcgattcatgctgcctgcgggcagtcctgcaatacgatcgattcacactgcctgcgggcagtcctgcaagacaatcaattcacactgtgcagtcctgtgatataatcaattcacac

SEQ ID NO: 89194 - DNA, 122 bp, Homo sapiens
gctcatgcggatctagattgaatctgatccttcgggccgcggcggctccgcctgggagggcgtggcccccgcgctggggcgggaaccggcttctggggacccgcggcctctgcgcctcagcc

SEQ ID NO: 89195 - DNA, 122 bp, Homo sapiens
tagtggtgtaagtagatggctgcttgcggttatggcggggtggccagcagcccttgcagacgcgccgctccgccctccctgccctgccgcgcccctcgctacgttccccgggccccgctagt

SEQ ID NO: 89196 - DNA, 122 bp, Homo sapiens
tgggaagccctgctccctgtgctgattttctggggcgctgaaggggttcccatgcacacccgggcaggtgggggctccgtccagagtaggcctccacatcctcccagggcccagccctcgcc

SEQ ID NO: 89197 - DNA, 122 bp, Homo sapiens
ggcgggacctgtgcttctcagcctcgcactcagcgcctctgtttttcgagtttttggaggcgacagcggccaggaaggctgaggcatgattcaaaagccctggaattatctggaacgggaat

SEQ ID NO: 89198 - DNA, 122 bp, Homo sapiens
cgcttccccgtgccccgccagagcccagtagttcaaaaattaaatttggggcaaggggtgcgcgccagagcgcagctgtttctggagcctgcggcagcggtggcgagccacagggcggcgac

SEQ ID NO: 89199 - DNA, 122 bp, Homo sapiens
ggccaccgcgtggcacagttctcgcttctgccaaacctgagtgaagatctggcaggtgcccgagcagccgacccgcacctgttgatgatgagcgaaaggggccacttgacgatgtagtcgaa

SEQ ID NO: 89200 - DNA, 122 bp, Homo sapiens
ctgtctcatgaataagctctctggtaggagggctgaggcacagtgaacaatcccccagggcgtgagacacagaattgcaccagtggcctgtctgccacccagctctgaaacacaagcaggct

SEQ ID NO: 89201 - DNA, 122 bp, Homo sapiens
tctgttggtgataaggaccttgaagaaaataaaaaaaggaaaaggagatgaggtagagtgcggcttaagggcaggggaaatgtgttcagggaaggcatccctgttgcaagaacatttaagct

SEQ ID NO: 89202 - DNA, 122 bp, Homo sapiens
tcctccaggatcctccccgcgctggcccgccccacaggagcaccgcccctaccaggagcccggagctcttcccagggcccgcctccccgccagggggcgatccacctccacttcctgtttcc

SEQ ID NO: 89203 - DNA, 122 bp, Homo sapiens
ccccgcatctcgcacaggtagataccatcatcgtctgccttcagcctgtggatgatgaggcgccggacagtgccctcttcgatctgctcgtacttgcggcagggcagcagccgctggtcctc

SEQ ID NO: 89204 - DNA, 122 bp, Homo sapiens
cggcttgcctcgctgcggttggtggtgacatcggagaccgcagctacggtaatacaaagccgtgtcctcggctctgaggctgttcgtttgcagatacagtgagttttttgcattgtgtctgg

SEQ ID NO: 89205 - DNA, 122 bp, Homo sapiens
gtgcagttgacttaaagtcattgttatagcaccccactagcttgatctataatctgtgaccgtccattttttcctgatgtgctctacttaactggaacaagttgctgccatgaaattgattt

SEQ ID NO: 89206 - DNA, 122 bp, Homo sapiens
tcccagaagcctccggtgtacctcgctgggaacgcacttcctgggacgctgagagggagacgctccaagaggctcctcagtgtgggcgagtaaaatgccctgcgtgtgagaagcaggtaggt

SEQ ID NO: 89207 - DNA, 122 bp, Homo sapiens
caccaacaatgcacagcttcttggtgctcatgttttctataattgccccagccatttttgcgccccccctttttcttttctccttgaaataaatgttttagggtgagctttttgctccctcc

SEQ ID NO: 89208 - DNA, 122 bp, Homo sapiens
gggcccagtgcttagcaagtgctccataaaatagtggcagactcttgagcacctgctggccgggagctggacgctaggtggcctccgctagccctcccggttggtctggaaggcaggcacaa

SEQ ID NO: 89209 - DNA, 122 bp, Homo sapiens
cactgagtgacacaaatggaagctagcccacacaactaagatctatttgctttagggacacggttgaggtcacttttcattttatgggtacatcattttatgggggcacatgggagaggttt

SEQ ID NO: 89210 - DNA, 122 bp, Homo sapiens
ccagctgtgacaaccaaaaatgtctccagacaccattccaaaaccagcgggagacaaaatcgcccgacagtcgttgctttagtgagtgaatgttgacctaagcgtcacttcgcctgtcttga

SEQ ID NO: 89211 - DNA, 122 bp, Homo sapiens
tcacaaactagcctcttcaaaccatgatttcccatcatgcagatggatgaacaatgaacacgatgtgataaaatatagaagaatcttagtgctgcagaaacccggaaaagtgagtgattcat

SEQ ID NO: 89212 - DNA, 122 bp, Homo sapiens
gttcgtcctaattgagctgaacactagtcactgggttccatggttctcttccgtgacccacggcttctaatagagctgtaacactcaccggatggcccaagattccattccttggaatccgt

SEQ ID NO: 89213 - DNA, 122 bp, Homo sapiens
atttccaagtcccacgacgatacccaaccttaatcgagtagttgaaaagacgccttcaatcgctgcttgagactgtgacgccaattttatcgcctcctcagcggctgcaaggaaaaaagctg

SEQ ID NO: 89214 - DNA, 122 bp, Homo sapiens
ttatatgcatttttcttagccttctgcctcagaaatgtctcagtggtccctcaaggtcttcgaatagatgtttatctaacctgacagttgcagttttcacccatggaaagcattagtctgac

SEQ ID NO: 89215 - DNA, 122 bp, Homo sapiens
ggggaggcaaactcattctggaaatgatgggctgtttgtagtttcacaaaacctctttcccggcagagcaccaacacctcccccttccaccaccccccatcccatctggtctgcttctcccc

SEQ ID NO: 89216 - DNA, 122 bp, Homo sapiens
tcctcgggctccttccacccttgcagggagcctgacactgagggctggcggcttttctggcgcgggccagggggaggaggagaaaggagctcccgggatcccctcgccccctcccccaactg

SEQ ID NO: 89217 - DNA, 122 bp, Homo sapiens
gtcagaaaaagcaaaatgatgtgtattcttagcgctttgtcccagcaaaaccaccacgcacgctacacttttaacctttgcattggggagatatctgtgctaaacttagaagaaattcaagt

SEQ ID NO: 89218 - DNA, 122 bp, Homo sapiens
acacacacgtgccaacacccacagcaatctgcaccgagaaacacccgatcactccccgagcggcattcaggcgtccacacttccagctggaattcactcatgcaactgctcttgaacactca

SEQ ID NO: 89219 - DNA, 122 bp, Homo sapiens
attgaattgtaggatacccagctggtgttagagaataggtccgtgtgcaagaaaaattcccgcacatcatggacataacagacaacgtcaatgatgaggaatccagcaagttcgggatagag

SEQ ID NO: 89220 - DNA, 122 bp, Homo sapiens
ccacgacagtcggccccggtggtggggattccgcgcgggacccacgcgggaacaaagaggcggctggacggcccagctctccgcacccggaaggacctgttccacctctccggctcccgtac

SEQ ID NO: 89221 - DNA, 122 bp, Homo sapiens
aggtttgttgcccctaaagctggtggacaggaatgcaacctgtctactttcttgctgccccgacagggaaacattcagatcttgtttcattttatggattctctgctcatcagtaaaagtaa

SEQ ID NO: 89222 - DNA, 122 bp, Homo sapiens
cagcaactgggctcgcgcaccacatgctgggccagcagcttcaatcgcctccgccacccgcgcccaccgcccaccaagctgccaaagcgagctgagcagaattcgaggttggaaagaatctg

SEQ ID NO: 89223 - DNA, 122 bp, Homo sapiens
gcatcagccaccactcctggccccatttcatttctttagaagtaaaatgctggccgggcacggtggctcacgactgtaaccccagcattttgggaggccgaggtggccggatcatgagatca

SEQ ID NO: 89224 - DNA, 122 bp, Homo sapiens
taacgcccccttcctgggacgccccatgatccccatggtgcatgctctcccttgttgcaacgagtcatcagctcagcttgttcacccacacgtgtgtttctggtgatctctggttggaggca

SEQ ID NO: 89225 - DNA, 122 bp, Homo sapiens
gtgggacgccccaggggccctgctcgcagccactctgctcagggtcatttatagtctctccgttctttgttaaataaagacggtgagacacggacgggctggagccggcaggggtagtggag

SEQ ID NO: 89226 - DNA, 122 bp, Homo sapiens
tgacttccactacaagaccttcgacggcgacgtcttccgcttccctggcctttgcaactacgtgttctctgagcactgccgcgccgcctacgaggacttcaacgtccagctacgccgaggcc

SEQ ID NO: 89227 - DNA, 122 bp, Homo sapiens
gcacgcgcgtgtgctgccggtgtgtaaggcaggggggcgagaacccgggcgcacgcgcagcgtctcacctgcttctgcagggcctttgtggatgtgtaatatcttgggtaaaaatcatggtg

SEQ ID NO: 89228 - DNA, 122 bp, Homo sapiens
ccctacctcagtgtgggctgcacagaaccgagtgtagacgggccgcctttacctagtgagcgagggccgccctgcctcagtgtgggctgcacagaaccgagtgtagacgggccgcctttacc

SEQ ID NO: 89229 - DNA, 122 bp, Homo sapiens
ccctcgggccggggaaactgcgcacggggcccggcctggccgggccgggccagagggccccgcctcccccacccgccacccccgcccactcgggcgcccgtgattggctccgcccgcccctg

SEQ ID NO: 89230 - DNA, 122 bp, Homo sapiens
cgtggtccggcagagtggcctgaaacccaaccccaaggctccagttccctctggcagggccgggagggctgggctgactggggatgccttccccacaccccaaggagccctgtgggtggtgg

SEQ ID NO: 89231 - DNA, 122 bp, Homo sapiens
cgcgctggcgtttggcctggccataggcacgctggcccaggccctgggacccgtgagcggcggccacatcaaccccgccatcaccctggccctcttggtgggcaaccagatctcgctgctcc

SEQ ID NO: 89232 - DNA, 122 bp, Homo sapiens
caggcccggctcatcaccgtggccgcccccggccgctccggttttgcccgcctccagctccggctccggctccagctccggccctggcccccccagcgcctggccccggcccggccccgctg

SEQ ID NO: 89233 - DNA, 122 bp, Homo sapiens
ggaataagctctcctcacagcacaccctacagccctgtgatgcttcagacatggtactctcgcaaattatttatgcactgatgaccagctagcttcaaaaaacaaatgtagaactttgaagt

SEQ ID NO: 89234 - DNA, 122 bp, Homo sapiens
acacaggtgcattccccagcccccgggattccccgtggtggtttccttcaccactgtcagcgctggaaacacagaaattgacacagtcccattgaagtgggtcaagtgtgttgtcgaacgta

SEQ ID NO: 89235 - DNA, 122 bp, Homo sapiens
gaggtgcctgggctccgggacgccgccgccgggggaaaggggacatctgggctgtcagagcggggctgcgcctagcttgggacaacacttctgttccaatttagggagaggaagtctctatc

SEQ ID NO: 89236 - DNA, 122 bp, Homo sapiens
agggtggcgcggtggcggggcgcgccgggtcacccacctgcgctggtctcggagcttctgcgcctcctgctgatgctgctccacctccgcgcgcagccgccgcaccgcgtcctggagctgcg

SEQ ID NO: 89237 - DNA, 122 bp, Homo sapiens
gctcccagccacgtcgcgggtggatattcccgcctgggctgggcaccgcggaatcagcaccgcctgctgcgcaggccccgcccagaggctgcaccacccaggccctgcccgccgccctctgc

SEQ ID NO: 89238 - DNA, 122 bp, Homo sapiens
gggagagtggccaggtcctgtctccatcagcatgcatttgcagggactggtctgtggtcacggcctctgtcgtcctccctgacgacatttaccctggtcccctcccctctcctctgggcagg

SEQ ID NO: 89239 - DNA, 122 bp, Homo sapiens
taactaatgcctgatgatctgaggtgggagagtttcatcttgaaaccatcccctccacctcgcaggccatggaaaaattgtcttccatgaaactgggggtccctggtgccacagaggttggg

SEQ ID NO: 89240 - DNA, 122 bp, Homo sapiens
tataaaatatcgcatgataataccattttgattggcgattttctttttagggcagtagctcgcctgagccagagatttcccaaagctgagtttgcagaagtttccaagttagtgacagatct

SEQ ID NO: 89241 - DNA, 122 bp, Homo sapiens
ctgtctgcctcccctaccatcctgtggcttcctgagggccagcacctggctcaggcttctcggggccccttaaacacatcaggttcccaataaatgtgagggcactaatggctatgtctagc

SEQ ID NO: 89242 - DNA, 122 bp, Homo sapiens
tgccccaccctacacaagctctggtgtgggacacgtccacgcagaggcccttctacgcagcggagttaggagacctcggaagacccagatatacagagcatgcctgaacataaacgcagatg

SEQ ID NO: 89243 - DNA, 122 bp, Homo sapiens
catgagccaatgagcccccagcctggattattattattgttccagaaggaagtactcttacggtttgttctgggaggctgccactaagagctgtagaaggcagctggcttccccaaaggctg

SEQ ID NO: 89244 - DNA, 122 bp, Homo sapiens
gctgctaggagtgtgtggtaatcaatcgccacccctgccaaaaccaaggaccccctgtgtcgggcgtcttcagccagccgcgagggggcgcggatctgagagagtcgcaccccgggacccca

SEQ ID NO: 89245 - DNA, 122 bp, Homo sapiens
aggtgcgagggcagacagaaacgaatacagaggaggcgcaacaaaggggctggctgccagcgccggaaaataaataaataaatacataagtgaaggccaggaaatggcaacggcgcatctca

SEQ ID NO: 89246 - DNA, 122 bp, Homo sapiens
ctgttaacgggattctttaccttttccctactactagatcacggtgaaatagacaagctacgccggaagcaatcaagtttagggtatggatgtagtcggcggctactggttaaacgcttaac

SEQ ID NO: 89247 - DNA, 122 bp, Homo sapiens
gtgtacttttcacacacaaaccaacccatccagagccgataccccaaccacttcctgtgtcgggctctcacacgtgggccaccatccgcctgccccagtcaccccggggccagcttccagac

SEQ ID NO: 89248 - DNA, 122 bp, Homo sapiens
cacctgactaaatgcgtcccgtgcacctgactaaatgcgtcccgtgcacctgactaaatgcgtcccgtgcacctgactaaatgcgtcccgtgcacctgactaaatgcatcctgtgggagctt

SEQ ID NO: 89249 - DNA, 122 bp, Homo sapiens
ctcacaaaaaccattcctgcacttggccaaagccagccagcaacttcgaggaggtgcagtcgaggcccctctttggggttgtccttgggacagcggtgatgctgttcagctgcggccgtgca

SEQ ID NO: 89250 - DNA, 122 bp, Homo sapiens
aggcacaaatgcccacccaagattattagaggaacgagggcagtgggcaggaaggtgagacgctgactttagaaatagccggtgattacagatttaattcatgttattaactccctgccttt

SEQ ID NO: 89251 - DNA, 122 bp, Homo sapiens
ccgcggcgggcggggcgcagcggcgggcgaaggggcgggcagaactggggccccgcccctcgccccaggccccgccccaccggccttctggcctggcgagaaactgcagggcgctggggcta

SEQ ID NO: 89252 - DNA, 122 bp, Homo sapiens
cctttccctcccctgcctcttcagtgcctgcctgataaagtggtgcctgttggtcacactcgctactcattaagtcacctttcctgggggaaattcctcgccttgggtatgggaggttccat

SEQ ID NO: 89253 - DNA, 122 bp, Homo sapiens
ctcatgccgctgtgggtggcgttgtaatgctaatcactcaaatcatctacagatgccttccgtgcacatgccaatgccttccgtgcacacgcccgagccctgggtggcatttggggcctcgc

SEQ ID NO: 89254 - DNA, 122 bp, Homo sapiens
agaacccccgaaaaaaacaaaaaccatccgggaggtgcatgagtccaatgggaatgcaaccgtgatgccgctgtcctatgcccagtgacagcacaggtcacgtaagttacagcaggggaggg

SEQ ID NO: 89255 - DNA, 122 bp, Homo sapiens
agacaggggttcagatcctgtgctatggctgagagtgatgccgaggaagacacttccctccgagtcttagtctgcccgcctgtgaaactggctcgtaacaaacccctgaccccaggctcggt

SEQ ID NO: 89256 - DNA, 122 bp, Homo sapiens
aaagaggaacagggcagaccctatggaacatgggaaactcaggccatggagagcccatgccgggatccctcaggctctcaagtggtctctcttctaccttcagtggtcagcttggtgggccc

SEQ ID NO: 89257 - DNA, 122 bp, Homo sapiens
gctgctcccattccttttatgtaaccttctcccgactcccccgatgttgatgaggaaaatcgcacaaccaggtagctgggtaccaaggcgaatccaggttttcaacttcagctgctccatca

SEQ ID NO: 89258 - DNA, 122 bp, Homo sapiens
gagggagagtccaggctctggctgaatgtggccccaaagaacaccttgggaggcaggccccgactccggaggctcgtcgggtgcccagggagctgcaccgggtccctgggccccgggcccgg

SEQ ID NO: 89259 - DNA, 122 bp, Homo sapiens
actcatgtctagaaaaaagctgactcgtgacaccaaaggagctctttcaagcttcctgcacgctcttagcgccagagcaccccagccgtcctgggagcccccgaagccaagcatattcgaac

SEQ ID NO: 89260 - DNA, 122 bp, Homo sapiens
agaggaagcgcagggacagagcggagcaggccgagccggcggaaagggtctttgctgctgcgcccgggcaggggctgccgcggccccaggtcccgcttcgagacgcggcgcggtccaggcgg

SEQ ID NO: 89261 - DNA, 122 bp, Homo sapiens
caggcagcggttcccattgagcagctcctctgtggttccacccagccttccaaccaataacgcagcgtctcctgcaggaaactcatcgcttgggtcacctgttgctctttgctctaatgagc

SEQ ID NO: 89262 - DNA, 122 bp, Homo sapiens
agctgtcccagggttcttctattcgggagccagggtgcccagccattcatttacacaacacgatgcatcattattcaacacctgctgtggcagcttgggaatcaaggctgagagtgaggcat

SEQ ID NO: 89263 - DNA, 122 bp, Homo sapiens
gcagggctctgctttgtcagggagaagaaaataaagagaaatcagcccagcttcaaagggcgcatttccataattgccctgtaactttggcaaaataaatctgagcggcggggaaaagcaca

SEQ ID NO: 89264 - DNA, 122 bp, Homo sapiens
ccttggcccagtaataaatcactcaagatatggcacaaactgttcacagtatggtttttgcggagaaaagctgaaaaccacctcagtgggcatctgtgggggatgacaaagcaccttatagt

SEQ ID NO: 89265 - DNA, 122 bp, Homo sapiens
acccccgggcgcatccagacgagcccccgccgcagcggcgacagcagctggagctgcccgcgcccccgcccgacccagcccccgatccccggcccccgaagcctccgcccgggtcaccccgc

SEQ ID NO: 89266 - DNA, 122 bp, Homo sapiens
gctggggtgtaagtttcggctccctgggatctgacagccgagggtatgcgccctggggtgcgccgggacccagagggcgagtgagcctcggttggtcggctctggagttcggttgtcagaag

SEQ ID NO: 89267 - DNA, 122 bp, Homo sapiens
cgataagcaaacactgatagctctgatctaccacactgtaaggggctagtcatgagccggcgtcagctttgttagtagccttgtccaactgatgactatatttgcatttgtggtcaactaaa

SEQ ID NO: 89268 - DNA, 122 bp, Homo sapiens
cccttaagcccaaggaaatcgtagcatcgcgggacagggaaaatgaaagactttggaagtcgtcaggaatttgactctgtgagttggtttccaagagtctaagttaagcatctccaagtgga

SEQ ID NO: 89269 - DNA, 122 bp, Homo sapiens
gtccgagaggtaagaggctgacgtctaggtgacgcgccaacttaatcatgtctgacgtcacgtctggtcgtcttggctagccggccgagattggccaggctggcttggggactcccctgcta

SEQ ID NO: 89270 - DNA, 122 bp, Homo sapiens
atttaaggtcagaatctttgtgttgggaaatgctagcgactgagccttgacagctgagcacgggttgcctcatccctctcatgctgtctatttcttaatctaacaactgggcaatgcgttaa

SEQ ID NO: 89271 - DNA, 122 bp, Homo sapiens
ccctagaagcatttaggagaactagctctacttttccaggagcttagtttattgattcatcgcctactttaggtcaggcagtttgccaagagctgtggatacacagatgattgtgacatagt

SEQ ID NO: 89272 - DNA, 122 bp, Homo sapiens
ctggggagattgcagcctttaagctttttttcttattcgcatcttctggcttctctcttccgtcgaacccttttggcaaccgcagggaacacgcatcctcaggttggcacgggaggcggcga

SEQ ID NO: 89273 - DNA, 122 bp, Homo sapiens
agccgtgcaggccagaaagcgggcagggggcatcttgacgcaggtgctggccatggtggccgtgtgcagcacgcgcacctccggccggtgcatcctcttcctctgcaggttcctcttcttcc

SEQ ID NO: 89274 - DNA, 122 bp, Homo sapiens
ccccgccgggactcttgcccaccctcagccatggctccgatatctctgtcgtggctgctccgcttggccaccttctgccatctgactgtcctgctggctggtaagtggggcttgacttgggc

SEQ ID NO: 89275 - DNA, 122 bp, Homo sapiens
ctgggccctcccagccgccctccgcgcaggcagcctggagccacctccaggagggctggccgccactgtaattacaggcgcctctccgcgccctggggctcggctctgcaaattaaactgtt

SEQ ID NO: 89276 - DNA, 122 bp, Homo sapiens
gatacttggcatacacaaaggcctcagtgaagcttatttacatcttggagatctttctggcgtagaagttcatattggaaaggcattgcttcctcacagcttcctatgtacaaatactgggc

SEQ ID NO: 89277 - DNA, 122 bp, Homo sapiens
aacatgcatgtctttgggatgtgggataaaactcaaatacacaaagaaaacccatgcggacgtggggagaacacacaaactcctcatggacagtggccctggccaggaacctatttattttc

SEQ ID NO: 89278 - DNA, 122 bp, Homo sapiens
cctctctaccgctcatctaagggcgtctccggactgtcgcccaccccaccatcctccctgcgctgggggtactaaatcccgtgcaaaaagacctggtccattcccaagactggtccagacac

SEQ ID NO: 89279 - DNA, 122 bp, Homo sapiens
cgtcatgtccctggtgatgtcatcggctgttctggtgaaccctgagtgaccgcgtggcagcggccatgaacactgtccatcgtggtctgccgcagggattcttctaagtttaaagtcatcca

SEQ ID NO: 89280 - DNA, 122 bp, Homo sapiens
tgctccgtcaccgacagcctctctccagaagtagagaccatggagtctggctgggtgccgcgtcaggggtctctcggggcggctagaggccctgggaacctggaagcccgcggggcgcggcg

SEQ ID NO: 89281 - DNA, 122 bp, Homo sapiens
aggaccgccagggcctctccttttttgtctgggagactcgattccatagactgggacccacgctcggctggcaggattcctgcttgtggggtaaggctgggtgccttgcggtgccctctcat

SEQ ID NO: 89282 - DNA, 122 bp, Homo sapiens
agctccagctaaactccgcttcattccactggtcaatggcctgccggcgtctgctggtgccgttcggtgtgctcttcaaccgaagtgttcctcttgatgtctagccgcttctgtgttctcct

SEQ ID NO: 89283 - DNA, 122 bp, Homo sapiens
catcgccgcccagccgccgccgcacgccggggagagatcgtccggggtgagcagcgagcccggggacagctagcctgggtcctgtccctggacctactccccctgcagctggcggatcaggc

SEQ ID NO: 89284 - DNA, 122 bp, Homo sapiens
aggttgacagactcctctgatttgtccagagcttgattacatcacagggtgttcacaaatcgcagctctgagcctaagaggcttaagctatcatcccccttatccccgcccccttacaggtc

SEQ ID NO: 89285 - DNA, 122 bp, Homo sapiens
tccctggtcaccgtgggtgtcagagccaccagggtggtgccatcccgaggggcattccctcgacaggtgacagctcttcccaaacactgctgccccagagtgtgacagaggcccctggtccg

SEQ ID NO: 89286 - DNA, 122 bp, Homo sapiens
ggccacgaagcacccgctccagcgcagagcgagagcgctcggggattcagcaccacgaggcggacagctccaggccctgaggtccccagaaaagctggagcgcggagtgtccagaggaggcg

SEQ ID NO: 89287 - DNA, 122 bp, Homo sapiens
ccgctgcacaccagcttgttggcgtcttcgtcgccgcgctcgccccgggctactcctgcgcgccacaatgagctcccgcatcgccagggcgctcgccttagtcgtcacccttctccacttga

SEQ ID NO: 89288 - DNA, 122 bp, Homo sapiens
gctttccaaacatgcaaaagagaagcacgacagcagaggcgctgatgacactggtgtccccgccccgagactctccacccccaagtgctaggacacaggaagacacacacgcacaggaagaa

SEQ ID NO: 89289 - DNA, 122 bp, Homo sapiens
ttattcacttacctttctatttcacagtaatacagccttgatttccagaattaaattgtacgttgtcagtaaaagcccaacactttttgttgttgtttcaagctacagtcactttgttttgg

SEQ ID NO: 89290 - DNA, 122 bp, Homo sapiens
gtcggccgcccaggtcctgggcgaagccgcagtcataataattggggcgcagggactccccggttttgtatttggagaacagtgagttgacgaaataagagctcattttattgaattttgag

SEQ ID NO: 89291 - DNA, 122 bp, Homo sapiens
tggtgttggagcgcgccctggaccgagaacgggagcctagtctccagttagtgctgacggcgttggacggagggaccccagctctctccgccagcctgcctattcacatcaaggtgctggac

SEQ ID NO: 89292 - DNA, 122 bp, Homo sapiens
ggaatgcaggccacctggcgcccttacggatttaacgggccggcttccgaccccctcctgcggcgcgaccactgttcctcgcctgtgtcccccagaggggaaactgaggcttgggggcggtg

SEQ ID NO: 89293 - DNA, 122 bp, Homo sapiens
gaggttcaacagctctctggggaggaactaagtgcaggggaagttgtggttattttttaccgagtcctgagaagtggcctagggattctgactgtgatccattcctgaactggcagggcttc

SEQ ID NO: 89294 - DNA, 122 bp, Homo sapiens
tgggcggggccctgggcgtcctggttacctggacaaggagtccacgctgggcggccgagccgccgccggctgggagccaagactctcgcagctcgagctcttctccatcgcgcggcaggggc

SEQ ID NO: 89295 - DNA, 122 bp, Homo sapiens
agacacaagagggagaggagatacctgactgggcataaaggtcaagaagtcaaaaacgaacggaaatgagagcccggtgcaaccttaacagccttagaaagggagctacaaacagctgtggt

SEQ ID NO: 89296 - DNA, 122 bp, Homo sapiens
gagaccagaggaatgttggattgcaggatgctaaactgctttcctcagacacaattcatacgtcagaaaatgaccatcaagtaagtgaatgatgacactaaattgcatggttcttttgtcaa

SEQ ID NO: 89297 - DNA, 122 bp, Homo sapiens
tgggggcgggaagggggcgtcagaggtgccttgggcgggtacccacccagacacgagcaccgccgccacaggtgtacccgcgacaccaggctcagcgtcttgctttcctcctggtagcgcag

SEQ ID NO: 89298 - DNA, 122 bp, Homo sapiens
cctggaaccaaaattctccctgcaaacggaggaggccaccttcagcttcatcgctgggcacgggtggcggtcacagcgctcccggggtctgtcaccctcgccgggcgccccgggaagcggcg

SEQ ID NO: 89299 - DNA, 122 bp, Homo sapiens
ccaaatctaagaataggatctcgaagaagcacacgagttacttcacgaggtttctcagttcgtgttggataagcctccacctaccgagagtaggtgcgcccaagaactagtaaatacttgtt

SEQ ID NO: 89300 - DNA, 122 bp, Homo sapiens
gccacggcgcccagcttacaccagactactttttaaaatgtttttgtaaagtcagggtttcgccatgttgcccaggctgattttgaactcctgggctcaagcaatccttttgccttttgact

SEQ ID NO: 89301 - DNA, 122 bp, Homo sapiens
tcactggggacccctcccctaggcccctacggcgccaacatggaagacagcgtctgctgccgtgattacgtccgttaccgtctgcccctgcgcgtggtgaaacacttctactggacctcaga

SEQ ID NO: 89302 - DNA, 122 bp, Homo sapiens
taaaaattaacgaaatcgcggttcctggagcacgttatccactcccagaagctgttgacccggatgtgggcgtgaactccctccagagctaccagctcagccccaatcaccacttctccctg

SEQ ID NO: 89303 - DNA, 122 bp, Homo sapiens
cagccctcattttaaaggcgggagtgcaaaggggatttctgcgcacggcacctggttttccgagctgtgctcacttttcctgagagccgaggtgggcaatgtatccgacctgctcccaggcc

SEQ ID NO: 89304 - DNA, 122 bp, Homo sapiens
ggagctgcaggtgcattgcaacgaggtcctgcacgtcaccgacaccatgttccagggctgcggctgctggcatgcccaccgcgtgaactcttacaccatgaaggatactgccgcgcacggca

SEQ ID NO: 89305 - DNA, 122 bp, Homo sapiens
gacgagctctgcggcagcctggtaaagagccgatgcgggaggcaggctgggcgggtgcatcgtgcagaactggttacgggttatggcaggcgtgggtgttttatggctgtggcagtggcaca

SEQ ID NO: 89306 - DNA, 122 bp, Homo sapiens
caggaggagtaaactgaggccaggaagagcagtgacttgcttcgtgtggcctgggagactcgggaccttctgtcccctcttcccgaggacccaggggcgatgcccagagctgtcaccacccg

SEQ ID NO: 89307 - DNA, 122 bp, Homo sapiens
cccttctgcttagagtaaccgcccaatttcttagtgcatcctaaatggtcccataccatccggtcccagcccaccactcggctctcaaatctcaccctctcactacacttgcagccccacca

SEQ ID NO: 89308 - DNA, 122 bp, Homo sapiens
gtcacattggggagttttccctgcactccagggggaattctcaaccacaacctctgtatccggtagtggcagatggaaagagaaacggttagaaaagcgtggttcttgcgcaggaaagttgg

SEQ ID NO: 89309 - DNA, 122 bp, Homo sapiens
gacttctactcaagtgacacagaagaaccagctatagcgccagatctcaaaccagtaaggcgctttgtccctgactcctggaagaactttttcagagggaagaaaaaggaccccgaatggga

SEQ ID NO: 89310 - DNA, 122 bp, Homo sapiens
gcccatggctgggcagagaaatgtcaactcctgggcttgcctgggcactgatgcagcattcgcctgagggcaggaaacatctgcctcagaaagtcacttggggtgggagaaaggaaatgatg

SEQ ID NO: 89311 - DNA, 122 bp, Homo sapiens
gccacgctacctcccgatcgtagggcttcctatgccggcatattagtgtgatgacggaggcgccccgccctcaaagtttgcgcatgctcaatatagaaccgctgtctcctgcgttgctcacg

SEQ ID NO: 89312 - DNA, 122 bp, Homo sapiens
tgggatccggcaggtccagggtgaaggagatggggctggagaggctgagcagtccgggttcgctgtccgccacttcggcgcggaatcagagcaggacttgctgagccctcctaccgctccct

SEQ ID NO: 89313 - DNA, 122 bp, Homo sapiens
aatcttaattctggttaatttgatgatggtttagcctgaatttagtaaagtgtaaaatgacggtaataagttttccacaaactgccttacactattatgaagggtttcttttttttaatgtg

SEQ ID NO: 89314 - DNA, 122 bp, Homo sapiens
cccaaaattcatttatgtttcatatgcgctgtctatacgcagcctgaaggtaacaggtaacgtgtctcccctcagggacgctgcagcaagtgtgtgttgtgcgcctgagtttcgagctgtgc

SEQ ID NO: 89315 - DNA, 122 bp, Homo sapiens
gaccggagccggggcctttttctttaagactcgcagcactggatcccagaacttagtctgcgcggcggcattgacactagctgggctcctcggggcgcgccccaggtggtccgaagcccggt

SEQ ID NO: 89316 - DNA, 122 bp, Homo sapiens
ctcgcgggacggggcggggtcgggtgagggggaggagacagccccacgctttgcgactcgcggtgacccctacgcggaactctctcgcggtaattcgaagtaccgcgcctgcgtgctgcagt

SEQ ID NO: 89317 - DNA, 122 bp, Homo sapiens
aaatattcaaagcccgtggcccacagaggctggattgcgaggctcctgggctccagcagccgcgtctctgaccgttgagacctggcgcggtccaggcgttgagcaatagggctgcgcccggt

SEQ ID NO: 89318 - DNA, 122 bp, Homo sapiens
agcccatccaggttcggggacgaacaactgcttggtgtcacaactaaactgtgcagacgtcgccgtctttccctaaacgacacggcacgagaaacctactttcattttttatctgaaagttc

SEQ ID NO: 89319 - DNA, 122 bp, Homo sapiens
ggcgggcctcctggcgcctgtcctgggagcagctgcagccgtgcctggatcgggctgccacgctggcctctcgccgggacctgttcttccgccaggccctgcataaggcgcggcacgtgctg

SEQ ID NO: 89320 - DNA, 122 bp, Homo sapiens
tgtgttccctgcctgtcctgattctccccccagctctgagctcttagggttgcttcctttcgggaaaaggtttggaagaactggtgtctaataccgtcatcctctccctctccccgcaagga

SEQ ID NO: 89321 - DNA, 122 bp, Homo sapiens
agtacagaaggggtttcaccatgttggccaggattgtctcaatctcttgacctcgtgatccgctggttttcaaaaaccaatttggtagatgaaaaatctatctcattgattgaatgctgctt

SEQ ID NO: 89322 - DNA, 122 bp, Homo sapiens
agcaaggaggaggggcttggctgtattgtgacttcatctgctgcacccaggctctttgcacgttgtcttcctggagtcctggggtgcagtggaagcgtgggtgacggcctcccatttctgag

SEQ ID NO: 89323 - DNA, 122 bp, Homo sapiens
ccggtttttcccgaaggtgaccagatgctcctgggccactgcctctgagacctcagggaacggagatttttgtggacccagctgcctggagctgctttcctgttccggccggaggaggtgag

SEQ ID NO: 89324 - DNA, 122 bp, Homo sapiens
cagcatttgtgttttccatcataggggacctttctggacaacatgaatgagcccctatgtcgtctgtcttctgatttggatgtggaaatgaggagccctggcagggaattggaggaaagagg

SEQ ID NO: 89325 - DNA, 122 bp, Homo sapiens
cagccttctgctacagacaaggtttcagatgacctggtgattcataacttaggcagctgccggcttcacccatctcaaaagagaatttgtcccggaaattctggatggctgtttttcctgga

SEQ ID NO: 89326 - DNA, 122 bp, Homo sapiens
cattccatttgcacatagcattgctccatgagcgcggaagtctagtggatcaaggaagcacgggaattcattgagactcagagtgagtacaagtgtgttgcacttatgactaggtaatgtgg

SEQ ID NO: 89327 - DNA, 122 bp, Homo sapiens
gctgcggggacgttgtgcccacggagctgtcctgggtcacggggtgtgcctcaagggccccggcccttcaggccttgaggcactcaaaggcagcctgcgtggctgagaagcacattttaaat

SEQ ID NO: 89328 - DNA, 122 bp, Homo sapiens
atgactcgactggagaatggcagccctggcagggtctgcggccggctgcggaggtggggacgcggccgcgcggacgagtgacaggttggtccggcgcagcaaagggagcgggtgcggcggta

SEQ ID NO: 89329 - DNA, 122 bp, Homo sapiens
tatttaactccacgtttctcctcagggctcttatcctctagacaataacggaatagagcacgatttctgtgacagagaagggaagtccctttggccagaacaaggttgtgggcatggaatga

SEQ ID NO: 89330 - DNA, 122 bp, Homo sapiens
cgggattatcgacgcgccgccagctggagcgggcgcgggcggggtccccgcgggaacagtcggcactttattaacctgtcagcgcctaaaaggtcccgggcggcctgggggaggggccggag

SEQ ID NO: 89331 - DNA, 122 bp, Homo sapiens
cgcctctcgggctgaggggcaacgtagttctctctggcggtcgcagggggcactgaggagcgtcccctaaatcaccggcgccgcgaaggctcatgggcgtagtagttctcaggtcggcgggc

SEQ ID NO: 89332 - DNA, 122 bp, Homo sapiens
ttcagactccagatatactttggtattgttttctctcttcctgcaaagctgaggcagagtcggactcctttactgtgagttgaaagatgtgagaataaggcattgctggaagcaacagtttg

SEQ ID NO: 89333 - DNA, 122 bp, Homo sapiens
gcgcaggccccaagcccacatgcgcagtcctcaccttgcgcgcagccccatgtacagccccggacgggctcccagccccactggcgcagaacccatcaccgcttgcccttcacgcgcttcat

SEQ ID NO: 89334 - DNA, 122 bp, Homo sapiens
tctggtgcagatcgcgaaggggggctcctgctcgtcctcggagacatcacctgtctggcgcgtttgttaagggcgcccagaagcagagggctttaggcttccgacagagctggaggagacgg

SEQ ID NO: 89335 - DNA, 122 bp, Homo sapiens
tctgcctataaaaaatgagcccaaccgtcaacaaaatctctcaaaacttgctgggtgtggcggcttacatctgtaatcccagcactttgggaggctgaggtgggaggatcacttgagctcag

SEQ ID NO: 89336 - DNA, 122 bp, Homo sapiens
tgaagaaatccaccctggctgtctgtcgggcagccccggcgaggagttgagtccccttaccgctgcgaatgagctgtcctccaccccacgtcggagacctcagcgcccggggccccggcctg

SEQ ID NO: 89337 - DNA, 122 bp, Homo sapiens
tgcgcagcgccacctgcgccgccatgacacgctggcgctccgcgatgagcgtgcacttggcgcacaggcagtccttccagcgacagtagcgtttgtggcccttgagggccgacaccacgcca

SEQ ID NO: 89338 - DNA, 122 bp, Homo sapiens
agggaggggcagagtgttaacgtcaggtaggaatgaccctcccagaagtcagaatgctcccgtgtccacccgtgttcactgtgctctgctatttatcttcttaagcctctttctgtgattat

SEQ ID NO: 89339 - DNA, 122 bp, Homo sapiens
caggctgcaggtgccctgtgacagcaccgagtcggagatgaaccacctgtacccggcgttcgcccagcctggccaggagtgctacctgcagaaggagcctctgctcttcagctgcgccggct

SEQ ID NO: 89340 - DNA, 122 bp, Homo sapiens
cgaatggctccttggaagcaaacctgccagtggttatcaagctccttacatacccagcaccgacccccaggactggcttacccaaaagcagaccttggagaacagtcaggtctgttgctgct

SEQ ID NO: 89341 - DNA, 122 bp, Homo sapiens
ttaccaacacctagggagttgcctggcatacagtaggtaattaatggagtatttgatgagcgcatgatgcatggtgtagtgccgatggaagtggggtcagaaggcctcctgccgctgcggca

SEQ ID NO: 89342 - DNA, 122 bp, Homo sapiens
gacagaaacccattctccaatctcagtagttttttcgaaaggctgtgatcatttattgatcgtgatatgacttgttactagggtactgaaaaaaatgtctaaggcctttacagaaacatttt

SEQ ID NO: 89343 - DNA, 122 bp, Homo sapiens
ctcctttcctcagaaggctcttgggcctgctctctgcagggccttgagatggccctgcttcgtcctagcaagtgggtggggtcggcacccaggcaggacgctgtctaaggtgttgaagggac

SEQ ID NO: 89344 - DNA, 122 bp, Homo sapiens
gtggtgtcaatgaagcggtctacacagctggagagacaattttcagtgcgagagtctaggcgattccctggcttctccacacatttatcccaacataactccatgaagtgatgcacctaaaa

SEQ ID NO: 89345 - DNA, 122 bp, Homo sapiens
agagccctccatagatggaccgctgcatgaggctgttggacgaagcatatttggtcaggccgataggcttggggtcgggattctagcaagtggggccctgagattaatgacaaacacctgag

SEQ ID NO: 89346 - DNA, 122 bp, Homo sapiens
cttcccagcctccataattgtaagagaatacatttctgttatttataaattgctcagtctcgggttgtggtgttatgatatatatattggcttttatccatggttcctggcttataactccc

SEQ ID NO: 89347 - DNA, 122 bp, Homo sapiens
ggaagtgttttgatcctcagattgctgggatttaccaccgactgcaagtctgtagacacacgcacacaaacaggcacacacccgcactccggggcagagatactccgacgcaagcttggcgc

SEQ ID NO: 89348 - DNA, 122 bp, Homo sapiens
ccgggtggtggtgtgggagtggctgaatgagcacagccgctggcggccctacacggccaccgtgtgccaccacattgagaacgtgctgaaggaggacgctcgcggttccgtggtcctggggc

SEQ ID NO: 89349 - DNA, 122 bp, Homo sapiens
gggagagctgattccaaactgagggagctgtttcctggaagacaatgactaagcagaaatcgtagccgagaaagtgcttcgtaaccgttactcatcccgcggcggggcaggggcggggcgcg

SEQ ID NO: 89350 - DNA, 122 bp, Homo sapiens
aactgagtcatcggtgaatcatctgaggatttctgtttccaatccttggaaataatttaccgattgttttttatttgtgcagtgtttgctgactctgagtggacacctcagaaactgtaaca

SEQ ID NO: 89351 - DNA, 122 bp, Homo sapiens
aagggcaggagatcgacggcttagggagctggaggacgagaggtgggaggggctccacgacgccaatcacaataagcagggagccagtcagattaggaaggaagcacgagaccagagactag

SEQ ID NO: 89352 - DNA, 122 bp, Homo sapiens
cagcgagccctgctggcccatgggatcctcatgcttgaatgagtggttggggaactgcgccgcatggtgcgagggcgtgtgaccgtagctgggcgtcccgtcgaaggtgaccgtgctgtaac

SEQ ID NO: 89353 - DNA, 122 bp, Homo sapiens
gcaggtctgcccagcaaacgccctgtggtgagcgtggggctcagtggccgctgatggagacgcagaacctggggcctcgcacagcatggcccccaggcgccaggttccccagccacactgtc

SEQ ID NO: 89354 - DNA, 122 bp, Homo sapiens
ccgttaggaacacttccttaatagcagggttgccaggattccgtgagggcacctctgtgccgtatccagcacctcatcggagctcagtaactgcaatgcccccctccttccgcacaggggct

SEQ ID NO: 89355 - DNA, 122 bp, Homo sapiens
cctttgccccggtcgggcgggacttcctgtgtcgtatttccaaggactccaaagcgaggccggggactgaaggtgtgggtgtcgagccctctggcagagggttaacctgggtcaaatgcacg

SEQ ID NO: 89356 - DNA, 122 bp, Homo sapiens
tcaatttggtaatgtgctcattactgctcctaattcattcatattttagcaaacacttagcgtggtgaggcttctgatcctcagcactggtaaaaatctaacatttattgtatctgttctaa

SEQ ID NO: 89357 - DNA, 122 bp, Homo sapiens
aggggttcatgaagagggcgttgaacagggaccagacaacatggtcgggcacggaggtctcgctgcggatgtggatcacagtggatgtcgggggagcagggttgtggggtgcccccgcacag

SEQ ID NO: 89358 - DNA, 122 bp, Homo sapiens
agatgaccaatgggagacggccatctgcgcctgcgcaaaaaagtcgccaatgttcatttccggtctttttcgccccgcccttcaaatgcgaaagcgactgccttcttgggtgagtgcattag

SEQ ID NO: 89359 - DNA, 122 bp, Homo sapiens
catgtgcatataaacccacacaacacagacatgcacagaggtcaaggagacccactgctccgttagcttttgtatcttgatgctacatggccaatggaagagccaatggaatatatgaatac

SEQ ID NO: 89360 - DNA, 122 bp, Homo sapiens
tcccggcggggctcgcggctcccggcagccgccgcctcccctcgcggcacttccggaccccggcgtcgcccttttaaggggcagcccccagcagcgctctccccgccccctgttgccggcgc

SEQ ID NO: 89361 - DNA, 122 bp, Homo sapiens
gttggccaggctgatctcgaactcctgacctcaggtgatccacccacctcggccttccaccgcacccagccctgactgggactgttaacagctttacccaaacagggaccgaaggagaggct

SEQ ID NO: 89362 - DNA, 122 bp, Homo sapiens
ggccagacttggggaaaattcaggtcacactgcaaggtagcatgtgttagggcctgcatccgtggtgcagggagtgccctaggaatgtggaagcgggagaactcagggcagatcagatgggc

SEQ ID NO: 89363 - DNA, 122 bp, Homo sapiens
aaacgagccccagagctgtcctagcatcagtttccaggtgggaagctctgactttcatttcggtcttcatttttacccctgaggtgttcccttgctctcttggtgcttaaccatgcattgtc

SEQ ID NO: 89364 - DNA, 122 bp, Homo sapiens
tatttcttcttcttttttggggctgctgagtgctgcctcctggccaccatggcatatgaccgctacgtggccatctgtgaccccttgcactacccagtcatcatgggccacatatcctgtgc

SEQ ID NO: 89365 - DNA, 122 bp, Homo sapiens
ggtgtgggctgcagggaaggaacgcactggtggccgtcggggccaaagaccggggatagacggggagagcgggggcagccgctggcatcaccgtgagcctgtcttagcccttgggggcatcg

SEQ ID NO: 89366 - DNA, 122 bp, Homo sapiens
tcctgaccttcctgtatttgggaatggctctgggctgctctccttctggtggctgacttgcgaacttgtgtctggttgcaggactggcattgcggactgacctccagggagaggcccagatc

SEQ ID NO: 89367 - DNA, 122 bp, Homo sapiens
ctagtgtaaattgtgcttagaccaataacacatttaaaattatagagcttttcatcactacggagatgctcttgcctatgataggaacgatggctacatctgaagctgagcaaatttatctt

SEQ ID NO: 89368 - DNA, 122 bp, Homo sapiens
ccagccaggaagtgcttgcccctggtcagggctccagaggccccggccaaggcaggagagcgcagaactttccacgcgccaccgcaaccaacaggcctcttcatgggaaattggctgaaaat

SEQ ID NO: 89369 - DNA, 122 bp, Homo sapiens
gcaaaaggactctccctcaccagggacccgcgaaggcgcgcattgcaagatgttagcgtgcgggctttagatatccttgcgtccgatgccagaagcctggcacgcaaatttacccacccttc

SEQ ID NO: 89370 - DNA, 122 bp, Homo sapiens
cccctctgcgcacgggacgggatctggtctcgagagcctggacctcaccggcaccctccccggggcccccagcaccagccagaaaacgacttgatctgcttagaagaggcaacttcggggag

SEQ ID NO: 89371 - DNA, 122 bp, Homo sapiens
tggggcgcgggcggcggcggggggcgccggctgctgcggcggggccgggcggctgctccgcgcatgtgcacccgtccaggtggccctgccctactctgcggcgccggcacggccgcccccgg

SEQ ID NO: 89372 - DNA, 122 bp, Homo sapiens
cgtccacgtttgtcctgtttagtgtcatactgaagaagagtatgaccagccagtgctgggcgttctgcagcttgggacagatgttggggggaagggcactgcctttcttgtgaactttcttg

SEQ ID NO: 89373 - DNA, 122 bp, Homo sapiens
taaagtaggggagtccttggcacgatgctgggcacggcaccaccgtcaaacgggactgcgcggttacggtattagttaggggatgctgccctctggcgaccatcaggaggaagcgcaggcga

SEQ ID NO: 89374 - DNA, 122 bp, Homo sapiens
ttgtggccggttggcgggctcagtgccgcctcagtgggctctagcagtagaaaagtaaagcgactaccctaagatacccagagcgagaggagaggggctagaagggtgctggaggcaggctg

SEQ ID NO: 89375 - DNA, 122 bp, Homo sapiens
caacgaggagggtgaaggagcgcagcttccggagccagagagccagacgactagtgtgcgcgagggccgcttccgcttccgtcaggggaggccagaggaaaaggggaggggggtcgggtgcc

SEQ ID NO: 89376 - DNA, 122 bp, Homo sapiens
gatggtaatgacctctccagggtctggcccacagcatgtttattagggtccatatgcagccgatgctgtccatgccgggtgaatacatgccaagtgatttcctgttcacccagttccgcata

SEQ ID NO: 89377 - DNA, 122 bp, Homo sapiens
agaagttcacggggagatggctgcaggtgcatctggttccagatgttcaaccaatgtttccggagttccatgcgtccgcttggccttcctctgtttgtccttgttctcaggtaggcattccg

SEQ ID NO: 89378 - DNA, 122 bp, Homo sapiens
cacgcgtgaacgtggacgtgggcggggggatggggctccgcccgggcgtgttgcgcgggacgcgggacgggcgggcggcgcgagcgcgggtgtgagctccggacgaagcagggggaggtgcc

SEQ ID NO: 89379 - DNA, 122 bp, Homo sapiens
tcatacctctctttccttctgagcctgttccctggctgtgaaatgggtgtgatcccccgacgctgggacgcgtcatggccaccctgcaggggctggacaacttgaagttccctggacgctag

SEQ ID NO: 89380 - DNA, 122 bp, Homo sapiens
aatggcattattctcattcttattgctctctaactgaagcacttagccccccaccggcagcgcagcaagtgctgaataaacatttgttgaacaaatggatgacaggccagcacaggttggag

SEQ ID NO: 89381 - DNA, 122 bp, Homo sapiens
aggaggcagccagcttagcagggtaggcatgtgggtggcccaccagctcctggaatggagcgtactccgtttctggggaggttccccgcgtcctgcctggagtctagaagggagcggggaag

SEQ ID NO: 89382 - DNA, 122 bp, Homo sapiens
tttgctgctggtgctcctggagctgggagaggcccaaggatcccttcacaggtgagaagacgtccccgcactgtgttcagctgggtagtcccatgccctgcaactcagggctgctctggggt

SEQ ID NO: 89383 - DNA, 122 bp, Homo sapiens
ggtgtccctctaagaggcttcccagagccgcacctcttggtgcaggaacaggcctcttgccggtgacatagactcttcctgacgtctccactaaattgctcatttttgtcaacatccaacct

SEQ ID NO: 89384 - DNA, 122 bp, Homo sapiens
cgtgattgttccctgttgcgggacattctgcgcctgaatgagcgggggctgctgtgtcgacgcggatttgccatatggttgcgcggagccaggaagaatgggcccctgtgtgtgcgaccggg

SEQ ID NO: 89385 - DNA, 122 bp, Homo sapiens
gtgatttttttccccaaaggacagtacttttagcgctataatgagggggaaagagaagcccgtatttcagagagtagcagtatttttcatgaggtgtaacagctactgagggtgaaatgttc

SEQ ID NO: 89386 - DNA, 122 bp, Homo sapiens
tgtcagatttcgggagtgactccggctcaggtgaaagcgaggccagacactccaaggctgcggccccgatgacacagccaggcctcacggaaggtgggcaacggagtccgtagggggaggcg

SEQ ID NO: 89387 - DNA, 122 bp, Homo sapiens
cacgcgcagcaccccatttaagtttctcgtctttgcagtggctttgcttagatccggtgccgccttgaaggcggggctgggtcccagccgtagccaatggagccccgggtgagggttgaggg

SEQ ID NO: 89388 - DNA, 122 bp, Homo sapiens
gcagatacctggagaacgggaaggagacgctgcagcgcgcgggtaccaggggccacagggcgcctcccggatcgcctgtagatctccggggctggcctcccacaagaaagggagacaaatgg

SEQ ID NO: 89389 - DNA, 122 bp, Homo sapiens
gcttcctttcccacccattggtggatgcgtgtgagccgtcttcccacccgttggtggatgcgtgtgagccgttttcccgcccgttggtggatgcgtgtgagccgttttcccgcccgttggtg

SEQ ID NO: 89390 - DNA, 122 bp, Homo sapiens
caagggtctcccgaacagaacggtaggtgcactgaccctccaccccctccgccaggccagcgcattctctctgttcatgcccaggcaggcctttttgtgctgtgcaaacaccagtgtgtgga

SEQ ID NO: 89391 - DNA, 122 bp, Homo sapiens
tttcattctagaatgtgaaaatactgccaacaataatctaaagacagcccatattcacagcgacaagaagttcagtgttggctatagctcggtcatgctatgggcaggaggccttctctaaa

SEQ ID NO: 89392 - DNA, 122 bp, Homo sapiens
tttttgctctccacatgacctgccaccaggcacgtgatgagcgagctcctggacacagaacgggcctacgtggaggagctgctgtgcgtcctggaggtgaggctggactcggggagggccga

SEQ ID NO: 89393 - DNA, 122 bp, Homo sapiens
ccttctagctgggccgcggccctcttgcacggactcttagagggctcctccaccgccctgcgctccccactgtaaatagtcaaggccgcggtatagctgagctaaattgtcctggtaaattg

SEQ ID NO: 89394 - DNA, 122 bp, Homo sapiens
tatcgctgggctccagggttaaccggtctctaacccattctttactggacctgccaacttcgcgcagggttggtaacctagcaaccaagcaacacgagcagtgacttccggtacccggactt

SEQ ID NO: 89395 - DNA, 122 bp, Homo sapiens
aaattctactgtcccaaagcactgcaatgcagtgaggtgagtgagccatcccctgtagagcgggagtcataaggaaaaggaaatacaatcggcttccagtcccagtatatccataagaaaat

SEQ ID NO: 89396 - DNA, 122 bp, Homo sapiens
taaacctttgttgtgccccagaatctgaatgtctggtttctgtacccattttgctagtatcgttcctatttgaaaacaatgcctacagcccacatccacagagctgggatctttagatttgg

SEQ ID NO: 89397 - DNA, 122 bp, Homo sapiens
ctttgtgagcagagctccttcccctctccccgggaacggcagggcactgggacctctggtcggtgcctcccacccactgcagccctagtgccttagctccatgcccggctgcagccccactg

SEQ ID NO: 89398 - DNA, 122 bp, Homo sapiens
gtctgcttccgccactccacagcaggtggtatccagagtgtgtaagcaaggtcaggggtgcgaaatttggagaagaaaactcagagaaaaatgcagactgctttttttggaaggggtgtttt

SEQ ID NO: 89399 - DNA, 122 bp, Homo sapiens
attttttaaaacaatgagcatgaactcactgtgtttttagccacaactctaagacaatcacgtgaattcctccaacagagttttggctcctgagttacatgtgatcagggaagtgtggagct

SEQ ID NO: 89400 - DNA, 122 bp, Homo sapiens
cgactgcgccctgccctgcgggtgtgggcgagttggccgcgtgtgtgcctcgctgtttgacgcgaagacgagccaatcagggcgggcggcccgagctgccatgtgacgggcaaggcggcccc

SEQ ID NO: 89401 - DNA, 122 bp, Homo sapiens
aaataactaaattttggacttctattaaaggctagggaccagctctagaatgaatgttctcgaccagggtgactgtccacttcatgaaagtagactaaaaataccaaactctcatatataca

SEQ ID NO: 89402 - DNA, 122 bp, Homo sapiens
gagctgagaaccttctcatgtgtttgttggccactaggatattctctcttgtgcagtatccgaggcttctccctatttctctactgggctgacgttatttttcatatggatttgtaggaagc

SEQ ID NO: 89403 - DNA, 122 bp, Homo sapiens
ccacggttcgcgatgtcagggccgcagtttgcgatgctgtgaatcttgggtccacggcgccgtcatgctgtgctctgaggacatctgcacagatgatgccttttcaccattttcaatcactt

SEQ ID NO: 89404 - DNA, 122 bp, Homo sapiens
aagtcacctttgctctgcatcactgaaatatttctctgcttcaatttagccatctctcaccgtccataacaagcagagaaatatgtccccacttcagagcacatagtgagatgctcattttc

SEQ ID NO: 89405 - DNA, 122 bp, Homo sapiens
ccagccgggtggggcccaggcaggggattgctgtccctccagggccagggccagggcccccgggggctcaccatgcgctctaccacgatgatcttggggcccagctgcttgtgtatggcaaa

SEQ ID NO: 89406 - DNA, 122 bp, Homo sapiens
tcatcgccatcgtctccgtcatggtcatcctcatctccatcgtcatcttttgcctggagacgctccccgagctgaaggatgacaaggacttcacgggcaccgtccaccgcatcgacaacacc

SEQ ID NO: 89407 - DNA, 122 bp, Homo sapiens
ggagccccgggcaccggggagaacacgtgctgttctgcgccttctttgggatgcatcacgcggctcccgagcccagacttcgtccaggccggcgggaaggggtcagcggagccgctagctgc

SEQ ID NO: 89408 - DNA, 122 bp, Homo sapiens
tgggtgctgcctggagacatagccagggcccagctgatgggctgagtctgcattcactaacgcctgccccatggcagggatggcttgggagtggtgggaactttccccagggtctgcttacc

SEQ ID NO: 89409 - DNA, 122 bp, Homo sapiens
gcagtcaattaggaatcaagaggtcgagacctgcccaagcccaggaggcagttgttgctacgctgggattcgaaccctggggtctgggctatatcccagggctcttttcaccagctgccgcc

SEQ ID NO: 89410 - DNA, 122 bp, Homo sapiens
ggggagctgactgtgccagagcagctgccgagtcctgcgacaccagcagctgtgctgttccggtacttcttgagaaacttacacgtcctgtataagatagggatctgttctgtggagagctt

SEQ ID NO: 89411 - DNA, 122 bp, Homo sapiens
ccggggacgccgttggcagctctccatggagcaacagtgccacccagtggtcagtcctcgcgatgccgccgcccgctcccctgtgcggtcctcagcggcctgggagaagacagagaaaatga

SEQ ID NO: 89412 - DNA, 122 bp, Homo sapiens
ggtccgtgctcgttcggcccccgcggccccgggctgttttccccagacccagctgccccacgggctttgccttgaggtggtcttagacaaaagagcccgacaagggcagcaaggaggttcct

SEQ ID NO: 89413 - DNA, 122 bp, Homo sapiens
aatgccatccctatgaatataccaatgacattcttcacagtcctaaaattcacatggaatcgcaaaagacccagaatagacaaagctatcctgagcaaaaagaataaaactagaggaatcac

SEQ ID NO: 89414 - DNA, 122 bp, Homo sapiens
ttcgtttgttttgtattcacttctattattgtctggattaccccgacaactggtgcgttacgacttaggagaaggaacaccagttcaaaccgcttataataaaagcaaaggggttgtgttaa

SEQ ID NO: 89415 - DNA, 122 bp, Homo sapiens
cctcagtagatgagagtatggggggcagctcacacgacagaggcaaagcccatccacgtgcgaggtgggtgtcatctgtgaagatgcatctgtgggaagtgccagggctcttcccagggcta

SEQ ID NO: 89416 - DNA, 122 bp, Homo sapiens
gccctggccggggagtttctcggccccggccgcgaatagcagcagcagatgcagcgccgccgacaagcggaacatcctccgtacacgtccacacgccgccatcttgagtccgcggcgagctc

SEQ ID NO: 89417 - DNA, 122 bp, Homo sapiens
tcatgggacttggtgtcaggacttaggtttgaattccagccttcctctaattagctgcaccgccatagatgagcttctgagcatttctagtcatgtgtgaaatggaaatgacagtaatactg

SEQ ID NO: 89418 - DNA, 122 bp, Homo sapiens
agggggcatatataagaggcttgagaaacttttctgggaactcagctcacaggagtgtcccgcggaatgccctgccgcttttcgccacagcatctctcttgcactccgcgttcaactggcta

SEQ ID NO: 89419 - DNA, 122 bp, Homo sapiens
tcacgtgacttgttattgtgttgtttccttctcggggacagcggcttcctgcagccctagcggggcacacatacctgactcccaaggtttcagcccctcctcttctcagcctccaaactcat

SEQ ID NO: 89420 - DNA, 122 bp, Homo sapiens
gtcaagagtacgggtggaagacatccctctgggattggccagttaatactggggcccagccggttaggcaaaaacaggacccggtccccagagaagctcttcaaggtatccaggtccgtctc

SEQ ID NO: 89421 - DNA, 122 bp, Homo sapiens
aacaaaaaagccttggtgacaattccagtgcttcaccctagacagcctttcctgggcttccgtgagaaacgaatttatacaaataagatttcacaccacagctgccgcggccactgccctcc

SEQ ID NO: 89422 - DNA, 122 bp, Homo sapiens
caggcgggctaggccggacccggagggaggggctcgggctccgggaggcagctgcggctccgactgctcaggaacctcctcctgggcccggcagagagagaccccgagtcccccggagtccg

SEQ ID NO: 89423 - DNA, 122 bp, Homo sapiens
gcggtgagatctagggcgggcccttgagagggcttcatgaatgttctccttgaccaatcccgtcgccgcatgcaaactcaagaccaagccccgcccacaagccttcagccagccccaggtcc

SEQ ID NO: 89424 - DNA, 122 bp, Homo sapiens
cgcctacctggacgctggctactgttgtcggctctgtgaacaggcacacagggtttcctccgggtgtgggatggggctgcccgggatgggggttggggatgctggagcagtgggagatgtcc

SEQ ID NO: 89425 - DNA, 122 bp, Homo sapiens
ttcatacacagaaagctggtgttacaggggcacagagcgggtggcgaatcatcgtgaaagcggtaaatttttaagtcctggccaaaacagtgtgatgaagatagtcctctcttgagcatgat

SEQ ID NO: 89426 - DNA, 122 bp, Homo sapiens
atcatacatattggagtttattcctatatgtattgttgctttttgttgccattataattgcgttcttgtcccagttatattttgcaagtgactatggtataaagggaagtttttgcttttta

SEQ ID NO: 89427 - DNA, 122 bp, Homo sapiens
tccactatgcccacctgcagggcctccgccggcgggaagagcagccccagctgcagggcacgctccgccgcccggtgcccgatggtgttctccagggtgtctttcaacctggaaatgcagac

SEQ ID NO: 89428 - DNA, 122 bp, Homo sapiens
ctgcccagaatccaccaccaaaaacggaagcagaggagagatgagaagcagcaccctctccggggcacagcctcgcccgggcacaccctcacccgggcacagcctcgcccgggcacaccctc

SEQ ID NO: 89429 - DNA, 122 bp, Homo sapiens
gctgaaggtgtctgctgaccccacacccaacagctcgggtaacaggccttactgtcagagcgatctggttgccacgtctctgtggccctcagagagacatcatgttttcttttttccctgca

SEQ ID NO: 89430 - DNA, 122 bp, Homo sapiens
ccttggggccctttgattggaagaacgtgcagcgcacctcggcattgagggcggcttcctcggggcgcggcgccgcccgcctctgagtgcgcctgtgagtgcgcctccgagtgggcgtggga

SEQ ID NO: 89431 - DNA, 122 bp, Homo sapiens
ctcgatctcctgacctcgtgatccaccagccttggcctcccaaagtgctgagattacaggcgtgagccaccgcacccggctagttctgtatatttttaaaagttttttctttttttagtttt

SEQ ID NO: 89432 - DNA, 122 bp, Homo sapiens
gcgtggggctcccggggcccacacactcacggcacgtccttgagtgtgtggcgcagctcgcggccgaggttctggatgtacagccgcaggccctcctgcaccggctgccccgtcaggtgcac

SEQ ID NO: 89433 - DNA, 122 bp, Homo sapiens
aggcatttagacctgctttatggggaaagaatcaggactgtggcttccgtggccagtgtgcggcagttgccaaacaggtcatgtggtcctggttccccaggattcccaaaggctcaattctc

SEQ ID NO: 89434 - DNA, 122 bp, Homo sapiens
cggcacaggcaccagggcgggggtctaggggtgccggcctgttggggagcggcttgctcacgctggggaggcggcagccccgagcgctgggccaggagcatggactcagcccaaggctggac

SEQ ID NO: 89435 - DNA, 122 bp, Homo sapiens
gatctccagaggacacccctgccaagccacccggatgcagagcctttgagtggcagctgccgtggccggccggaagcatggcggcggcagggaggcccctagggtgtggcagggcgggtcta

SEQ ID NO: 89436 - DNA, 122 bp, Homo sapiens
aatcagcccctttgtgggctccattttgctatactctatgttctctgagagtgctaccaacggaattgagaaaataaccatccagacgggctatttgggggctgatctttaccctggaatct

SEQ ID NO: 89437 - DNA, 122 bp, Homo sapiens
atgccagttgtaacttctctttagtacaagtgaattcaaagttcaagagaaacgaaaacccggaagatggctgaggaaccaaggtaaggatggaagactgctctaagccaggggctggggaa

SEQ ID NO: 89438 - DNA, 122 bp, Homo sapiens
gtgctccataaacacctattgaacaaatggatgattctgcagcccaagttcttcccactacgctctactattacaaaactgttatccctctgtctggtacacagttctgataccaaggctga

SEQ ID NO: 89439 - DNA, 122 bp, Homo sapiens
tgcattctgggaccactagcgtttgccccggtataaaaaccgatcccgcgtctaagcagccggtatttcatcacctacaactgtaacatgacggcacaatttgagcgtggctgcgaaatatg

SEQ ID NO: 89440 - DNA, 122 bp, Homo sapiens
tatgtacaataaaatccattgcttttagtgtacggccctgtgaattttaacaaacacaatcgtgtgaccaccaccacaatcaagacgcagaatagttctatcgtctcaaaaagctccttggt

SEQ ID NO: 89441 - DNA, 122 bp, Homo sapiens
gcgccctctccctccactcctcctaaaagaagatttcacactggagacagaatttcagaacgagagaaaataattcgattttgtcctttattagggcctcattaaacacgaaagttgctttt

SEQ ID NO: 89442 - DNA, 122 bp, Homo sapiens
tacccgcgcgcctccatcgcccgcacgctgcgcaccatcgtgcgggaggagggcgccgtgcgcggcctctacaaaggcttgagcatgaactgggtcaagggtcccatcgccgtgggcatcag

SEQ ID NO: 89443 - DNA, 122 bp, Homo sapiens
gggcacagttgggactgaacgcaggggctctacctgtgccaggtgtccacacctcggtggcgctcggccgcctgacctcctcttggagttcccggctcagggcagggggtcgcgtccctgcg

SEQ ID NO: 89444 - DNA, 122 bp, Homo sapiens
ctattgcggattttttccaattaacgaaccagcgtgatctctgaacatgtgaaacggtcgcggcttctccggcgcctagtcctggagtcacttttaatctaagcaccactccagtgagaacc

SEQ ID NO: 89445 - DNA, 122 bp, Homo sapiens
agtttcttccttctggtgggttcatggtctcgccggctcaggagcgaagctgcggactttcgcggtgagtgttacagctagctcttaaggcggcgcatctggagttgttcgttgctcccggt

SEQ ID NO: 89446 - DNA, 122 bp, Homo sapiens
cccgaggtttgctggcggggcggcgctcactaggaccccgcggagagccccgccgagccccgcccactcagggatgtactgggcccgctgctccgccccgacgccccctgggtggtctggac

SEQ ID NO: 89447 - DNA, 122 bp, Homo sapiens
cctgagacaccactgaccccttctggaacatgcaggtgctcctgccccacacctacagcacgttgggggctccctgccagcctgtctgaaccaccacttctcacactgggtcctgccatgta

SEQ ID NO: 89448 - DNA, 122 bp, Homo sapiens
tacgcgtgaagcccccgggaagccaagccccaggaagggcccattatgccgatgaagacacgagagaatgaaggatgtggacactgccccaaacactcgggaccaagagaagatcccagaac

SEQ ID NO: 89449 - DNA, 122 bp, Homo sapiens
actagcattctggcaggtcttagaagttataatacaaaaccatcagttaaattctaatcacgactgtgtagttcctccccaaaataattttcctcttagaagtaaaatcaggaaaggggctg

SEQ ID NO: 89450 - DNA, 122 bp, Homo sapiens
ttgctgggctcagtagtgaagctgcatcttcgcggtgagtgttacaactcataaaagcagcgtggacccagagtcagcagtagcaacatttattgcaaaaagtgaaagaacaaagcttccac

SEQ ID NO: 89451 - DNA, 122 bp, Homo sapiens
tggccataactataggccccacaggaccgtctcaacttccagtacttctgggaatgacttcgaggagacaaaagcacacattcgtttctctgagtcagctgaacccctaggcaacggggagc

SEQ ID NO: 89452 - DNA, 122 bp, Homo sapiens
gaatcgggatttccgaggtcacaacaaaggctatatagaaggccctattatttccgtgggcgcaacagaggcttttatccatggggccagtataacggaggaggctatggaaactaccgctc

SEQ ID NO: 89453 - DNA, 122 bp, Homo sapiens
actaatattactgaacttcaacttaaaattagaatgcacttctttttgaaaggccacactcgtattctgactgacagcaacctctggaagctgacattttctctagaatcttggaaataaag

SEQ ID NO: 89454 - DNA, 122 bp, Homo sapiens
ggtgggaggggccctcggaggggcccctacaagggatcccagtccgcagaattaaaaattcgttcgcaagggagcgcccttccggggtcagggtcgtgaagagacactcgagaattagggtc

SEQ ID NO: 89455 - DNA, 122 bp, Homo sapiens
acctcaggtgatctacctgcctcggcctcccaaagtgctgggattacaggcatgagccaccgcacctggcttgaccattattactgttactgttatcggcattgggtgaggcagtgggtggt

SEQ ID NO: 89456 - DNA, 122 bp, Homo sapiens
caagctgcaggcacttcatgacagataaagcctgcagagttacacgacacttacaagatacgactttagacagtgcagataaaatgtatatatgcattggcctgaaaaaaataaagataact

SEQ ID NO: 89457 - DNA, 122 bp, Homo sapiens
ttacgggcccttctccgccagccctggctgggtcacccccacgacccgggactcccccgccgttccctcccgggctgcctgcagtgaggtccgctcctgaggcctcagcctcgccgggggta

SEQ ID NO: 89458 - DNA, 122 bp, Homo sapiens
gggaagcgttcgggagaaaagtgtgtggccgcactagtggagatccccgccgacaggacccgcctctctccccaggcccggcggggccgaccccgcttctcgctcccagcataccgtgcgat

SEQ ID NO: 89459 - DNA, 122 bp, Homo sapiens
tggagatccacccgtgtctctgaaccatggcgtggagatccacccgcatgctctgaaccacggcatggagatccacccgtgtctctgaaccatggcatggagatccacccgtgtactctgaa

SEQ ID NO: 89460 - DNA, 122 bp, Homo sapiens
agacaccgaggcctaggaaggcaaaaattacaggcccaaggtcacccaggttggaagcaccgggcactgaaccagatggctggaatccactagagcaaggggattttcaggggagccaggct

SEQ ID NO: 89461 - DNA, 122 bp, Homo sapiens
tcctgtctcagccttggtgggcagctcttctcggtacctggggggcccccaccctcgccccggtcctccgaagctgtccccagggtctggacgggagcactcacagacaagccgaagagctg

SEQ ID NO: 89462 - DNA, 122 bp, Homo sapiens
aggcaggtgaagatgaacagggaaccccacccaggcagagggcccagcacgcgcaaaggccgtgaggtcagcaagagtttcccattggggtgttgacgaaagagccctccccagggcagatt

SEQ ID NO: 89463 - DNA, 122 bp, Homo sapiens
cttataaactcaagaattgcagtgagttactagtttctttaactctggggcatgacatcacgtggactgtgccaaggcttcttgggcaggatgctctgtagctgagatcacccatggccaca

SEQ ID NO: 89464 - DNA, 122 bp, Homo sapiens
gccttctctaagcagctcagcctgtgtttctgtggccagaaagttgcagttcttcccactcgaggccaccaaagtcagaaaagtgttgcaaatgggactccgagaggccaggctgaagctgc

SEQ ID NO: 89465 - DNA, 122 bp, Homo sapiens
tgacagagcaagattctctctcttaaaaaaaaaatcttaattcagttctaattcacttctcgaggagagtcatgtatctggtaaccttggcattgttgcatgtaagagaaaaccagaaagga

SEQ ID NO: 89466 - DNA, 122 bp, Homo sapiens
catcattatcatcaacactatcctacagaagttactagtaccactgaaatagtgttgctacgttcaaagtagcagctataactagaagagatacatgcgagatagctgaaagcttgaagaac

SEQ ID NO: 89467 - DNA, 122 bp, Homo sapiens
tgggttccccctgggtggagcagcggcagcagagcgggaaagtggtggaggatgatcttgcggccaaaggggacctcggcgcagtaatgtcaacatgtaagtctcacctttcagcttggaat

SEQ ID NO: 89468 - DNA, 122 bp, Homo sapiens
ccaacctctgccccaagtcactgggcgggcgcctgacatcgacatgcaggctgtaccccccgcgcagggcacagggatcccagggccttcagaagagccagagtctagaaccggtgaaagtg

SEQ ID NO: 89469 - DNA, 122 bp, Homo sapiens
caactacatgctcatgtgctgtttggtatcctaatttggtgtccactcagctgggtgtttcgctcttgcttttctgcatgaactgtcccagtgggcccctttgtcagcagcaggattcaatc

SEQ ID NO: 89470 - DNA, 122 bp, Homo sapiens
gtatctgccctgactgcctgtcccacaaacaaatggtggattgtgacttaagcccaggctcgctttgagaatattctgatgctggcagcaggtggtggtgtggttgtggctgttgcctgtgt

SEQ ID NO: 89471 - DNA, 122 bp, Homo sapiens
catccttttctttcaacttctattcaggattagtagaaaaacactttgacacgtttggggcggaagagtggtacagggaggggtggtgcctgagacaggcctggcaggagaggagtgttgac

SEQ ID NO: 89472 - DNA, 122 bp, Homo sapiens
tgcatttatttcttactccgtatttctgataatgctgaattttttatatgccaattgtcgcgtcatttccttggttgtcttcttttcttcaaactactctgaatgtcattcttctttttctc

SEQ ID NO: 89473 - DNA, 122 bp, Homo sapiens
atttaagtgttggactgctaggagaacttgtacatttatgataatgcagaattaggaaaacggttcaccagtgtttagttttatattgaggtgctcaggttggaataaagtggtataaaaag

SEQ ID NO: 89474 - DNA, 122 bp, Homo sapiens
cgagcgccgggggttgtggaggaccagcccggggtgcagccctgccggccgccccgactccgctcaccactcaccaggggaagcaaactgaagccaaatacctgttttggaaactaaggtgc

SEQ ID NO: 89475 - DNA, 122 bp, Homo sapiens
taacatgatgtatctcacactcagagaatgtggtgcaattcgagccctacctgtgcctggcgtctagatctagatggtgttcaaggaaagtttgctatcattgtgtcttcgtttctttcctt

SEQ ID NO: 89476 - DNA, 122 bp, Homo sapiens
tgggagcagctctcaacgggtacaagagagataccaccagaagtgaaatgtcctctctcccgtgatgaagccagatctccgagcgattccatctacactgaactaaaccggtttgtgccaaa

SEQ ID NO: 89477 - DNA, 122 bp, Homo sapiens
gcgtcacgtgaggaggtggtgtcacgtgacctgtctgtaccctagcgcggggcttctgtacgctgctaggaagccgaattacaaaaaggtcgggtgggcagggaatggtggctcacgcctat

SEQ ID NO: 89478 - DNA, 122 bp, Homo sapiens
tcaaactcttgacctcaagtgatccacccacgtcagcctcccaaaatgctgggttacccgcgtgagccatcatgcccagcagaaaaggtttttaaagattaaatctaagatgtattgcagaa

SEQ ID NO: 89479 - DNA, 122 bp, Homo sapiens
ctcacaactctaagggggtccgcgtgagagggtcgggatccattgaccaagcaggcggtacgtgactgggggctgcatgcaccagcaattagaatggaacagaacaggacagggattttcac

SEQ ID NO: 89480 - DNA, 122 bp, Homo sapiens
aaatctgaggcaggccccacccagtacactgggtgatgctgatggaaaaacagatccttgcgattgtagcctggaaccatttcacagaaggatctgctgagatccaccccagctggatcagg

SEQ ID NO: 89481 - DNA, 122 bp, Homo sapiens
gtgcagtggtacaaacgtaattcactgcaatctcaacctcctgggctcaagggctcctctcgttttagcctctcaagtatctgggactaaaggcgtgtgctaccattcctggctaatttttt

SEQ ID NO: 89482 - DNA, 122 bp, Homo sapiens
gttgagtccacagatgtgtaacccacagatacggaggaccaactgtgtttacttacaaaacgagatgaatcaattcacttatcagtactcgcagcaagtgttttcctgactgctaagactgc

SEQ ID NO: 89483 - DNA, 122 bp, Homo sapiens
tacctacctctcacgggccctcagcgacccattgttaacgaggacttggaacatgagtatcgaaatgttccctcccatcctaacaccgtaggatcagtactttactgactcaaattactagg

SEQ ID NO: 89484 - DNA, 122 bp, Homo sapiens
cctgggggggggcggatgagcgctcgagaggggctttctgttcgcagcggagggtctcagcggctacgcggtgcggtacttgaagcccgacgtgacccagacctggcgggtagggagcgctg

SEQ ID NO: 89485 - DNA, 122 bp, Homo sapiens
caagcatgaacctggatgtgcctggcctggtcccgggccctcagcctcccaacgcccctgcgcccgttctcactggcacggctcagtgtccacaccgggccagcagcgcaggaactggaggc

SEQ ID NO: 89486 - DNA, 122 bp, Homo sapiens
cagcagagctggtctgtaaaggggcttaaatgactttctttgtaattcctctgcagagatcgttccatatctgcctcaggctccttctctccctccctccctccctctcccccttctttcat

SEQ ID NO: 89487 - DNA, 122 bp, Homo sapiens
atgaaacaaaagaatgagtgagatttaggcgggttatctgggggaggggaacggcgtgggcgaggccaccacatgatgtggtgacaagctcaaggtggagcgctcttttcttcctaccgtgc

SEQ ID NO: 89488 - DNA, 122 bp, Homo sapiens
catgatccgcccgcctcggcctcccaaagtactgggattacaggcgtgagccaccgcacccggcccaagtcaaggaaactttcaaggagttttacagcaaaggggagaaaagaaaagatgtg

SEQ ID NO: 89489 - DNA, 122 bp, Homo sapiens
gagtagctctgaagcgagggggcgtggcctcgcctgagttctaacagatgattggtcttccggcaggtaggtggggaatgagtgctacccccacccctccctcttcgaaccggaagtgtctc

SEQ ID NO: 89490 - DNA, 122 bp, Homo sapiens
ctctgtctgtccgtgggcagagcccgcgtctggtccagagtaactccctctgtccaggtccggaacagtgtctcaactggccaggcggtggcagtggagctgcttctgaccctgcagctggt

SEQ ID NO: 89491 - DNA, 122 bp, Homo sapiens
cgtctgccgaattggactggagtagctgcagcagctgtgacctggcggcaagtaaccggacgaaatggaccgatggccgtggaggagaagcctgacctgactgagggagaggcctgatccga

SEQ ID NO: 89492 - DNA, 122 bp, Homo sapiens
tggttgccggcagggtggagcagctggagggccaagcctttgagctccagggggggtggccgggacagtgggtagtgccagccgatcggcgtcctggggattgcctgaatgtgaggtctggg

SEQ ID NO: 89493 - DNA, 122 bp, Homo sapiens
actagtttggcaattgttttttcattctaattttaaagtgcctgatttgatagcctctgacgttttcataagcagatcagatagtttcagcattttttgaaattgccgttttctctttcatg

SEQ ID NO: 89494 - DNA, 122 bp, Homo sapiens
ttgcaaatgaagatgttgaggggctggctctgggctcatagcagaaactgccagatctagcggccacccctcagtcctcatctgcgccggccctcccagctttcgacccggcctcactgtct

SEQ ID NO: 89495 - DNA, 122 bp, Homo sapiens
cccaggctgcatctcccatccccccggtgcacacgctgtgttgctgcatctcccaacccccggtgcacacgctgtgttgctgcatctcacatcccccggtgcacacgctgtgttgctgcatc

SEQ ID NO: 89496 - DNA, 122 bp, Homo sapiens
gttagaaaaaggcaggtggacatatttagcttgcgaagcttgcacaaggaaaatccagagcgtctccagaataaggatcccacgagagaacgtggacacaagtaggccctcagccagccttg

SEQ ID NO: 89497 - DNA, 122 bp, Homo sapiens
tgtggtgtgggttgggcaggaacagatcataataagggaggtttatgattccagctggcacgctgtggccacaaataggatgtcagcttttgatcaatgaagctcatagggaaactccaacc

SEQ ID NO: 89498 - DNA, 122 bp, Homo sapiens
cggcctgcacctgcgcctgcgcctgcgaggcgccgcagccctgcatctggccgagcagctcgcccacctgctcctgctggcggtgccacaggtagctacactcctcttgcagtgcctgcgcc

SEQ ID NO: 89499 - DNA, 122 bp, Homo sapiens
tcccaagccgcaggggcttcccagacctctcaatcttcacaggggctgctcctcttcctgcggtactgcccgcaccccatccttgggggcccagttcaggtgacaccacttcaggaagttcc

SEQ ID NO: 89500 - DNA, 122 bp, Homo sapiens
tgatttgatatttattttatcttgctaggtttggaagaggacagttgccctttattctggcggcagatagcagcaggtgaaaaagtgctacacaagtttgatgtttgtgtcttcttctccaa

SEQ ID NO: 89501 - DNA, 122 bp, Homo sapiens
acctgcggttccggattggtgttccgcggcgcgggtgtgttggtgctctccaggcacctgcggttccggattggtgttttgcggtgcgggtgtgttggtgctctccaggcacctgcggttct

SEQ ID NO: 89502 - DNA, 122 bp, Homo sapiens
ggcggcggcggctcccgggcgggggtgggggcgctggtcgggaggctctggggaaggagccgccggccccgagcagccatcattaccgagccgcctttctccggatggctctgcctcgagga

SEQ ID NO: 89503 - DNA, 122 bp, Homo sapiens
gagaatggagtctgcaggagccaggagcgccgggcggccctcctgcccggcgctcatggccgccctccccgcagaggcccagcgccggccctactatgccgactactcgcccacgcgccgct

SEQ ID NO: 89504 - DNA, 122 bp, Homo sapiens
tgctgaacacagaggaggaactcagtaactgttaattgttttgctctctaattaggcccacgatagagtagatactattgggtgctggtttttaggggtgtaggaaaggaatctggggagtc

SEQ ID NO: 89505 - DNA, 122 bp, Homo sapiens
gtcgcactgccacttacagccgcactgccatctacagtggcgctaacatctacattcacgcggccatctacagtcacactaccatctacagccgcgctgccacctacagctgcactgccatc

SEQ ID NO: 89506 - DNA, 122 bp, Homo sapiens
cacatcccatccctgggcaccccctcggctcttccgcaaggggtttagtaatcggttctccggagtgaagcaatctcatgtaatctatcagtggctatcaggcccatcggagggccgggagt

SEQ ID NO: 89507 - DNA, 122 bp, Homo sapiens
cctctctattccccgctaattatcactttgaaatctaggcggaaatcctttaacaagctccggggctgggccctcattagggataattacttaatcagtaggacgggagggaatgcgctccc

SEQ ID NO: 89508 - DNA, 122 bp, Homo sapiens
ctgaatttacctcacaaggccactgtgaagagaatgaaactgaaatatgtagaacattctcggcctctctgaggatgggtggaatcagaacagagtaattaccccttgtgctgtcttgtatg

SEQ ID NO: 89509 - DNA, 122 bp, Homo sapiens
agagaacgggcgaagggcgggcgtggagaccctcgagcttgggggaggccgcgccccagccgggaaggaaaagagtgcttagtcgaaagccgagaggcagcactcccaagtggaggaggagg

SEQ ID NO: 89510 - DNA, 122 bp, Homo sapiens
ccctccgcggccgcgccccccgcccagcccgcggcgcaggcctgccagtgcggcgaccgccgctttgtcctctcgaggatgcctgggccgagcgcgaaagccccatgccttggaacagccac

SEQ ID NO: 89511 - DNA, 122 bp, Homo sapiens
gacaggcctcgcgggaggggcgcgagggcccagggcccgcccggcctcgctgcctgccggcgcagcgccgccaaacccgcagccgggatcccaagcctgagccggtacctccgcccggccgc

SEQ ID NO: 89512 - DNA, 122 bp, Homo sapiens
ctaggagccactggcgtggcctcagcgtcactaaagcaggtgcagtgcgctgagagtgcgcgggctcaggccctcaagtgaagtatttcgtaaataaagtggttccattttcatgtcaaata

SEQ ID NO: 89513 - DNA, 122 bp, Homo sapiens
cccgctcccggcgcggcccgggccgctcccgactcccgccggcaggggccctcgccgagccgcccagaagccggaggaaaaaggagccgagaacaagcctcccccgccctcgccctcgcccg

SEQ ID NO: 89514 - DNA, 122 bp, Homo sapiens
acccaccatcaccaccacaaatcccaacatgcagaagattatgaacagacagataaggctcgctctgcagataggtagggacaggacagtaaagaaattcggaggcaagtttttagacagtt

SEQ ID NO: 89515 - DNA, 122 bp, Homo sapiens
aactgggcttgtatcggaaactggtcgccaaggacgggtcgtgcctgttccgggccgtggcggagcaggtattgcactctcagtctcgccatgttgaagtcagaatggcctgtattcactgt

SEQ ID NO: 89516 - DNA, 122 bp, Homo sapiens
ttagaatgcacattctccttcagtaagtatggggcagggccaagaatctgcatttctaaccggctcccaggaggtgctttgggccaaaggaccaccctgaggagctatcccctccccagccc

SEQ ID NO: 89517 - DNA, 122 bp, Homo sapiens
aaggaagcggcaattcttgaccctcagagtaaggtggcttcctggagcagtgaccagaaacgaactttaactgctgctttctgcagcccaggctgggcaaacaacagtcccagctcagcact

SEQ ID NO: 89518 - DNA, 122 bp, Homo sapiens
atttgtgcagtctcgtccagagcgttagggaggtggaatcaggcaggaggagctccttcgcgtctggccgcctttgctcagcccagcggtttaggcttcgggtggcagttgcgtgcatcagt

SEQ ID NO: 89519 - DNA, 122 bp, Homo sapiens
caggatgtacagactggcagtgtctatgtgcccatgcgtgtgtgtttgcttctcccccaccgtgtgcctctgctgggcagccatgtgccagtctgtgtacacgtctgcattaacctgtgtga

SEQ ID NO: 89520 - DNA, 122 bp, Homo sapiens
gggaaagaaccagggcttgttattgtcaatagcacaagaggctaaagatggcgccatttccggtcacgcggcgccgagggaggggcggtgtcaacctcagggagtgggggtgagggaagcgc

SEQ ID NO: 89521 - DNA, 122 bp, Homo sapiens
ccacttagtggttgcttttggttgtaacacaagatgactcatttggacttttgttttccccgtttgaagaaatgatagctcgaacagctgaaaaataagcccactcccaccagtattctagg

SEQ ID NO: 89522 - DNA, 122 bp, Homo sapiens
gactccgcgccagcccagcagcccagcagcagcgccgcggctactgagcatgcccagcgccggccctcacgaggcaagggaatttcaaagtgaaattccgcttctccgggtcttagcggcgg

SEQ ID NO: 89523 - DNA, 122 bp, Homo sapiens
cacgcctctctggcctaggcaccattacatcaccctgggtgcatccggactttctagcaacggctttgtttacttgattgagtaaagagaagttggccttttttaacttttaaattagacct

SEQ ID NO: 89524 - DNA, 122 bp, Homo sapiens
cttccacctcggccttaaataattttaatagttgacatgcacatggcatttactattggccggcattattttaaggtgcctgctctgaaggaattctgttagccttcctaaattattccctt

SEQ ID NO: 89525 - DNA, 122 bp, Homo sapiens
ctcaggtgatctgcctgcctcggcctcccaaagtgctgggattacaggcgtgagccattgcgcccggcctgtatcttttgttactaaagtggcactgctagtacttgtctcaggtggccttt

SEQ ID NO: 89526 - DNA, 122 bp, Homo sapiens
gcctcctcccttagcttcccaaagtgctgagactgtaagtgtgaaccaccactcccagtccgagacctggcttttgacttattatacctgtgctcctgcttcctgtgtggcattgggcaatc

SEQ ID NO: 89527 - DNA, 122 bp, Homo sapiens
acacacaccaaaaaaaaaaaagcgcatcattcaaaattcacagctgggtgcagtggctcacgcctataatcccagcactttgagaggccaaggcaggaggatcacatgaggccaggagtttg

SEQ ID NO: 89528 - DNA, 122 bp, Homo sapiens
ttaactctaatcaaactggagattattctacttcctgtgagcacatttactggcctttctcgaccattcctttgcccttgtgatcaaggcttcctattgcctgaggaaattctcaacaactt

SEQ ID NO: 89529 - DNA, 122 bp, Homo sapiens
cccccgcgttcttcccacctcccgattggcaggccccgaaccggcacgcccccgtgagcccgccctcgaaatcactcttaaagggtccgctcctggctcgcgactccccagttccctagccc

SEQ ID NO: 89530 - DNA, 122 bp, Homo sapiens
gctgaagtgcatctaaaatagctgaatccttctccagtgagctgagccacaggccttgcacggaaagacctgggaaacattagctagcttctggtctggccataatgaaaataaatgagggc

SEQ ID NO: 89531 - DNA, 122 bp, Homo sapiens
acattttactcctcaaacccaaatattgaagccaaacccaaatccactaaccagctctctcgccctatctttaggtgttcctctacttggaatgcctttcctactttgtcccttgtcactct

SEQ ID NO: 89532 - DNA, 122 bp, Homo sapiens
aacagggtagaaaagtacagactaggaagcagaatgacccttcactgaatgggccttttgcgtaaggcctgagaagcaagccgagtgccattagagatgtgctgaccaggcattcctataaa

SEQ ID NO: 89533 - DNA, 122 bp, Homo sapiens
agccggttctttcaggccttccagcgccggagcctcgggcgtgggcaaaaagcgtccatacgcagcctgagccacttgggagcccccagtttccgaggcagaagaacagtgcccaccagcgc

SEQ ID NO: 89534 - DNA, 122 bp, Homo sapiens
ggtaaaaggatgaagtttggtttccatttttctctctgcctcacgtgcttccttgtccttcggtcatgttacgatgtagcaagaaggccctacagatacagccccttgatcctggacttccc

SEQ ID NO: 89535 - DNA, 122 bp, Homo sapiens
gcgggaccagagcactggcggccgcggcttgccccgcacctcgcattgcagctcggcaggcgatccctcgcgcacggtcaccacggccctacccttgggcacactgatggtgggcggcactg

SEQ ID NO: 89536 - DNA, 122 bp, Homo sapiens
aggacctaaatgatgggaaccctttcccttcagtcaaaggaccttcagcaggaggtggggcggaggacaccaggagagggaagttccagaatctctggaagggaagggaggcaggcagagag

SEQ ID NO: 89537 - DNA, 122 bp, Homo sapiens
cgctggccttcagggtggacccgttcaccgactacggctcctcgctcaccgtcacgctgccgcccgagctgcaggcgcaccagcccttccaggtcatcctgcggtacacctcgaccgacgcc

SEQ ID NO: 89538 - DNA, 122 bp, Homo sapiens
gaagcggcccggctccttcctcctcccccggggcgtgactaaggtcacgaatccggcccgcgacgacagcaaaacaactcaccgagaggaagagcatgtctagcagaagacagagggggtcc

SEQ ID NO: 89539 - DNA, 122 bp, Homo sapiens
acatagaatccatccctcccagctctgccggccgtctgtgcctgccccccacgtgtcccacgttctgcacacctgtaaatcttgggatgtaatcccttgctcagcgtcggtccgccctactg

SEQ ID NO: 89540 - DNA, 122 bp, Homo sapiens
taaaaatacaaaaaattagccgggcttggtggcgcctgtagtcccatctactcgggaggccgagacagagaactgcttgaacccgggaggcagaggttgcagtgagccgagatcgcgccact

SEQ ID NO: 89541 - DNA, 122 bp, Homo sapiens
ccgcggtctggctgtgcctgggccaactctaggcagccgggggaggctgccctcagaccccgtgtagggaagtggccggcgggcaccgggcttgctgcaccgcagggctctgccttagcctg

SEQ ID NO: 89542 - DNA, 122 bp, Homo sapiens
actaggaagggaggcgacagcagaaaagccagagagtccagagactcctaggcaggcctccgtgcagccccaacagcgtggtgccgggaggtgtgtgtgtgtgtgtgtgtgtgtgtgtgtgt

SEQ ID NO: 89543 - DNA, 122 bp, Homo sapiens
tttgaatagctcattgacacaattgcctcggagatcggagaactgaaacaggagatggtgcggacagatgtcaacctggaaaatggcctggaacccgctgaaacccacaggtgaccagagac

SEQ ID NO: 89544 - DNA, 122 bp, Homo sapiens
agaccaggctgggctccttgctgggcacacggaagcctctgccttgtgttggtgcccgtgcgggatgctgccaggagtgtgttggtggcgtgtgtgtgcgtgaacgtgtgtgtgtgtgcgcg

SEQ ID NO: 89545 - DNA, 122 bp, Homo sapiens
gccgcccaggttgcgtttcctcctcctgttccagggacattttgcgctggttagagtggccgccgccgccaggccgcgcgtggaggaggagccgggcggcgagccccgccccgggccgcgcg

SEQ ID NO: 89546 - DNA, 122 bp, Homo sapiens
tgaatctatgcaactgggcctgagactccactccaggcactgacttctccctaggacaatcgcaccatgggctcctgcctcttctcctccttacagcccttcccttcctgggctgtcctcaa

SEQ ID NO: 89547 - DNA, 122 bp, Homo sapiens
ccacagttggggctacttcctgtgctgaaggaagtcctcttgccattcctgctgccctgccgctgcctccctgggaacccatgtgtccttgtggtattgaggccttgaggtccagggcactg

SEQ ID NO: 89548 - DNA, 122 bp, Homo sapiens
aaaaatattgaaaaaaataccagggtgggtgcaggggtggggctgagccgaggagccggacgcagcgagagccaggcggagtcagggaccccggcatcccgggcgggcggagtcagggcccc

SEQ ID NO: 89549 - DNA, 122 bp, Homo sapiens
tccgtaagtgcttttggagggcttcaatcccctgcaacccagtgctctggggagggcaggcgtcacccccttaggagctgatctgactcagcagggctgagaagtccatgtccgcaatggag

SEQ ID NO: 89550 - DNA, 122 bp, Homo sapiens
aatgcgcggcccagtgcacgggcgtccagccatagaaggagtcctcagaggccaggtgggcgtggggtgtctgctgcagcagcgagcagagcgtggccaggtccccgtcgcggcaggcgcgg

SEQ ID NO: 89551 - DNA, 122 bp, Homo sapiens
ccaccgttttcgcagagggatactggtgaagcgggagtggtgtgcggcctcaggtccgggcggcactggggttagggactgcggagggaagtggtgcgtgttttttgtcctgaggggtaagt

SEQ ID NO: 89552 - DNA, 122 bp, Homo sapiens
agaggctggggagacctaatgggcagggtccccctcatctccatcaccaagctgagcactcgtgcccatgccaccccccagccccagcctggggaaaggaggaaaagtgggcaccctagccc

SEQ ID NO: 89553 - DNA, 122 bp, Homo sapiens
gagtttgtgacgcagcccggggagccactcgtcccaggggcatcaggagtttgtgagccccggggtgattttaaaaagccaaaggtccagagtgatttcactggaccaggttcttcttccct

SEQ ID NO: 89554 - DNA, 122 bp, Homo sapiens
ctggggcagcggcggcgctgggtgacgccggagggggcgcccgacttgaaccaactgcggcggacccgggagccggggtccaggaatacagcccgaaccccaagaatacaacccgaacccca

SEQ ID NO: 89555 - DNA, 122 bp, Homo sapiens
agggttctggcgcctctagggaggcctcgccttcaccgtgacgccccactcttccgggcacgcccctgcccaaaggctttaaaggcgccgtgtgggacgtcactttaatgcgacctcatctt

SEQ ID NO: 89556 - DNA, 122 bp, Homo sapiens
aagaggcgtctctggaggtaacttttcgaccttcctgggagtagctctgaagcgagggggcgtggcctcgcctgagttctaacagatgattggtcttccggcaggtaggtggggaatgagtg

SEQ ID NO: 89557 - DNA, 122 bp, Homo sapiens
gcttctggagcctccggagctagctcccggcgcggagctccgcctacggcccgtccccggcgcggaaccccgcccacgagcccgtttccagcgtggaacaccgcccatagcccgtccccagc

SEQ ID NO: 89558 - DNA, 122 bp, Homo sapiens
gctgcaaggggcttgggtttctcatcaaacggcgccacatcttcagatgtctctggaagccgaattgagactggatttgggtgtgtgaagatgtttaggaccagcacgtgtgaagggaagca

SEQ ID NO: 89559 - DNA, 122 bp, Homo sapiens
tgccttcaggtccgtactgctgcttctgctcttgttcttcatcccgggtgtggttatggccgtggcctacgggcttatctctcgcgagctctacttagggcttcgctttgacggcgacagtg

SEQ ID NO: 89560 - DNA, 122 bp, Homo sapiens
taccggggctggatgaaggctggctcctggtcactcaggactcagcaacatcacctcctgcgtaggccagctgatgaccctaacaccggacggctgccctcttccctctctaaaccactcta

SEQ ID NO: 89561 - DNA, 122 bp, Homo sapiens
gataacagtgcctctgtcagagggctgttgtgggattataagagcccacttgtgaaattgcgcggtaggggtggcagtcatgatcaccgatgaaaattccaggacgggagaagaccatgtgc

SEQ ID NO: 89562 - DNA, 122 bp, Homo sapiens
attctgcagctctggggtaaggggtggggagcaggcgcccacacttcggcctcagggagtcggggcagagctctttcagctctacctctggccagctcccagggcctctccttactttcttc

SEQ ID NO: 89563 - DNA, 122 bp, Homo sapiens
ggacaagccgatggagccggtttattgggtggaagggacgaaggagaggaacccaaagcccgggtacttgtctcagaggccccaaagccaaatcctgattgctcagcgggctggaaggcgtg

SEQ ID NO: 89564 - DNA, 122 bp, Homo sapiens
gctggacacgctcaggctggcgtccagctacatcgcccacttgaggcagatcctggctaacgacaaatacgagaacgggtacattcacccggtcaacctggtgagtgctcccggggctgcag

SEQ ID NO: 89565 - DNA, 122 bp, Homo sapiens
tttaaagtgaaagacatgtgactcttcccttcacttagaagccactgtaggattattaaccggcctaatttcaatattgtggtatctcagggaatagaatagggaggcccaaggaggaaaga

SEQ ID NO: 89566 - DNA, 122 bp, Homo sapiens
tgctgtacttgagtggttagcctttttctgcttgatgctgaaagtgaccaactgtttacccggtatgtctcaaactatagattcctggctttcatatggttcagacagctccacacttccac

SEQ ID NO: 89567 - DNA, 122 bp, Homo sapiens
acaatgaaatcatgagctaagaatgcaaccttacgtacagcttatgactaccaatgtcgtcgtctgtatcttagaatcttgcagcagtgaggcaacaatttgttgaaatggagatgaaatca

SEQ ID NO: 89568 - DNA, 122 bp, Homo sapiens
ggagcagagatccctcggccgtcctggctggactgggctcagcctttgcaaaaaggctggcgggggaggggagaagcatgatctcctcaagcaaacaatgcctttaaaaatccgatctggaa

SEQ ID NO: 89569 - DNA, 122 bp, Homo sapiens
tgtccacacccagacctgcttcttccctttgcaagggcagggcagccgctccagctccaccgctgagccaggaaggccggcctgtgggcccagattaaacagaccagctctgggctttctca

SEQ ID NO: 89570 - DNA, 122 bp, Homo sapiens
ctccagcgaggcgcgggctgtggggccgccgcgtgcctggccccgctcgcccgtgccggccgctcgcccgccatgcctggcttcgactacaagttcctggagaagcccaagcgacggctgct

SEQ ID NO: 89571 - DNA, 122 bp, Homo sapiens
cgaatgtggggtgaggaaggggcaaaaaagcgatcccggtcttggctccttcttccggcacgggccggagctgacacccccacggaaaaccgcacagcgcctccgctctttctccacgggct

SEQ ID NO: 89572 - DNA, 122 bp, Homo sapiens
tccgcaaagccggagctgggcgcaacagtgttgacttgtaattgatcaatttagatcgggcgcaggccgggggagggcagtgcttttgatttaggctgggaaaggcctcctagtgactatgt

SEQ ID NO: 89573 - DNA, 122 bp, Homo sapiens
tctacctactcatgacatggcaaatagtcattttacaataacaatacagtacaatatgatcgtgctactttcatggctaggaatgaagttgttgggtttctctttcagagctacccctaaag

SEQ ID NO: 89574 - DNA, 122 bp, Homo sapiens
aaaagaaattgggggtagaagaaatagaaaactaatgcaaattagttaagacttttcgaacgattaactttgcaaaatattaagattgagaatttgtagaggatactgaagcaaaacaattt

SEQ ID NO: 89575 - DNA, 122 bp, Homo sapiens
ccaggccccgggcagtcccggggaaagtttgggccgcggcccgtagggctccccaccgtgcgcccctctccggggctgggtgccgggctccctgaggccctgcaccccagccctgggtgttg

SEQ ID NO: 89576 - DNA, 122 bp, Homo sapiens
gcccggtgggtagcctctcgcccgcgtctcccaacccctcctaaacctctggggaggagacgcccagagggtctcacctggggtgtcatgtctacccgcaggctcctcagttgtgatgatgg

SEQ ID NO: 89577 - DNA, 122 bp, Homo sapiens
ttatcagctgttcagggagaacaggcagagagcccggcagtaagtggacaacaaggctgccggttagtggcagggacagttttttgtttttcttgaaacaggggctggagtacaatgttgtg

SEQ ID NO: 89578 - DNA, 122 bp, Homo sapiens
catggaaatgcacagccccagcctcctgctgcagggagcaagttgactgacagccccagccgctgctcctggccctgagctgctctctgccaagtcctccatgactggaactcctctatggg

SEQ ID NO: 89579 - DNA, 122 bp, Homo sapiens
atggaacttgccagaggtgagggccaccagacagtttgtcacacacttttaccaaagagccgcagactgccctagcttcagcctcttcagccccctccataaccacagcattctcatccacg

SEQ ID NO: 89580 - DNA, 122 bp, Homo sapiens
atgagcactgtttccttttcttgttagtcaaaagccagatgatttttattaggttaaagacgagttcacagatggtaaatcgcgtggagagaaatgagctggagagttacaccgagtcaacg

SEQ ID NO: 89581 - DNA, 122 bp, Homo sapiens
tttctcagcggatgctgcatcgcggcgcccttctccacccccttttctcctctacttccgcgaaaaggattgcagactgccttggaaagggcggtcgtgcccagtgccactttcccggtagg

SEQ ID NO: 89582 - DNA, 122 bp, Homo sapiens
tttttcctcaaaaaaaaaattatttttcctaccaatgattttcggtgcattccgccccaacgaaaagtatgtcctggcaaagtcagttccctaggaaccccatactttattttattttattt

SEQ ID NO: 89583 - DNA, 122 bp, Homo sapiens
ctacctctcaggagggctcctgtaaaccaggcactgtacacacacctttcatttcatcttcgcagcagctctttttggtgagtactgttatccccattttgcaaataaagcaacggaagctt

SEQ ID NO: 89584 - DNA, 122 bp, Homo sapiens
ggccgtcagcctcccggccccgccccggaggcctccggtcgcctggctccggccccaccccgccatcccctggccctggctgactcgccacccccgacactgcagcgcctgccgacctcggg

SEQ ID NO: 89585 - DNA, 122 bp, Homo sapiens
gccacctccccgtgaagagaggccacatcctcatggagtccagccgtgtcctctgtcccccgcctgttcaccatctgctccctggagcaggaggagtccctgcctgtcagaccagtctgtgg

SEQ ID NO: 89586 - DNA, 122 bp, Homo sapiens
agtaagcacagtggacgctcacagagcccagagaggatctgtgaaggaatccacgcttgtcgcaccaggcagggcacagagcccccttccccagtctactgaagttgctgagtgtcatagac

SEQ ID NO: 89587 - DNA, 122 bp, Homo sapiens
acctcaagtgatctgcccgtctcagcctcccaaagtgctggaattacaggcatgagccaccgtgcctggccattattattatttgtagagacgggctttccctatgttgcccaggctggtct

SEQ ID NO: 89588 - DNA, 122 bp, Homo sapiens
gaggagtggctggtcaagtggtcgatcaggccggtcaggccggtcaggtggtcgatctggcggccggtcaggtagacagagtcgacaaggaagtcgctcaggaagtcgacaagatggtagaa

SEQ ID NO: 89589 - DNA, 122 bp, Homo sapiens
tgcagagaggaggcgaggttaggaacccccgtggcacagggggtggcagaatccagggcccgtgccctgtcagggggcagatgagccccttcccgggagcccgtttctccttcctggaggag

SEQ ID NO: 89590 - DNA, 122 bp, Homo sapiens
tttgagggcaagagactgaccatccatgcagaaagctggcctgggctgctcgctgcctgccgtggctttcccacctcattaggagcccgcttctctcggtggggagatgctgcccccagagc

SEQ ID NO: 89591 - DNA, 122 bp, Homo sapiens
ccctaggggcgggaggaggcgctaggagcggggctgggaagcgccatggtgcaggttgaacggggacattgggtcaccgggatgggtggaattagggtagggcgagtgaggcactggcttct

SEQ ID NO: 89592 - DNA, 122 bp, Homo sapiens
gcggctcccacggcggctccccagctgcttggccagtgccacagtggcccggctgttcctcgcttggtgcctggctgtcccctctggcctcaccagctgtcccctctggcctaaccacacgc

SEQ ID NO: 89593 - DNA, 122 bp, Homo sapiens
gcgaaagtgtgagccgcccagtgagttgcggaaacctggagggtacttggagtttgggttcgcatcccctctccagctgcttagtggtcgcgtgactttggacgagtaatttaacttccctg

SEQ ID NO: 89594 - DNA, 122 bp, Homo sapiens
tctgtctccccccactacacaactctacctagaagttctctgctgttctcaacccttaaccggactgggacctctctgggaatctttcggaccctctccctcccacctcccccaacattcca

SEQ ID NO: 89595 - DNA, 122 bp, Homo sapiens
gccgcctgcggtatggcagcaccgtggagagaaaagtcgtctttgggatcatcttccctccggaaagagatgggacatgaccagtctaagggggcttccagccttgcagaaaagacactggg

SEQ ID NO: 89596 - DNA, 122 bp, Homo sapiens
gttttcttctcgtgacctggggaatgtcccgccccatcgctcacctggctcttgtcatctcgctcatcttgaagtgacccgtggacaatgctgctccctgccgcagctccgccggtcactca

SEQ ID NO: 89597 - DNA, 122 bp, Homo sapiens
agctttacctgcctttggaatgtgcagagcgggatcggatccggactccgggttgcgatccgctccggaaactgcgcagcaccggaagccggggggcggcggcggggcatggcgggacttgt

SEQ ID NO: 89598 - DNA, 122 bp, Homo sapiens
gggcctgaggggcggcgaacgctgccctcgctggccactctcaccacccgcgcgaatccgcgaggcagccgctcgccccgccccccaacaccgccccgcgcatgcgaaattgggtcccccgc

SEQ ID NO: 89599 - DNA, 122 bp, Homo sapiens
aagcggcgcagccgggggatgggcgggcacatggaagggcgggggttgtggccctcgggccggaccacgggaccccagcctcgggggcgagatatctcagtacacctcgaaaactggcaagc

SEQ ID NO: 89600 - DNA, 122 bp, Homo sapiens
taaaatgggcactggtgcaaataccgtgaggccttcctgcaaagaagtgccaatctcaggcgccagggcacagacccagtgcgtgtcacagatcctgtcctgagtgctaggccgggtgacgc

SEQ ID NO: 89601 - DNA, 122 bp, Homo sapiens
agattactactatgacaccttcaaaggagatgactacaatgaggagaatcctactgaacccggcagcgacggcaccatgtcagacaaggaaattactcatgatgtcaaaggtaaccccatgt

SEQ ID NO: 89602 - DNA, 122 bp, Homo sapiens
gtgagctgtaccgccagaggcgcattctcctagccccaaaccatgcccgctacgccccagcggaatgccaccttaaagaccctaatccgggcacctcccagctcctgcttcccaagggcgag

SEQ ID NO: 89603 - DNA, 122 bp, Homo sapiens
cctcccagcttcgaggctaccacctgcccgaattggtgctttggcagagtctctggtgcccgggtgaatgggttcagggtctcttaaggaccctccgttgacgatgcctcgagctatgaccc

SEQ ID NO: 89604 - DNA, 122 bp, Homo sapiens
tccaaatcaaaaaacaaaaaacaaaaacaaaaaacagggaccaatggtggtccagccacacgatggaatattactgagcaatccaaaggaagatctgtagctcaacaacatggatggatcat

SEQ ID NO: 89605 - DNA, 122 bp, Homo sapiens
aatgaggactgatttacagcactgaagggctttgcagtgacaaaggagggccagggtcctcgagtgctttctgtatttttaagatcccagaagatgatgtggttctgtgataggaatctctt

SEQ ID NO: 89606 - DNA, 122 bp, Homo sapiens
ctaattcggacacatttagcagattagctggccatcagctggcaaaaatcagggcgtttacggcagtcggaagacaacagcgtcatgtctgtcactttacggtggacatcagccatctacct

SEQ ID NO: 89607 - DNA, 122 bp, Homo sapiens
cttggcatattgacatttgggattggttgattctacttgctgggcaggggggcgctctcccgtgcactgtaggatggtcagcggcttccttggcccttccccaccagatgccagtagcaacc

SEQ ID NO: 89608 - DNA, 122 bp, Homo sapiens
acagagtcagggcctgagtcatcggaggaaggctggcgtgactcggtcacttggtgtgtgcgtggtggtgtcgcttagtcatcctggaaaggcctgcgtggtattgcgtgcactctaagaag

SEQ ID NO: 89609 - DNA, 122 bp, Homo sapiens
aaagaatttaccattcaaggagatgggaccctgcctcaccagaggcgtttaacaggccagcgctatcacattacccagattgtataaagagtatgaatgatttccgctcacagacctctaat

SEQ ID NO: 89610 - DNA, 122 bp, Homo sapiens
ccaagcgtggccaagtgaggactgctccggccgcaggtagctgaggcgcgggaggcggcgcgcgcgggacccgagcggagcgccggggaggggccgacggacgcgagggcggacggactccc

SEQ ID NO: 89611 - DNA, 122 bp, Homo sapiens
cggaaagaaaccccactggggggtcgtggtcagggagacagcccccaggatacccgctaacgaccgagacgcctggatcatcgctggtcaccgtctgtgtgtgtaatctgacgtgatgaaag

SEQ ID NO: 89612 - DNA, 122 bp, Homo sapiens
cgctaagcttatcgctatctcctccttgagcgtggtgctggcctccatcgtggccatgtgcgttcacagcatgtcggagttccagaatgaggatggagaagtggatgatccggtgctggaag

SEQ ID NO: 89613 - DNA, 122 bp, Homo sapiens
ggccggagggcgagagccaagtgagcagctcgaggctgccgggggctgacgtcaggggggcgggggagggggcccggagcgcccgggcccgccccgccccgcgcagcccccagcccccgccc

SEQ ID NO: 89614 - DNA, 122 bp, Homo sapiens
ctcagcttcaagtgacctcagacagggcaactcagagtcccttgccgtgggaagtgaggccgcagtgcaccaccacgctgcttccctggacactcagaagccagccggggagagcagctggg

SEQ ID NO: 89615 - DNA, 122 bp, Homo sapiens
aagacaatcatgtcataattacacctaacataatacaactttccttggtaggactggaaacgcaccaatccccaacccaaatactatcacacaaagttaacaatacttaaatgctgacatga

SEQ ID NO: 89616 - DNA, 122 bp, Homo sapiens
ctgctctgtgtagagacagaccttacacaatgttaaagacaaattggcagccaaaatccccgtcttttgtctcaagaagcatctaccttgctatgagagagctctggtgcccccgagaggcc

SEQ ID NO: 89617 - DNA, 122 bp, Homo sapiens
aactgtcttttcatttccgattttcacaacaaatgaagtttcctaagaacctagatgttgcgttgggggaagcgcagccccaggctacccagacgcactgcctgagtcaccttcctgccagg

SEQ ID NO: 89618 - DNA, 122 bp, Homo sapiens
ccttcctccttgtcttttccgcttcctgctgaccggaatgtggatgaggtcaggagcctccgggaatggccccaccccaagacaggagctgggtcctgatactgaaggcatcttacagtcat

SEQ ID NO: 89619 - DNA, 122 bp, Homo sapiens
gcctccagggccactcttaattataggccttgtgcctcagggtttcctaggctggcggtgcgttgggggaggggggggcggcggggcggggagggggtggagggttgggaaagagaagaacc

SEQ ID NO: 89620 - DNA, 122 bp, Homo sapiens
gtgtcagcggctgccctcgggctgggctgcggtactcaccggccagcggcccgtgcttgtcgttcaaggcctcggacaggtgcttaactcggaaatcatgctcgtgacctggcgagatgtcg

SEQ ID NO: 89621 - DNA, 122 bp, Homo sapiens
cgcgtgcggccgggctgtgaatggggagcggcggccgcggcagctgagggcgagcgcgaccgcgacgtgcgggcgggcgcactttcttctcagcgccgggcgggggcggcggcggcggcggc

SEQ ID NO: 89622 - DNA, 122 bp, Homo sapiens
gcaagcacagattgaataggctggggcgaccaggatgggaactagcattggctgtgaagccgccggggccctagggctgccttttgtccaaggagcttagaatggatcttaccacacaagac

SEQ ID NO: 89623 - DNA, 122 bp, Homo sapiens
agatgctcacatggcaagggagctggaggcactcccaggacttacttttcacatgtttaccgtcatatctcagcacctgggatacaaatccctaaattctaagaataaacctgtattgagtg

SEQ ID NO: 89624 - DNA, 122 bp, Homo sapiens
gtagaatactgctgctgatggtgaatatccaatgaccatcctgtggtccagataaatgtacgggtaaaatattgtgacatttcaccatgtgactctaagggaatccttccataagacctagg

SEQ ID NO: 89625 - DNA, 122 bp, Homo sapiens
cccacctcaccctgtgtgtgccacgggggccagctgcgttaggtgcacacagcccaggagcgcacccagactcgcctgtgtggccgtgtaggtctcgccgcccacgtagacgggatggaggt

SEQ ID NO: 89626 - DNA, 122 bp, Homo sapiens
ttcgtattcatgcagtcacccgtcagcacatctgcgctgctggaagagccaaagctgaaacgccgggtctgctgatggtgccggggtccggctgtttctcttgtctactgatggtgccgggg

SEQ ID NO: 89627 - DNA, 122 bp, Homo sapiens
cctcaaacggagcaactctgcttttgtttgctctgtatattaggtttcctaatactccttcgtttgacaaaaggatcctgctgctaaaaaatgtttgaaaatcactgactttttgcagccct

SEQ ID NO: 89628 - DNA, 122 bp, Homo sapiens
ttttccttagtccacacagcttctaaaccaacaggtactaaatattctacactgaaataacgatggctgtggtgtacggtccgtccttcagttctgctggctgggcgcacgtgtgggctggc

SEQ ID NO: 89629 - DNA, 122 bp, Homo sapiens
ctagttgagcgcaatggcctggccattggctgggtatcgaagtttctctctctccaaagacgcagagtcgaattagtgtgagtgacatgtgtttgacaggtgtccagctcatcatgtagaca

SEQ ID NO: 89630 - DNA, 122 bp, Homo sapiens
caaccaatcagaggctgaagtggaggcttgggccacaaccagtcagaggcatttctcgttcgtgaggtaggggaggagggttttgtagaggtcaggaactctggtcccttttcacctgggca

SEQ ID NO: 89631 - DNA, 122 bp, Homo sapiens
aaataaccaaaataagcaaacaccaagacgactgttctggggactatggtcagggagagccgatggctcagatccaggaaaccctaggctccagggtacctgtttcactacccctctccccc

SEQ ID NO: 89632 - DNA, 122 bp, Homo sapiens
ccactgttgctatttccttccactgttccggacgcgggtccactcccgtgggattgtgggcgcaggcatgcagaagaagaacactctgctctggtattttctaaagagaaaaacagccaaga

SEQ ID NO: 89633 - DNA, 122 bp, Homo sapiens
cccaccaccagcactgccaatgagagcccaccgccccgcccgggagagccccgcctctgccgatacctccaatcatcagcgccgccctgtggttccaggtgcccatccctcctcctctttct

SEQ ID NO: 89634 - DNA, 122 bp, Homo sapiens
cgcggggtgcgctcgccgcggccaggggctccgctgcccccgccccaccctccgagggagcgccttccaggggccctggccggcctcccaccttgacccgcttgccctggatctccagcgtc

SEQ ID NO: 89635 - DNA, 122 bp, Homo sapiens
cgccaggctggggaagctgcgggatgagggggtgggactccattagactgggggcagccccgtcccggccccacagtacccccacagcgccttcctgggctctgtcttgcgcgcgtcctccc

SEQ ID NO: 89636 - DNA, 122 bp, Homo sapiens
agccacatgcccgcctcgccccaagggcagcactcggacagagcagtgccccttctagtgcgccacccacatgggtgcctaagacgcccgagcccctgtgacagcacaatgccactccacgc

SEQ ID NO: 89637 - DNA, 122 bp, Homo sapiens
cagcccctctgccccactcacccctgacctttccttccaggctccactcaggaccatgagcgcaggcttccctggggcccatcgagggctgaggatggccgtccagcccactccccagggcc

SEQ ID NO: 89638 - DNA, 122 bp, Homo sapiens
ccattatccaagtcctgctccctgaaacaaccattttaatggcttatacctttatatgtacgctatatcttaagttagcaattttagactatgaaagatgagtatttaactcacccttcatt

SEQ ID NO: 89639 - DNA, 122 bp, Homo sapiens
taatgaggagaaattcagtttgttggggatgggctctgaactggcaatcatgcttagcggcgaggcattgaattctctctgctggtgcctcccgcatctgcggctcccggaggtgtggtctg

SEQ ID NO: 89640 - DNA, 122 bp, Homo sapiens
tctgccgacagcaggtaccttacttgggatttactatccgacaggggtcggaacggaggccgggataagaaagaaagcaggtcatttgcaatctacccgagcctaaaggcagaaggcaggtg

SEQ ID NO: 89641 - DNA, 122 bp, Homo sapiens
taagggaggtcagttgatcaccctctgaggagctccccatgcttgaatgactccagagtgcgaatggtatctgggctcaggagtcaaggcttggaactttccatgttgcaaaatcaaaatca

SEQ ID NO: 89642 - DNA, 122 bp, Homo sapiens
gaaattagcattataaaagaacaaagaaaactgtatactcgctgcatactagggaagagccgtagaaggaccttgtttatagggcaggcaagatgccaggttttgtttcttctgctagcaat

SEQ ID NO: 89643 - DNA, 122 bp, Homo sapiens
agagctccaccctctgccagtcctccccgggggatgccggctccacctgcagctcacgtccgatttccaccggtacccatcgtcaccatcaccagccttgcccctggtttcactgtctaccc

SEQ ID NO: 89644 - DNA, 122 bp, Homo sapiens
aaggaggatgacacagattacaaggcaatgaataagaacacactctatgaactataaagccgggcagaaatgcctgctgtggatgcagggatgaagagggacaggagaacccaacgctgctc

SEQ ID NO: 89645 - DNA, 122 bp, Homo sapiens
tcaaaaagaattaagattttcaagatggtgacagcacagcatcaaaccaagtgtggaccccgtggcactgcatgggtggcaggccatgtggtcagccctgcctttcggatgataaacactca

SEQ ID NO: 89646 - DNA, 122 bp, Homo sapiens
ttgggctgggtgaagtggctcacgcctataatgctagcagttttggagtctgaggcaggccgatcagttgggatcaggagttcaagaccagcctagccaacatggtgaaaccctgtccctgc

SEQ ID NO: 89647 - DNA, 122 bp, Homo sapiens
cagagcacctctgcccacgggggccagcccaaggcggcaggaaagcttaaaagtagaggtcgaggcatgtgctatgtggaaggaaaacacgaacggtgaggcagaagtccaccccacgagag

SEQ ID NO: 89648 - DNA, 122 bp, Homo sapiens
ttgctggggtgcctctaggcagctgatcctgttaagccctcactctagtgcacaagtctgcgagtgtacaggagcccctccctttccaatcctggttttattaaaaattggttttattattt

SEQ ID NO: 89649 - DNA, 122 bp, Homo sapiens
ccggcgcggctggagtctctgattctcagggttcggtggttggaagatgctccagagagacgaggctgcggcggaggaggtggcggcggccgaatcggcaacggcgctagggtggagagaag

SEQ ID NO: 89650 - DNA, 122 bp, Homo sapiens
gcgagtgagcctggggttgcgtcgggtggcaggctctggttgctctggtcacagctggggcgggctggggactgaggagcagacacctgttgcacagtgctcattagctgcaggagggcggg

SEQ ID NO: 89651 - DNA, 122 bp, Homo sapiens
gaattgggggcttagggtcggaacccaagcttagaactttaagcaacaagaccaccacttcgaaacctgggattcaggaatgtgtggcctgcacagtgaagtgctggcaaccactaagaatt

SEQ ID NO: 89652 - DNA, 122 bp, Homo sapiens
ctggggccgagcatgcggggcgggcggagcctcgagctaagtcccctggggtcccagggccgcattcctccgaggtctgcaaaggccactgcttaaaggcgcagaggagcagctgggaacga

SEQ ID NO: 89653 - DNA, 122 bp, Homo sapiens
aatatactggagattctgaaggcaatgaccacactgaccacaggtgaaaccccgcaaagacggaggaacccaaagagccacgagagctgtgggtggagacggcccaggaggctgcagcggcc

SEQ ID NO: 89654 - DNA, 122 bp, Homo sapiens
gaagctgcaggcctttgccatgagtgttacagctcttaaggcagcacgcctggacttattcgttcctcccggtggattcctggtctcgctggcttcaggagtgaagctgcagaccttcgcag

SEQ ID NO: 89655 - DNA, 122 bp, Homo sapiens
gcagggctgggctcagcccaagccagacggcgagagtcgcaccgaggtggaagctgggggcgcggcctcgccggggccaggaaaggggcggggccgggtggggcccggggaggagcctgtgc

SEQ ID NO: 89656 - DNA, 122 bp, Homo sapiens
agaaaaccagctgtgcctacaccttgggttcagacttgcagcacccaggctgcagggcttcgtcagggcagccctggcggaagaacgcagcctcgtcggtgggtttggtgatgctgtgcagt

SEQ ID NO: 89657 - DNA, 122 bp, Homo sapiens
cagctgcggctccggagggaagttcagaccttgagcgctcccagccccgcgagccgcctgcgcacaaacaactccgctggcggcgcggagccctccatcctgcaggagccgcgctccgatgc

SEQ ID NO: 89658 - DNA, 122 bp, Homo sapiens
taattaagcatagcattggggcttctcttaccccagggctatctagtgctcttgaataggcggtctagagaatgacctgcattttttcagtccttgcagatgtagagggtacaagaactgga

SEQ ID NO: 89659 - DNA, 122 bp, Homo sapiens
cgcagtggctgatgataagacacgttcttcctcggggacccaggctctgcttctttgtggcgttttttttcttttcttttccccaggtgcctcactttcccgtcatgggctttctgcccgcc

SEQ ID NO: 89660 - DNA, 122 bp, Homo sapiens
accaattaaataaaaaactctagagggtcggctccagcgtcaaacctccccaggtgactccgctatgcagtcagggtcaacagccactgttttaaacaatctgagctttgtttccagggttt

SEQ ID NO: 89661 - DNA, 122 bp, Homo sapiens
tgtcaccaactgggacgacatggagaagatctggcaccacaccttctacaatgagctgcgcgtggctcccgaggagcaacccatgctgctgtttgaggcccccctgaaccccagggccaact

SEQ ID NO: 89662 - DNA, 122 bp, Homo sapiens
gcgggtgaatggggcaagaggaggaagaaggcagtgatccgatgggtgaggggcactacccggttgggcagctttgccaggcttcccatctgaggagggggaaatgcaaatagaaacatggg

SEQ ID NO: 89663 - DNA, 122 bp, Homo sapiens
gaccgcagcctgtgtgtgtctttcccttcgaccaaggtgtctgttgctccgtaaataaaacgtcccactgccttctgagagcgctataaaggcagcggaagggtagtccgcggggcattccg

SEQ ID NO: 89664 - DNA, 122 bp, Homo sapiens
gccacaataatggctacttgcggattatggggagactccctctagccactttcttccattcggtcaaaaggattggagaactcaaccttgggataacctgggggctataaatttgctgtggg

SEQ ID NO: 89665 - DNA, 122 bp, Homo sapiens
cgggagtggaggtcgctgctgaagggtgacggtgtggccatgacacgggcagcacgggaacggaagacgccggagacccagaaggcgcatgactgcctggcctcgagtcactaaaagcagtt

SEQ ID NO: 89666 - DNA, 122 bp, Homo sapiens
aggagggttgtccaggcaggctggggtggaatcagcctcagcctctgcctgcctcttcctcgggctcaggtccgtctccactttctgcctccctcctgctctgtgggtctctctgcttcctg

SEQ ID NO: 89667 - DNA, 122 bp, Homo sapiens
tgcaattaactctcttagatctttgcctagtcttttaaaggactgaaaagccgcgaggggcgggggctggaattcgccccctgaagcgcagagatgtcagctcctgaaaagtcattcggtcg

SEQ ID NO: 89668 - DNA, 122 bp, Homo sapiens
tagagaaataatgtaaaataaatatacggttggaactaggggtaaaaaaaaaatcagcaacgtcagcaaactgagatggggtgagttggaaggcagattggaatttatctcttaaaaaaata

SEQ ID NO: 89669 - DNA, 122 bp, Homo sapiens
taagagatgagggtgaaatgtgaacgcgtaccattatcttgtgactaaacttagtttcttcgtggcatgcacaggaagttaagcttaatcacaggatatgcaataatagtcacagtattcca

SEQ ID NO: 89670 - DNA, 122 bp, Homo sapiens
gcacttgggagcttgttagaaaggcagcttctcaggccccttcccaggccaaatgagtgacgatcggctttgtagcaagatccacaggtgatttgcatgcacagtaaagtttgggaagcact

SEQ ID NO: 89671 - DNA, 122 bp, Homo sapiens
ttggaaagcgacatcactctcttttagagttttgggggttcggtccaagtttggtcctcacgttttctttggtattttcagtgtgatgctcacactacagggctggaacgctcactgattaa

SEQ ID NO: 89672 - DNA, 122 bp, Homo sapiens
tgtctttgcgctggcgagggcgggcgtctgcaacgcctctgatgggcggccgggcggccacggggagaaaaggctgccagcaatgggagcagtgcctgcagagcacgcctccgaccagaggc

SEQ ID NO: 89673 - DNA, 122 bp, Homo sapiens
gttggctggagccaccacaggagagtgattcagacggggctgacactagacacactcctacgtttctgtggagtccccatttctgtgtggggtcagttaaaagtgacattgtgaagtagtca

SEQ ID NO: 89674 - DNA, 122 bp, Homo sapiens
agccgcgcctccctggctgcagctgctgtattcacagcagccgcttcaggcgggccgccacggcgatcagtttttcatggcctccaggttctgatgaagcgtgggattttctgccctgtacc

SEQ ID NO: 89675 - DNA, 122 bp, Homo sapiens
gctcggggggcggggcttgtaggttactcagtggcaagccggagttgaggcgtttaaacccgcgtgtcccgcagctccggactcaggacttgtcctatttccgagatatgccgcgggccgaa

SEQ ID NO: 89676 - DNA, 122 bp, Homo sapiens
gattccttccataagggatccacaaagtttagatgtgaaatgtacctaaaggttcctagccgtctttcatccctccctctgtgaaacagggagacacatgtgttttaaggcagagatggaac

SEQ ID NO: 89677 - DNA, 122 bp, Homo sapiens
ccgagcgtcgaagtccccaccaccgcccgggcgccctaaggagtgggggtgtacccagcccggagtcaaatcctggagccctgccccagaaactaccctgggttcggacctgcacccggcgc

SEQ ID NO: 89678 - DNA, 122 bp, Homo sapiens
gtaagactcggtgcaagaagacatcagtgttcccatctgtgaaatgaaggaattgacccccgaggatcttccatttctgacagtgctttggatttcattggttttgtcacaggtacccccca

SEQ ID NO: 89679 - DNA, 122 bp, Homo sapiens
gacaaggaatagccagttcccataaaacttgggaaacgtagatttctcaaaagtagggtccgacacaattttttagttactttttgagaaaatttaaaaataaatacattgaaatgctgatt

SEQ ID NO: 89680 - DNA, 122 bp, Homo sapiens
aaggcagccagcgagaggtacagtgaagcttctccggtggctataactgctgtttcatcacgtgtctttacagtgaaatttatgtctatgtatgttgcttctccaacaatattgaaaaggga

SEQ ID NO: 89681 - DNA, 122 bp, Homo sapiens
cgggggcgcggtcctggggagccggggccggtcctgtactcacaatgccgggaaggtcggcgtatttagggtccgccatggcggcggcgagacgggctgggggacccgggcctcggtggagc

SEQ ID NO: 89682 - DNA, 122 bp, Homo sapiens
tccagggagctatgccaatctgatgcggtctccaggctggctgatgctgagtggaagggacgacagagcttcctcctcccccaagagacctgaacctggacttctacaggcaccattgagcc

SEQ ID NO: 89683 - DNA, 122 bp, Homo sapiens
gccacctccccgcctacctggtggccgccttcgccaagcggctggcccgcctggccctgacggctccccctgaggccctgctcatggtcctgcctttcatctgtaacctgctgcgccggcac

SEQ ID NO: 89684 - DNA, 122 bp, Homo sapiens
gggtccccgcctcctcgcctgcaggaccttggggtgggggtgaggcgccggaggctctggcgcggggcggcccgaggcccccagtaccccctcgctccggccaggcccggcgccggccctgc

SEQ ID NO: 89685 - DNA, 122 bp, Homo sapiens
ggtgacatggaccagaaggagagagatgttatcatgagggaattccggtcagggtcaagtcgtgttctgatcactactgacttgttggtaagtctcttaatgctttttaaaaatctaccaaa

SEQ ID NO: 89686 - DNA, 122 bp, Homo sapiens
tttccgacagggatcaaacaggtaatggcctcgcatcttcgctgttgctgctgctctgggcgcggcacagtcgcagcacaggaattcagccgccgcaggcaccctccggaacagcgcgacag

SEQ ID NO: 89687 - DNA, 122 bp, Homo sapiens
ataacaacatgtgcaaaccaagcacattaccctgatacggtccttgacagaaagctctttcggttagctgatgtttgatattgctgcatgcaggtcattgctctgaaggataagctatgaat

SEQ ID NO: 89688 - DNA, 122 bp, Homo sapiens
gaccgaacagagcctggcacgtgctccaggagcgcctcgggggctgagcgctggtagaggcggcctctgtctcccgatcactctgcaacacaacgggatgcccacctagcctgaggatgcca

SEQ ID NO: 89689 - DNA, 122 bp, Homo sapiens
ggcctctggctcgcaccggctcccacctggctgggaacatgggagtccgtttgcccttgccggcaggtggggtggctacctgggaccctagcagggcacatctctccatctttctgcttctg

SEQ ID NO: 89690 - DNA, 122 bp, Homo sapiens
ccagccaagtggccttgatcgttttcccaatgcccccgagcctgtttcctgccagtagagcgggtcagatgttgccaacctctgcagagtagcaataagcagtaaacgccacgctctgcaca

SEQ ID NO: 89691 - DNA, 122 bp, Homo sapiens
ccctttccgagtcaaagaaaggggtgacggacgcatctggaaaatcgggtcactcccacccgaatactgtgcttttccaaccggcttaaaaaacagcgccccacgagactatatcccgcacc

SEQ ID NO: 89692 - DNA, 122 bp, Homo sapiens
ctccgggcggccgccgcctcctccctctcagcgtccagagcccgctcctcctcccgccgccgccgccctcgccccgcgccgcctgccacttatcacaattacccgacgctcccgtgccattt

SEQ ID NO: 89693 - DNA, 122 bp, Homo sapiens
cagggcgtagacctttccttcctagcacctgggcccctactccagaagaccagaagactgcggctggccgagcccccggcagggcttttattgtgaagggagcttccccctcccgcgctttc

SEQ ID NO: 89694 - DNA, 122 bp, Homo sapiens
ggcgccgctgtgcggggcgctgagcctgctgctgggcgcgctgctgggcaaaggtaaggccggggcgggtgcctggcgcgccgacgcatgcgaacttcccggttccgggggagctcggggtg

SEQ ID NO: 89695 - DNA, 122 bp, Homo sapiens
aagggcggcccgcggctcctccgggaaactttggcggcggcggctgcgaggccgggtgatcgcttccccacagggaggccgcgcgccccgccccaatcccggcctggccaggggcgcgcccg

SEQ ID NO: 89696 - DNA, 122 bp, Homo sapiens
gccttcctctaacttaactgtgccctcttggaaacgccacctggccaggcttctctggggcgcctggagcactggcccggactgtgcgccttctgggagggggccgctcagaaccgctgggc

SEQ ID NO: 89697 - DNA, 122 bp, Homo sapiens
gaaatctgcgctctttgggtcacttggagcgcggccagtttggcagatttgtttttttcccggaacaacccgcggcggctcggctgtcccgggaaactgcaaactttgctgtgcgcgttctc

SEQ ID NO: 89698 - DNA, 122 bp, Homo sapiens
tcaatatctcggtaggtgtacatccagccggtgatattgatcccaatatcatctccagggcgtggagtatgacgttactcccaatatagcactgggtgtgcatgcacccggtgattttgctc

SEQ ID NO: 89699 - DNA, 122 bp, Homo sapiens
tttttgtatttttagtagagacggggtttcagcaggaatcactgctgacctcaggtgattcgcctgccttggcctcccaagttgctgggattacagacgtgagccactgcgccaggcctttt

SEQ ID NO: 89700 - DNA, 122 bp, Homo sapiens
accaccacagtcaagatatagaacatttcaatcaccacaaaatattccctcttgccccttcgtaatgaacccttcatttcaaccccagttcctggaaaacatagatctactttttgtcctta

SEQ ID NO: 89701 - DNA, 122 bp, Homo sapiens
tgactgcggccactgggcgggctggagactccaggagaatcaggacgtgcgtaactccctcgccggcggactgcagcggacggggcgcgtgctggtgacgtcagtagcgcgcgactcgctcc

SEQ ID NO: 89702 - DNA, 122 bp, Homo sapiens
ggacgcggaggctgcagtgagctgagattgccccactgcactgcagcctgggcgacagagcgagactccgtctcaaaaaataaataagagaatggggaagctgaccaatgaaggtagtggat

SEQ ID NO: 89703 - DNA, 122 bp, Homo sapiens
tagcctaccctgcaacaaaatacttctgcagctggctttgtgctaggtgcaagctgctatcgacgacagcttgagtcaaaaccgaaaaactaacagggctatttcctttctaaacgccttta

SEQ ID NO: 89704 - DNA, 122 bp, Homo sapiens
agatgaggagttggggaggcccggggcgtgcgctgggcaggggcataggcaaggccagcccggtcccgcgctcccgtcccgcggattgcagcccccgttctggtgcctcagccctgaaccca

SEQ ID NO: 89705 - DNA, 122 bp, Homo sapiens
ggcgcaggagagctggagtcaggcggagaccgcaggctgaccccgcagcggccgggctgtcgcggcccccacctcaggtcagtaggcccccgggccaccctgtccccattttacagttgctc

SEQ ID NO: 89706 - DNA, 122 bp, Homo sapiens
agggtccccttatatacctgccaactaggtgttgtgtacatgggtgtggatccacttatacgtgggtttggtctgcctgggagctattcctggtgcgtgattatcaagctaatagccattaa

SEQ ID NO: 89707 - DNA, 122 bp, Homo sapiens
tatattttgtccccattttacagatgagacaaaggaagctcagagaggggaactgacttccgaggtcacagaacaagcaagggtgggacaggatttgaacccaggcttgtttgaccccagcc

SEQ ID NO: 89708 - DNA, 122 bp, Homo sapiens
ttttatttaccctcttcctttaaagggtttaatagacaggaagcgaaagccggctcttcccgggttcccaggggtgggggtggagccggccgagaggaccccagagaccccggctactactc

SEQ ID NO: 89709 - DNA, 122 bp, Homo sapiens
caggcggcccggggcatcgatcgcgcggggcgtaatgaaccctaataacagctctatcaccgcccgcccgccaattggcccgggtgccctccaaattagccacaaagaagccagtctgtcaa

SEQ ID NO: 89710 - DNA, 122 bp, Homo sapiens
tcataatcaagaatgacaacgtaaacagcagatgtggactgaagatgacccactgtgccccgacttgaaagagaaccaagtagaactgctctcagtgagaactgtagatattttaaagcaaa

SEQ ID NO: 89711 - DNA, 122 bp, Homo sapiens
cccgcagcccggagcctctccatattgtgcggggccacgggagggtcatgggggcaatcccgccttgggtgtggggctcgtgcgggaggagctgcgctgtgaggccctcagtgccccctttc

SEQ ID NO: 89712 - DNA, 122 bp, Homo sapiens
gcaatacacagcgttttgtaactggcctcttctactccgagcgtttttaacatttgtccacgttgtagcgtgggtcagtgctttattcctccatggatgcaccgcattgcatttctctgttc

SEQ ID NO: 89713 - DNA, 122 bp, Homo sapiens
gggagtactggtgcacgctcaggtcgtacatcgggggtaagtccttgttgcagaagtggccggggtagctcagctcctcctggtggctcttgatgtgctccagaaatgtgtcgagctttggg

SEQ ID NO: 89714 - DNA, 122 bp, Homo sapiens
acaggcgtgagccactgtgcccggccaatatgacctttttaagaaaaaaagaccgcagtccgtaaatataagggcataaagcaggaccataatcacatacatgctgactgtgtgttgagagc

SEQ ID NO: 89715 - DNA, 122 bp, Homo sapiens
cggacgccaggcctgactgccagcctggtgaccagtgctgaggcacgcagccctttctgacggcctcggagccaggcaccaccagcatgagtcactcggcgggagggggatggctgaggggc

SEQ ID NO: 89716 - DNA, 122 bp, Homo sapiens
agcccacgcaaaccgcaggacaccagagccgccgccctgcccctccaagctgctggcactcgggctcaccctctctggaggagccatcattctggcctcagattctccttccaaaacattgc

SEQ ID NO: 89717 - DNA, 122 bp, Homo sapiens
gagccgccggggtccgggcatgcgcagagaaccacgggcacaggggcagctccccgcggacgccaaagtcaacaaggccgggagacgcccccatctggccccgcccccctcagggctcgctc

SEQ ID NO: 89718 - DNA, 122 bp, Homo sapiens
cagacccagagctgccactgtttctggaggcttccacatctgcccagtccacaaattctccggtaaatctcccagtaaatctctcatttttccaaggtgacctgagagagtctatattgttt

SEQ ID NO: 89719 - DNA, 122 bp, Homo sapiens
caagtgacatagcctggccagacctgcctgagacacaatggcctctgcacagcctggagccgagcgtggagccggcgtcctccctctgctcagtttcaggcgttaacgatgcgcgcaattgc

SEQ ID NO: 89720 - DNA, 122 bp, Homo sapiens
gtccttattgttaccagcctcaaggaaatccctgtctagtgcatattcatggagagtgaacgatgagcttgtgaaacatgtgagatgcaagtacagaaatgttggcccaactctattaaaaa

SEQ ID NO: 89721 - DNA, 122 bp, Homo sapiens
cacgcccacgcgaattcctaggcgtacgggtttgtttggatggtggagggagacagggcccgtcaggaggcactcttggggaatcgcgcagccatacaactttagagctggccttggctggg

SEQ ID NO: 89722 - DNA, 122 bp, Homo sapiens
gagggtgggtgcggagaaggcgagcacgagacgccgggccgggcagttggggaccccgatcggtgtgagagggcttcctagggctggcatggacttccccaccacaaaatgcccagggccgg

SEQ ID NO: 89723 - DNA, 122 bp, Homo sapiens
ctaaaaatagagtatttcatattttttactcacctagttccaagtttccacccctgcaagcgaaccaaaaacaaatcctggcaccttgccattcccagaaaagccagtgcatggcacactct

SEQ ID NO: 89724 - DNA, 122 bp, Homo sapiens
gcagttctaagaatagtgaatatggataatacagacagcaacccagacacttgatccatgcgtttgctacgtaaaagttggatgagaataactttcaacaaatttactttccagtgacttgt

SEQ ID NO: 89725 - DNA, 122 bp, Homo sapiens
tctacttatctttgtactaccagtgcctggcatgactcacgacacaaattaagtgcttaacgttttttacaaatgctcatgaggcacagtgttaggagactgtagcaacaccttagttacct

SEQ ID NO: 89726 - DNA, 122 bp, Homo sapiens
ccattgagacaaaagagcgtgacaagccgcgcgacgcggccaatcagcggggcgaggaggcggcctccccaagcagcctctggccctgaagctactgctagcaagactcgggagctggctgg

SEQ ID NO: 89727 - DNA, 122 bp, Homo sapiens
actaatttgactaactttcccaccaaactgatttttaagctgcattgcataactgtgttacgtcatgtgggtgtgtctatgagctaacttttcacattgcattgtggtgatatttgaattga

SEQ ID NO: 89728 - DNA, 122 bp, Homo sapiens
gaagctggagagagtgaaggatggcctccagatgtctggcttgcgcaaatgagtggagggcggttcctactgagaccaggaagaagagaactggagaccaggaagaagggaattggggacca

SEQ ID NO: 89729 - DNA, 122 bp, Homo sapiens
gctctggattggtcttcgctcattcccatgaacctgtttcactgcagagcccgcaccccacgctcacagccgttccactcggaatccaggttcttcccatgttattatcccgctccctgatg

SEQ ID NO: 89730 - DNA, 122 bp, Homo sapiens
tggtcagcctgggagaagagggctaagattaaggttagtgatggttcccttaaaacctgtcgagtgtctgcattgttagacacactgaaatctaagaatcccatctctctggggctgttcac

SEQ ID NO: 89731 - DNA, 122 bp, Homo sapiens
caggcaggcaaggaaggtatcaaccacactgcctgaggaggctgggagagggggaagggacgttaacaaagagaagatacggccttgcctctgaagaattttataatacagctggagaacca

SEQ ID NO: 89732 - DNA, 122 bp, Homo sapiens
tgcggcctcagcgcgagagccctggcccccttcccgccgcgggtcgcggtcgggaaagcgcgccctgcaagggggttttgtagataaacaaaagcgtttgctcttctggttttcttttattt

SEQ ID NO: 89733 - DNA, 122 bp, Homo sapiens
ttgcagcattgaggaatcgcggttctttgctgcctccctccgctgtggagcccaggctttcgccctccctagagctcctgaggcctggccgctcagcgtcctgtagagccgggccggtagcc

SEQ ID NO: 89734 - DNA, 122 bp, Homo sapiens
gtttcctcaatcgctgcggagacggagctgtcactgaatctgacagagccctgcactccccggtccgccgaccctgtggaatggtggaaacacaacgcaatcaggcctcctaatctcgcagc

SEQ ID NO: 89735 - DNA, 122 bp, Homo sapiens
aaggggagacggacggcacctggaaaatcgggtcactcccacccgaatactgcgcttttccgacgggcttaaaaaacggtgcaccactagattatatcccgaacctggctcggagggtccta

SEQ ID NO: 89736 - DNA, 122 bp, Homo sapiens
aatgagagagaacccaagtgaaggtccggagttgtgccggcacatcatgggctcagtgcccgtgagctccccttcccgatgtgcacacagaccctgctgacaggccgtccacctgaggacac

SEQ ID NO: 89737 - DNA, 122 bp, Homo sapiens
ttttctgcgggaggggacggtgcacccccggaattgatatgccccgggagactgctttcccgtaggtcggagcctcatcttctagtattcttaaaacctctcccctttcagggcactgtagc

SEQ ID NO: 89738 - DNA, 122 bp, Homo sapiens
tctgccctccctcgacgggcccagccccgccccgcccggccggttccctccgcggggccccggccactccttgtgcaagcgcaggcctccaaagggtttgggcttcttgcccaaccgccgcg

SEQ ID NO: 89739 - DNA, 122 bp, Homo sapiens
aaatgcctgaaaaacagtcaccagctgggactctaccactgcctcgagaggggctatggacggtcgtatggaccttggactttggagatgggggattatgccacattcatctatgtttaaat

SEQ ID NO: 89740 - DNA, 122 bp, Homo sapiens
tgcccctgtggcccttgccaaagggccagatgtcaagagagaagcaaccagatccggagtcggcccctagccagaagctcaccggaatagcccagccaaagaaaaaggtcaagatttctatc

SEQ ID NO: 89741 - DNA, 122 bp, Homo sapiens
gggcagggctcgggacctgcagcccgccatgcctgagcctcccacccctccccccggctccgggggctcctccacagcccaaacctccccgacgagggccgccccctgctccacggcgccca

SEQ ID NO: 89742 - DNA, 122 bp, Homo sapiens
atggctctccctgaccatgcgggctacctcagggaagccagcttcttcagcgagctgagccgcatccctgccactcagctcacagacccccacccaggcagccccacggcccaggagatagc

SEQ ID NO: 89743 - DNA, 122 bp, Homo sapiens
ccccttggaggaggtcctcttccatcacgatcacgcatcattccaccacccacaattccacgtggaccaccgggacctcgatcattgcgcctaatatccctgcgatcatcaccaccacctct

SEQ ID NO: 89744 - DNA, 122 bp, Homo sapiens
agtcccctgagactcattggcaaaaccacacctgtgaaccagtggttctcaaactttatccgttcctacgctttgggtcatgacctttgtcatacatgtgtttgcctgtcctattattgact

SEQ ID NO: 89745 - DNA, 122 bp, Homo sapiens
tgctcagtaccaaaatgacagcgccaatgtggcagccatctttgtacagacgggaagtctcggcgcgagttcccgccccctcgtctagttggaaaccgaggaggcggtctcctccggcctgt

SEQ ID NO: 89746 - DNA, 122 bp, Homo sapiens
aggggcaccgggttcaagctcctgcctctctgtgtgggaaggcaggccagcaaggcggcccggagacccaggagagccccttggggctcaggttgaggaccctggctcgggatgtctgttgc

SEQ ID NO: 89747 - DNA, 122 bp, Homo sapiens
ctcccgggacacgtgtgaggtgggttcatgcggctcctcctcacccccagacctgggcagcgcccactcccattcatcctcagcccggcctctctctaccttccccgcccccagcctcaccc

SEQ ID NO: 89748 - DNA, 122 bp, Homo sapiens
gttctcaggtgagctcccggactagcgcgcatgcgcacaggtgagtgcccgccccgcccccgggcttggccacctgcccaagaaacttgttggttgttgccctcaggtcgctcccgggcggg

SEQ ID NO: 89749 - DNA, 122 bp, Homo sapiens
tgcttctgtcttagctcctcagtagctgagaccatgggcacccaccactgtgcccagattcgggctttcttgtaaaaagcggatggatgcttgaaactattttctgaatccctttggctccc

SEQ ID NO: 89750 - DNA, 122 bp, Homo sapiens
tcctggggaggaaggtgcagccatgcaaagtgagtccaggggacggcgaggggcctgacccgctcttctcccgaaactcggatatttccagtatgtgtccggcgtccccagaacgacacgga

SEQ ID NO: 89751 - DNA, 122 bp, Homo sapiens
aaagggtccctagataattctaatgtgcatccaaggtcgaggatcactgagaaagttgctcgctgaccatacaactcaaactggagaaagttgttcatactgcagatctgaaactctgttga

SEQ ID NO: 89752 - DNA, 122 bp, Homo sapiens
gccagccggctgcagtgacagcttctctgtgaagtgtcttgtcttcttatcccccaggcgcggtccggcttctcgttgcacactggtgggcttcaggccgtcagcccacctcccagggaatt

SEQ ID NO: 89753 - DNA, 122 bp, Homo sapiens
aatacttggcaaaatcacagcagtccggtgtgtggccctttactgaccttgattaaaaatcgggtgtcagcaccccaagtggatccttcttacaggtgcagattcagactcattatccaagt

SEQ ID NO: 89754 - DNA, 122 bp, Homo sapiens
ccggggtcttggagaccagtctgtgcagcctgcccggcaccagcgtgagccccgggaccccggcctggcgtcccccacgcccgcgcccccgcgccagtacctgctcctgctgcgggggggcc

SEQ ID NO: 89755 - DNA, 122 bp, Homo sapiens
ggggctaattttctgagatagcaagcggaatgggagggcttctctcgcctgaccctacttcgtggtgaaactgttctgccatggtagggtagggccccgcccctctgagcaggctggggccg

SEQ ID NO: 89756 - DNA, 122 bp, Homo sapiens
atattcaaacaactaccaccccggaagctactatttctgatcatttctataaaggaaaatcgctcactcagacaatgtgatttccccaggctagaaatgaagatgaaactctcaggcttttg

SEQ ID NO: 89757 - DNA, 122 bp, Homo sapiens
aagggaagcaggaaggtcagcagtcccaggaaggccaaggagacgggatttctcagaagccgcgacgcgctcatctgccacccacacgaagacaaaacacaatggttatgcttcctcctcaa

SEQ ID NO: 89758 - DNA, 122 bp, Homo sapiens
gcctgcccgccctggtggccgtctgggggcgacaagtcctgagagaaccagacggaagcgcgctgggactgacacgtggacttgggcggtgctgcccgggtgggtcagcctgggctgggagg

SEQ ID NO: 89759 - DNA, 122 bp, Homo sapiens
aatgtctaatgggggtggttaaattaacagtacttctctattcaaagtactctgatgggccgggcgcggtggctcacgcctgtaatcccagcagtttggaaggccgaggcaggtggatcacg

SEQ ID NO: 89760 - DNA, 122 bp, Homo sapiens
gagagtaacaggcttggtttgcagggggtgggggtgggggtgggggtcaagacccttagacgagctgcagctccttgctgagaacgtgcacacactcaaaatttgtggggggcccatggtcc

SEQ ID NO: 89761 - DNA, 122 bp, Homo sapiens
atacaaaggtttccatgtttcatggtgaccccagggcccgacctgctcacacgctgtgcccggcacttacctctcggggtgcggctcccagaggagcttcccagagcttccctgctgatagg

SEQ ID NO: 89762 - DNA, 122 bp, Homo sapiens
ctgaatggtgagcaggcggccggccacgcgcgccagttccacgccatggccacgcgcacccgccagcagtacctgcaagacctggccaccaacgaggtgaccactacgtcgctggactcggc

SEQ ID NO: 89763 - DNA, 122 bp, Homo sapiens
gcctctgaatctgttgattccattctcaaacctcagttcctttcctcgttgcagatgagtcgcctccagtgcccgaagcagcctcctcaccctctgtgtatcaagactgacctgtgccccag

SEQ ID NO: 89764 - DNA, 122 bp, Homo sapiens
cagctcctcattccacctccaggaaatcgaactggaggaaggagggcaaactcagggaggcggggctcgttccacagggacaccacgacggctcgcggcccccagcctctaccccgctccgg

SEQ ID NO: 89765 - DNA, 122 bp, Homo sapiens
aaaaaatcagaccacctcacacccaacaggatggttactactgacaatatagataagtgtcggccaggatatagagaaattagaactctgtgtattgttggtggtaatgtaaaatggtacaa

SEQ ID NO: 89766 - DNA, 122 bp, Homo sapiens
gggccccgggatacgttggaaaatctaaccaaagcaggaaaaactggcgggcctggagaacggggcagagatggaacagaagtccccgttgacttcaggcatcccctgtctttcccatcctg

SEQ ID NO: 89767 - DNA, 122 bp, Homo sapiens
tttcggggaattagaagtgagtttacttcatctagcgccacacttagttccccaccacaacgcagctagttagttgtcctccacaactagttagctggggaaacacaaggaacttccagaca

SEQ ID NO: 89768 - DNA, 122 bp, Homo sapiens
aaagcccttctttgagcagtgaactcactcactaaggaatcccccaagagtctggccagccggccccactgcctggttgcctcactgagttggtgctctctttaagctgttccttttgtttt

SEQ ID NO: 89769 - DNA, 122 bp, Homo sapiens
ggactctgcagcgcgcaggtgaccacgcagagacagccccagcgcgatgaataattgaggcgcagagtggaattacctctgtgggctccgagtccctcccgcagcccgcacctgcccctgcc

SEQ ID NO: 89770 - DNA, 122 bp, Homo sapiens
acaaatgtgagctattagtgaacgttattcctcctgttcaaacttgcatttgaagatatacgtgtgtcacatttcctgaaatcttgaaggtctctcaaacgtcatttacatttggattcaga

SEQ ID NO: 89771 - DNA, 122 bp, Homo sapiens
ccctgtccggcatctgtcttgagctcccagcaaggtaggtgatgcggtcgcgaggaagtgcgcggagctaccgcgggaaggacggacgcggctgcctgcgccaggggagggggctgcggggg

SEQ ID NO: 89772 - DNA, 122 bp, Homo sapiens
agggaacactgcggtgaggagcgaggacttcgtccccaccccggcccagggcaggggcttcgtggtgagcccaccccaccccagaaggctcctggaagggcagggcagactggcagcaaaat

SEQ ID NO: 89773 - DNA, 122 bp, Homo sapiens
cctcttctagtttataaccatcttctcttcctgcttgcctgccttgtagacctcaagcatcgtcatcagactccaggacaacagctttgcagatgccacttaaccagctcctgcaactatgt

SEQ ID NO: 89774 - DNA, 122 bp, Homo sapiens
ggttgattttattgtgtattcaccagcctgagcgtccttaggggtggcaggcagggaggtcgaggtcactgatgctggtgctctcagcatgtagttatgcaggagagtcactgctctgtatt

SEQ ID NO: 89775 - DNA, 122 bp, Homo sapiens
agtggtcgcagggcgctctccgggaagcgctgctaagtggtaccgtgcatgcaattaggacgctgatgtgctttaatagcgtggtagtgaagtccaccatcaaagcaaatgcgctctccttt

SEQ ID NO: 89776 - DNA, 122 bp, Homo sapiens
cgccagttagtcttcaccgctctggagagagttgctagccacgggatcctgacccggacacgaactcgtttctccacgtcggtgcgcgcttgcatccctggccccgaaagcgtgggaatgtc

SEQ ID NO: 89777 - DNA, 122 bp, Homo sapiens
cacactttgcgcatttctctccggagctgtgtaagtcacagcggagatttcctctctgaccggggctgtgttacccaataggccacctagtaacacgcctgggatgcatgacggaaaagcag

SEQ ID NO: 89778 - DNA, 122 bp, Homo sapiens
attaacagctgctcccattgccgacgttaccgcctgagctccaccttgtcagatcagtagcggagttcgattctcacaggatcgtgaaccccattgtgaactgtgcatgcgaggggttaggt

SEQ ID NO: 89779 - DNA, 122 bp, Homo sapiens
gtgcagggcttttcccatctcacccctcaggatctgggcctctgcccccacctcccatcccgacagaccactgtctccaagagcagagctttaacttcagaattttagtgtatgtacaaaag

SEQ ID NO: 89780 - DNA, 122 bp, Homo sapiens
gggctgccccacagacgggcccaggagaggacacgccgggctggcatcacgtgaggagagcgtccagcaaaccacactggtcccgaggcctccacgaaaagtagatgggcatctcgcggcag

SEQ ID NO: 89781 - DNA, 122 bp, Homo sapiens
gcgcccgcgaccccagagggccggtcctgtatttgttcctgggtggaaggagaataagaacgggattaattttacttgctttcatggcccctaagagagacttttttagggcgtgaacagat

SEQ ID NO: 89782 - DNA, 122 bp, Homo sapiens
tttgcaccagctaactattcactggctgcccacctgggccaggctcaggaatgcaatcatcgtggagtgcaggggtcaggagtgtagacctaaagttggacagacccaggcgatcttggtgt

SEQ ID NO: 89783 - DNA, 122 bp, Homo sapiens
tctctcggctctctcccattctccgtgccctgtccctcggctctctcccattctccgtgccgtgtccctcggctctcgcccattctccgtgccgtgtccctcggctctctcccattctcctt

SEQ ID NO: 89784 - DNA, 122 bp, Homo sapiens
gtttagagcaataaacttttactgtagccacacttatccttgtcctggagagataaagtacgggattgatacatttcaacagggaacaaggcaggagttgagggcaagcagacaatgctaac

SEQ ID NO: 89785 - DNA, 122 bp, Homo sapiens
gcgtgtgaggcgaacgtgataaccactacactacggaaaccaccttggctactttcctgccggcatcgtcctgaagacacacacggctgagacggccgggatagctctaggcaagcgccctt

SEQ ID NO: 89786 - DNA, 122 bp, Homo sapiens
cattcacttccacggccgctgctctccttcctgcgacacagacagcgttggcccaatcagcggagaagctgcatgtgcacggtccagggagatgctcctgagccctgcccgctggacagggt

SEQ ID NO: 89787 - DNA, 122 bp, Homo sapiens
gttgaataccactgaacttatggaacatttaaaattgcacagtatttagaaaatactaatcgaatgaatcaccacctcatgtgttgttttgataggaagtgtatcacgtctcaataatttcc

SEQ ID NO: 89788 - DNA, 122 bp, Homo sapiens
ctttcagtatggaaaataatcagcaagccttttttgtaccataagtaaaatggattgtgacgcacttagagcaagtgtagacagactacagcctgcaggcccaatctggccactgcctggtt

SEQ ID NO: 89789 - DNA, 122 bp, Homo sapiens
tcccgaccccgcgtgtcaccgcgagtggattcacacgctcatcccgaccccacatgttcacgtgtttaatgaacactgtgctagaaggtcagcagtaaacatgccacagcaccccatctgct

SEQ ID NO: 89790 - DNA, 122 bp, Homo sapiens
cgcggccactacgaccagctgcggtccggggcccggggtgggagttggactgcgtggctgcgcgtccccatggcgaccgggcgggtgcgcgcgtcaggggctggggcctgaggcggaagtcc

SEQ ID NO: 89791 - DNA, 122 bp, Homo sapiens
cccaccgccgtcctctggagatggcccgaggctggtgcccatgactcaatgtcccactcccgcatctcctgcggtcccagggcgggtcccgctggtgtgtggccggcctcgcaggaaccact

SEQ ID NO: 89792 - DNA, 122 bp, Homo sapiens
ggccatcatagagacgcaggccaatcatccggcactcagggtcaatgatgccaataatgccggtctctgaggggcggccaatgcggtcctgagaaacaaaatcgggattagggaagaacctc

SEQ ID NO: 89793 - DNA, 122 bp, Homo sapiens
catgataagttagcagagtcacctgtaagaaccccactgccgagcagcaaagatagatcacgtcagcagcgaccaggtggaggatgtataccatgtagggattcgtggccccacagcaaagc

SEQ ID NO: 89794 - DNA, 122 bp, Homo sapiens
tctttttctcttctctgtttccatgtccccttcgcgctttctcaagtgttactttgcaaacgaattctttagggatctggctaaaatgcagtttcagattcagtagttctgcattttttttt

SEQ ID NO: 89795 - DNA, 122 bp, Homo sapiens
cctgccctcagcctagccccattctaaccctttgagaatgagggtcgagggcacaagggtcgcgagtggtgcgggaggtgggacaggggtcctgtggccacgcccctccctggcccctccca

SEQ ID NO: 89796 - DNA, 122 bp, Homo sapiens
cagaaaggagtccgccgccttcgcggcccagggctcggccccggctctggcccgcgcccccgccccccggcgctaaaaaaggagtgcctccgacccctcgtccccagcgctccgcacgcggc

SEQ ID NO: 89797 - DNA, 122 bp, Homo sapiens
atcactttattaatcatgtatgaatttctgtgcatgcaccctgaagcgatcacacacacgcggtgcaatcccaatcaaaaacggaagccttacctgatggcagaaaaggcagctgcaggagc

SEQ ID NO: 89798 - DNA, 122 bp, Homo sapiens
gaccaggtggcggggacagggtgagcacacagtccagtccccgctgtaaggaccaggtggcggggacagggtgagcgcacagtccgggtccccgctgtaaggaccaggtggcggggacaggg

SEQ ID NO: 89799 - DNA, 122 bp, Homo sapiens
caccacccactctaggtccccgtctgctcgccgtgtcccgagcttgtccttcactgttgccgtgcccactgctgacagctggccccgtccatttactctcatgtccgagaatctgaagcggt

SEQ ID NO: 89800 - DNA, 122 bp, Homo sapiens
gcttccccactttacccagaaaaggcaggctctaggccacctcctcctcctcggctgtggcgtcctggtactgctgatactcagacagcaggttgttcatgttgctcttggcctcggtgaac

SEQ ID NO: 89801 - DNA, 122 bp, Homo sapiens
agggggcccaagcgccagccccccagctccggcggacccgggtgggcgtgcccgcggacccgcttgccgcacttaggcgagtctcccctgcagcgccccgagtccctgggggctgcggcggc

SEQ ID NO: 89802 - DNA, 122 bp, Homo sapiens
ggccgggtggggggaggtgacttgatgtcatcctgagcagctgggcggcgggtgccggtgcgcacggagccgagccggggctcccgttgcgctgcaccgcgttgggtcggagtcccaggact

SEQ ID NO: 89803 - DNA, 122 bp, Homo sapiens
tcctaccgatcaccgcttaccatgtatgcgataaaagctcaccgaaagcgggacctcgtgcgctgtgcaaatgaggaaactggcacagccatcagcccacttcatatagacagatagatgca

SEQ ID NO: 89804 - DNA, 122 bp, Homo sapiens
ccagtcagccatggagagctggggaaaccacattaaggtgctcacaaaaatacagtgtgacgtgtactgtcatcaaggggtatgctccatgctttgagtcaccaatgaagcgggtgagggaa

SEQ ID NO: 89805 - DNA, 122 bp, Homo sapiens
atgtggctgaaaacaaagttagtgacgtgaaagccaggaatgtggaattcctcaagatcacgagacagagaggggtgcaaggcctggagtgggcgaaggacacgggacggggagggacgcgg

SEQ ID NO: 89806 - DNA, 122 bp, Homo sapiens
gggggaaaagatgtcaggcactcagcgagcgacggctggctattgataaaaccaatctctcgctcaaattcgtaattcatggccttctccttggagccccctcagagaaaaagttccctctt

SEQ ID NO: 89807 - DNA, 122 bp, Homo sapiens
agtcaggtaaagggccaggcagagcagaatggtaaggcacccggcggcggcgtgtgccagcgaggccagaagaccctggcaggtatcccaccacgcccaggcggggctgcactgtgcccacg

SEQ ID NO: 89808 - DNA, 122 bp, Homo sapiens
gcattacaggtgtgagccaccatgctcggcctagggattacaggtgtgagccaccatgctcggccgagatgtgaggtttccaggggccgtgcccaacgccaggtccggcctctcccacggta

SEQ ID NO: 89809 - DNA, 122 bp, Homo sapiens
gagacactacttacccttgctttcgcaatacactctaatcgtttgtagtctatactatttcgtttaaaaaaaaaaaaaaccggatcccacactaaattggctttataaccctagtgagccct

SEQ ID NO: 89810 - DNA, 122 bp, Homo sapiens
aattacagcccaaaaggtggagggtgatcaaattaagaacatctgagctgtattggtgggcggtatcgctaaacgcctccggggagcggtttccaagtgatttgcagtaatcccccaccttc

SEQ ID NO: 89811 - DNA, 122 bp, Homo sapiens
cactgtctggcacgtaaggaacctgagaaatggagagactaaatggctaaattagataatcgagctaaattaagaggccaaattagacaaccaggactctgagaccggtaaccaaccttgag

SEQ ID NO: 89812 - DNA, 122 bp, Homo sapiens
ttgccttttaattaagaagagctgatcgggggaggagtccagaacgaccaaaccctggggcgaaaactgccaccgggcttggctctgtggccggaacaaaaggcctgagaagggggtggggg

SEQ ID NO: 89813 - DNA, 122 bp, Homo sapiens
aatgatgaggttggcagccaaaaagccagagctcttgggttcaactttagatcccattaccgcattgatgggtggtcttgagacaaaatcctgtaatggttaagaggttgggctctgggatc

SEQ ID NO: 89814 - DNA, 122 bp, Homo sapiens
gcaggcaggtcttctcgttagctgtggtgctccatgcccagcacatggtagggtctccaccggggtttactgagtgaacattctgagagctgggagaatgccatggaaccgagaagcagcac

SEQ ID NO: 89815 - DNA, 122 bp, Homo sapiens
ggaaggtaagaggctgacgtcgtgcgtgggccccgccggccccagtgggaagcagtggtgcgtgcctccagggagcacttctcctggacccggggccgtggctgcctacgatgtccactgcc

SEQ ID NO: 89816 - DNA, 122 bp, Homo sapiens
tcaaataaagagctttttaccccctcttgcctggtgctgccctgttgaagataggggattcgaggttggggaggaaaggtcagacaggcatagtatcccagtcctgaggcagaaatgaccag

SEQ ID NO: 89817 - DNA, 122 bp, Homo sapiens
aaactgtaagaattcaacaaggaagaactgatactcgcgagcaggtccttcagatgtgggcgcttctctggagttcgcacactgacaacaccgttgctccaaaccactttggggatgatttg

SEQ ID NO: 89818 - DNA, 122 bp, Homo sapiens
ttgcagccaccacggagggacggggcgcgtctccttctgaatgacgcaaggggcggggcgcgtggtggggcggggaaggcgcgaggcgcgccgcgatcggggactgtcctaagacgggcggg

SEQ ID NO: 89819 - DNA, 122 bp, Homo sapiens
gagcccccacgcgcgctcccccggctacccagctggatggcagcgcgagggcagttctcgcggatttatagtccccagccactcggctgtcagtcctgagagtctgagagtttccacctctc

SEQ ID NO: 89820 - DNA, 122 bp, Homo sapiens
ggctcagctggagggagctttgcgattgcacctgctgtctgccttggcagccaggcaggacgcatgcccgtgagcccagccacacaacccacggcacaggcctcgttcttcatggggctggt

SEQ ID NO: 89821 - DNA, 122 bp, Homo sapiens
cacccccccaccaggccctccccggcccgcaggtgaatgactggcccacacaaaggaagccggctggaaatgtggaattcggaccaatttacgggagactctgtcgcctagggtcccagcgg

SEQ ID NO: 89822 - DNA, 122 bp, Homo sapiens
cggtagccgtctctcggtcgccggctaataaaggactcctgaactcgtctccaagtgtggcgtttctaactcgctcaggtacaccacttggaagcagcttgaatacttgctatcatcatgtt

SEQ ID NO: 89823 - DNA, 122 bp, Homo sapiens
caaagccttcagagtgacagattataccgaatttattgcataaaagggtcagtaagcacccgcgggtctcgaaccccagcacagagatggacagatagaaagtccggcatgaggaggtaacc

SEQ ID NO: 89824 - DNA, 122 bp, Homo sapiens
tgtgttgccagcatcccagtttcagggacagtcaccgccaagcccgaccctgcaaagggtcgtaaccggacttcggggcaaacttcaggtcccccgcctgctagcccgccaaccccctccgc

SEQ ID NO: 89825 - DNA, 122 bp, Homo sapiens
ggcctctcaccttcaaggcttcagatctattgtgctccggacgcttggccacgctgtcggcgtgaatggtctcggtgaacgccggccatggagacgagtgtgcatacttcgagcggctggag

SEQ ID NO: 89826 - DNA, 122 bp, Homo sapiens
tttcgcggtcgggtgatgggggggctccctgacgggcttggatgacgagcttcccagccccgcgacccttgtgtgcgtgggctcgggttctggcgggagcccctgggccgtgcgcgcagccg

SEQ ID NO: 89827 - DNA, 122 bp, Homo sapiens
cggcctctaggggtgtgtggtgggacttgaaatcctcccttaatgaagtcacaccttctccgtccgcttccacccggtcggcccatggcagagcccccatgtagcccaggaatcggcttggc

SEQ ID NO: 89828 - DNA, 122 bp, Homo sapiens
ttctggtaacactgggaaccagccagggtcagggtcagagtcggagtggcctcagcctagcggctgcccgattcctagatttgcgcgccagccgctccactgtctccttccgcctgccttcc

SEQ ID NO: 89829 - DNA, 122 bp, Homo sapiens
actggtaaacttgctttgtttttaaatagtttttttctgtagtgaacaactaaaacagttcgtggaaaaacaaaagaaaggcttataaacatttgaagagatgccctcattcagaattagag

SEQ ID NO: 89830 - DNA, 122 bp, Homo sapiens
accccttaatcgatgaaatggggtaggagttggcgttggtagagcaaagtaccgattaatcgtgaacttaaaggggattgcaaattgcaacctttggcaccatctgcaaattgtgggggtgg

SEQ ID NO: 89831 - DNA, 122 bp, Homo sapiens
cgggtcaccccaagggtgcagtgctggagcacctggtgcccgcaggtgtgtgttcctgcccgacaacggcgccttcttcgtgaactacgtcattgcctcagcctttatcggcaacgccatgg

SEQ ID NO: 89832 - DNA, 122 bp, Homo sapiens
gtttaaaagtgcgcttgtggctgctgctgtcttaactcctgtgcttggcggacagacaggcgagatggcggcggaggtgttgccgagtgcgaggtggcagtattgtggggcgcccgacggga

SEQ ID NO: 89833 - DNA, 122 bp, Homo sapiens
atgacatcaggagcctgggaagcctcctgccctaacccacagccacaccagtgcctgccccgggcttcttaccagaaccccctgctggaaacccggccccagtctcagtctctcttctcagt

SEQ ID NO: 89834 - DNA, 122 bp, Homo sapiens
ctgagctgcttactttggaccaagcatgttggaaactgttttcagctgagtccaagcactcgaaatctgcgtgtgcccttttagtaggtcacaccctccaggccacagccacactgggctcc

SEQ ID NO: 89835 - DNA, 122 bp, Homo sapiens
tgagagttaattcattatccaggttcatgcccacttctaggctcacatccaggctgacctcgcccatctcagaaatcctaattttatgcaggatctgtataacaccacccaacgggtaatta

SEQ ID NO: 89836 - DNA, 122 bp, Homo sapiens
attgggaagacctccgttgtgagcccggccctgcttgttggcttgttggccgcaggaggccggctcggtggctgcccctggtgcccgctgatccatgcgcagcatcaggctggaggagcgcg

SEQ ID NO: 89837 - DNA, 122 bp, Homo sapiens
gatcaccaggctattgagcgcatagcagtacacagccatagtactgggtcccgcgctgcccgccgccgcggctcccgctcctgctccgccgccggcgcctcctcctcccggcgctcccggct

SEQ ID NO: 89838 - DNA, 122 bp, Homo sapiens
ctgccgtgggcctcctgtcccaccccaggccacggctagcccggcggcctccctgaggtgcggctcacgcctgcttcctcaccagcagcacccagggcaggatggcggccaccacggccacc

SEQ ID NO: 89839 - DNA, 122 bp, Homo sapiens
ctttagaattaatttcttaatcttgtaaaactgtgacaccagggttttccctggtgtcctcggattgtcagtaaggctaaaagtagagaatatgccccaaattctaagccccaataactgca

SEQ ID NO: 89840 - DNA, 122 bp, Homo sapiens
aggaacagacaggtcagagcacagtaactaagggcaagtggtacaagatgaggtcaggtacgtgatagccagataaatgcactgtagggcttcgtatgcacggaattggattttattctaaa

SEQ ID NO: 89841 - DNA, 122 bp, Homo sapiens
tttccccaccacttttacagcaaccaaggaggactgacctgatatttccaccccaggaaccgtttttatcagctcaccttgaaaccagcagagatgctcaggagggtcagagaaggctcttc

SEQ ID NO: 89842 - DNA, 122 bp, Homo sapiens
ctaagtcgccttagtccgtgacgtgcggtgtagttggggaaacgcaccgtggttccccgtcgggtcaggagatcccgagccccaggctggcgtgggcgaagcgtacaatcccttcacctttc

SEQ ID NO: 89843 - DNA, 122 bp, Homo sapiens
gtggaggcaggagctgtctcatctctgatcctgggcctgggttccaggctttctgtcctccgcccccaccccaattccctaagctgaccccacaagggcctgccaggtgtgtgtggagggaa

SEQ ID NO: 89844 - DNA, 122 bp, Homo sapiens
ttaatgatgcagtttagtgaattttgaaaaacctccatacctgtgcagccgccaccatcgcggtggtgaggacggaggcggctctggagcttacccctggagtgcgtgtggttagagaagcc

SEQ ID NO: 89845 - DNA, 122 bp, Homo sapiens
cagacagcagggccggaagaacaaagctggaaagggaaacgtcgcaccggctctgcccagcggcgccagcccgggcaaccttccgcagtcgcgaagccacgcccctttcccaagtacctccg

SEQ ID NO: 89846 - DNA, 122 bp, Homo sapiens
aagtccgggttggggtcacctgaccggagagccggctagatatggcgtcctctttgcttgcgggcgagcgattggtgcgtgctttgggccccggcggggagctggagccagagcggctaccc

SEQ ID NO: 89847 - DNA, 122 bp, Homo sapiens
gggagaggagcgtcttctgcaggtgtttttgggcgaacctcttcaccttgtgtggttcggcgtctccttttgtgtattaacccggacttttccgactggaaaataggggtttgggaagcagc

SEQ ID NO: 89848 - DNA, 122 bp, Homo sapiens
aggctgaggcaggagaatcgcttgaacctgggcggcggaccttgcagtgagccgagatcacgccactgcactccagcctgggcgacagattgagagactctgtctcaaaaaaaaaaaaaaaa

SEQ ID NO: 89849 - DNA, 122 bp, Homo sapiens
aatagggcttgtgctgctatgagactcatgccaccgctgttctgacaggaggtggagctccggcggtaatgcttgttcaccccacgctcacctcctgctgtgcggcccagttcctaacaggc

SEQ ID NO: 89850 - DNA, 122 bp, Homo sapiens
cggctttatatctatatatacacaggtatatgtgtatattttatataattgttctccgttcgttgatatcaaagacagttgaaggaaatgaattttgaaacttcacggtgtgccaccctaca

SEQ ID NO: 89851 - DNA, 122 bp, Homo sapiens
aacttctgtgggggctgcggttagaagcacaggctgtgtgaaaggtgactccgggggctacgaaaaaacacgaaggttttcacatagggtgagaacccaagacactggagaccatgaagcaa

SEQ ID NO: 89852 - DNA, 122 bp, Homo sapiens
aaacaaaagacttcacaaggctcaaaggacccacggctttggacactccatcctaagcaccgaacagttgacctcacggtggcagatttgaaagaccacggggtgcctgaagtagggtgcag

SEQ ID NO: 89853 - DNA, 122 bp, Homo sapiens
gtcgggctggcctcacgcatttcgcttggatgcctaaatctgtctccacgtggggccggtcgataaaacaacacttcccagaatacgctgcgatccattcgcggtctgcacccggaaagtac

SEQ ID NO: 89854 - DNA, 122 bp, Homo sapiens
tctctctcctgcagggagaacagttcaaagaaattcagtctgggcaggtggcctagaatgcgggaagggctgaggaaagaacattttccagcacctggccccaacacagccacgtaagcccc

SEQ ID NO: 89855 - DNA, 122 bp, Homo sapiens
tgtggctgagccctgggggcacccaggtaccttgatgtaggggttctccatccaggctggcgtgagggccgtggccgtgtccgcatcgctctcatagtagaagacggtgaaggtctccttgc

SEQ ID NO: 89856 - DNA, 122 bp, Homo sapiens
cttttggctatataacctagaagtgagattgctggatcatgtggtaattctatttttaatcgtttgaggaaactccgtactgttttccctggtgggtgcaccattttacattcccttcagca

SEQ ID NO: 89857 - DNA, 122 bp, Homo sapiens
gcgttcacagcccgcttaaattgcaaacaggcttcctccggctggtctgacgccgaagaccgcggagccgcggattcaaagaatgaggaagcgctgataccggggagaggcgggcctctccg

SEQ ID NO: 89858 - DNA, 122 bp, Homo sapiens
gtttagttaaccagccactgtaccgtcagcgccgcgcgttcctcatggcgttagggctgacgggccttgttgctgaggggccttcattcaacggtctcttgttgaatgaaaagacctcattc

SEQ ID NO: 89859 - DNA, 122 bp, Homo sapiens
agaggccggggaccgcgggtagtgagggaggagaagccgggtcagaccccagcccaggggcgccctttgggcgatcagcacctcagtcccggagcgcccagccccgccccatctcccagccc

SEQ ID NO: 89860 - DNA, 122 bp, Homo sapiens
atcatgattgctgtcattaccctattggaaatgttgctaaatgtgctctcctgctccatccgacccctccttccgaagggcccgaggaagaccacccacgacgggcagagctttcctccatt

SEQ ID NO: 89861 - DNA, 122 bp, Homo sapiens
ctgagcagacatggaggcccccggccctgcagcagagctgcctgtcagcctgggacagcgcgtgcagccactagagggccgtgggcacacgggggccaagcacccaccattctgtgccggcc

SEQ ID NO: 89862 - DNA, 122 bp, Homo sapiens
gacataatcccacttctcactcccattgggtgccgggtttttagagaagccaatcagcttcgccgcgatcccggcactacgatcccggcactacagtcccggcgcaaccacccgcactcaga

SEQ ID NO: 89863 - DNA, 122 bp, Homo sapiens
ggggtcgtctgggatgacgtcgccgtcgatcaccggcccgaaggctatgtggtaggtggccggggtgatggtctgctggatgagctccttgtagttcttgttccgcaggcattctaccatgt

SEQ ID NO: 89864 - DNA, 122 bp, Homo sapiens
tttaacatatcaaagccatcttcccttcaggcttcagctcaatgctgcggctcaatgctgcggcttagagctctggcttatggagcatctgccacgaagagcaatgcattttagaaagtgac

SEQ ID NO: 89865 - DNA, 122 bp, Homo sapiens
gtggctgcggcagggccgcagatcaaagtggtaactggggatctgagttcggcagtgacgcgcgtccctcacgtgaccaggagcctctatgtgcccaagtccctctcgtcccggtctttttt

SEQ ID NO: 89866 - DNA, 122 bp, Homo sapiens
tacaatagggcttctgatggggcctatgccggggaggcatcctgaggcctgaattccattcgcttctgctttctgctctcaatccctcctcctccgtaatgaccgggccaaacgtgtttcag

SEQ ID NO: 89867 - DNA, 122 bp, Homo sapiens
ttggttcgcccggagttgtttgtgagtggccattggcgacgtcgaggcgccatgacgagccgattggctgggcgttggaatgcccgccagggcaagggtagggaggaggcggccgaaccgcg

SEQ ID NO: 89868 - DNA, 122 bp, Homo sapiens
aaaaaaaaaaaatcccttcagccacccataaagaaatctgctttggggatcataagcattcgtatatttaaacacctaagtcactcttagtcctgcaacatgttcccgatgggctgaggggc

SEQ ID NO: 89869 - DNA, 122 bp, Homo sapiens
ggataacctccccaccagtgtctagacacagtaggtgctcaataaataggtgtgggtttgcggtggcagaagagcgctatcccttaagtttctgacagtgagggggaaaaaggctaagcagg

SEQ ID NO: 89870 - DNA, 122 bp, Homo sapiens
gcagctggacaaccccaagctgtatttcacactcagagaaatgtaaactcttctttcattcggtagccataacttctgggaagaaagagatcttcacagaggtccagagaagtgcagcaatt

SEQ ID NO: 89871 - DNA, 122 bp, Homo sapiens
tcggactgcccgcccctcccatccccctatgccgccctcgcttccccgactgtgagctggcggggcaggcaggatctttagcatctcggcctcaccaccagccctgatccaggaagcccagg

SEQ ID NO: 89872 - DNA, 122 bp, Homo sapiens
acacaaacacacacacatttctgcaatatttcatcttcttaggccaggaacttatcatgacgaaccaaatgcaatacctatttcctgaccaaagctgttattcaatatctctatcatttgag

SEQ ID NO: 89873 - DNA, 122 bp, Homo sapiens
gtcagagtccacaggtgctcccagcctttctggcatacaggttgtattagtctgttctcacgctgctaataaagacatatctgaggctgggtaatttataaaaaaagaggtttaattgactc

SEQ ID NO: 89874 - DNA, 122 bp, Homo sapiens
gtttggatgggattgtgggataagatcgcggagcggatctggacccgagcctaataaaggcggtgtaaatacaggtgtcataaaggacggggcggggcgcgcggttgtcaggggcgcaagcg

SEQ ID NO: 89875 - DNA, 122 bp, Homo sapiens
ccctcagcccacctcctgtaggggagcacgggtcccgtctttcttgtccaatttctcagccggggcactgagacgtctttgttccctcaccctaagcctggtctgaagtctgcctcctgcaa

SEQ ID NO: 89876 - DNA, 122 bp, Homo sapiens
gtctgtgcgtgcaggggctgccgtcccagtgggcggccgtctagcttgtttggatggctgcgccagtgtgatgggaaggacaggcggcctcttccttaggagccacctcacagttcccaggg

SEQ ID NO: 89877 - DNA, 122 bp, Homo sapiens
tgcacatagcagtgatcatgaagggcacggtcagatgcagttagtaccagcttgaagtagcgttcctgcttgtagtccagtggcagagccagagtcaccagacccacacccccctgggtgct

SEQ ID NO: 89878 - DNA, 122 bp, Homo sapiens
cttcatggcctactactactattctgcaaacgaggaattcagaccaggtaagtacccatgcgtctcattttggaggaataggtttaaaaaacacaggggtgcttgagtgttcctgaggacca

SEQ ID NO: 89879 - DNA, 122 bp, Homo sapiens
ggggcagggcgcgctgcggagagacggcaggagcgggctttgcaagccgagtctggattccggcgcgagccgattccgggaactggcttggtgacccggccgccggcccgtgtcccgggctc

SEQ ID NO: 89880 - DNA, 122 bp, Homo sapiens
gggaccggccgctgagcccaaggggaccgaggaggccatggtaggagcgctcgcctgctgcggtgcccgctgaggccatgccggggccccggcgccccgctggctcccgcctgcgcctgctc

SEQ ID NO: 89881 - DNA, 122 bp, Homo sapiens
gcattgtgggattcagagcccccagaagcagcaagccaagttacctgtgtgaccctggaacgtgggtatgaggagcctggtttagccaaacacagggatgattcaacaagattataggagtt

SEQ ID NO: 89882 - DNA, 122 bp, Homo sapiens
acacacattcccagccacgaagcctgttcctccaccggacagcctaccagacccagttcgcgagcagatcctcctggatccaccagaaagtcgaaaagacatggtggcagcacagccgggca

SEQ ID NO: 89883 - DNA, 122 bp, Homo sapiens
gatcagacgtttagcatcaaaaacagtgttctggggattcattgctacctggttcttggccgcatccccaatgagccgctcggtgtctgtgaaggccacgtagctgggggtggtgcggttgc

SEQ ID NO: 89884 - DNA, 122 bp, Homo sapiens
tagattctccctgtactggaaagggatgtcgcaaggttggggacgaaacctctgagtttgcgaccgtagctgtcgctttccggccaacacagaggtgcctgaaggctggttggggtggtgag

SEQ ID NO: 89885 - DNA, 122 bp, Homo sapiens
gatcaaggccacctgagttggttaggacagctaagcgggacgtccagggctgctcgccagcggtgggtctagatatgaacttgtgcttgagcagcccagcgtcttacaactctgctgtgagg

SEQ ID NO: 89886 - DNA, 122 bp, Homo sapiens
taaaagaaaggagtgacttccccaacctgtcgcatcgtgtcctggagggtttgaggaggccggttagcatagtggttaaggatgtcaacccgggagtcagtcggatctctgttctattacta

SEQ ID NO: 89887 - DNA, 122 bp, Homo sapiens
gtgggatggaaacctgcgagtggctggagggtacctgggatccaggctccctcaacaccccgtgggctcccagtgctcatctgagagacggaggggcattcagacacgtggtccttcacggg

SEQ ID NO: 89888 - DNA, 122 bp, Homo sapiens
tctcccacctctctgacttcctcccccaacccaatttgcacagatggagacctgattggtcgggagacagggattccccagctctccttccatgtccctgcccccagactcagccaagccaa

SEQ ID NO: 89889 - DNA, 122 bp, Homo sapiens
gcccccaagacacacagacggcacagcagggctggttcaagggctttattccatctctctcggtgcaggaggcggcgggtgtggggctgcctgcgggctgcgtctagttgcagtagttctcc

SEQ ID NO: 89890 - DNA, 122 bp, Homo sapiens
gggaggggcgtgcacgcccgcgctgcgtggcaaggggacccgcgagaacgttgtcgcctccggaaggaaagggacttgaactcacgacccacgcagctccagggactagaaactcacgatcg

SEQ ID NO: 89891 - DNA, 122 bp, Homo sapiens
caagaaaagcccccttggatacagacacccaccgggaggccaaatcggccctcggacccgcggcttacctcttgcggctccccgcagctgccatgacaccaacccgaagcgtgcaccccact

SEQ ID NO: 89892 - DNA, 122 bp, Homo sapiens
tgggagggggccctgcagtcaggtggggtgggaagctgggctggtgccccgatacctgtccgatcatcacagagaaagcaaagacgcccgtgaaataattcagcagctggaagacaatttca

SEQ ID NO: 89893 - DNA, 122 bp, Homo sapiens
cttaccctccctccagagacagaaacagtttcccttcaaaccatcatgaggattgttgcacgccagctctgtcttaacttaaatatgactccaggtcaatatcaaaaggaaggtgacagtgt

SEQ ID NO: 89894 - DNA, 122 bp, Homo sapiens
tcattcagaggtgggtctccggcgcgacgtccctctgtggcctaggagccactttcctctcggatcctgtttactcagatatccacggggggctgtcgtgtaattaaatgaagactccctct

SEQ ID NO: 89895 - DNA, 122 bp, Homo sapiens
ggaataaaaagtatctgttaattccagcctctgcactttgcattaactaaagagcgtctgcgagactgggagactggcgcattagcaggtgactctgtgggctatgagcctacaaggacagc

SEQ ID NO: 89896 - DNA, 122 bp, Homo sapiens
ctcaggtggtccactcgccgcggcctaccaaagtgctgggattacaggcgtgagccaccgcgccccgccaaccagctggagatggcttaaacttactcccgaagaagctcccttccatttct

SEQ ID NO: 89897 - DNA, 122 bp, Homo sapiens
aagaattgggaatgtgtcaataaatagatcagatctcatcaacccctctgggaactcaaccgtaaatgggacaaaaagtttgaaaaatcacgatggtgtgaagggaaagcataacagagata

SEQ ID NO: 89898 - DNA, 122 bp, Homo sapiens
gaggcagagccgcaggtagtagtcggggctcccggaggccctgggcacttgcaccagaatcgccttgcgcctccggtccacccagtagctgagcttccccgctgcaggaggcggcaagtcgg

SEQ ID NO: 89899 - DNA, 122 bp, Homo sapiens
ctggatcgggaggcgacggaggtgctgcgcgcgcaacccgccgttcccgtcacggcgccacggtcgcagttggccacacagtgcaagtgcagcccaagccgaacgcccaagagggctccggg

SEQ ID NO: 89900 - DNA, 122 bp, Homo sapiens
gctggggttgtatcaaaacaaaacaaaaccacaccacctggtgggcttgataaaaacatccggcctctggcagtggctcatgttgcaatgccagtgctttgggaggcaggtggatcacttga

SEQ ID NO: 89901 - DNA, 122 bp, Homo sapiens
gcgcccggccggccgaggcgccgggagagtgtgtgtgtgtgggaggctggcgcgggcccgcggtctcctcagcatcccgaacccggagcggctcggtcccccaaaccccagcccgggggcgg

SEQ ID NO: 89902 - DNA, 122 bp, Homo sapiens
aaacggagtcagctccaggatcctcgaccacgggcgtggcgtgaaatcgatttacaaacacgcgatttgtatctgcccatctaggagcattgccttttccacgaaggaagcccaggtgggac

SEQ ID NO: 89903 - DNA, 122 bp, Homo sapiens
tcaaattcatgctcctgatcttttttttcccccttcctttggctatgaaaacccaaagcccggagtgattgttttctccttgctttaagcagtgaagttatcctaatgcaaaagagcttagt

SEQ ID NO: 89904 - DNA, 122 bp, Homo sapiens
tgaggagagcccagaaggcgttgttgacctcactcgagggattggggttgggagggaagtcggctgtacttagggaaataaatggttcctggcctcttgatctcagttcagactgcaaactc

SEQ ID NO: 89905 - DNA, 122 bp, Homo sapiens
gttttcaggtctctgttaacaccttggttcctcagatattgcggacagtctaattcgccccgcgacgtgagggagaacccaggagcgggctccggtagagaaagaagcttccggtcaacgac

SEQ ID NO: 89906 - DNA, 122 bp, Homo sapiens
ctaccctcacctctgtccctagctcagagccgagggcacgcagcgggacgggtgctcgggcggagggtcggaggtggagacaggctcagtcccctgcactctggccccttggaggggcttgg

SEQ ID NO: 89907 - DNA, 122 bp, Homo sapiens
tgatggcctcacatggggctcctcacagcacctgggtgcacccactggcagcttcctggacgctcagtcggcgctgcggtgaaggtgacaccgggtgcatgggaccccagggaggtgcccca

SEQ ID NO: 89908 - DNA, 122 bp, Homo sapiens
gggactcgatttgcatcttaaacgcggacgccacgcggggctgctggctccaccccggctcgcgagcgctgggggcgcccggactcccacccgctccccacccaccagccccgccccgtggt

SEQ ID NO: 89909 - DNA, 122 bp, Homo sapiens
gctcaatatagaaccgctgtctcctgcgttgctcacggagacttggagtcacagtgctctcgcgatcagcagcagtaaacacactaggaacgcactattaaaatgaagagtgcctacatatc

SEQ ID NO: 89910 - DNA, 122 bp, Homo sapiens
ggagccgttccgcacctttcagctgttcccgggaatgatagggcagctcagtgccgagctcgctaggtaattctcgctttctagaactcctgtgaaagcaaagcagcccgcatttggaggct

SEQ ID NO: 89911 - DNA, 122 bp, Homo sapiens
cagcccgggtctcagggaacatggcggcgctggtgagacccgcgaggtttgtcgtgcgaccgttgctgcaggtggtccaggcttgggaccttgacgcgaggcgctgggtccgggcgctgcgg

SEQ ID NO: 89912 - DNA, 122 bp, Homo sapiens
ctcgatctcctcaccttgtgatctgcctgcctcagcctcccaaagtgctgggattacaggcgtgagccaccacacccagctgactgagctgtatttcttacccagatctacacagcatccta

SEQ ID NO: 89913 - DNA, 122 bp, Homo sapiens
caccgatggcgaaggcctctttggattgcgtgccgtgttcattgtaccagggcggccgcccggcggtgtagatggtacgcttgcttgtacgcagcaggggaggctctgacttgcactggctg

SEQ ID NO: 89914 - DNA, 122 bp, Homo sapiens
ctgggagagcagtttcatctgagtcaggaggaaataagtggatggaatcaggcggaagcacgtagcgtaaaagaaaaattgcaccagacactcattaaaaatggcagagagactttctttga

SEQ ID NO: 89915 - DNA, 122 bp, Homo sapiens
aaaggaaacgcaggcctggtagggggtcctgcccagtggatgtcccggcgaacatgatttcgcgaacgggagtgggggcacaggagagcgtgtccgaggtggcctggcgccccggctttgag

SEQ ID NO: 89916 - DNA, 122 bp, Homo sapiens
taccactgcccgtcttcctactctggaaatctttctctgctccagcttcttctgtcttaacgtcagtccagcaagtctccaagaccctagatttcaaaagcaacattctcttaactaaggaa

SEQ ID NO: 89917 - DNA, 122 bp, Homo sapiens
aggcagaactcccaaggcctaccaggcagcagagtggggcatcatacatgcctgaccccacgcaaagaccatcactactgccagccgctgcctggctgtgtgcaggtggggagagacctaaa

SEQ ID NO: 89918 - DNA, 122 bp, Homo sapiens
gggaggtatcatcagaatccagggagaccagtgattgtgaaagggccatgtgataggagccgtggcctctgctgagacacagcccacctgcagggaggacaccgagaaataagcaccctaac

SEQ ID NO: 89919 - DNA, 122 bp, Homo sapiens
tgcacctacacatatgtacatacacacatatgcatgagctcacccacctgcacacacccacgcacagggctctgagttggagtggtcgtgatgctgcttcacctccccatgaggagtcatat

SEQ ID NO: 89920 - DNA, 122 bp, Homo sapiens
aaagggagggcgccctgcgggcgggcgggccacgctaggcgccgtctgccctcagagactcgggctgacaggagtgagagctaaaacttccaactagctgaaaccaatagccgggaatcgag

SEQ ID NO: 89921 - DNA, 122 bp, Homo sapiens
ggaccaggatgggctgcactttccccacccgcggccctgggacccgccccacccgaagcccggggagatccaaccgcaggctgcctccggccagcggactcattcacactccgcaaacaggc

SEQ ID NO: 89922 - DNA, 122 bp, Homo sapiens
gttccaggtttgtatttctggacctcagctagattaggccctgcccagagttctagcatacgtggacttccaggtgggctcttaggatttggctggtctttggggacctggagtatgacctg

SEQ ID NO: 89923 - DNA, 122 bp, Homo sapiens
tcaaaatatttactgggaaggcactgacatattcagaggacataatagaaaattaaagtgcgggaagatggctgtaaatagcccgtttccgggatgggaaatcctgtgtctgggaaacacag

SEQ ID NO: 89924 - DNA, 122 bp, Homo sapiens
caagtggaagcaactgcagtgggagcaaacccccatggaggtcgtctctcccagtgcccccgcggagatccgctctcccagtgcccccgcggaggtccgctctcccagtgcccccgcggagg

SEQ ID NO: 89925 - DNA, 122 bp, Homo sapiens
aaatcaggtcaaaagaaaggccctgatgatcagaccaccgtaaagagtatgtcttggagtcgagaaaaattcatttgggagccgagataattcacattgcatgagtgacccagggcctgcaa

SEQ ID NO: 89926 - DNA, 122 bp, Homo sapiens
atagggctggggggagacgccccagtcgggccaagcaacagcactgccacacaggtgacacgttccatgtgtctctcaggaagagagcaagtgcacgggcttggctgagccagcggttggga

SEQ ID NO: 89927 - DNA, 122 bp, Homo sapiens
ggcgcacagcgcggaggaaggcgcgagtcagtctggagtgctccccatttatcaagctcacgcaggccgccagccgagcgagtctttctatcattacacctctcaaaatccgattcatacca

SEQ ID NO: 89928 - DNA, 122 bp, Homo sapiens
gatctgcatgtgggggtgccttcctgcatctccccatcagtggtaggtgctcctcccagccgcctctttcaggcctggagacagcggcctgcacctcaaccctactgcatgccagtgaagcg

SEQ ID NO: 89929 - DNA, 122 bp, Homo sapiens
ttcccggaaagttgtggggcttcgaacctaaagtttcgggggatctgggctgagcgtggccgccgctccgcctccctccgccgccatttacagtgccccggcccggccccgacgcgcccgca

SEQ ID NO: 89930 - DNA, 122 bp, Homo sapiens
tactccacgttcccgcaccagttgacctcactgtgatgcccaaatgctgcctctactccacgttcctacaccggttgacctcaccgtgatgcccaagtgctaattctactccacgttcctgc

SEQ ID NO: 89931 - DNA, 122 bp, Homo sapiens
gcgagggcgcgtgcggcgtgacgacgcgactcgcggcgcgtcccgtgacgccatcgcgcccgcttttgaaagttggcgcccggggccgcctcccatgctgccctgcgccaacccctcccctc

SEQ ID NO: 89932 - DNA, 122 bp, Homo sapiens
ggccacccccccgatggatgtctgccgtgccaggcaggaatgggctacttggggatccagcggccttccagtgcctttgtgctacttcctctactcctgtatgttgctcagctcggctctct

SEQ ID NO: 89933 - DNA, 122 bp, Homo sapiens
gtaggcaggcacgcagtgtctcgaagcagtcggcgcacacggttacccttaatgggactgcgctgcctgactcatatgctctgaatctgtcagggccttgtttttgttttttgttgggaaat

SEQ ID NO: 89934 - DNA, 122 bp, Homo sapiens
tgctgcgcgttgtagggcggaatcgccgaccacagcttgggcctagagcgcccataagcgcgggcagcggtgctcacagccaccccgtccaagataaagcctttctccagtcgcaggcgaca

SEQ ID NO: 89935 - DNA, 122 bp, Homo sapiens
aaacgtgcgggagaaataaagccgttcgggatgcacaccacctaggcgcgtgtattagagcggagcctccctgaaggagcagccagggagagcgaaggggaagccgggggcaccccgcgccg

SEQ ID NO: 89936 - DNA, 122 bp, Homo sapiens
tatgaagtgtacttccctaatatttctctagtcagtacagcaaagcacaggctctcttagcgaaagagagtggggaggaggggtgctggggaggtggcaagatgggaaagtggtgaggtgga

SEQ ID NO: 89937 - DNA, 122 bp, Homo sapiens
aagcagggggagttttaggcagcttaatgagttgttgctccctaaccacacacttgtcagcggcggtattattgttgtggtttagcgcctggcagcgccgcctccccccgctgcgctcccgg

SEQ ID NO: 89938 - DNA, 122 bp, Homo sapiens
cctgcacttttttctgtctgcagcctcttttctgttttttttttttttttttttgggtggcgccctgtccagcctgaggtcagggtcatggggaccctgtctggcctcagagcccagaacca

SEQ ID NO: 89939 - DNA, 122 bp, Homo sapiens
cctcccaccatcccccaccccctcttgatccttgtggggaaggagggccaccctccaatccgtccacagggtaagctcagaacaacctccaggagtccagccccagggccctccgccttggg

SEQ ID NO: 89940 - DNA, 122 bp, Homo sapiens
taagttccggtgctcaaacctgagcggccgactacaaatcccagagtgcctcgcgggcgccgtctccacggcacttgggtttcagggccatggaatcgcaagcccttttcgcactgcattat

SEQ ID NO: 89941 - DNA, 122 bp, Homo sapiens
gggtggctgagcccacaccagggttctgagcagatcttcctgcctcagggcctctcttctcgcccagcccctcccttgccccgtgctgtattattggcagaggaggggcaaacaggagtctg

SEQ ID NO: 89942 - DNA, 122 bp, Homo sapiens
aatgagttctccccacttttacccttgagctttcaatctccttgtgggtgatggggaactcgttactcccacattcatcccactccttccctgttcaatagatccgggtttgatgctggttg

SEQ ID NO: 89943 - DNA, 122 bp, Homo sapiens
gccacctgcgcgccggccgccctgcccaggccctgcgcccgcgtgccgcggtgttttcagcggctggcaggagctccttctcaaccgttagcacccaaagagaatcccaacagcacacttcc

SEQ ID NO: 89944 - DNA, 122 bp, Homo sapiens
ctgtcctctatctctctccctgagcaggagggacccacttccagtcacctcactcaaccccgtgacaaggtttggctgctaaatagagacagccaagtaaaacagctgctgtgagtcctggc

SEQ ID NO: 89945 - DNA, 122 bp, Homo sapiens
agtggtctaacttgttggctttgacaatcttcaccgcataatcagagctactggaacactcgatgccgatgaccttgcgggcccggccttggcggcgaacatgcagaggatgcttgtgtccg

SEQ ID NO: 89946 - DNA, 122 bp, Homo sapiens
cccctcagtctgagcccagagagccgcggggaccatggagccggtgccgctgcaggacttcgtgcgcgccttggaccccgcctccctcccgcgcgtgctgcgggtctgctcgggggtctact

SEQ ID NO: 89947 - DNA, 122 bp, Homo sapiens
cgacggcatccgggcccagctggggtatccggcctcaggcggatactgacgccctgagggcgcggaatagggcggcctgcgcagggcccgccgtctcgggccttgcaaaaagagcggcctct

SEQ ID NO: 89948 - DNA, 122 bp, Homo sapiens
cctgcgctgtccgagagggatggggtttgacaggtctacacctgcgctgcctgggaggagcggagtttgacacatgtacacctgtgctgtccaagaggagcagggtttgacacgtctacacc

SEQ ID NO: 89949 - DNA, 122 bp, Homo sapiens
ccttgcccaatatccaccaaccccctcagaatctagaccccccctgtctgttcctcacctcggccaggatcgggggacacccccattttgcagagtcagccccacccccacctcagcaggcc

SEQ ID NO: 89950 - DNA, 122 bp, Homo sapiens
cccatggggtggggacagagctgctgtcacaggtaagcacagcctgagaggggccagagacggcaaccacgtggagaggtccaagggtttttgcaggagtcttggtaaggctcccctccttc

SEQ ID NO: 89951 - DNA, 122 bp, Homo sapiens
gccactcagtgatggactgatcacaaccggggggcccagctccaaggcatccaccacagccgccaggaagctgccaggggccagctccccaataggggcaggggctgctgcttccttggagt

SEQ ID NO: 89952 - DNA, 122 bp, Homo sapiens
ggaatgaggcatgaggcatggtttgctgtgaatgttctttcctgagctagacattggttacgagggtctgttcaactgtgaaattcattagctgtacgcttataatatgtacactttctgtg

SEQ ID NO: 89953 - DNA, 122 bp, Homo sapiens
gagcggacgaaagcaggtgactctctagtcaacttccgacttggactccgaagatcggtacgttatttccggggctgggttaacgcagcggttccgagctgcgactgcgcagcgtggcccag

SEQ ID NO: 89954 - DNA, 122 bp, Homo sapiens
gacgccggccatgcagccagcccggggtccaataggtgcatctggggagcaaagggagaccgaaaaaaaggtggttttcaaaagtgaagtgccaggttaccagagactgggcaccttcacat

SEQ ID NO: 89955 - DNA, 122 bp, Homo sapiens
taggtgtgagcctccgccccagcctcattattgaaaatttcagtgagatgcagtggtctccgcctgtagtccaagctactagggaggctgaggtaggaggatcacttgaacccaggaggcag

SEQ ID NO: 89956 - DNA, 122 bp, Homo sapiens
gggctgctgtgaggcgaaatgaggctcataaaatactttgggtctcctcctcctcctcttcggggagaggggaaaaaagaatgaaggatgaagaaacagatttgatacccacctcgttgtgt

SEQ ID NO: 89957 - DNA, 122 bp, Homo sapiens
tggttgggggccggccatttttctgcttgttcctctagctctgctactgggcacatggtccgtgctgggtaggctgcaggccagggtgagttgctgacccgctgaccctggctgtgcacctg

SEQ ID NO: 89958 - DNA, 122 bp, Homo sapiens
gcgcctcgccaggtgagctgggtgcgccgggccgctggggtggggatgccagccttttgtcgttgttcattctgcgattttcttctgtgcattttcttctgagtaacggaaataataaaagc

SEQ ID NO: 89959 - DNA, 122 bp, Homo sapiens
ccagtgtcacgtcgcacaggaagccctcggcgcgcagggcctggtagccggtgagcagcgcgccgccatgagctttgcagtaagacaggaagtaactcattctacccagggctggaagcagc

SEQ ID NO: 89960 - DNA, 122 bp, Homo sapiens
ttgggtttttcctgttttcaattttttcttggagacagggtcttgttctgtcacccaagccggaggacactgatgtgatcatggctcactgtagcctagacctcctgggctcaagcaatcct

SEQ ID NO: 89961 - DNA, 122 bp, Homo sapiens
catctcaaaaacaaaacaaaacaaaacaaaaaccagcagttcaagcacaacaaccaacggcgcggacagagggcctcagtgtcagagagaccctgggaaggggtgaggaccacggcagcctg

SEQ ID NO: 89962 - DNA, 122 bp, Homo sapiens
acaggctggccatgcagagcctggaaggacagccttgtcctcttgcagaagcagcaacgccgccttccgagaggccctgagagagattgagaggcggccggcgtgcgggggcctgcccatgc

SEQ ID NO: 89963 - DNA, 122 bp, Homo sapiens
agtgcattattatgcagtcactgcttttgttccgagttctgagcctgcttctatttgcatcgtaacctctttgggggccgggactgtgcacttgctccctttctatacctctccacagttcc

SEQ ID NO: 89964 - DNA, 122 bp, Homo sapiens
accgcccgggctcccacctcaaccctgcaatatggggttggggcagagtggtctgctgcccgctgcccgcagccgcttccggttagggagggagcctgggcctctgggtgctcacgctgcgc

SEQ ID NO: 89965 - DNA, 122 bp, Homo sapiens
gacccctccctcaagagtgccccgggacaccccgcctgtggctcagcctcccccgccccgcgctgccatctcctcagggccgggcagcaggctcccgagcgcccacagacccggggtgcggc

SEQ ID NO: 89966 - DNA, 122 bp, Homo sapiens
cagttcccggacagcatcatcgtggtttccaggacaacaattcccgaccaatcagagggccggaagcgggcctgcgattggccgacggcgccaggggcggggccggaccttccgccttcgat

SEQ ID NO: 89967 - DNA, 122 bp, Homo sapiens
cctctgaccaacaggctgttctgcactgaaaaggttcttcatccctttccagttaaggaccgtggccctgccctctccttccttacccaaactgttcaagaaataataaattgtttggcttc

SEQ ID NO: 89968 - DNA, 122 bp, Homo sapiens
ggcaggggcctccgctgcctacgtcctacctcttttcctggataaacacagctctgtctgcgcggccatcagcccggtcttctgacttcctccagctgaagccaggtttctagcaacaatcc

SEQ ID NO: 89969 - DNA, 122 bp, Homo sapiens
gcaccgctgccttctgggggaggctctggatgtctctaaagaggtcctgggcctcagcctcgaagagccggcggttgtccgtgttctgcaggggctgcgcccagaaggagccaatgtagacg

SEQ ID NO: 89970 - DNA, 122 bp, Homo sapiens
cactcgcgttcgagccaagggaggatgcagatccctcccaagtctgtggccagaagaggtcgtgcgggggtgaaggctgggagagctccagcttcttgcaagcatccgaagtgataagcctg

SEQ ID NO: 89971 - DNA, 122 bp, Homo sapiens
ctctcttccttcttccctaaacgcctggcctcaggatgtcacaagaagctccctctggttcgtttagctcacaaaggcattgtttctagaagcaccaaatctccaaaaaaaaaaaaaaatgc

SEQ ID NO: 89972 - DNA, 122 bp, Homo sapiens
gaatcgagtgtttatgaagttttagtcaattgatgaatctcattggctaaaatcaagaaacgctccgcctctttgcaaatatgtatgaaggagagaagtgcctaaacttctatgtctgatag

SEQ ID NO: 89973 - DNA, 122 bp, Homo sapiens
gtagcgtcagggcgagactccgcctctggggccccgcccaccgcgagcggcaggtggggccggcagatcttctttgcgcatgcggaaaccgctgcccgcttccacctctaacccaggctcag

SEQ ID NO: 89974 - DNA, 122 bp, Homo sapiens
aatcttccagaagatgctggctgcattttctcatatattctgagtgggtatagcaaagttcgaaaagtaaggaaagtctatctttagctttattacctggatgccagaagatgagtattcaa

SEQ ID NO: 89975 - DNA, 122 bp, Homo sapiens
ccgcccaccaggcaattccaggtacccaccgctgggagctgggagggggcgccgggctggcgctgccgcccaccttctctagctggaacttgggatcggtgctcagggaggggagagccggc

SEQ ID NO: 89976 - DNA, 122 bp, Homo sapiens
gacatgtgatccctgccttcacagtgcttacactttgctggaatggaagtgtctcatccacgttgaagaaaatcatcctcatttggctgtgaattagaatagaatctggtcttgtgagaaga

SEQ ID NO: 89977 - DNA, 122 bp, Homo sapiens
gattcccatcctggatcaggctcgacttataatccattctgtgggaaggaatgagagccacgcctagctgcctcctctactaactttgctctaagtagacctgggggtcttgcctttgtcac

SEQ ID NO: 89978 - DNA, 122 bp, Homo sapiens
gcttgctggaaagaggtgctttcggctggctaccggtgcgcggggaccacactcacaaaccgcattccggtcttcccgcccgaaaatccgcgctgtgcgagggacccacaagactggcggtc

SEQ ID NO: 89979 - DNA, 122 bp, Homo sapiens
gaatgttccagaatgcctatttgagagactcagaacaaacgtgtttcttgtcctttgtgccgtggccgggcatcgtggagaagctgcatccagggcgggcccagccaggcagcgcctgcctc

SEQ ID NO: 89980 - DNA, 122 bp, Homo sapiens
cacagactcaaaacaggacaaagcaattagagaaaattatcacgggcggaaggggcggatcggtcccctgagattttcagatcatccagacagattacccattggaaatggcctagagacac

SEQ ID NO: 89981 - DNA, 122 bp, Homo sapiens
acccatcctcacaccccaggagtgccttggtttcagttgagagccccctttcagccaacacggccgcctttcattgttagggctctcttctctgcccaaactaggaacctgtctccttgacg

SEQ ID NO: 89982 - DNA, 122 bp, Homo sapiens
atagatgcagtgttcagtttttaatatatgtgttccctgttttctctgctctttttatggcggggggtgggggacaaaaaagtgtaaaacaagatccgtgccgcaaaggcaatttaaaccta

SEQ ID NO: 89983 - DNA, 122 bp, Homo sapiens
agcccggagcgcgccctccagcagcccctccctcacgtcccgcagccaatgaacttggaacgcgccctcccggggcaccaccctcacgaccctcagccaatgagcccggagcatgccctccc

SEQ ID NO: 89984 - DNA, 122 bp, Homo sapiens
cacaatactactgctgcaacaaccataaaaaactattaaaacaccaaaataggccaggtgcggtggctcaaatcccagcactttgggaggccaaggcaggtggaatcacctgaggtcaggag

SEQ ID NO: 89985 - DNA, 122 bp, Homo sapiens
gggggcccgtcggggcatgagggcgagagcacggcggggggggcggccagacagagcgagcgaggaggaggaggaggaggacgcggaggaggaggaaggaggaggcaaagaaaagaagcggc

SEQ ID NO: 89986 - DNA, 122 bp, Homo sapiens
atatggagggaggcacagcccctgggtctcttaccaagtgaatccccttgcctgtcctttcgctgtagttaatctttctccatgacaggaagtagagctctgccattccatgtacatccctg

SEQ ID NO: 89987 - DNA, 122 bp, Homo sapiens
cctgccacgttcgacgtcccagggtaacgcaccagcccagtggtgtagacctgatgtgttcgacgtcccagggtaacgcaccagcccatggtgtagacctgacgtgttcaatgtcccattgt

SEQ ID NO: 89988 - DNA, 122 bp, Homo sapiens
agcagctccaagcgtggggctcagtgggtgtgaagagcagagtgagagtgaggctggctgcgggcagctcattaaaggactggaaacaaggcagagagggctgtcactagagccatttgtca

SEQ ID NO: 89989 - DNA, 122 bp, Homo sapiens
cactacatatacaaacattgaaatcgggaacactggtaccaattactgacacttaaattacgaatcagctttacctatactatatggagaagttctgtgctctcaatatttctctcaagacc

SEQ ID NO: 89990 - DNA, 122 bp, Homo sapiens
gcagcccctccttgcagcgtgtaggagctgccagcgtgcccagcagctggtgttcccgtccgtacctccagaagagcccagcgcgtgcaccatccccaccccctagcttccctccccaccta

SEQ ID NO: 89991 - DNA, 122 bp, Homo sapiens
aagagcaggatttttctcaggtggaagagttgaagtaggtgtgagatagattattttcctcgggcaggaaatatcacatgcaaatatgatggatcctatacttactgacaacgtctagggat

SEQ ID NO: 89992 - DNA, 122 bp, Homo sapiens
ggcaggcgttcgcgccgggcagcccgagcggccgcgaaggcccccgctctccgcttctcccgcccctcgcgacccagagggctgctggctggctaagtccctcccgctcccggctctcgcct

SEQ ID NO: 89993 - DNA, 122 bp, Homo sapiens
ccagcgggcagaaggccccacgcccagcggcccgccgcaaggcccgccgcctgctgaagacggtgctgatgatcctgctggccttcctggtgtgctggggcccactcttcgggctgctgctg

SEQ ID NO: 89994 - DNA, 122 bp, Homo sapiens
catgggcagtgccccggcctcacgtgccccgtggttctctgtctctctcctgctcacaggcggtgccctggcctcacgtggcccgtggtgctctgtctcgctcctgctcacctgccgggctt

SEQ ID NO: 89995 - DNA, 122 bp, Homo sapiens
gagtggctggtaaggccatttcctcagaggtgggacacaagtgtaaggctgctcaaccatcgtagggggcatgcctgctgcagcagcccacagagctgtttctcaggcctgggacagagtta

SEQ ID NO: 89996 - DNA, 122 bp, Homo sapiens
aagacacaagcaccaccacctccacccccactacctaggcgagacagcgccaaaagccaccgagcgtgcacgccagccaggcccgctaccccgcaaacccgggagcttctttatccccagca

SEQ ID NO: 89997 - DNA, 122 bp, Homo sapiens
acacaaaaataggaagagtggtgaggtgggggcacctcaggcctgcggggctctttgcagcgcgtagtaggtgttcactgagtgtgtgtcgcaataggcaaagatgagtccatataaggaca

SEQ ID NO: 89998 - DNA, 122 bp, Homo sapiens
aaaaaaaaaaaaaaaggaactacataggatgaacatcccagatcagggaatgttgactgtcgacagtatcagtatctacagtggctactgtctgatgtagaaagaaatgggatcaggctagg

SEQ ID NO: 89999 - DNA, 122 bp, Homo sapiens
aaaattattcgttacttgtctgaattcaagtcctgtaattttcagccaatcctagcccagcgtggcgcagtagtgggtcagggagggcaccggaacagcgcgacccgacagcccgggaaacg

SEQ ID NO: 90000 - DNA, 122 bp, Homo sapiens
caccaccatattattttgaagcaaatctcggatattgtaacattttatctgcaagtatttcggtacatatttttaagcagtcttgcttaaaataagaatggtatgtaggtgtttaatgtatt

SEQ ID NO: 90001 - DNA, 122 bp, Homo sapiens
caagtagggaggaacggccgggtaaccacctcttttccctttatccaagcagagcctcggcgtgcccccaggaccggtaaagttcctctcgccagccgcatccatgcttctggcgcggatga

SEQ ID NO: 90002 - DNA, 122 bp, Homo sapiens
ggcgagtatctggggaggcctgggtcggtggtaccctcgagtttggagagcacatgtgctcgaggggccagttctcttcccagggggcagagggtgagaggagacagctgaagtcttggaga

SEQ ID NO: 90003 - DNA, 122 bp, Homo sapiens
cctcggcctcattgccctgggcacttctgggccctggtgttggccagggtgacagtgccacggcctcctgcagcccgtcccccagctcgggctctgaggggccaggccaggtggacagtggg

SEQ ID NO: 90004 - DNA, 122 bp, Homo sapiens
gcgcgtcgggcgggcgccaaggacggggtggccgggaagccactgaccgccgcagcctctcgcttccagccttgactggctgtgtctctgggtctcacagctttgagaaacccctgggaccc

SEQ ID NO: 90005 - DNA, 122 bp, Homo sapiens
gccttaccgaaagtgaagtgaaaatctgccggtgcacagggaagtcttagtgttcaggctcgattatagtggggctggaaactggtctcacaaatccaaaggatcttttctctgatgctgtg

SEQ ID NO: 90006 - DNA, 122 bp, Homo sapiens
tccgtacggcactagcaggggactgaaagcgtcttcaggtactgctggtgggcggtgatgcgctacaggccgatcagacagttttgtgtcttttggaacttgacactgcaccacggtaatgc

SEQ ID NO: 90007 - DNA, 122 bp, Homo sapiens
tggggtcctacttttacataacgcccccacaatgcccttcgccttcctcaacgtggcccccgctccaagcccattttctggagccaggaatccactctgtgggttaggaaaggccctcagga

SEQ ID NO: 90008 - DNA, 122 bp, Homo sapiens
ttttgctgcagctctaccagccgctccgcgggtgggcagctgtccctgccaagaacgtgacgcaccgagaggttcgtggcttgcaggaggtcacacagcccattccaaaggccgtggggtgc

SEQ ID NO: 90009 - DNA, 122 bp, Homo sapiens
atttaatacagttggcagactcgtattttgatcctgagagagtccaaaatgcactggtcacgaaacgtctaatactatgactgttaaaatgtcagactataacaaatatctatcttttattt

SEQ ID NO: 90010 - DNA, 122 bp, Homo sapiens
cttagagccactaagaagcgggacccagtgagggctaaacgtggggcgccgggggcgtggcgcggggcgcaggtgcacgcaggttggccgcgggcgcgcggggtccggcgggagtcccgggg

SEQ ID NO: 90011 - DNA, 122 bp, Homo sapiens
gctattactacttttagagtgcatacctatttctgccccatatttatcacatacaacttacgtatgatttagttagcatcctcaaacttagaaaatgattctcgcagcccagcaaaaatcct

SEQ ID NO: 90012 - DNA, 122 bp, Homo sapiens
gctcccctgggctgtgacggctgagcggtggcaggagctgagagcgagtgagctagttagcggtctgcacgcccgggagtcagcactgggatatgacagcatgtaaattaccctagagggga

SEQ ID NO: 90013 - DNA, 122 bp, Homo sapiens
aaggaaggttgtagcctgaagaggaggctcctggcttctccttgtgatcagggcaggacccgcagacgactgggcattctaaagaatccacaggcagaaatgaagtcccttcctgggcacac

SEQ ID NO: 90014 - DNA, 122 bp, Homo sapiens
gtggcccagggctgcaaaggtcaggggtcagaaggctgaaccctaggtggaagcaggggtcggcgtcagccccaggtggacaggaccacgcagtctctggctaggccaacatccaaccccca

SEQ ID NO: 90015 - DNA, 122 bp, Homo sapiens
gcagccgcctcatcgcgcctgggccggcagagccacaccccgcgtctcgcgtcactgagtcgcgtcacggctattggcttgttcctactgtggcgtcattagagcccggcctccggctgggg

SEQ ID NO: 90016 - DNA, 122 bp, Homo sapiens
ccccatcacctacatgaacttattctgaaccgagatttggaacaaatactgttctcttctcgcctaaagcaggtctccctccctttcctcctgatctctccagtggcttgcagctcccaggg

SEQ ID NO: 90017 - DNA, 122 bp, Homo sapiens
tgctgggattacaggtgtgagccaccacatccggtccctactaaattttctatgttaaatcgttaaatcagatactttgttagttctcttctcctaccagcatgcaaacaaatagatttttt

SEQ ID NO: 90018 - DNA, 122 bp, Homo sapiens
cagtttaatggaatccatttggggtgaaaggtgttattttgtctaaagaaatctccccctcgcagtccagctctcagacagactctgcaacatggtcaccatctggggatgtctgatagatc

SEQ ID NO: 90019 - DNA, 122 bp, Homo sapiens
gagtcgtggcaacagccattaggatgcactaagcagggcacttcctgagcccaaggacaccgaggggcattcactgagtgaatggggatgtgctgctaataactaacactaattgaccacct

SEQ ID NO: 90020 - DNA, 122 bp, Homo sapiens
acacactcaccgtatgcataattaattgctctagaaaaagatctgcgtggagggagtattcgtttcctgttgctctgtaacaaaacagcactgactgagctgtgaaaacaacacccattcat

SEQ ID NO: 90021 - DNA, 122 bp, Homo sapiens
gtagaaccgcagagcagttcctagattaggctgtgccacccagactgagtgggctcacctcggccaggcatgagccatcactgtgcacgtacagaacctcatagtagcgcccaggacttggg

SEQ ID NO: 90022 - DNA, 122 bp, Homo sapiens
ccactaacaccagtgcattcgtccatggggggagcacctgtcaggcaccagagcaaggcacgtggggacatgggggtctcgtcatgcatgaagctggcaggttgcaggggggggtgacgaac

SEQ ID NO: 90023 - DNA, 122 bp, Homo sapiens
ggcccagttagttacctgcagcgtctcctagagctctcagtgcagtcaggggcaggaaaccgtattaggacatattgcttggctgagctgcagccagaggaggtagaaaggaacggaaaagt

SEQ ID NO: 90024 - DNA, 122 bp, Homo sapiens
ggcggggggcagggctccaccccacaagcctgctcaggaggcctctccacgatccacaatcgaccacctgtccatggagctccgggaatgctggcccggccccactgcagggcttccccagc

SEQ ID NO: 90025 - DNA, 122 bp, Homo sapiens
tcactaaagcctaaaaaagtgtttctcatactctggaaatcttcagcaaagtcaaatgaacgtgggctcatacaggaactaccaaattaattgcatcaaggcaaacatatgtattctaattt

SEQ ID NO: 90026 - DNA, 122 bp, Homo sapiens
aggacacgtggatgatggggtcagagatcactgagctgcccctcaagggggcctggaacccgggtgctggggtcatgctgcctccgtggctccaaggtgagggtcatcttcacgagcaaaga

SEQ ID NO: 90027 - DNA, 122 bp, Homo sapiens
cgttgtttgtcaaaaaacgaggccagcgaggaagaagccaaccatgcctcccgctccactcgctttggaacccacagaatgttcaacagggcagcacctttcagttattaagacactcagat

SEQ ID NO: 90028 - DNA, 122 bp, Homo sapiens
agggcaagacaaggctccaagcaagtgacaactgcttaaaacaggctggtgaccaggcctcgggcagacagaaatgagtcaggctggggagggcaggcatggaggcagctgaggtggtggga

SEQ ID NO: 90029 - DNA, 122 bp, Homo sapiens
ccgagcatgcgccttagttctctcttctggggctgtgaacgtggggtcgaagcgcgcgtgcgcggcggctctggcggcggcggtggggcggggcctgggctgtcagccggcctaggaggagg

SEQ ID NO: 90030 - DNA, 122 bp, Homo sapiens
gtcagggtctgcatggtggcgctcctctcccggctgagtgtggcgagggctggtgggagccgcgggccagagggtggtgcctgcctccccaagagccattcccacgccttcagagacggtga

SEQ ID NO: 90031 - DNA, 122 bp, Homo sapiens
aggagcctggaagatgcagaaagtcgctcatgcgctggctctggttctagggtagagcaccgggaaatacgcagacagggacagatgcaggcagaaacttatttagtgctgtttaaattaag

SEQ ID NO: 90032 - DNA, 122 bp, Homo sapiens
gaccagcctggccaacatggtcaaaccccgtctctactaaaaatacaaaaacttgccagccgtaatggcagacgcctatgcctgtgatcccagctactcgagagtctaaggcaggagaatcg

SEQ ID NO: 90033 - DNA, 122 bp, Homo sapiens
cacctcctccctcccaggctcacccagctggatattttccatagaggaggtcccgcttctcggcagaaagcagggaagaggcaggatctgggctaaaacactcgttgggatcatggcctcac

SEQ ID NO: 90034 - DNA, 122 bp, Homo sapiens
ttaaataatatcctgaagtttgtctctctccctccctccctccctccctctctctaattgcgtcgaaagtggaatctcttggcttctggctgcactgggcggaagtgctggcagcctgccct

SEQ ID NO: 90035 - DNA, 122 bp, Homo sapiens
ccctcggagcttcacatcacactgtacagagggagcggtgaccagggtctctgctgccagcgccacctcgtccaggttttcatagcgcacagggagtcgggcggatgcgcaacatctccgca

SEQ ID NO: 90036 - DNA, 122 bp, Homo sapiens
ccctcagggacaccagagtctccgtgatgttcttgcgtatctgggctcggtgctgccgctcgtgcttgggctctgccgccacgtccagggcccgctcgtactggggcaggcagggggcacag

SEQ ID NO: 90037 - DNA, 122 bp, Homo sapiens
ctggagagcaatcagttctgcataatcgaattcctctcttagggaagcttagttaataagcgagggcatgaaggctgcgactggggccctcctggtcacagttggtctggggttgggggcag

SEQ ID NO: 90038 - DNA, 122 bp, Homo sapiens
ttgcaaatagcacttattaaagaatttttccacatttgtatctatttaacccatttatgccggaggttgcaattttttgaatttttgcatgattggaaaatcagaacttggtgatgacttga

SEQ ID NO: 90039 - DNA, 122 bp, Homo sapiens
tttagggcaaggcggaccttccctcccgggtccccttgtcgtgcatgtggtgggctggggcgtggagtgtgcttctgttatgtggtgcaaatgtgcgttccggggtgttagacagcactccc

SEQ ID NO: 90040 - DNA, 122 bp, Homo sapiens
ggcccggagtgcaggccggtggtgaccgggccggggacggcgcagtccccatccccgccccgggcagcgccaccacttcctcgccagccccgccgcagccctcccgctcccgggccgcgccg

SEQ ID NO: 90041 - DNA, 122 bp, Homo sapiens
ctttgaggacagatacagtgtcctttttggtccccattgtttgctgcaggctcaacactccgtatgtgcagatctctttcatggccccttggggatcactgacatcacttaagaaatcctag

SEQ ID NO: 90042 - DNA, 122 bp, Homo sapiens
tatctggaagcccacacagcaaagaaggcgtatttggagacatcagtgaccgagataggacgcagcaagctatcgtgcttagaacgtgagtgagacagatcagacacagtgagtgacgggaa

SEQ ID NO: 90043 - DNA, 122 bp, Homo sapiens
agtaataaaacctgtgccagctggaatccttcccctgtgctctgtggcaagggcagcccacgcgggtatacggctgagaaaaaacacagtagggcattttctaccttcagccaggggatgtt

SEQ ID NO: 90044 - DNA, 122 bp, Homo sapiens
gaaatttccagttggcctttgcttgttctgtgattatttgtaaacgaactccattgctttcggcttttcttttttctttctttctttctttttttttttgacaattatgattttaaaacttt

SEQ ID NO: 90045 - DNA, 122 bp, Homo sapiens
cacacacacacacaatagaatcatagtgtagtcggtagatagaaggccaaaccaagattgcgtttggataccagagatagggttaccttcagagtcacacacacacacacacacacacacac

SEQ ID NO: 90046 - DNA, 122 bp, Homo sapiens
catgcaacaaatgttaccacagctatggagaaatcaacagggtgataagctagagatgggcggaatccgcagttgagggaatgggttgtcaagccagactgatgggtcaggagccccctcta

SEQ ID NO: 90047 - DNA, 122 bp, Homo sapiens
cgagggtcactcctggactcccttgctggcatccatgcctcggctgggtcaggacagagccggggttgggggccaatgcccagcaaccccctcccccaggatctggagctggacctgggggg

SEQ ID NO: 90048 - DNA, 122 bp, Homo sapiens
ggtctgggccacatcaaggaatgtggttgaagacccgcccttaggagctgaaagccagggcgctaccaggcctgagaggccccaaacagcccttgggcctggtttgggaggattaagctgga

SEQ ID NO: 90049 - DNA, 122 bp, Homo sapiens
ccaaccccgcggctgggctgggcgattggggacgagctccacacatggagaacctggcctcgcctcgcaagaccgcgggacgcgcagatgtgaagtgcgcctgcgcggggcgcagccccagc

SEQ ID NO: 90050 - DNA, 122 bp, Homo sapiens
agaacagggggtaggaggcgcgtcctgtgcggtcggtggcggccccaggtgggtgcggtgcgctggcaggaagcggcagcacgacccccgactttgcatctggacttttctagtaacggacc

SEQ ID NO: 90051 - DNA, 122 bp, Homo sapiens
actgtcaacactgttgttgacagtgatgacaactgtgtcccgtgtggggcgctgggccagcgttttttgcatggagacgtcactcactcttccagcaacacgggtgacgatggccgcacaac

SEQ ID NO: 90052 - DNA, 122 bp, Homo sapiens
ttgttcctgctccgcttttctgatttcaccctttctggactctgtcttcgtctcctgccacgcctcttaacattctaagtccatgtaaatgacattctcacgttaagggctgcaaagaaatt

SEQ ID NO: 90053 - DNA, 122 bp, Homo sapiens
aacactctactaatgctgacgaaggctatccctttaaatggggtatgttctctacttggccgcaaaccctgtctccatgtaggctaacttgctgtcccaagagacaattgagtttatgcccc

SEQ ID NO: 90054 - DNA, 122 bp, Homo sapiens
gttaataatttccgttttaagtagaaagcacaaaataaaactgctcgctaattcggtgcccgggaagcgagcctagagaggattttgccagcttgtctgaatgtgcttttctgctcggagtg

SEQ ID NO: 90055 - DNA, 122 bp, Homo sapiens
aaccctgcttcctcgacccccctgggaggccgccttcttcaggcgcctcccttctctccacgagctcgctctgacagctgaggaactggcaagatcctgctacccagagggtgaatgggtat

SEQ ID NO: 90056 - DNA, 122 bp, Homo sapiens
tgtgaacttctaccagtctcacggtccctctggccagtacacccatgaatttgatggagacgaggagttctatgtggacctggagacgaaagagactgtctggcagttgcctatgtttagca

SEQ ID NO: 90057 - DNA, 122 bp, Homo sapiens
ccacggccgtggcagtgccaagtgctgacgatacccaggccaaggcccaggagaaacttgcgttgctcaaagccctttcacataagactggggaccatgtccgaagtgaaaacagctgtctg

SEQ ID NO: 90058 - DNA, 122 bp, Homo sapiens
agaagcgccattgccaccttcttctatcctcctccgaaggtttatttggtctctgtccttcgggttggggggtttctccatattagtttagttccggagctggctggaccctctgcgggttc

SEQ ID NO: 90059 - DNA, 122 bp, Homo sapiens
cacacacactgacacacacagacttacatatacagatacacatatacaaatggacacacacgtacacagagacactcatgacatgctcacacacacaggtatctatacacacacagacagat

SEQ ID NO: 90060 - DNA, 122 bp, Homo sapiens
cactctcggctcattccgtacagtgtatggtagcatcttctgacacgcaaggcctgagggcgcggtgcctgcactactatccaatcagggcgctggggtgggaactgtccaatcaggcgcgc

SEQ ID NO: 90061 - DNA, 122 bp, Homo sapiens
cgagccttccccaggcaggcagcatctcggaaggagccctggtgggtttaattatggagccggcgctgaccggcgtccccgccctccccacgcagcctccttggtgcggtccaacacatcac

SEQ ID NO: 90062 - DNA, 122 bp, Homo sapiens
gtctcccactccttcctggtgcccctggaatgggagggcactctgccagtccagccccagcgcctccaacctgtggcctgggcaggcatcctgatcatggccagtgctgggtcccagggcag

SEQ ID NO: 90063 - DNA, 122 bp, Homo sapiens
tatggcatttcggtgacagggcgtttctgtttcaaagtgtcaatgagggataagacccctcgttttacattggttgtgactcttctggttactgaatctgctggcggtggaggtggtcgaac

SEQ ID NO: 90064 - DNA, 122 bp, Homo sapiens
cagatcactagaagcagcagtctgtcggtggaatgcgatggatggcgatggcagtggcagcgcaggtctgtgggcagcatgatgtagtcgtctggaagtctggtgaggaggaggggggttgg

SEQ ID NO: 90065 - DNA, 122 bp, Homo sapiens
aagtgagcgttcgtcaacccaagctccccgtaccaggcagttttcctagaagatactctgcggtgtggaggatgtttaccagctaccacacatctgcttccttgggtagaggaaaaaaatgt

SEQ ID NO: 90066 - DNA, 122 bp, Homo sapiens
aagtgtgggccggtggcgcaagactcagaggtgtgctcgtctctttcctgtcagagtgggcgtccccaggccacggtgcaggcctgagtccttccaccggccccgtccagtcgtccctggag

SEQ ID NO: 90067 - DNA, 122 bp, Homo sapiens
ccccaggccttgtctgtcggcatcttcccctacgtgctgaagctgctccagagctcggcccgagagctgcggccacttctcgttttcatctgggccaagatcctcgcagtggacagcgtgag

SEQ ID NO: 90068 - DNA, 122 bp, Homo sapiens
ggcccattgtgtcggctttgtctgccttggcaaactggagacggaaactcgattcaccatcgccagccacgggaggactgggaggacctccagaggaggttaggttgacttcatggtaactt

SEQ ID NO: 90069 - DNA, 122 bp, Homo sapiens
tgtaatttgatgatggttccatccttgctcaaatactgcagtctcccgtggcctcctccccgtctcgctttacatgaagatgttgggatgtgaatacacgtttcttcttcaggaaatatcag

SEQ ID NO: 90070 - DNA, 122 bp, Homo sapiens
gtagacgtccgtcgagtcccaggtggtaggaaacgatgggcttctctgtgcgactgccagcggcctctggcggctcattccgcgcagatctgcgtggcgcccgagccctcccagtgggcccc

SEQ ID NO: 90071 - DNA, 122 bp, Homo sapiens
ggcgagatgcgatgagcgtccgaattggatggtgcttgaatttgggttccagggcgctgtcgggagagccctgggtccaagtccagccgcggatccgcggaggaaaacaatgcgaccgcccg

SEQ ID NO: 90072 - DNA, 122 bp, Homo sapiens
gcagcccctgcgggagagcggcgcaggcagaagcaagtgataggccgaacgggcgcgctccgaggttacttgccaggttcaggcaggagcactcgatagccgagccaaaagggcaggagcga

SEQ ID NO: 90073 - DNA, 122 bp, Homo sapiens
tcaaaataacagtcccgcccttcccgggactcttccctataggctgttcaagtcacgtggcgactgtggccccgcccacagctcccagaggcctgcgcgtgcggtctgcagttcggccgctt

SEQ ID NO: 90074 - DNA, 122 bp, Homo sapiens
ccggggtcagaacgcgtgctctgagatctacattcacggcttgggcctggccatcaaccgcgccatcaacatcgcgctgcagctgcaggcgggcagcttcgggtccttgcaggtggctgcca

SEQ ID NO: 90075 - DNA, 122 bp, Homo sapiens
tcactgacagcgcctttcccgtccggctctgcttttccgccccaccttctgccactcagccgaccaacatgctgccagagactgcggggacagtgacgtctgcctttccttcctttccctcc

SEQ ID NO: 90076 - DNA, 122 bp, Homo sapiens
tgcagttcagcttagcccttccctgttcctgtgtagttacaatctggccctgaagacatccgaggcacttcagtaagtgggatcttttctagagatcctgggtgactttgggtgcacagggt

SEQ ID NO: 90077 - DNA, 122 bp, Homo sapiens
caggtcctgcctcctggcaggcccttaacggaggccagtgcgtcaaaaggacttggctcccgccccaggctgtcatcaggccagagatggccatgtccctgagagctcagtgaggatttctg

SEQ ID NO: 90078 - DNA, 122 bp, Homo sapiens
tgcttgtttgtgtgaggtgaccatcattaccttagggaagaagccatacctgtacaagaccgggctcttgaaaagaaacacctcgaacccagcccgtgtaagaacagaaggctcacctgcag

SEQ ID NO: 90079 - DNA, 122 bp, Homo sapiens
aggcgtttgtgaaagacagaacctttgggctagggacccgggcactggtgcttcgaagtccgaatccgccggccgagaaaacgacaagagaaagaaaatccagcgggcgctctctccagcgc

SEQ ID NO: 90080 - DNA, 122 bp, Homo sapiens
gccggcgtgactttgaccgcttcccggtgcgttaccggcagctgaacccacccggcgccacgggactttgacgcgtgctctgcgcttgccatgagactcctgggagctgcagccgtcgcggc

SEQ ID NO: 90081 - DNA, 122 bp, Homo sapiens
attataaatatgttaacaaagctaaaggaaagtatgataaagatgtaaaggaaggtacgacggcaatgttgcatcaaagagagaatgccagtaaagagacagaaattatcaaaaagaaccaa

SEQ ID NO: 90082 - DNA, 122 bp, Homo sapiens
gcattggtctgtgggttcatgaggacagggtagtgcagtgggtggcagatagccacatagcggtcataggccatgaccaccaggatgaaggcttctgaacatgtaaaactttggaagaggta

SEQ ID NO: 90083 - DNA, 122 bp, Homo sapiens
tctctacatttacactgcagtccactttgaccttttgttccagggaagcagctgaaccaccgggccaatcagagcagcagctgctgcagcactaaaggcgctcctcctcctcccccgcaccc

SEQ ID NO: 90084 - DNA, 122 bp, Homo sapiens
gaatcatcagttttactaaggctgtatgatgttagcagatattggttctatcagtctctccgcagacatttgctgtaaataaagcagagaggctttcagagtgcaccctgtttttgttcctc

SEQ ID NO: 90085 - DNA, 122 bp, Homo sapiens
ccccacagccgcgcgggtgctccagagcatccaacttcatttccacttcaattttatcagcggccggggagccgggcgggagataggaggccggccctgacacgaattagcccggagattgt

SEQ ID NO: 90086 - DNA, 122 bp, Homo sapiens
agtgatccacccaccttggcctcccaaagtgctgggattacaggtgtgtgccaccgtgcccggctgaatcattattattattgtgactaattgtgacacctgtcctgcaaggccttcaaaaa

SEQ ID NO: 90087 - DNA, 122 bp, Homo sapiens
ggagccgggaacaggcgggagccctgcccgggtcggagctggcgtggcacgagccctgcccgcctgggtgcagcctcccccacaggctcggaaatgcctgctcctgctacctggcctgtatc

SEQ ID NO: 90088 - DNA, 122 bp, Homo sapiens
acggtcacagccgccccgacctcatcgctctgtccacggccagaaaaagaattcaggacacggacagaaggggccagaggaagaagcgatgagacccgccctatgtccaggacacaacttcc

SEQ ID NO: 90089 - DNA, 122 bp, Homo sapiens
gtccctgggacgtgagggagggggtggaccctgagcccggaagtcaaggcaccgcctcctcgccccaaaatcttccctgcaagcccagcgacccctgcaaacgctgcctgtttctgccaggg

SEQ ID NO: 90090 - DNA, 122 bp, Homo sapiens
ttacaatcctgcaggcagggagacaagggctttctacatggtaggctctggtttggtcatcgtcacaactgggggctgttcaggtgggctcccattccagatacctaggcttatcaatccct

SEQ ID NO: 90091 - DNA, 122 bp, Homo sapiens
gctggaggaagaaaaggcagccctgcagggccggctgcggcaggcggagcaggaagccaccgtggcgcgggaagagcaggagcggctggaggagctgcggttggagcaggaggcggcgcggc

SEQ ID NO: 90092 - DNA, 122 bp, Homo sapiens
ggaacattaaagtccattctggccacacatttaggctccttttaatgccaggagtatttccgacattcatcacacataacagtggaattaggcacatggaatgctaccctattttcttacaa

SEQ ID NO: 90093 - DNA, 122 bp, Homo sapiens
catggtttcagattccatattgcaactaacctttaagaagtcagcacctgttagtggaaccgcgactgctccgcagagctgctggtatgagcgcccgtcgccaccccacatcccaggcccag

SEQ ID NO: 90094 - DNA, 122 bp, Homo sapiens
cctccgaaaattatagaccgaggccttgaggaggccgccccaggccctgtcaccccctcccgctccccatcaatccccctgcacaatggggccgccgccgatgactgatgtccgtgaaaaca

SEQ ID NO: 90095 - DNA, 122 bp, Homo sapiens
cctcccaaagggccgtgattacagatgtgagctaccatgcctgggcctgttttctagatgcgtgtttgcacgcagggggtgtttgattaaaccttttttggaacactctttcaactctcagg

SEQ ID NO: 90096 - DNA, 122 bp, Homo sapiens
gaatttcctcactttaaaaatgtttgaaaatctttggattcattgatcagctctagtatacggttattagcagaggtttgcaaattctttgaggcctgtagttcatctgaatgtttagtctt

SEQ ID NO: 90097 - DNA, 122 bp, Homo sapiens
tttatgtactatggttaaatctttgtggttttaaaagataattttcactaaataaatccacgcagattttgctctgcaaatgctggctgaacaaagtattgagctaataaagagaattaata

SEQ ID NO: 90098 - DNA, 122 bp, Homo sapiens
ttatttaaaggtcttgatttaatgggtccttcccaggggttcgtaactaaagacaaactgcgcagcaaacactgtggggttgggagaggagtcgctgctccccctaccccgtgaccagggac

SEQ ID NO: 90099 - DNA, 122 bp, Homo sapiens
agagaggctctgggaatgttactgtcacattcatcaggcattatcctcaggcagattacccgtgcgtggtatccttgttaattgtagcttttcttgccaccggacttgtactttcttctctt

SEQ ID NO: 90100 - DNA, 122 bp, Homo sapiens
gtgtagagaacaacagtcgctccttagatattactccaggacggaaacctgattgcaaaccgctgttccttcgaaacttgcaaaacccggaacagaaaactcccgcccagccaattttagct

SEQ ID NO: 90101 - DNA, 122 bp, Homo sapiens
aggaacgacgtggcctctggttccccggagcgaggagcagtggctccctgtggctccccacggtggtacccaggcgtctgccttgatcacccagtgccctgagccggcactcacacagcacc

SEQ ID NO: 90102 - DNA, 122 bp, Homo sapiens
agtgaggacaggagtcttggaatgactccacggtgcacccgcaccctgtttcatctcaggcggcatcctgtcagccagtagaagagtggccggcctgaacagtgcaacctccattctaccct

SEQ ID NO: 90103 - DNA, 122 bp, Homo sapiens
ctgaaacagctccttggcacattcgtgtgatagacttctaagcaaagaggccatgcggttcgcagtcatgtcgttctgccttcctttccctgcctcgcaacaatccttatttcccttactca

SEQ ID NO: 90104 - DNA, 122 bp, Homo sapiens
ttaagattcctttttcaagtgttctaaagcgcaggcgcaggctgttttgcggttgcctcccggcgcctcttgtgcaggccggggtcgccctctgccgacccagggcgggagcgcgctgagtg

SEQ ID NO: 90105 - DNA, 122 bp, Homo sapiens
acttgatccatcagatatcagtatctcactatttctggaccccaggacacttttccaccacgaagttcttttcctgcttacagtgctactgtctgtttcccatctctgttcgtggagatcct

SEQ ID NO: 90106 - DNA, 122 bp, Homo sapiens
caaccccgtagtaagtcgagaagcatctgttcctacctagaaaatcttccataaggtaatcgattaaaaggttttaaggaaatacaagaaaaacctgaccagtgaagaggtaaaagccccta

SEQ ID NO: 90107 - DNA, 122 bp, Homo sapiens
tctagtatcaaacctctcaaatatttcctagatatataaatatatgaaaacacatacaaacggtgttcgcagccgccaccgcgctgccgtcgctctccaacgccagcgccgcctctcgctcg

SEQ ID NO: 90108 - DNA, 122 bp, Homo sapiens
gctgcagggggacgtttcacctgaaggactgcctcgtttcaacaacaactttatggctcccggaagtgcctcctccccgtccccttcctttccagcctcacgcccgtgggctgcagttggaa

SEQ ID NO: 90109 - DNA, 122 bp, Homo sapiens
tgaacgctggcttcacgctgtcatttaagtcatttcgtcctcttggagcctcggtttccacgtgggtaaaatgatcgtgaaaaaaagcaccgaggagtactttgagctcgaacggaggccat

SEQ ID NO: 90110 - DNA, 122 bp, Homo sapiens
gcaagtgtctactgagggcctacaatgtacgaggcgctgtagtgggcacatcccatgaggcggcacctccaggcttctctagtgaacagattcctggaacattcactctatgggagtaggaa

SEQ ID NO: 90111 - DNA, 122 bp, Homo sapiens
ggcacatccacctgggaagtggccttggcccgtccagggcttggttttggatctgccgcgcgtgttctccaaactgaagatcacttgtattcatttggtgcaggtctaaggcgcagcgggct

SEQ ID NO: 90112 - DNA, 122 bp, Homo sapiens
tctccgtggctttcagacacgcctctgtggacccagcgtgtagacatctgcctccatctccgcagctctgagacgtgcctctgtggaccgagcgcatagaccgctgcctccatctccctggc

SEQ ID NO: 90113 - DNA, 122 bp, Homo sapiens
cggacttaatggtcggttttcaaacttccgtgtggacagaaacgacctccgggattcggccgtctgtgacccccttcaactgacccacagttgtcttcctggaaggagcagccggcgctccc

SEQ ID NO: 90114 - DNA, 122 bp, Homo sapiens
gggcccggggatccccgggagcgtccccggctacctggcgccgctcatcctgggtagggtcggccccctgaggctgcccggcatgagggagttgcacccctgagcttgacctctgacggtcc

SEQ ID NO: 90115 - DNA, 122 bp, Homo sapiens
ggggcgaagacggccgggaaactcgggggctgcagcctcgcgctcgcgccggagccgtgacggactcactgcagcggctcgcgctgacccgcaacctcaaggcacgaaaaaaggggagggcg

SEQ ID NO: 90116 - DNA, 122 bp, Homo sapiens
ttaaaaaagcaataccacctgccaattgctgagccccagtgagcctggcactgtcctgggcgcatcgtccaagacctccgtgttctcccggctttgtaaatcccgccgcttctccagccagt

SEQ ID NO: 90117 - DNA, 122 bp, Homo sapiens
ggaacaatctgttccttcctttcaggcatcattttgtaatggtgaagagggaaaagatggcgagagaccaagaagtgatgaaaaagggcctcaacagtcagcagaaaacaggacccacagca

SEQ ID NO: 90118 - DNA, 122 bp, Homo sapiens
ctgcctctgctctagccctcatacttgaagtatttgtttacgtctgttgtttctgaactgcgagtccatccagggctgggcccaacccttattcatctttataggtttcccaggcctgtcac

SEQ ID NO: 90119 - DNA, 122 bp, Homo sapiens
gacgcgcgctcgctgggggaagctagaactcaggtgcccacgacaccaggatctcagtctcgccgtcgcagccgccgtcgctgccttacaccgaaaaacagggcacggccatcttcctcttg

SEQ ID NO: 90120 - DNA, 122 bp, Homo sapiens
ctgggaaagaccccagactcctgggtcaggggaccctgtgcacctccagatgcctagccacgccccctgccctcagtccctggaggcctcagcccagttgcactccctggtggtgcgtggag

SEQ ID NO: 90121 - DNA, 122 bp, Homo sapiens
agccagctgtcaccttctccctgtctcagctgagggcccagctgacctggtggggtccagcgtgtgaacccaggggagaccttgctcccctggaagacaggagaagctggggaggatttatt

SEQ ID NO: 90122 - DNA, 122 bp, Homo sapiens
atgtattttctcaaactagatgctgatggaaagttaagcgtgaaatttggggtcctcttccgtgatgataaatgtgccaacctctttgaagcattggtaggaactcttaaagctgcaaaacg

SEQ ID NO: 90123 - DNA, 122 bp, Homo sapiens
ggcttggtaagccccttcagctctctgggcctggtcatgctgcaagcagggaagagagtgcgggcaagcggggctcccagcaggctcacgacacacatggtgcttttcttccttctttagga

SEQ ID NO: 90124 - DNA, 122 bp, Homo sapiens
tacttgttaaattgagaaaattacttttgcatggcttatcagaatttcagatagcaggcacgtttaacatgttagaacaaacttttgaaatattcatttattgaaaatggataagccaggcc

SEQ ID NO: 90125 - DNA, 122 bp, Homo sapiens
cttaggcttagcgtccaggaacgctgtagacggtctattctattctacccctattctactcggttcgattctgttcctaagaaaatgccgatctcgacccacttgtacttccacgagcggag

SEQ ID NO: 90126 - DNA, 122 bp, Homo sapiens
gcccccgggacttcagagccggagccaggcacttagcttccttctggggaccctgaggcacgggaagagaagggacctcctgctcgcagtgtcccccttgcgctgtccctgctagtgacagg

SEQ ID NO: 90127 - DNA, 122 bp, Homo sapiens
gtcttagtaagtttctcttagagtccatgatttagcctgagctccttagcatgaatggaacgtggccctccctggaaacgcactgttctcttactagactcccatcctgcacatttatatgc

SEQ ID NO: 90128 - DNA, 122 bp, Homo sapiens
gctggggtccggggttccgagactgcctcgggtaggcggccggatcagcggaggagagcacggggctggctgggggtgcagcagtgcacggggttgggacgaggaaggtgcatcccctgggg

SEQ ID NO: 90129 - DNA, 122 bp, Homo sapiens
aattgcctcaaaagaggctagacagaaaaagaagttttggggtaaggttctgggaaaggccgtcatttagatgtaggcagaggaggacccagcaaaggagacaggatgagttgccagaaagg

SEQ ID NO: 90130 - DNA, 122 bp, Homo sapiens
aaaaagcacgtttggctccgctctccactgacacgtttttagctgagtgacgatggaagccgctggcttttaacagacggtcttaacgagcctctgctccccggcgaccagcagacgcgggc

SEQ ID NO: 90131 - DNA, 122 bp, Homo sapiens
cttttgcccactgtgtcagtggcagaaacggatgacccaaccgtctccaccaacaggtgtcgatcctggacaccaccaggctgctgagaagctgtgtgcagagcgccgtgggcatgctcaga

SEQ ID NO: 90132 - DNA, 122 bp, Homo sapiens
cgtagacgcggagggcccgctgggggacaacatagaagcggagggcccggcgggcgacagcgtagaggcggagggccgggtgggggacagcgtagacgcggaaggtccggcgggggacagcg

SEQ ID NO: 90133 - DNA, 122 bp, Homo sapiens
aaggggcgcgaaccccaagtaggagacgaggaagggtaggtgccagccgccgccgcccttcgcaacccgggccgtcagccccgcccccaccgccgcagcgactcccgcccccgcgcccgccg

SEQ ID NO: 90134 - DNA, 122 bp, Homo sapiens
gcgctggggctgggatggggacgcgacgccctctgctctacccccggctccctgcgccggcggggaccgtgcgctctccccacagcgttagtggcatccccttcgtcgaggtccaagagcgg

SEQ ID NO: 90135 - DNA, 122 bp, Homo sapiens
atttagtttatgtaacccttgaaaaatgtgaaaaccattcttagctgagggccgtccttacgcgaagaggcctcgggctgggcttgcggctgcagactgcattgcctccgcttctcaggtgc

SEQ ID NO: 90136 - DNA, 122 bp, Homo sapiens
tatcggtttgattccaggcatgcaggggttgcatagagactgagtagccaaggtcagtcacgtgggtgactcatacctccgtgactgactcccttctcctaacaaaaaccctggacaccaag

SEQ ID NO: 90137 - DNA, 122 bp, Homo sapiens
ttcagagatgttcgacaagcagcaggcgaacaccatcttctggagcccccaaggacagttcgtggtgttggcgggcctgaggaggtaggtgtctgcgctctgagcctgtccgccctgtgagt

SEQ ID NO: 90138 - DNA, 122 bp, Homo sapiens
ggtctccacagcagcgccggccgagctggtttgcagactctgcctctggagaatcgtgggcggtggctcctgtttgcctacgtgtgtgctgcatggacagagctgcaaggccccgggcgaac

SEQ ID NO: 90139 - DNA, 122 bp, Homo sapiens
tgtcaaggaataggatatttgaaatcagatgtttggctgtattgcagttattggtgatgacgaaaccttggatatgaccctatgacttgacagttgagatgagatgggaaataaagacaatt

SEQ ID NO: 90140 - DNA, 122 bp, Homo sapiens
caggctgttaagttcaataaacaagagtttgaatcccaacccttccatttactaactgtacgccatgcagattacttaatctcctaagtcttagcttcataatttgtaaactcaactaatta

SEQ ID NO: 90141 - DNA, 122 bp, Homo sapiens
gtcagccgactgtacgacggggagccctgaagcactttaggaagcagagagcctgatgcacgctgggaaacggagtccactcactcagtctattagctgtgtatgcctcccagagctcggtg

SEQ ID NO: 90142 - DNA, 122 bp, Homo sapiens
tccttccactctggaagcttgcatccgtattagaaaggagaaaatctctagccgtattcccgctcataaccaccaaagacatgtggccatccccgggcaccctgaggaggaggggagtgaga

SEQ ID NO: 90143 - DNA, 122 bp, Homo sapiens
agtactggattttcattcataccgtgcccggaattggttggttcttggtctcactgacttcgggaatgaagccgcgggccctctctgtgagtgttacagttcttaaaggcggcgtgcgggag

SEQ ID NO: 90144 - DNA, 122 bp, Homo sapiens
gctcctcgcccccgctccggacgcccgacgtgctcgagtcctctgggcccgcagtgcgctcgggtctcaacgccaccttcatggtaaggggcagggtctgttgaagggaaggggtgggcgaa

SEQ ID NO: 90145 - DNA, 122 bp, Homo sapiens
tcggtgttgagggacagtgggcctggggcaggggccggagtcggggaactgggggcagcccgggcgtgggaaaacttgggggaacagatggggaaggccccgagggtccctgtgcccccagc

SEQ ID NO: 90146 - DNA, 122 bp, Homo sapiens
ccctggaatgggctctggagcccacatcgcccccccaggaggagaagcagttcctgcctgcgtccagccgggctggggccagtccaagcaggctggcagcggccccattaactaccagggag

SEQ ID NO: 90147 - DNA, 122 bp, Homo sapiens
cgtctgcaggtatttcctcacccgtcagcccctcgtagagcaggagaaacggaacaaacacggaacaaatagtggctgcttctcgccagtccgtttgtgacataacattccagcgtgtgagt

SEQ ID NO: 90148 - DNA, 122 bp, Homo sapiens
cggttttagattcctcatactttgaagtaaatacatgttcacctctcacgtcagctgccgcgccttcctgaagccgggtcttcaggacgcggcaggggaaccgacgcccgggttccagtcgt

SEQ ID NO: 90149 - DNA, 122 bp, Homo sapiens
tatcatcccttctagtctggttccgcccaagcttcctacaggtcttcttggtacatctaacgcaggccgacctccttccccctcatctccctactccgtcgcttcgtaggtctcaactctcc

SEQ ID NO: 90150 - DNA, 122 bp, Homo sapiens
ggcggcgcgttccaacggtgggggggctcgttccaacggtgggggggcgggtctgcgtttcgggcccccagacacgcagcacgcggaggagcgccccgccccgtctagagccccttcctcca

SEQ ID NO: 90151 - DNA, 122 bp, Homo sapiens
cctccctgccccgaggggacagtcctgggtccccgccaatccggcccttgaggttgagctcgctctccccgtgccggcagaggtagatggagcggggggtcacgtggatgttcatgaggtaa

SEQ ID NO: 90152 - DNA, 122 bp, Homo sapiens
gaatctattggtaggaccccatggtggacgtatgagaagccaagcatttgagttttgactcgatgcagtaggcagtggggagcccttgcaggtttggggacatgatggaagagggcttaatg

SEQ ID NO: 90153 - DNA, 122 bp, Homo sapiens
ccccaagactcttggcttctttctcacccttcactgggtgctaaagagacagcaagctcccgggaaagaccagggcatcaccagctgcccaacacctcattcatccggcacgagccaggaag

SEQ ID NO: 90154 - DNA, 122 bp, Homo sapiens
gtgccagacagtgggcgcaggacagtgggtgcagtgcgctgtgcaggagccgaagcagggcgaggcactgcctcactcaggaagcgcaaggggtcagggagttccctttcctagtcaaagaa

SEQ ID NO: 90155 - DNA, 122 bp, Homo sapiens
ggctttcgagaaccacgtggggagaactatttcccaccccctaccccgacgggcgctgttcgaggctggtcccgggagcatgcgcagtgacacctcaacccccagccctcctcacaccccca

SEQ ID NO: 90156 - DNA, 122 bp, Homo sapiens
gccggacagcggcccggaaggcgagagctcggagtgacggcctgggacctgccactgtggcgtgcggctcctccccgcgccgcgaggccgcgacctctgccacgtggaccgcgcgcggggcg

SEQ ID NO: 90157 - DNA, 122 bp, Homo sapiens
cactctgcccatagtcgccactgacggtccctgcaaggtgaagagtgagaggcagggccgcggtgagcaaggcgaccagaagaaagggattaccaacttggcttcctgctctaggagccagg

SEQ ID NO: 90158 - DNA, 122 bp, Homo sapiens
ggttgtcaccccgcctttgatcctgtgttgggacaacttgggttttcctgggtgcccacccggcgggcaaggtgcattttagagagtcagttctcctgccctaggtcgagccagatgttctc

SEQ ID NO: 90159 - DNA, 122 bp, Homo sapiens
tgcctccagaaaactacaagtcccaggatgctcggcgcgggacggtcacgtgggaggggccgcgggcgcggctaaatagtctccatcggccattttgtgcgagaagccgcagcgccgcctct

SEQ ID NO: 90160 - DNA, 122 bp, Homo sapiens
ttttacccatgtgccatgcttcctgcattgtttaaatatggtcattcaggactttttctgcgagcacaaaagcattgagaatatgttagtggctgccaggaaaacttgtcatcattttagtc

SEQ ID NO: 90161 - DNA, 122 bp, Homo sapiens
aggatggcgggtccaccccagcgcccccactccccgccctccttcgggtcgccaggccctcgggtgattcagaaattcatcaaatccaaatggcagcgggctctctgtcaggcaggaaacaa

SEQ ID NO: 90162 - DNA, 122 bp, Homo sapiens
aatctcacggcatctcttagtttggtggttttgactgtgctgtacaaaccacccgtgatacggctcattctttccctaacagccacttcccaagagggttcgccgaagtccccacagtcagg

SEQ ID NO: 90163 - DNA, 122 bp, Homo sapiens
actgatggttcttttttgcctgctgttcctgtacccaggtaggaggcagggaagggggaacgtcagggtcctgtgtgtgaggttggtgctcccagcttgaattcccatgtgtgaaacagtct

SEQ ID NO: 90164 - DNA, 122 bp, Homo sapiens
gactccgcgtgctcattggtccttgctcagagcagggcttttacagtagccaacaagctgcgttcaaaagtatgggcttctctgccactggacagagagaaaggaataaacaacctaaagac

SEQ ID NO: 90165 - DNA, 122 bp, Homo sapiens
aagtctgagatgaaagtgtcagaagggctggctcttcctgaggcctctctctgtggtttgcggacagccaccttctccctgtgtcctcacagggcctttcctctgggcacacacatccctgg

SEQ ID NO: 90166 - DNA, 122 bp, Homo sapiens
cggagtcactgaaggagtaagtaagtctggaggagctgcctgagcttcctgcttaggggccggcccccacccacagggtctccctggactggcggggggtgggggtcaggcagtgggcaggg

SEQ ID NO: 90167 - DNA, 122 bp, Homo sapiens
agggcatggacccaccgctccttcccgtctctgggcactcgaggatacccggggggttggcggctcctgcgagagtcagcgagcatttgctctgtgccgggcatcacaggggacgcggactg

SEQ ID NO: 90168 - DNA, 122 bp, Homo sapiens
atgcaaagacccctgtgaaagcgttgcccactgtgcggcgtgcggcacccagcgcggaaccgtcctaatgggacgctgagacccagagggcgcccagggttttcccactgcggccggcctaa

SEQ ID NO: 90169 - DNA, 122 bp, Homo sapiens
cgtcaacccaccacagggaacagtgctgactgtggcgtccttccctccctgccacagacgcggcttccatcctgcccgcaccagacaccgctgttgagtgcgtggaagcgtcacgccgcccc

SEQ ID NO: 90170 - DNA, 122 bp, Homo sapiens
tgctcacaccgggtgtggaagcatttgtaacccccaggggacctgctgctccacagaacccgacggaaagctcgaggaaggccgagcttcgggggtcacaggccggatgccggagctgctcc

SEQ ID NO: 90171 - DNA, 122 bp, Homo sapiens
ccttggttcggatgtctggaggtaagttacccacgtagatgcggcaatcgttgttccctgcggggccacgaatcacaccacctcccgacatggcggtgacgaaaagcgcggactcgagaaca

SEQ ID NO: 90172 - DNA, 122 bp, Homo sapiens
cacagaccaggttcagtggagagccctggtgggaccagagcccagtgggagggccctgaacggcctgtggggcttgaaggaggggaacagaggcagcgtccatttgttctgtaagggccggg

SEQ ID NO: 90173 - DNA, 122 bp, Homo sapiens
tagagaccattcaccttagctccagacttcccagtggcacctcggggtccccgctgaccccgtggaccctacagagggaagaggagttgtcagagaaacccaaatgcccccctctggacctt

SEQ ID NO: 90174 - DNA, 122 bp, Homo sapiens
accggccgtttgcgaggcccgggaggggtggggcctgcggccagagctgcggcttggtcgcgcagcagccgcaccaggaagccgatgtacttcatggctaggcggagcacctcgttcttgct

SEQ ID NO: 90175 - DNA, 122 bp, Homo sapiens
cgtgatccgcccgcctcggcctcccaaagtgctgggattacaggcgtgagccaccgcgtccggctacactatccgatttctaaagtaactcaggaaatggtagcaatcctatgccttttcgg

SEQ ID NO: 90176 - DNA, 122 bp, Homo sapiens
aggagagggagggaagagggaaggatgccagagacgtggggtcgccaggggcaggggcggcgaggggttcctgagtttaggaaaagagcgctccccgcggacgctttttttttttttttttt

SEQ ID NO: 90177 - DNA, 122 bp, Homo sapiens
ccggcctgcctgcccccggggacgacgccgccgcccgggcctccgctcgcagaccccgctcgctggcctccctccgccgcttgctgggccgagctaactccgtgcacctcgccgtgggggcg

SEQ ID NO: 90178 - DNA, 122 bp, Homo sapiens
tcatgtcagccctaggaactaacttctcagtcaatcacagaccaggtgcaagaggtcacgcgataccagggctggggatcagcccccggaatggagggggtcggcggaacaggcagcgagaa

SEQ ID NO: 90179 - DNA, 122 bp, Homo sapiens
ggcagaaggcagtggcagcaggcagtggcagcaggcagtggcccaggcagaaatagctcccgcgcgattcactggagccttccccgggccctggtcccggctaccgggactcgcgcgtccgg

SEQ ID NO: 90180 - DNA, 122 bp, Homo sapiens
agccagatggtccaacttctggtttctggattctggtcagtgagataaagggcttgggtacgccatataatgtcgagctgattgtccacctctaggaagatggagcagaaggactgatgatg

SEQ ID NO: 90181 - DNA, 122 bp, Homo sapiens
tgactttcagcgggactcttccagccggactctagtgcagctgagctcctcccccagtcccggctctgtccctgccccaggtgtccagcaggccctggaatccgcaaaggcagaaggggaag

SEQ ID NO: 90182 - DNA, 122 bp, Homo sapiens
tcatgaagtatggcaagaaaatttgctgagctttctcttcttctgttctctctctgtttccggcaataagttaagtcttatgctctagaccactatctgacctcacaggaagagtttcaaag

SEQ ID NO: 90183 - DNA, 122 bp, Homo sapiens
ctccccgaagccgcaggagggcgcccgactaagccttttctgccctgcgtgaggcgcatgcgtgttccgtctgcagctgcagacgcccatcctgggagtggacaccagcttcgttccctctc

SEQ ID NO: 90184 - DNA, 122 bp, Homo sapiens
ttatacaacttacatgacagctcaagccacccatcccatgtaattcttaagatttctgtgcgttcctaggggacttatattcctgtggtctcttctagcttcaggtttcacatttcacagga

SEQ ID NO: 90185 - DNA, 122 bp, Homo sapiens
ggtgttggagaggtttggaaagggcgtgccggagagccaagtgcagccgcctagggctgccggtcgctccctccctccctgcccggtaggggacctagcgcgcacgccagtgtggaggggcg

SEQ ID NO: 90186 - DNA, 122 bp, Homo sapiens
cagttccctggaggctttttgatactgattcgcgtacacctgttgtttgaaagctctcagcgggacaatgctgacccaggtgagacctggggcccggctgggtacctctatctgaatgagac

SEQ ID NO: 90187 - DNA, 122 bp, Homo sapiens
taagaactccttgttattgacttgaatgtgtgactaatcctgggaaacccccatggttgacgggcaggggacagaagcattaacagaaagggaaaagcaaagcgagttgggccgggcatggt

SEQ ID NO: 90188 - DNA, 122 bp, Homo sapiens
tctagatttctattcagattctctccagcgttcagaatgatggatcttgtcaatctgtgccggtcgttgggtggaaatggcactgcagggcctccgttctgatttccttcatcagtaggcat

SEQ ID NO: 90189 - DNA, 122 bp, Homo sapiens
gatacaacaaaatctactgctcgtgcaagatccgacttcccagaccccttcgcattagggcggagcgtgcacccggcagccaatccccgcttcctcacgtcgccgtatccccgcccaccgcc

SEQ ID NO: 90190 - DNA, 122 bp, Homo sapiens
cagggaagggcgtgcgcaggattggggagcacgttttgcgtcttgctgtgcgtgaggaagcggggatccaggtcaaggctatggaaaggtcagggaagggtgtcagtgcgcccgtcctgcag

SEQ ID NO: 90191 - DNA, 122 bp, Homo sapiens
gcaatttattgggagaatgtgggtgtttcttccatgcacacaaatggcacagaaattccacgtgtcctgagtgacagattttacctttcttggcattcacccagtaacagtttcaagtaaga

SEQ ID NO: 90192 - DNA, 122 bp, Homo sapiens
tgctcgcgagcccaagcctagcagcgctcgccacaaactttcccgcggcagcgcgagcgccgtcacttaccggctgcagaagtcatgattccccggtgcagctcgcttccccgctcggcccc

SEQ ID NO: 90193 - DNA, 122 bp, Homo sapiens
atataagtaaaacgaatcctttagaaaaacagaagccgtttgtgagagtcttgtttccagcgttcatgttcctacgtgaatatcgagacctgaagttgttcttgtacatgtggcagtatatt

SEQ ID NO: 90194 - DNA, 122 bp, Homo sapiens
aatctggtcttatgtgatgtttcaggcgtatcttgctgttgttcagggaaagcacgcctacggagcctcagataaacttctattttcttgccattagcactcaaaccaagttgttgacacca

SEQ ID NO: 90195 - DNA, 122 bp, Homo sapiens
actcctaaactaagcacagaagagttggcgtcatcttaaaaataccaaataacagaagatcgcattgcagatgatatcaggatgtggtttccagctttgcctgagggaattccaacatgaga

SEQ ID NO: 90196 - DNA, 122 bp, Homo sapiens
caggggcggcgtgaggtggggagggtcaggtcaatgggtcgttagaaacaacccggccatcgccttggaaacgctcccccctgcgccgcatgcatctggatccaccctgaaccagctgtgta

SEQ ID NO: 90197 - DNA, 122 bp, Homo sapiens
tgcctttaactacatttagattggaaattagggtaaaatgtttttgttgcaatctagtttcgagcatgtggtcctgtgattctgggtttgttttataacttatggactgagtaaaattaccc

SEQ ID NO: 90198 - DNA, 122 bp, Homo sapiens
cgggcctgtccaggggtttgagaaccgcagacctgcaggactgtgcatggctcattaggccgggtctgtccagggggtccagacctgcaggaccgtgcatggctcatcaggccgggcctgtc

SEQ ID NO: 90199 - DNA, 122 bp, Homo sapiens
gctttctcgactacaaaccagcacccatggtgaggctccatgacggtccagccaccactgcgcacgggacccgtgagcttgttaaggcttctgagtagagaccaacagattcgtgtgccata

SEQ ID NO: 90200 - DNA, 122 bp, Homo sapiens
tgggcacacccacccactccaaggcacacatacgcacacgtgcacacagatgtgcccgcccgcacaggtgggcatcggtggggcctgtctcttcaccaagttttgaatggctacacctgatc

SEQ ID NO: 90201 - DNA, 122 bp, Homo sapiens
tctcggtgccaggtgaggctgggcccctcctgccatccacatcccctgcatgccagtggccgccgcctcccccaggaggccgctgtcctgaatcgcttctgccatcccagggaacgtgctgg

SEQ ID NO: 90202 - DNA, 122 bp, Homo sapiens
aagcattctttggtatctgcttagtggtgcaaatctgcacttttaaagagtggatttgaacgttagcaactgccacagtcatgtaggagcatgtctggtgagtgaggtaaatgaccaagcat

SEQ ID NO: 90203 - DNA, 122 bp, Homo sapiens
gcagcggtgacggcgtgcgccacgccagccgcggtgatggcgtacgtgaaggcagcctcacggctccctgcggggacagacaggtgcagaaggtgagaccccaggccctgggccaggtgggc

SEQ ID NO: 90204 - DNA, 122 bp, Homo sapiens
aagaggcctttcagcaatactgatctagggaaccactgaagaaagggaggatttttggctcgcaaaatagattacagtgagagggtgtaaagatttccaaataaatgcctggctgtcaatgg

SEQ ID NO: 90205 - DNA, 122 bp, Homo sapiens
tagttaagttgaagaaaccaagatccaaaccacagtctccataacccatgatctttctaccggggatgagatcagcctcccagaagaaggtcaacccagaagttagtagaaagtaggatgtg

SEQ ID NO: 90206 - DNA, 122 bp, Homo sapiens
ccccaaccctgagaaccacttcaaggtagagccagggcaagtgacttctctctcggcctccgcgtccccagccatggaggaggttgggccaaaagtaccgcaaggggccaagcgcagtagct

SEQ ID NO: 90207 - DNA, 122 bp, Homo sapiens
tactttcaccaggagaaaaatagcgtcttggtttccgggaccctctctcccgttccacaccggtgggcaagccaggtccttcagccgacctctccacccgtgatttgctttgagaatcaaag

SEQ ID NO: 90208 - DNA, 122 bp, Homo sapiens
ctctgataggaggaagcccacccacattatagaggacagtctacttcactcaaattctaccgtttttaatgttattttcatctaaaaaacttcatagacacagctaaaataatgctttacca

SEQ ID NO: 90209 - DNA, 122 bp, Homo sapiens
gcggcggcccgcggcgcagcggggcccgggccgggaccgccgtcggggggcgcggcgacgcggagcccgctggtgaagccgccctactcgtacatcgcgctcatcaccatggccatcctgca

SEQ ID NO: 90210 - DNA, 122 bp, Homo sapiens
agctgtgagcaagacagggtctgtctgggagcagagagcaaagcgcccctgcacagtggccggaagcccgtggactcctccgaaaagccacgggcctgcccgcatgccgtccccaccccgcc

SEQ ID NO: 90211 - DNA, 122 bp, Homo sapiens
aataatcggagcattttcatttcgctatgatgatcgctgtaattggcagaatcacagtcgcgctggggctcgaggctcccggaggccggggggtaggcacggcgcggacgcaccctaggatc

SEQ ID NO: 90212 - DNA, 122 bp, Homo sapiens
catcgtcaaacacagtagtgatcagccaaagtccagatgcttcatgcagagcacagaatacgagtagcgcaaaggcatttcagatgatgtacgtttggttcacatgtagtgagcacctacct

SEQ ID NO: 90213 - DNA, 122 bp, Homo sapiens
cggggcgtgggctgggtgcccttttgggcctcacttgtccggcctgcggcaagtgctgggcgatgggatgcggttctggcggcaaaggaagggctgcctttgagagtcccgcaggaaggttt

SEQ ID NO: 90214 - DNA, 122 bp, Homo sapiens
agggggcctgaggggaaggtgagcaaagaaaggcaaggcgagggcgctgcttcaagaagccgggttcattcaaaccccgaggacagcaaaccccgcctccccacgccgccgcccgctcaatc

SEQ ID NO: 90215 - DNA, 122 bp, Homo sapiens
gggcaaagccagggtagggattgttctggtctccctctggtgtccctgggggtgtttttacggaacccagtgggtggcagaacataatgaggactctggatgtagtggaatgagcacaaggt

SEQ ID NO: 90216 - DNA, 122 bp, Homo sapiens
gccatattaagcagccaccgtttccacccctttcattagaaggccctgcatccgtaaattcgcgcatctctgtttttgttagatccttgtaagcatcgctacccgagtccaggatggaattt

SEQ ID NO: 90217 - DNA, 122 bp, Homo sapiens
taaaatgtcaagaagcgagtctgccagcggcgatgggcttcagcgtttcctccctccacacgcagtccctccatgtcaccaacatgctggagctacgtaggactgagccttccctggtattc

SEQ ID NO: 90218 - DNA, 122 bp, Homo sapiens
gctcttcgcctgcttagcaggggcctctgctgcggtgacagccaaggccacagccacccacgcaggacccgttcactttcccctccgagcttacttgtctttctaccctaaggggctgctgc

SEQ ID NO: 90219 - DNA, 122 bp, Homo sapiens
caaagtgctgggattacaggtgtgagccattgtgcctggccacctcattatttttgctagcgcagcattcactatcactaagtcctccaaaccaaccaataaaatccctttgagtagtattt

SEQ ID NO: 90220 - DNA, 122 bp, Homo sapiens
gttgagcatcccaaatccaaaaatctgaaacgctccaatgagcatttcctttgagtatcacgtaggtgctcaaaaagtttgggattttggagcattttggatctgggatgctcaatctgtac

SEQ ID NO: 90221 - DNA, 122 bp, Homo sapiens
ctgccaccgagcgttgcccggagtgtgagggcagctgagtcccgcagggctgcggaggggcgcgctggggcttcgacctggctgcactaacccaggctcctcctcgccccggcctccgggtc

SEQ ID NO: 90222 - DNA, 122 bp, Homo sapiens
gggaggccggcagccaggccacagaatccacacgtggaccattgtgggtccctgggaggccggcagccaggccacggaatccacacgtggaccattgtgggtcccttgggaggccagcagcc

SEQ ID NO: 90223 - DNA, 122 bp, Homo sapiens
cactgcagcctccctgcctgattctcctgcctcagcctgctgagtgcctgggattgcaggcgcgccgccacacctgactggttttcgtattttttggtggagacgggatttcgccgtgttgg

SEQ ID NO: 90224 - DNA, 122 bp, Homo sapiens
ggcagggagtgcccaccttggccctgaggatgctacagtgcagagtgcaggaggcccggtcgtagagaaggtcaaactccagcgtgcctagggcggctggagagagaggaaaggcagcatgg

SEQ ID NO: 90225 - DNA, 122 bp, Homo sapiens
tgctttattcaatgggttcttgcagcccaagggatgccttagccctgatattgtagtattcgtaggctgattcatgatccctgccgacatatccttaaaagactggatagatgctacacaca

SEQ ID NO: 90226 - DNA, 122 bp, Homo sapiens
aactttaaaagaataaagtatcagaaaacacgaagttcctacttacacaaccacttccaacgggcctgcttcctttctctttgctttactctggcagctccacaaagccacagcagcacact

SEQ ID NO: 90227 - DNA, 122 bp, Homo sapiens
ttgtggcatttccaagagatgggagctgaaggggctggcagggtgaccccaggcagcagacgccctcagtcgctttgtaactcagctcgtcggtggccaagagagctcatgtgcctctccaa

SEQ ID NO: 90228 - DNA, 122 bp, Homo sapiens
agatggggtttcaccatgttgcccaggctggtctcgaactcctgggctcaggtgatccaccggcctcacctcccaaagtgctaagatgataggcgtgagccattgtgtccggccctggcctt

SEQ ID NO: 90229 - DNA, 122 bp, Homo sapiens
gcgcgccctgcggcgtgtgtactcacaaaggtgtgtctgctaaccccacagcccgggctgcgttccaccccgagctggagaaaccccggcctggagcggggccttgtccgcgcggccgcggg

SEQ ID NO: 90230 - DNA, 122 bp, Homo sapiens
gcgggacacggctcccggcccgggccgggccaggggtgggaggcggttccctaccgcaggcggcgggactcccatgcgccgagggacccaagtctccactccacccacacgcccacccggcg

SEQ ID NO: 90231 - DNA, 122 bp, Homo sapiens
tttcttctcaaatattcagttaagagccaaaggctgctttggattcttacttgttacagccgtctggcctgctgtcagaagggcccaccacagtgtccatgaatgttgcgatgttagaaaat

SEQ ID NO: 90232 - DNA, 122 bp, Homo sapiens
gcctctcttggaaagttgatctccctgcttttcttctcctctgtttcatgccatgaatttcgcactaacagtcctcccccatccagggtccagccagcctcttgcttgctaaggcagaggaa

SEQ ID NO: 90233 - DNA, 122 bp, Homo sapiens
cctccatcgctttccagggccgcagcgtgagaattaataaagcccttgttgaaaggtccgcgcttcacgcctcgcacagagactgggaagcggcgtggttcccatcccagaaaacactgcgg

SEQ ID NO: 90234 - DNA, 122 bp, Homo sapiens
attctggatctagctaccaagatgttttttccaaatgaattttaataaagacacacattgcgagcacttttatgtagtacctctcaaaatatacactgtgatttctaagaatctttcagtta

SEQ ID NO: 90235 - DNA, 122 bp, Homo sapiens
gccagacccagaagccccagaagccgtggtgggaggacgagtgggaggttcccagggagacgctgaagctggtggagcggctgggggctggacagttcggggaggtgtggatgggtgagtgt

SEQ ID NO: 90236 - DNA, 122 bp, Homo sapiens
ggcccccttcgtgttctgcatgaagctgcccgtgctgccacaagggacaccacaggttgacgcgcagtatcttcggagcagcacagggacagacgtattgctagctttgccatttcccaagc

SEQ ID NO: 90237 - DNA, 122 bp, Homo sapiens
aaggtctccaagccctccaaagcccacagggcaggaaaagtcaacccggtcctcatgcttcgcctccacactcacccaggaacgacattgccctgctcaaactggctaaccccgtctccctc

SEQ ID NO: 90238 - DNA, 122 bp, Homo sapiens
acatggaggtctctgagggagacgtgccagcctctgccacttggacacagccaaggcatccggcacggtggtgaccctgcatccctcccaccatagcaaggggcacccacacccctccagag

SEQ ID NO: 90239 - DNA, 122 bp, Homo sapiens
gattaatttacatgcaaaagaacacttaggagagcagcatggtaagcaaatgtattgtctcgattgctgaggtggaaaaagaacctggaaagaaaaaaaggtgctctaattaaggggcatca

SEQ ID NO: 90240 - DNA, 122 bp, Homo sapiens
gctttctctttttgttcccatagctcctgagcgaaacagccattttatatttgcatgccccgccccacaggctccgagctccgtcctccccgcaggctggccctattaccaccatctaacat

SEQ ID NO: 90241 - DNA, 122 bp, Homo sapiens
atttactcccaggagttacttaggtactggggactttcaggtattagatgtaccaatgcgcgcgcgcacacacacacgaacatgcgcgcatacacagacgctcgtgcacacacgcgaacagg

SEQ ID NO: 90242 - DNA, 122 bp, Homo sapiens
ttctatagctctgaaaggtaggttaccagcacctaacaaaaataggacaaaacttggaggcgaaagatttcataagcactaacactgtttcaagtcaaagctgagctcatctatcttgcccg

SEQ ID NO: 90243 - DNA, 122 bp, Homo sapiens
ccagccctggatgatgccttttccatcctggacttattcctgggacgttggttccggtcccggtagccttgttaaccctcagaggccttcaagtcctttccacctctcacccattgcccacc

SEQ ID NO: 90244 - DNA, 122 bp, Homo sapiens
ccgtgggtgtgtctggcccagtggtaggaggatgtccagtgtctggcctctccaggtctccgatgggtctaggaatgtctgatgtgcattttatagtaacagacaagaagtggctaacactt

SEQ ID NO: 90245 - DNA, 122 bp, Homo sapiens
acaatcccacaacaattgtgaaaattaggaaagcacagatcagatctgcttagcatccaccgactgtgaggatgtgaagctgaacaccaaattacagggtttcaaacctcaagccttggtga

SEQ ID NO: 90246 - DNA, 122 bp, Homo sapiens
tgccaatgacaaccccccagtgttcagccaggacgtgtacagggttagccttcgggaagacgtgcctccaggcacctccatcctgagagtgaaggccactgaccaggacgagggcatcaact

SEQ ID NO: 90247 - DNA, 122 bp, Homo sapiens
agctccggggctgaaggtcactttgtgcttttaaacggaatagagtcgctggctccaacccgagcctttatatcccgactgcagtttcccacggtggtggaaagaggggcggctccaaacat

SEQ ID NO: 90248 - DNA, 122 bp, Homo sapiens
gtcctttaatgactgatccctgatcaaggctttggcccttcaaactgctgctgttcaaaacgtgaaatgattctgctgaatccattcttgatgtctctctttagtggtcttctcattagtgg

SEQ ID NO: 90249 - DNA, 122 bp, Homo sapiens
aacagcctcataggagctgtttaattaagtgaaagtaagtctagtccttttggaaccgaacggttcagtgagcaaatacatatcaccaagtgaaggaagtggggaagttattatgtgcttca

SEQ ID NO: 90250 - DNA, 122 bp, Homo sapiens
tgccttaaacttgggtgctatcaatctatccaacaatgacggatgaccttgtcataacgacgccagtcaaaacattttcggtctaactctcttccaaccaacatcgaagcatcctgaatgag

SEQ ID NO: 90251 - DNA, 122 bp, Homo sapiens
ctggtattttacaaaattgctaagtggaatgcatgaattgcattatgttctctggtaacacgtagagttcagacccttctgaactctgttgataataccacaccatgttctggacccatagc

SEQ ID NO: 90252 - DNA, 122 bp, Homo sapiens
caaagcccaaaagatgatgctgcgaatccggaataaagaaatgcacacgcaagggctgggcgcggtggctcacgcctgtaatcccagcactttgggaggccgaggcgggcggatcaagacgt

SEQ ID NO: 90253 - DNA, 122 bp, Homo sapiens
ttaactttggtataataatttccaactcagttggcagtcgtgctcgcgagaagttaaaggcgaacaatcgacccaccgaaaagctgtgcgcagatttttttttaacagctgaactcaacgaa

SEQ ID NO: 90254 - DNA, 122 bp, Homo sapiens
agctgcctccctaagtcatctagcctttctggcctcagtttcctcatctgtaacatgaagcgattgcacctagtgatgtctgacacactttcgggcgtacaaaaggcatccacacgcaggcc

SEQ ID NO: 90255 - DNA, 122 bp, Homo sapiens
tcttcccctcttttcctcttgattgtctggaactagctccctctgggctgccggattacccggcccgccaagttccgcagcgagagccagtgagagatgatgccggctgggcttctgggacg

SEQ ID NO: 90256 - DNA, 122 bp, Homo sapiens
agaggcacttactgttctgcatgctggctctggctgggggccgcgggattccacggggctcgaatatggggctctgttagcaagaaaataggagttaatcctcgggcagctgcatcaggtag

SEQ ID NO: 90257 - DNA, 122 bp, Homo sapiens
ccgagcgagggtggggggcggcgggcggcgcggggcggcggcgagcgggggccatgcaggcgcgctactccgtgtccagccccaactccctgggagtggtgccctacctcggcggcgagcag

SEQ ID NO: 90258 - DNA, 122 bp, Homo sapiens
ttgaaaactccaggatacgcaccacctgactgcggaacagtgagcacaagacacccggagcgctgcagaatgggcacggcatccttggtaccgggccagccctctccacagcggcaggggcg

SEQ ID NO: 90259 - DNA, 122 bp, Homo sapiens
cgcgggcctgggtgcagtgtggtggccgcctccatcaccgcaggctgggcaagggcgaggcgaaggtgggctccgggaccgaggctgcgagctccgctcggtccgagacccgtgcagacgcg

SEQ ID NO: 90260 - DNA, 122 bp, Homo sapiens
ctgagacaggcatgacaggccacaggagtagggcaaccaaccatgtgcttagctgggtcccgggcaaaccaggacacataggtcaaggcatatgctctcatgggccaggttgcaaacgacag

SEQ ID NO: 90261 - DNA, 122 bp, Homo sapiens
taataatctgggcagatgcagtggctcaggcccgtaatcccagccctttgagaggccgagcgggtggatcacttgaggtcaggcgttggtcaagtgctcctagagaaccaggctgaccaaca

SEQ ID NO: 90262 - DNA, 122 bp, Homo sapiens
tcgaaggggacgccgtacggtcccccgccccggcgccgccgccgcccctccaggccgccgcgcgggaaggcccagccggtggccccgcttttttacctgcccggagttttcgcgcgcgcgct

SEQ ID NO: 90263 - DNA, 122 bp, Homo sapiens
ttgcttctctaacggcgacgccgtttcccccttcgcctcgttactcctcaaagccccacgcggccacagagttcagacttacccaccaccaccttgcagtggctcgccccagtttgacgcat

SEQ ID NO: 90264 - DNA, 122 bp, Homo sapiens
ctaaggtgggttagggttttccgaggtctgaacttcaacctgggcgttcagactcctaggcgagaaaaggagggataagaaccatcctaaagctgtaggactggaagggattttagtgactc

SEQ ID NO: 90265 - DNA, 122 bp, Homo sapiens
actccgtgggctcctgcgctgcccgagcctccccgacgagcaccgccccctcctcctctgcggcctccggtcccctcgaccgcccaagggctgagaagtgcaggagcatgggcgggactggt

SEQ ID NO: 90266 - DNA, 122 bp, Homo sapiens
aggctgttgaggctccagctccctgagccgccgctgcccgctgctgtgccaccgccgccgcggctgccctatttctgccgccgggaccggagcccgtgacgtcaccctctgggccccgcctg

SEQ ID NO: 90267 - DNA, 122 bp, Homo sapiens
taaggattctgaggtggggagtcgggagtttctggattctttatccggaatttcaagggccgccggagggctgtcgcttctgcagtgcgtaggagcggccggggcgggaggctccgcggagc

SEQ ID NO: 90268 - DNA, 122 bp, Homo sapiens
ggtccgtatccagagcctgcttctcaggagaacgctggctctggggccagtcctaacccacgagggctcctctcgaccacatctgcaaaggccctatttccaaataaggtcgcattcctggg

SEQ ID NO: 90269 - DNA, 122 bp, Homo sapiens
gccgctgattgggccgcaccgcccgtgacgttagcccggaccccacccctccggcggcaccgcccccgtccccattccgcacacagacacacacacgtggacccggcgcggcggcggctggg

SEQ ID NO: 90270 - DNA, 122 bp, Homo sapiens
ccaacatagctgtggacaaagccaacctggaaatcatgacaaagcgctccaactatactccgatcaccaatggtacctccctctctgctgcactcctggacatgggaatccatagtttgaaa

SEQ ID NO: 90271 - DNA, 122 bp, Homo sapiens
tgcgaactcctgcagcatatttatactgtggaacggtgcggacagcaggagtagctgcagcggctgcagctgcaggacgtggacccattgtctgtgttgatgtgttagctaaaaaataagaa

SEQ ID NO: 90272 - DNA, 122 bp, Homo sapiens
tctggtccggctttagaactctgcggttttgtggagctcgagagtccgggacaaggtagacgcaggatattgacctttttatttttaactgcattttcagtttggaggttgtaaaataggta

SEQ ID NO: 90273 - DNA, 122 bp, Homo sapiens
tctttctctgtcccaggtttgctgtcgtctgatctctgtctgagtgtctgtgtctccactcgcccccgacccggccccccgagccccctcccgggtcccccactcccattcaggcccgggtt

SEQ ID NO: 90274 - DNA, 122 bp, Homo sapiens
ctgctccccctccctttcccacctattcatgtgtgcaagagtgccctgtcccacagaacacggggaacaaccatctcaatgacaaggacagcaggtggcaaggcctcaacaggactcagatg

SEQ ID NO: 90275 - DNA, 122 bp, Homo sapiens
tggctcagcgcatacaaggtggctcggctgcgctgatccctcgccatgttgaagatctctcgcagctgctgtgctgagggctcggggatcagggccaccaggtaggtgaccacatctatcag

SEQ ID NO: 90276 - DNA, 122 bp, Homo sapiens
aataaccccatttcatcccaatgcgctggaagcaccccttgccacgccctctcttcaggacgtctccacgacgccacacgccacgccctctctccgggacgcagcagcctgccccttccatt

SEQ ID NO: 90277 - DNA, 122 bp, Homo sapiens
tgtttcagcgattaaaccagcacgacagggggctggaggcaggtaaaaagcaggctcttgcgtggcccggacagttgatattcctggcactcggtgttcgagatgtttccttacaattgcgt

SEQ ID NO: 90278 - DNA, 122 bp, Homo sapiens
aatgctttttcagtatcaattgaaatggtgatatggcttttgtcctttattctgttgatacgatgtattacattgattgatttgtgtatgcatacctggaatacattccacttggtcatgaa

SEQ ID NO: 90279 - DNA, 122 bp, Homo sapiens
gcttttggccaacaaacacgccatggtttactcacccacttcctctgattcttggccagacgctctaagcttgcactccctgggatagtgtttttgaattatcgtccacagttccacgttga

SEQ ID NO: 90280 - DNA, 122 bp, Homo sapiens
ctcgaatcgagttctcctgcaggcgctgcagattttggtgtatcctggggtgggaggctccggctctgtcagctgccgctgccctctcggaggtatccgcggctttagcctagggaaggagg

SEQ ID NO: 90281 - DNA, 122 bp, Homo sapiens
gacgctgaggagcatggccagcaggaaggtgtcatggtctgcggggattgggggaaggggcgctgagtcctgagcaggtgcaccaccccagctcctgcccacatgccccccactggcatact

SEQ ID NO: 90282 - DNA, 122 bp, Homo sapiens
tcacgctgcagaatgttgggtgcctgaattattccctgaccccagaatccatacacagtccgcgctgggctccaaagctatgagcactaaaccctgctgtggactgttcgtgccaatgccgt

SEQ ID NO: 90283 - DNA, 122 bp, Homo sapiens
tgctagggattaacaactggcaattttaggaggaactggagtcctccctctcccccaccccgagaatcagcaagcagctgctaattcccatgcacccggctcccgacagctttttccttacc

SEQ ID NO: 90284 - DNA, 122 bp, Homo sapiens
acgctcctacgctgccttgggccgcaggcctgctaagccctccgctctcgcttccctgcgcgcgaaataagtcccagggccaatgtggcctccccacccagtgcttccgggggcgccaaaaa

SEQ ID NO: 90285 - DNA, 122 bp, Homo sapiens
agtcacatgcaagttgggggttgcggggcggcccatgcaggccacagcaggccaggcaggcgaacagacagatgcaccaagactggggtctaggtccacaccagggtcagcccagcactggg

SEQ ID NO: 90286 - DNA, 122 bp, Homo sapiens
gtctcacgggcgggcctgggcgcacggccaaagcgccaggtctccacccccagcccccggcgtcctgcagccggagcctgcctcgcctggctcctgcgcccgccgtccagggcccctgtcca

SEQ ID NO: 90287 - DNA, 122 bp, Homo sapiens
ggggagtactattattatccccatttgacaaacttggaaactgaggctgattgcacataacgtgctcatgatcagcatgctggcatttggcagagccaggattcaaattcaagtgttgcaaa

SEQ ID NO: 90288 - DNA, 122 bp, Homo sapiens
aggggagccctggcccagggcctgagactagtgctctctgcagtgtttgcccctctgcttcgtctttctccacccccgggagaccacgattatatctacaacctggacgagagtgaaggtgt

SEQ ID NO: 90289 - DNA, 122 bp, Homo sapiens
tctgtctgctggggagggacggcccacttctaggagcatttacaacaataataataactgcgacgacccgcgggtactgtcataaatagtgctgagggccagggagacaggaacggttcttg

SEQ ID NO: 90290 - DNA, 122 bp, Homo sapiens
gaaaaaaattttttttctactaaccgatgttacctttgattgtgcagattgtcagttatgcggtggaaagaatgaatttgtcagcagatttgaggtcagaatgtctttgtagccctgtaatt

SEQ ID NO: 90291 - DNA, 122 bp, Homo sapiens
gtcacctcataatggtggcagttttataaatattaggttactacctcacctcctgtcatccgtttgtcaaatacttgagtcattcaaacttaacgcccacacgttcaaagttgtactccagg

SEQ ID NO: 90292 - DNA, 122 bp, Homo sapiens
cctgctgatgggtctgggctgggtcactagctgctcaaaatggcagctctagtttgctggcggctgactggggaggagaagggctctgtttctcttcccaccactcagcccacctgctgctt

SEQ ID NO: 90293 - DNA, 122 bp, Homo sapiens
gcacccacaggtgggaggctggctgaagggctagtggtggggggcgcctccttctcaccccgcgatggctgggactgattcattcattcagtgtgaattggactgagagcactgccatacgc

SEQ ID NO: 90294 - DNA, 122 bp, Homo sapiens
tatttttccccactgcagcccacatttttggattatgtccggccacgttcctggacttgtcgttacgtgttttagaagcttggactttgtttcctccttgtcactgaagattgggtagctcc

SEQ ID NO: 90295 - DNA, 122 bp, Homo sapiens
ctgggtacctgtggcaacttggacccctcccagtacgcctaggtatgcgcgcccatgagccggcactcacttgagtccctgcacatgcccacctgggccatacaggcgccagtagtacccct

SEQ ID NO: 90296 - DNA, 122 bp, Homo sapiens
ccaaatcgactgtccaatggatttggtccccttcaaccagctgtagctgtgcattgatggcgccgtgcggcccggccgcaggtcccgcagccgtggagaggacccagcaggtggcgcgggga

SEQ ID NO: 90297 - DNA, 122 bp, Homo sapiens
ctgggattacaggcatgagccaccacgcctggccctcctttttgtccttatggatatgcccgttactggcagtccagcagtctgcttgtcttctgcattcatccgaaggaactaaaagaagt

SEQ ID NO: 90298 - DNA, 122 bp, Homo sapiens
aggggagttttcaagaattcacccactaggtgctggcttaaattcatggcattccctaaccgtttgttgaaataccattatgggcctggcgcagtggctcacgcctgtaatcccagcacttt

SEQ ID NO: 90299 - DNA, 122 bp, Homo sapiens
gtcgcaggtgctcaggaaataccagatgagccggcgtccggcaggtgccttgcaggagggcgcttggagacccctgccccctccacagacggcgaaactgaggcccggggaggggcaggggc

SEQ ID NO: 90300 - DNA, 122 bp, Homo sapiens
gcgaggtcctgctcaagtctggggagctgcaggcttgcagctctgagcactacctgcagccggagaccaacggggtaatccgaagcgccggcggcgtccccatcctcccgggcaacgtggtg

SEQ ID NO: 90301 - DNA, 122 bp, Homo sapiens
tgcgccggcactcctcagccattgggcggtggatgggaccgggtgccgcggagcagggcgcggcgctcctcgggaagactcaggcggcgcaggagcccacggccggggtggggagactcagg

SEQ ID NO: 90302 - DNA, 122 bp, Homo sapiens
gggtttaagacatacgacctatggggaaacttatgttcaaaggattgggaagataaggcacgtggtcacccttctctgataccacaggacttgcaggggcagaaggtgagaagggaaggggg

SEQ ID NO: 90303 - DNA, 122 bp, Homo sapiens
cggtggtgcccatttgtttggtcttttacaaaccaagtgaccggcctgggcctcgcggcccgggacagccgcattggcaaacttctatctctcaaagccagagcagttagcaaactctcccc

SEQ ID NO: 90304 - DNA, 122 bp, Homo sapiens
ttcaggtcagtgacagtcacttttaggagagggttcgtttgctttcaaaatccatctccccgttcctctcagggttctttgccccaaaggactttgcccttccttacgcagtggacaccttg

SEQ ID NO: 90305 - DNA, 122 bp, Homo sapiens
ggccaacggcctgcagagcaacatgcccaagtgagtggggccccgaaatctgagggtgatcgtagtcactagttgtggcccccatgcaggagcggagagcgggttctggtttctgaaacctc

SEQ ID NO: 90306 - DNA, 122 bp, Homo sapiens
tgagtccctctgcacacgggaactgtgcgccctgggcactgcaccttccagtatgtgggccggagaggcgggggatcttgcccagcgggtccgacagggcatggaaggaagtaaatggaagc

SEQ ID NO: 90307 - DNA, 122 bp, Homo sapiens
ggctccggcgggcccgcgagctgaggtccttctcagcccggtcccggagcgagctccgtgcgttcaggaactgaaattactatgccaagagcagaggcggcgcgcagcagtcgggcgtagac

SEQ ID NO: 90308 - DNA, 122 bp, Homo sapiens
atgaaatcagtccaaagttgtaacctatgagtaccttaaagctttgggaaacaaggagatcggatccattcctagctctaaggaggttgaccccagttgctaactccttccaccaggatcaa

SEQ ID NO: 90309 - DNA, 122 bp, Homo sapiens
ggccttgagtgtcttcctacctgcaaatctgaacagggttctgttttgtgacaacagatccgtgggttcccatcatactgtggatgcaaagaggtaagagacagggaagggcaggcaagaga

SEQ ID NO: 90310 - DNA, 122 bp, Homo sapiens
aacctgatgcacgtgacccctgcagactcacgccagccactgccacccccacaacccttgcgccctggccccaccctctgcaggtccccagatcaaccatgttcctcctgtcccagccactt

SEQ ID NO: 90311 - DNA, 122 bp, Homo sapiens
agctcaggcaatctacccgcctcggcctcccaaagtgctgggattataggcgtgagccaccgcgcccggcctaggtaacgatttttgcgcgctaaacggttcttagtaacctgcagagtgaa

SEQ ID NO: 90312 - DNA, 122 bp, Homo sapiens
ccgctctctccgcgcgccccctgcagccctggacgcagcacctccgtttgggacgccctacgcccaccttaacttgaggctcccatccacgcagcctctgcaagcctcaccgcaaccgtgct

SEQ ID NO: 90313 - DNA, 122 bp, Homo sapiens
tctgttcaaaaggtccatcacaaaagtttctggttcctggtttgccacaagggaccctggcgtcctgtcctcctgaagcattcatgaatggcagttttccctgtgagccttccagcttggct

SEQ ID NO: 90314 - DNA, 122 bp, Homo sapiens
gcaaggctgcgctcccggccagcaggatgtgccagatgctgtgggtgtagtagtagttgtcgctagtcatcatggaggtgtagatggcgatgcccacagaggccatagagacgccgggcagg

SEQ ID NO: 90315 - DNA, 122 bp, Homo sapiens
ctcaagcgatcctcccatctcagcctcccaaagtgctgagattacaggtgtgagccaccacgcccagtctagagagttttcataccacaaagttgaaggtgaacctgtagaacccataaact

SEQ ID NO: 90316 - DNA, 122 bp, Homo sapiens
gcgcagagcccagctccctactcccacatgctgctccacgatcactgcgctcgggaggatcggggaggatccgggaggactagcttggtatttgcagcgcccacccctcccccactccccct

SEQ ID NO: 90317 - DNA, 122 bp, Homo sapiens
ctttctgggagcagtggccatgctgtgcaaagagaaagggatcaccgtgctgggttggaacgtggtgtttgacatcttggtgagaggcaaattcaatgttctggaaattgtccagaaggtac

SEQ ID NO: 90318 - DNA, 122 bp, Homo sapiens
tcctaggtcaaggctggcatttgcaccttttcatggtctttccctgcacagtcacttcagcggcggcgtcgctggggctgaggccgggtgactgcggctaggcatgcggatttagttccccg

SEQ ID NO: 90319 - DNA, 122 bp, Homo sapiens
gccctcccggggctcactcacgtagactgcgtcgatgtcggatctgtcgtagaagcggagcgccccactcagctccagggcaggagagacgaagtcatccccgtcctccagctccaggtccc

SEQ ID NO: 90320 - DNA, 122 bp, Homo sapiens
gtacgctgctggaacgccggagtgcaaaggcttttagggctacattgcaaccctcgggctcgatttcgccctttgggctgtcgagtaaacatttgcttttcacacagtgtgacccctttctc

SEQ ID NO: 90321 - DNA, 122 bp, Homo sapiens
tttatcacctgaattcttagaaaagtagccttcttctcactactatttactgcccagattcgaatttttcacaagaattgaatgtttcttctctgttattttacatgaggaatgcacaacta

SEQ ID NO: 90322 - DNA, 122 bp, Homo sapiens
gtggcagggcatagaggtcaaatagtctagccttacaggtagagagcttattaaatggcacgtctattaaacccgatggacaacataaagaaacattacagcaaaatacttttaacatagtt

SEQ ID NO: 90323 - DNA, 122 bp, Homo sapiens
aaaggatgttatagaaactccagatactacttctcccctccagtggtctgagttgcgcggcgctttcccgcctgtccggtagggcggtgccgcgcagaaagccgcggtccctctgcggaagg

SEQ ID NO: 90324 - DNA, 122 bp, Homo sapiens
ccctttcccggagaggcctggggagggggcaccgaaaggggcccgggccgcggtgggggacgggcgacgggccccggaaaggcacagatcttacccctcaacccccatccttacaggagccg

SEQ ID NO: 90325 - DNA, 122 bp, Homo sapiens
tttttcttgctgaaaaaaatctcataatgttttaagaaagtttgcgaatttgtgttgggccgcattcagagccatcctgggccgcatgctgccccagcggtgggttggacaatcttgtccta

SEQ ID NO: 90326 - DNA, 122 bp, Homo sapiens
ctcgaccctgcccctaccacttctaaagagaccccttgcaaaagcacatcagctcaatgacgccacacccactgaaaacactcgtttctgggaagccactattagaacacgccaagaatgtt

SEQ ID NO: 90327 - DNA, 122 bp, Homo sapiens
tgactccagcctgctcagagttccaggcaggcaggacaggctgctctgggagccaggagtcggacctaggtaacaacagcctggaaacaaatcctggctctgcccctcacccctcccttttt

SEQ ID NO: 90328 - DNA, 122 bp, Homo sapiens
cgtggcgcccccggaaggggttgccgagtggggcattcacttccggtctggggcctgcggcggcggcggtgtcggcggcggcggcggcggcggcggcggcggcggcagcgggtcggtgtaga

SEQ ID NO: 90329 - DNA, 122 bp, Homo sapiens
tcgcaccccacccactagtccttttcagcgttcccaggattttctccaacaaatgtaacgcggttaaccttagaagcagtgttgaagaaacacgcaaagaggcctgagtatccatgacctca

SEQ ID NO: 90330 - DNA, 122 bp, Homo sapiens
gaggaaggcggccggcactcaggtgagtgtggggccaatgccaggccctgggcgtggaaccggggagttcgtgtttcagctccacagccaggactcactttgcagggagagcgagggggagg

SEQ ID NO: 90331 - DNA, 122 bp, Homo sapiens
gtccctcggcttcgccatctaccgcgcgctggactgggggctggacgagagcgaggagcgcgaactcagccctcagctggagcggctcatcgacctcatggccaacaacgacagcgaggaca

SEQ ID NO: 90332 - DNA, 122 bp, Homo sapiens
gattgtgcggatcatgtcgagcataaacagataccctgcctgtggctgagtaaaaaaggccggtgacagaatgcatgtgcagtgtggttgccgtactggccggggctgctggcagctaacca

SEQ ID NO: 90333 - DNA, 122 bp, Homo sapiens
ttatattgtcttttatatacattttatgtatcatatgccagggcagcatgcgcgagcaagcgctgggagagcgagcgaacggggagcggaggcggcctgaccgagtgagtgccagcgagtgt

SEQ ID NO: 90334 - DNA, 122 bp, Homo sapiens
caagagctagttccgcccccaaccctgccacagacccgcgccaggacgaccctgcctccgcggctgtccctagccagggcccaacctggttctattaataactaagcaaactagaacacctc

SEQ ID NO: 90335 - DNA, 122 bp, Homo sapiens
atcccggtaggatcttttcagcctacatcaaggaggtggaggaacggccggcacccaccccgtggggctccaagatgccctttggggaactgatgttcgaatccagcagtagctgcggctgg

SEQ ID NO: 90336 - DNA, 122 bp, Homo sapiens
gcgcgctgctgcctgcagtccgccgggcctgagcacacccgaggctcccacctgcggagccgctgggggacctcacgtcccagccaggatccccctggaagaaaaagggcgtccccacactc

SEQ ID NO: 90337 - DNA, 122 bp, Homo sapiens
actatgccaaaaagcctccaaataacaggactaacacgtatcaatctacgaaccagcatacggatcttttattctatactactactgctaacaaagataatttcaacttcagttttaaaaac

SEQ ID NO: 90338 - DNA, 122 bp, Homo sapiens
tgcagctgttgcgcaagccggtgctcacggccatggggctgctggcgctgctgggtgagccggggccgctggggtgggccggccagggccctccaggctggggagcggctcctgcgaaggcc

SEQ ID NO: 90339 - DNA, 122 bp, Homo sapiens
gcgggaggggccgaatagaagaatgatgggcgtggccaaccccgaggtggctggaggccgcgcccccttcccagagtgcaccgcagccgctgcattcaggaaccgctttagcttcgcccccg

SEQ ID NO: 90340 - DNA, 122 bp, Homo sapiens
acccaggcttttgatatcggcaccctgaggaatcctgaagccatagaggacaacaaattacgaagggacattgtgcccgaagcccttttcctaccccgacggactccaacagctcgcgacaa

SEQ ID NO: 90341 - DNA, 122 bp, Homo sapiens
acttacctttcccattttgaaggaagtgagcagatgttttctggttgctgtgtgggactgcgggaacgtcactgtatgtatagcagccctgactgctgcctccacaggaaatcacacaaaag

SEQ ID NO: 90342 - DNA, 122 bp, Homo sapiens
agcaggagcagcccagtgtcatcctgcacaaacaggtggtgtttacgcacggcatgtcaccgagagccatctgaccagccgtgccaaccgggagcaaagggggctgataaaggcagcttatc

SEQ ID NO: 90343 - DNA, 122 bp, Homo sapiens
tcctcatataaacagcatggattacattaacaggcctccctgggtgagtagcgtctctttcgcctaccttacgctcaccccatggttatataaccttttgaacggaatttggaaattcttct

SEQ ID NO: 90344 - DNA, 122 bp, Homo sapiens
ggtggcggcgatggagaggacagatccggctcccagaggaggtcgtgagcgcggggcctgcgccggccggaggagggacccggggggctgcaatatggctgctcgggcgccgtcccctccct

SEQ ID NO: 90345 - DNA, 122 bp, Homo sapiens
cacgacatattcagacaagattcatttagaagcgtgcatgcattcttttgacctacactgcgtcgaaaggaaaacccacataggaggtgtcatgccctggacctcggttgagattcaaaact

SEQ ID NO: 90346 - DNA, 122 bp, Homo sapiens
ttagcattggggggcctcccttggttgtaaggactgctgcttagtagaaggcctttcaaacgcacgtctgctccctcctttacagccacttcagtatacagaaacttcctctagtttctcat

SEQ ID NO: 90347 - DNA, 122 bp, Homo sapiens
agggtgggaatgagcggaggactgaggagaggaaggagggaaagaatagggagatgaaaacgccccggtctgctgctaagcacagcacagttaccaaagccaggaaactaacactgacacga

SEQ ID NO: 90348 - DNA, 122 bp, Homo sapiens
tgccaggctaagagacaacgtgtgggttagctcagattgcttcattcttgtttacattcacgtctgctccggatgagccagcagatggcactacaaacctaaacttccttcaagcactagcc

SEQ ID NO: 90349 - DNA, 122 bp, Homo sapiens
ggacactgcctcaaagccacatgtctgctccaaaggaggcggcatcaacaaaatcaaaggcgtatgatgcagctcgttagtaatccatcgagtccctgtctcaaaacatctcactcctattc

SEQ ID NO: 90350 - DNA, 122 bp, Homo sapiens
attacctgcccaaagaacaatgcatccaaacacagacccagctacctccgggtcaatgggcgagggacgcagagagggaggagctcccgcagccggcggccgcggaacccaggaaacaaccc

SEQ ID NO: 90351 - DNA, 122 bp, Homo sapiens
ctgcactgcaggaaaacatttttagtgttgtatttatgaaagtatgacatgaggccagtacgtgtccttacaggaaagacttcctgatgtgcttatgcaaattcaaacactgcaagcatgtc

SEQ ID NO: 90352 - DNA, 122 bp, Homo sapiens
tgtataagcgtgtgattgtgtacgtgtgtgagtgtgtgtgcgtgcgcgcgcgcgaaggagcgcgctttcgcttgccctggacacaaagttacgtaaagatgcgctggctcgcggcgagctcg

SEQ ID NO: 90353 - DNA, 122 bp, Homo sapiens
atcttaagaagtaaaactgatatggctccagatccaatatttatttactctttaattcaacgaatatctactgaacacatactctcgtgttgcaggtgctgcaggtatgagtgcacaggata

SEQ ID NO: 90354 - DNA, 122 bp, Homo sapiens
gttgtgaggctgagatgagacaccactgtgtgcctggcacatacaggagtgaaatcagcgcgaatctccatttcccatcctgtgcaggctccaagctctaaggcttacctgctctctctctg

SEQ ID NO: 90355 - DNA, 122 bp, Homo sapiens
gctggagtgtctgctctggatacagtcgattctgacatcaattaaatatataaccagacacgtgcagtggcggggagggtcccctcacccagggtgcatctccagaaacgccgcctgccctt

SEQ ID NO: 90356 - DNA, 122 bp, Homo sapiens
ggtgtcatcataactcactcatgggccagggccgttcggacatcctgaagtcatttctcacgtgagccgtgtccagctgccagggccgggtggtcctgtgcaggccgtgggtgcggtgtgcg

SEQ ID NO: 90357 - DNA, 122 bp, Homo sapiens
acacggccggagggagcttggccgtggagagagtcctggccggggttcaggtgcaagtcccgggtggaagggcctggcgtgtgtcttcttcctgccgaggcatccacccggaggcctctgtc

SEQ ID NO: 90358 - DNA, 122 bp, Homo sapiens
acctcgtgatctgaccgcctcggcctcccaaagtgctgggattacaggtgtgagccaccgcgcctggcccaataataataattttaacagcctggggaaatgtttatgatattttattattt

SEQ ID NO: 90359 - DNA, 122 bp, Homo sapiens
gaaaggggaggacggtttgtccgcattcagtggcagtggaggtgcatcttctctctcggtcgcaagaaggtggggtggggtggggcggggcggggcggggcggggcggggcggggcggggcg

SEQ ID NO: 90360 - DNA, 122 bp, Homo sapiens
gaaaggggtgacagacgcacctggaaaatcgggtcactcccacccgaatattgcgcttttcggacgggcttaaaaaacggcgcaccaagagattatatcccgcacctggcttggagggtcct

SEQ ID NO: 90361 - DNA, 122 bp, Homo sapiens
tggagggacttgtgcctctctcagtggtagtagaggggctacttcttcctgccacggtcgcgattgagaggcaatgggtggcgagcctacaggggacgtcgtcgaggagacatgggataact

SEQ ID NO: 90362 - DNA, 122 bp, Homo sapiens
aaagggctttgtcaagacttgggaaggcatttcagaaaacccagagcctttgctttccaccggcatttgctttcctgggccagacgagggcccttggggtagcccggagagtcttggggcag

SEQ ID NO: 90363 - DNA, 122 bp, Homo sapiens
agccccttaattgctcacagagaagtcacataggattttcaatccttctgtttatgccaacgcttggaaaagatcactgagttcggatctgtgttgagctaccagactgaatcagagataaa

SEQ ID NO: 90364 - DNA, 122 bp, Homo sapiens
gaggcctttctcaccatcgcgccaaactctcttcgctacagcagctgccgacaccgccgccgttacacgagcttaactacaacgccgctaacagccaatcctcgcgagaggagccgccggaa

SEQ ID NO: 90365 - DNA, 122 bp, Homo sapiens
gagtcctgctcatgggcctggaacgtttcaacgccagttatcccatttaacctccacaatcgccattgcagaggaaacgcaaaaagatttgaatgatttgcctaagtcacgttatcaaatta

SEQ ID NO: 90366 - DNA, 122 bp, Homo sapiens
ttaactgattaactgaagttaattctcactggccagcaaaaagttcggtgaaattagcctcgggagaaactaagatggcaaaggctattttgtgggaggtaagagaagagggagaaacagag

SEQ ID NO: 90367 - DNA, 122 bp, Homo sapiens
agcgcgcgccggcctgggcaggcgagcgggcgcgctcccgccccctctcccctccccgcgcgcccgagcgcgcctccgcccttgcccgccccctgacgctgcctcagctcctcagtgcacag

SEQ ID NO: 90368 - DNA, 122 bp, Homo sapiens
gcagccagatgggctgaaagtggaactcaaggggtttctggcacctacctacctgcttcccgctggggggtggggagttggcccagagtcttaagattggggcagggtggagaggtgggctc

SEQ ID NO: 90369 - DNA, 122 bp, Homo sapiens
cctcgccgtctacagcctgaattttggcaaccgaaaggcagcgccggcgccacgtgcacacgggctgggccgctccgccagctgccagggccactgccgcgctcactcccagagcgcgctgc

SEQ ID NO: 90370 - DNA, 122 bp, Homo sapiens
atgaatagtgatatagtcatacaatgaaatactactctataatacaaagagttattgatacgtgcaaatacatgaataaatctcaaaagcactattttaagcaaaggaaccacacataaaag

SEQ ID NO: 90371 - DNA, 122 bp, Homo sapiens
acatgcctggtgcctgacacagcgggcccacaggctgctcctttagtggccttgtgagttcgatgagcttttggctctaggaagtgcctgggctgctattactctgtgaatctcatgagatt

SEQ ID NO: 90372 - DNA, 122 bp, Homo sapiens
cagggagggggtggggtgcagctgggagagtggcagagccgagaacggagtcacgggagccggtaagcggcgctggaacttcgagcagatctccttccccaacatggcttcagacagccgcc

SEQ ID NO: 90373 - DNA, 122 bp, Homo sapiens
ggcactgggtgcccagtggcctcggcagccgtgtctgcgtgacagaagccgagcgtgggacggctccagctcaggactgtctgagccccaccctgcgagggtgctctgagctctcagggcgt

SEQ ID NO: 90374 - DNA, 122 bp, Homo sapiens
aactcccgctcgatggtggtgggcatggctgcgggagcgagctggcgcgagcagagcctgcgccggcggagaggctcaggccccgcacgatccggggagagcgctggcgctgcggcgcatgc

SEQ ID NO: 90375 - DNA, 122 bp, Homo sapiens
cactgtcagaagacccagcacgggtatgcgaagggaggtctgagagcctcagaaacaacacgtaaaacacacacacgcacacacccccccaaccaaaccaccccgtcctctggggaagaggg

SEQ ID NO: 90376 - DNA, 122 bp, Homo sapiens
gaactgcgtgcctctgccctccctgaaagttgtgaggggtcatctagggtgggtggggcccgggctgaaactcttccacattggggttggggcagcctctgcaggagccgggcggcggcgca

SEQ ID NO: 90377 - DNA, 122 bp, Homo sapiens
agtccagaagcctcagtgttctcatcgtcaggctgggttctgaatggcgcgctgtcgctgcgggacctcggggcctgtaaagatcatgggaaggggcagctgtgccggcagctcctcctcct

SEQ ID NO: 90378 - DNA, 122 bp, Homo sapiens
agaatctggggctatcaggaaggaaggaagaaggtgaagggatgaatcatgagttggccacgggaatcttggtccttactgagtctgattacagcatcaccacatgctttatcctatgagac

SEQ ID NO: 90379 - DNA, 122 bp, Homo sapiens
gtccaaggagaaggaggagcgggcccacctcaaggagccgcccccggcggcgtccaagggcgccccggccaccccccacctagcggacgcccccaaggaggccgagaagaaggtggtgatca

SEQ ID NO: 90380 - DNA, 122 bp, Homo sapiens
atttgtactagaaataaggaactcagcatctcactcaccttagtttgtccttcaccagcccgtctttctctttctgagagcctttgtctccctctcttcatgtccaacaagcagagaaaaat

SEQ ID NO: 90381 - DNA, 122 bp, Homo sapiens
aaaattcactccccagccacctcccgagcctcgggttgggcaagcggccgccgtcttccccgccccgacgcctctcgcggttttccattggctttggctcccctggggtactccttcacata

SEQ ID NO: 90382 - DNA, 122 bp, Homo sapiens
agccgccgccagctgcggaggaattcgggctaactttaaaaaccgctggcgtccctgggccgcctgcccgggccgcactgggcggcctccatcgtcccttccctctacctgcactgccccag

SEQ ID NO: 90383 - DNA, 122 bp, Homo sapiens
cagcctcccgcatgcgccgcgtcagctggggtgagtactcggccggggtcagctcgctgtcgtaggaccccaggatggcccgcataccgtcccgctcctgtggacacagagggcagctgatc

SEQ ID NO: 90384 - DNA, 122 bp, Homo sapiens
cgtgggtacccctggccgtgtgtttgatatgcttaaccggagatacctgtgtgagtaattcggttctccaatcccctgggtcactttgctcttgtgcacgctttccagtctttcagcgtaag

SEQ ID NO: 90385 - DNA, 122 bp, Homo sapiens
tacccttcaggaataaccattgcctgctttttagtgtacatgctttcagggttttctttgcgcagaaatgcattatacaaacatttacatttttataaatattggctgataaccgtatacga

SEQ ID NO: 90386 - DNA, 122 bp, Homo sapiens
agacggacacggacttcagacagtcctgcaggctaactaggagagctctggcaacacggccgttctaagtcttcccggagatttaactcaaggcacacttgtatttacatgtaggctccaca

SEQ ID NO: 90387 - DNA, 122 bp, Homo sapiens
gctccctgctgctgtccccggagggactcggcgctcagggaagctgcggtgtctcagcgtcgccgccgcctctgctgcaactccgccgagccgctgcctgccgctcttcccgcttcagctcc

SEQ ID NO: 90388 - DNA, 122 bp, Homo sapiens
caggcaggggcagagcaggcgttccgagggccagagacccacccaggtgggggtaggggccgcggaagggcggggatggccgcaggggcagggctcaggctgtgggcgcctgaggcttcagc

SEQ ID NO: 90389 - DNA, 122 bp, Homo sapiens
caaatgcgagtcgcgtgtctgaacgtgccctgcccacggtatctctacatttttgaagcacggcctcataaaaggagagctatgataaaacccagcagaaaacacccggaggccttcagtgt

SEQ ID NO: 90390 - DNA, 122 bp, Homo sapiens
tttgtctgaaacgtattggaatttatctaaaacctgaatatctgcagagtcgcatggtggcgctgcaggataagacggtgaaatttttgtaaccgcagatgctctggttttccttaaccatg

SEQ ID NO: 90391 - DNA, 122 bp, Homo sapiens
tgccttatgtcaaagctccctgcctttcttctatcaccatcatctcataaccctgtgggtcgccacagcagggacaacccctgggacacaaagtctcataaccatatagtcgttagaagaga

SEQ ID NO: 90392 - DNA, 122 bp, Homo sapiens
tcaggcgcctgcgagtcccttgaggatttaggccgccctccttggcgggatgactggcaccggtagcctcagagagcccggggtctgcctccacccctaggggtgccgtcggctcctggggt

SEQ ID NO: 90393 - DNA, 122 bp, Homo sapiens
catttatttatttatttattttttaagaggcaggatctcactatgttgctcaagctaggacgcagtggctattcacaggcacaatccaactattgaccaccacggagttttgacctactcca

SEQ ID NO: 90394 - DNA, 122 bp, Homo sapiens
tgcaggctaaccttgccgcgggccgagccctgcctcgccatggaccaggactatgagcggcgcctgcttcgccagatcgtcatccagaatgagaacacgatgccacgcgtgagtgcccccgc

SEQ ID NO: 90395 - DNA, 122 bp, Homo sapiens
agaacctaacaggcctccaggtcccagatgttctgaccagccagcatgtctcgagtgtgacgttaagtccagaacacacgtgaaggacggcacactggtccatctccctggacgtcctttct

SEQ ID NO: 90396 - DNA, 122 bp, Homo sapiens
agggagaggggcagggctgctacaggacatctgtccgtccgtctgtctgtgaagctgcaccggcgattggaccaccctctgcccgcctgttctttccccttcacgccacctgacagccttac

SEQ ID NO: 90397 - DNA, 122 bp, Homo sapiens
gcagcctccagttattcagtggctgattcagggtgagttagaaataacaacacagagccacggaggcccaggcctccacacattcatttatggccaggaaggtcctgagcaggccccattgc

SEQ ID NO: 90398 - DNA, 122 bp, Homo sapiens
aatgtgaggttggaagtggcacttgatctcatcacctaatataaagaggctctgagattgcgccataaacttcctaggtcctatagaatctcagccctgtttgtttttttattcttttaatt

SEQ ID NO: 90399 - DNA, 122 bp, Homo sapiens
ggaggcccagtggggtgtggcaggcaggagagaaggggctggggagcaggcccagccaggcgtagtcaggccccaacctgcccagcaggtgcctcctgcaccaggacttgggggctggggac

SEQ ID NO: 90400 - DNA, 122 bp, Homo sapiens
cttcgagtgggccagccccatcctcgcctttggaagctggtttgtgcagcacagctgtgacggcccttgtatccctgccgagggctttactgaaggaatcttgaggcgacctcactgatcac

SEQ ID NO: 90401 - DNA, 122 bp, Homo sapiens
gttgttttgcagccacccggaggtggcctgtcctatttgcgcttgcattctctctcccctcggatgggcatcgctggagagtggaaaacatctgctacatactcagtgtctctgccacttcc

SEQ ID NO: 90402 - DNA, 122 bp, Homo sapiens
gccacctccctgaccctaggtcgtcggcggcgtctgtccttcccacacccagactgaaaacgctgcacctgagttttgatttggggaagtagaattgtctggtcagagcagaagggttgcaa

SEQ ID NO: 90403 - DNA, 122 bp, Homo sapiens
agcggggtcgtggggagagggcgcgcggggcccagggaacccgtgatggaaaaggaagcccgcagtgggtctgactcttcaagagataaggaagtggtaggaaagtagccttgcgcggtggg

SEQ ID NO: 90404 - DNA, 122 bp, Homo sapiens
tgacacgttttaggaaaagtaaacgtgctactaagttgcacgacttgtcaagaaaagaggcgcttccgagtttgagaattgggagcaaatggagtccgagtggacagaaagacaagaccctg

SEQ ID NO: 90405 - DNA, 122 bp, Homo sapiens
aagtaggggaatagccaacggcgtggtgtcacagaagcccaggagtggagatgaaatattcgcaggaggttatcataatgttaagtgggtgactacatcctacatcctctgtagatggatcc

SEQ ID NO: 90406 - DNA, 122 bp, Homo sapiens
aatcactcgctcttgtcattttggtggagaaggtaatgctgctggaattatggaagagcccgatccacatttacagagccctgcgtgccagagagaaagcaggctcgcgcgcacatgcaggc

SEQ ID NO: 90407 - DNA, 122 bp, Homo sapiens
aatgagggtagcacaggagttagaaccaacttctgtgcaagcgagcactccccgacgcaccggaagttttgaaatatcctgtgggcttcccacaggcaaagtggttttccctccccgcggct

SEQ ID NO: 90408 - DNA, 122 bp, Homo sapiens
ctggctggggcgggagaaaacgcctgcgcggggcggggagaggtaggatttagggcccgacgcttccgattattttaagctgagccacctagtgagcgaggctgtccgaaggctgactctaa

SEQ ID NO: 90409 - DNA, 122 bp, Homo sapiens
ctaatgagacggcccgaggatgccctatggtagttacttttaggcttccacagtgattgtcgcaggcagcattttccctagactaggccggctctgccttcccattttcctctgctcaggca

SEQ ID NO: 90410 - DNA, 122 bp, Homo sapiens
agcggcagagggaggtgcgctcagtggggcggagccaaggtggcccccgcgggaggagggcggggcttcggtcctgcgaggggcgggacctgacttcccgcggcgctgatggggcgggatga

SEQ ID NO: 90411 - DNA, 122 bp, Homo sapiens
tgcctgtgttcctcctcatgtcttctgcaggctcctccaggcctctccctggtcctcgcacgtgggcccggcatctcagagccagagctggcacagcttcaaatcgcttcccttcctgccac

SEQ ID NO: 90412 - DNA, 122 bp, Homo sapiens
cacctccctggcccgtgcaggtggcctggccgtggttctgcacgggccgccgcgtttaggcggcactgcagctaatgacaccccgcagcgtgtgcctggctggccgcccgagatgtgcctgc

SEQ ID NO: 90413 - DNA, 122 bp, Homo sapiens
gacccaggtcagcacaagggtttgtatggacaagctgcacctcgcaggggacctggaagtcgcctaaactactccagcaggacactcgtcgaagtcctgcgttttcttttaaatgctttttt

SEQ ID NO: 90414 - DNA, 122 bp, Homo sapiens
tgggaacggctgagcctgtgtttcagggcagcatcgtgcaccgagcaggaaggctgcttccggcagtgtggagccggcggtggagggcagggttagggcctgttctccagctggccatgctt

SEQ ID NO: 90415 - DNA, 122 bp, Homo sapiens
caccacacatctattagaatggccaaaaccaagagcaccagcagcatcaaatgctgctgacggagaggagcaagaggaactcttgtatgttgctggtgggaatgcaaaatggtgcaaccact

SEQ ID NO: 90416 - DNA, 122 bp, Homo sapiens
cttagattcagttctccacatagattcagttctccacatttcggaggaagcaacttaccacggtggagacaattcagttagtgcatttgcctcacttgtatcctgcccaccttaactatcgc

SEQ ID NO: 90417 - DNA, 122 bp, Homo sapiens
tgcttcacggcgcccagtcccatcaaacgcccaaacactgagaagtgtaggcgtccggcgcggggttgacaggcagctccacctgcagccctgataagagatccactaggtgagactagctg

SEQ ID NO: 90418 - DNA, 122 bp, Homo sapiens
ggcggctccgggaaccttgggggagggccgccagaactcaacccaggacgcaagagctcacgctcccggcctgggcgcacgcttaggatccggattcctacttccagggctggtcctgcctg

SEQ ID NO: 90419 - DNA, 122 bp, Homo sapiens
cggctgcatcttcaagaacttcaacctctttctcgccctcatcatctgcaatgccatcatcgaccccctcatctacgccttccacagccaggagctccgcaggacgctcaaggaggtgctga

SEQ ID NO: 90420 - DNA, 122 bp, Homo sapiens
aatctcatgcggggtcattcctgcggtgaggcccgcccatatggccagtgactgctgccccggggcccacccttgccttgccgcaggcagctcacatgtgaatgccggtctttgcttatgga

SEQ ID NO: 90421 - DNA, 122 bp, Homo sapiens
attagtgttcttcttcctatattcccatgataataaagaatgtttacagagtgcttaatgcgtgccagaaattgtcctaagctctttacacacattagctaatttaatcctcacaacattcc

SEQ ID NO: 90422 - DNA, 122 bp, Homo sapiens
tgggaaagtgcatttgggttatccaaccgtggaggccaatgttcagataacccactgaagcgggtgcccaggacatggttgacgctgagctgggggctatcataggtgaggtctgtgtaaac

SEQ ID NO: 90423 - DNA, 122 bp, Homo sapiens
cgttggggatccagcgtgaaccagacaaggcccgcattcggagaaaccagcaaataagcccggagagatgaaatgccagggatgggcagggattccaagccgggcttgaacccaggtcttcg

SEQ ID NO: 90424 - DNA, 122 bp, Homo sapiens
agccgtcgccgcgcttgtcaaggggctgggaaccatccctgctctcccatatgttgctaacggggtggcgtctggcgcggggatcccgctgcggccccgtagtacgttcgctttctgtttcc

SEQ ID NO: 90425 - DNA, 122 bp, Homo sapiens
ctcagttttgcattttttttcaggtagaagagattatctgcaatatggaatttgcacattcgtattgtcttctcctgggaagttgcctagacacatgccccaatttggaagtccttttgtaa

SEQ ID NO: 90426 - DNA, 122 bp, Homo sapiens
ctgaacccaaaataaaagtaaaaaataataataataaaaataaagcgaagccccacggggcgagcatgaaatctgggagctcagccatttccctggaggtggctgggtgggcggtgggagtg

SEQ ID NO: 90427 - DNA, 122 bp, Homo sapiens
tcccctcgtccccaagaccacttgctgaccctgctccccgctccagccgcaagacggccccgtccagacacacggaggtgaataagtcatcaaaccacttggaaaaataaaatcgcacagag

SEQ ID NO: 90428 - DNA, 122 bp, Homo sapiens
cctctgatttgctctaccaactccacaccccacctgcagccacataaccttccatgatcacggccatgcacaacacaccatgtcccccaggcaaggggaccttagaaacataaccaggcttg

SEQ ID NO: 90429 - DNA, 122 bp, Homo sapiens
gcacagcagccgccctgggccccggcagacacgacagaatgggtttccttacacaaaccgcgcttggcagatgttgcctgaaagacaggaactccgaaattccaacagaacggccagcgggt

SEQ ID NO: 90430 - DNA, 122 bp, Homo sapiens
cctggggatgagcgcatgcgtgtgaggtggctgaggctgggcccctgcccgcgtgcgtgccggtgtgcaccgtgtctgtgtgtgcacacccagtactgacaggcttcctttctgattccccc

SEQ ID NO: 90431 - DNA, 122 bp, Homo sapiens
ttgaggctgcccctgcggattgcacggctaatgcagaaggctagaaagaaggacccgaaacgcccaccaaactataaattaaggcgaagatctcaggagcaatgtgcctggtgcccggcgtc

SEQ ID NO: 90432 - DNA, 122 bp, Homo sapiens
accctattccgcgaacgtttgctgagcggcatccaggcctcagggaccaagtgtgtcgcgcggtgccataccgtgaccgggacctgttatttctaatgtccagatattgtaattctatgctg

SEQ ID NO: 90433 - DNA, 122 bp, Homo sapiens
ccatccatccctatcccgcttcccagatccaacgctctccgcaaaattttacccactagacgacaaagtaggcaaacttacctctaaacgaaccccagaatggcggccgcccgctcgggtgg

SEQ ID NO: 90434 - DNA, 122 bp, Homo sapiens
acctcctgggctcaagcgatcctcccacctctgcctctggagtagctgggactacaggcacgcacccctatacctggctggtttttaaatagttttgtagagacaaggtcttgatatattgc

SEQ ID NO: 90435 - DNA, 122 bp, Homo sapiens
cagaaggtggcagtggagggaagaatcacatttaaaatgcaaggagagacttcctccctgcggtgtagctctgaccccctagaccatgcgctgagaatagttaagctctcccacatttatgc

SEQ ID NO: 90436 - DNA, 122 bp, Homo sapiens
aacactaactcaggcttctagtggtctgatgagcttaaaaatcaattaataagccgggcgcggtggctcaaacctgtaatcccagcactttgggaggccgaggcgggcggatcacgaggtca

SEQ ID NO: 90437 - DNA, 122 bp, Homo sapiens
cgcgctcagccgggtgaacctggaactgtgttcctggcccagcgctttcataaaagggcgcggaatagtaagtcctagttcaaggaataaacacggatccccactggccatgccgggactga

SEQ ID NO: 90438 - DNA, 122 bp, Homo sapiens
ctacttgattaaagcacaaaggccataactatggtcagcagcagggtggaaaatacattgcgctgggggctgcatgaagggaggacctaaaatgcaacagcggtaggtggggaggatgcagt

SEQ ID NO: 90439 - DNA, 122 bp, Homo sapiens
gcacctcccagaatgtggcctgggatgctgccttttcttatgcttggaaggaccagaaaacgctaatttagttgtttctttccctctttttttttttttttttttttttttttttaaaaaaa

SEQ ID NO: 90440 - DNA, 122 bp, Homo sapiens
taaggaagaaaaggaagtggtaaactctgaagatagaacctcaattcccttgctgagtgacgcggtcaatgagcaccaatcgcctacgggaggccagaaaaggctgcgtggtgctcccctct

SEQ ID NO: 90441 - DNA, 122 bp, Homo sapiens
aggactccggccagtatgagtcccgggggcggcggcggggctcaggccctgggtctgccccgcggtgtgaccccggccggtgccttggttttcctggccttcatgtcctcctatgtaaacgc

SEQ ID NO: 90442 - DNA, 122 bp, Homo sapiens
cctgtctcccggaactggtgggcaggaggcattgaggtttgacggaacctcagaggtcaacggtgtcatcttttcagcccaaacacttacaggtgatattaataatcagtcacgtgggggct

SEQ ID NO: 90443 - DNA, 122 bp, Homo sapiens
acctcaggtgatccacccaccttggccttacaaagtgctgggattacaggcatgagccaccgtgcctgggctgtttgtgagattcttctgtggggatctgtatagctgtaactcactcatgt

SEQ ID NO: 90444 - DNA, 122 bp, Homo sapiens
ctccagctgggagaagaccaagtccaccgccagcgtgaagggcagcaccagagtgtgagtcggggcgtcgtagcgcagctgcagcagcacccgggcgcgtccggggctgtgggagccgaagt

SEQ ID NO: 90445 - DNA, 122 bp, Homo sapiens
ccccatttccccaccttcctagccccagacgggtcctttccttctaaacacatatgaactcgcctagccacctgcttgggttgctggtggtagggccaaaatgggcatctggggtttacgaa

SEQ ID NO: 90446 - DNA, 122 bp, Homo sapiens
gccaggcaccctgctcacctctggctatgcacggctccccatggagtgcgggcaatgacccggagggggtctgggaagaaaaggccttgtgttccagttcacaccccagtgccccctcggcc

SEQ ID NO: 90447 - DNA, 122 bp, Homo sapiens
tcaatcaagtgtggttggccacttactgagtctcttcacagagccagacctgagagtatccgtaattgttaccctaacctcagggagctgcattttcctctactgaaaattgaatacaatgc

SEQ ID NO: 90448 - DNA, 122 bp, Homo sapiens
tgggcctcaagcacttcacaacatgattattttattcctaacggtcagtagcgaataagacgtaaaatgacatagttctgctgtgggtaaactcaaggttttaaaaaggaaaaacttcattg

SEQ ID NO: 90449 - DNA, 122 bp, Homo sapiens
ggccaagctgacaccagccctgagctctccctgagatgaacttctcaggctggggatggtcgtgttaggttcatgccatccccaccactccaccaacctgggtccatgggcaggtcctgcta

SEQ ID NO: 90450 - DNA, 122 bp, Homo sapiens
cttccccagcgaggcccccaggaagcgggcgccgcggagccgggggaaggagagcgaaaccggcaaagatcaatcagaaggaccaacctgacactctccatgtagccgccaggcgcgcggag

SEQ ID NO: 90451 - DNA, 122 bp, Homo sapiens
atttgaggatggatgcggacacccgggcctgaggcagctcgcggccttgaccgaattccacgcgagctgaagcccagggatatcccagaatcttcctcaggatcaatcttccgcctttcacc

SEQ ID NO: 90452 - DNA, 122 bp, Homo sapiens
aaagatcgttaaaaagccgccaaagtttgcaactcgtcttgagtggctgctcctcccaaacggttctgcctctggtgtcttgttctaggagcggttgaattctctgttttgctgtgggtgcc

SEQ ID NO: 90453 - DNA, 122 bp, Homo sapiens
gaagcgtaattgaagggggttcccgggaaaggtcatgggagagcccttgaggggcgcgtgcgcggcagaggggcactccgagtagccgcggcggccgaggccttgggcctagacgggcggat

SEQ ID NO: 90454 - DNA, 122 bp, Homo sapiens
gccatgaggcctgtacatgtgggtttatctggaggctgccatgacacctggtacgagtagcgacaacaaaaagagggcaggagacaccatattgaatttacctggcttccaggtacagctgc

SEQ ID NO: 90455 - DNA, 122 bp, Homo sapiens
tgtgttggggcggttgcgcccccttccgcagagtccccacggcctcccagcccggagcagcgggagccccaagtttgccatgaagaccaggcaggctttctatctgcacacgacgaagctga

SEQ ID NO: 90456 - DNA, 122 bp, Homo sapiens
ctattaatactaagtcagtaataacctccctacttcttcttctctccttacaacacaaggcgttgtaagcccatgtgtccaaacgaagggaaagagtagtcattcactccgcggggcagcgt

SEQ ID NO: 90457 - DNA, 122 bp, Homo sapiens
atgtggtgttagggactccgcccccttcctccatgtgtgttggttgactttttgagcatacgtatccttacagtgaaaacaggaaacagagaacaagctgctctgtaaagcgtttctgcaag

SEQ ID NO: 90458 - DNA, 122 bp, Homo sapiens
cggagtagacgctcaagtttttcaccgtggcgtgcacagccaatcaggacccgcagtgcgcgcaccacaccaggttcacctgctacgggcagaatcaaggtggacagcttctgagcaggagc

SEQ ID NO: 90459 - DNA, 122 bp, Homo sapiens
tctctaacatgagttgcagaactttaaaaaaggagccaggattcctgttctttttctcaacgttgtggattaactggggtcctgaaatgatatcattaaaatgttaaacctgtgaccatttt

SEQ ID NO: 90460 - DNA, 122 bp, Homo sapiens
aaaaccagattgacttatttttcaattcaattgttagagagacacaatctcatactccgtcggtcaccctggccacaggtactacagactacagcctgctttctccccattggtccccacat

SEQ ID NO: 90461 - DNA, 122 bp, Homo sapiens
caggtgagaatagcgtaggtacaggccgccagggaggaagaaacttggaactttcaaagacgtaaagaaaaattcggagcgagtctcactcgctgtggtccaacaggcaagtcctggcgggt

SEQ ID NO: 90462 - DNA, 122 bp, Homo sapiens
ttctttgcaaatgaaataattgtagcaccaaatcccatgctgcccaaggacctccgacgccgactcccaggcaggtgggcccccgaggcccccgcgtgtgtttcatcagcacctgcagctcc

SEQ ID NO: 90463 - DNA, 122 bp, Homo sapiens
cgaactcctgacctcaggtgatctgcctacctcggcttcccaaagtgctgggattacaggcgtgagccattcaaccagagcacgacccaactttgcctttttgactctagatttctactttt

SEQ ID NO: 90464 - DNA, 122 bp, Homo sapiens
aggtgggaggatcgcttgagcccaggaggcagaggttgcagtgagctgagatcatgcccacggaattccaggttcagtgacagctagaacccatctcaaaagaagaaaaaaaaatctttggc

SEQ ID NO: 90465 - DNA, 122 bp, Homo sapiens
gcgattctggagatgcaagagaggcatgaaacaaaacaaagtccaagaaacgcggacaaccgggttaccgctggatctttcgctttcccaacgggaagaccaatgtcgaaactagactgcgt

SEQ ID NO: 90466 - DNA, 122 bp, Homo sapiens
cacttagatgctcagtaaatgctccaggaaactgcagcacaaggaataatgaacttggagcggggaagagctggctttgtcccgggagagctcgggcaagaggcctcgcatgtctgtgcctc

SEQ ID NO: 90467 - DNA, 122 bp, Homo sapiens
gaaaggagttacacacccctccaggaggccacccctacccccaagcagtttgttttggtccgaaaatgacaaaggagactggacttcagccatatggctgctggtttggggcagacctgttc

SEQ ID NO: 90468 - DNA, 122 bp, Homo sapiens
tagtagatgaaggcacagacatgctgttttcacagcctgcagacaagtcaaagctgctgtcgttcaaatctgtcaatcttctaccttctgttgagtgtgctttcttgtcctgaagcacatga

SEQ ID NO: 90469 - DNA, 122 bp, Homo sapiens
aggaccccatttaacaaatgggggagtatttagcccatgccaagctcccaaggcgtggggcgctcctggagttcaagatctagcagctgctagtaggccctgaactatgggggctggatatc

SEQ ID NO: 90470 - DNA, 122 bp, Homo sapiens
tctccttcctctgtcagttcaacagaatatccacacccagctcagtgcctgccccatgctcggacgtcctccagcggtgctccccaactacttagcctgttacaaggcgaggctcggggtct

SEQ ID NO: 90471 - DNA, 122 bp, Homo sapiens
gccaatcagcgcgctggctgttccgggctgagtggcacgagcttattagtatgcagggcccgtggctcgccgcgccaggctgcaggtttgagagccgctctggatgggctcgctagagtcgt

SEQ ID NO: 90472 - DNA, 122 bp, Homo sapiens
aacgggttttctgccacacaactggggtatatagggaagtctttggccagaactgtgggccgtactgcattcttcccgtgtctgtcactgctgagtcgtgagcttgatctcttttcttagtg

SEQ ID NO: 90473 - DNA, 122 bp, Homo sapiens
tttctcatgtactgaattgctgttggtttgaagactgcaaggggagagtgaaaattatatcggttcctcaattggtgttggctataggtcttgcacaatttctaaccaaaggctggagtata

SEQ ID NO: 90474 - DNA, 122 bp, Homo sapiens
tgggaagcgctcaagccccgcccacagagtgacgtcaggtggcggtattgctacttaaggcgtcgtggcctcccctgccccgccttagctcccgcgctagagagaaacatgtatcgttttcg

SEQ ID NO: 90475 - DNA, 122 bp, Homo sapiens
ttcttgaagtcagtgagaccaagaacccactggaaggaaccaactctggacacagcaggacgtgagacttctagtgctcactcagaatcatttctgcaccaaccatggccatctttgtggag

SEQ ID NO: 90476 - DNA, 122 bp, Homo sapiens
agaggtgctgcgccaccggaagcagcacgtgtgagctgggccaggagccctgcccacctccgtgcagctgacctgccctccagcccaggactaggggcaggactcttgcctgaacccccagc

SEQ ID NO: 90477 - DNA, 122 bp, Homo sapiens
acatggagcctgccagctccgtcagccctgactcggcccggagctgagctccccacctgccggtagcccaggagatggagcagcccagcccacgtgcccggccttccgcccctgacttcact

SEQ ID NO: 90478 - DNA, 122 bp, Homo sapiens
tgatggtcttgacttgctcgtgcaggtagtggctctccaggaagtggcacagctgggggtcgcccttctccacggccagctggtacagatccagcaggctctggttgacgttcttctccagg

SEQ ID NO: 90479 - DNA, 122 bp, Homo sapiens
cttcccccaccaaaaactaaaaggctctcggggcctcccgagatctgcccccttccccaccgcgggcaaaaaacagatttggcgtttccgctttctcgcttgtgttgggatccaggaaccgg

SEQ ID NO: 90480 - DNA, 122 bp, Homo sapiens
gggcagggcgctgaatggcccgcccagctgcacgcatggctgcgtcttctgtgtgccctgcgtctttaagagaaaaggagggacctctcaggaagtggcggggcatctgctcccgcaggaga

SEQ ID NO: 90481 - DNA, 122 bp, Homo sapiens
agctggctttaagttggggttcctgcaaccccctctttggatttgattaatttgctgaagcgactcacagaactcaggagaacacttacttatgtttattataagggatattacgaaggata

SEQ ID NO: 90482 - DNA, 122 bp, Homo sapiens
tgaggatgcgccccaggcgttctgccctggctcccagccgcctcccggtgctccggggttcggcctcacacacctgtcgaccgcgtcggcccagctgcggcccaagcctgtgggactccggg

SEQ ID NO: 90483 - DNA, 122 bp, Homo sapiens
ctccacccgtttgccccgtgcccacagcgttggtgccacaggcagcgttacatgaggctccggccgctgctggccaggtctcctgcccacagctggaccttggaactccgccccttaggccc

SEQ ID NO: 90484 - DNA, 122 bp, Homo sapiens
gcgcctcctccgcggcccgggcccccatcccgcggctcgcgcggccaggacgccccaggtcggagcctgcccccaccccgcacccggaggccagcagcccagtcccctaggccgcgcagcgc

SEQ ID NO: 90485 - DNA, 122 bp, Homo sapiens
atggataattacttcccttaatgctgtttcccctgaaggttaaccctgttcaacaagacacgattgaatcttgcctctcacggttgggtggggctggagtggggggaagggtctgcatccgt

SEQ ID NO: 90486 - DNA, 122 bp, Homo sapiens
ctcagacgtgaagaccttaccccgctatgtcgtcgaccccggagaccggaagtggactggcgcggtggccgctgggaaatacagtcccgaacagaaaaagcctcagaagccttgagctgtga

SEQ ID NO: 90487 - DNA, 122 bp, Homo sapiens
gataataatgttattctttaaaacatacactttttctcttaagaaaactgttctcgcaatcgtcaaaattaaaaaagaaaaacttataataaaggtcttagatagctcaaaatctacccata

SEQ ID NO: 90488 - DNA, 122 bp, Homo sapiens
ttaccagggcggagttttttcccactctagtaagcctgagggtactgtaggagaccagggcgtatctcagtccttatctcaaccgcataagacagacattcccagagcggccgtttatagac

SEQ ID NO: 90489 - DNA, 122 bp, Homo sapiens
ccacaggtcacgatgagtaagcactgcattgacacaggcttctccatctccatgtcaggacgtgcactcgccgatgaagtgtccacccaagatggcgacgggtgagcacgggcacgtgtggc

SEQ ID NO: 90490 - DNA, 122 bp, Homo sapiens
actcagctcaggtgtcaccacctccaggaagacctccacactccacactgagtcaggtcacgccctctgcctctgtgcagaatgcagagcttgaatcacagggccatgaaatgaaccagcaa

SEQ ID NO: 90491 - DNA, 122 bp, Homo sapiens
tgcagagtaaagtgccttggccgaccagtgtgtgtgccacagcgaagacggcgacagtagcgttgctgcgtgaggggcagggacggcctctgggagaggaaagttaagttctgtggtaaagg

SEQ ID NO: 90492 - DNA, 122 bp, Homo sapiens
ggttttccagcctccttccttcccgtcccaggcttgggaaagcctctctactggccaaggcgcgcagggacaggtcgggaagggcctgcgcccgtggcatcccagcccaggctgtagagccg

SEQ ID NO: 90493 - DNA, 122 bp, Homo sapiens
cacccccagctcccaggcctccctggaagaggctggttctgtccccagatgcttctggaacgtccttttaacccctgtctctcaggtccctgagccaggagactggctacacccttttcctc

SEQ ID NO: 90494 - DNA, 122 bp, Homo sapiens
cagcgccccctatctctgtggaggacaggccggctccagagatcgctgcagttggcggagcgcctgcaggagtccggtcgttcattaggcacccaagagcaggcgacgctgcgcttctgcac

SEQ ID NO: 90495 - DNA, 122 bp, Homo sapiens
gcgaggcgcgacctcgtgagcgacggatgggctggctaattggcgcccagataggagggccggggcctgtggcaccgcccccctaagctttgctgattggctgaggcggaagagggtggtcc

SEQ ID NO: 90496 - DNA, 122 bp, Homo sapiens
aaaccgctgaattacagccccttcagccaatcctcgcccagccccagcctggccgaggcacgccgtcatgcataattcatgaaaggccagctcgttcggccacccagaggtcccagtgcgtg

SEQ ID NO: 90497 - DNA, 122 bp, Homo sapiens
gggcaaatcctgacatacccaggcagggagtcctgggcctacccaggtccccaaaggccacgccccttttttctccttcttggggaggagccgtgggctttggaacaaggcccttgggtcaa

SEQ ID NO: 90498 - DNA, 122 bp, Homo sapiens
tgtttgttctcccctgcctcttcccttcagggtctctcttggtcacttctcatgtttctgcgtccctgtcggtcactccctctgtccctctgtgttcctgtgtctggggctcagcccctccc

SEQ ID NO: 90499 - DNA, 122 bp, Homo sapiens
ctgcaatacagagctggaaaagaccggcaccatcttatccacttagcactccatgggcttcgaagcctgtccggtgccatgttaattacgggcactgggcagccattttcccgctcctcatc

SEQ ID NO: 90500 - DNA, 122 bp, Homo sapiens
cagtggtgggagcagatgctgaaatccccgggagcactttggactgtgccctgggagaggcgggaaccaagcctgagagcagagtactggcagctgcacgttggaatgtgaagcctggacac

SEQ ID NO: 90501 - DNA, 122 bp, Homo sapiens
cataggtggctacatgctccggtcaggtgccaccactttactgcctcaaggagaacaaagcgctaaacaaatgcaagatcacagcagctggtctcagcatccaagtgggatgtagatccaca

SEQ ID NO: 90502 - DNA, 122 bp, Homo sapiens
gcccacaccttcgtctctgcatctgttcgtccattcccatcacagttgctgagcgtcggccgccactcccagggccagcagggccctgccactgtcagggtgtaggtgtgcggcaccaagac

SEQ ID NO: 90503 - DNA, 122 bp, Homo sapiens
accactctcccaactccagaatgagatccgcggcggcccggcgagggggttctggggaggcgcaccccaggctggctaccctgagcccaggcccaaggctgcccctctaggccccagcaccc

SEQ ID NO: 90504 - DNA, 122 bp, Homo sapiens
tccctggccgcgtctccgctagggtggcctgcgctttcacgccgtcgcacgttcggatcccgagttgaagtggttgggagttcttggcatcctcttgtgaatgggtcccccccccgatgttt

SEQ ID NO: 90505 - DNA, 122 bp, Homo sapiens
gaattgtcccacccaaatgccactgaagccctttttgagatgcatggagtaaaaagaagacgaatgtcagaattttgacaaagaaacatttaaggagcctgtgggttggaacagaaatgagt

SEQ ID NO: 90506 - DNA, 122 bp, Homo sapiens
cccccttgtcctgggctgatgaggccccaagtaatcctgacccctagtcctgggctgatccggcccccgtccccgtccctgtaccccgcgtcctgggctgacctggccgggcccccactcac

SEQ ID NO: 90507 - DNA, 122 bp, Homo sapiens
agccttccagaaaacccgagaaatctgtggcacacatggtgcaaaccacactttattatgcgtgctactacccagcgacgtgtgagcctcttgtcactcccctctgccaccaggaatgacga

SEQ ID NO: 90508 - DNA, 122 bp, Homo sapiens
tcacggtgacagcacgggatcacgacccagacacagactcacggtgacagcacgggatcacgacccagacagactcacggtgacagcacgggatcacgacccagacagactcacggtgacag

SEQ ID NO: 90509 - DNA, 122 bp, Homo sapiens
gtgctctgctgcctccaaagctggccccacttcccccgaagggtgttaatcactagtccacgctgctcccaaggagcgcgaaccacccggccccgcccgcctcccatgcgcgcgcgcgtccc

SEQ ID NO: 90510 - DNA, 122 bp, Homo sapiens
atgccgcctgccaggatgcgctgtgggcgctggacagcctcggccaggtgttcatcaggacgctctccaagagctgccccacgggcatgcactggaccaggctggacctctcccagctaggt

SEQ ID NO: 90511 - DNA, 122 bp, Homo sapiens
taaccattcagtatctacgaacattgatcccacctaacaccaaatgggactcccaaatagcgtttgttgtttatagcatgctatatgtcgacatccacactcagaatcaagtctgcagcaag

SEQ ID NO: 90512 - DNA, 122 bp, Homo sapiens
cagctgggaccagacaagcatgcccgggacgttccctcccttgacaagtacgccgaggagcgatgggaggtaagcacttgggagtgtgtgtgtctctgcttgtgcttctacttcccatggcc

SEQ ID NO: 90513 - DNA, 122 bp, Homo sapiens
acctgcctccctccctccttatcgccatgggcttatccaatcatttcttcacggaacacacgtgggccaacgctgaccgggctctgtgccaggaacccgcaaggcgctgcttgttcatctcc

SEQ ID NO: 90514 - DNA, 122 bp, Homo sapiens
ctcctgagctgcagtttcacaataaggcaagcccagcatcactgcatctgttattaaaatcgaggcgaggtgaggaacattgtccactgtggtatgcgagctccctgcctagtcttatgtaa

SEQ ID NO: 90515 - DNA, 122 bp, Homo sapiens
gatctttggggggttctctgagagctctttgtcttggtacttactggtattccccctcaacgcattttagggtatagcttctaataagtaaagctggaatccatttctccatctgtgttagt

SEQ ID NO: 90516 - DNA, 122 bp, Homo sapiens
ggaagaaagtacacaaggtacatggagggtacacagggaaagtacatggataaacatggacgtgtgcaaataggaaagacatgactcagcatgctagacaaattgcacatgcctacccaaac

SEQ ID NO: 90517 - DNA, 122 bp, Homo sapiens
gtgggaggtctggggtgtggtccctgccgagctcagcccccgccttcttgccggcagctacgtgcgccaggggctgttgtcggccgtctcctccgtcctgctcagcctgcctgctgcgcgcc

SEQ ID NO: 90518 - DNA, 122 bp, Homo sapiens
ctgactcacattcccagcattcccgaggagccgctaggggggacggggctggggcccgggcgcctccgctgggggcagcagaaagcgcccggcatgggcgggggtcttcgcagcgcctcctc

SEQ ID NO: 90519 - DNA, 122 bp, Homo sapiens
gaccaacatgagagacgccaagagccaatgtctgtccagccgtgagccaagggcagactccgcaggaggccacggtcacatagagcactcgaagggtgactccaggaaagacagaatggtgc

SEQ ID NO: 90520 - DNA, 122 bp, Homo sapiens
cccgccgaatccttacccgctcccgcttcggtgatggccgcaaaagggaagagaactacacgctgcttccggttctgtaagtttaccaaagatctcgcgagacctatgtctctcggagcgag

SEQ ID NO: 90521 - DNA, 122 bp, Homo sapiens
caaggagcgtcttctgtcagcgtagtctgcatctaggctttctggagcatcttccagggtcgctccagagaccccccagactactgaatctgaatccttagagtggtccaaccttcctcttc

SEQ ID NO: 90522 - DNA, 122 bp, Homo sapiens
ggaactcctggggtcaagcggtcttcccacctaagcctctccgtgctgggactccggacgcgctccacctcacgcagccgtattcctgctttcaaagcagatggaagaggtgcgccaggacc

SEQ ID NO: 90523 - DNA, 122 bp, Homo sapiens
cctggagaaagctcctctctcccctggaaggcggcgggcccggaacgcttggtgggagagcgaggaggaaacgcggagaactcaggccacttctcctgggtcccacgtcccctcccgtcacc

SEQ ID NO: 90524 - DNA, 122 bp, Homo sapiens
ggagcggacgagggccacagccccccacccgccagggagcccaggtgctcggcgtctgaacgtctcaaagggccacagcgacaatgacagctgacaaggagaagaaaaggtaagcgggcgtc

SEQ ID NO: 90525 - DNA, 122 bp, Homo sapiens
cataataaatgaagacaaagtgccggcggcatagaccatctctcccactgcaccactggccgctgccagcttcattattcgcttaagttgccggagagaattacttaaccctgacccgtgta

SEQ ID NO: 90526 - DNA, 122 bp, Homo sapiens
ggagcaccgcccctaaaagcgacttcaaagggccggtgtcgacagctgggtttgggtccgcggcctgcagatccaaggcccgagcaggatccaggccgtcggggccgtccgaacgcggggat

SEQ ID NO: 90527 - DNA, 122 bp, Homo sapiens
agtcccggtctccccaccccgccctgttctgcttccagaggccggcgtgggcctgggcatcggcctgtgcagcgttccctacttccaatgcatctctggcattttcgtccacacgctgtcac

SEQ ID NO: 90528 - DNA, 122 bp, Homo sapiens
ccgggaagaacctgtgtgtgtcaggatgcacgaaaggaatgactcccctctttgcgcccccggggttaactgcacgaccctgtcaaagtcccgccgtggagtgggatgagggtcgagaggta

SEQ ID NO: 90529 - DNA, 122 bp, Homo sapiens
agggagagacagagggagactgattcacagtgaggcagaccaagaccccgagaagaaccacgacaccaagacccagagatggcgacagatacagatggagacacacagcagaggaaatagag

SEQ ID NO: 90530 - DNA, 122 bp, Homo sapiens
tggacgagcggggtgaccctgggtgagcccactccttctctaggcctcagcttccccatccgtataatggggagagtgggtctaggtaatgtctcagggtggtattgtccaggccctgacca

SEQ ID NO: 90531 - DNA, 122 bp, Homo sapiens
gtttatttatggtctgtttctggaatgtccgctcctgggactgggaccatgattttctggcgcagtgcgggtgtctcggcgtccgggatcgggcgggtcgcagtagggctccacatttgttg

SEQ ID NO: 90532 - DNA, 122 bp, Homo sapiens
ctctgctccaggcacaaacgcggcccgagagccggcgccttgcagtcacacacggatccacgcatacagtagagctgtctagatccacattcttgcacaccgccccctcctccccccgcgct

SEQ ID NO: 90533 - DNA, 122 bp, Homo sapiens
gagctctcgagaggcggagcaactcgggctggtagagaattctgggagatgtagtataaccgtcctcagccataagcctgtcccatcgagacgtcgggacaccgaaaactaccattcccgcc

SEQ ID NO: 90534 - DNA, 122 bp, Homo sapiens
agcagcaacagaagctccaggagctgagctcgcagcgcaccaagcacgtggcatgtgttccgtcacctggggacactgagcccagaaagagctccaaccccctgccccgcacgccgctttct

SEQ ID NO: 90535 - DNA, 122 bp, Homo sapiens
ggcttgatcttttgctattttccctaattgcataattgctgcacatggtgtgtctcctggcgagtgccgggtttggctccttcgccgccgcaccccggtggcccgcccggagaagaccttgt

SEQ ID NO: 90536 - DNA, 122 bp, Homo sapiens
aagaaatgtttgagatggatttggtaattaccctaatttgatccttacacaatgtgtgcacgtatcaaaacatcacattgtaccccacaaatatgtaccattctcgtgtcagttttaatttt

SEQ ID NO: 90537 - DNA, 122 bp, Homo sapiens
gagtgcctaatgtgtcccacttactgtgccacgtgcgagggtgcacgtgtcaggcaagatcgctgttccaaggaggctgagaacaagtaaatggtaattaccagttatgaccaaagctgtga

SEQ ID NO: 90538 - DNA, 122 bp, Homo sapiens
aggcctaccccggctatccggtgggcagcggcgtggagggcaccgagacctaccagagcccgcccttcaccgagaccctggacaccagccccaaagggtaccaggtgcccgcctactagcgg

SEQ ID NO: 90539 - DNA, 122 bp, Homo sapiens
tgatcagccccaccctggcctagaccagcagacagagccaggagaagctcagctgcattccgcagcccccacccccaaggttctccaacatcacagcccagcccgcccactgggtaataaaa

SEQ ID NO: 90540 - DNA, 122 bp, Homo sapiens
ctggttctctacctgggggttggtgggggcacgcagagggccagagccccctccccgctccgccctccgccctccaccctcacctgtgtttgacttgctgcttagctgctccttgggatctg

SEQ ID NO: 90541 - DNA, 122 bp, Homo sapiens
gagtgggtggcaagtagaatattgtggttaactcctgggatggagaaagggtaggggaatcgatattattaagagagggatataggagaggcttcagtaatttgcagtttgaatactgcaaa

SEQ ID NO: 90542 - DNA, 122 bp, Homo sapiens
tcgcatccggccttggccttggatgtttatgggtctgtctgtgggtgagcctgtgggtcccggggctcccgaggcctgtgcggctttcaggtctgggggtgctgccggtgcgcctctgtcca

SEQ ID NO: 90543 - DNA, 122 bp, Homo sapiens
ttaggaatgaagaaatgaggcccagtgaggtacatgtacacgtgcacatgtgcatacatgcgtgtgtacttgcctgcctgtgcatccacatatatgtgcgtgtgagcgtgtgtgggcacagg

SEQ ID NO: 90544 - DNA, 122 bp, Homo sapiens
ccagcttctcttttggtcctggtgtgggagaaagggcccgggcccctgtgagaccagctccgggagacccacagctgctgtggcaggactgaagagtgaagggagtctcagagactccggag

SEQ ID NO: 90545 - DNA, 122 bp, Homo sapiens
caaccatggtccggcctctgctggggggccgggccttcgctggttttcttggcccggccgcgcctcccccagggtagggctgccgtgccccgccccggcccccggcccccggcccccggtat

SEQ ID NO: 90546 - DNA, 122 bp, Homo sapiens
tgggctccttgtccttctgcctctcagggtgctgcttgtcagaagacttcctgtgtctgtcggaggcataggcctcccgtccttcctccttctcctggaggccgtccgtcctcggcaagtcg

SEQ ID NO: 90547 - DNA, 122 bp, Homo sapiens
tgaaagaacaagcacattttcagtttgtcttacatatttttcacaaagggcaggtcaccacgaggtacatgggtttgcaattgtgttacactggctgcatttgggagaatttgtctaccagg

SEQ ID NO: 90548 - DNA, 122 bp, Homo sapiens
aacaggttgctaataagtagttgaataaatgtgcagcagatgccatcagtgctcgcccctcgagctacctctttgtcccctctgtcctgactatttgtactcaccacgactttcctttgctg

SEQ ID NO: 90549 - DNA, 122 bp, Homo sapiens
tttggaccccaggcttatgagaaaactcatttggcaattaatcctactctcaccttggaccggttctgcaaagtcccagattcttgtggggagagtgggcgtttcaaaagcgtagagaagct

SEQ ID NO: 90550 - DNA, 122 bp, Homo sapiens
gcgcctgtgcctcgtgtgcggggacattgcctctggctaccactacggcgtggcctcctgcgaggcttgcaaggccttcttcaagaggactatccaaggtgcgtggtgggcctcaaggagcc

SEQ ID NO: 90551 - DNA, 122 bp, Homo sapiens
ttggcttcaggtcacaggactgggcggggtcaagatggacaccaggggtgtggggagggacgtggagcatttacagccaggggcaaagtcctcccctgatttaaacccaggcagcctgcgct

SEQ ID NO: 90552 - DNA, 122 bp, Homo sapiens
tagccagtgaagagccaagaaatgaagagacggtttgagaagacgtaggcggtgggggaacggaaagaggaatcgcgaaactaatattgtccttccaaggacaccgtagggcggatctcgca

SEQ ID NO: 90553 - DNA, 122 bp, Homo sapiens
ggatccctggggaccctacaccagctgagagagcaggtacaatactaaggagcttgggttcgagagtcaggggaccccaggttcaagtcccactgctggcccctttgcccatataacttggt

SEQ ID NO: 90554 - DNA, 122 bp, Homo sapiens
cactcagggaggcgcaatttattctcgagttgcgagtgaggaaattctggctcgtggcttcgattccttcatccgtacaatgggggcgacttgagacggagttcccacacaacgggtgctcg

SEQ ID NO: 90555 - DNA, 122 bp, Homo sapiens
aaaaggggaacatggatttaaaaagattgaggaatttctacaagtttacgatgttacttccggtaggtactgaataagtggtaagtacacaaagaaaagtggcagattcaagttctattgtt

SEQ ID NO: 90556 - DNA, 122 bp, Homo sapiens
cgcctgggcgcccaagctgcagccccaaatttttgggtggattgtggttttggggtggatcgcggatttggggctgcacttgggcgctgcccggcaactccccagcccgctcacactgccag

SEQ ID NO: 90557 - DNA, 122 bp, Homo sapiens
caggggagtcacaggccccgtcctcacagctcccccaaaaaccggccccaggtgagaagacggaagatcgcttactagtgggagctctgccaaaagttccctgccatggaacacagcttgcc

SEQ ID NO: 90558 - DNA, 122 bp, Homo sapiens
tggtgtcgggtttctagcgaagccaatcggcgtcgctggggtccctgttccagaagtccccgcgaacccattgggactcagattctccccagacgccgaggatggggtcatggcgtcccgaa

SEQ ID NO: 90559 - DNA, 122 bp, Homo sapiens
gctgatgcccttaggaggtactggttgaggaatgtattaaagtcaataggaaatggggagcgactgtgtacttgatagttcataaacgttcttgaagaaataaataggggaatgatggatga

SEQ ID NO: 90560 - DNA, 122 bp, Homo sapiens
gcttcaacccacccatggcagtgtctaggggtgagtgtttacaggccctgaagccccagtcgttgtgggttacaggatgctcttttagtttgcctataggtggattgtgttaaccagttcaa

SEQ ID NO: 90561 - DNA, 122 bp, Homo sapiens
cacatccatgccgtgttttagtttgtgcctcagctgctggctacagcttcccgggggagccgggtaccacccgggcctggagacatgaggaggcagggatgtgaggggcgggggacaggaca

SEQ ID NO: 90562 - DNA, 122 bp, Homo sapiens
taatgtttggtggtagaatctttcatggggtctgtgggggaaaagtcaggaagagagacacgtggcagggaactgctgtccacatcagtgggtgtgaaggtcctaaaggattccacctaaat

SEQ ID NO: 90563 - DNA, 122 bp, Homo sapiens
tcatcatcaaaagggggaaaacgcatcctcttgaaatgcctcctatctcttttttctcggcgcatcataatccacattgacctggaaggcaagacatcacacaaccatttctacccactgcc

SEQ ID NO: 90564 - DNA, 122 bp, Homo sapiens
gcgccgcgccccacccccaccccgtctcaccccaacccccagcccggctcacctgccgcccgcgtctccatggcaacgccccaccgcggaggaaaaaaaagcctcgggctcttccgggcccc

SEQ ID NO: 90565 - DNA, 122 bp, Homo sapiens
gtgtgggcgccgttccccccgggggtgcctcgggcgcgtcccgcccccagccgccgtggccgcccctgatggaacccctcccgcctcgggcccgcgcctcggcctcctggcggcccctgcgc

SEQ ID NO: 90566 - DNA, 122 bp, Homo sapiens
catggataaacaacaaaatggatagagctgcaaaactaattgtcaacttggaagaccaggcggaggaaatctttcagaagagataagaaaataacaaagacgtataaaatataaagaaaaaa

SEQ ID NO: 90567 - DNA, 122 bp, Homo sapiens
gaccgcaggcagccaggagccaggtgcccctgaagcagccttgcctgagaagggcatccccggtgcagtctgccccagggatccaggcccccaccaggtgcctcccccaatgcctgccccgg

SEQ ID NO: 90568 - DNA, 122 bp, Homo sapiens
atgtttaccagagcagcaaaggacctatttatagcctcagctgctgctttctctggctcacggtggcgggggcagggtggctcctcagagcaagggaggtagtcgggtcgagggaacctggc

SEQ ID NO: 90569 - DNA, 122 bp, Homo sapiens
tgtgggttctatttacaccgttatgagaaaaacctgtggcggagtaaaactcggtaactccgctcgcagaccgcccatctacagcagtgagcgaacccaaaccccacacggccaagtcccgc

SEQ ID NO: 90570 - DNA, 122 bp, Homo sapiens
acttgctggtctaatttaggaacaattgggccgaaaggtatcagcgagagcaacagaccccggtgttgtgccgcacagggagccgcatccgcagacgcccctcgctgcccctgggctcgggc

SEQ ID NO: 90571 - DNA, 122 bp, Homo sapiens
tcagcccaccgtggtccccaactcatctgcatctggaacccaaacctccggcgcgaggcccgccttgggaagcactagggatctaaaggcagcgaccggagtcaaagaaatccccaaaccca

SEQ ID NO: 90572 - DNA, 122 bp, Homo sapiens
ggcattagttagggatatagtaaagttacttctagtcttttaattggcttctgcccttggcgctgtttgagcaaagagaagagaccctcatagagaactctaaggacaaaaaaacttacttt

SEQ ID NO: 90573 - DNA, 122 bp, Homo sapiens
ctcaatctattagttccctcaagagccggttatttaaaaagagcctggcaccttctccctcgctctcttgcttcctctcttgccatatgatctctgcacatccggctccccttcaccttcca

SEQ ID NO: 90574 - DNA, 122 bp, Homo sapiens
ccagaacgaggagcagcgatataggagctgcagacagaaaactgaattgcgctttacatgcgctgcaaaatctgagctgcagaagagtagcactacaaaaaacgctacaaaaacgatgcgat

SEQ ID NO: 90575 - DNA, 122 bp, Homo sapiens
gcaacaagaatcaacaaatgtggccaaccccaggaaaagcaaaccacctctggccaggcgcggtggctcatgcctgtaatcccagcactttgggaggctgaggtgggcagatcacgaactca

SEQ ID NO: 90576 - DNA, 122 bp, Homo sapiens
ggggattggaattccacagcaaaaagaaacctgtcgctgcaggatcccttctctaccccgcggggagagcggcacggagacagttcattactttagaagtggcaactgtttgcagccaggcg

SEQ ID NO: 90577 - DNA, 122 bp, Homo sapiens
ccccgcacactgccaaccagaaaggcaaaggggcaagctccagctgcattcccaaagccccggggcatttagaagacgccccccacaggctgtcagctcctcgccctggggcaggcaagggt

SEQ ID NO: 90578 - DNA, 122 bp, Homo sapiens
cagggtggacaggaaggctccggaatattcagttgcgtcgccgcgcggaggggacaggtccgcgcctcccggagagcgggacccgagcgtaccgcgcaggcgcagcccccgagtgggcgccg

SEQ ID NO: 90579 - DNA, 122 bp, Homo sapiens
ccagagacgtccaccccccacctcccacaaaaaaaaaccctgcacttaatttaaatgttacgttatatatacatcccatcatatacatatattcacacataatcactatgtaacagtccagg

SEQ ID NO: 90580 - DNA, 122 bp, Homo sapiens
cttcggttttccggccagacccggaaaaacgaaaacacagcttggggagcccccactagccggcgcctgtgccagctcacctctggccatggcgcagctgccggtgcacacggcggccaagg

SEQ ID NO: 90581 - DNA, 122 bp, Homo sapiens
ccagtcctccattgatggacacgtaggttgattccatatctttgctaatgtgaatagtgccgtgataaacatgggggtgtaagttaacaattaatctccaagtaatttccttgatggcactt

SEQ ID NO: 90582 - DNA, 122 bp, Homo sapiens
tgtggatatttaaataaaacaacggtttttcaaaccatgagtcagctggaaggatgcccacgccacgcacactgcagcactgggagctgcactgggtggacgggaaggacgcaaactccaag

SEQ ID NO: 90583 - DNA, 122 bp, Homo sapiens
cagcacattagactgtgtttgaccacttcttccagttcatagtattgacttcagcccaaacggagataactccctgtgtgtccttgaggtattgagctgggctggacagctccccttgagcc

SEQ ID NO: 90584 - DNA, 122 bp, Homo sapiens
tgggcccaagagatcactgagctggcacagggcccaggcagagacttcctacagctgcaccggcatgacagctacgccccaccccggcctgggaccttggcccggtggtgagacactgacat

SEQ ID NO: 90585 - DNA, 122 bp, Homo sapiens
ttgtgcccgcctccgagcctgaggaaacagctgattgatcagcctggctcaggcttggggcggggattggctgattggcagcaacgccacgggacagccaagctagaagcctgaggagccgg

SEQ ID NO: 90586 - DNA, 122 bp, Homo sapiens
atcctcagagacacccacctggccctttcacagtgggttgcggttggcgctgttggggcacgatgcaggggcacttgctgtggccttggtgttaggtctcaagagaaatcttaggggccagg

SEQ ID NO: 90587 - DNA, 122 bp, Homo sapiens
tggtcctgcccttagcctcactggccccatctgtaaaatgggcagagggttccagcctcccggtttcctccctaggcccacagctgcccaacctggttccccctcttgcccccaccttgcct

SEQ ID NO: 90588 - DNA, 122 bp, Homo sapiens
ggaaacagcaaaggcaaaggctccgaggcagggactagcttagtgtgatgcaggttcatgcggagcgcatcgctcctggaggggactgaacaaggagagggtggaagggtgggccgcggtga

SEQ ID NO: 90589 - DNA, 122 bp, Homo sapiens
ggcctggggtgacgcggatggcggcctggggtgacgcggatggcggcctggggtgatgcgcgcctgtcgggcggatggtggcctggggtaacgcggatggcggcctggggtgacacagatgg

SEQ ID NO: 90590 - DNA, 122 bp, Homo sapiens
actattatggccttctttgtccgattgaacggaggtaacgaagtctcgtcttccgccagtcgtccgggcgaagccagtctggagccgctccggagcgcgcgttgtgattggctcttacatta

SEQ ID NO: 90591 - DNA, 122 bp, Homo sapiens
ctgagctgggtgagtggggcaacagaggtgtcaggttcttcccgcatcactccgtgaattcgtatatctatatgtgacctgcggtgctccatctccctgaacatgaatattagttcagggat

SEQ ID NO: 90592 - DNA, 122 bp, Homo sapiens
atgagggggctttgggcctgggtgtgagtgacaaggagctggtgccagcccctccctccccggcactgaggcgtccgtgggggctagattattcctccttttcttccaaggtagcctatttt

SEQ ID NO: 90593 - DNA, 122 bp, Homo sapiens
tcgtcgtcccgtccccacaggtgcgctccgccccccctcacctgaggccacctgggccggcgtggctggggctctctgcgcctgcgcgtctcgcctacccgtcagactccaaccgactcaga

SEQ ID NO: 90594 - DNA, 122 bp, Homo sapiens
cccccagacccatcctcctatcttgagagtaaagagtggaaagaggtccccaggaccaggcgcctcagagcgccgcaggctttttgcagcgctgcgcttgcagaataggactgaaattttcg

SEQ ID NO: 90595 - DNA, 122 bp, Homo sapiens
gagctgaggcattgtgggggtcctggccatgtctctcacttgtgaggacctgacactcaccggggccagctcttgtggatgacatcggtgtcatgagctctgatgggacatcatggggcttc

SEQ ID NO: 90596 - DNA, 122 bp, Homo sapiens
tgtgtgggcgatcacgaaatgagcgcttgtttttgaaggcgtagtatctccgtgaacatccggttgaacaacctttctgactttatttttcccacgaaagttattaattaaaaaacaaaaag

SEQ ID NO: 90597 - DNA, 122 bp, Homo sapiens
gacgcttctcacttcccagacggtggggcggccaggtagaggcgctcttcacttcccagacggtggggcggccagggagagacgcttctcacttcccagacagtgcggcagccaggtagagg

SEQ ID NO: 90598 - DNA, 122 bp, Homo sapiens
gagtcttgcacccaactgttctaccccacggggacctacagaacagcccaaagcctcttacgcaggacaacccatagcagtttgattaaaatcagcgcaaacccattcccatttggtgaggg

SEQ ID NO: 90599 - DNA, 122 bp, Homo sapiens
aacctcaacgcttcaggtcccgaccaatctctcggagagctcagagggagccgctctagccgccttccgccacggagtgcagggacagccgggaaggggacggaagccggaggccagagcac

SEQ ID NO: 90600 - DNA, 122 bp, Homo sapiens
cctgccttcctgcatctcccacgatgaggacggaggccgccgccccgggcctgttttgagcgccagcagcagcgaggcacccctcaaggaagcagcgccctgcagctcctttatctttttgc

SEQ ID NO: 90601 - DNA, 122 bp, Homo sapiens
cttctctacgagcttaagagtagttagggacatggaaacagtgatttgttaacttgctcacgacctcttttgaccacttaatagtgccaggcacttatctgcacactagagaataggaatta

SEQ ID NO: 90602 - DNA, 122 bp, Homo sapiens
tcctgggcaacagagcaagactccatctcaaaaaaaaaaaacaattttcagaaaataaagcgttagtactatgtaatgtaaaactgactttgtttatctgtcttttgtttagtcttttttat

SEQ ID NO: 90603 - DNA, 122 bp, Homo sapiens
gaccagctcttaaaaccacgctacttcttagtcaacctggcagtgacagaagcagcgccacgactttacctcaggtttgcaagctgtggttggtgaattttcagccattattctaaataaca

SEQ ID NO: 90604 - DNA, 122 bp, Homo sapiens
tgccagatgtcccagctgtgatatatcctgtgtttcccagaactcactcttgaccctgaccgcagacttcccaaaaggagctcttgcattctctcaggaacgctgccactgaacgtgaccca

SEQ ID NO: 90605 - DNA, 122 bp, Homo sapiens
gcggggagcgcccctgaaggccgggcccagaggtcctgtggctgcgcgtgcacacacacacgtgcacacagtcacacgcgcacaaccagccagagctgcggcctggcgtgatcggcccaaga

SEQ ID NO: 90606 - DNA, 122 bp, Homo sapiens
gtttaaatacagtctagaaacaaaccaagtgcttggcttccaccagagaaactagaatctcggctctcaatatgcaaacactaaggatgtttgttttcacctctttaccgggaagataaacg

SEQ ID NO: 90607 - DNA, 122 bp, Homo sapiens
gtgtgagtgaggggcgcctgtgggtgggggagccatatccgtgtcccgggggtctggcggcgccgtgggcagcctggcgcgcccgctccctggggtccccgccgagcgcctgcctggctgcg

SEQ ID NO: 90608 - DNA, 122 bp, Homo sapiens
agaagccaggctggcaaaacggagggtgaagggcaccttcccaacacccgcccccgtgcccggccatcgccagtgcggggaaaacaggaacttcatacatgcataacctaagacccggcaac

SEQ ID NO: 90609 - DNA, 122 bp, Homo sapiens
agaggttcataagccatagaggatctgtcataaatgggtctgcacagtcacccagcctgacggaagtcagaggaggaaaggaaacatgagggctgatgggagcggtcaaggagggcttcttg

SEQ ID NO: 90610 - DNA, 122 bp, Homo sapiens
cgttttcatttttagcgggaggagcagtccttgcgttaagcggtgtgaggccctttaaggcgcggccacactcagcatggcggcctcagtcggccttccaagcatggcgcggggaggagggg

SEQ ID NO: 90611 - DNA, 122 bp, Homo sapiens
atgttccttgcaaaaagggaagctgaagatagaaccaagcttggagaattttgtttgcaacgcagtcaggctctcctggatcctctctcacagtcctggcattcagggggtgccatccccat

SEQ ID NO: 90612 - DNA, 122 bp, Homo sapiens
cataatttaaaagccccacagaggcagagaacatctctgtctttttcagagttgtattctcggtgacacacatagattaactgctcaataaatatttatttaatgaacagatgagtaactta

SEQ ID NO: 90613 - DNA, 122 bp, Homo sapiens
cgtgcacatacgtgtaggggtctgtgtgcacatgcgtgtcgggctctgctgctgtctgcgcgctgcggccgctgggtgcgcgtgcgcatgcgcgctggcctccagggggtggcgggaccgag

SEQ ID NO: 90614 - DNA, 122 bp, Homo sapiens
gcctagagaagtgagtcagccacctgggcataggtgctctccttgtcattcccaggcctacgtaagcactcccttcctctttcctccctgctgtgggggtgcaggggaaaccctaaaccctt

SEQ ID NO: 90615 - DNA, 122 bp, Homo sapiens
gtctttctgacaggaatgtccagtcagggttcaagacaagctgcaccttatgcaaaataacgaggtgaggtatatatatggtgggcctccgaagtcattgaacctggtacaaatgggtgctt

SEQ ID NO: 90616 - DNA, 122 bp, Homo sapiens
cgcaccctatgtctcccgtcccatctgcctgtggtctggaggtccccctgcttcccactccgggaaccaggcctggtactcaggtcccagaacattcaggagtgttgtttcagactgagtta

SEQ ID NO: 90617 - DNA, 122 bp, Homo sapiens
ccgccagccgccgtgggagccggaggatggcggcggtagcagcggccgcccgagaggaggcggtgccgagatcgggggcgccgagcgcggcagcagagagcggtagcggcccgtcgtggcgc

SEQ ID NO: 90618 - DNA, 122 bp, Homo sapiens
gcccccagcccctgagacctaatccccctcatgctagcctagtccctggaggagggagtccggccccaggccagggactaaggagcaatgaccattgtgcacatgcgtgtgggaaggggttg

SEQ ID NO: 90619 - DNA, 122 bp, Homo sapiens
ccagccgtaggagcacaaactcccaccccagggctgatgccgtgaaggatgagggcatcccggcacttgtgagaggttaaaatgcttcatgtggagagcggaagtacccaggacgaaaggat

SEQ ID NO: 90620 - DNA, 122 bp, Homo sapiens
ctcgtttgaaataatagcattgttggagtcactagagacaaacaagaggaactccacttccgcaggaagcatgcatctggccacagttcatttcactctgtaccttccaggggaatgcacca

SEQ ID NO: 90621 - DNA, 122 bp, Homo sapiens
tttcagtattaggtgcatatctttcaaaataaataaacataagccaggcttttccaactgcgtcctacacattctacaagatattaatcatgtgtcaagaataaaaagtgttgtgttcaagt

SEQ ID NO: 90622 - DNA, 122 bp, Homo sapiens
ggggcgggcatttagcgtcccgggccccgccttcccgccctccacagtcttcgccttgatcgtgttctcctgcatctatggcgagggctacagcaacacccataagtctaagcagatgtact

SEQ ID NO: 90623 - DNA, 122 bp, Homo sapiens
agggggaggctgggaggggccggggagtgactgggcgggcccggaggtgatcccaggctgcggaggctggggacccggtcgcggcggggcgggtccggagagaactcgagagtgcagagatg

SEQ ID NO: 90624 - DNA, 122 bp, Homo sapiens
caggagggaagggtcggaccccggggcgggctgcaggctcggccagcccagggctccgcgcgtctgaccccatcctgaggacccaggggaaggaccagccctggctctgcggcctcgaaccg

SEQ ID NO: 90625 - DNA, 122 bp, Homo sapiens
gcggctggcagatggccaggcagcggtccagggacatgagcagcagcaggtaggtggaggcgaacatgcccaccacctgcaagtacttgaccaggcggcacagcaggtcgggcccgtagaag

SEQ ID NO: 90626 - DNA, 122 bp, Homo sapiens
gatgttctttaaggggtttccacctgagaagctcccaggcaggggtccctggctgccccccgccccccgggcaaccatggccgccgctgctgcttccaccaggcccgaggtggcccccacgc

SEQ ID NO: 90627 - DNA, 122 bp, Homo sapiens
gggtctacgtgggacaccctttctccttcacctcttccagagctccggcagtcactagtacgcacctctgtggaagcacctctgttttgttccccggtttatccccagttccaagcgcaatg

SEQ ID NO: 90628 - DNA, 122 bp, Homo sapiens
attgcccaggtcctcagctacaaggaagctgtgcttcgtgctatagatggcatcaaccagcggtcctcggatgctaacctctaccgcctcctggacctggaccccaggcccacgatggtgag

SEQ ID NO: 90629 - DNA, 122 bp, Homo sapiens
ggctccccaggttgacagctcacagccagcttaatggtgccagatgatggcagcttcagccgaggcctcgtgccaagacccttgcagtggagccagggcacgggtcgcccctgacggctcag

SEQ ID NO: 90630 - DNA, 122 bp, Homo sapiens
gcccagcgcggggtggacgcacggaggcacagagggccggccggccaccgtgctgagcaccgcgggggaggctccaccatgccccactccacagaggaccccgaggctcagagagggaggcg

SEQ ID NO: 90631 - DNA, 122 bp, Homo sapiens
gtgctgtgggaaggatggaggcccccacggccttgacctcagaacactacgccctgaaagcgcccctcactgcccgtgggcacagtgaggagaccccacacctttccccacccgagctgcag

SEQ ID NO: 90632 - DNA, 122 bp, Homo sapiens
tgctatagcagatatctgttggacggtgtgaatggcttgtattccaggcccatctgcctgcgttgggggtgcggcggggggtgttggagacgggactggggcttgagctccttgcacccgac

SEQ ID NO: 90633 - DNA, 122 bp, Homo sapiens
ctgctcttaccaagtcacctcatgatggccagcaagcagcttcctgagggaggagaggaacgggctgcttctcatggatccagggaaaccaaagccttgaaaagagaaacaccaaggccacc

SEQ ID NO: 90634 - DNA, 122 bp, Homo sapiens
gcgtggaagagtactgtgggaaatccctgccactcgcttctctcaaggccatgcacgtagcgactgtctggggtcccagctctcagatgtgacccctccccttacctttctctgcagcaggg

SEQ ID NO: 90635 - DNA, 122 bp, Homo sapiens
taccttcttcatctcactcactgcccactgcgtttttctcttccttgcaggtgtctcctgcgcctgcaccggctcctgcacgtgcaaagagtgcaaatgcacctcctgcaagaagagtgagt

SEQ ID NO: 90636 - DNA, 122 bp, Homo sapiens
agcccctgcggaccctgcctccctgcccatcccaccttgtacctgagagtgacagcagcacgttgttcacgcagtagagccaggagcagcgatgtgaaatcagctggaggccacagagggac

SEQ ID NO: 90637 - DNA, 122 bp, Homo sapiens
ttgcctttgcactgcttctgtgaacagtctttgtctcctccccacctttggtgggaagtgcggggcagtcctggtcaagacactcatgccctggcaatgtggctgccagagaatgttgttgc

SEQ ID NO: 90638 - DNA, 122 bp, Homo sapiens
ctttccctctctctcccgctagggtgctagtgaacaatgagctaattctgatggagctggcgcggagccagcgccccagccttgctgccactgtgcagccgcctaggagccagactgcttac

SEQ ID NO: 90639 - DNA, 122 bp, Homo sapiens
gcagtgagccgaaatgagatggcaccactgcactccagcttgggccacagagcgagactccgtctcaaaaaagaaagaaaaaaagaaaaagtcctcataagtagggcagaggtcacggcaga

SEQ ID NO: 90640 - DNA, 122 bp, Homo sapiens
cctctccccccacctccccccccactcccctcctccccctaggtcctggctctccctccccgacccggtcttcttggtaccagctaagccctggaggggccacagcctcccctccagccccc

SEQ ID NO: 90641 - DNA, 122 bp, Homo sapiens
cctgcggccaacctgcgattctcaactccccgccctggttgctaagggaggcgcgcagagcgcttgtgcctgcgcacttccacaccagcccgtgtagtgtgacgctgggccccgtccctgtg

SEQ ID NO: 90642 - DNA, 122 bp, Homo sapiens
tagagggcagcagagctcggagcccggagcccggccacgtggcggtcacgttctggccgccgcaggccagataccctggggtctcccgggcagatggcctccctgccccatcccgctcgcac

SEQ ID NO: 90643 - DNA, 122 bp, Homo sapiens
ctgatgattttgctggtgaggatcatggtgtaccaaagaggtttgcaaatggcaatgtagcggtcaaaggccatggccaccaatacgatgctctccatgacagtgaagaaatggatgaagaa

SEQ ID NO: 90644 - DNA, 122 bp, Homo sapiens
acctatgcacctcactgcctttctcaagcacactgttttgcttctgcacttcttaggtggcgttggtatggaaggaaggccagtgaccgcaagggatgactttgatcttgggagatttttgg

SEQ ID NO: 90645 - DNA, 122 bp, Homo sapiens
aggagggctgggattggccaccagtggcctgggaagaggcgcagatccttccgcggagggcgggggggccgcgtggggtgtttgttctcttggggattaatggggggttgtgggggaggggt

SEQ ID NO: 90646 - DNA, 122 bp, Homo sapiens
agacctgcaccatccggacaccacacatccagctaaccgcagggcctggtgacctcaccccggacctgcaccatccgacaccgcatatccagctaaccgcagggcctggcgacctcacgcca

SEQ ID NO: 90647 - DNA, 122 bp, Homo sapiens
tgagccatgcagagttagaggtgggctgaggcagagtggcctccaggagaaggtgagaggcgtgcccaggtgccaggcttgatcggcaggctgtgctcaggcccatttttctgattcatttt

SEQ ID NO: 90648 - DNA, 122 bp, Homo sapiens
tatttcagggcgttagagtgtacgctgcattggaatccaaccaatcgcagtattcttgcccgccccaattttcatttgttccccctacctgagctgcccgtgttaaatgaccgcccagcacc

SEQ ID NO: 90649 - DNA, 122 bp, Homo sapiens
gggtagaaggtggagcggcagggtgtaattgggttgatgggtgggacctgtcttgaccatcggagttttataatcgagggccaggagggcccgggttgctctcctggttatgtatgtacttg

SEQ ID NO: 90650 - DNA, 122 bp, Homo sapiens
cctggtttgaggagttggaaattttacacgagtcaaggattgcagtggcggcagctgggacgcatctgtaacggtgttagtttgcctgaaagcagaaaattagcaaccccaaagcccagctt

SEQ ID NO: 90651 - DNA, 122 bp, Homo sapiens
ttggagaccacagtgagctatgatcacaccactgcactcctgtgacagcctgggtgacaccgcaagaccctgtcttaaaaaaaaaaaaagttagacttatgttcttttctaagcaataaaat

SEQ ID NO: 90652 - DNA, 122 bp, Homo sapiens
cgggacttttgccgagggggcggggccgccgagggggcggggccgccgagggggcggcctcgtaccctagggaccctgcgtagcccggcgatccttggagggtccctcaggtggtaatggag

SEQ ID NO: 90653 - DNA, 122 bp, Homo sapiens
ccagctcaagtttctgtggaaactttccctcagaggctcctcctccttcaccttggaaaccggcgcgggccgtgcggcgcggcactgcctaagtccccggcgcacctggcggcggcgtgtcc

SEQ ID NO: 90654 - DNA, 122 bp, Homo sapiens
gacgcagcgtccatgggggccacacacgccggaggctgctgtgccaggcatcccaggccccgcgtctgacccgcagccatcgatcactatggcaggcagtacagtcaggagtcaggcccgcc

SEQ ID NO: 90655 - DNA, 122 bp, Homo sapiens
ctattcccgtctgtctactcaaacagctcattgtcgttactatgcctcgctagctaaccacgtgcctctgatctgagtgttataaaagagtagaaccttattatgggaatctgaacctcatg

SEQ ID NO: 90656 - DNA, 122 bp, Homo sapiens
ctagggtcttgctgtacgtccctgccctcacatgccctgtgcccccaacgacagggagggcgccgaacacccgggagtgttactgtttaaagacctgaagggtgaactgttttaaaaactga

SEQ ID NO: 90657 - DNA, 122 bp, Homo sapiens
tgagggaggaggccgaggagggcccggggctccaggggggcgagagcggcgcgaatcccgcggggcccactgcgctaggcccccgctgcctgtccgcggttcccactccggccccgatctcc

SEQ ID NO: 90658 - DNA, 122 bp, Homo sapiens
cttgctgggcgcctgaatgagccgcaggaggaactccagggagaaccagcccacgcacaccgactccacgatgaagacgttgtggcacatctgggaacagtggccctgggagagaggggaag

SEQ ID NO: 90659 - DNA, 122 bp, Homo sapiens
agacaataccctctgtgatgcagaggcccgctcaagttccccctcttcccccacgtagtccgcgagcacatccctttaatgcccacgcctcagtcagtcactgcccaggccctgctgcgact

SEQ ID NO: 90660 - DNA, 122 bp, Homo sapiens
ctggaatatgcacagcaatgacttcttttaggacattttagcaatgaaagcagcattaaccgtgataaaacccgttactttccaaggacccgctccgcaaagcgcccaccctcgagggagga

SEQ ID NO: 90661 - DNA, 122 bp, Homo sapiens
cccgagcggctgaggctccagccataaacaagcgcccggaggagcggcgcaggagtgaggcgagcggggcgcgcggagcggacgccgcggatcttgtgctgcgccaccgcgcccactcggca

SEQ ID NO: 90662 - DNA, 122 bp, Homo sapiens
cagctctggaaatggtgggaacccgctccaggtccaagttcctaggtgccagtcaagggccgaccttggaggccgccttccaggggcagcagtctcaggctgctgtgtgaactctccccacg

SEQ ID NO: 90663 - DNA, 122 bp, Homo sapiens
aggacctgatggacgagctgctggaagcccggtcctggctggcgggtgagtgtcggcctgcggtgtgtgtgtgagatgtgtgtcggcccggggtgtgtgtgtatgtgtgtgtgtgtgtgtga

SEQ ID NO: 90664 - DNA, 122 bp, Homo sapiens
ggaggttgcgctgagcttggctgctcgctgggtcttggatgtcgggttcgaccacttggccgatgggaatggtctgtcacaatctgctccttttttttgtccgccacacgtaactgagatgc

SEQ ID NO: 90665 - DNA, 122 bp, Homo sapiens
agatgcacaccttgtgccactggaggagccagtgccctctcactggacagtggtgcccgacgaggactttgtgctagtcctggcactgctgcactcgcacctgggcagtgagatgtttgctg

SEQ ID NO: 90666 - DNA, 122 bp, Homo sapiens
agggtctgggcaagttgacaaatccaaaggcacctgctgtcgagcgaggactgaagccaccgctgacactgtgcccagcaaaaccagcacacacggactattaactggtcgactttgctcct

SEQ ID NO: 90667 - DNA, 122 bp, Homo sapiens
gctgtactccagctcctcgcagagcctctgcagcgtgttcaggggctcgttcagctccaccggcatggccaccttggacaggtccttcccgatgttgttcctcaggatgttccacaggctga

SEQ ID NO: 90668 - DNA, 122 bp, Homo sapiens
gcttcctgtgcttttgcatactcttgtgccccttttcctcatttcctcatcactaacaggcggggaaactgaggttccccaggcgaagcgactgacttgcccagaaccacactactggggtg

SEQ ID NO: 90669 - DNA, 122 bp, Homo sapiens
tctctgctattttaatgtttaatttgcgctgtcgaggcgagtgtgtgtgttgcatctggacgccagggtttgcccaatctttgagtgtttggttaaatgttcaaactgtggcttcctcccgg

SEQ ID NO: 90670 - DNA, 122 bp, Homo sapiens
gaatgaaccctcctcctctccctcctccttcttctcgctgagtctcctcctcggctctgacggtacagtgatataatgatgatgggtgtcacaacccgcatttgaacttgcaggcgagctgc

SEQ ID NO: 90671 - DNA, 122 bp, Homo sapiens
gcggggccggggaagtgagcggagtgaggctgcgagcgcgctccccgcctcaaaagttatcgggagccgcgggagggctgccgggggccgggctggctgggcggaggcggcccgcggcgccg

SEQ ID NO: 90672 - DNA, 122 bp, Homo sapiens
attacagacatgagctcccatgctccgccctcttctaggtcttttgctagtcctacaaagcgcaaatgttgccttccacataggaaacactcactgccaggcccaggccagctctgaagacg

SEQ ID NO: 90673 - DNA, 122 bp, Homo sapiens
atgcagtaacttgccctcctgttgccttcgcaaagggccttggcacccatgtcatcctcacgacaagcctgccaagtggacagttagatattcccattttagcataaaggaaatggagctga

SEQ ID NO: 90674 - DNA, 122 bp, Homo sapiens
ataggtggtcctggttctcagtagtcccaaagcctctagtccggatgggggtagaattgccgcagatgcggaatccactaacagtcgaggaagcttatcttcctggaagccttcagcctccc

SEQ ID NO: 90675 - DNA, 122 bp, Homo sapiens
ctctgattggcccagcggtaggaaaggttaaaccaaaaatttttttacagccctagtgtgcgcctgtagctcggaaaattaattgtggctatagccgcctcgatcgctgtctccccagcctc

SEQ ID NO: 90676 - DNA, 122 bp, Homo sapiens
ccgtgctttcgcggctgcccggtgcgacactttctccggacccagcatgtaggtgccgggcgactgccatgaactccggagccatgaggatccacagtaaaggacatttccagggtaagaag

SEQ ID NO: 90677 - DNA, 122 bp, Homo sapiens
cactgacgagctctggcctgagcggattcggcagaaggcaacatccgggtgagggacaggcggagcgacttgcggtgcctgggattggatcacgggcttgccagttcacggtgggaacagcc

SEQ ID NO: 90678 - DNA, 122 bp, Homo sapiens
gactctggccaggctccctctgatctgttactcctgaaacttgcatatataacccagacacgatgcaccacagcatcacctttacctgaaagattcagaaggcatcagggccctgcagagtt

SEQ ID NO: 90679 - DNA, 122 bp, Homo sapiens
aaaacttattaaggacaataaaggttgcagtgtaccagttaacgtaatctcaaaaatccacgtacttcacctttggcactttcaaaaagttggacaaaaaccactgaaataatcacattctc

SEQ ID NO: 90680 - DNA, 122 bp, Homo sapiens
tctgggggcatgaaacattccttgaagtcttccattctacctgcctttctcccttgctcccggcttccatgttagactatcaacacttagatcatgttattttcaatctgtatgaaattctt

SEQ ID NO: 90681 - DNA, 122 bp, Homo sapiens
tggtattttagaaaacgctaaactaattccccagaatgcattgtgctgttattgttgtttcgtgcccctacatatggggtgtcctcccttggaatatcctttttttccccataagatagaca

SEQ ID NO: 90682 - DNA, 122 bp, Homo sapiens
ctccccatgcgagcctctgaagccctcggcacacagccctggaggctgggaatccttgagcgttttcctctgaggtctccaagtgtttatggtaacaagaggagggaggagggcgaggggac

SEQ ID NO: 90683 - DNA, 122 bp, Homo sapiens
ctggaaagcaatctttctcaaagtctcggaggagcagggtggtctgggatcgggtgactgcgatctgctttcacctgccttcttgcgggctgcgtttcctaggccagggccaagattcctgt

SEQ ID NO: 90684 - DNA, 122 bp, Homo sapiens
tgcggtcgcgcggagcgaggggagctggggaccgggcgggcccggggctgcgggaggcggcgccgccgcacaatcgccccggaatgcccgccagggcgcgcgtggggtgcggccgtccggcc

SEQ ID NO: 90685 - DNA, 122 bp, Homo sapiens
attctccgggtgctgaaggccagagatccagaggtgctcagctgccaaactccagggctgcgtgactgtgtatcattcctagatgtagctttcagcggggagacccggaggaaacatgctgg

SEQ ID NO: 90686 - DNA, 122 bp, Homo sapiens
tgggaccctcccctgcattcacctgtagtctctcaagtctcctgggaaaatttctcagcacgtgtctggcatgtgcctctcttctagccatgaaccagtagccccaaaccaggctgtgccag

SEQ ID NO: 90687 - DNA, 122 bp, Homo sapiens
tgtcggctgggcctggagcgagggtggaggttggcgggcggcctgcgctctcaacctgggcgccttggaatcgcggtcccgtgctgtcctccaaacttcagactcacctcggacgcgtcaac

SEQ ID NO: 90688 - DNA, 122 bp, Homo sapiens
ttgccgaccaaccatgagctcccagattcgtcagaattattccaccgcggtggaggcagccgtcaaccgcctggtcagtttgcacctgcgggcctcctacacctcctccctctgcgggtttt

SEQ ID NO: 90689 - DNA, 122 bp, Homo sapiens
gagccggccgccaatgcagtctgtccctctaacttgttctcgttacaaaggcagcagacgcgtggagctggccgctcccccgcaccgtcatgaaatgtcctcccggccctgctgcttgagct

SEQ ID NO: 90690 - DNA, 122 bp, Homo sapiens
aacagccaggaggaaattgaggccgacaaccacaggagtgagctgagaagcagatcttcccgcagcagtgccttcagctgactgcaaccttaccttaggacaaacctgagcctgaacaatcg

SEQ ID NO: 90691 - DNA, 122 bp, Homo sapiens
cctggcccctcgcttttgttttattaaaattgcctctggatgtatcattttcaagatgttcgtctttgagcctctcttgtgcttgaagttcaaattgtagttccttgtagtgaacctcattg

SEQ ID NO: 90692 - DNA, 122 bp, Homo sapiens
ttactaaggacaatgccactggggggcatttcactttagatttaattcagatttcccctccgaggagcaaaaattccctgtgagtcactgggtaaatgcctcttaggcatttgccaaggtcc

SEQ ID NO: 90693 - DNA, 122 bp, Homo sapiens
aaaattccctatcaagccagaaacgcacctacagagggagagaacgacatgagaggggaccggagttctcagggaggagggaagcctggctccgcatcccagagctgccagggacccggagc

SEQ ID NO: 90694 - DNA, 122 bp, Homo sapiens
agcccaccagcctcctccgacgcgtccatcagcatcacagccgggaagttggcatcggtgcgctgtgtgtggttccgtcatctcatcccgtgtggctctgcgaccgccacctcggtcaccac

SEQ ID NO: 90695 - DNA, 122 bp, Homo sapiens
tgaggctgcaccccgggctgccactccaagagcggaggcagtgagagtacgcgtgtgcctcgcgccagtccacgctaggagagcactgggaccgagacccggcaccacctcccggtccgccc

SEQ ID NO: 90696 - DNA, 122 bp, Homo sapiens
tcagctatgacatgatttccaagctcaaaaaaaaaaaaaaaaaaaaaaaatcaagcctggcgtttaacttcagtctggagcattgacaggtgacaggtcactgcagaacacagaggtgaccc

SEQ ID NO: 90697 - DNA, 122 bp, Homo sapiens
tgctgggattacaggcatgagccaccacacccggcccttaatcgtagtaataaatatttacgctggatcagactctgagctgggctctggaaatacagaaattaatcaaacacaaagcctgc

SEQ ID NO: 90698 - DNA, 122 bp, Homo sapiens
atcagcctgctgaactgtcggctagggttataggtggttctgagtccttccggaagctgccgaatcttagaagtcgcgccactgttgtggcgatggaagaaggcgaagctctacagaaacca

SEQ ID NO: 90699 - DNA, 122 bp, Homo sapiens
gcctcctgctgccattcatgaagcccaggcttgccccaactttgctcccagatcagagcacgtgtccacagcaggaagaagccaggcagcaggagaaggcacttccgagcctgggagggcag

SEQ ID NO: 90700 - DNA, 122 bp, Homo sapiens
cacaacggatgccattcatggacagaacgcacagctgaggcgttcagcatagctgaggctcgaaccccaaaacccacctcctgcctgatctcactcacatggagaccgggagagggagacca

SEQ ID NO: 90701 - DNA, 122 bp, Homo sapiens
tggtgggtcggctaggaatagtcttgaaggtctacctctgacatctcatttcagtaacctcgcatcttcagggacagttatctgctttttaaaggaggtaattgtcaatcttgttttcaaga

SEQ ID NO: 90702 - DNA, 122 bp, Homo sapiens
cagcagcgtgacggtgttcctgcagttgtgcagccgcgtggtgaagctggacgtggtgggcgagttgtagtcctcggtggtctcggcgatgaactccgagacagagatctggtccggcatcc

SEQ ID NO: 90703 - DNA, 122 bp, Homo sapiens
gggcgcatccgacctgagcttccctgggccgccgcggccccggggagccgccgcctcccgcgacctggcagcgcgcctcttccgggacatcagccccttctaccagcggcgcctcttcgacc

SEQ ID NO: 90704 - DNA, 122 bp, Homo sapiens
tccctggcgtatttgcgccattggtggatattccggaccgtgatggtggcgctgcgcgtgcgcactcgctccgagccctgctcccgggagagggagctctcgggtcggggctagggaaggct

SEQ ID NO: 90705 - DNA, 122 bp, Homo sapiens
cgaggtctggccccgccgcctttctgagccgtgagaggtgccactgcagagactctacagcgcccaggtgctgagatgccctgggggccgctgtgactggtgtctggacaaagatgtcccca

SEQ ID NO: 90706 - DNA, 122 bp, Homo sapiens
accaaaacttagggatgaagcttcacgaagctctcttttgtgaaggagagaggcctgttccgttgccaaggagtgcaaagctgcacattggctttgggatgacattgggtataaaatttatc

SEQ ID NO: 90707 - DNA, 122 bp, Homo sapiens
ctcccctgtcacctccccacgtgggtgggcatctctgcgtgtcttcagcgtgtgtccttccgtgtctcacgtgctccactcaccacagtgtcctcaagctccctcctgttgcagcgtgtgcc

SEQ ID NO: 90708 - DNA, 122 bp, Homo sapiens
ggcgttcctgacagcctccccggagcaggtgcgcgccatggagcgcactgtggagaacatcgtactgccccggcatgaggccctgctcttcctcgtcttctgaggacaaggcgcacgttctc

SEQ ID NO: 90709 - DNA, 122 bp, Homo sapiens
atcttggctcactgcaacctctacctcccaggctcaagcgaacctcttgcctcagcctcccgggtaactgagaccacagatacacaccactatgcctggctaagtttttgtatttttggtag

SEQ ID NO: 90710 - DNA, 122 bp, Homo sapiens
gctttcttagcaaaaaactagcacaggcggctcaggagtagagtctagctagggtcttcccgcgcccctccctcactggtttctctgcccctgcctcgctttctcccagagctaagagccta

SEQ ID NO: 90711 - DNA, 122 bp, Homo sapiens
ctgtctgggtgcaagcaggccaagccccactcctcaagatggaggaggagctgctgctcccggtggggactccccagtaggccactgggggaagccccacgacccagacagcaggtggagag

SEQ ID NO: 90712 - DNA, 122 bp, Homo sapiens
cttcattaaaatacatttcacacgctacacagtctggctgcttaaagtgtacagctcaggcgtttttagtacactgacagggtgtactttttttttttttgagacagagtctctctgtcaca

SEQ ID NO: 90713 - DNA, 122 bp, Homo sapiens
ccgcgcgggggccagcgactctcgcgccagtaggcccttgacttggatcaagacgggggacgggggactcccaggacgcgagcagagtgaacgaggacaaggtgatgctccacgcgcttcta

SEQ ID NO: 90714 - DNA, 122 bp, Homo sapiens
tacctgagatgtaggtaacactaattatatctcaggtacaagaaggaggtaaagttgaaacgccaaaccagtgtttggatggaagccctacaagaactgctgaatatcagacccctaaagct

SEQ ID NO: 90715 - DNA, 122 bp, Homo sapiens
aggacagagcttcggcagaaagcacctcagctttaggtgaattcgagctaggacaagttccgcgtttccctccagcccagcaggcagacggagggtctgtccctcctccagaacggtccctt

SEQ ID NO: 90716 - DNA, 122 bp, Homo sapiens
ttggcttttttttttggcaaaccagttattcaagtttctggtctttaaaaaactctgtggcggtacggtaaccgaggaggttccagcgcggcggaagtaccccgcgggtgggtgtgtgcgca

SEQ ID NO: 90717 - DNA, 122 bp, Homo sapiens
gcccgggtgtggctgcctgccacgcgcgctgccataggatccaccaacgtttcgcctggtcgatcgccatttcgcctaacgggctgcttccatggaaaggtcagaggcaggggaaggggcgc

SEQ ID NO: 90718 - DNA, 122 bp, Homo sapiens
cagaggagtcgccgatcccacttgggtccggagtcagggccttcaggggtccgggaacgccgccatcccggtgaatctccccttccgtttctagggacccgggaccggagcgccgcggcccg

SEQ ID NO: 90719 - DNA, 122 bp, Homo sapiens
cacagggtctgtcccggggctgtcgccagccttatatagtgccaggacagctccgactgacgtcagcgaagaacatgcactgattgtagaagcaatgacagccacagcttcgagtctgacgg

SEQ ID NO: 90720 - DNA, 122 bp, Homo sapiens
tcacggaaaccacataaacagaaaatagctacaacagctaattcttactaaggtgtcaagcgttgtgcataacactgcctaatgtgtgacattaaacgttttcaccaggtcagccacttaat

SEQ ID NO: 90721 - DNA, 122 bp, Homo sapiens
tcctgccaacggggagcagctccacctggtgaactatgtggaggactacctggactccatcgagtccctgcctttcgacttgcagagaaatgtctcgctgatgcgggagatcgacgcgaaat

SEQ ID NO: 90722 - DNA, 122 bp, Homo sapiens
ggccaggtagacgcatttgaaggctgtggccgatggcattcgccccacgcactctctcatcggactccccaaaccggtctgggtggcacttgaggctcccaggccaaaggagacctgtaagg

SEQ ID NO: 90723 - DNA, 122 bp, Homo sapiens
gacaatgcccagaatactgtaagcactcaagaaactgatttattttcgtcattttcacagcggccaaggtacatgaggatgtagcttatcgcccttttaagggactctcccacgttcgactc

SEQ ID NO: 90724 - DNA, 122 bp, Homo sapiens
cgccatccacccgcctcggcctcccaaagtgctgggatcacaggcgtgagctaccgcacccggcctaagattccttttaaatgccagggtcctccctgatgtctcatatcaacgtaactgcc

SEQ ID NO: 90725 - DNA, 122 bp, Homo sapiens
cgaacccctgcgggttcagcgaatcggctgcaagaagccctgcatccgcgaggtaagcggcggttggcggcggtgccggggttggcagcgcccgcgggttgtctacgccgcggggcctacgt

SEQ ID NO: 90726 - DNA, 122 bp, Homo sapiens
cgcgttagagccatgtttcccttagtgcgggagaagcgcacatcagtgacgtcacggacgcgccgcgacctcgcgtacggtggctggcgaggctcagtacggtgtgtggagctggagcaccg

SEQ ID NO: 90727 - DNA, 122 bp, Homo sapiens
gcagccttctggcacagacgaaggaggttcaagtcctctccatggacgtgagctccaaagcggaagtcacaggtccaccataggaccactgttgaggttaggcatggccggaaaggagctcc

SEQ ID NO: 90728 - DNA, 122 bp, Homo sapiens
gagaaaagaaccaaaaagaaaacatgaagttgtggtttgctggatctctttatataagctcgcctataccggaagactgtgtgaaaaatgctgcgataggttttgatttttctcctttagat

SEQ ID NO: 90729 - DNA, 122 bp, Homo sapiens
cggggagggcagggtgctgactccagggaccacgacagtcggccccggtggtggggattccgcgcgggacccacgcgggaacaaagaggcggctggacggcccagctctccgcacccggaag

SEQ ID NO: 90730 - DNA, 122 bp, Homo sapiens
tgcctttcctgccgctgctgctgcttgcagcccccgcgccccaccgcgcgtcctacaagccggtcatcgtggtgcatgggctcttcgacagctcgtacagcttccgccacctgctggaatac

SEQ ID NO: 90731 - DNA, 122 bp, Homo sapiens
agggacgttgcagatacctaccctctgggtgccagcggagcgcagtcacagaccctggcacgtcccagcgggcttttcttcctggctgcaccttggagtcccagcgaaacgctgttatcata

SEQ ID NO: 90732 - DNA, 122 bp, Homo sapiens
cattcccaccaaccatgaatgaagtttccatggctattcattcatgcaaaaacctttgtccgtctggtgagtgtgacttcttttctttttttttttccgagatggagtctcactctgtcacc

SEQ ID NO: 90733 - DNA, 122 bp, Homo sapiens
acatgatttgtttacctgttctactgtggacagagacttgggttatttctagtttgttggcgttaagtgtgatgctgctgctcaagttttctagtaatacttggaagtggaattgctagact

SEQ ID NO: 90734 - DNA, 122 bp, Homo sapiens
tccttgtactacaaaactgcacgactaaatcccgtgatgggtatgcagtagagaagtgtacgccatcacaacagacgtgcaggctgcccccggacctagcagggagcacacagcaaacgtgc

SEQ ID NO: 90735 - DNA, 122 bp, Homo sapiens
taaacttatggacatacctggaatagctacaaagaccaatcctacctccagacaggcaaacgaatcctactaccctttcccttccttctagtgacactttgcgtgggcaggtacagtgtgtg

SEQ ID NO: 90736 - DNA, 122 bp, Homo sapiens
ttcaagaacgtgtgaaggacacttggaaagttaccaggccatttctctcctgggcgcccgcggccctagaacgccggcctcaccggcagacgcgcgccctcctcccagatgcgcaggtgacc

SEQ ID NO: 90737 - DNA, 122 bp, Homo sapiens
attattgtcttttttttttttaatcgaaggtcccttactggtcctgcttccatgagtagccgtgaccaggggaaaagggagaggaaccagccggcacagggaggggtcatctccacaacatt

SEQ ID NO: 90738 - DNA, 122 bp, Homo sapiens
tggaaggggagcatgccagctgactttctgacgtgagggtgtctgggtcttcagagggtgcggttgcagccacagtgataagggtgtgaggtgtctgacctactctggcattggtgtgtgac

SEQ ID NO: 90739 - DNA, 122 bp, Homo sapiens
ctaagtgtggaagtctgtgtgtggaagaggccagccagggcgacccttcttggcgttgggcgcacctggcacttgaattgggcccacggttttgtcccctttccgggcctgcgagggagtgg

SEQ ID NO: 90740 - DNA, 122 bp, Homo sapiens
cgggggccgggccgggcggtccaggccgcggcggggtccctgccctgggccgagcagcgccggggaccacaggttaatttttaattgctagctgtgtacgtaattcagggatgcagatttca

SEQ ID NO: 90741 - DNA, 122 bp, Homo sapiens
aaatgcgattggccgctcgggagggtgggtctcacaggggcaggctgccgaccggggtgccggggccctgggaggcttgtcggggaggggcccggccgtcggcatccgtgcagggggaggac

SEQ ID NO: 90742 - DNA, 122 bp, Homo sapiens
tggtttctgactccaggtcctatgcttggaactataatatactgcctcctctgaatggtacggtttttcaacttctacacactcctgtgatttatattttcccttgtattataattatctat

SEQ ID NO: 90743 - DNA, 122 bp, Homo sapiens
aactcccgccacccgtgttggcccgggactggccaatcccgcgccgccggatcaatgacacgctgaggcaccgccccttccgggcactgcgaaacatgattggccttgcggcctgtctatgc

SEQ ID NO: 90744 - DNA, 122 bp, Homo sapiens
cgccacttccttcccagccagaagtttcgcgccaaattgttccgcacacaaaatggagcccggaaggaggcgaggtcatgcactttgcagccaatcatcttcggcagacagtccgggcggcg

SEQ ID NO: 90745 - DNA, 122 bp, Homo sapiens
agagattagcacgttggaaccaccaacatgtcaccttgtggtgtgaggtcatctcgacttcgtaagccctcagcatacccaggcttctcccaaaatctgtgagttgcagcagccacagagag

SEQ ID NO: 90746 - DNA, 122 bp, Homo sapiens
tgcatagctgtttctgattcttagccagctcaggccctctattctttccatgctggtctgcggcctccgttacccacctgctgagggcgatcttctggtggagcagaaagccccgctcgtag

SEQ ID NO: 90747 - DNA, 122 bp, Homo sapiens
tgcacctatacctcctactcgggaatcatctgagccggggaagtcaaagtcatgcctgggcgacagagtgagaccctgtcttaaaaataaataagtaaataaataatctatcgaggaagatc

SEQ ID NO: 90748 - DNA, 122 bp, Homo sapiens
ggagctcagagcttctctggcaggtagaaggcaatgtgaactcagtcccgagtgcaagcacgataacgaccttctatgaatggaaaggggcattgttgctgcagagcagctggaggggtgac

SEQ ID NO: 90749 - DNA, 122 bp, Homo sapiens
gcagcccgggaaggggcattggtggcgcttggcagcaggtgtgacagacctcctccggggcgcctgatccgcggcgggggcggggcctgcccctagggcccctccagagaacccaccagagg

SEQ ID NO: 90750 - DNA, 122 bp, Homo sapiens
cagggccccacatccctttttgcaaaggccaatctggtgcctgcccagccctggtccactcgttagaaattggagtggctgaccttaccccggaaccaatctgaattgtatctggaattgga

SEQ ID NO: 90751 - DNA, 122 bp, Homo sapiens
tttatctgcctctgggctgaaatttctcaggctgaggagaaagcggtgctaagaacccagcgtttacaagcaggaaaataatgaagatgggaagcaaagtaccacttcctcatcacacgcct

SEQ ID NO: 90752 - DNA, 122 bp, Homo sapiens
agtgtgcagcttcctctgaaccaaggtttccaaaaggttttgatattgaagaagcagtgccgccttactggcttttaatgaaagcagagtattgtagtgtcagaaaaaaagaacaaatggtg

SEQ ID NO: 90753 - DNA, 122 bp, Homo sapiens
cccgggagggaggacgatcagctgaggcgtccacctgtggtgtcctcccaaaaaagcgctcgcgcgcgcccttccggagccccaaccacgccacaggctggtcgcgagggaatacgcccgtc

SEQ ID NO: 90754 - DNA, 122 bp, Homo sapiens
cacgtgcagctcgatttctttaaatgcctctgttgctcattggaaaagcattgtcagatccgattcatgttcccacctgacaaatattcagtcttattttcaaacacttgtggagcaagata

SEQ ID NO: 90755 - DNA, 122 bp, Homo sapiens
ggtgcggcgatgtgtgcttctccttgtctctgccacgtcccgccctcccggccagctccacgtgcctcagtgaagcccccagctgccctgctttacctacttaaaagctcacctcagggcca

SEQ ID NO: 90756 - DNA, 122 bp, Homo sapiens
cccccgggagttacgctgtagcgactgcatcgtgtggaaccggcagcagacgtggctgtgcgtggtacctctgttcatcggcttcatcggcctggggctcagcctcatgcttctcaaatgga

SEQ ID NO: 90757 - DNA, 122 bp, Homo sapiens
tctccagcctggggagaaggcagacacaagaagaccctcatgtacctggacgactcactccggccctctatgaagtgcttggggttcagggctcaccttagccccaggcttccccccgaagg

SEQ ID NO: 90758 - DNA, 122 bp, Homo sapiens
gacaagcgttcaccctactctttccaaaacgaaaaccaaattacctggaagatttgaaaacggttttctgtagttttcctgtagtcagctactcttccccacagatttttctcatcatgtga

SEQ ID NO: 90759 - DNA, 122 bp, Homo sapiens
agtgccctctatggtgtgttcacacaatgatgaaatcacctaacaatgcatttcccagaacgtatccccatccttaagtggcgaatgaccatgtatataaatggaagcaagcatgtagtttc

SEQ ID NO: 90760 - DNA, 122 bp, Homo sapiens
tgtttggggtgatgaaagttttggaaagatgctggagtgatggttgcacaacactgcacgcgatgccactgaattgtatgcttaaaaatgcctaaatgcgccaggtgcggtggctcacgcct

SEQ ID NO: 90761 - DNA, 122 bp, Homo sapiens
gagccgcaggctggtgtcgggcgcccgggtccgggtgaccttggcaggctcgggcgggggcgcggcgcggggactgaccgccctcctctgccccggggctgctattccgggcgccgcgctca

SEQ ID NO: 90762 - DNA, 122 bp, Homo sapiens
cggttgaagccagacgaccaccttgtggagttaaactccgtaaccagggagcaccacttccgctgacgtcattacggcgacacgtggatccaagatggcgacggcgatggtgagtgaaggag

SEQ ID NO: 90763 - DNA, 122 bp, Homo sapiens
ccaggcgatgatggacaaggccagggctggcagcgcagggccaagatcggggtcacagcccgggcactcaccgctctcctgctcgctgcccttcttggcggcggcggcgttgcccatcgcgg

SEQ ID NO: 90764 - DNA, 122 bp, Homo sapiens
acgaggatggatcagtataaacttgctaacagattcatttttggagggccagttttaagccgaacggttagggaaacagaaaaacaaaccagtggagataaatgtttattgacactacaaaa

SEQ ID NO: 90765 - DNA, 122 bp, Homo sapiens
gctgggaacaaaatcatctgttagaaagagtatgcaggaggttggagtaggcaaacgtatcggaggcagaaaggcaaacaattttgtcagctctcctgacatacagaagataatcaaagcag

SEQ ID NO: 90766 - DNA, 122 bp, Homo sapiens
ggaaccagccaggtggagtcccaccatgcagcaggccagaagccaggaccaaggcagcaccgtcgtgggcagccccgggccaaccccacgcgcttctctccaggacccaggcggcaccgtcg

SEQ ID NO: 90767 - DNA, 122 bp, Homo sapiens
atcaggtgtctctcagccaagttgctcatccaagtctaccccactttctactgcagcgctcgcgcacttccccctgcttcagccagtcagactttgctggctgcctgcccgggaccagtcct

SEQ ID NO: 90768 - DNA, 122 bp, Homo sapiens
gcggccgccgcgctccgggttctgaatcctccgagtccgccgccccgcgcggctggagggcgccggttgcacccactcgcctcctggtaggagccgcgcgcgtccctccccttcccctccgc

SEQ ID NO: 90769 - DNA, 122 bp, Homo sapiens
ccctggtggctcggagttgcagatttctggccacccgggaccctggagcccgggaattaccgggtcttggcatttccgaaccttggaagtccgaggcttcgcacaccgaccagggtcggccc

SEQ ID NO: 90770 - DNA, 122 bp, Homo sapiens
ggggcacaccctcgcccggacacaccctcacccgggcacagcctcgcccgggcacaccctcgcccagacacaccctcacctgggcacagcctcaccggggcacaccctcacccagacacagc

SEQ ID NO: 90771 - DNA, 122 bp, Homo sapiens
ggcggcccccgaggtgtctcatatccaaggctggccttcccagagaggccgtacgtggggcggactcggccgcactgccggtcccggtgacccagtagcggtatttaggcacaccagggatg

SEQ ID NO: 90772 - DNA, 122 bp, Homo sapiens
tcctgcagtagccgctcactctctggtagtgctcggggctgaccacgctgtatatgtaggcgtagtaggccacctcggcggcggtgaccatcccatagaagaactctacaacctgcatggtc

SEQ ID NO: 90773 - DNA, 122 bp, Homo sapiens
gacagcggagtggaaaccagattccggggcagcactgcggggatgggcagggcgagagtacggcatgaggtcccagttgcctgtcccaaacccttgctggttttgcagtgaatatgggggga

SEQ ID NO: 90774 - DNA, 122 bp, Homo sapiens
gcttgcaatgagggttgccccacctttccaagactcacaaattagttctgaagtgggagccgcggtggagccggcagaggtgcagcacttacccccattcacccctatggacggctccagtt

SEQ ID NO: 90775 - DNA, 122 bp, Homo sapiens
cctttccccagggccacgtcacttgccattattaagaagtctatcctatagccatatacacgattctgggtcacccagataattagctgaaaattatcttcatattcgttttccctccacag

SEQ ID NO: 90776 - DNA, 122 bp, Homo sapiens
ctgtttaagatttcgtctaaacttcttcccacacctcatgagaaaggacccaggagggtgcgtccgtccgtgtgaatgcacttgcagatggctgtaatcaccctaaccgcgcgacttaacat

SEQ ID NO: 90777 - DNA, 122 bp, Homo sapiens
atttcctacctcttccccaagaggcccccctcgacctccttttaaaaattctcttagccacgttgattgtacgggaaaagcctttttaaaacatcttttacgttgcttaaacctacagtttc

SEQ ID NO: 90778 - DNA, 122 bp, Homo sapiens
tatagccctcctgactctgaaactctggaggtggggcccagccatctgtttaaacaagcccgccaggggattcagatgcaccctcaagtttgagaacccttgttctggagcactatttggcc

SEQ ID NO: 90779 - DNA, 122 bp, Homo sapiens
gaaagctgtgactcagagaggttgaataacttgtccgaggagctcagccatgaggcggatcggggatggaaacccaggccgtgggccctgcgcggttacaggcattcaatcctccaaatgtc

SEQ ID NO: 90780 - DNA, 122 bp, Homo sapiens
ttcaaactactacttctatgaatcacttgtagacgttgaggaggagttaggaagaaaagtcgagaactaatttagtcctggggttaaataataattgtagccaacttgaattgagcacatat

SEQ ID NO: 90781 - DNA, 122 bp, Homo sapiens
aatcttattaaactaacctatcaaatctaatcttattaaatcccaaacactggcagggcacggtggctcactcctgtaatcccagcactttgggaggtcgaggcaggtggatcacctgaggt

SEQ ID NO: 90782 - DNA, 122 bp, Homo sapiens
ccggggccgagcattggggactgcggggacgctccatgtcgggtcgcgaatcctgaccggcgtgtaatgcagagaagcgagcacttccgggccgaatgggtgcaaccaccatgggggaggtg

SEQ ID NO: 90783 - DNA, 122 bp, Homo sapiens
accacaggggcgggggctgtggggacatggaggcctccacggtactccttggatggtccacgctgacccggcagccaggaactctctctcccagggtgagcattaactggcaccgactgtgt

SEQ ID NO: 90784 - DNA, 122 bp, Homo sapiens
tctttctctcatctattactgcattgatttgttcatctaatcaacacgtaccaatgagatcgcagccatgggcaggccccgggttagaagccaggataagtatttacggtggagaacatgag

SEQ ID NO: 90785 - DNA, 122 bp, Homo sapiens
ctgtgcagaggagaactcagctcgccctcacgatgcaatctgggtctgtgctgaggagagcgcagctccgccctcgcaaaggcgcacagcgcgggcgcaggcgcagagaggcgcacatttta

SEQ ID NO: 90786 - DNA, 122 bp, Homo sapiens
cccaagccaatctgtcccagctccgggatcacttgggacaggaggtcatcgtgctgtcggcgttgaccggcgagaacctggagcagctgctgttgcacctgaaggtgctgtatgacgcctac

SEQ ID NO: 90787 - DNA, 122 bp, Homo sapiens
attttcctcctccgctccattttgggaaaatagcgtctctccagctacggcaaagggttccgccattttgggcgtggctaggaagctgccatgttgagtgtggctgaggaagtttgagtgca

SEQ ID NO: 90788 - DNA, 122 bp, Homo sapiens
gttagaagctcacagtgagggcagccaccagtgccccctgcaggaggccaacaaggacatcgctccagtggtgtttgtaatcagacacgcgggtgtagcccacgtagagggcaaaggccacc

SEQ ID NO: 90789 - DNA, 122 bp, Homo sapiens
ggaggaaactcctaccatgcccttctttccactacatcctctacaggaggctggtgcattcgctcttcgcctttccagaccccagtacagtcctctgcttctactgaaagccctgcttccac

SEQ ID NO: 90790 - DNA, 122 bp, Homo sapiens
ttccccagcgaaggcaccgacagggccctggagggttcccatagtgggcggaaggaaagccgcctcccccaaggctcaggaatgcccagaatggttgtttcctcacggcctacaagcccatg

SEQ ID NO: 90791 - DNA, 122 bp, Homo sapiens
tgtgaccatccatgtgagcatccgtgtgaccgtgagcgtccgtgtgagcgtgtgaccgtccgtgtgtgaccgtccgtgtgagcatccgtgtgagcgtgtgactgtccgtgtgtgaccgtccg

SEQ ID NO: 90792 - DNA, 122 bp, Homo sapiens
aacaggaacttaagggacaaggtagaagaaaattcagtgagatctccaagaaaatcacctcgtttaatggcacaaggtaatcctttgagagaggtctagctagaaaattagaggtataggga

SEQ ID NO: 90793 - DNA, 122 bp, Homo sapiens
tttgataagtgccacattcccaacaaaggaaatgttcttgctgcagcacatcagtgacttcgaggtaccttggctaggaagtgttcacattcaccttagcatatcacaataccattgctgcc

SEQ ID NO: 90794 - DNA, 122 bp, Homo sapiens
ggaggggcggaggctgagcgggcgaggcccaggcgcgcatgctcgggcgggtaaaatccgcgccggggacagtcagggatgctcccaggcccttcgctcttgctttcagctagtcattgtcg

SEQ ID NO: 90795 - DNA, 122 bp, Homo sapiens
gtggataatgatttaaacaaacaacaacagctaaacaagagcagcggcctccaggtctcacgtcaccgctagatccctcttgacccccccgccagagaaggaggaccctcccgcgccctttc

SEQ ID NO: 90796 - DNA, 122 bp, Homo sapiens
aatggtttggggccaacttataccatggcttaatgtaatcaagagtcagtggtatttgatcgtttcagaattgtttattcttacgtctttggtctgaactgaaaccatggcaacggttgatc

SEQ ID NO: 90797 - DNA, 122 bp, Homo sapiens
tcttggagcttcgagtcgggggtggtgggcggaggaggaggtggggaagctgccctgctgcggactgcacatctgtggcgacagggagctcagtgggcagcacagctcacgtctgagcgcac

SEQ ID NO: 90798 - DNA, 122 bp, Homo sapiens
gaggctcctcctatgaaacaggaagagggagttgccaagggctcttcacaggagccaggacgagggccgcactgcccttaaggagctcccagtgtgtttggagaaagaggccagatcagcca

SEQ ID NO: 90799 - DNA, 122 bp, Homo sapiens
cagcgcgtcctggccgctcctgcgctctcccgcctcccggggctcggaggagccggggcacgttccaggagctgcctagggctgaggttccaggcctgggggtcgcttccagctgccagatc

SEQ ID NO: 90800 - DNA, 122 bp, Homo sapiens
gcccagcgctgacctggttggtggcattgtgttcccaacggcctcttgacgacctcagcacgggtttccacctctccccaagccacctagtgaccccagaattgactggggaatgcctgtga

SEQ ID NO: 90801 - DNA, 122 bp, Homo sapiens
gaggtgcgagcgccgccggacatttcctgacggctcaggtgggcaggctgagtgcgcgagcgcctcactggcttctcataggtacctgggtcaggacgaagccacatagttcctcgtgatga

SEQ ID NO: 90802 - DNA, 122 bp, Homo sapiens
cggagaagcggtggccgccgagcgggatctgtgcggggagccggaaatggttgtggactacgtctgtgcggctgcgtggggctcggccgcgcggactgaaggagactgaaggtaaagccgcc

SEQ ID NO: 90803 - DNA, 122 bp, Homo sapiens
tctctttatttctacacccttcccccttccttagacacagaaccacacatgcagctaccccgggtggcacagcaccaccattgccgaccacaccagacctcatggagacagtgcacctgttt

SEQ ID NO: 90804 - DNA, 122 bp, Homo sapiens
gttttatgctgcatttctcaaccttcctaaggattaacaaactgtgcatggttatgcgaacgacctgttctccccatgaaagatagcaagcatgctgtgatgacaaaaccatgcaatcagtt

SEQ ID NO: 90805 - DNA, 122 bp, Homo sapiens
aggagcctcgggcgcggcctcgcctcccgggcccggcgcctgcctcagcacagcggacagcgccgcgccccttgcctggacccagccgcccgcccgcccccggcccacctgagcccgggccc

SEQ ID NO: 90806 - DNA, 122 bp, Homo sapiens
gttcagcaccccctcctgcagcccggccccgcgaacttccacgtccgcctgcgggccatccgggctgcgggcccatcctcccgctggtgaaaaatgcatttcggtggaatgggaacatctgg

SEQ ID NO: 90807 - DNA, 122 bp, Homo sapiens
tccaaagagagttaaaagcagcagccccggcaactctggctccaggcagaaggagaggcccggtgcagctgaggttcccgacaccagaagctgttgggagaaagcaatacgtttgtgcagaa

SEQ ID NO: 90808 - DNA, 122 bp, Homo sapiens
tttgaggggaggagtggcgcatgtttgttcacgcacgaaaaagaaattaaacctaactaccgttcccagagggcgccgctctgcaaattacccaatcagctctaagtacaaagcatcgcgag

SEQ ID NO: 90809 - DNA, 122 bp, Homo sapiens
gatgggcacatgatagccttcctgggggacacccagggccagctgtacaaggtgagggcccggccttgctgtccggctgggtgtgcccctggccacggaggctcaggaaagcccccagcaac

SEQ ID NO: 90810 - DNA, 122 bp, Homo sapiens
tgtggcaagaggagagaacaggattccgattccgtgggggcgtgggaacactgagttccgcgcagggagtttccctgttcagagcaccttgtgcgcgagttgataactctcggaaaggaaac

SEQ ID NO: 90811 - DNA, 122 bp, Homo sapiens
acgaggctggccacacttctttctcaagctcgtgcgcccgtgagcgcaggtcccctgggccgatgcactgcagttccacccaggggagaggttcagaccacgtctcagaaaacctgagtttg

SEQ ID NO: 90812 - DNA, 122 bp, Homo sapiens
tttatacacaaaaaaatcattttgtgcctgccaaaacgttttcaggtatgagtgcgtgtgcggagagatgcgtaaataatactcgattaccatgccacctacatctttttgttaaaaatgcc

SEQ ID NO: 90813 - DNA, 122 bp, Homo sapiens
gccacacactctggtctgacgatctccaggtttgctttccatgacagagaaataagccctcggctgtgtaagcagttataggtaagcaagtttgattcctgtttggggacaggtcccacctg

SEQ ID NO: 90814 - DNA, 122 bp, Homo sapiens
ctcctaagcccgggggggcgctcccggacgccgccctcagggcactcacctgggcgcgagcggcttcagacaccagctgtctccgccgaccccaggctcgagtctccacacccccgccggtc

SEQ ID NO: 90815 - DNA, 122 bp, Homo sapiens
agggccggacacagcccatcctgcctggccaagccaaccttcttaatggggtctgaatggcgggtgggggtcgggaaggggccagggccgggctgagggcaggacggagggggtgggagttg

SEQ ID NO: 90816 - DNA, 122 bp, Homo sapiens
ttatctgtgcatgctcctcctcccttggcacagtgctcagtgggacactagagatggattcgaactcttcaatgtgttcccattggtgcccaaacacatacatttgtaaggatgcttttgtc

SEQ ID NO: 90817 - DNA, 122 bp, Homo sapiens
cgcggtgagggtgtgtgcgcgtggcccggcgagacgagttgggagtccctgataaggatgcgtctcaggccgggcgcgggtgctccagcctgaaatgccagcacgttgggaggcagaggcgg

SEQ ID NO: 90818 - DNA, 122 bp, Homo sapiens
ccagggtggaaaacggcacccggcggacagggcaggagaccacggctgtttcctgtttcgcgcccctgccagccagcaggcagcttctctgggatggatggctggatgccagcgctcttccc

SEQ ID NO: 90819 - DNA, 122 bp, Homo sapiens
gctgcagacgttcaaccttctcgcgggattttcatttctcgcgtctgccgtacttggtttcgcttcgctagtcccagaggcccagagtggctcgcctggagtctctgtggcgcggtttcctg

SEQ ID NO: 90820 - DNA, 122 bp, Homo sapiens
gagcaagtgggagcagacacttggatgctgcccagacatcaagggtctcagagctgctgtcgtttagcacctgcacgtgtccgtattcacaaaatgcttcacgattcaccaaaaagaagtgg

SEQ ID NO: 90821 - DNA, 122 bp, Homo sapiens
atcaaaaattttatttaaagaaattttaaaaaaggagagagagagagacgaggaagggagcgctgccggaggaggtgttactttgtcgcccaggctaacttggaccccccccccggctcagc

SEQ ID NO: 90822 - DNA, 122 bp, Homo sapiens
gatctatttctagggacccagggccttaggctgttgcgtcagcccagagatggtgcgtggcgaagctcccagtgcaatgagaaattgtggtcttgatttgtatccaaccagacgtttaatat

SEQ ID NO: 90823 - DNA, 122 bp, Homo sapiens
aggaagcgcgagcgccgggcaccgggctgtcagtgagcctggggccagcgggcgagccagcggctccggctcccgctcccgctccgcgcagcaccagcccgactctccccggcccccgccgc

SEQ ID NO: 90824 - DNA, 122 bp, Homo sapiens
tactggggaggctgaggcaggagaatagcttgaacccaggaggtggaggttgcagtgagccgagattgtgcattgcactccagcctgagcaacaggagcgaaactctgtctcaaaaaaacaa

SEQ ID NO: 90825 - DNA, 122 bp, Homo sapiens
ggtgcccggccatagccggtttgcttctgggattggctagagggggtggttccgctgaggcgtggtaggaagtggctgccgtcaatcactcggggagactccaaacagtgagcctagagctg

SEQ ID NO: 90826 - DNA, 122 bp, Homo sapiens
ctgcattttctaaccccctccatgagagtcatctaaaagcattgaacatatcagatatatcgagttattgtcaaatgtaccacttttctttaaaattgcagctgtttatctcttcatcagtg

SEQ ID NO: 90827 - DNA, 122 bp, Homo sapiens
ccccagccgcgagccagacctcgcccctctggccccgcccacgtctccataactgagggccggtcctgtcagcccacccagacttgaactttgcaccattccctaagccccccccctccccc

SEQ ID NO: 90828 - DNA, 122 bp, Homo sapiens
caccagcagacgaccacacacatcgtggaacactagcagcacacagcgctccttaaacagcgctacaccagcagacgaccacacacacggtggaagatcagacgccacacacggaaacattt

SEQ ID NO: 90829 - DNA, 122 bp, Homo sapiens
cacacctataatggttccaagagccacattccgactgttgtactgcgggtggcaatggaacggtcttccgattacctaaaatgccacagattcccttcttctctaatacgcatccgattacc

SEQ ID NO: 90830 - DNA, 122 bp, Homo sapiens
ggcggagtgtgtggacacgatctgacagatccggtgagtggccacgcagtcctcctgagtcgggtccatgcccaaccgcatcaggacctcacgggccttccggatgccatccttctcccctt

SEQ ID NO: 90831 - DNA, 122 bp, Homo sapiens
ctcattggagcggaggaagttcgtgggtggagctggttgtttggcgcctgcgtcttgcggcgagcgggctggcgtgcggcgccgttgcgggcgggagcggctgcaacgccggtgcctgagga

SEQ ID NO: 90832 - DNA, 122 bp, Homo sapiens
gaacacatttaacctggcctggagtaagacaggggacgggcctgaatcttttatgggacccgcccccaatatcaaccgccccgtccccagcacagaactgggctcctagacgacacggtgcc

SEQ ID NO: 90833 - DNA, 122 bp, Homo sapiens
gcaggcgcgggggacgaggtcaggctccgtgaggtcagaagtgaggcgcttcccacgtcccgctcatggggacgcccgccacccttttcttggtctgcgaatcctgttcccaaatgggcaag

SEQ ID NO: 90834 - DNA, 122 bp, Homo sapiens
acctcgtgatccacccgcctcggcctcccaaagtgctgggattacgggcctgagccactgcgcccggctgacccaattacttttaaatcattgtgacttataggctgaatgtaatggtttca

SEQ ID NO: 90835 - DNA, 122 bp, Homo sapiens
gaagttggagggggttggaccacgtggacgcttatgtaagcctaggggttttcgactaggcggaaggttgccaatcaaagttttcaactcagaaagttagggacagaacctcttccttggct

SEQ ID NO: 90836 - DNA, 122 bp, Homo sapiens
gcgaggagaccctgggtgaccttggatcagccctgcctctctaggcctcagtttccctttcgtgcagggtgcgtgtgatgattcagtgggaccgaggcttgggacggcccaggccagcccaa

SEQ ID NO: 90837 - DNA, 122 bp, Homo sapiens
atccttcgggggctgataaggctccgcaatggtctgaactacaattcccacaatccagggcgatttccgctttgtcgcgtttcctcaaggctccgccccatttcccatctttcttttcagtc

SEQ ID NO: 90838 - DNA, 122 bp, Homo sapiens
gccgccgcgacgaattggcctctgggcggggacttttagccaaaaggaaaatggctcagccgggaactggtgcccaggccatggagaagctgattcaaactttacttgtccacaccggtaga

SEQ ID NO: 90839 - DNA, 122 bp, Homo sapiens
gccatttgctggagacctcaggtcggcaggaagccctcactggccacccaagcggactcccggctccgctctctgccctgggctccgtggggagaaggtgcctgtaaactatggggggttat

SEQ ID NO: 90840 - DNA, 122 bp, Homo sapiens
acgccaccggagctatactgctgtagtcgtagcactgtaccatcccgcttctccaaaactcgcacaaagctccgcagtgggtcctccagcgaggactccagcgtatccgccattgcgcccgg

SEQ ID NO: 90841 - DNA, 122 bp, Homo sapiens
gcaatctcattctccagccgggtcttcacgtccagcagcacctggtactcctggttttgccgctccaggtcggcccggatctcagacagctgctcctccacgttgctgatgaggctctgcat

SEQ ID NO: 90842 - DNA, 122 bp, Homo sapiens
gccgggcatggtggctcaagcttgtaatcccaactacttgggatactgaggccggagaatcgcttgaactcgagaggtggagattgcagtgagctgagattgcaccactgcactgtagcctg

SEQ ID NO: 90843 - DNA, 122 bp, Homo sapiens
gggaaaaggctgccgctctgggaggaggggccgcggcgatccacctgaggtcctcgcgagcggcgacgtcacttccgctggttcaagcaccgcgagactatacctagctgcccacccgttac

SEQ ID NO: 90844 - DNA, 122 bp, Homo sapiens
tgacaccgaggatgaataaatgatgctcgctgactacccgtggccaaagcccgtggccaccgagcgccggctggcaggggcagtgaccggcggccggcccgttcgtccctgggctccgcaag

SEQ ID NO: 90845 - DNA, 122 bp, Homo sapiens
gtcgatgagccgtccagcattttccagagcttcctgcagggctgcggcagatgtagaggccggcatcgccgcgcccaacaaagaagacggcatctcggaaatcgtagacaccagggtccaga

SEQ ID NO: 90846 - DNA, 122 bp, Homo sapiens
agcgaggactggctcctgcacgtgagagtccaatctcaagagcgggaatcggaagtctcccggtgtgacgtctctgggaagtacagttccgtgatgccggtggcgccagactgagccaagga

SEQ ID NO: 90847 - DNA, 122 bp, Homo sapiens
gcggggaatcacgcgcgttttgtcaaatgtgttctcatttccctgcgcattcagccacaacggctgacatggactgcaagctgagccctgagctaagcgtttgagagtagaaccaaggagac

SEQ ID NO: 90848 - DNA, 122 bp, Homo sapiens
gccaagggatcaggttaaaattctttgcatgcagaatgaagaatgaggaggtgctgcgatcgaacgactgcgaggaaacacacccgctctcatggcattcccagtaaactgagaagacgtga

SEQ ID NO: 90849 - DNA, 122 bp, Homo sapiens
taaaacttcacacatgcaaaggggtaggaagctgtggatgcctgtccaacaaaaggaaagcgtattaatctgcaaagaaaacatgttttcccattgctatggtgatcagcttatacccaaaa

SEQ ID NO: 90850 - DNA, 122 bp, Homo sapiens
aggcagaaatgaggagcccttccctgggcagggcagccccatactcccagccagtgaggacgaaacaaacgcaaacactgcttgcgcctgtgcccctgcccccgccccgaccaagccccacc

SEQ ID NO: 90851 - DNA, 122 bp, Homo sapiens
gtgacgttagcagccttcgcggctatttatatccacacgattggatttcattcatgaaaccggggcctggtgtgtctgtgctctgggacacgggtggcaaaggttcctcggctctacgcaga

SEQ ID NO: 90852 - DNA, 122 bp, Homo sapiens
gccccggaccgagcccgaggcggcccggccggccccacggcccatcccgagccagccggacgagttgtcaaggtaatttcaacacgtctgggtgatggatagagacgaagggccgcggcggg

SEQ ID NO: 90853 - DNA, 122 bp, Homo sapiens
agtgagcttcgagaactccaaacgtctttcttttttccttttaatctataaaatgggaagcgttgcgttcacgagtccataaacgaatttctagcgctccctggagtttgtttagacagcac

SEQ ID NO: 90854 - DNA, 122 bp, Homo sapiens
gtgacgcggcattacataatgggcgctgaggcggcggcggcgggcggggacacgtgaggccgctcggctccctgacccacattccccggggccgcagggacacgtgggggcgggggcgcgcg

SEQ ID NO: 90855 - DNA, 122 bp, Homo sapiens
tcccggcgcaaagacggtgccaccaggcacggccaccggatccccgctcccgctggctcgcgcctcgggggaagctcagactcctaaactcgcactctccgtgctttgcgccgggacccctg

SEQ ID NO: 90856 - DNA, 122 bp, Homo sapiens
ggaaccccagcaatctgcaactttaaatgggcccacactaaagttagagaaccacaggctcgctcacaaccctgacttctccatgtcagttccgatctttgcgaaccgcagacagggaaggt

SEQ ID NO: 90857 - DNA, 122 bp, Homo sapiens
cccaagggaaacctggacatctttggggacccggagagccggcgagtgattgctgggacacggctggagccgggagagagtagcactacgccccctccctccctcctctctctacccctcac

SEQ ID NO: 90858 - DNA, 122 bp, Homo sapiens
tccctgctggttaggggatgcagctggggctaaggggcaacagctgcactttctcagaggcgcttgcggctctggcaggcagaaagaatgagatcctcccgagattaagggttatcgagtca

SEQ ID NO: 90859 - DNA, 122 bp, Homo sapiens
cctcctcccgccgcctgcggcccccccctcgccggggaccgagcgcgctcgctccggcgccggcctcgcctcctcgcagcagcgccatggtacgtcgccgcacccactttcgttttcgcccg

SEQ ID NO: 90860 - DNA, 122 bp, Homo sapiens
cgttggcgtttcggcgccataaggtggtggttgtcgtctgacaatttgcacaacaggtgccggctcttctggcggccgactgggagggcaaggcagcgtcagcaggctggactcccacgccc

SEQ ID NO: 90861 - DNA, 122 bp, Homo sapiens
aatggtcatttatgggcttggggggcgaccagggcagcgcgcgctgacctatgacgtcatcgggacgttaagcatcgtagcattacctggacgtagccccatttctcttcccggacaggtcc

SEQ ID NO: 90862 - DNA, 122 bp, Homo sapiens
taatcaggtagtcggccatggccaacacaggacaccgccgcgtgtctccgaggaccgcgccgcagagacctctgccgtctgggccgcgccaatataaaccagccgatttcgtcactgcgctg

SEQ ID NO: 90863 - DNA, 122 bp, Homo sapiens
ggatgtgtttagagagctgattggaacacagaaaaccaggacaggatgttttcctccaagcgggtcataaggcttcagcttctgggtggtgggtggggtggggtgggcatggaatgaggggt

SEQ ID NO: 90864 - DNA, 122 bp, Homo sapiens
gtggccactatagccattccattgcaccagggtggagggctgtccaccaaattcagagcccggcatagtgggtgggggtcacccactttatctgactctcatgggtccttgatctcaggggt

SEQ ID NO: 90865 - DNA, 122 bp, Homo sapiens
tttattttactgtaatctattgagttgtatttgtttttctgaatccgcttcctaggaaagcgccccctcccattttaaaccgttctcaggtggttttttctggaagcagcagtggtttgtcc

SEQ ID NO: 90866 - DNA, 122 bp, Homo sapiens
ggaggaattggtaagagtgagacggcgaatccctctgactgtcccagccttctgcttcaccgcccacccgcttttcctttctgtttctctctcctgtttctccccgctccacttccctagtc

SEQ ID NO: 90867 - DNA, 122 bp, Homo sapiens
aagcgccttccacaactttttcctcccaggggcctgtttttgggacagtaaaagactcaccggccatggcttttctctcctcccttcttgtgtaagctgaaactgaaagcatgcaccacctt

SEQ ID NO: 90868 - DNA, 122 bp, Homo sapiens
tatatttgcgcagactcattttatagtttggtgcaatttaggatacccccaaagtgcaaacgaagggtctcattaggaaactaaatgttgtatgcattttggttttcccacagcagttccgc

SEQ ID NO: 90869 - DNA, 122 bp, Homo sapiens
tggggggagcttgaaaacgcagaaacacagacaccttagcgtgggttggttgaaagagggcgccgtcaaaatgcccaccccatccttagagacgaaaaacaggtgctgttcccagctcctgg

SEQ ID NO: 90870 - DNA, 122 bp, Homo sapiens
gctgactgcagtgtgcagacggacgacgaagacagtgctgagtgggagcagccagtgcgccgccgcaggtctcgtcttccccgccactcagactcaggctctgacagcaagcacgatgccac

SEQ ID NO: 90871 - DNA, 122 bp, Homo sapiens
ggcttttgggcttaaattgacagccaaatactccccattcctgttacagtttgatggaggcggggaacctgaatttctcagagaataactataactcataaggtttagccaccacctgcaag

SEQ ID NO: 90872 - DNA, 122 bp, Homo sapiens
cagacccagcccctgctccacactgtgccagtagcctaggtgtctcaggcccctgggccccgcagatggccatttccggtgcctgcccagtggccactcttctggaaggggcttggaaaaga

SEQ ID NO: 90873 - DNA, 122 bp, Homo sapiens
atgatgacgacgatgagtcttccaggacacccacgttctttgcaagatatttctgctaatcgtttctaccagaatcagttggaaaacttttttttttaagttttttttttttctctgtatct

SEQ ID NO: 90874 - DNA, 122 bp, Homo sapiens
gggggccaccactcgcttcctggagggcggcggcccagccctggtccacccacgcgcggccgggacctgcgcccctacccccgtggccacgccctccagccccccgggctcacggcctcaac

SEQ ID NO: 90875 - DNA, 122 bp, Homo sapiens
agatctgttctcctggaaaccccacacacacacacccagacacatcgcgcacagttctcccggaaacgtcacacacacccaggcacatcgcgcacagttctcccggaaaccccacaaacacc

SEQ ID NO: 90876 - DNA, 122 bp, Homo sapiens
tgggctatggggtcacctggctgtgggtcactgggctatggggtcacctggctgtggggtcgctgggctgtgggctcactgggctatggggtcacctgggctgtgagctcaccggggcgtcg

SEQ ID NO: 90877 - DNA, 122 bp, Homo sapiens
catgctctcctgggtgggcgccccacgctccaggaagcagaaactgcaggacaaagctggcgcaagtgacatgcccacgtggctgccagcttccatcttgggatctgctaaggccaaagcag

SEQ ID NO: 90878 - DNA, 122 bp, Homo sapiens
gaggaggaagcggttaggtgggcagaccccttacttgatggatgtaagtgcagccttggtcgcccccatacccgggctgggcgcaaggcgggccctgctgcccccaaccggcgccgcgcccc

SEQ ID NO: 90879 - DNA, 122 bp, Homo sapiens
cgtggtttcctgatagcagagttcagggtggaaactccagatccagctttctgcctgtgacgattctggtggatgtgagccttgggtgctgcctctgacacctgctgtgcacggcagccaga

SEQ ID NO: 90880 - DNA, 122 bp, Homo sapiens
aggtgttctccatctctgatgtctgtgattcatcctgcacagctgcgcgcacacagcacacgcatacacaggctcccagaatacggcgccccacacgctgtaccgcccgtcgcgttctggac

SEQ ID NO: 90881 - DNA, 122 bp, Homo sapiens
gtccccatcatggcaaaggcccctcaaggggtgcatctcatctgctactcgcagggtaggcgactcccctgcccctaactcctaagccctatctgaggcttgatccttatctgagggacact

SEQ ID NO: 90882 - DNA, 122 bp, Homo sapiens
tataggtgtgagctactgtgcctaaccacattttagctttttattacaaaaattttcggccgggcgcagtgactcacacttgggaggatgaggcgggtggatcacgaggtcaggagttcaag

SEQ ID NO: 90883 - DNA, 122 bp, Homo sapiens
cgacccgtgccgcccgagcgccgcgctgcgtccgcgccactcttctcgccgccccgatggcgttccggggctggaggcccccgccgccaccgctgctcctgctgctgctctgggtgaccggg

SEQ ID NO: 90884 - DNA, 122 bp, Homo sapiens
gaaatcactgtgctttatttggagcatctttggtggatgttgctccgagaacaaagcctccggttgccctgtcccaaaaatggatccgggccatgaatgaataaggcctcagttaggatagc

SEQ ID NO: 90885 - DNA, 122 bp, Homo sapiens
tccccattttctgacccaagcgatttgcggatcccggggagaatctggccgcacacatggcggcctgaaacgttcctccgaagtctgacccgtctgtcagccttggagggcagccagcagtc

SEQ ID NO: 90886 - DNA, 122 bp, Homo sapiens
ttgcatcaacaccggaggtcaaaccaggctaggagagggcatttggaatttcatttcctccggctctctggctttgtttacaaagtcagaggtgaccttagagattttgcatctaatttggt

SEQ ID NO: 90887 - DNA, 122 bp, Homo sapiens
ggtgggagcttacaaacgggcgccagagctcccgcagagactcgggctggagggctgtagcgcaccgcagcctgctgccccagaaccacagtcggcggccccaaacccacgctattaaagtg

SEQ ID NO: 90888 - DNA, 122 bp, Homo sapiens
tgcataaagtgaaaacacagacttgcttcccagattccacacagctctaagcaaaatgtacgtattcagactcaggtttaaaactgcaggcacattattcattttttctgaggcagttttct

SEQ ID NO: 90889 - DNA, 122 bp, Homo sapiens
acagaggagaggggcgctcaccagggcgcttgtgcaggtgagcgagccccaggcaaagagcggtgctgtgactctacctctattcagtgactggggtggagggaggtaggttagggagtgtc

SEQ ID NO: 90890 - DNA, 122 bp, Homo sapiens
atgccaccaggtatgaagtggaaagtcatcagcggcgagtcgccctgtgtttgtcttcttcggctctcccgatgtgttgactcagctgaaaaaagatactgacaacagcaccccgagtcacc

SEQ ID NO: 90891 - DNA, 122 bp, Homo sapiens
gccagcggctctgattgtgtgttcgggcccgcccgggctgaggggtttggggtccagtggcgaggacagccccacggctaaactgcctttcactgcgctgacccttcgtctgccccttgtga

SEQ ID NO: 90892 - DNA, 122 bp, Homo sapiens
tctcttccaggacatcaaggtaactagtgtgtgggtaatggactacatctcccagcaggccgtgcgcgcgaggagccttgatttgagggcgtaggtgtcgcgtgggcttctgggagattgag

SEQ ID NO: 90893 - DNA, 122 bp, Homo sapiens
tgcgagctcctagcacccgtcctggcagcctgcaccccgacctccctccaactcaccactcggagtccccactacacaggcagagatgctggggggttttctgaggactccagggccaaagc

SEQ ID NO: 90894 - DNA, 122 bp, Homo sapiens
ttttttttttgagatggagtctcactctgttgcccaggctgaagtgcagtgacacaatctcggctcactgcctcccaggttcaagcaattctcgtgcatcagcctcctgagtagctgggatt

SEQ ID NO: 90895 - DNA, 122 bp, Homo sapiens
ggtttctcttaccgaaggcagaaagtgaacgaagtgtggaccacacagtggggcaggtggcgaattgaactgacctgtgattcaggtatttgaaagaaaaattgttccctattagagaccct

SEQ ID NO: 90896 - DNA, 122 bp, Homo sapiens
cggccggcttgagagttttgtgctttctagatgaagcgcgtcttcgcatacgtgcggtcgcgtgatctcacaagatgcttggcatgtgagtattcttaacagactcattctacagttcggga

SEQ ID NO: 90897 - DNA, 122 bp, Homo sapiens
agatttacgtttggatttgttagtttaaaaattagttttccagttacccgggctggagtgcgatggcgcaatctctgctcactgcatcctccgcctcacaggttcctgcaattctcctgcct

SEQ ID NO: 90898 - DNA, 122 bp, Homo sapiens
ttttggcatcatgagctcaggagagaactggccggtgggtgagcaggtgcgaaaggaaaccgagaaaacccggggggtactttgtgggttaaaagaggcaactgcctttccatcctgaccag

SEQ ID NO: 90899 - DNA, 122 bp, Homo sapiens
ggcgtctctgtccccatctggttttaggtaacaagcggagcttctgaacttctcggctctcggcagcggctgtatttcctctggcctggttgggcttttcccgcctctggttgcttttctgc

SEQ ID NO: 90900 - DNA, 122 bp, Homo sapiens
gcatctgaaacccagacacaggcacatgcagtgggaacctcacccaggggcagccctgcccgcctcgaggggtgatgtctaaagtcatggacaaaggctgctccactccctctgtgccccaa

SEQ ID NO: 90901 - DNA, 122 bp, Homo sapiens
gatggccgaagcagggacgaaggaacggcttcgctgcgggaggctagagggctgcgcttccgccctcccggcctccctcttgccgcatgagcagcgcagggcctcctgggctgtgctggggt

SEQ ID NO: 90902 - DNA, 122 bp, Homo sapiens
cagagacagtcaggaacaggaagacccatgaggagggagcccacaggccaagtcagcacccgcccgcccctagtccccagcacaatgctaagttgcagtgcccgactgttctgctcagaact

SEQ ID NO: 90903 - DNA, 122 bp, Homo sapiens
gcgcgaggggaccctctgctgggcaccaagctgccggaaagagcaccgctccggagtcagcgaccttattggattcttgccccaggtctgcccttaacaatgcagtgtgacccacctagggc

SEQ ID NO: 90904 - DNA, 122 bp, Homo sapiens
agaggaaaagcgtcttctccccgcgacgacgcggcacagcctgggcccaggaggctttgccggccaggcccagcccaggcccgtggcttggctgaccacaccctggccccacaaggggcagt

SEQ ID NO: 90905 - DNA, 122 bp, Homo sapiens
gagccatggttctgggatggaaagtccatcatcccgaatggccagctgaaggtcaccccccggaaggaccctgcgtggttcacttatttatttatttatttatttatttatttatttattta

SEQ ID NO: 90906 - DNA, 122 bp, Homo sapiens
aaacaagaggacttggaagaaaagagctgctatacatcatatgcagaggaagcttctacgcgctagagaggatcaaggggccacactggaccatgtgaacagccatcctgaactgccatcag

SEQ ID NO: 90907 - DNA, 122 bp, Homo sapiens
cctgtggtggggagggtgtccctgccttcccccagactgagagctccctgaaggcagagtcggctccagcacccagcctgccgcaggaccagaccagagttctactgggtgagttaagtgta

SEQ ID NO: 90908 - DNA, 122 bp, Homo sapiens
cgcaagcgccgactggggagccgcagtggggaagaggaaaacctgagggaaaggcctaggcgcgacggcaacccccaccctggcgcaggcgcacaacgaccctccccgggtgggagccagcg

SEQ ID NO: 90909 - DNA, 122 bp, Homo sapiens
cgcactgcctgaggatgctgctttgcgggccgcagggtcccagtgaccgaccccgtgccccgccctgaaccacctgatctccactaaagcccattgtgcaaaatgaagacaaggaatgtcac

SEQ ID NO: 90910 - DNA, 122 bp, Homo sapiens
gtgtctggtgctactggcaggagatggacctttcttccaggtatttacttcctgtggttgcgaaagataggatgtatttcttctggatttgctgcaatataatattttagtatcaatttgat

SEQ ID NO: 90911 - DNA, 122 bp, Homo sapiens
gcagaatactcatccccaaccactctagtttaactgctaaagtcagtgttgcaaggatcccgcgctctccaatgcagtgaatttctgagaccagtttggcaattttgcttggcagcctataa

SEQ ID NO: 90912 - DNA, 122 bp, Homo sapiens
ccctggagactgacttcatcaacgggattcctatggcttcagactgagtttggtcaatggcgtaccttagcaggatattattgggaagaggtattgccctccagctagctgtgtcctttgat

SEQ ID NO: 90913 - DNA, 122 bp, Homo sapiens
accccagccaggctccagcggtcccctctcttccatcccgccatctctctgaggggcttgcgtctccctgatgcgctctggtgtctgtctgagccatccatcaaggatggcaggctggggga

SEQ ID NO: 90914 - DNA, 122 bp, Homo sapiens
cctgagttgagtctgatgccttcactttggagtattgtttcctgtgctccaagaacactccgagaagttatccaagagttgggaaaaatcagtcattagaatccaaacctcctgctatgatc

SEQ ID NO: 90915 - DNA, 122 bp, Homo sapiens
aggtggggaaggcgtccttgcaggtggccgcgaagatgtagttgcacgtccccgagaagtcgtacacgtggtggtcgaaggtggagaagtgaccagccccccacgtggagcactggcctttg

SEQ ID NO: 90916 - DNA, 122 bp, Homo sapiens
ggggagactaaaaaggccagggaagttggcctgccggaagttcccagggagaaggcagcgcgttgtacccgaggtaaggcttcttggagtcagagcaggagccggaactgtgggcccagtag

SEQ ID NO: 90917 - DNA, 122 bp, Homo sapiens
cacgccccagtccctttcccggtctttccggagtacccaatgtgcaggatgccaagggttcggtgtcctcagggaccgcccaggcagtgccctccagatagacgaagccgcacacagcacct

SEQ ID NO: 90918 - DNA, 122 bp, Homo sapiens
cagaaatgcgtgacctcagggaaccactgtggagggaggaggcgggatcaggggtgcggccgggcccagatgtggggccaccacccaggaggccggcctcaccttgatgaggacgttgtcgt

SEQ ID NO: 90919 - DNA, 122 bp, Homo sapiens
ggactctcccagccatctgaaaggaggcatagtgggcagagttctcacctgtcagggcctcgacatggacaggacctacatgcttcccatcactgaaaccatacagggtcaccaggtatctg

SEQ ID NO: 90920 - DNA, 122 bp, Homo sapiens
acgccaccttctcccaccaaaggtggatccagctaacaggagactggatcgcgaccatagcgcgtttgtgcccagttctggggaaagcctcatgttagcgagtggccctcggctcgtctcgc

SEQ ID NO: 90921 - DNA, 122 bp, Homo sapiens
ggcagaggaagaggaggcaggaggagggagggaggccgggcagcagctgggggaggagggcgtggacaggccgggaaaaggagcaaaggcaggatgaggacacaacactggcctgtgcctgg

SEQ ID NO: 90922 - DNA, 122 bp, Homo sapiens
atgtgcttgcgcataactggggccgcctggcctcccgcgggcggcctttttaaccgcgagcgacaagaagtaacctgactgtccggctgctaggctgggcaattttccagctgttttgccac

SEQ ID NO: 90923 - DNA, 122 bp, Homo sapiens
aaaatctttaagccaatcttgtaagtacgaccatctcccttctacaggtgagaaaactgacgtgtacggagtgatgacagggtaggggctgcgggattcgaactcgggcaacacgtgcagtg

SEQ ID NO: 90924 - DNA, 122 bp, Homo sapiens
cactcacttcatgtggacttggagctacagaccttttacatccatcacagattggctggacgggttgcaattgctatgcacagcctgattggcactgcaggtttttagagccattttgagtt

SEQ ID NO: 90925 - DNA, 122 bp, Homo sapiens
caagaaggaaaggggcaggagaaggaacctgaagggaaagggaactgggcagaaaaagaacggtaaaagagatgtgctatctgggcttcctacaaacaggcagacatcacccattgcgtacc

SEQ ID NO: 90926 - DNA, 122 bp, Homo sapiens
gacatcgatggcctcgctctggcagaggagtagtgtggctctgccgagaactggggagcccgggtccccgcagggccaaggggagggagggctggcggaaggggccgcgcccacagccccag

SEQ ID NO: 90927 - DNA, 122 bp, Homo sapiens
tcttctctgcacggcctagattacctaaatcatctgtagcacactgactcgagcatcaggcgtcccgcaggcgacagtgggcagaattcccaaagaacctcgggtcagtttacccactcgca

SEQ ID NO: 90928 - DNA, 122 bp, Homo sapiens
aggctggctgctcctgcagatgtgaaaggagcccggagacttagctctgaatcctctcggcgctgcatggggatattatcagagtctgggatttctattggctctgaacaccaaacaaatca

SEQ ID NO: 90929 - DNA, 122 bp, Homo sapiens
accggctcaacacggatctcattaatgcagcccggtagactagcaatctcgggaaggaagcgcggtcagcggagctgccggggctgcggggccagatcaaagcggaagacggaggctaatca

SEQ ID NO: 90930 - DNA, 122 bp, Homo sapiens
gtggggctgctgagaaaccccagacaccccctgccctcctccctccaggagtgtctgccccgtcatagctgtaagctcctcagggggtagaggcagatggggatccccccccatcccagccc

SEQ ID NO: 90931 - DNA, 122 bp, Homo sapiens
tacggtatcgaacctgtccctccatgtgccgtatcaaggctgtatcttgatgtaccgtatcgaggctgtacctcggtgtgctgtatcaaggctgtatctcaatgtataatgtcgaggctggc

SEQ ID NO: 90932 - DNA, 122 bp, Homo sapiens
tgaccctgaggcccaggtagactttggagcaactgccaactccggccggggccagggactcgagtctctgcagacacagcccactatcaagtgtggctgaggcccgaggtcggccccaggtc

SEQ ID NO: 90933 - DNA, 122 bp, Homo sapiens
gcggtcaggcatcccgtgaccgcggcgggcgcccagggccccgcggggagagggcgggggcgaggagcaaacttggaggcccccacctcgcccccgggctgttgcgaatgcggctttcggcc

SEQ ID NO: 90934 - DNA, 122 bp, Homo sapiens
cagtggatctcatccaccgacgtatccctcgcaccattgaccgaaacacaggagcgctatcgacatgtgccgaatgaatgaatgaatgaatgaatgagccccaggtgtttaggagaccctaa

SEQ ID NO: 90935 - DNA, 122 bp, Homo sapiens
ggaaagacaaaggattggaagtctggagactcacaggaacgaactgattttgggcaagttcgtttggacacgggagagggggttggtgtccttatctaaaaatgaggacaatcgcatctcct

SEQ ID NO: 90936 - DNA, 122 bp, Homo sapiens
ggggttaaagtacttgcacagtttcactgctagtaatcttggagagccaagatctgaactcggggatctaggcccttacccacaaccaacatgcctaagtaaggcaagggtgtggacagtgc

SEQ ID NO: 90937 - DNA, 122 bp, Homo sapiens
actggaagcgggaccgtccagagaagaagactgcgcacagggatcgggagctgggacacacgttagtcaaggtgtacgagggaggaatcaccgccatgtggagccactactcggggaggacg

SEQ ID NO: 90938 - DNA, 122 bp, Homo sapiens
ggccagctttactgtgctagaggaagagggtccccacatccggccctggccctcctggtccggtttgctgaagcaacacacttggcctacccactgggtggggcaggaagtctcgagccttc

SEQ ID NO: 90939 - DNA, 122 bp, Homo sapiens
cttgggcaagtcatttcacctcccacaagcacaacttcaactgaaaaggatgctggcctacgtgggcccaaaactttcaccaccaaacaccagtctctctctgtctttcaatacacacacac

SEQ ID NO: 90940 - DNA, 122 bp, Homo sapiens
gtggtgcccccatgggcttctctcacaccgtggatgcgggccaggaatggcacgtttgtccgggccctgcacaggggctgctgggaggcactttcatctgtgggaggacccaggcccgcttt

SEQ ID NO: 90941 - DNA, 122 bp, Homo sapiens
aaacagggagagcaggctattgcggcaaccgaaccctggcagcgaaggaacttcctgccccggaagagacagggtctcccaggctgtagtgcattggtgccatctgggctcactgcagcctt

SEQ ID NO: 90942 - DNA, 122 bp, Homo sapiens
ctcgtgtcatctgaattctggttcgcatccaccctaaggacagcccccatcaggcgctgtcgcctcgggcttcaggactgtgtctcctttgtcttcgtgctcctcattccctgcacttagta

SEQ ID NO: 90943 - DNA, 122 bp, Homo sapiens
tggtggcattttgctgactaatagtagaatttgttggagttggtggtgaccttttcctcccgttacatttctaaatattttgcttgtcaactataaacaagcccattccaaaacaaaaatca

SEQ ID NO: 90944 - DNA, 122 bp, Homo sapiens
gcctgcggcagctgtggctgcccacagggcctgggagcagaagctggcctggacctgggccggaagccctcacccagcaccagcggcacgtccgtggtctcggttctctggaccgcaggctt

SEQ ID NO: 90945 - DNA, 122 bp, Homo sapiens
tgtgcccatgaagcagccacaggtgtttgcccgtttagatgcagtaggtgtttgcttttccgatgtgtggaggcagggcccagaggtttactaagcccctgttctcacttttgcagtgccgt

SEQ ID NO: 90946 - DNA, 122 bp, Homo sapiens
gaggctccaggggaccacagctgactctgccaggcacagagggttgagtcattctgcaggcgtcagagctgttagcaacagctctgctgatctgtatgcagctccaactccctctccagttc

SEQ ID NO: 90947 - DNA, 122 bp, Homo sapiens
ggttctccattgtaacctattccttatattacactgttaaaattgtaatgttacatactacggttttttaaattatttttttcacattggtcatcagaacattgtaaacaatctttaaaaaa

SEQ ID NO: 90948 - DNA, 122 bp, Homo sapiens
gggagggggagccaaggtcgcctcgagcaccttgggacttgtagtcccggagggacaggacgtagcccaagacgatcccatttggattcacccagagtccatttcacagacaggaagggcga

SEQ ID NO: 90949 - DNA, 122 bp, Homo sapiens
cgcctccctaccatggtgccaggggtctccctccgccacctaggaaaggagggagatgtgcgtgtcaaatattcatctagtcccctgggggaggggaagggtgggtctagacatactatatt

SEQ ID NO: 90950 - DNA, 122 bp, Homo sapiens
gatactggtcttttaggcacacaggttatcctgtatattaaataatagtggctgtgccagcggcttgttaaactgtaagatgtgacgcaaaataaatgaaggcgatgacagtgaaaggggag

SEQ ID NO: 90951 - DNA, 122 bp, Homo sapiens
acttgcccatagcaagtgctcagctgaaatgcactgaggtacatggctggagccctaccccgattcttactggatgaaggcttcctccctccccttgttaggctgagccccaggcaactttt

SEQ ID NO: 90952 - DNA, 122 bp, Homo sapiens
aggtccagtcccagcccagtgatttgttgggaggccctgggcctctgggcttcagtttctcgggcttccaggcgggtcccggggcggctaggaaggagccgcccagagagggaggcgcgccc

SEQ ID NO: 90953 - DNA, 122 bp, Homo sapiens
gcctgatcctatagcaggggcatcctgggggtgggggggtcgttattctccagaaaaggccggacatagaaagagggggaccagaggctcttcaagggatgcctcctgcaaaccccatgccc

SEQ ID NO: 90954 - DNA, 122 bp, Homo sapiens
ggcaggcggctgctggccagggtctcgggcacaccctgagatgagaatttcatctaagagcgcgcgcgcgcacacacacacaacccactcacactcttctgggcgcatcgctgaccgcgcca

SEQ ID NO: 90955 - DNA, 122 bp, Homo sapiens
cgcgactaaagaggggactggttttgatgacagtgatttatcgcctcagcacagcacgcacgggacgctgtctctccaagcgatttgaccagagcatcccgtcctcgcctcctgtccaaacc

SEQ ID NO: 90956 - DNA, 122 bp, Homo sapiens
ttcactggccccgaaagaaacttctctgtcaggccacaatataaccagataccagacacacgagatgttttggagggagggtggtggagccaagattgcagctccttattgaggaaaacagt

SEQ ID NO: 90957 - DNA, 122 bp, Homo sapiens
gctcgggggctggaggtccttggactttggtcgaaggctggcagctctgagcccctgccccgcgggccccgcgcggctgcggaccaggggcccttgcacgtgtcggttcttcctggactggc

SEQ ID NO: 90958 - DNA, 122 bp, Homo sapiens
gactaagagtcagtttaatgtattatttctagtgcatttttttcctcgccaagaataaaacggaaggtgagaataataaaactaggagactgaagtacataatgcaaaatacatacaaatct

SEQ ID NO: 90959 - DNA, 122 bp, Homo sapiens
ctgggctgtgggttccctcttacctggggacttgctacttcctgctggaggacaggcaggcgggcaggtgctatgggtgactagagtccgaccccccattttatagtctggcagacatcagg

SEQ ID NO: 90960 - DNA, 122 bp, Homo sapiens
cgtgaccagtggggcggggcctgagccagctgtgtgcggatggggcggggctttggaggccgcgtgaccagcggcgggtcacgtgacgcggtgcctggcgccgagcctcccaagatggcggt

SEQ ID NO: 90961 - DNA, 122 bp, Homo sapiens
aaaaacaatgtctctcccttccaatgctctagggaatgtttagcaagcatctgctgtaggcgaggtcctgaactgggtgacttcctatttacctcgtcagtcgcaggataatcgttcagata

SEQ ID NO: 90962 - DNA, 122 bp, Homo sapiens
gaaagcgagggggcgggactacgcgcactgtgacgtcatgatgcggagcgggctttatgacgtcacacaagagcgggctcctgatttgtgatgacgtccctggagggggcggctcctggaga

SEQ ID NO: 90963 - DNA, 122 bp, Homo sapiens
ggaagcaacctgccgcttccgctgaccccgcctccccacccactaccctcctccccctcccgctggagtttactcaggcgagccataccgctcccgccgcccgcgaaaaccctgagcgggag

SEQ ID NO: 90964 - DNA, 122 bp, Homo sapiens
gggggcgcggtcagctggcaaaacagcaagggcgcgtgagcgcgggcccggggcggggggcggggggcgggggcgcgcggcgaggctaacccggctgctgggccatgggcggctccgcaggc

SEQ ID NO: 90965 - DNA, 122 bp, Homo sapiens
tcatgtatctttcctaaagttacctcacctttttcttcagaaagacttaatatttaaaggcgtgattatcttcaagaacaaataaattagatgagtgcctacttagctagttttgaaggcct

SEQ ID NO: 90966 - DNA, 122 bp, Homo sapiens
cttttccattcccactccctactctggcagtctagcttctaagctgaggagtttggccttcgctccaggtgcggggactcgtggaaggatttgattcgcgcttgagaaagatcgctccgctc

SEQ ID NO: 90967 - DNA, 122 bp, Homo sapiens
gtgagtgttaacagctctttaggcggcgtgtctggagttcttcattcctcccggtgggctcgtgggctcgctggcttcaggagtgaagctgcagatcttcgcggtgagtgttacagctcata

SEQ ID NO: 90968 - DNA, 122 bp, Homo sapiens
actcagatgcatccagatctgagtaactggagagctgtgcattttcagaatctgcatattcgctctgtggtataatgactgatgtcagccccaactttgccaaacatctctcatcactacta

SEQ ID NO: 90969 - DNA, 122 bp, Homo sapiens
aaatacccacgtggataccatgtgtcaagcttatttctccccggctccatggagaggtgacggcacaccctactgaaggcaggggcagctaccttgctgcagcagtaggacctcttctaggt

SEQ ID NO: 90970 - DNA, 122 bp, Homo sapiens
ggagcgaccccgccggccccgacttctctgaggcgactcagggcggcaggcctcgcgccgcgccgggtgaggcccagaaggaggcagcctcaccgccccgcccccaggccactgtgggctcc

SEQ ID NO: 90971 - DNA, 122 bp, Homo sapiens
gggcgcggcgagctccggagaaacccaggttgggcgtgagcgctgggcaaatcagcaaagcgctgggcgggtcccttgccccgctagggagactgagaggaccgcgaagaggtggggtcgta

SEQ ID NO: 90972 - DNA, 122 bp, Homo sapiens
tcgccgccctgccccgcctgctgctgtgtgggtgtcgggctggctgtgcgcaaaggggcgcggctcggccctcccccgcacccgcgccccccgccccgcatctcggagtgacccgggccgcg

SEQ ID NO: 90973 - DNA, 122 bp, Homo sapiens
gctcctgttttccaggcacacagttcagggctggaaaagttcaacaagtgcatggaacatcggaaacctcctgaaaatgctaaatttgccccgagatgtcccgaagtccggcatatttctct

SEQ ID NO: 90974 - DNA, 122 bp, Homo sapiens
gaggagaagccccgggggtccatgtagtgacaggggccagggagggtcgctcgggcaatgcgtgtggctgcaggaggcggggggcgtatgcagggagcccccgaggtgcagctggaccagcc

SEQ ID NO: 90975 - DNA, 122 bp, Homo sapiens
ccctgacctcctgacagtgggagccagccctcagcctttctcaagggggcagggcccctgcggagagatgccacctccccgttggccgctcgagaagccaggccactctgcctttcctcaag

SEQ ID NO: 90976 - DNA, 122 bp, Homo sapiens
aaaccggcgtcgcttcggcgttccggaacccaggcctgggggccgcggggattgcctctgcgtgcaactccggaaagtttcaaggggtcccccgactgcacaggtaccctcacctttcctgc

SEQ ID NO: 90977 - DNA, 122 bp, Homo sapiens
tgaggacccgaagcgggcacacctgcgccgggcaagaatgaacccagccaatgaggagcccgcatgcggggggcggggcggaacggggaagctgccaatgagagagcctaccccgagagaga

SEQ ID NO: 90978 - DNA, 122 bp, Homo sapiens
ctatgtctaaatgtgtgtgctgggagagtgggcagggtggggggaacagaggatgacaaacgggtcagtaatgaatgtgaaaccaggctgcattgttatcttagtgtattgggctcaggcag

SEQ ID NO: 90979 - DNA, 122 bp, Homo sapiens
ggcggggcggggcgagctccgaaggggcggggcctaggaggcccagacaccgcccaaagccgccccgacccccaccccgaagggtccccgccgccgtcttagggctcagaggtgtggagctg

SEQ ID NO: 90980 - DNA, 122 bp, Homo sapiens
ccactcctcttgagagttcgtagtggtggcttgctgcttcccagtcagaccagcagcagccgcaggaagccagcccggcgctcccacgctgcttttgcaccttttcccccgcccctttctgc

SEQ ID NO: 90981 - DNA, 122 bp, Homo sapiens
ttgcgcacggactgggccctggcgccagggcggaggccggtggcggccctgcagctgcaccgggactgccaggcttccctgggaaacggagggctgctcaccccattgcacggaggggaaca

SEQ ID NO: 90982 - DNA, 122 bp, Homo sapiens
gagggggaaaggagtgagacagaaaaccagcagggccccggggaccgagccctggagaagcgccagttcccgcccagatgagggccgacacctcggaaggaccggcctggggggtcgccctc

SEQ ID NO: 90983 - DNA, 122 bp, Homo sapiens
ggagaagctccttcaagacgtgagtgcacgcggaggccgggctgatctcaggctcagcaccgccagattgtgcccaatgcacccctttcttcaccccacatacattcagggagctcctacca

SEQ ID NO: 90984 - DNA, 122 bp, Homo sapiens
ccggcgggaggggcgggtgggaggccgcggccaccgccacctgccggcctcgagaggggccgatgcccagagacacagcccccacggacaaaaccccccagatatcatctacctagatttaa

SEQ ID NO: 90985 - DNA, 122 bp, Homo sapiens
gcactgaggtagggcgtgggagaagaccggggtgacctttcctccgggggttcccaggtccgagacggtccttaaaggacctcagaaggatacgacaaccatcccatgaggccccacgggaa

SEQ ID NO: 90986 - DNA, 122 bp, Homo sapiens
agtccctgccgcctcctggtggagtgtcaggccacctacaaattttgtgggacccctggccgtgtcttcagatacaaattgggtggttggccacacgtgtgcccagggcagattcggaggca

SEQ ID NO: 90987 - DNA, 122 bp, Homo sapiens
catccccaaaacatcacttgccaggtgacactgggcaagctgtacttgacctctgagagccgtgtgtccccagctgggaaacagggcaacccatcccatcctccgggactctgcaggtcaga

SEQ ID NO: 90988 - DNA, 122 bp, Homo sapiens
gtcgggagcaggcggagagctttcctgcgaggctgtggaagcagtgaacactcttctcagcggctcgcctcccagcagtgctattttttgccatccgccctcacccccagcacacgcgctcg

SEQ ID NO: 90989 - DNA, 122 bp, Homo sapiens
tcaaagacagcatcctacaggtgctggtacttcagtggttagcatccaaagcccagggttcggccaagttccctgttttgggatccttcccagcccccagaataaagaagagagactagctg

SEQ ID NO: 90990 - DNA, 122 bp, Homo sapiens
cctcgccacgctccggagcgggttacccatgagggtgctagacctgggcagcgggaacctcgaagaggtggagattgcaggctgggactccagatttcgggcagggatgcggggaagggaag

SEQ ID NO: 90991 - DNA, 122 bp, Homo sapiens
tgcacttcaaacacccagcccccagcggcctagaactccactgcccacctgcctgggatccgggagacttgttctcctcaccaggtgcctggagaggctgctcacattgatgcctcggtacc

SEQ ID NO: 90992 - DNA, 122 bp, Homo sapiens
tatccatagatgaccaaaggagtgcagagaaagatgtggaagggatggaaagcctcaacccgagtgacagtgaaagcagtgtgggacagggctccccacctaccatcccagtgcttgcttag

SEQ ID NO: 90993 - DNA, 122 bp, Homo sapiens
agccacacaaaatgaggggtgcccttttcctgtcgcctcgggagtcactcctccctctgccgtcacctgcggatgccaggccatggcactcggccacttctcggccacaatgggagctctca

SEQ ID NO: 90994 - DNA, 122 bp, Homo sapiens
catctgaggtttccttgtctgctcactgactgtccatctcccctgctggagtgtaagctccgtgagggtcgagtccgtcctattcaccagcgaatccccggcatggcggcgatcagtgccgg

SEQ ID NO: 90995 - DNA, 122 bp, Homo sapiens
ctcgacacaccctgcctccctgactgcgcctgtgtgacacatacgttcactggtggggcacgcatcagatacggatggcagtggttttgaagtgggaggccctgtataaatgtaaacggtta

SEQ ID NO: 90996 - DNA, 122 bp, Homo sapiens
tggttgctacattccacactcccatgtgccctgagcaacctccagggaaacttcagataccgtggggcttggcctgccagctgagctgacccagcgatcctttctatcacagctttgatctt

SEQ ID NO: 90997 - DNA, 122 bp, Homo sapiens
ctcatatcagatttctaagaaatacagttgagaaagtgagataataaccactaagaaggacgtaaagcattcttttgatccttctgtgtaatttggggtgtttctatacaactacattatct

SEQ ID NO: 90998 - DNA, 122 bp, Homo sapiens
ttgaaactcgctcagcggcgtcggggctccagccaggcgtcaccttccacagcgaacctgcgaaccacagcgtcccctgggggtctccgtccgcgtggccgcttcctcttacatcggtgacg

SEQ ID NO: 90999 - DNA, 122 bp, Homo sapiens
cgaagttcccggcctaatacagcccttctttaatccggtgtctgagttttgtctgcggctcgtcctgctgcaggaggatcacctgagcccgggagtttgaagttgcagtgagcccagatcgt

SEQ ID NO: 91000 - DNA, 122 bp, Homo sapiens
ttgaggacactcgtgtggagaatccctgggacacgtggaggacccccaagtcctgagccccgtactccgtactgcagggagcaggccaggagccacgggccttggggcacagggtccttctc

SEQ ID NO: 91001 - DNA, 122 bp, Homo sapiens
ccctcccccacagaccccgttctgtgcaccccagaatgtgggctgacttttgttcttcaccgtgagagcttccgggaagcagaggagagcgggattccttcctccttgtccctctccgagcg

SEQ ID NO: 91002 - DNA, 122 bp, Homo sapiens
ggcgtgagccacctcgcctggccaaagatttcctttcttaaaagacactgtcagctggcacggtggctcatgcctgtaatcccagcactgtaggaggctgaggcaggagggtcgcttgaggt

SEQ ID NO: 91003 - DNA, 122 bp, Homo sapiens
caagtaaaaatcaagtcataaattaggaaaagcattaacagaagtatgtttcagccccagcgcgctgacctgtggttggaataccggccctggagcccggaggtcggggcccacccgccgag

SEQ ID NO: 91004 - DNA, 122 bp, Homo sapiens
cgcgagatgcccagaggatacaattttggaaccatatgcccgactccgcagaatcctgggcgtaacacctggggtgactggagagtttcggcgacttcttagggaagtcgagtctaggactc

SEQ ID NO: 91005 - DNA, 122 bp, Homo sapiens
tgatgatacacaagtggaagcctgagcaaagagggtgaggggaatgagcagttgaaaccacggatctgtgtgggattgccaaagaagagaacaaactctaaaaaggaaaagaactaaaccta

SEQ ID NO: 91006 - DNA, 122 bp, Homo sapiens
gagaaaaagagaagagagaggggaggagagccctgtcaccagcagtcagaggctgcactgcgagactttgctgccctcaacagccttccagtgtaagcgctgccacccaatttgctacagag

SEQ ID NO: 91007 - DNA, 122 bp, Homo sapiens
tctactaaccacaggctgttttgccctctctgagtaccactgacatcctctgtaaaatagcggatggatgctaagaggattatataatacatggagagcacctaccatggtatctgtctcat

SEQ ID NO: 91008 - DNA, 122 bp, Homo sapiens
ggaggcctggactgggggactccggtttctgggccaggcttcctgccatgccactggaaccgctttttgtagtggtggtgccggtggcggtggtagtggacatggctggaaacctgggtttc

SEQ ID NO: 91009 - DNA, 122 bp, Homo sapiens
aaggtaccagttgtttccactaaagatcggttacttgcatcttacaaagttgttaggaagcgtctcccggacatttgcagcccctgctaagcgtagtgtgttccagagcctaagtggctctg

SEQ ID NO: 91010 - DNA, 122 bp, Homo sapiens
atatttaccaattttgagaatctattaagtgcctggcactctgtgtagaagccctccaatcgtaccctaaatctgagaagtatttattattatttccatttttactccctaatgcatctact

SEQ ID NO: 91011 - DNA, 122 bp, Homo sapiens
acgggggcggggcgggggtggcctgcagacctggcgaggtgagtgtgtggtcactccgtccgtcagcagcggttatgggcatagcagcgggcaggctggcactggcattcagagggttaaaa

SEQ ID NO: 91012 - DNA, 122 bp, Homo sapiens
tgctcgtacttgcggcagggcagcagccgctggtcctcacggaaccaggccgtggggatgcgggagttgggtactttacattccagcacggcaatcccgtgctcacggccctccacgtcctg

SEQ ID NO: 91013 - DNA, 122 bp, Homo sapiens
tcaaggatttgggagcaggagacctgcccggttgccccttttggggaactgcaccccaggcgtccaaccccatagtaacttctgtagtacttactgcccagtctctgttctaagaactggat

SEQ ID NO: 91014 - DNA, 122 bp, Homo sapiens
ctgcaacagtgatccattgtatttccagggggcaacccatcatactttgatgtaagacgtcgttccagccctttggggtcaggaatgcaaaatgccaagtcatctattttgcatcacaatga

SEQ ID NO: 91015 - DNA, 122 bp, Homo sapiens
ttagctcctgcaccctgctcttctcccaccggccctcaggccagccctccacctgtcccccgccctcccaggctagcttggagccctggtctgggaagcagtgttcccatgggaagaacccg

SEQ ID NO: 91016 - DNA, 122 bp, Homo sapiens
acaggactttcccttttggagttgggggactattaaaggagctgttaggctcccctgctgcgtggtttacctcatttaagtcttacaactcccctgggagaaagacatgagtagtctcgctg

SEQ ID NO: 91017 - DNA, 122 bp, Homo sapiens
gcgcgcctgtctcccgggacgctagagcaggcggttcctgggctgctccggtaggtttggcgtgcgcgggtttctgcagatctagggcgagcttgcacgttacatcaccgatgcatctcttc

SEQ ID NO: 91018 - DNA, 122 bp, Homo sapiens
cgcccgttattctccagttggggtgccaggcgcccattattctccaggtggggtgtcaggcgcccgttattctccaggtggggtgtcaggcgcccgttattctccaggtggggtgtcaggcg

SEQ ID NO: 91019 - DNA, 122 bp, Homo sapiens
agagactgctttttttgcttcagggatgctgctgctgtcacagccattccacatcatctacgttatagactccacctaatttttttaaactagaccatctgtctgcctaatttacctgtctt

SEQ ID NO: 91020 - DNA, 122 bp, Homo sapiens
atatcgtagagggtgtaccccctctgtgacatgggtcgtagtaaccaagaaaggagatgacgttactcccaatatcgcagagggtgtgctccctctctgatacagtttgcaatatccaaggg

SEQ ID NO: 91021 - DNA, 122 bp, Homo sapiens
cgcaaggagcccccgcccgtctgggggacccttggcgagagggtgacgcagtctgacaggcggagcccctccggcagggccgttagacaacgagtgtctaactctgtcctcggcctctactt

SEQ ID NO: 91022 - DNA, 122 bp, Homo sapiens
ccttcaatggctcaatctcagaaatggcaaaattctaggacacatcaagacctgctcttccgctttccactagttcccaatctttgatttccaggttttggccctttcaaacccattttttg

SEQ ID NO: 91023 - DNA, 122 bp, Homo sapiens
gtgggggttggaagaggaaccccacggcacagcggacaccatgtgggaccccagcacgggcgctttgggatgtcggcagaggcacgcatgcctccagggatgtgccagctcagggaggcacc

SEQ ID NO: 91024 - DNA, 122 bp, Homo sapiens
gaggaggagtcacttattctgcctgaggggaagtcaggttgctatctgaagttggccttgcggctgctgtcccatttgcgggagccgtagccgcaggtgacacctgagctctcgaaatgtgg

SEQ ID NO: 91025 - DNA, 122 bp, Homo sapiens
ttttccttcctttactgacctccctgaaatcagtgatttggagagattcctatagggcatcgtcaagaaatgtggttatcagacaaagaacgcagatatttgggaagaaaaaaaaataaagc

SEQ ID NO: 91026 - DNA, 122 bp, Homo sapiens
ttatcaattaccaggtggatcaaaaggccgattaccaagtgaattttcccaatttccacacggacaaaagggccagcactattctggacaaaaaggcaagcaacaaactgaatccaaaggca

SEQ ID NO: 91027 - DNA, 122 bp, Homo sapiens
gttccctgctcacacagatactcacacacgtgccgctgcgcagggaggacggggcacacccgcagcacacagatccctgcgtgccatcatggaggtttgggacttggcatgaggaatgagga

SEQ ID NO: 91028 - DNA, 122 bp, Homo sapiens
ttttagaaaggtggacatgcgtgtcttcggagtgtgttcataacactctagttttccaaacgtagtagcaaggttgtttcaaaaagcacatagaatgttgtcaccacaaacttgattgcctc

SEQ ID NO: 91029 - DNA, 122 bp, Homo sapiens
cccccaggtggtggagtacagcgagatcagtcctgagaccgcacagctacgtgcctccgacgggagcctgctgtacaatgcaggcaacatctgcaaccacttcttcacccgaggcttcctta

SEQ ID NO: 91030 - DNA, 122 bp, Homo sapiens
caagaccttcttcattttggcagagatcgagcaaatagtacacagtccaggctctccaaacggaactctacagacagccgccccgtaagtgtcacgtatcggtttggttccgtgggccagga

SEQ ID NO: 91031 - DNA, 122 bp, Homo sapiens
aggttggatgggcaatggggaagggacgctcaaggccatcattcccaggaccttccctgtcgtcttcctgtgaaccccggccacgcaaagggatctcgcccagcctttccaaaagagcccca

SEQ ID NO: 91032 - DNA, 122 bp, Homo sapiens
tgattgaaatacagaaaatgatcgtactttaaaaatgaaagaccaaatttaaagtatcttcggtgtctctgttcaccaagccggcaagtgcataatacatttcagaaagagttctttcaaaa

SEQ ID NO: 91033 - DNA, 122 bp, Homo sapiens
gcagggcagggaggcagacataccattgtagttggtagccttcaggatggagtggaggtgcggggtggtgcaggactgagtcaggactcccacgctggccaggcagccctgctcacaggcaa

SEQ ID NO: 91034 - DNA, 122 bp, Homo sapiens
cactccgtcgcattatgtggaggggttccgctcccctcatcagtggcataaggtgtggaacggactcgaaggcgcaggggcagttcgtacaaatgcatgcatggagaggagaatgagtttgg

SEQ ID NO: 91035 - DNA, 122 bp, Homo sapiens
attcagagcctgggcagtttagggagacgttgtccctgcaaattataaaaatcagacaggcgtggtagcgtgtgcctgtagtcccagttactcaggaggctaaggcggaagaatcacttgag

SEQ ID NO: 91036 - DNA, 122 bp, Homo sapiens
ggcccagaggatataaagccacaatgcttctttctccttcaaaccactctttggatattccggttcccactgcttcactgcgcttcactggtcagtgcgtcactcaaactagctgaaagaat

SEQ ID NO: 91037 - DNA, 122 bp, Homo sapiens
ggcagcacacacgtgggaggcacacgccctggacgccggatgtgccgtgcccgtgagggtcggaggctccactgcacgatgccgcacactcgggcctgaatcccacaaaaggtgagcaggtc

SEQ ID NO: 91038 - DNA, 122 bp, Homo sapiens
ggaggtcccggggctgccctttccagggcctaggcccaggagctctgggcaggctgggcccggcgtccccaggagcgcagcctaagaggggcctcttgggatatggacaaggcctgggctgc

SEQ ID NO: 91039 - DNA, 122 bp, Homo sapiens
cccgtgagctgtgatccgatcaaccacgcctacataatgaaacccagtaagaactccagacgtcacagctccggtgagtttccctgggcgacagcactctgtgcaccgtcacacacaatgtg

SEQ ID NO: 91040 - DNA, 122 bp, Homo sapiens
aacacgggatgatcactgacattggcaaagtcatggggacttgctggggcggtgggtggccgggagagggggacagaagaggggcgcccagatccccccaacctgcggctctgcaatgcacc

SEQ ID NO: 91041 - DNA, 122 bp, Homo sapiens
tttccagattaccacccacctagtggtcacgtgacctgcctctggccaataggctgcaagcggaggtcgaccacaattgctgagttttgctttcccgatgcaggtgcgttgcttgtccctgc

SEQ ID NO: 91042 - DNA, 122 bp, Homo sapiens
aatcacaattcccagaatgccgcggtgctacggcagccgaaggggccattccgtgtgcagcgctcccgcccaccctccggtctcggcggctctccagagcgtctgtaaacacccagagactg

SEQ ID NO: 91043 - DNA, 122 bp, Homo sapiens
tgaggagtgaggaggcagaaaggaccgagaacaaggggacccggttccatttctggaccccgtccgcaggctgctcgcccgacttggggtcgctctgccccggacgatcaggacagctgcgt

SEQ ID NO: 91044 - DNA, 122 bp, Homo sapiens
aaaaccaaatactcggtcttccgaaagaactaactcaacctacccttctacaagagggtccgaaaaccactgttacgcccattgggtagccccgcccttggggggggcaaagggcgtgaaag

SEQ ID NO: 91045 - DNA, 122 bp, Homo sapiens
gggaggcccaggcaggcagatcatttgaggtcaagagttcaagcagtgtggtcaacatggcgaaacccatctctactaaaaatacaaaaattacctaggtgtgctggtgggcacctgtaatc

SEQ ID NO: 91046 - DNA, 122 bp, Homo sapiens
aaaatgcccagaaaaggtaaacttattaagatagaacattagcggttgcctcaagctggacgtggaaaggggaattaacttaaaaaaaaaacgagggatctcatgggttgagaagatgaaaa

SEQ ID NO: 91047 - DNA, 122 bp, Homo sapiens
tgaacagcagtttgaaaccatatgattctctgagatctctccttaagaccagctgcagttcggatgtgatcactcattgttctataataagcagcttagacccaactagccaccctttggac

SEQ ID NO: 91048 - DNA, 122 bp, Homo sapiens
ccccccacagccctgaactggagtgtgtctgaggctccggcaggggccccctcacttgggcgcggagccctgggagtggagagagcggaccccacacctggggccggaccagcctggggtgg

SEQ ID NO: 91049 - DNA, 122 bp, Homo sapiens
attgatctacattctatgtccgtggattttccttctctggacatgtcatataaatggaatcgtacaatatatggtccattgcaactagctcctttcacttatattttcaaagttcatctatg

SEQ ID NO: 91050 - DNA, 122 bp, Homo sapiens
gcgctgcgccgtgggctcctgcacctgctcctcccggcgccccctcgtccccctccgagacgctcccagacatcctctctggaagcctcttgcaaaccaaggttaaattcaaagtccccagc

SEQ ID NO: 91051 - DNA, 122 bp, Homo sapiens
tagattttatgtacagttaaccaaacaagatacagcaaaattctttcttaaaaagctcttcggacacagtaaagatgcccatccagcaagtaaatgtaaccttttttcccccactgtatttt

SEQ ID NO: 91052 - DNA, 122 bp, Homo sapiens
caggtcacttgctcaggtagtttgatgcctgccttcctgtgttgatgtttgtgcaaatgccggttgaggtgctgcgatacagctgtgtgtaagccttggcacttggtgttggacactgttag

SEQ ID NO: 91053 - DNA, 122 bp, Homo sapiens
taaattcgtttccaaagttcactgcaggtcacaaccagtgtttccgttaacgaattcacgcgggggctggcaggttgtttgtgctgcatcttttctgagagataacggcgcctccctgtagc

SEQ ID NO: 91054 - DNA, 122 bp, Homo sapiens
gccagctgccggcccagggggccctcgccttgcaaggagccagcaggctggcgggagaggcgggttcacgaccctgggggggggtcatccccaggtcggaaggtactggcagagcgggggta

SEQ ID NO: 91055 - DNA, 122 bp, Homo sapiens
ttttcagccagccagtgccaaaaaatatcaggtggtgttcatcaaaaaagctgagccaaccggtgatgaggatggtagtgtgagtcatgtgtgacaggtgaggaatgaaaacagagtgcccg

SEQ ID NO: 91056 - DNA, 122 bp, Homo sapiens
gagttttgtttgtttgttagtttcattgtgtaggcatgattgcttgagtcattgtccacacggctagtgtttggataacaaagctcccaattcccaagattgcctggaatgtctaaagcttt

SEQ ID NO: 91057 - DNA, 122 bp, Homo sapiens
cacgacccttggcaaggcgggcttcctcccaacggagtgacctgacccctcccgaagtgacgtttgcattttagaatttcctgattgtattcagtgggttcttcctgctttttcctcctgga

SEQ ID NO: 91058 - DNA, 122 bp, Homo sapiens
tccaccgcccggggccaccatcttgggggcgggactttgtcgagggggcgggacttttgccgagggggcggggccgccgagggggcggggccgccgagggggcggcctcgtaccctagggac

SEQ ID NO: 91059 - DNA, 122 bp, Homo sapiens
atgggggtcccacgatgttgcccagtccagtcttgaactcctgggctcaagtgatcctcccgcagcagcctcacaaagtgctggtgtgaactactgtgccctgtggacagcacatagcacat

SEQ ID NO: 91060 - DNA, 122 bp, Homo sapiens
tgaccaatggggagaggccgtgcgggggcgtgcccagggggcgtggctccaggcttccctcgccctctccttgagctggcccagtgccctacggttgccatagtaattcgggagcgctagat

SEQ ID NO: 91061 - DNA, 122 bp, Homo sapiens
tcgattgcctggcgcgctcctggaccgaaagctgtggctggttgaggcgttgcctggcgacgtgttactcagtggcgcagtgcttccgtagaggccagctggttgctacgcagcaacaggaa

SEQ ID NO: 91062 - DNA, 122 bp, Homo sapiens
gcctccagcccagcaccggggagctgagcaagccggggttgggaaggcgggcgagcggagcgcctgccccgcgagcgttgtctcagtctctccggcgcgccccatcccgcggatgtggtaaa

SEQ ID NO: 91063 - DNA, 122 bp, Homo sapiens
atggggtttttcaaaacgtcgctgcaaccagatgcaaggctgcagctttgcttaccgcagcgtgctgcagttgtgtttatttcagggacagacacaaggggaagcagcagccagagcacacc

SEQ ID NO: 91064 - DNA, 122 bp, Homo sapiens
gacaccacaaatgtaattatgagcaagaatgtctcagcccccagcctcaaggagcttccacgcttgttgggaggagacagacaaaagcaccccgatatactcatgcttcaaggtagcacaaa

SEQ ID NO: 91065 - DNA, 122 bp, Homo sapiens
gtgggtcacgggaagatctttcctcagccaaccccaaagccaagggggtgggccttgcttcgcagatcagccaatagagatgagggctggttccggaagtatcttcccgggggcgggcacag

SEQ ID NO: 91066 - DNA, 122 bp, Homo sapiens
acctcagatgatccacccaccttagcctcccaaagtgctgggattacaggcgtgagccaccgtgcccagccaacttcattatatctctaagtgatgggagctttaaatatataaccatcatc

SEQ ID NO: 91067 - DNA, 122 bp, Homo sapiens
actaccatcaaaaaaaggggggctagagccggcgatggccttgaggattaggacacctgccgagcctggagtaaacaggtaatgtcaggcaggtcctggaaccccgggaggcccaagttctt

SEQ ID NO: 91068 - DNA, 122 bp, Homo sapiens
tcgcgtgggcgggctccgaggggggtcccttcagccctgggggaaagggggcgggcaccccggctccgccccgcaaacagggtgctgcctcctggcggccaagcgccaccaaagcgggtgat

SEQ ID NO: 91069 - DNA, 122 bp, Homo sapiens
tgcgcgccccgctcggagctccaggtcccggcgaggaaggtgttaatcggagccactctgcgcgtgtcccgggggcgccggctcccgccacccccttccctgagtcgccaggggagcatcag

SEQ ID NO: 91070 - DNA, 122 bp, Homo sapiens
gctccttggtgcccttggcaccttggcgtgctgagcactttgcgaggaacagtctgaccccggcgcgcagctccgcgggatcctgggtactccacgaagaaagattctgggcggagaacacc

SEQ ID NO: 91071 - DNA, 122 bp, Homo sapiens
cggccaggagctgcaggaagcaagggaacagcctcatgaccggcatcttctcagacgtcccgagccagggggctccgagggaaaaccaccatgctcatcccccggggagcccctggcacagg

SEQ ID NO: 91072 - DNA, 122 bp, Homo sapiens
cccgccagccggccgcgaggccccattggctgaggcaacgttctaaattccacgagggcacgcccacctccgcgcgcggtacgcgctgttgtagtttccacttcaccgaaaaaaatctgcct

SEQ ID NO: 91073 - DNA, 122 bp, Homo sapiens
tccctgccagaaatagctgaaacctccaagaacccggagaacacactttcagttctatttcgctgcagccacggttccagctcctgacacctaaggaacaaatgaaaatcttcccagagctg

SEQ ID NO: 91074 - DNA, 122 bp, Homo sapiens
ggccacggcccaggcttggaatttggtctgattccagagtcacacgggccacagtgcacacgcatacagggacgtgtgcacaaacacctgcacaaccaggtaaatacataaccacacacaga

SEQ ID NO: 91075 - DNA, 122 bp, Homo sapiens
ctgggacccctcccccagccccagctgcccactgacaagtgggacaacctggggccaggccggggctgcccgaaggctactatgcttgggaagaccccaagacaggagccctgccccttggg

SEQ ID NO: 91076 - DNA, 122 bp, Homo sapiens
acagtttcattctactgacaatggagactggaatttattggctgctgaacttcacacacacgcactacagaactgacttccaaatacagctggaataaatttcaggttttggggttttgaat

SEQ ID NO: 91077 - DNA, 122 bp, Homo sapiens
ccagcaccctttaggatctgaaacagaaattcttatgtgaaacctgcctcttccaggcagcgtttgttgctcagccccactttctctctgtgaacctcctcgcatacgaatgttttaatgcc

SEQ ID NO: 91078 - DNA, 122 bp, Homo sapiens
tataaattgtgggaaatgagtgagggcaaggtggtacttcctccttctgagctcttcacacgtaatgcaaaaacccggtcttaactgattttgttttttttctgagtatgcatatatgtggt

SEQ ID NO: 91079 - DNA, 122 bp, Homo sapiens
agttaaaataaaacccaaacttctcatttatgtttgtaatgtattgtgataggtcctctacggacccctccagccctccagctttatctgtttcccctactcacacacagtcatcctaggat

SEQ ID NO: 91080 - DNA, 122 bp, Homo sapiens
gggggtaggcggggtcacctgccctgctgtttgggtatttcctgggataacaggaggctacgcccttccactgagttcacagagaagtaagactgctgggtcaggcaattttatagttttaa

SEQ ID NO: 91081 - DNA, 122 bp, Homo sapiens
gtgacaggcgagcgtgggaagggcacaagcacagggtttcttcctcttctcccccagccccgtctccgcgcctgttctcgctgcctcttgcctcctcacgtccaagcttgtctgctctggcg

SEQ ID NO: 91082 - DNA, 122 bp, Homo sapiens
ttttaccgggtccccctgcggctccagtgcctgctccgaagcccgggacatatatttattcggcaaaagttaacttagtgcctactgggtcccaggaattatggctacagcggtgtcgagag

SEQ ID NO: 91083 - DNA, 122 bp, Homo sapiens
gaccggagccggagccggggccggggctggagccaggaccgggactgggggcggggtggacgccggggccgggaccgggacactaggcagctgctccggcgcctcctcgaggccgtcgaggg

SEQ ID NO: 91084 - DNA, 122 bp, Homo sapiens
gggccttgtgtgactcagttcattccccagatcctgtctggctcaggggcgggcaagcatcgtgggtgaggggtcttttggttggcctgaccagctttggttgatagctcctgtttcttgaa

SEQ ID NO: 91085 - DNA, 122 bp, Homo sapiens
cccagccagggctgtcacagagtgagtagcagcagcctagggcactgcaggaggctgtgacgtcactgacgttcccataagaagctaagtgacagggaccaagggtggctgcaaagtgaacc

SEQ ID NO: 91086 - DNA, 122 bp, Homo sapiens
aacacaggctgcttttctcgcccgaaagaccggtttcatttcgcagattgattattgctgcgtgagtgtgtgtgtgtgtgtgtgtgtgtgtgtgtgtgtgtgtgtgtgtgtttgggcgttgt

SEQ ID NO: 91087 - DNA, 122 bp, Homo sapiens
aatagttttaaagaatctactgtgggccagttaatgttctaaatgcaaaagattcaatgacgaacaagagacagttcttgtctttgatgggatcttaacctggtgggaagatggacctgtat

SEQ ID NO: 91088 - DNA, 122 bp, Homo sapiens
gccaggttctttgccaaccctgacgcgagtgtggagcccccctcccctcccctatgaaaacgctttcatgcactggggtctgcaaacctggttggtccggtgtgggttgggccaggtgctct

SEQ ID NO: 91089 - DNA, 122 bp, Homo sapiens
gaggtattttaaaacacaaatcctcatcttaccctggctctgcttaacagccttcagaggcgtccagtggcccatagataatgtccaaggctttcctgtgatctaccagtctggtcagtgtg

SEQ ID NO: 91090 - DNA, 122 bp, Homo sapiens
attgccttgcaatggaaaggtagtaacagcaacttcgagagttcctgccaagttctaccccgagtggaacaagttgctgattgttcccttccctggattttaaccaaggtgataaatacagt

SEQ ID NO: 91091 - DNA, 122 bp, Homo sapiens
ttacaggcgtgagccactgcgcccggcccaatttttgtatttttagtagaggtggggtttcgccatgttggccaggacggtctcaagctcctgatctaagtaagtgatctgcccaacttggc

SEQ ID NO: 91092 - DNA, 122 bp, Homo sapiens
agggtgaatgagtgtgggaggtgtcattccctggtccgtgtgtaagagtgtgaccgcgcacgccttcgtgtgtgtcccgggtgtgtggggtcggggcggtgacgaggtgagggggacgccgg

SEQ ID NO: 91093 - DNA, 122 bp, Homo sapiens
ggccatttgcctcctcctgttccccacgcaacacccccggcacccgcccctttgttctggcgggtgttagtacttgcagggacctttcacatccaggagttgactcattcgccaaaggagcg

SEQ ID NO: 91094 - DNA, 122 bp, Homo sapiens
ccacgccgtcacttcccttcaccaaaggttagatgggaggcgtgcaccctctggggagttcgcaaagcttctcgctttgatcagccgcgcgcagtgccagggagagatattgctggggtctg

SEQ ID NO: 91095 - DNA, 122 bp, Homo sapiens
cctacaatctagccatggggcttgggcttaacgggggtcaatgggcgccaggcctgaggacgtggggcccccagacacactttctctacaggcacgtcgcatgccacacaccacacatgcac

SEQ ID NO: 91096 - DNA, 122 bp, Homo sapiens
tcttcacggactcggggaccacaggaccttgattctttacaggtgccacaactgcagaatcgtgaacctttgcatgctctgggactacaacatcttgatccttgactggccctgagaccact

SEQ ID NO: 91097 - DNA, 122 bp, Homo sapiens
tttgtcattgacacacacagacacacatgcacacacatcacaatcacaccattaggggaccgtgggagtgaggtggagaaaaagaaggcctgaatagaaatcaggatgggccagaaaagctc

SEQ ID NO: 91098 - DNA, 122 bp, Homo sapiens
gccccgagcccccaccttccttccttcctcctccctctggtttctttcctcccattttatcgagtccctctgagatggctgcgcaccagtggctccagcctctgaccgttgctgccctctgc

SEQ ID NO: 91099 - DNA, 122 bp, Homo sapiens
cagcaagtcccgagcgagtgtgggacaggcagcaaatcagtgccccctggccaggcagaacgagtcgaacgtggaagtagggagcaggcggaggccggcgcggagctgcagttaagcaagcc

SEQ ID NO: 91100 - DNA, 122 bp, Homo sapiens
tctaccgcacgctcagtcgctggctccagaggtgctgctgggggccagggttcactgccgcgcgccaggtgcctgcccgtgaggcggcgcggggctcccgggtggctgcgcgcccagacgcc

SEQ ID NO: 91101 - DNA, 122 bp, Homo sapiens
aactggcctgagtcacatttagatccagcctggagggaggcctttccccggcactgaccgcgggctgctccggaaatggggatttgatccggaacttgtttgctgcagcttcttccgggctt

SEQ ID NO: 91102 - DNA, 122 bp, Homo sapiens
gaggagccttgggggctgcctccctgcccttgtggtgggctctgctgggatgtgaccacacgggagcaggggctcccgggggcctggcggcctctggggcggctctggagcccggccagcgg

SEQ ID NO: 91103 - DNA, 122 bp, Homo sapiens
ctgatggccggagaaccctgcgctgcgggcgcacatggccaggtggcgcctggcaggcgacgtccgggtgcaggacggcgctcttaccgccccaccccaaaccgttgcctgggcctaggtcc

SEQ ID NO: 91104 - DNA, 122 bp, Homo sapiens
tcctgacacttcctcactgcggtagcctggagagcaggcctttgtccacaggcgggcaagcgtgctgtttacagcctggccacaaaaaaacacttgcctattcatggctaatttgaaaaaaa

SEQ ID NO: 91105 - DNA, 122 bp, Homo sapiens
cctcggagttcctgggtcctaaagccagaaacgtcccggtttccctgaggtcctaaagaacgttgacagccaacagcgcgcctaacttggagcgaatcctcttcgggctttccagagtgcgg

SEQ ID NO: 91106 - DNA, 122 bp, Homo sapiens
tcacacggagagattagaatcaaaatgtgtggaaggcatttgtcgtctcactgccagacacggtgttgatgagaaattggtgtttccttctggcggccatgcactttgctgagctgtgtgcg

SEQ ID NO: 91107 - DNA, 122 bp, Homo sapiens
cacatgattcagctactaaccgaagctcacccttttggatttcccctgctgtactgtggtcgaggtgctaattagcagggaaagtgccaaatggcaggcagccagaggaaaagcagagaagc

SEQ ID NO: 91108 - DNA, 122 bp, Homo sapiens
tcccagctggtgggccatctgctcccgagcagagccggggctccacgggcaagagatgggcgggcatgctgcggggtccctccagggcaggcagcgacagtctgggcccagcgacggcatca

SEQ ID NO: 91109 - DNA, 122 bp, Homo sapiens
gacatcaaaagtgcacagaaagctcacaactcggtcaacaaaatgggtgacagagacctacgcacggattataatgaaccaggcaccatcccgagtgctgctcggggattggatgatacagt

SEQ ID NO: 91110 - DNA, 122 bp, Homo sapiens
cgagtgaacagcagagggggctgttgggtgagggccagaagagttggggaggcacgagggcgtccagcgctgccctcactcaagatggcggccagagcctcgcgcttggtcgcgtggggcgg

SEQ ID NO: 91111 - DNA, 122 bp, Homo sapiens
gcgtgcgtgtgcggggcaggaacgcgccttacaaaactgggatgcgctgggggtggagggcgctagttcggactggatcctgggcccgaggcctgcttatttgcataatcctagcgcgggac

SEQ ID NO: 91112 - DNA, 122 bp, Homo sapiens
cactatccatgcagtacaaatggagtctgaccatgatgcaagtttaagttttcttgagcacgaaccctatcccagcaccagtctgagcactcctatctttgtttattaggcaagcattccac

SEQ ID NO: 91113 - DNA, 122 bp, Homo sapiens
aaagattttggggggcagagggtgcaagtgttgtgggaagagatgcggagataaattttgcgagccagaccccgacactttccccgtccgtttgcaccgtctccggaacaactggcggccag

SEQ ID NO: 91114 - DNA, 122 bp, Homo sapiens
agtgctcttcgactggactctgccccatgcccaagatcaatgccctgttcagttcctattcgcagtccccagcgcccaggaacatagtccttccagcagtggcagtaataggtcgccaggtg

SEQ ID NO: 91115 - DNA, 122 bp, Homo sapiens
cacatacatgaatcctctcccacccatccgccccccaccctacacccacgcacccacacacgtgcacgaactctcccaaactgacattgcccccagccctcctgggcacaagaatacatata

SEQ ID NO: 91116 - DNA, 122 bp, Homo sapiens
gcaactgccccacgctgccatggtggggaggtggccagcggggatgccaacccggtaagccggaggcatgtgagccaggaggcacctatgtctcttcaggaattgttctaataagtaattca

SEQ ID NO: 91117 - DNA, 122 bp, Homo sapiens
tatctgacttcttttacttcgcatgtttgcaaggttcattcatgttgtagcatgtgtcatcgctttattcctttttattgccagataatattcctttgtgtggatatgccatattttgttta

SEQ ID NO: 91118 - DNA, 122 bp, Homo sapiens
acacagaggttcagaacaatgggaggaagttgagcttcgcctggggaaagaagcagcccacgatgcaggatggctgtaccagacagagcttctcagctcaggatcggtgctaggagaaggtg

SEQ ID NO: 91119 - DNA, 122 bp, Homo sapiens
tacaccatgcttgggaaggtgcatgcagaccaatgttagtaatagtcaaaattcctgtgtcggtttgtgtggtttgctaaacaggactcaatgtatcatgaaacagtgtattatatagtcaa

SEQ ID NO: 91120 - DNA, 122 bp, Homo sapiens
caagcccctcttcatcagagggctcgagttggggttgagactggggctgaggctgtggtccgtccccctttccaggtccttgtcttcctcccgtcggcctgggggcgcccgctcacgcggcc

SEQ ID NO: 91121 - DNA, 122 bp, Homo sapiens
agcaactccagatgtcccatcacagctgcccaccggacacagatatggggacaccaagtgcgcagggggcaaagtcatctgcgttgtgctcagctgccgccgccacacaacagcaccagaag

SEQ ID NO: 91122 - DNA, 122 bp, Homo sapiens
tgctgggattacaggagtgagccacctagcctgtccaaggtttttttctgattagccaggcgtggtggccccagctaacttgcaaggctggggcaggagaatcacttgagctcaatggattg

SEQ ID NO: 91123 - DNA, 122 bp, Homo sapiens
cttcaaaaaacagccctcctattttgtgatgtgtaatctttattcaagcagctatccccacgcaattacatttgtcaaacttcaagcagttttgtgtctgtgcattttcactggggttggag

SEQ ID NO: 91124 - DNA, 122 bp, Homo sapiens
aaaagaaagtctgtcattttcttgtgttagggaactggattgtgactggccaactactgacgggtgagcccttctcttttcctacaattcatataaaatgacaaagtcctatttaaattgtg

SEQ ID NO: 91125 - DNA, 122 bp, Homo sapiens
tgaggtaagtggcccagacttgcttccaaggctgattaacagggtagcattggccgggcccggtggctcatgcctgtaatcccaacactttgggaggccgaggcgggcggatcacaaggtca

SEQ ID NO: 91126 - DNA, 122 bp, Homo sapiens
acatggaatccgcaaatactagttgaagcccactgtaagcaaaaacagttaacgacagtgcgtaaacagtgatgatcaagtcaggcagtggcactaaacctacaaattcttgtttaccacct

SEQ ID NO: 91127 - DNA, 122 bp, Homo sapiens
tccttccattcactcattcatgcaacaaatattttcggtggtggtaaataagttaaacaacgttctggcctcctgcaaacttttattctagtgggaagaggcagaaattgaaggctcaaaaa

SEQ ID NO: 91128 - DNA, 122 bp, Homo sapiens
gagactgcggctcgcgggtctctccaccctccccctgcgtcctcctccgccctcctctgccggatccgacctgcgcccctacgctggcccagctgctaggaactagcgccccgagcgccgcc

SEQ ID NO: 91129 - DNA, 122 bp, Homo sapiens
gcgggaggaggctgcgctccagcgctgccaccgcggctgctctgggctctctcgggctcacgctgcctcccatcggctacgagcacagagcatcatcatcatcagcctgccagccggccccg

SEQ ID NO: 91130 - DNA, 122 bp, Homo sapiens
atcaagaatacaaattcagagcttgggaaattcatctctccaccatctccaatctgaggacggggtatgttacactaaccttcaggtacagctgtgatgaaggatgaagtgttgactgatgc

SEQ ID NO: 91131 - DNA, 122 bp, Homo sapiens
caaaggcctgtcggagaagttgatgaaagatgcaccttaggtgtccccgagcagggccgccggcctccccagaggtttccttggcagcccttatttgtaaggcaaatccaggcccgcgcaca

SEQ ID NO: 91132 - DNA, 122 bp, Homo sapiens
tgaacacggtgctgtcgcgggcgaactcactgttcgccttctcgctgagcgtgatggcggcgctcaccttcggctgcttcatcaccaccgccttcaaagacaggagcgtcccggtgcggctg

SEQ ID NO: 91133 - DNA, 122 bp, Homo sapiens
ctttgtctgcagtgcactctagtggggtgggaaacgaaagttagcactaaatattaacaacggctatcatgttagtgcatttcaggtggtccacagtgggccacttttctgttctattctta

SEQ ID NO: 91134 - DNA, 122 bp, Homo sapiens
ctgcccggtgcacctgccccctcctggtggggtctcctttcctcccactctttgcctgcccggagagccctctaggggtggtggcagctaccccgacccttaggagcccaccaggacctctc

SEQ ID NO: 91135 - DNA, 122 bp, Homo sapiens
atgttaatggcgtctttattctagtaacccgaactggaaactacagcatcgaaacaatctcggtgcagtcacagaaggatgagcaaacagtaaggagccaccaatacacagccaccaataca

SEQ ID NO: 91136 - DNA, 122 bp, Homo sapiens
gtgcctgcctagcacaagtgtaggacagctttattgatctctgggtttgtccagtcattccgaatgtcatccaggtggttatcgaaatccacgagcgtctcgtaggaccggctgtccaggag

SEQ ID NO: 91137 - DNA, 122 bp, Homo sapiens
tgctcaagaggtgtcccccggcagggactacaatgcagattccctggagcaggggcgagccgggcccaaggagcaggaaatgaagaagccaggaatcccagctggtccctgacccggacgca

SEQ ID NO: 91138 - DNA, 122 bp, Homo sapiens
agttggtgctgtattctcactttgggttatgtgttgcagggagtggggaaccttctttcacggcccagtccctgggtggcattgtgtgtcacatgtgtcatgtgaaggcctagcttagagca

SEQ ID NO: 91139 - DNA, 122 bp, Homo sapiens
gactgggcaccacttccggtccgacacggccacgtgttacatctaaatggcaccgtcccccgagtgcgccgaccttgtgctacagccagaacagctccgggaaacaagggcagcgggagaaa

SEQ ID NO: 91140 - DNA, 122 bp, Homo sapiens
cgtgaggcaccgcgcccggcccctcctccctttcaatccctactcccagaagccgggattcgtggcaacccctagtttttagttccaaagcctcctgccggcagggaaccaaatccttctgt

SEQ ID NO: 91141 - DNA, 122 bp, Homo sapiens
gaagatcgaggtagtaaaggccatccacattttaaagggttatttgtcttttatataattcgtttgctttcagaaaatgttttagggtaaatgcataagactatgcaataatttttaatcat

SEQ ID NO: 91142 - DNA, 122 bp, Homo sapiens
ccctggcagagaggctgtgagtagagccgtcccatcctgtccctgcctgtgaccaggacccgggatatgtgggctggggcctgtgggtctccccagcactcactactacgtaaacatttaca

SEQ ID NO: 91143 - DNA, 122 bp, Homo sapiens
tgccagggactcaggggagggagggaggaaggcacaggtggagcagggagatctccagggcgtgggctcctccgcaggaccccgcagtggtggatccacgccatcacacgcctgtccacacc

SEQ ID NO: 91144 - DNA, 122 bp, Homo sapiens
tttcgttctaattttttttttcagggtgttgctctgcatgattgtagctcactgtagcctcgaactcctgggctcaagggatcctcccacctcatcctcccaagtagctgggaccacaggta

SEQ ID NO: 91145 - DNA, 122 bp, Homo sapiens
tcaagacaaagagagatttttttttctgtcccggtccgctcaaagtttatcggtctttcccggcggtcggggccgccgggctttgtagttcgccagtccgagctaccccaccaagaccgcga

SEQ ID NO: 91146 - DNA, 122 bp, Homo sapiens
tgtgactctgactgtgtgcttgtgcgtgactgggggttgataaatgttcattcatcctcgcgtctgagtgtgctgcctgtggctgtatatttatatttctctgtctaatgcaagggggtgga

SEQ ID NO: 91147 - DNA, 122 bp, Homo sapiens
aattacaatgtatttttataaagtgtcttttaggaaagaactagccccatgcttggaggccgggggacagctgccctgacctcaccccggaccagctccctcggtccccggggtctgtcccg

SEQ ID NO: 91148 - DNA, 122 bp, Homo sapiens
tataaagtgtagttgtcagacctgggtgattgatttcatctagagggagaaaaagaaggtcgtggatgattctcagatttctggcatgggcaactgtgcaggcagagtgcctagaaagaatt

SEQ ID NO: 91149 - DNA, 122 bp, Homo sapiens
tttttttttttttttttttttttagacagagtctctgtcacccaggccagagtgcagtggcgtgattcacaggtcactgcagcctcaacatcccaggctcaagtgatcctcccacctcagcc

SEQ ID NO: 91150 - DNA, 122 bp, Homo sapiens
gcggtgatgttcccccagcagggcctgtgccggcacagacgcgtcctccggccctccccacgttggcagcacgttgactgtgtctgaagcttaatcccgatgtcacagattcttgtctttgc

SEQ ID NO: 91151 - DNA, 122 bp, Homo sapiens
gtcgctggccttcgggctgagcatcgccacgctggcgcagagtgtgggccacatcagcggcgcccacctcaacccggctgtcacactggggctgctgctcagctgccagatcagcatcttcc

SEQ ID NO: 91152 - DNA, 122 bp, Homo sapiens
gccacggagatggtgccgacccggggcagtcagaatgtggaaagtgaatcatgatctgtgcgggcaagggaagtgccacgaaacggagcaccagggtgtgcgtgctctcatgtgtcccgtga

SEQ ID NO: 91153 - DNA, 122 bp, Homo sapiens
ggggggagggaacagcgttgatcacgtgacgtggtttcagtgtttacacccgcagcgggccgggggttcggcctcagtcaggcgctcagctccgtttcggtttcacttccggtggagggccg

SEQ ID NO: 91154 - DNA, 122 bp, Homo sapiens
cactattatatatggtatattggcttttgcatagtttttgggggtgaactttttctaaaacgatgcctatttttcctgggagttttctgtctttggcttagagatatggaggcattcttgat

SEQ ID NO: 91155 - DNA, 122 bp, Homo sapiens
cccacccaggagagagagctgcagacagggtccgagaacacctttattgtgcacgtcccccgcagagcagcctcaggcgtcctggtagtagttgttgaagttgatgcgcagcagaaagtcct

SEQ ID NO: 91156 - DNA, 122 bp, Homo sapiens
aagcgaaccgcatcctcctgcagttgcagcaggaggccttccagaagagcctggcacagccgctgcccgctgaccctctgtgcgtgcacaactcgtcgctcttcgccctgcagaatctgcag

SEQ ID NO: 91157 - DNA, 122 bp, Homo sapiens
tatgttgcttttcagtttatcatttttaagtcatctccccaacaagacactccgaatcagcgtctcttatgttctttcacagagtgaagggaatacttgcttcttttcttgttagaaatctt

SEQ ID NO: 91158 - DNA, 122 bp, Homo sapiens
caattacagtcacacagcgtgtgcaactccacaatcagctcctctgagaagccaagggcccggagcctcaggagatggggctctgggaggcagtgggtggcttggagagaaacccagaaagt

SEQ ID NO: 91159 - DNA, 122 bp, Homo sapiens
ctgaccacaatggctggaccggccttaatgtcgcctgataccacgactttgtggatataccgtggtggccttagctgagtacccccacattgatgtcaactggcaggacagggaggggaacg

SEQ ID NO: 91160 - DNA, 122 bp, Homo sapiens
ctctgcgtttcgggagaagggtgatcattcccaggcttgtccgacgtctctctcagggtgcgctccggaagagcgagccctttaaggctatgccgagtgggcgcgtcccggcctctcccggg

SEQ ID NO: 91161 - DNA, 122 bp, Homo sapiens
tccctccgcgccccggccggcctcctgcatcgccaccgccgcagctccccccgaagaatccgctttgaatctctaaggttgtactgtatatgtctttcctggtcagtgtctgtctggagcat

SEQ ID NO: 91162 - DNA, 122 bp, Homo sapiens
gcataacatcccgctttctgaatgggcctaattatttccacttgatgttccttcatctcccgtatcttctataaactgagataaatgtctgtaagcttgatttgatttaagcagaacagcct

SEQ ID NO: 91163 - DNA, 122 bp, Homo sapiens
cttgcttctggcctgcgctcccgtggctccctgctgggtacccgcgtggcccgacagcctcgcctggccacccgtgccctggcacaagtcacacccacggggcgcacgctgagcgttcactg

SEQ ID NO: 91164 - DNA, 122 bp, Homo sapiens
gtgggaggtgagcttcgagctggggacccctggaccggagcggggcggcgcgcaggatgccgacctatggagcgagaccttccaccacctggcggcccgcgccatcatccgcgacttcgagc

SEQ ID NO: 91165 - DNA, 122 bp, Homo sapiens
ttcttgcagacctactgattttgtgttttgcagtgaagaatgggtaggctccactatgcacggtttcacatttatctggagccatctaattaacacctgtactccacttgtcacctgaacct

SEQ ID NO: 91166 - DNA, 122 bp, Homo sapiens
acctgtacctgtagccaatcagcgccagcgctgctgggaacctacctgtcagcaaaatctcgacacccaaacctcaacataaatcaaacactttcccgggcagagaatgtctgtgtcaggca

SEQ ID NO: 91167 - DNA, 122 bp, Homo sapiens
ggtgagtgagcgagtcgggggcccgggcggggtgggctgcggagagcagccacggggcgccgccgttcccaggacgccctggcaccgggcccagcccccaggtcccacggcgaggcgaggcg

SEQ ID NO: 91168 - DNA, 122 bp, Homo sapiens
agaaaagaagagctgagcatttcacaaacggagagcaggtgtctggtgtttggtgtgttccggtcgagtgtagtcaggaaaaggaagccgcgttgtctgcggggcgggggcctgtgcttgtg

SEQ ID NO: 91169 - DNA, 122 bp, Homo sapiens
gggaagccagacctgtgtctaggtttgcctaaagagaaggtactgcttttgggtaagtgacgagcttctggggctgagggaaaagcttagttctggtaggcaacagataccataatatctgg

SEQ ID NO: 91170 - DNA, 122 bp, Homo sapiens
agagaaagagctcagagccggggactggaggcctggaggagccgatgtgggagagatcctcgtgggagggccccagtggccgggatggtaaaagacttcggagcaaactaatcgattgtaat

SEQ ID NO: 91171 - DNA, 122 bp, Homo sapiens
ccaaaaggctaaaacaggttcagaaccaggggaaaccattggaaaatcttcagggtgatccggggtgtggaagggaggaaccaggtcacaagaaggacctctttcctggagagtcctgtttc

SEQ ID NO: 91172 - DNA, 122 bp, Homo sapiens
agaggtctcttactaccgagtcacatgcagcaccaaagtatattaccggtggaacatttccgagtcacagggcaccgaaatatgttagcggcagtggttctgtccaggtctgaagcaaactc

SEQ ID NO: 91173 - DNA, 122 bp, Homo sapiens
gtagggaaggggcttccgcggggttggggttcaggggccgcagggctggggttcgggggccgcgtggctgggagcagagcttgtgctggcgagagttgggtagtgcgctcgcgcagtcccta

SEQ ID NO: 91174 - DNA, 122 bp, Homo sapiens
caaagaaagttagactagaggatggaactttctgacctcttgctctgcaaaaggtggggacgaatggcccccacagccacaccatagtaaatggcaggtgtcttgatcatcttcactctgac

SEQ ID NO: 91175 - DNA, 122 bp, Homo sapiens
ggtggggagtgagctgctctccaaatcctggcttgggccaagctgacattcttggaattccgagtgtgtgcgcttcctatccctccatttcccagcagagcccctgagatctggagactgcc

SEQ ID NO: 91176 - DNA, 122 bp, Homo sapiens
cgcgccgagtggagagctcacggctgccggggtgttttggcagcgagaacaagcgagctgcgcctgagaacggccttcaggcctggcgctaaataataagtcgttgttatgtgttatgtatt

SEQ ID NO: 91177 - DNA, 122 bp, Homo sapiens
cctcatggatactaaaacaggagcattttgtccagctcttatacctctgtgggcctttggcgttagctcctgctcactgctctggctttaagagttttgtttgtttgtttgtttctggcatg

SEQ ID NO: 91178 - DNA, 122 bp, Homo sapiens
atcactcgcgcatccctctcccctcctcccccggcccgcagtgcaccccacagggagccccgccgggtccactcttgctccgacccccatttcgcgcgccccctcggctctatctcccagat

SEQ ID NO: 91179 - DNA, 122 bp, Homo sapiens
ttacctggacaacccgccacgcagccgcagcgacaggcactgacgcttatgcgaccggagcgcaacacgcgtcgcaaggtcacacgtaactttgcggcgaagcaaacagaacgtgcgcaagc

SEQ ID NO: 91180 - DNA, 122 bp, Homo sapiens
gtgatcctttccggaagcggaagctcggggggcgggccaagaaggtccgggagcccacggcggttgttttttctgtgaggcttcacttacctcggtctgggcttctctgaggctgcgagaga

SEQ ID NO: 91181 - DNA, 122 bp, Homo sapiens
ggcctgccaggaggggtgctcccttcagcaggagggaagaggcctcaggacccccaggggcgtcccacctgcctggggattgaccccgcgcccctaagtggcttgctttctccccgacctcc

SEQ ID NO: 91182 - DNA, 122 bp, Homo sapiens
cccagggcctaagaggagcgtcttgtgaaggagctgtacctgccggctcaggtcccttctcggagtgactcctggcagagcagagcaggcctcagccctccttacaggcgcgtccagccagc

SEQ ID NO: 91183 - DNA, 122 bp, Homo sapiens
gggagctgtgatcgtgtcactgcactccagcctgggcaatggagcaagagacaggattggcgagttgttacaaagggcagtgcagtgtgtggaattgggacccagatgctgctgggctctgg

SEQ ID NO: 91184 - DNA, 122 bp, Homo sapiens
ctgatccttgcatggggcacaacatcctcaaggctcatcccatcacagccggcgtcagagcgccattcctgtttagggctgagcaatatttcatggtgtgcatgggctacggtttgtgcata

SEQ ID NO: 91185 - DNA, 122 bp, Homo sapiens
tgagcgtgggacgttttgtccgttctgtccactgctgtagtccgagattctagaccgtgccgggcccacagtgggtgctcaggaagcacatgtcgactgaggaatgcgtggggctgggaagg

SEQ ID NO: 91186 - DNA, 122 bp, Homo sapiens
gcgggcgagcaggcgggctgggggtgtcgccctccggactcatccatcttcctcaaattacgcttcatttcctccctccgcccgccgccgccgcgcccggctcccgctccctccgcagagcc

SEQ ID NO: 91187 - DNA, 122 bp, Homo sapiens
ggggcctggaagcagcctccgggatctgcaagtctggaaaggccacgttgtggaccttggcgcagaggttatgggggcgacccggagcggatggtttcaggaaaactagaacccaccctcat

SEQ ID NO: 91188 - DNA, 122 bp, Homo sapiens
gaagggagacaaacttgcaggcttcagacaagacgggctcaaagtagttggagctgcctacgccgcgtcccgagaacagtgggtgcctccgaggctcgggcgcttccaagtgaacacaccaa

SEQ ID NO: 91189 - DNA, 122 bp, Homo sapiens
gaatatgtccccaggttccgcagccgtcccggccgggtgccttcagccagcctgggcccacggggtccctgcacaagttgctcagtgtccctgggacccctcggctctgggctgggggaggg

SEQ ID NO: 91190 - DNA, 122 bp, Homo sapiens
ctccccaggagggaggccaggaccccgccggcactgtggggactcagcacagccgagggtcggccgatggcgttgtcacccctcccgggccccttgaaccacccactgctgggacccttgac

SEQ ID NO: 91191 - DNA, 122 bp, Homo sapiens
ggcgccgctgttggccaaagtgcagagcttggcgctccagatctcctcgcgcagccgcagcgcgctttccagggcagccccagctcagactccccagcgccggcctttacaccgcttcctcc

SEQ ID NO: 91192 - DNA, 122 bp, Homo sapiens
gtttattttgaccacttccagtaatgcactttgctcataggtctttcaagataaacggaacgtccctaataattaatgttttggttatgtgcccacttgagaagagataccacttcagcctc

SEQ ID NO: 91193 - DNA, 122 bp, Homo sapiens
ctgggtgccaggcactggactaggcactgccttaacagctctttcggagttgattttgaacgcatacaacgacggaaagagcaccgcagtgggaatgtgaagacttaggttctaatctttcc

SEQ ID NO: 91194 - DNA, 122 bp, Homo sapiens
gactccaccaagtttttattgcctccgtagctgggtcctgtgctaggcgccctgggaaatcgaaatggaagacaagacttctcgatttcaggagggacactttcggcccgcgtggtggctca

SEQ ID NO: 91195 - DNA, 122 bp, Homo sapiens
atccgagcgacgttctagaaagcagccaaagcctgtcctgtagccacaactttcaggaggcggtatgagcctgaactaggaggagccaggcacgcactctttttttcccctccactatttag

SEQ ID NO: 91196 - DNA, 122 bp, Homo sapiens
aaactatcatcccaccaggaaatcatgttttcttgaaaaagatatacagaagtgcccaggcgcgttggctcacgcctgtaatcccagcactttgggaggccgaggggggcagatcacctgac

SEQ ID NO: 91197 - DNA, 122 bp, Homo sapiens
cgccttctcccagttcttcctgcagccccacgtgttcttagtctcttggaactcctcacacgggccgcacagctcttcacaattcacacagttctctgtccccacacagccaccgccgagtt

SEQ ID NO: 91198 - DNA, 122 bp, Homo sapiens
aaactgcagaaagttgttccctagaatgactgcctactcccaagaggaagcgtgggcgagcggtgttctgcaaaatgggctctccggcagcggatctgcgcagaagcgttccgtgcgtgcaa

SEQ ID NO: 91199 - DNA, 122 bp, Homo sapiens
aagtgactaggagcgctcagccttgctgggcacccccatcctgcggggggcattctcgtccggggctcgcagcccctccgcctctggacggacctccagactcacggaatctgccccacccc

SEQ ID NO: 91200 - DNA, 122 bp, Homo sapiens
gacctgaaggatgagtaaagctagtcaggggaaagtatgagggaggggataaggagatgacggagaaagaataactacactctgggaactgaaagaagcttcatctagatggctgaatgttg

SEQ ID NO: 91201 - DNA, 122 bp, Homo sapiens
gtgccacggggaatgaatgaatgaggcttacccttgacagagcccaggctctggtgggtacgagggcggccgggggtggggagcaccaggagccaaccagctcccgcgcagggccctggagg

SEQ ID NO: 91202 - DNA, 122 bp, Homo sapiens
ctcaggagtgctcagtgttcacacatattaacacagcccatccacagatcctgtgagaggcgttgatagggttaaaggaaaagctcttggtgtgtgggtaatgttcataagtagaaacaact

SEQ ID NO: 91203 - DNA, 122 bp, Homo sapiens
gttacttagacaaaggcacaggagcaccaggcagcatccacgtgtggtaagatggcagtgcggcagtgctcttgtcctgggttcattgccctcgcctcctaaaatcgctgtgatcattaaag

SEQ ID NO: 91204 - DNA, 122 bp, Homo sapiens
atctctacaaatatttgtccttttgttaaaatcttcagcctcaaaagacattggcatttccgtgtccctgtcacatttcacctccagttcacaaaagaggccacagagacccagagtcaaga

SEQ ID NO: 91205 - DNA, 122 bp, Homo sapiens
catgtcctctcccacctcggcctccgcgtgggactggggtggaggggaggggtgaaaccgcgtggagtcctgtcctgcccgccaccgcgtgcccagaaacgcccacgcgagccttggagctg

SEQ ID NO: 91206 - DNA, 122 bp, Homo sapiens
gctctcaaaacaaaactaaccaagcagtcaagcttcggaaggccccgtcactaccccacacgggaggcagcagagccatggcggccacccgcctctcacagggacccagagcctgacctggg

SEQ ID NO: 91207 - DNA, 122 bp, Homo sapiens
taatcaccaaaaaaattagatactagggctccagatgataggatggcccaagttatttaacgttttcttgtttaaaaggtgggcccattggcacttaagaaaataaatcagaaaataatatg

SEQ ID NO: 91208 - DNA, 122 bp, Homo sapiens
tggcctgcctgttgcctgggaagctgttctcctgacatcacagggctgtgcccatatccccgcttggcttaggggcccctaagttaggaacaaagaagcagaaaaggttggataaaagataa

SEQ ID NO: 91209 - DNA, 122 bp, Homo sapiens
caagggacaatgctggtgtctgactgtcactaaccgagtctcacattcttattcaatgtacggcatggaattttaaaacaagtacttgtcaggaaaccacacagcagcaagctcagaattcc

SEQ ID NO: 91210 - DNA, 122 bp, Homo sapiens
aaaccattagttcttaaatagcttctccaagcatgctgtccaagctttatagcttcattccgtgggagagactgggggaagtgtgcttaatccatcttacctggaaccagaacttatcacca

SEQ ID NO: 91211 - DNA, 122 bp, Homo sapiens
ggtaggggtccggaccccgcgccccgaagagtccggagcctggccccccgaccctcccctcgggagcaggcccatttaatcaaagttttgcagtgtccttgatgagaaacgcccggagtatc

SEQ ID NO: 91212 - DNA, 122 bp, Homo sapiens
gaccaccagattggattacggaggggcgataggaggccatccttccttcttgcagactgacgcatcagtcaagacactctcttcccttcccccctttctccagccttggtgccttcacctcc

SEQ ID NO: 91213 - DNA, 122 bp, Homo sapiens
ctatagtgacaggagaggtcagaaaaatttgagtcttgggctcccttctttctgttcctgcgatgcacccaatctgagctccctgcccctaggaaagcaggagagagcttcatggttcaggg

SEQ ID NO: 91214 - DNA, 122 bp, Homo sapiens
tatttgaaagctgaatagccaatgtcaaaaatagatttccctttctttccaaagtgcagacggggtccagaaaggggcaaaaataaccacatgcctttcttggactcctgactcttaccacc

SEQ ID NO: 91215 - DNA, 122 bp, Homo sapiens
ttgaaaacatacctaactccaccatttatagctgctgagcaggtggatgacattcgtcaacgtggggtttagaataatgcaatgtttgaaataaaattagaaagaaaataaggccaggcacg

SEQ ID NO: 91216 - DNA, 122 bp, Homo sapiens
tggcagcactgccggcctggcccacctgtctaggccgtgtgtttgttgacattgctcctgcggccggcattggccggcctcgctctgcgtcagacggggcgggggaggggccgccggagact

SEQ ID NO: 91217 - DNA, 122 bp, Homo sapiens
cagactctgattgcccattactgcctttctaaaatccaaacaagttctgaggttcaaaaccgttttggccctaaggctttgggtaaagggggtggactctgttctactctgactggagtcca

SEQ ID NO: 91218 - DNA, 122 bp, Homo sapiens
gaggtggatgcggccccggaaaatgggcggctggggggtgtccagggagtagggtcggatcggagtatatggaccaccgggcccggagggtccgagccgagagcggagcctgcaccctccac

SEQ ID NO: 91219 - DNA, 122 bp, Homo sapiens
gcgggctggcaaagaggaaagggcgataccacccggagacctccggcaactttctgcccgcggcagctgctcattcacgcgtttcttataagcccaggagccaatcagaggctgcgtcggga

SEQ ID NO: 91220 - DNA, 122 bp, Homo sapiens
gggatccagctccgcccctggccagtgtgcggcccgggggctccctgtgcccgcgtgaggcgagagaacaggggacttgagtctcgaacagcggttgtttttactttatttatcttaggccc

SEQ ID NO: 91221 - DNA, 122 bp, Homo sapiens
acgaactctccaggcttccgggccagagtcacaaaaccgctgcttccccagggggagactcgcgtgtcctaaggacactttcctcgccccaggaggctttgtcgcctctacccgtctccgcc

SEQ ID NO: 91222 - DNA, 122 bp, Homo sapiens
ccggattgagcgttggcgccccgggtcaggctgcgaggccgcaattatagtgggatggggcggccgcccacgcgccgcttggcggttcttacgagaactttgtttgtgacggcagtggtgat

SEQ ID NO: 91223 - DNA, 122 bp, Homo sapiens
gggaagctgctgatgggcatcaggctgctgtggtggcggctgttgttgttcctctgccatcgctgcagaggggtgggagggagggagggaaagatgggggcgcggggaagggtgagggaaga

SEQ ID NO: 91224 - DNA, 122 bp, Homo sapiens
gagaaaacaaatgggaaactaatgtgtatagagcatcacttatgtgtcaggctctgttatcgttccatataaagctctcagaacaccccagctaggcagttgtgcaaccattttataaagga

SEQ ID NO: 91225 - DNA, 122 bp, Homo sapiens
cctttcaaaaggagtggcgcgagggcttgtgggaaatgtagtctgcactttctaagggagcggcgcgagggcttgtgggaaatgaagcgtgcactttctaagggagcggcgcgaggacttgt

SEQ ID NO: 91226 - DNA, 122 bp, Homo sapiens
ggcttcaggtacgtgcggttccctcggctaaatctggcccgggggatggggggcaggggccgtctggtcctccggaactcgaactttgtgattttgttctttctgtgtgacatcctcatccg

SEQ ID NO: 91227 - DNA, 122 bp, Homo sapiens
accaccctcggctcccgagtccacgcctgcctgggcctgtgctgtcagacccgcgtcggtcgtaaccctctgtggctcccctgcatcagcaccgtcccaccaccaagttcaccaggttcacc

SEQ ID NO: 91228 - DNA, 122 bp, Homo sapiens
agttggaagggcgctttgcttctgttttctggatgcagagtcctctgactccctctgccacgggctgagtttccggctccaggttcgcgtgtcgccctgaggtttgaggccagacagctcgc

SEQ ID NO: 91229 - DNA, 122 bp, Homo sapiens
cgccgcggccacccagcgatttccaggcacgcaactccgcctccagggctctctccctcgcgctctctcccagccgcttgctcgcagccccagcagccgccgcagcatcacttcacacaaag

SEQ ID NO: 91230 - DNA, 122 bp, Homo sapiens
ccctgtcctgtgcatgaagtctggtggggaccccagaggcaggggcttgaggatttgtgccggagagtcccgagactgcagcagggccgacctggatccctccctccctgccttgcccctcc

SEQ ID NO: 91231 - DNA, 122 bp, Homo sapiens
ttatgtttaatctctgacactttcagtttctaatttataaaaagggggtgaataaaaatccgcctcagtgtctctccacaggatcggaaggaagcaggaatcagctgggcgcagtggctcat

SEQ ID NO: 91232 - DNA, 122 bp, Homo sapiens
acgccttgcgcacccgcagccgatactccctgatcagggtgaagcggtctccaccttctacgtcacggtcaccgcctccgaaactcccgccaaccaagggcgcatgcgcggccgtcagtttc

SEQ ID NO: 91233 - DNA, 122 bp, Homo sapiens
gaggggggccaagaacaggggacactgcctctgtggcactggccacagcaagaaggtgctcgcatcatcagcatacagctccccactaaaggaaaaggcccttgaaggcaggtgtggagatg

SEQ ID NO: 91234 - DNA, 122 bp, Homo sapiens
caggctgagctcaaagccatttctccgctgacatccagtagtgctcttccagggctcgggcgctgtgggtctccgtaggtctcccgcgtggtgcggcggtgcctcgcttattttccctcctc

SEQ ID NO: 91235 - DNA, 122 bp, Homo sapiens
agaaatgatagatcagggttgctgcagggagtgcgaagtatgagggcattccagcttggccgagggtagagaagtgaacgtcaaacatttttcaaacataagtcatagggaataaacataca

SEQ ID NO: 91236 - DNA, 122 bp, Homo sapiens
ctttctccctgcttgaactgattctcgctgttggtagactgcacagtcacagtatccagccggacaggacctgctttgccgggactggaaacaactaccgcggcaaaagaggccgtttcgcc

SEQ ID NO: 91237 - DNA, 122 bp, Homo sapiens
aaatcagaaatatccattagatacatctcatttgaatcctaagagtttaaacataataaacgctgtatttatttattttatttcttttttattttttgaggcagagtctcactttgttgccc

SEQ ID NO: 91238 - DNA, 122 bp, Homo sapiens
tgctctgtcctgaaaacctggaatcataacatttcatggctaggactagagtgtccttggcgctgtgtttctggtcagtgtcaattgtgtgtcatattgagatgcccccacaaaaactgtca

SEQ ID NO: 91239 - DNA, 122 bp, Homo sapiens
cggaatcccgccccaggccctagtttcccatccctgcgccccgggcctgggactcagcgtcgccctgagaccaagtctgcagtgcccgggcgtccccagcccctgccctttgcacccaccct

SEQ ID NO: 91240 - DNA, 122 bp, Homo sapiens
aagtgaggggcgcgctggggtaccgacgcccccccacaaccctcctccacccccgagtctcgtgcgggctcctgcctaggctaccctggatgcccacctccgccgcctgccccgcccagagc

SEQ ID NO: 91241 - DNA, 122 bp, Homo sapiens
gctggcttactagcaacccaaaacagtgtgtggggggaattagtttttctccagagctaccgagaaggggaacctcaacatcaagtgtctggcagatgggagtgtgtgttaagcgagggctg

SEQ ID NO: 91242 - DNA, 122 bp, Homo sapiens
gacctgctctcacccaggtcctggagagaccccttgctctctggggtggcatccctgtgacgtccccttcctactggcaggggaacctgcgccgagtggatgtccagctgctgggacagctg

SEQ ID NO: 91243 - DNA, 122 bp, Homo sapiens
tgccatagaaatcctaacttaccatgaagatgcaccgtggcgaagaaacactgctttgtgcgcgggccctttgatgtagcaggcgcgagatgcggggcgctcagctgcgcggagcgagatta

SEQ ID NO: 91244 - DNA, 122 bp, Homo sapiens
tgtgagccactgcacctggctaaattctgcacaccttttactctagggataaaaataatacgaaagtggaatgccagactccgaatacacacaccaagtggcctggactcttcactgctacc

SEQ ID NO: 91245 - DNA, 122 bp, Homo sapiens
cgcccacttcgcgagctactctcttgcagtagagttcgggcgggaggaagtgccaggagtcgcccaatctcaggcccttgggacggtagaataaagggaaggaggtgatgactgattccagg

SEQ ID NO: 91246 - DNA, 122 bp, Homo sapiens
ctttggccattgggtatctggtcgttaattttttgtttgtttgtttgctattatgagcaacgttgctagaaatcatacatgtctcctggtgcacaaatgcaagctcctctgagtacattttt

SEQ ID NO: 91247 - DNA, 122 bp, Homo sapiens
caaggtgatgcagtccatctctaacacttgacttttctctcacttctacttgtagatggccgccctgctcccccaatgaaaggccagcttcgaagaaaagctgaaagggagacgtttgcagt

SEQ ID NO: 91248 - DNA, 122 bp, Homo sapiens
cacagctgatggacagtgtgctttaaactggactggccagaaggctcaacagagagccggcggcaatttttggcttctgaatcagattttatcatgatttctctcacagtattttattttta

SEQ ID NO: 91249 - DNA, 122 bp, Homo sapiens
tctgtagctgagccgtgtgaccggccacagggccctggggcacaggaggggcctcagctccggcctggcacactcttgagttcttggcaaaccctgagagcggctgtctttgtggtgatagc

SEQ ID NO: 91250 - DNA, 122 bp, Homo sapiens
cctctgccaagacagaacgtgcatcagctcagcaggaaaacagttcaacgtgtatagggtcggccatcaaatcagagagtgggaactcagctcggagctctggcatctccagtcagaatagc

SEQ ID NO: 91251 - DNA, 122 bp, Homo sapiens
cacccacagacaacgcgcaaaacacaatttaaggtggaccgactttacaaaaggcaggcacgcctacgcgatgagcactggatctaagcagaaacgcagagccgcccaagccaggtccatcc

SEQ ID NO: 91252 - DNA, 122 bp, Homo sapiens
gagtgtgtgcagtgagagatgagggaaaatattaacggctgctgatcctgggcaaaggggcgtgggagttgtcggagctagtttttttgaaacaaacttaaaagtgaaccattaagatagga

SEQ ID NO: 91253 - DNA, 122 bp, Homo sapiens
ggcaggacccggtggggcagcgggaaacttgatcttggagtcgtggaactgcttgatggccggccggctggcggcacttgctggctgcgatctccttcaccttcaggatctcgatggaatgg

SEQ ID NO: 91254 - DNA, 122 bp, Homo sapiens
agtccggctaagagcctggttgtaccaggctcgcttgttaggaggctggctacaagatcccgtgaaagcctcacggctctactcaacaaatttctctagaaagaggccggagtgtacaaggg

SEQ ID NO: 91255 - DNA, 122 bp, Homo sapiens
gggggggctcaggacgcggctgcaggtgtgtgttactaagacgaaagcaagaaccgcttccgtcccgggagtgcgcccggaatgggcagcgcaactgcggggtgcaggcaggattctcttgg

SEQ ID NO: 91256 - DNA, 122 bp, Homo sapiens
ccagtgggttcaacagtgagccagaagctgccaataagagagtagtggactgcatcgggccgaccttagtgttttgtttggtccagatagtgtttagttatttaagttgctcacttctagct

SEQ ID NO: 91257 - DNA, 122 bp, Homo sapiens
cgctgtccgggctctagtcccgccctcgcccctccccgcccaccggcctcgcagtcaccgcggacgccaatcttgtgcatggagtcgccattttgctcctagagaggccgccaggagacccg

SEQ ID NO: 91258 - DNA, 122 bp, Homo sapiens
agtgatcctcctgcctcgacctcccaaagtgctgggattacaggcgtgagccaccgtgcccggccccgaaaatgaaatttaagaacaatttttgttggggatcattattttagctttttttc

SEQ ID NO: 91259 - DNA, 122 bp, Homo sapiens
ggcttgggggcacaggtgggaataacattctattttttttcactgccatgaggcccctcacgtggtggatggggaaggggaagggggtcttcagatgccaccctgcagcagccccccttagc

SEQ ID NO: 91260 - DNA, 122 bp, Homo sapiens
tctccacacaatatacatgaaaaaataaacttgcctcatgataaagctgctaatgaatgtcggccagaacaggacttcaaggcagagcaatattagctgcgcattgagtcctcaccaggtca

SEQ ID NO: 91261 - DNA, 122 bp, Homo sapiens
atctcaacaggagtaaggaaggagtgcagttgctgccaggggcagccttccttgctctggcggaaaaacttcggccccggccccagcagaaggttacagcttcacactcaccaggtccccag

SEQ ID NO: 91262 - DNA, 122 bp, Homo sapiens
gcgcgctccgtgctcctttcactttgctatccaaggctccagtgccaggcttttgcagcccgcggctctctgttaatatttggagcgctgctggctgctttgccacaggcttgacccagggc

SEQ ID NO: 91263 - DNA, 122 bp, Homo sapiens
tgagccgagtacggcccccagtgccaggaggggccagtgctcagtgtcctcacacaggtccgtcttcctgctcacccagtcactggccactctcaccccatgctgggttcagaagatggcga

SEQ ID NO: 91264 - DNA, 122 bp, Homo sapiens
tgtgccagtgtccgggccatggaccttccccgggaagggagagtttggggagaagataggcgttagaacaactagccttaggaagttctttgactccaacaattgtcgatgttccagcaaga

SEQ ID NO: 91265 - DNA, 122 bp, Homo sapiens
acttgggcttcctggacttgaagttgcccatgctgggtcgcaatacgctgtccaccagcacggtcgcctctacattctgctgctgcggctcccaagagggcggcgcgtgctcttctaccaga

SEQ ID NO: 91266 - DNA, 122 bp, Homo sapiens
tgtctgtttcctctagagtatcgagatcgttatgattcagaccggtatcgggatgggtatcgggatgggtatcgggatggcccacgccgggatatggatcgatatggtggccgggatcgcta

SEQ ID NO: 91267 - DNA, 122 bp, Homo sapiens
aagagggagaaccctcagtgccccagcctcagctctgcgcacagcggtcccctgcatgtccgcactcctgttctgtactgcacgctcgccagagcacagagccccatgtcccattgcgaggg

SEQ ID NO: 91268 - DNA, 122 bp, Homo sapiens
ctcaccgagaggaagagcatgtctagcagaagacagagggggtccgggcatcggtggccgcggagccgctctcccaccctggggaccctggcggagcagccacaccccccattccgccggag

SEQ ID NO: 91269 - DNA, 122 bp, Homo sapiens
cgaccctccttgaacccgaagctgccctggcccgagtatccgcactggcctgggcccgagcgaggctgcaaccctgtgaaaccccctgcaaggcggaagcctccaaacccaaacgaccccga

SEQ ID NO: 91270 - DNA, 122 bp, Homo sapiens
ctggcgaggacatggcgctgtctgggctgcctgtctcctgctgatggatgtggaagctggcgcagcacgagggaaacctgcttggcagatccactaaacctaacaacaggtgctgctccaca

SEQ ID NO: 91271 - DNA, 122 bp, Homo sapiens
gaggggccaaaaacggcctcgagactcccatgtcgaggaatcaaaggctgaaaccacagacgggctccagtcacctcaagaagacgcaaatgctaccgacggcgaagtccaaagctgcctga

SEQ ID NO: 91272 - DNA, 122 bp, Homo sapiens
actcctcagcaaggggctggagatgcgtgagctacccctgtccatgttcctcctggtgggcgttaggggtgagcctgaatcgtggcttcctggcagggtgacgtctgcggggcactacggaa

SEQ ID NO: 91273 - DNA, 122 bp, Homo sapiens
taaaaataaaaattacatgtaaacggagtctgactttacccacgcagcacctgggagccacgcttgactgaatcagacccctcttgcctttaggagaagtgtttgatagtgtttgatagtgt

SEQ ID NO: 91274 - DNA, 122 bp, Homo sapiens
ggctcccccacaaaacccacccaaagccaccgctcgaggccctctcctaccctgagagcccggagacagcagctcccttggctgaaggcacagctcttacccctcgatctagtccaattgta

SEQ ID NO: 91275 - DNA, 122 bp, Homo sapiens
gcagtcggcttcgagagtcatcctgagttttcaaggctgacacaaatatcagtctaactacgcagtccacctgtgtaaatatttggggaatagtggatggttaaggaagagacctagtatga

SEQ ID NO: 91276 - DNA, 122 bp, Homo sapiens
tagccgcagggaggctgggaacattgtctttattttaagcctccgagtgcggcacgaacgcggctgctcgcgacaaagggcttcttgaagcggctgcaggcggcgcacgtggggctttggcc

SEQ ID NO: 91277 - DNA, 122 bp, Homo sapiens
gggcgcaggagcgagcgggacacgggcagctggcgcaactgggcggcgtgttgctgctggcggggggcaaccgctccggggccgcctccggagaggccagcgagggcgctgaggcatcggac

SEQ ID NO: 91278 - DNA, 122 bp, Homo sapiens
gtaggcccgtcgtgggccccaggggggccagagaccagggtgtgcgggctcaaggaggtgcgggggccgagggaggctggggcgcctctccttcaagggagtgggccgccgatcgccggcca

SEQ ID NO: 91279 - DNA, 122 bp, Homo sapiens
tctgggtcacaccaggggctcagccgactctagacccacttgttaagtggggctctggcccggcccttattgcctcagtttacccatctgtagcatgtgtgagttgggcacccagtggaact

SEQ ID NO: 91280 - DNA, 122 bp, Homo sapiens
ccccggcggggctgggggctcgtggcgcagtggcaagaaagtgtgcaaattaaagccttccggagagaaatgaggcggccgagtcccggcagtgctccgagctccgggctccctagctccct

SEQ ID NO: 91281 - DNA, 122 bp, Homo sapiens
agtgggaggctggagcccttacgtcacttacataatgagccaatcggaaggggctgagggcgagcccacacgcgagtgaggtggcagcgtgagagcgcgcgcagccctcgagctgtggaaag

SEQ ID NO: 91282 - DNA, 122 bp, Homo sapiens
agtcccacctgcctcgactcagtcccgacccagatgaccaccccccccccgcccccaccacgaccaacttttattccgactgcgccagtgacttgcagatagcatagcttcaaatttcctca

SEQ ID NO: 91283 - DNA, 122 bp, Homo sapiens
ggtcaggggcgggagttcgcggcagcaaacctgcttccccctcccacgcgccaccgcccccgccccgcccccgtccagaggccccgcccctagccgggcctggccccgcctctctctcccga

SEQ ID NO: 91284 - DNA, 122 bp, Homo sapiens
ccgctggacaaaggggccgagggctgctccgcgggagcccaggagcctcccagggccagccgtgcagaaaaagccagccagaggctggcagccagcatcacgtgggcagatggggagagcag

SEQ ID NO: 91285 - DNA, 122 bp, Homo sapiens
acgggcggggaggccagcgacgctgccgtccggaccccaagagtcggcaaggtggctctgcgggctgccggcttggacccgccatggctccctctgtgcactttgtgatcagtaaaggtgga

SEQ ID NO: 91286 - DNA, 122 bp, Homo sapiens
ggagcttgcgccggctcctatgtccaagtctgggcctctgggaaccaggaagagcagccgcgacttagctgcgcctcctggcggccgcgccagcacctccctgctctactcgcgcgcatgcg

SEQ ID NO: 91287 - DNA, 122 bp, Homo sapiens
atgaaagcagtgagtgtggctttaatcccaagggaccggcaggggtgagtggagctgccccgctgcagcagagccctccatgcttacccacccctccatccgggaggaaatcgagtctattt

SEQ ID NO: 91288 - DNA, 122 bp, Homo sapiens
cccagccccaggtcctgtgcagggcacctgcgtggctgacagccaggctcttactccagccggggctgccagcgcatccagccagcccagccctgtgaaagatggagctgacttgctgcagg

SEQ ID NO: 91289 - DNA, 122 bp, Homo sapiens
ggtagggggcagaaccgggaaccggatgttctaagcctgtcgtacgagcgcgacgtaaagcggatctgctttatggcaccttgctttcgccgtaaagcgcagtcagcgagcccacgtgcttg

SEQ ID NO: 91290 - DNA, 122 bp, Homo sapiens
gagtacctaaaaatgcatggttttcgacataagtgggaaaaccgcaagacactgcgtaaccgctcaaaatggcggagagcgaagaacaaagccggtgcctggcaatgggccggacccgcgaa

SEQ ID NO: 91291 - DNA, 122 bp, Homo sapiens
ccctgagactccgtcagaagattcggtcctccccataggtggctttacctctaagcatcccgccctcttttcccccatcgcccgccctttttgagcccgaaagcttgcagccaacttccaac

SEQ ID NO: 91292 - DNA, 122 bp, Homo sapiens
gtggttgagcgacgtgtagcgccgcagtgtctgcgcgaaggcgccagccgcggccacctgcgtgcagggattgaggggcttgctgcttccaaggaaccccagcccgccagccctggccccac

SEQ ID NO: 91293 - DNA, 122 bp, Homo sapiens
catggctccagggcatgccactcaccctgcagtacccctggccttgggtggttgttaccacgcttctccaggaggtggcggtaaagctcttttttttttttcttttttctttttttgagacg

SEQ ID NO: 91294 - DNA, 122 bp, Homo sapiens
ctccagcctcctccctgccctggaaggcattctatctcccttctgtggggaaggagctgccgtgaatcctgggcctgcatgtttcctgtatgttggctgtgtgtacactccatgttctgccc

SEQ ID NO: 91295 - DNA, 122 bp, Homo sapiens
acccggggaagacaggtgcgggggaactctagtctcgaaggacctagggctgcagggggacgtttcacctgaaggactgcctcgtttcaacaacaactttatggctcccggaagtgcctcct

SEQ ID NO: 91296 - DNA, 122 bp, Homo sapiens
cgtgatggaagaatgtgttatgagccatgagagatgtacaaagtgctgggaagagaggagcgtgcatatggatgtgcaagataagtgtctatcaaaatttgaagaactgaaaaacaggattc

SEQ ID NO: 91297 - DNA, 122 bp, Homo sapiens
gtcctcccgctggcaggggaaggagcatccatcaattaccttggctggccggagccgcggcgtggcgggccagcccggccccatccatcaagcgtcctggctgctggcaggggctgtctact

SEQ ID NO: 91298 - DNA, 122 bp, Homo sapiens
tgttataggaccaacagtttcatatgcttactgtccaataatagtccaattacactgagacgtcagatttggcagcaaagaaggagtttaataattgcagggcactgagcaaggagataaga

SEQ ID NO: 91299 - DNA, 122 bp, Homo sapiens
gataactgcaggggtgactgcaggggcctggcttggcttcgaaagcagtagcagcagcagcggagacggtcctgtggcacccagctgtttaacttccaccgaggcagggggcccgagcaggg

SEQ ID NO: 91300 - DNA, 122 bp, Homo sapiens
caaaagaggctgaggtggtaattcctcttgtcagtgtcatgggagaaaagaaacaaggaacgtttactgtctaaactgagctgggcagagggcatggaaactatgaagcaaaatatctgtaa

SEQ ID NO: 91301 - DNA, 122 bp, Homo sapiens
tactggtgcgatgcacggacagacaagattgaacggatcgacctggagacaggtgagaaccgcgaggtggttctgtccagcaacaacatggacatgttttcagtgtctgtgtttgaggattt

SEQ ID NO: 91302 - DNA, 122 bp, Homo sapiens
tgcccaacatggtgaaatcctgtctctactaaaaatataaaaattagccggtgtgtggcccgtgcctgtaatacgagctactagggaggctgaggcacgagaattccttgaactcaggagac

SEQ ID NO: 91303 - DNA, 122 bp, Homo sapiens
ttgttaaagagcagcttggttgtgtggcattgaggcgaggaggcggggagtggccgcccacggagggtcgggctcctcggaagcagtttcctgacttgcatggtagtccctgcgggctctgt

SEQ ID NO: 91304 - DNA, 122 bp, Homo sapiens
tgggacctaaagctgggagactacggaggcagctctcaattggtcaggatgcgagattgacggctgcaataactaataggaacaagctactgccgaaggggcccgcccacagaagggtggtg

SEQ ID NO: 91305 - DNA, 122 bp, Homo sapiens
gtatggcgctaaaaggtgcagaaaactggcttcaattaacattctaatcatcactgtcaacgccattatgcaactctgtgtagagtggcatattcggcactgtggggttaaacataagcagt

SEQ ID NO: 91306 - DNA, 122 bp, Homo sapiens
gtccctgatccacctgcggaaggcggggcacctctgtcacgcctactcctttttcttccgcgacagccacccgcgctgctggtttgagttcctctgagggtggtgctcagcctaggcctccg

SEQ ID NO: 91307 - DNA, 122 bp, Homo sapiens
ctttctccgtactgtccctgtgaaggccaagatctgtaacgctgacagtccccagacatacgatgggagagttgcagtaagtgctctttaaatcccctttcacccttgagagtctacgattt

SEQ ID NO: 91308 - DNA, 122 bp, Homo sapiens
gacaagtctgtctctgccttcatggagcttatattcttcttttattttttgagacggtctcgctctgtcacccaggctggagtgcagtggtgcgatcatagcttactgcagcctccaactcg

SEQ ID NO: 91309 - DNA, 122 bp, Homo sapiens
gaaaggtatgtcccccaagcgttcagttcagactagaacctttgaatctctctcctgtctcggtctctccctccacccccctaccccgccacctttcacggtgtgggagttctcctttccca

SEQ ID NO: 91310 - DNA, 122 bp, Homo sapiens
gaccgcggctcggccgtagcggagctgcgaggtgccaggaagggctgcgtggcgcgggaacggccgggcagcgccgcctccgcttcttccgggctgtcaaggccgcgggcgggcggggccgc

SEQ ID NO: 91311 - DNA, 122 bp, Homo sapiens
aaagtcagaaggtttcttccaaatggtcagcttgcttactgtacctcttcagttttgcgacgtagaaccacttcttggtttcttttttgggcttccagaagtctaagttgatgctataaaat

SEQ ID NO: 91312 - DNA, 122 bp, Homo sapiens
tgcattgctttttgtaccccaggctgatcctaatacagttatctcacacaaagcaaagcgcgtgttatgtgaacacctattatcatgctcactttgattagatgtagtcccagtagatgttg

SEQ ID NO: 91313 - DNA, 122 bp, Homo sapiens
tgacacaaaggaattgcatcttaccaaatgattagatttaaagtcagtgtagtaagcatgcgttaaaaattgtgtatgccatagttgcccatgaaaacccatatagggccgggcatggtggc

SEQ ID NO: 91314 - DNA, 122 bp, Homo sapiens
taataggtttaatgatttcataacatttgtctccctccctgtgagatttccttgttacaccgtcttgaacagtttgcaaagcttgctatgatgttcttctagtttatattaaaatattgagg

SEQ ID NO: 91315 - DNA, 122 bp, Homo sapiens
tggaagtgctcggccgtcttctccatgatccagcgctgcatctccttggcactgatcttccggtcagtgttcacatccaccctgcaagacagcaaatgggcaggtggccgtcagactgggcc

SEQ ID NO: 91316 - DNA, 122 bp, Homo sapiens
aaaaggcacattagagactgcactgcaaagcacgttatagctgtgaagtcttaagcccagcgaagcatcatccatttccagaatcactgagaagaaaagctaaaaatccttcacttcagtct

SEQ ID NO: 91317 - DNA, 122 bp, Homo sapiens
ctgtgcatcctctgaggcccatttcaggagcttctcctattcttctttcccagttgcccccgaaacatgactgtcccttcattttccctgttttctccctcctctgtgatcacactgttacc

SEQ ID NO: 91318 - DNA, 122 bp, Homo sapiens
tcccggaggatcctgggacatgtagtctaaaaagagtgttcctgctttaaaaggtggcaccggccgggcgcggtggctcacgcctgtaatcccagcgctttgagaggccgaggcgggcggat

SEQ ID NO: 91319 - DNA, 122 bp, Homo sapiens
gtaagcgaattcccgggtgtgtgtctgtgtctgtctgtgtctcgcagcggcgcgcggccccggacaagcgctggggattcccgtttgaggcgtcactactgtcactgccatcaccccacgga

SEQ ID NO: 91320 - DNA, 122 bp, Homo sapiens
aagaaagcttccgaaaaggacaccgtttcaggggcgagtgacgccggggtgcccaggccgcgccccagttccgggtttgcacccggtcttcttgccctgccccgcccgcgggactacagttc

SEQ ID NO: 91321 - DNA, 122 bp, Homo sapiens
aagagtggtaatcgcagtgggtcttatactttccggatcaagattagaggctctgctctccgtgttcacagcggaccttgatttaatgtcatacaattaaggcacgcggtgaatgccaagag

SEQ ID NO: 91322 - DNA, 122 bp, Homo sapiens
ctgagcctgcgcactgaggccacgcaggggctggtgctctggagtggcaaggccacggagcgggcagactatgtggcactggccattgtggacgggcacctgcaactgagctacaacctggg

SEQ ID NO: 91323 - DNA, 122 bp, Homo sapiens
tccgtacacagcagtaccaagccccgaagtggaggccactccatgaggtctgcgtgggaccggggaggcagggctgcggtctcagggcaaaggcacgtgtatgaaacatcctctgtgctctg

SEQ ID NO: 91324 - DNA, 122 bp, Homo sapiens
tttcaccctcattacatctagaacgaagctgagttctatcacatcagaagccacaggaaacgagagccatccatacctcaataaagatggctcacagaaaggtatccacgctggacagatgg

SEQ ID NO: 91325 - DNA, 122 bp, Homo sapiens
ttcagcagggcctcatggcctgtgccagagcgggctagggatgccggcttttctgaggcacgcagccctctgggagatgctcctcctctccttctagagagaaaaggtggaaccaaagtaac

SEQ ID NO: 91326 - DNA, 122 bp, Homo sapiens
ttgggccagccaggacctgaggcggagtgcagaagcgagggcctggagacagccgagagccgccttcaaggagggctgggggcggggctagaggaggggctgggggcgggtttcccgatgaa

SEQ ID NO: 91327 - DNA, 122 bp, Homo sapiens
aaagacaacccttttaaggctttccttagtgttgactgttgacttgagttcatgtgtatacgtgtgtgaatgatgacctaggtttgaggtctctgatggatggcagaggacttcagccccct

SEQ ID NO: 91328 - DNA, 122 bp, Homo sapiens
acaatacaatgatcaaaaccaggaaattaacatcggtgtgcgctattaactaaaacataccggtttcaccagtcccttcctcctgcaccccgtctcctttttctgttttaggatccaatcca

SEQ ID NO: 91329 - DNA, 122 bp, Homo sapiens
gaggaaatcagggcgccgcacagctgaaccctgcgcaggacagaggggcgcggacagcagcgcatgccacaaacattcacctggcaaagaaacagagcagaacctaagggctctgtgtacac

SEQ ID NO: 91330 - DNA, 122 bp, Homo sapiens
tttaatgacagataaaatggcatgccacatacatttacccagcctgaatatatgtaaacacgaatttattcacaaacaggagctctcagttacacttacacactcaaatatatacatactca

SEQ ID NO: 91331 - DNA, 122 bp, Homo sapiens
cgaactcctggccttaagtgatccacctgccttggcctcccaaagtgctgggattacaggcgtgagccaccatgcccaacagtggctctagtttctgtgacccattttgaaaaagaggaatt

SEQ ID NO: 91332 - DNA, 122 bp, Homo sapiens
acagtttgaattccaattccaggagcactgtaatgtaactttgtcagacccattgaagtacgagccagcatcccactctgaattacaagagctgagcagaattctaaattctccctccatgc

SEQ ID NO: 91333 - DNA, 122 bp, Homo sapiens
ggagaaacctgcctggacactggaactgggagaaagcagcagcctaattgctcttccgatcgtcgcttgggaaaggggggcttcacatttagaaacttctcgcacctttctctctcggtctc

SEQ ID NO: 91334 - DNA, 122 bp, Homo sapiens
ctccagccggagtccgcagggcagggagcgccgggtgcggcccagtccccgcgcccagcgcgttggcgcgcacaccccgtttctgcagactcaggttttctggccccgcctctttcgggccc

SEQ ID NO: 91335 - DNA, 122 bp, Homo sapiens
aggcacagcccagcatgtgtgtgaccccataggatgacacaggatgacccctcttctgtccgatcagtcatggccctggcttaatggacaccttgaagctggtggggaggacagtcaggcca

SEQ ID NO: 91336 - DNA, 122 bp, Homo sapiens
tgcgagctaaatttgtgatcgcacaaaatcaagatgttagattgatgcagaagatcactccgttccaaagggaaagttttcatctcacgagtttggagctgagggcccgtggggcaacatgg

SEQ ID NO: 91337 - DNA, 122 bp, Homo sapiens
ctaaaacacatacacgggtttatttaatggaatggattgaagccgcattgtagacaactgcgctgtccctccccgcgtccctcagcgcacctgcgcctagaaccagggccttctcccacgca

SEQ ID NO: 91338 - DNA, 122 bp, Homo sapiens
taggtgtaccctgggacccagcacccaggcgtagagtgaacataggtgtaccccaggacccggcacccatgcatagagtgaacataggtgtaccccgggacccggcacccaggtgtagagtg

SEQ ID NO: 91339 - DNA, 122 bp, Homo sapiens
caagtgcctgacacactgttgttacttgggaattgacattcaagaagaagctgttctccacgtcctaaaaaagaagccagagagaagtgagaggatgggactgaaaacaaccactgacatct

SEQ ID NO: 91340 - DNA, 122 bp, Homo sapiens
tacttacagctctttaagattcttcatcttcacaaaggcatcaaactggacagatctgatcgcattccctccaaggttcctgaaacagaacatacattacttatgcaaagaaaccctaggta

SEQ ID NO: 91341 - DNA, 122 bp, Homo sapiens
taattttaattttaaacgaaaatacgcatcgtactcagaggtaaagatttttaatcctcgcggttcgctcgtataaaggcatatttccggtcccttccaaggtccaacaatccggacacggc

SEQ ID NO: 91342 - DNA, 122 bp, Homo sapiens
cacggtgcagcgcagccagacggtcctcaaccagctgcgctacccgtctgtgctgctgctcgtgtgccaggactcggagcagagcaagccggatgtccacttcttccactgcgatgaggtgg

SEQ ID NO: 91343 - DNA, 122 bp, Homo sapiens
gtgattagtttcctggctctagtcagctctaaacctaacccctaggctgtaccacctcatcgcctggggacgagactcatcctgtgattgaggaatgcatgcagcctctcttgacactgacg

SEQ ID NO: 91344 - DNA, 122 bp, Homo sapiens
gataccaacagggatgctttaatgcagcgaagaaggagctccaagaattctgttaaggtgcggaacagagggtggagtaggcgactgtttgtgtttaaagaaaaaagaaaaaggaaatgcat

SEQ ID NO: 91345 - DNA, 122 bp, Homo sapiens
ttcagcgttcctctccctgcactatcaatgacctaggcacaggcagcctatgatcactttcggatgcaggagcagaaacagacaggagagccaggaagggcaggaggatggtgccagggcct

SEQ ID NO: 91346 - DNA, 122 bp, Homo sapiens
tgactgataccttcctcatactcaagtatgcttttaaggccggaatccccacagaaagaacgcagactaagaccagagaagccccagcctcttgcaagcaccagccaggcagatccctgcag

SEQ ID NO: 91347 - DNA, 122 bp, Homo sapiens
gagcctaccttctgcctcccggacactggctgctctggatgatgacgaggagagaaggcccggcgctacgagcagccaagggcagcttctctgagtgcagcctgaaaatgagatgttaacaa

SEQ ID NO: 91348 - DNA, 122 bp, Homo sapiens
gtctcttaaaacgtctcagcccctcagtttattatcttaaaaatgaagttctgggccgggcgcggtggctcacgcctgtaatcccagcactttgggaggccgaggcgggtggatcacatgcg

SEQ ID NO: 91349 - DNA, 122 bp, Homo sapiens
ctgttggcaatatgagcgcacccctgtagagggagcccttcggtcctggaggcggcgcggcgtgaagacaggttgctatttgagagcgttcccttgaagcccctcagagagtgggggagggg

SEQ ID NO: 91350 - DNA, 122 bp, Homo sapiens
gcccaaacgctggctcaggctaaggccaggtgggctaatctcaatgttggcctgtggtggcgaaagtcttgtgcaaatggcatatgttaggaatcactcccagaggcaggacccttgaaggc

SEQ ID NO: 91351 - DNA, 122 bp, Homo sapiens
tgttaggccggacgtggtggttcacgcctgtaatctagcactttgggaggacaatgtgggcggatcacctgaagtcaggagtttgagaccagcctggccaacatggtgaaaccctgtctcta

SEQ ID NO: 91352 - DNA, 122 bp, Homo sapiens
ttcttcctagaacacttagatcaacctcaggaggaggaccaactgctgtccctcacgtgacgagccttttcaacaggaagtagccagaaagaattgtcatccaacaccccttaacagcagtt

SEQ ID NO: 91353 - DNA, 122 bp, Homo sapiens
ggcagaggaggtcacggtcagcgccagggccacgacaggaacagtggctctcacagcagccgggacacggacacaggggacaatacacgggtgggcagaagcacaaacacacatgctgacag

SEQ ID NO: 91354 - DNA, 122 bp, Homo sapiens
ataaagctctttccaaaagaactttgcgtactttcaaaatgctatgtgcaacataccccacgttgaaaagagaagagggaaactgatttaaaacattatgaaccaagacagtggaatgctct

SEQ ID NO: 91355 - DNA, 122 bp, Homo sapiens
gcttggctttccaactgatggggagcttcttcttatgactgactacaaacaatgcatggccgtgaacttctttggaactgtggaggtcacaaagacgtttttgcctcttcttagaaaatcca

SEQ ID NO: 91356 - DNA, 122 bp, Homo sapiens
actgggggacacagaaggaggataagcaataggtgttggtatagatgaaacaaaactgtccgtgaactgctatacaccgaatatcactgatgatgcctgggggttcactatgcttttctaat

SEQ ID NO: 91357 - DNA, 122 bp, Homo sapiens
gcgatcagccggagacatgcaggggagccatcttgccacttacccagcagcctgtgtgtgcggatgggggagggccttgctgcagcaggggaggggaaagaaaagagggagggagctgagtg

SEQ ID NO: 91358 - DNA, 122 bp, Homo sapiens
ctaccaccctccccccccaccccacctcctccttctcctccccctcctcctccgaaccaccgaagtaccgagggtgagacacagagactcacaacaacatggctgccaccgccgcctgccct

SEQ ID NO: 91359 - DNA, 122 bp, Homo sapiens
cccgcacctcctcctcctctgcctcgcgctgcacccgcaggcggcagacccctcggagcgcgccaccccagctacgttgcattggcaaggttcggaggctggagggcagcagccacttgctg

SEQ ID NO: 91360 - DNA, 122 bp, Homo sapiens
atccaccctcagaggccactcccaagctgcccaggctgtgcagaagatgcaggaatgctgcgagcagtgccacctcatggtactcggagggaggttgtccgtggtgagttcgcattatttaa

SEQ ID NO: 91361 - DNA, 122 bp, Homo sapiens
acatatgacaattaaaactccttggacagaatcctagataaatccacacacaacaaatttcggactatgaagattcacattattagactccagtgctccctgacaatctgttctacttctct

SEQ ID NO: 91362 - DNA, 122 bp, Homo sapiens
taatctcacttctaaagctgtgaagtcttatttaacaaatcacacaggcctagaggggtccggaaagaaaacatttagacttgaaatgataacactctcttaaaagatgtctatgtgagcag

SEQ ID NO: 91363 - DNA, 122 bp, Homo sapiens
ggacagcgctttgtgcgcgttgctatggcgccgccgccgcccgtgcaggcttcctctgggcgcgttcccaggacgcagagcctgccagttggccctcccagcccctggcagggccccatccc

SEQ ID NO: 91364 - DNA, 122 bp, Homo sapiens
cagtaacctgagctggcagataaacccgctaagatcccaacgacaggagacaggacacaccgttttgctgaactccatcaaaatatcaaaagccactctgctttcttttctttttcaaaagg

SEQ ID NO: 91365 - DNA, 122 bp, Homo sapiens
ggagaaatataaattattgtgatcgtctttcaggagcgctcgagttaattattgtactttcgccagctgcgttgtgccttcatcaatgccgagccagaagtgatggttttagtggggaaaga

SEQ ID NO: 91366 - DNA, 122 bp, Homo sapiens
ctgaatcgctggtggcaccccacagggcccccttgttctgagccacctgagactgggcatcggggtgccacacacctgactgccctcccccatggggccccttgctgcttgctctcctctcc

SEQ ID NO: 91367 - DNA, 122 bp, Homo sapiens
ttccccgggttctcttacttctggattctaacagtgagttgtgagaagcaacgcggaaaacggaatggagactccagcttgttttaaacgagctgtattaccccgcacagtgcaggagaaaa

SEQ ID NO: 91368 - DNA, 122 bp, Homo sapiens
cgagccgagcgggaccgagcggggccgaacggagccgagcggagccgagcctggccgggccgagtccgccacattcccacaatcccgggcggccccgccccggctcccggctgcgcgtcccc

SEQ ID NO: 91369 - DNA, 122 bp, Homo sapiens
ttaccacgcggttttgaagtaattcatttcattaagtgttttgtgaaggacataaccccccgggacacacgagaatgcctccgttgggactggaatcgctgcccacaaacaaacggagaaac

SEQ ID NO: 91370 - DNA, 122 bp, Homo sapiens
ttagagtgtggcggagcagctctgaggcactgtcctggccccactctggttttggtggcccgagtcacagcttggcgcccctgggaggctctgaggactgccgcaggcacatctgttcatgc

SEQ ID NO: 91371 - DNA, 122 bp, Homo sapiens
gtctcctcggcctcccatggcccttctgcaggatcctgttgcacccaggcctggggcccacgattaaatcgtgcattggcactgcagcatggggccaaggaggggctggcagctccttccca

SEQ ID NO: 91372 - DNA, 122 bp, Homo sapiens
tccacgcggtcctccgagacctcagggcgcgtggcaactgggcagaagccgtctctgcagcgccgctgccccgggtggagcggcagcccaggctgcagcagtggggttgccacgccgagttt

SEQ ID NO: 91373 - DNA, 122 bp, Homo sapiens
caagcagcagcatcaagcgatctttggatgacttaaaccctggctcagcattctcttcctcggaaataaacgttcctttgggcattctcttccaatcaagtctcgtctcatctacgttaaag

SEQ ID NO: 91374 - DNA, 122 bp, Homo sapiens
tgcctgtaatcccagcactttggaatgcgaaagcaggtggttcacttgaggccaggagttcgagaccagcctggccaacgtggcgaaacctcatctctactaaaaatacaaaaagtagccgg

SEQ ID NO: 91375 - DNA, 122 bp, Homo sapiens
gcggtgtgggcggggccaagggcctggggaggcacggctggaggcgggttggaggcgtggcgccgcggtgtgggcggggccgagggcctgtcgccgccgcgcccgcgggcggggcgagggca

SEQ ID NO: 91376 - DNA, 122 bp, Homo sapiens
gcagtactcctttcaaccgatactcggtcagagtggaagaaagtttctaaaggtttgtcccgacatgactccctccgccgcagcctcgtactctgctctcgtgcagcgccgcaaggagagac

SEQ ID NO: 91377 - DNA, 122 bp, Homo sapiens
cgctcggcgcttcctgttccggcgccaggaggagccgcgcgctgctggtgctgttgccgccgctgctctagctgccgtcagtcaggctgcgcccgcgtcttcagggcccagtccctcggacc

SEQ ID NO: 91378 - DNA, 122 bp, Homo sapiens
gctccggagccgcagtccaggcgcgccgcccgagggtccacgccgcacccctcccccgtgcgttctgcggccacccaggccttccaggacaccgtggagagggaacaagggggcagggacgc

SEQ ID NO: 91379 - DNA, 122 bp, Homo sapiens
cgggcgggcgggcggccgggggggcgggccgggggcgggccgaggatggggttacctgggcgggcccagcggcccgggacacccccccgggggcgggccggagcggcggcggctgccgcctt

SEQ ID NO: 91380 - DNA, 122 bp, Homo sapiens
cttgacccggaggtgcagagagcccctcagagcggcaggtaaggggcccggggagcagggcgaggaaaggtcgcttcagtgacagggtcgttcgcctccacagcctcggctccggggagagg

SEQ ID NO: 91381 - DNA, 122 bp, Homo sapiens
ggaggccaagacacaagaatcctttgaaccttggaggcagaggttgcagtgatccgagaccgtgacactgtactccagcctgggcaatagagtgagactctgtctcaaaaaaaaaaaaaaaa

SEQ ID NO: 91382 - DNA, 122 bp, Homo sapiens
tcagaaagctcctctctaatcacttactaatgataattactctgaactaggacctctttacggaggctgaagctgtttttctcttggttaaggtattgtcattagtttcctgtcagagtcgg

SEQ ID NO: 91383 - DNA, 122 bp, Homo sapiens
agacccctgaggctgtctgtggcctgcagagcccccagggcgccgaggtctgacctgcagcgcctgaggtctgactgtctctgcctgcagcatgccggcccctctcctgcagcccctgcccc

SEQ ID NO: 91384 - DNA, 122 bp, Homo sapiens
agccttcccccagaaacctgcaccactcacacataatgcttcacaaacaagttttggcctcggttttttcatacttttggggctggtatccagctagtgtattttccctcatggagcgggaa

SEQ ID NO: 91385 - DNA, 122 bp, Homo sapiens
acccccaggcaccgccatccgggccatgcctgtttacaagaaagcggagcacgtgaccgacgtcgtgaaacgctgccccaaccacgagctcgggagggacttcaacgaaggtgagggccccc

SEQ ID NO: 91386 - DNA, 122 bp, Homo sapiens
gactggaggtaagtgtctatacagtggtagccaacttccataaaggaaaatagagaaggacgtctgtctccaaattctatcctggataacacttctgtagaaaattcaggagtattgggaaa

SEQ ID NO: 91387 - DNA, 122 bp, Homo sapiens
gtcgccctgcctccctggcgtatttgcgccattggtggatattccggaccgtgatggtggcgctgcgcgtgcgcactcgctccgagccctgctcccgggagagggagctctcgggtcggggc

SEQ ID NO: 91388 - DNA, 122 bp, Homo sapiens
ccttttgaggggacctgttacaggggcacctgcttataatgaccttggacacaaagaagccgtgcgcatggtgaatttgtgcagcagggtagagataataactcctgtaagactatagtatg

SEQ ID NO: 91389 - DNA, 122 bp, Homo sapiens
tgttgattgccttcagggctgacgttctgtgaactgagtaatggaggaataggtacatttcgtaccttttggccacaccctggtttgctgggtttcttggggtccaccaaggcttgccccat

SEQ ID NO: 91390 - DNA, 122 bp, Homo sapiens
aaaacctcacagaggtgttataagaattacgtgtggaaagcaaccgtttatgtacatgtgcgtattaataagtacctgacacagaaagcattcaaggaaagacttatttacaggtaactaat

SEQ ID NO: 91391 - DNA, 122 bp, Homo sapiens
cggcaaggatgcagccccagaccaggtgagccgggggccatatctccagccaccaaggaacgacagacccagatctggggagtgtggatcaccgggaggactgcagaggggcagatgtctgt

SEQ ID NO: 91392 - DNA, 122 bp, Homo sapiens
agggcggtccactgtaaggggaaatgctgaggatcactgggctcctcccggctttctgaacgcaagccagcaagtgggcgggacctggggcgggcggagcggcgaaagcatctgctcctgcg

SEQ ID NO: 91393 - DNA, 122 bp, Homo sapiens
ttacttacaagaccagcactcttatctttagacaggtggtaacatctattttcccagggacgttttctcataagaattctaccagttcacagtggctgcagacatctacatgccttctttat

SEQ ID NO: 91394 - DNA, 122 bp, Homo sapiens
aatatcagctggtagtgatgcctacagctcaaaatatttatacactccataaaagttcttcgcaaactcctattggtctgaaaatattccatggaagcaattgcatcacgtgtcacaagtct

SEQ ID NO: 91395 - DNA, 122 bp, Homo sapiens
gcacctgtagtcccagcaactcgggaggttgaggcaggagaatggtgtgaacccgggaggcggagcttgcaataagccaagatcgagccactgcactccagcccaggcgacagagcgagact

SEQ ID NO: 91396 - DNA, 122 bp, Homo sapiens
agagccaggggggcaagaggggctggctctttcttactcccggcatctcggggggcgcctcgccccactgtgatgtgggtcctacgagccaggggagcaagaggggctggctatttcttact

SEQ ID NO: 91397 - DNA, 122 bp, Homo sapiens
gaggccgaggctggtggatcacttgcggttaggggctggagactggcctggccaacagagcgaaaccccgtctccaccaaaaccagtcaggcgtggtggcgcgagcctgcaatcgcaggcac

SEQ ID NO: 91398 - DNA, 122 bp, Homo sapiens
acacttccaaattaaagtaagatgttgactacaaagctttgtgccaactgggttctgtgccgcttatttgccattcccctccccatctattctctgatgtcctggggcagggagcacaggtg

SEQ ID NO: 91399 - DNA, 122 bp, Homo sapiens
cagggcaggtgcgggcacgctggggaatagggagaaacgccccagccttgtcctgggctccgtccccagacccacgtctgccaccccagtcccaggtgcgaaacaggggcgctacctcttta

SEQ ID NO: 91400 - DNA, 122 bp, Homo sapiens
aaagggaattttatgtctggtttttaaaatattttttcctccggatggaaatcggatgctcgcttgccgggtggcggtttggtgaacgcttttctcctctaaaaaaatattggtttataggt

SEQ ID NO: 91401 - DNA, 122 bp, Homo sapiens
tcagtatcagatcccacctgcatgattcctgcacctgctgatgtcggggaggtccggttgcgcgccctgtgggcccccagaggcatggctggtggccgagcacgcgcttgacttccacctgc

SEQ ID NO: 91402 - DNA, 122 bp, Homo sapiens
gacagggccatgagggagctgaggcaggcctgtttttataaagcagggggaggaagttcacggtggaagcagcacagcccatcctggcttcgggccaggctgattattcacagccgtgatgt

SEQ ID NO: 91403 - DNA, 122 bp, Homo sapiens
ctgaggtgggagggttgcctgaatccaggaggttgatgctgcagtcagccatgatcatgccgctgcactctaacctgggcaacagagtgagaccccctcttaaaaaaagaaagaaagaatga

SEQ ID NO: 91404 - DNA, 122 bp, Homo sapiens
cggggccaatggcagggcggccttcagataggcggtggggacattcaaatagctgctccccgctgcagtgattggccgaaaggagtgggcgcgccggggcggggcggggtctccgctgcctc

SEQ ID NO: 91405 - DNA, 122 bp, Homo sapiens
gtatttttagtagagatggggttttgcccatttctactaaacagatggaggtaatccacccgccttggcctcccaaagtgctgggattacaggcgtgagccactgtgcctggcctacaattg

SEQ ID NO: 91406 - DNA, 122 bp, Homo sapiens
gaggctggcaggggactggtgccatggacaggccctggctgacgatggaggtgggcacgtcggcccacagaggctctccttggcctacactcagttggctcctgagccctttctaatgaggc

SEQ ID NO: 91407 - DNA, 122 bp, Homo sapiens
agggagaaacagatgcaggggcctggcctactctcagcaggggctccctggactctgaaccgactccccaaggctggccctgtgcatgctcctccttcccgaaccccaggcctgtccagccc

SEQ ID NO: 91408 - DNA, 122 bp, Homo sapiens
attctagcaaacagcccactgaacatggcactaaacctctctccttcccaggcaggattacgccaaagggtaggtgtgcttttcattcatcctctcttagtaagtggtgcctgttcagggct

SEQ ID NO: 91409 - DNA, 122 bp, Homo sapiens
tacctctaggggcccaggagaggctgggcccagcatcccggcacagcctcgcctccccagcgcatttcccgccccactccgggcccacgcgcctgggcccgccgtctccaccatgaagcctt

SEQ ID NO: 91410 - DNA, 122 bp, Homo sapiens
tgcggccgcctcccgcctctttcttctgagcctgctgaagtccccgtcttcctggctggacgccccagggtctcaccccacgctgtgcagcaacagctcagcctcctgatgttcagaactgg

SEQ ID NO: 91411 - DNA, 122 bp, Homo sapiens
gtctgatgagagcacacagacaaatatggaggactccccaaatggctggaagtccctgcccggggagctccttctcccaggtccatgtgtagagtccccccacgcccccagctgggccagcc

SEQ ID NO: 91412 - DNA, 122 bp, Homo sapiens
agcgccgctcctgacatccaacctccatgttcccccttttattctccactacctttgacccgcgcgctcttggtctcgaatttggttaacatctctcaggtctccgactccgatgtcttaat

SEQ ID NO: 91413 - DNA, 122 bp, Homo sapiens
ggccacatgttagacaagcttggcctaaagataagtcacattttggagtctgttcttccccgtgtgtgtatgagttgggggtggggggagggagggtggtgagcagcatgattacaagtcca

SEQ ID NO: 91414 - DNA, 122 bp, Homo sapiens
acacagtctcttgagggtgtccaggcctggctgttaagctccctgctctgattagtttgtcgagttcacagtgttccagagtgctgaagcacagaaattagggaggggaggtggaaggaaaa

SEQ ID NO: 91415 - DNA, 122 bp, Homo sapiens
ctcaggaacttgctaaccatgctgattcctgccccccacccccccgacctgctgaatcaacgccaggaaaggagcctggggatccgcatttaataagctcccctgtgaatctgacacccact

SEQ ID NO: 91416 - DNA, 122 bp, Homo sapiens
tcctcttccttccttctttccttccttccacaccttgcaagggtcctctgtcccgcactgcgagtaaatcatacactttggaagtttagcattagagagcccagcaggggagaaaattgtct

SEQ ID NO: 91417 - DNA, 122 bp, Homo sapiens
ttcgggggcggaaatgagggcagcgccgttgtccgacgtgaagaagacgaaggtgttgtccgcgacgtgcaggtcttggaggagctccagtatcttcccaatgctgtcatcaatctcccgga

SEQ ID NO: 91418 - DNA, 122 bp, Homo sapiens
gaaagggggtaacctagacctgaatgggcttgaccatctcacaactgctcgcgtgacgaccgcattcgtggcaggtgagggcccaaaaccggaggagaaccggagatgcggaacctgatcat

SEQ ID NO: 91419 - DNA, 122 bp, Homo sapiens
caaaacactaaggctctagcagtgacttgttcactaaaaagagagagtcctgtccccagacggttagtacaaagccttggatacagtttgcttgtaatatttttaataatgtgaggagtaca

SEQ ID NO: 91420 - DNA, 122 bp, Homo sapiens
atttttccatcgcaaggaagaagaggaaactggtaataatctcctctgacagaataatctcgcaactttaggaactttatttaaagaattcagaaatggggttgggcgcggtggctcacacc

SEQ ID NO: 91421 - DNA, 122 bp, Homo sapiens
gtgggcttggggctgaggcctgtggttctcgggccggggagcatcgctggggagatgagtcgtttttggttagcgagtgtttgcgggctagtggtggacggctgcctgcttctttgcttggg

SEQ ID NO: 91422 - DNA, 122 bp, Homo sapiens
ggctttgcccccaaaccccaggccttttgcggacggaacaggtgagcactgcgcactgctcgcgccccggttcttgcgtcccctgctctccctgcgctctgagcggcctggcccccgcgggc

SEQ ID NO: 91423 - DNA, 122 bp, Homo sapiens
agaatgtcaacacaccagggctgggatcaggggctccaccctcttatcctgctgtgcagtcgtcctcaatatgtggttgctaactcctagtctaggatggccgcccatgtgccagccatcat

SEQ ID NO: 91424 - DNA, 122 bp, Homo sapiens
ctggtcgttcggggactggacatggagacagatcgcgagcggctgcggaccatttataaccgcgacttcaagatcaggtacgggccggcccactcccggccccgaatcgcgggcccagcttg

SEQ ID NO: 91425 - DNA, 122 bp, Homo sapiens
cagcagagagactaacgaaaggtccccgaggtgcccgggaggcggagctgcaagaccacccgcacgcgcacgccgccgccctccttgcctgagcacaggtttcgcgggtagaaggcgtgcgc

SEQ ID NO: 91426 - DNA, 122 bp, Homo sapiens
cgggtgcgggaaggggacagcagggctgagcctggggcccgcaagacccagcagcccgagcgggcgcagagaccccacgccacgcacaaccctctcttctagggggcgccgactacactgac

SEQ ID NO: 91427 - DNA, 122 bp, Homo sapiens
cgccatctgctgggtgccccggccagtataaaacgacccggggccctggccctctctttgcggggaaatttacagtccaggaaggttcatttcacaaatcagtgagaattacgtggaaatca

SEQ ID NO: 91428 - DNA, 122 bp, Homo sapiens
ctgccaaacctccaacaggcaagagcccagacgctgggcgcctgcgtctccgggtgacagcgtcgtcacctgcagccattagtgggatgttgtggcgccctctctttaaagccggccaagta

SEQ ID NO: 91429 - DNA, 122 bp, Homo sapiens
ccggttggtgacagcaaagacggagtcggtgcagtatgaccaccccaaccacacagtcaccgtgaccaccatcagtgacctggacctctcgggggcccggctgctcgggctgaccccacctg

SEQ ID NO: 91430 - DNA, 122 bp, Homo sapiens
gactcccggggatcttctgcttgctgcgtggcccgtggggctgtcactccgccctacccccgaaacagcggaagcagctgcctggagcttttgttctgtgctgctccttcagggaagaaagt

SEQ ID NO: 91431 - DNA, 122 bp, Homo sapiens
ctgttgatgttaagcgggttccccctgcccagcttctcacaggtttccttttctggtttccgaagtgcgagatttaaatcaccggtggaccgccttgcagacctttaacttacgcgttgact

SEQ ID NO: 91432 - DNA, 122 bp, Homo sapiens
atttaacaaagcccttttgaatgggtagttccttgaggtggctctaggagaaagccctatcgtgtgtctaaatgacctacattatttggaaaaacaaacaaagctggattgatctgagttga

SEQ ID NO: 91433 - DNA, 122 bp, Homo sapiens
tgtgtttttttattttttattttttttattttttatttttgagacggagtctcgctctgtcgcccaggctgatatttgttttattattgtatgcccagtacctagaagagtgccaggcatga

SEQ ID NO: 91434 - DNA, 122 bp, Homo sapiens
cttgtagtccgttgccttccgcaactaggaagggggagggaccgcccctcctagaatttccgtaacttgaatttgattattttgttttaaaagagccttaagggctgaaggaatggggtgaa

SEQ ID NO: 91435 - DNA, 122 bp, Homo sapiens
ttggggagtggcagggaccacatattgtcagtgttaaccactgttatgactggcccaggtcgggtgacgacgagccatttccgcactattgtcccttcttcctcactgcacccccagccctg

SEQ ID NO: 91436 - DNA, 122 bp, Homo sapiens
caacgaccacctccctcccggcccgcgccgagcccggccacaccctccccgcgacacccgcgatcgccccccaggactggcggccccgggccccgctcccacccacccacctacgcaggggg

SEQ ID NO: 91437 - DNA, 122 bp, Homo sapiens
gttcatgctgtcttcatatgttgtcatggactttacactgtcccaccaaggccctgtagccggccgcaccccttagcttccctccagggattgaagagctctgcttcctcggaggagtggcc

SEQ ID NO: 91438 - DNA, 122 bp, Homo sapiens
gagtaaatatgcctacctcctcttctgggctgctatcactcgagaaggcacaaggctgtgcgatcctccgccgcatctggtgtcctcgatgttcctcccacccccactgtcccaccgggtgg

SEQ ID NO: 91439 - DNA, 122 bp, Homo sapiens
cctcctggtcccggcgctcaccatggccggccaggagctcccccagctggtggcacagcgcggcctcttcgcgccgctgcccggccctctgcgccttggctttcgccttgctcagctctgtg

SEQ ID NO: 91440 - DNA, 122 bp, Homo sapiens
gtgccggggctcgtcaaaggctacaaacaaaccggacgggtgggaagcacgtttcagcggcgactggatttttaaaaatctgctggtagagtgaaaacaaaaattgtcctccaagttggcaa

SEQ ID NO: 91441 - DNA, 122 bp, Homo sapiens
aattgcacatgcctacccaaacacgctcaagggcagacccatgaccatgagaggggcacacgtagctgtgaatgcagggcacccgagagcacatgtgactgaacatgaagaaagcatacggg

SEQ ID NO: 91442 - DNA, 122 bp, Homo sapiens
atcccatgacttgggtgcaaaaggccacagggggccctttggggcctgctctgggctgctcgcaccgcccaagcttgggaccactcagcgtttcccacggccctgcagtatcctgggctgaa

SEQ ID NO: 91443 - DNA, 122 bp, Homo sapiens
tggtcgcggctggagggagacacggggcagcggcgcacaatggacgggttataaactgcgcggggggaggggagcggagacgagccacccggcctccacttcctcctctgccctccccaaag

SEQ ID NO: 91444 - DNA, 122 bp, Homo sapiens
agttactgcccttctccacaaggctttcagccgcccagaagtcaattcagggcaaaaaagcgcagtccccacgtagccttgatttgaactactgcttcccttatcctttactggcctattgc

SEQ ID NO: 91445 - DNA, 122 bp, Homo sapiens
ggccgaatcctcctctttagcggtgagtggggccggcggcggggcgcgctggggccggcgcggggagcccacccctgacctcccggcctccaccctgcagggccccagttctgggtgttcca

SEQ ID NO: 91446 - DNA, 122 bp, Homo sapiens
tggattccggccgcgatgaggagcccgggttgtcgtcccaagcacttgcactgtcacccgcgcccatgggtacgcccaggctcgggcagcaagcagcaaacaacaccagagttacggcgaat

SEQ ID NO: 91447 - DNA, 122 bp, Homo sapiens
cggatcccgggcacaggggctggaggccgacccggtgagagtgcaaggtctcgcgaccaccgacgacagcagacagcgagtcgggccttcccatctgaggccagcttcagtacaggcctcca

SEQ ID NO: 91448 - DNA, 122 bp, Homo sapiens
ccggggaggtggtggagcgttctcagctgaggacggaaggtttagcgcaatcacaaggagcgaggccgaattgtttacaagtttaagtgatctagtgtttctgatggctagaaggcgggaga

SEQ ID NO: 91449 - DNA, 122 bp, Homo sapiens
ttctaggaaaccaaagttgggctgctctggttagagatgagagcaagggtgacctgaggtcgtctgagactccctgggctcccagagaaccatttgaaggccacgtattttgtaggttggct

SEQ ID NO: 91450 - DNA, 122 bp, Homo sapiens
ggacagcctggtgggctcaggatctgtcccatcacgagttggaacctcagctctgccactcggcaaccgcgagccgttagtaagttgctgaatctctccgtgtgcctccgtttcctcacctg

SEQ ID NO: 91451 - DNA, 122 bp, Homo sapiens
cagtcttcaaaggtaccgggccattatcttctaatcattataccctcactaataatggctcggtatgccaggcatctgcaaacgtttcccacttcttttgtttacttttcagatgaagagga

SEQ ID NO: 91452 - DNA, 122 bp, Homo sapiens
cagggctacctgcaggccccggcgctgggccccggagctcggacccgcctgcctccccagcgccccccgcgcccacccacggggccagcagcatccgcagccgtggcttgcttctgcggtct

SEQ ID NO: 91453 - DNA, 122 bp, Homo sapiens
tcacctgccgtcgcggggcgggcgttgcggccggtgcccagctgcagatccgcaggcgatcgcactcctggcggccccagctttaagcaggcagcggccgatccgccctgctcgagggctca

SEQ ID NO: 91454 - DNA, 122 bp, Homo sapiens
gatgatctgcctgcctcggtctcccaaagtgctgggattatgggcatgagccgctgtgcccggccatgtcttttgcatattgtattatctacaaaggacatgagttactttttaaataagtg

SEQ ID NO: 91455 - DNA, 122 bp, Homo sapiens
tttcgcgtctaacaataggatcactggctttccctataaacactcatattgatgtcctatcgcattaaagttcctggatactcactctcctctccctcgctgggaaagacatatttgagaac

SEQ ID NO: 91456 - DNA, 122 bp, Homo sapiens
tggggctaaaggcgcagcactcacaggactgccgggagtcgggggacagccggggacgagcgcccaccgcacctaggccgcctcggaggcggcgcgcagtgggaggggccggaaatgtttac

SEQ ID NO: 91457 - DNA, 122 bp, Homo sapiens
aaactgtgttaagagtcaggtcgtcctgttactgaaatgcaccgtgcctcttccctctgacgcacgcgtttccgtgagacttagttctgttctgctcttttacaggcagtgtgtgaagaaac

SEQ ID NO: 91458 - DNA, 122 bp, Homo sapiens
ctaattggggcgcgtgccgccgcctctgcccggaccgcaccctggactctgcctgggacgcgccctcggacgcaggccccggacccgcccgccaactccgacccgaccccggcctgggaccc

SEQ ID NO: 91459 - DNA, 122 bp, Homo sapiens
gcaaacctgcgtctgtccctcccgcatggccctccaggtctcgccacagccacaagcctccgggagctcctgcgggcctgggaatctgtttaagtcacagttgagtttcattgttttccccg

SEQ ID NO: 91460 - DNA, 122 bp, Homo sapiens
gacggtggattcacttcccatcagcccttgaggctgcagggaccagccctttggtaggtgcgctttgcttcctaacccgttgccgggttggagattccacctccgaagttttctttctgact

SEQ ID NO: 91461 - DNA, 122 bp, Homo sapiens
ggattctatctataaatcagcctaagccccgcttccttttaaaacaggattacgccgggtcgagggagcctggcgtggccgcgcagtggccgggtcccgcggattcccctccagctcccgct

SEQ ID NO: 91462 - DNA, 122 bp, Homo sapiens
gtccaggccagccattcaactacccttctctgaaaccttctcctcctcctctcagagtcacgggaggaactccaccagactccaaaggggcagcccaaaggtcctcagagcccttctgggct

SEQ ID NO: 91463 - DNA, 122 bp, Homo sapiens
ttgttgagaaaacctggatttcccacaatgtggaagcaacgaggaaggggtttctggtcccggttctgaaggctgtgaccttcagcgcacatctatacaatgctgatagccccggcacctct

SEQ ID NO: 91464 - DNA, 122 bp, Homo sapiens
ggcgggccgcgcgcccagggagaccgcggcggttgaggagctcggagacgcgggagtaggcggcgggcccgggaggccgggagagaacgttggccggagcgcgggcgcgcggcccggggacg

SEQ ID NO: 91465 - DNA, 122 bp, Homo sapiens
ctgcacaggttcagggaccgactgcgcctgcgctgggtcctccgcctcttaggtccctagcgaatttctgcagggctggggtcgcatcatgtgttatttccaatttcacagcttctccttcg

SEQ ID NO: 91466 - DNA, 122 bp, Homo sapiens
gctgcgacctggacccggaccggagcctcttcgcgcggggatgaacataccctacgatggcgccagttacctcgtcctaaaccaggaactgctctcttggaccgcagcggaaaaggcggctc

SEQ ID NO: 91467 - DNA, 122 bp, Homo sapiens
tgcagtccgctttgatagaatttcagccagaattccttcctgttcagtttatcctcagcgcgtcttcccttctgactcctcccccagcagagcctcctagggcaggataatccattcctgag

SEQ ID NO: 91468 - DNA, 122 bp, Homo sapiens
acgtggacgacacgcagttcgtgcgggtcgacagtgacgccgtgagtctgaggatgaagacgcgggcgcggtgggtggagcaggaggggccggagtattgggacctacagacactgggcgcc

SEQ ID NO: 91469 - DNA, 122 bp, Homo sapiens
gcaagaaagggcgagaggaccagggtgggagcacgcaaggtaagcgcctcaaagcatccgcgcaaggtgaggtgtcccgcgcgcgtgcgcagcgcacagagggctctaggtcccaaggcctt

SEQ ID NO: 91470 - DNA, 122 bp, Homo sapiens
tagctcaatccacagctatagatgtggtgaggggtcccatccctttgtgggagtctcattcgtagcctgaaaaggggtgtctgatgaacccaaggcatctcaaacttctccctcaaccaggg

SEQ ID NO: 91471 - DNA, 122 bp, Homo sapiens
ggatccccacatccccagtcacagcagcgcttacaaatgcctgcccattgtgagcccaggcggcccttcacaccgccaaggtcagacagcgtctttacatcctaaacatggccatgacacag

SEQ ID NO: 91472 - DNA, 122 bp, Homo sapiens
tcgtgctcggttgctcctcagttttcctaccggtgcgaagctttctctcaaatttccgcccgtagtaggcatggcggcggcacctcaccactgattcgttgaattccttcccggtaatcttg

SEQ ID NO: 91473 - DNA, 122 bp, Homo sapiens
cgtcgggcgcggagcctgggcctggcgcggggcgggggtggcggggacctcggggcggggcgcgctgacggacgcggccaggtgtgccgaggcggcggcgcccgggagctcggggaccgtgc

SEQ ID NO: 91474 - DNA, 122 bp, Homo sapiens
gccaacacagctggcgaggtgagtgagccggcgggagcccgcctgtgctgggtctgctcccggggggcccaagaacaccgagcccgagcctgttcattcgggccacaggcggccggagcctc

SEQ ID NO: 91475 - DNA, 122 bp, Homo sapiens
cagcgggctggggagctggagcctgggacgggggctcagggctatttcctgggggcactacggaccacagtgaacgacctggcatgctctgataagaaaacgctttataatctcgccaacta

SEQ ID NO: 91476 - DNA, 122 bp, Homo sapiens
ttcatcacaaagaaagccctctttccagatcatctaagggtcattgtgccaacatccgggcgtggagagtttctgtagggagaaggacgaagaggggccccctcggcggggacgcgggccgg

SEQ ID NO: 91477 - DNA, 122 bp, Homo sapiens
ttctgtcttcttttgaaaaactgaatgttctttccacagtgagcccacattccttcctgacgaccatcaccgttcagctggagtagagagggctctgctcgcttcagatccggacgcgcagg

SEQ ID NO: 91478 - DNA, 122 bp, Homo sapiens
gcctttaaatgctgactcacctcctctcggaggaggcgtcctgtcttcacgggggggtcccggtggcctccagacgtagccatttcctgacatcaagatgttgaatgtaatctggtctgagc

SEQ ID NO: 91479 - DNA, 122 bp, Homo sapiens
cctatgctttagaggcctcagagtggaggggaggctctgtcccctgtgggtctgggaccacgtggcaaagaattctagtgtcagatccaggcttagtgggtgtcaggggattccttccaggt

SEQ ID NO: 91480 - DNA, 122 bp, Homo sapiens
cattgtgtttctggggggttctagttcttttgctggactgaggaggcccagggagggagacggatcccgagacgcacttcaccccagacctgtcgcagccacatcccctttcttacggttct

SEQ ID NO: 91481 - DNA, 122 bp, Homo sapiens
tccggttccatgccatgttttggaatttgtgtttacgtctgccttcatccccatcctttccgctccagcataagcaaaattataaccccgcacaccgacttgcatgcaattatcatagcccg

SEQ ID NO: 91482 - DNA, 122 bp, Homo sapiens
gggactctttgatagcgagtgtgtgggaaacccgaaggaatgtggctgttcggaccgccgcggcggggccaggcgccgggaggagggtccgcacctcccccgctgggactcccgggacctcc

SEQ ID NO: 91483 - DNA, 122 bp, Homo sapiens
taactccctgctgtcctcctgcttgagccttttagggtaaagttcagcacatatcaccctcgtcaaccgcgccccgtaaggcagccacagagtcctgtgctgatgtacttgaattccttgct

SEQ ID NO: 91484 - DNA, 122 bp, Homo sapiens
atctaggatcatggctcggtacagcgcggcattacaggccaggagatgcccacccgtctccgggggccgtttgacaaacatcggctacttccggacaagccactggtcctgccatcttggtt

SEQ ID NO: 91485 - DNA, 122 bp, Homo sapiens
taatagaaaactgagtagaggaagatgaagaggccggtggagccaacactcagcacagatcgccaccaccagcggtaatcctccccagacaactggaagtaggtgagtgcaatggagatgca

SEQ ID NO: 91486 - DNA, 122 bp, Homo sapiens
tgacatagagcgcgccagcaaagggcacgaagaaaatgcgccaagggtcaaaggcacgggcgaggcccagccctgggcctgtggagccctcatcaagcaggtccctcagactcctgcctgcc

SEQ ID NO: 91487 - DNA, 122 bp, Homo sapiens
cgaagactggtccgcctgtcaaccttatctttatgggtttttcccaacccagactggccccggcccctttttatctcctgggttgcacttggcttgtttactttgcgaggtcctgggagtcg

SEQ ID NO: 91488 - DNA, 122 bp, Homo sapiens
ttggtaagctttcattaatagaacatttgtgggaaataaaacagatgaataagaaggtgacgctttaaagtggctacagctctgatgcaccctacttccagtgggaaactgtctttcttaat

SEQ ID NO: 91489 - DNA, 122 bp, Homo sapiens
ctccatgggccaaatccagggtcccctgggccccacaaatgcaccgtggggaggcactttcgcctctgggtccttacctcttccacaccgtttgtgttttccttccaaaacacgggtgcctc

SEQ ID NO: 91490 - DNA, 122 bp, Homo sapiens
cccggcccgccccccgcccgcccccggcccgccccggccccgcctatgtccccgccaccgcggaccgcacctctcggcccgtcggatcctccgaccccaccggacacccggccgctgtcacc

SEQ ID NO: 91491 - DNA, 122 bp, Homo sapiens
gggatcgcccgggggcggggcctggcgctcgggcccagcaggtggtgaacggcggctgagcgaggccccgccccctgaggcctaggggcggggcttcgccgagaccccggaggctttgggtg

SEQ ID NO: 91492 - DNA, 122 bp, Homo sapiens
aggctaactaataggcatctcctgcttgttgcctcactaacatggatttacatgtacaggcgttcctggaagacagtgcaatttggtttcagaccaatgcaataaagtacatatcacaatga

SEQ ID NO: 91493 - DNA, 122 bp, Homo sapiens
ccccaaggcgtggcctaatttgtgcgggctttcacttcagtagaaaaaatgtgcatgtctcgacatccagtcgaccaggaaatactgactgggtttctgtgatatgctagccactcttacag

SEQ ID NO: 91494 - DNA, 122 bp, Homo sapiens
atggaacatggcctggtgctgaacctgtgaatttgcagtgaacacacaacacacaagactcgccacatcacatacaccacacacacaatacatacaatacaccacacatacatacatataac

SEQ ID NO: 91495 - DNA, 122 bp, Homo sapiens
aactgcacacaggtggtccccggggccagagagccgccggcgctctctccccgaagaccacgccttcgcctccagccagtttgcttggggaatcagaaaggtgcccagggcccagaaaccat

SEQ ID NO: 91496 - DNA, 122 bp, Homo sapiens
gcagggcacgctgggcagtgcttctgggccctctgctgctcctgcttgtcggttgctaggcgctgggacgcgcctcccgaagggtgcggggcacaggtggcctcttcggggtggaccgcgcc

SEQ ID NO: 91497 - DNA, 122 bp, Homo sapiens
cttaaacacccgcttcctaagcctgggtaagtgcagtagctcttcgctcgagaggagccacgtggaagagagtcgggaggggccctgcgccctactcctcctctccagaaacagggagggct

SEQ ID NO: 91498 - DNA, 122 bp, Homo sapiens
agccacctctccgggtgtctgtagtatctgggacccgggtgtccagctccgcactctggccgatcctgcggctctctagagcccggcgccgctgcagccccagctgccgctgccatcaacct

SEQ ID NO: 91499 - DNA, 122 bp, Homo sapiens
aaggtaaggcaggggattggtgactggaaacttggaggtgagtgagaacctagggatgaacgttcagaagcagggctggaaggaacttaaaagggacatttggattgtttctagcttttggg

SEQ ID NO: 91500 - DNA, 122 bp, Homo sapiens
ggagagagtgagtggctgggggcgaggccgaggctaggctctcagcgctagcggcgggggcgggggcgggggcgggggcgggagaggggactgggggcagcgggcactcaccggtggtcctg

SEQ ID NO: 91501 - DNA, 122 bp, Homo sapiens
ccagagaagtgactggaatagaggttgtagcttaggcaccgctgctccctccagtccctccgtgcagccgatgatggccctatggtccctgctccatctcaccttcctggggttcagcatta

SEQ ID NO: 91502 - DNA, 122 bp, Homo sapiens
ctccctccgccggggaaaggagtgcggccagggcttggcgcccgcagctgggcagatcctcggccgctcctgaggcggggacgaagggcgcgacccgctgcggccacagcgggttacgggct

SEQ ID NO: 91503 - DNA, 122 bp, Homo sapiens
ctagaatgcaccgggctccgggaaagtgcgcgtcactggaggacgaggcagggctgtgcgcgcctccctaggattgttggaagatgcactctcataaacactcccaacccttgggtcaaagg

SEQ ID NO: 91504 - DNA, 122 bp, Homo sapiens
cttttttttttttccaaagcagcaagccacgcccctcccgcgctcgcgaaatccgagacccgccctttccggaagttttgacactgtgcgccccgagtaatgtgatggagagggtaatcatc

SEQ ID NO: 91505 - DNA, 122 bp, Homo sapiens
aataactctaattcagctcaaatagattcagatagtttattacctacacagatacaaggtcgacattggatcaactccccatggccttggtcccatgggatgacaccaaatcagaaggattt

SEQ ID NO: 91506 - DNA, 122 bp, Homo sapiens
cgcttccgcagccctcccccgcctgcacctcacacagaccacacaccgcggaccacccctcgcccggcacatcctcctcagagcaacaggtggttctgcgcccctcaagtcgtccgggctcc

SEQ ID NO: 91507 - DNA, 122 bp, Homo sapiens
agccggatgccccgaacacgcaggagtcacagggcgaccggagcgtgacttcggattccacgttgctttgccctctgcaaggggcctgctggccactatcaaggtatagcaattgaagcagc

SEQ ID NO: 91508 - DNA, 122 bp, Homo sapiens
ccttggttgcgatcagcaaaaacacctccaaggggctggttctgagtgcatgagaatccccggggggcctgagaaacacagagggctgggctgctgccaggcctgggaccttccaggagctg

SEQ ID NO: 91509 - DNA, 122 bp, Homo sapiens
tgcgtttagacatatttatatataatggggccaaaaatcatctcttttacaaattagattcgtgaccattcaggggctaccaagattgtgctacccactgtagcacaatcggagacccacgc

SEQ ID NO: 91510 - DNA, 122 bp, Homo sapiens
tatccccacctctccaacctcctctttcatccccctcccctctcctctcctccccgctcccgcctgccccacccctgggaagcccctcccgtcgggcagcgccgccttataagcgggttccc

SEQ ID NO: 91511 - DNA, 122 bp, Homo sapiens
ccacccgggcctgtgccggcgcgtggcgctgcgccactgcctggccctgctcgtgctgtccgcagcagcccctgtgctggacatcaccacatggaccttccccatcatggcccttcccatca

SEQ ID NO: 91512 - DNA, 122 bp, Homo sapiens
ctgagaccaccctttgagcacaacagcctctgcaagaacaaaaacaagctttgaggactccgagccagagagatgtgggggagaccgcacactgagcaaggccctgaagacctggtagaatt

SEQ ID NO: 91513 - DNA, 122 bp, Homo sapiens
gcccccagcccgcagggtactttgccctcggagcgaaggaggctccagaactggtagagccgggccatcgggctgggcacctccccgcggcgcccgcagcgcggagtccactgaccggctca

SEQ ID NO: 91514 - DNA, 122 bp, Homo sapiens
aaaggggcgggttcggggggactgtgcggggcaggaggtggtggagccggcggttggcatcgctggaggcagaggggaccaggagcgggagaagccggggccggaaaggcgaggcggggctg

SEQ ID NO: 91515 - DNA, 122 bp, Homo sapiens
gccgtaacgacaataatcgtgtccaccattctcactacaggccccgaagcacgtaggtgccgttttttatcccaacttaactgaagaaaaaaaaaacacggccgggcgcggtggctcaagcc

SEQ ID NO: 91516 - DNA, 122 bp, Homo sapiens
cctttcgccgggagcctgctccctgcctgcccgcgtcgaggaggaggcctgggatctggacgtcaagcaaatttccctgggtgaggcacctctcaaggggtggctcccaacagctcggtcat

SEQ ID NO: 91517 - DNA, 122 bp, Homo sapiens
acgcttacccacctggctgtgcaccgggtgactggggaggtgttcgtgggcgcagtgaaccgagtctttaagctggcccccaacctgactgagctgcgggcccatgtcacggggcccgtcga

SEQ ID NO: 91518 - DNA, 122 bp, Homo sapiens
atttgagctgtcctcaaagacttgacaggagaggagtggggatgggaaaggaattgaaggcggagatactgtgtgaacaagggcatggagacatgacgtagtgatctacggctgaagtttcc

SEQ ID NO: 91519 - DNA, 122 bp, Homo sapiens
caggaacaggaacattgaggaggctgtgcactaacaggagtgaaagctgcgggaagccagcgctggcagccacttacttcttcccaaaaggctagcagggaagatgcagacgaggaggagag

SEQ ID NO: 91520 - DNA, 122 bp, Homo sapiens
actcgatgattctttatcttacaaaaggatgtgacaggatttcttgagaagccacgtccccgcagatgattaacacgcagccgctttgataaccgtcctgcgaagtcgccttcatcacgtcc

SEQ ID NO: 91521 - DNA, 122 bp, Homo sapiens
cagcaacagggcagctccagggttcacaacccttggaaccctgtccttagggtgtagttacgggataatttgttcaacctcttatatcctgggtctctctattgaaaatcccagttcctgga

SEQ ID NO: 91522 - DNA, 122 bp, Homo sapiens
tagctgtccactgctccaccccacccacaggtacccaactagtcctgtgcacctacctggcgtggactgccaagggaacctctggatctgccagtcagccaccctgtcctgctcagacttta

SEQ ID NO: 91523 - DNA, 122 bp, Homo sapiens
caggaactgacctggaaggagtggatgtggccgccccaggaccaccctgttccaggtgcccggccctggccatggagcccttggacttatttgtttctttagctgcagcgagcggggtcccg

SEQ ID NO: 91524 - DNA, 122 bp, Homo sapiens
caacgcctcctggggttgtcaatatggctgcgttgggatctgttcaccttcaggctgagtcgagactgaggtgaaaaagcggaaaaacgcgagaaaaggtttccccgttgtacagaggctag

SEQ ID NO: 91525 - DNA, 122 bp, Homo sapiens
tcagcagctcggtagctgggatgtgccccctccgctgcggactggatcaattctgaatcccggtactgaaatgacagctctctggctgcgacaggtctgcgctgaaagaaagagaaagacga

SEQ ID NO: 91526 - DNA, 122 bp, Homo sapiens
tagagatacagctcacagtaataggagccaggagaaaaaaatgcgcgtttccccggggtccgaggaatgacacaaccacattccgggtttaaaatatcgcagctgccctttgacccaggcag

SEQ ID NO: 91527 - DNA, 122 bp, Homo sapiens
tacatttgaattcgtttgtgtttgtggcaccctagggcctctgctcagtgcgggttcagtcgcccgaggggccgtttgaaaccgagccccttaaaggaggttttttggacgcagctgttggt

SEQ ID NO: 91528 - DNA, 122 bp, Homo sapiens
gtcagggcgcctccaaaggatgattccaactgcccagatgcatgcaagtgtacattttcccgataaaaaatcagcacacatggcttaagaagtagattgtgattttttaaattgatgtataa

SEQ ID NO: 91529 - DNA, 122 bp, Homo sapiens
aattggaggttagcccaggagggttatcagcttcgcccaggaaagaattcaagggtgagccggtggtgtcaggtggaaaccttttattgaagagcactgctccttgaggagcaggactaact

SEQ ID NO: 91530 - DNA, 122 bp, Homo sapiens
tcctgtctggggacatccacaaagcttctgacccctctgggcagacaacagcgttccccccgcggttcccagccaagaggctcacagtcaggttccagtcatgggagtctgcagcaacaaga

SEQ ID NO: 91531 - DNA, 122 bp, Homo sapiens
cctggcgggaggaggtgggttgtggagcgctgggactcaaccaatttggcctcaagcgctcgcaggtgccagggcatcagctttgtggccacagcttgtctatgggggaaaaaggcagtgtg

SEQ ID NO: 91532 - DNA, 122 bp, Homo sapiens
gaatgtttcaacctcataatcccggcctctcaaagcctgcctctccttcatgcctgacaccggagggggaacaatgactgccatgttcaataaaacttttgtgggagatgatttaaattgct

SEQ ID NO: 91533 - DNA, 122 bp, Homo sapiens
tccaaggactctctccatgtggcgtctcttcagccgacagtctagccctgggcttctttacgtctgggtggctggattccgtgaggatgtgttgcaagaggacaaccataatgagcaagcgg

SEQ ID NO: 91534 - DNA, 122 bp, Homo sapiens
tggggacaatgagatgtcactgctaggtctgggcagtgacaaaaccatacccccatggagcgctgcctcagggatggggcagctggtgggtgaggggcaaacctccaaagcgcccacctctc

SEQ ID NO: 91535 - DNA, 122 bp, Homo sapiens
ctcaaatttccttttaaattttgctgtttgagtaaattagtgctggcctttcctgagctccgcagctccgaggtggcccgactgccgggcctccaccccttttccccggtcccgggtcggtt

SEQ ID NO: 91536 - DNA, 122 bp, Homo sapiens
tctcgctccctcccctcccgggcctccgggtcagctccggcagcgcctcgggaaccgggacggactccccttggcctcgccgaggtccttgagcctgggaccccctccaggaactccgctcc

SEQ ID NO: 91537 - DNA, 122 bp, Homo sapiens
gtttttttggcctccaggtgcgatttgtactgaatgatcacagttgggctttctctccggcgctggaagcctgaactggcttccttgccacccgcctgctgcggaggacagggctccctctt

SEQ ID NO: 91538 - DNA, 122 bp, Homo sapiens
tggcaaaaatggagaagaccctccctctttatcctggttctcctccttgttaaatagattcgtatttaagataggcacagacattctaatttgaattccaggggttgaactccagttagaat

SEQ ID NO: 91539 - DNA, 122 bp, Homo sapiens
ctgctgccacgctctgtgggttgacgctgctgccatgctctgtgggtcgatgcagccacccggagtcgggacctgtgggcagagccgtcgagccctcccggcctggtgccagtgtgagtgtg

SEQ ID NO: 91540 - DNA, 122 bp, Homo sapiens
gcaacagtttcctgcaatcacaatcaggcattgcctggcctctctgcacatggccgtctccggctctccagcccgggcttctctgtcgacactgagggctgcaacaatctgcaaaggcaggg

SEQ ID NO: 91541 - DNA, 122 bp, Homo sapiens
actacatgatgtggggatgcttgaaagagttgttttcacaaggtctgtaccaaattctgtcggccttgacttcctgtcgtccttgatgataaaatcattttatttgatatggggagggcgtc

SEQ ID NO: 91542 - DNA, 122 bp, Homo sapiens
cttcctccgccccttcccaggcttccctgacccagcgcgcagccaatccccgcccgccgtcgcgggcttctggtccaatcaccatggtctccccgcccacccccattgctccgccccggggg

SEQ ID NO: 91543 - DNA, 122 bp, Homo sapiens
aaagtaggaaaaaccctcccatcagaccagcaattggctcgacgcttgagcccggatgtacggcacgcgtcgcgacctaacccggaaacactgcctcccgaaaaaaaggtaaactctagact

SEQ ID NO: 91544 - DNA, 122 bp, Homo sapiens
agcatttaagccagtatttattttctattcaaggctctgaatgtttagaagacatgtattcgctgcttcctaggtaaacaagaggcggctctcgtacacttgggcatggactttttaaaccc

SEQ ID NO: 91545 - DNA, 122 bp, Homo sapiens
tgggggaaaaaaaaaaaaaagtgggagagaccaatcaaattcccaagaggcggagcagcccgctgacctcttaaagagacagcacagaggaggtgcagagacaagacgctgcttcacggaag

SEQ ID NO: 91546 - DNA, 122 bp, Homo sapiens
gggcttgagccggaggccgcctggagcagccgggcggagggcggggcttggagctgcggacgcctggagcggccggtaggtggcggggtctagcctagaggatgcctggagcagccgggtag

SEQ ID NO: 91547 - DNA, 122 bp, Homo sapiens
tttaaaatattttacaaaataacttttttctttgatttgcgagatttcctttgttgcatgcgaaagtcttacataaaattacatgactgtaatgtcttattaaaataataaaactaatttta

SEQ ID NO: 91548 - DNA, 122 bp, Homo sapiens
gccccggcccactggccccgcccaccgtccgcggctcctccccgacccgtggcccggccgcggccctcagccccgccccctcgacccagctcggagcacgtgcgtcgtccggcctagcctgg

SEQ ID NO: 91549 - DNA, 122 bp, Homo sapiens
agagtttggtactatgagaaggtttttaattttaaaaagaaggaaaaaaagaaacacggacgtcagaaaactggttcagtagggatgggtgctagaaggctacggaaccgccgaaggcccag

SEQ ID NO: 91550 - DNA, 122 bp, Homo sapiens
cgtttattatttattatcctttaaaggggccgcgacctgaaaatttccgtccactctgcccggctccccagcgcccccgggctggttgcgcgtcgtcagaccgcgggaggggggcgaggggg

SEQ ID NO: 91551 - DNA, 122 bp, Homo sapiens
cggttcccacctcggcattgcaggcccagagtatctaacgcgtctgcgtgtgaacagtgtcggaaggcactgaggcagcgcagtccccaccttggcattgcaggcccggagtgtcttactca

SEQ ID NO: 91552 - DNA, 122 bp, Homo sapiens
aaaatgtgtcacgtgatcgggtctgcctcacttatacgtgcccttgctgatggcagatgtcggatctgcctcgcttatacgtgcccttgctgatggcagatgtcggatctgcctcgcttata

SEQ ID NO: 91553 - DNA, 122 bp, Homo sapiens
ggaataacggcactgcactgctgtatgcgagacctgcgcatgcgcgagtctcagtgagcgcgtaaacgctgtgcgtgccagagtgtgcgcatgcgtaagcacggtggccaatcctctagcgt

SEQ ID NO: 91554 - DNA, 122 bp, Homo sapiens
gtatactgaaatcttatccttaaatttcaacattgtgtattgagttttcattgctacttccggggttcccttcgcattttttttttttttttttgcttctatcttaacgcttgcttctatgg

SEQ ID NO: 91555 - DNA, 122 bp, Homo sapiens
ttttatcaaccttatcctgccccatatttctcatggccatcgggaatttagcatttgcttcgtattatttgcttggttcaaaatgaatcaagatgctgtccttttttatgttgcaacattgg

SEQ ID NO: 91556 - DNA, 122 bp, Homo sapiens
gagtccacagatttaaatgctcatctcatctaaaaaacacccgagcaatgggcaccgtggcgcagccaagctgatgataaaatgaacgatcacagccctcccaggagggcaactgcacgggt

SEQ ID NO: 91557 - DNA, 122 bp, Homo sapiens
cccagctagccgggtcctgccctaggctcccccactcctccacttcatcttcagcctgaacgttccgcctgttatcttccacctccgggtctttgcacaggccgtgctttctgcccggccca

SEQ ID NO: 91558 - DNA, 122 bp, Homo sapiens
tttaagtgagttttctctttttattacataattccttaccataaacagctgttgtaaatgcgcaaaatgcggcatttgttgacagtacctagagccactcattcattcgttcaacagtgttt

SEQ ID NO: 91559 - DNA, 122 bp, Homo sapiens
gaaagacactgcaggttgtcctgggaacctccaactcagttaacataacacaaacgtgaccgtatgtccactttgcagggacagttccagtggaattctgttgcctcagctatctgttagta

SEQ ID NO: 91560 - DNA, 122 bp, Homo sapiens
ccagggctccacgggcgagcggcgaccctgcctcccggagacggcgcggcctgccctgcgcgcctcagccccgggtgccggcgtctcgggcagcaccaccaagtctctctggaggggaaagg

SEQ ID NO: 91561 - DNA, 122 bp, Homo sapiens
ttttaaggagaaagaactcaaatggaatgaacacgtaaaagccagcagagagctctgttccgaagggacgtagcgctcaatgcctactttaaactcagagtgttcagccacggttagattct

SEQ ID NO: 91562 - DNA, 122 bp, Homo sapiens
ggtgtcctgcataggtccccaggaagataaaccctgggtgatgtgtcattttcccctttccgttccttcccacgcccttccccccacctccccgcgtaggcagcgcatctagttggcactcc

SEQ ID NO: 91563 - DNA, 122 bp, Homo sapiens
gagccaaaagagccaaaataaaagatcacctttactgagccacaggggcacaactgtatccgcccgtccccaaagcgcaagccgtcctcccgttcgcttctccagaatttcctgcttttccc

SEQ ID NO: 91564 - DNA, 122 bp, Homo sapiens
gctgtgcacaccacattccctgcaatgatcctgctaagaacaggagcccaaggtgccagccggccacggcaagacagggcccgccagctgtttggaagaggcggcaacaatgagtcaccgcg

SEQ ID NO: 91565 - DNA, 122 bp, Homo sapiens
cccgatttcgcgcgccctgagttccccgggagcatctgggccaatggggagcgagcggggcggggcggccgggtgctgcggagccaataagaggcggctcaagtgaaggggggcgggacttg

SEQ ID NO: 91566 - DNA, 122 bp, Homo sapiens
gggaaagaggacgagttcagttttgcagatggtgtattctggacatccgggagatacattcgggggaaagaggacgagttcagttttgcagatggcgtattctggacatccgggagatacat

SEQ ID NO: 91567 - DNA, 122 bp, Homo sapiens
aaaaaaaataccaaagtaggatctaaattccttaagttcactaaaaactgtgaaaatttccggcatatgatgtttgaatatcaaacgcagagatttctgaagctttaatgccaatagttagt

SEQ ID NO: 91568 - DNA, 122 bp, Homo sapiens
gcggggacttcctcccatctctgtccagcatgcgtgtactcctcgcagttccatctacctcgcgggtgcctctggtgtctccagaggtctccgaccccagcccgcccccagccctcccgccc

SEQ ID NO: 91569 - DNA, 122 bp, Homo sapiens
cggcgggaggtggcggggcttaagtccccagacccacggttgcttttaacgctggaactccgagggagtcacccgggaagctctgtaaagttctgtgccgggccctaccccagactttctga

SEQ ID NO: 91570 - DNA, 122 bp, Homo sapiens
gaagaatttactgacaacagtataggtttgaaaaaggaaagttttattagaaagaaagaacgtgcctttccagccccccacccggaccctacagccaccgagatgttgatgcctaagaagaa

SEQ ID NO: 91571 - DNA, 122 bp, Homo sapiens
tgctgcttgctaggtcccggcgaggcctggggggccgagtcctcaggggacccctgggagcgtgcccgcaggtcctcgctgcgttgcacatactgcagctgggcgcgccgcagtgcctgcac

SEQ ID NO: 91572 - DNA, 122 bp, Homo sapiens
taaaatatttgtttttccccaagcttccattcttagccctaatcttactttatacaatgacgctaaatctcttttcattcgtgatcttgaccacacaataaacgctggtatctctcaaactg

SEQ ID NO: 91573 - DNA, 122 bp, Homo sapiens
tggggattttcccttctgctctcgtacctctttgctgcaaaattttctaaccaggagcctcggatgtggtttgtacactatgggctggtttgttctatttatttagcaagtttgttcccctt

SEQ ID NO: 91574 - DNA, 122 bp, Homo sapiens
tggttaatgtgttccccggaaattgtgtaaagccagggattctgggcttgggagttcctccgggaaggagagactgcatcgggctacataaataaataggtatttctcccgccttgagcaaa

SEQ ID NO: 91575 - DNA, 122 bp, Homo sapiens
taaagttcccctttaacaggaccgtagacggcagggattccaccgtgcgtagtgtggatgcgccaaaatcgggatgccgctggcgggcgtcagcaatgggttaggctatttctggtgcagac

SEQ ID NO: 91576 - DNA, 122 bp, Homo sapiens
tcactatgtctgcagcatgcacccttgaacttcagcagagcctagtgtgccacccacagacggttttattatatttccatgaaaatgccttgggagtaatgccttttgctccttgttattta

SEQ ID NO: 91577 - DNA, 122 bp, Homo sapiens
cggccgggggaggagaggggcggctgctggctgcgggctacggggacggtctggtcccggcggcggacggggtccggactaggggaggtgaggaaggaggggaaggagatgagcccgcaccg

SEQ ID NO: 91578 - DNA, 122 bp, Homo sapiens
ctctgggcttggattcctcattccttcattcaatgaacatttgctccgcagttacttgtgcgaggcactctcaccggagactgaaggtatagagcaagcttgtccaacccgtggctcactaa

SEQ ID NO: 91579 - DNA, 122 bp, Homo sapiens
gttcacacacacacagcctcaggtcccgcactcactctccactcacacacacacacagcgcgaccacggctccacagcggcccacatattatgcgtcactcgcgcgctacgtgcaccgcgcg

SEQ ID NO: 91580 - DNA, 122 bp, Homo sapiens
gcattaagaaatatggaaacgtgagatatattggcttcatatcaaacatatgctatagggcgtaaagttgaaaggcaacaatttaagatggattaaatgacataaaggcaaaatactgtggg

SEQ ID NO: 91581 - DNA, 122 bp, Homo sapiens
acacagctggactggacaaagcggcttccgggatatggcggggcctttgtctctcgctgtcgccggagtcccaggtctgtcttcactgctctgtgtcctctgctcctagaggcccagcctct

SEQ ID NO: 91582 - DNA, 122 bp, Homo sapiens
agcaaatgggaaagggaagcaacatttaaaaattccaagatcatcacttatagataggcacgcttatttacatatgtctatttattcttttttttttttaacatttgctcctgttactttaa

SEQ ID NO: 91583 - DNA, 122 bp, Homo sapiens
ctttcctttttttggtagaaaaccgctccccgggccgagcgctcggcgcgccaactcctccgccctcccgcggcccggctcccgcagcccccggaaaagccagctttcctcccgccgagctc

SEQ ID NO: 91584 - DNA, 122 bp, Homo sapiens
ggggctgagagggagattctgtggctgcactccaaggactggccagttccaggcaggaggcggcactcccagctggctggaaaagaagaggctgcttctctgtcaagctcatgtcattcccc

SEQ ID NO: 91585 - DNA, 122 bp, Homo sapiens
cgcgctcccgccgctgcttggcgtgcacgcgctgcagctcccactggccgtgggcagccgcgcgttgctccagcagcaggagctcctcctggtgccgcgccagcatgagcgccgcgatcttc

SEQ ID NO: 91586 - DNA, 122 bp, Homo sapiens
gtattctggttccaactcagccactgacttggtgtcaggacaagtcccctttcttattcacgcttcagtttctcatctgcaacatgaggacataggactctttaattccaaaggctcttcca

SEQ ID NO: 91587 - DNA, 122 bp, Homo sapiens
tctgacacctcggtgttttaattagagtaagcaaaggacagacgcgcgtacgtcccaccgcgtcagccctgtgaacatccagaggttccagccagagtacgtccggccggaggcggggcgcg

SEQ ID NO: 91588 - DNA, 122 bp, Homo sapiens
cagtttgataaagataaagtcacgatttcagcctcaaaagccaactgcacagggatcatgcgccacgtggcttaacagcaacaaaggtgacagatccttggccataagcccttcccactctg

SEQ ID NO: 91589 - DNA, 122 bp, Homo sapiens
ccccgccccctaggtggtcctagcctttgcgcgtgcgcggcgtgtctgcgtgggcgcatgcgcataacggccgccatcttaacagcgcgttcccgttggcgtctgaggtaagtttttgtttc

SEQ ID NO: 91590 - DNA, 122 bp, Homo sapiens
cagaagcgctcccgctgttccctagttgagctggaaacagtggccaagcgtgttttaaatcgagtttccgtgtggctagatattatctgctggttactcttattttttttctccattcgttg

SEQ ID NO: 91591 - DNA, 122 bp, Homo sapiens
acatggagaaaagaatctggctgatgagtcaccaatattaatgggtttttgaatcctattcgctgtggcagctgcctcttctttagttattcacacacaaaaaaaagaaaaagactttcagg

SEQ ID NO: 91592 - DNA, 122 bp, Homo sapiens
ttctgggcaccgagctcctcccgctgaagtgatcggcttgcactgactgcgcttgggcttcgcgctttcccgcagcggccgggccttggcgcctggacgccccgccgacccccgcggccgcg

SEQ ID NO: 91593 - DNA, 122 bp, Homo sapiens
tccaggatggcccggctggaagtgatgtgagtactgagacgtttggtgttagccagtccgcggttttctccgttactgtgcccctgttagtgactgccacttcacaagtgtcacgcccggct

SEQ ID NO: 91594 - DNA, 122 bp, Homo sapiens
agtcctgaggagccccagcccccatgacgtcaagattggctccatataaggtgaggggtccgcagcccatggtccccaagcagccacccagctccgacatggcccagccggtccacagcctc

SEQ ID NO: 91595 - DNA, 122 bp, Homo sapiens
atatttcaaaataggttatcatgtgcctttataatgaggagagtttctcagcaaaggcagcgccagattgtgcctttgcctttcaaggaagtttccttatttgcacagcactgaaagggttt

SEQ ID NO: 91596 - DNA, 122 bp, Homo sapiens
gggctatattcactgcctcagttgcatggagtgaacaagacctagtgaaggtggtgggtgcgctgagaccatctggttgatctctcctgggtgggaccaggtgctcccctcaccacccccac

SEQ ID NO: 91597 - DNA, 122 bp, Homo sapiens
gcctgggagaacgccagccggcggggaggtcgtgccaggatagcagactttagttgttgtcgttgttccgtggactttttagcagcacaggggaccttatcgagccaggttttttcaggttt

SEQ ID NO: 91598 - DNA, 122 bp, Homo sapiens
ttgtgatacggtacatggtggaactgtgacgatacggggcacggtggaactgtggcgatacggggcacggtggaactgtgatgatatcgggcatggcgaaattgtgatacggtgcatggtgt

SEQ ID NO: 91599 - DNA, 122 bp, Homo sapiens
tggacatggggccccaagcccaggcctcaccctggcacccctgactataggtgccaaggccgcaggtgcaccagagcccagatccagggcagtgtccagcagcctggacccccatcgattct

SEQ ID NO: 91600 - DNA, 122 bp, Homo sapiens
gtacaaccacttcagaaaactgctgggcacttccttataaagttaaatgcacatctgccccgagacccagcaatcccattcctagctatttatccgaaacacggaagcacacccacaaaaag

SEQ ID NO: 91601 - DNA, 122 bp, Homo sapiens
ggaaactgaggctccacagagtcatatccgagcctgaggccgcacagggagtgctggcgccggttctcagggcaggggttgtgtctgctctgtcacatgtcacacgggggctcccccaggcc

SEQ ID NO: 91602 - DNA, 122 bp, Homo sapiens
aagaattctcaagagcataagccaccacattggttcatcactcaacccaatgtgagttgtcggataccccatttctgaggagccaatattagactgcaaaaagtagtgttatagtctacttt

SEQ ID NO: 91603 - DNA, 122 bp, Homo sapiens
cctttttccccattacaattccacctcttaatgtcttcatgttcttgatgagaagcagaacgtccctactgtgttccatggcaccaagttccccagaacccgccagtctctgatgacagaac

SEQ ID NO: 91604 - DNA, 122 bp, Homo sapiens
tcctagcctggcggagctcggaaagaggtggaaatctgtctgaagtttgcaggagacccgcgctgcctaggcaaagggacccggcgaccaagacacccccgcgagggcccagggcgcgtccc

SEQ ID NO: 91605 - DNA, 122 bp, Homo sapiens
aaagggaagcgctttctgtttgttttctcttaaacaaagtgcctccctttagagtgttaccgtttgggaaaagccacgttgaagatgatgctgatcttggtaatacatttgcagaccatgct

SEQ ID NO: 91606 - DNA, 122 bp, Homo sapiens
aggtaaactcagggaacttgccacacactgcgtgcaggccagaacaccaagcgttaactgcgggtctcaacacaagagcaaaatctcctgctcaccagcctggggaagacatcctagtgctg

SEQ ID NO: 91607 - DNA, 122 bp, Homo sapiens
ctcatctctatggttcatccattatgggtgaagatagagccagagatacacctcaagcctcgcctgcctccttagtccccagtgcagattctgcaggtttgaaattcaatctcctttatatg

SEQ ID NO: 91608 - DNA, 122 bp, Homo sapiens
cagttcctgcggctcttgctgtgggagctgcccgagagccagagcagtggggagggacggcgagaaccaatgtttaagtttatttaagaaagaagaaaaagagtcaagaagttcaagatttt

SEQ ID NO: 91609 - DNA, 122 bp, Homo sapiens
gccccggccgaagggccggaagtggaagtgcgcggccttgcccgccgcgtttcccctcctcggagtgctttttgtggaccctgggcaaggggctcttgctacatagagaggagcaaagaaca

SEQ ID NO: 91610 - DNA, 122 bp, Homo sapiens
tgtggctgtcagattgagtttgccttggctcctctgaactattggcttgttttccaagctcgaaagtgtatacaaatagtgatatctaaattagacttgcaaacacacacccaggtaggggc

SEQ ID NO: 91611 - DNA, 122 bp, Homo sapiens
ggaaaaaaaataagcgcctctggctctttaagtttggcctccccctcaaaacccccgcaacggtcccaaaccccttccagggactgggactacggaccctggtccgaccttctcgcgggctt

SEQ ID NO: 91612 - DNA, 122 bp, Homo sapiens
gctgtccaggttctgtctggtgcccctactggagtcccgggaatgaccgctctccctttgcgcagccctaccttaaggaaagttggacttgagaaagatctaagcagctggtcttttctcct

SEQ ID NO: 91613 - DNA, 122 bp, Homo sapiens
aatatcgcccaggcatgagcgtcctgtccctgttgtgtgacaagcaccacacacaggcgccgtaaacaagagagatgcactgcctcacagtcctggagctcagagatgcaaagtcagggtgc

SEQ ID NO: 91614 - DNA, 122 bp, Homo sapiens
ggaagagaccccaggaccaggccagtgtcattaccacgtaaggaagtaacattagcacaacgggcccagtctttgaccctaacctgtgccgcatccacatgctctaccatctccccttatac

SEQ ID NO: 91615 - DNA, 122 bp, Homo sapiens
ctacatcagaattgccggtggtgatgttttagaagattccaaattcctggactccatccccggaggttcatcccctagttttctagtgaggggcctagaacctgcgttttttaagtgtcatg

SEQ ID NO: 91616 - DNA, 122 bp, Homo sapiens
ccccacacaggctgatcgacggtagctcctctgaccaacaagctttttgctcgtcttatacgtgagcatcaggtataacccgggccaaaagctcgcccgtcacaggaagtgggtcagggcca

SEQ ID NO: 91617 - DNA, 122 bp, Homo sapiens
tctagtggtgtgcaagcccaagttgggagcctatggcagagacactgaaaggggaccccacgagtctggaggaggcgatcccagacaccaggataggctcacctgtgcccaggcgtcggaac

SEQ ID NO: 91618 - DNA, 122 bp, Homo sapiens
ctccggggttcaagagatcctcctgcttcagcccccaaaatagttgggactacaggtgcccgccaccactccggctaatttttgtattttttgtacagctggggtttcaccacgttgcctaa

SEQ ID NO: 91619 - DNA, 122 bp, Homo sapiens
ggcaatagctgctgcagcctgacaaattcgttgaaactctctgaaacacaaaggaatcaccgccagcctccctctcccattgtaaccctgccattgtgcaggttgtagtctgggagaatgat

SEQ ID NO: 91620 - DNA, 122 bp, Homo sapiens
ttctgctggctgtcccccaccccccaagggctactgctggtcttcctggagcccatcttacgccactagctcccttgctgccacagattggcctggttgctccgctgaagagactattgcat

SEQ ID NO: 91621 - DNA, 122 bp, Homo sapiens
gactcatgtccacctctccccagctctttgaaggctaatggtgatctcctaccccattcccggggggcacacaatgagaaacttccactttgtagatggggaaatgcactttgcacggaaag

SEQ ID NO: 91622 - DNA, 122 bp, Homo sapiens
tcctcttgtctcccactggtgctctggctgtgaatccatccaggggccaggatgacaatccgacaccaaggccagcagtacaggccgaggatggcatttctccaaaaggtaaccctggcccc

SEQ ID NO: 91623 - DNA, 122 bp, Homo sapiens
agcccgccggcgccgccgtcagcgcctgcaaccggggccgcgctccagcccagcccgtggcggagccggtagttgaacaccaggcagtccaccagggcgcccaggcactcgggcctggccgg

SEQ ID NO: 91624 - DNA, 122 bp, Homo sapiens
ttaggccaagaggaacagcacctgtttatatgcccatacgtgtccctctttctccctccacgcccccagaacaaccccttgggggcctagcaggtatctcagcacttcagtttccctgagtg

SEQ ID NO: 91625 - DNA, 122 bp, Homo sapiens
tagagagaaaagcactcttggaggtagtaagatgggccggtccttgatctgagaaatgggcgcacaacatcgctgttctctctgcaaaggtggggaccagaatccagcttgcctgaccttgc

SEQ ID NO: 91626 - DNA, 122 bp, Homo sapiens
gcaaagctcaaggaaatgcacagttctcagaacgtggaaggtgctggaggaagccaagggcgtgcatatcgtgaactatgaagcgtagtctgaccacggcaaggcaagactacaggggatcg

SEQ ID NO: 91627 - DNA, 122 bp, Homo sapiens
tggcctggagtgcctccgcccagctccttggcctcccccggctgtgggctccgacccttccgtcccctgcagcgcctgcttcctggaccagagaccgaaagcctctcgctccgctgggcctc

SEQ ID NO: 91628 - DNA, 122 bp, Homo sapiens
gagcatagccagcggcacgcactgccctcgtgccatcctcctctagagtgacgttcttgccgcaagtactgtggaatcggtgagccacgccagccactgtgaagagatggcaccagtagaag

SEQ ID NO: 91629 - DNA, 122 bp, Homo sapiens
atcaatccacatttaaaactctgtgttaaccaaacaacattatagaccaaatcagaacaccgggccacaatttacaactgatggtctggagattcaagtaggcaagagtggagggaagtaac

SEQ ID NO: 91630 - DNA, 122 bp, Homo sapiens
ttcttcaaatacagcaagtaggtgctttttgccccgtcattttcttccgtccccttaacccgctgcctggaagatggacacagacattttagaccttaaggttaaagtccgggccagaaaca

SEQ ID NO: 91631 - DNA, 122 bp, Homo sapiens
ttcaggagtgaagctgcagacctttgcggtgagtgttacagttcataaagttggcgcgtccggagttgttcgttcctcccgttgggagttgtttgtccctctctgtgggtttgtggtctcac

SEQ ID NO: 91632 - DNA, 122 bp, Homo sapiens
cggcactgggaagcaccagcggggctttggagcggcctctggaataaccttggctttcctcgctcttttaatagaacatccgccaccaaaaagtggtttcagttcagggttaacatgtcccc

SEQ ID NO: 91633 - DNA, 122 bp, Homo sapiens
agaaacacaaattgttcctttgttttccattttatttactaattcatatattgatacatgcgttgattagtttattctttaaataataatgattgggttgtatatattggtactttgatggg

SEQ ID NO: 91634 - DNA, 122 bp, Homo sapiens
ccctctggccctggctgcatcccggcctctgggtgttcctgcctcgggcctcgcacaagccgttccgcggcctccgtgtggtgcttcccggaagccaagccagcccctgcctgacctacgga

SEQ ID NO: 91635 - DNA, 122 bp, Homo sapiens
tgccagcccaccgtgctagtcttaagagcagccagggcagttaggaaggtccttctgccgcgagagaaaaatcacatgtggtttgggggcttggagggaagagaaacggcttttgctctgtg

SEQ ID NO: 91636 - DNA, 122 bp, Homo sapiens
atcactgtgtagtattggggatacttaggtgagaaaaaaacttaacgctagagacgttcacgcactagtggagaagccaggattgttgccctagagttacagtagataaaagtacctcagag

SEQ ID NO: 91637 - DNA, 122 bp, Homo sapiens
ctgctccagggcgaacccgggggtcctctcccatggctctgtgggggaccccggggaggtcgccctggcacgggacactgtcgcggggtaggacccgagagggtctggggcggtcaggcttc

SEQ ID NO: 91638 - DNA, 122 bp, Homo sapiens
gggctacgagtgtaaagctaacctgagtgtgtgttgggggggtgggtatgcatgcaggtgcgtgcacatgcactttggcctggagtaacgtaactgggagaaaactagcgaggtggatagga

SEQ ID NO: 91639 - DNA, 122 bp, Homo sapiens
acatttgactgccttaaggcttcaggttctagtcccaaccaccagaatggttgaagagggcgggagacagaaagacccagacccttagtgtccaattgcacctaggaaagccctgcttgctt

SEQ ID NO: 91640 - DNA, 122 bp, Homo sapiens
tagagattctgatttcattggtccgggatgggggcccggggatcagaattcttaaagagtcgtccagtgattcggaagcactgcagagctgagagcctctgggactggtcccctctcacaat

SEQ ID NO: 91641 - DNA, 122 bp, Homo sapiens
aggaggcgaggcgggaccggctgggggcgtgcggcggcagcggggaggagcgcaggggaccgcggcagcggctgcgacggcccgggcggacgggcgggcctcgcagctccgcctcctcacgg

SEQ ID NO: 91642 - DNA, 122 bp, Homo sapiens
cggggggcggggcggggcctcccgtgcagaccaatggtggagtagatgcagatgtcaaaacgcgcgctcaagtggcttccgccaggaatcccgacgcttagggaggcggagggaggatcgct

SEQ ID NO: 91643 - DNA, 122 bp, Homo sapiens
gatctcagtgccaaagggccagtggttgtgggctgcataatagtagatgagggtgggcagcgacagcacatacaaggtgtctgacaatgccaggtggaacatgtaggtggccgttgcatccc

SEQ ID NO: 91644 - DNA, 122 bp, Homo sapiens
agctcatcaaatccggccaggcagcagcagcagcagcccgagagtgggcatcccatgggacgaacggcccgggatccacacgcagatgcccagaaagcgagaggacagagggcgcggggcgg

SEQ ID NO: 91645 - DNA, 122 bp, Homo sapiens
ttataaaaagtatcagttaatggaggtactacactgaaattttgcttaaattagacaggacgggagccactgcaaagaaggaacaaaacaaccactggaaatgtagggttgggagaagaggt

SEQ ID NO: 91646 - DNA, 122 bp, Homo sapiens
gatctggaacactgggagcacgggacattaggaacagacagtgtcagcaaagtaactctccgcagggcaaaagcaatcccttgggctttaaaaaatgctggattgtcaaaaaagtaccgcca

SEQ ID NO: 91647 - DNA, 122 bp, Homo sapiens
gggagaagggagagggttttccaaacagagggagagcttatacaaaggttaaagagcaagcgctacagcagtttggtaaatctaaggtgtctatgggagggagaagaaggagattagctcct

SEQ ID NO: 91648 - DNA, 122 bp, Homo sapiens
accttttatttccctgcttcgtgattctggagctgggccttttaaacatttttccattgccggctggcataatgttaagcgtgtcagtggagcatgctggagggagctgcagcagagaggtg

SEQ ID NO: 91649 - DNA, 122 bp, Homo sapiens
atttcttcttgaggggcttggagggagccacacccctgagtcggttaacaatttctctgccgaccccaatttttaaacaaagctgctcttccttaaccaactacaaatcaggaaatccttga

SEQ ID NO: 91650 - DNA, 122 bp, Homo sapiens
ccaacgttcttacgcacagcctcttccggtcgtggggccgagcggttccggtgaaaatgtcgattccgattggactctcgatgatttaaaggcatctggcgtttctgaggcaggtagggtgt

SEQ ID NO: 91651 - DNA, 122 bp, Homo sapiens
tcgacccggcgagcgcagcagggaggggctcagagtcgaggaaccatctgcccttcctggcgttctcccgcgaacgttcgcgcgagtccgccagctccctcaccagggccggaaagaccgac

SEQ ID NO: 91652 - DNA, 122 bp, Homo sapiens
tttatctttgacatctaatttaccatcaagttgtaaaattatttggaaaaatacagaactcgttttatttgtatacttatatggaatctgcatgtgaggtgtttgagggcatatgtttgaaa

SEQ ID NO: 91653 - DNA, 122 bp, Homo sapiens
tcagcttactcctgctcttcctgtatccccacaatcagagatgctggctggctttcaacacgtgccattagtgtgcagcgcttcctttgtcttttctgttttgtaactgtcactccgagact

SEQ ID NO: 91654 - DNA, 122 bp, Homo sapiens
ccacactgctggctattgtattggttccccaacacctccagggctggaaggacaccagaacgctcccgacacgttgagagagagaaagccagtcgttaagggcggggtggtggatgatcgga

SEQ ID NO: 91655 - DNA, 122 bp, Homo sapiens
cccggggcgtggcaggatggcagcgggggcggggagcgcggtgcgcacagcgaggagcgacgcgggcgtgtgggtcgcgcggcctgggctgccgggggtgggttgggggtgaggcggtgggg

SEQ ID NO: 91656 - DNA, 122 bp, Homo sapiens
gccaaaatatgcagtgacagatggctcatgtcattgctgtaatgtcagcctttgggtctccgaggggatgactccaggaatagaaagtggagcacatacaggagtggatgtaaaacagaatc

SEQ ID NO: 91657 - DNA, 122 bp, Homo sapiens
tgcttgatattccggagagggcggcagcagcgttcagaatccttagatgaacctgcctggcggcgccggaggccggagggcgcttggcagaaccgccaggaagcgaaataacaaacagtctc

SEQ ID NO: 91658 - DNA, 122 bp, Homo sapiens
aattggccaatgaggactgcggggcgggaccctgtgccgcggcggagtccaagatggcggcgtgcggttccgctgtgtgaaacgagcgcggggcggcgggttactcagctccgcggagacga

SEQ ID NO: 91659 - DNA, 122 bp, Homo sapiens
ccgagggcgcgcggatggacctactctttttctggtaaatggtcctaaaataaaacctggcgtttaacatggacactcagggggtcgccctgaaacaaaagggggtgcgaggcgtggcccgc

SEQ ID NO: 91660 - DNA, 122 bp, Homo sapiens
ccagcgccgagacggcagccgcccccaccgtgctggacaccagcagctcctgccacagcgcgtccagactgagctgccgcttgagcagcagcatggcccctgacaccaccccggtgtcatag

SEQ ID NO: 91661 - DNA, 122 bp, Homo sapiens
cgactgctgaggggagacctggcgagcagcagggcccggcacgaggagggagttagggggcgacggctccttaagacaagggtggggtctgcaggatcccaggaccaggcagaggatgcggc

SEQ ID NO: 91662 - DNA, 122 bp, Homo sapiens
gccactggccaaacagatcgctgctcccaagcagatttcgccggtacaaagcgccgcagccgctcagcctccggcagcggcaatccttgcgcctgcgccgcagaaacccctcctgcagccca

SEQ ID NO: 91663 - DNA, 122 bp, Homo sapiens
acatggacagcaagtttcagagacaagactgagaccccggtctgtctgcttcagtgccctcgtatcactcattcattcaacaaacattcatcaagtacccacactgcaccaggcaaagtatt

SEQ ID NO: 91664 - DNA, 122 bp, Homo sapiens
ctgccctgttacttttaatcttctttatcctgtgattccgttctgcttttccttccagcacgactgcaaagtgactgcggggttttcccgagtgccctcgccccagacctcagcgagttatt

SEQ ID NO: 91665 - DNA, 122 bp, Homo sapiens
ctggctgtcaggcagcacgcctctgcctgcaggtccctttccattcctggaggcctgggccgatcaggcccctgggtgcttcttctgatgatcatgaaggtgctctcagacagatagctttt

SEQ ID NO: 91666 - DNA, 122 bp, Homo sapiens
cgtgtcagatttaggccaggaagcggaagtcgccagcagcgagagtttaacctctgtgggcgcagagggttgcggggattcagcgcccgggaccgtggatctgtgcagggagtcataggtgt

SEQ ID NO: 91667 - DNA, 122 bp, Homo sapiens
tccactctggcagatgcgacaccacgcctagtgaggtctgaacagggaccctcagcagtgcgcccacaggtgcacatgagtgatgaccatagctgcccgctggttgtgccctcctgggcagg

SEQ ID NO: 91668 - DNA, 122 bp, Homo sapiens
gagggcctgttgggcctcccggaagtcttctggatgggggcaaggaggccgaggcctttgcgtggggctgccggccgttgtattctcacgatttgccgggtgactccgggtgaagaagtggg

SEQ ID NO: 91669 - DNA, 122 bp, Homo sapiens
cctcacccccaccgcaaccttacccccaccccaccagtgctgcctggtcctccccacacccggccttggaactccggaccctctagccctagcatctttcaacttagatggggcagggcagg

SEQ ID NO: 91670 - DNA, 122 bp, Homo sapiens
gcgaggaatagcttgagtcactttgcattagcatctggctgagtgttaaactcatttctacgtggggagcagagaaaaggaatttctgttcaagcatcctttcaagaatgtttaaatatttg

SEQ ID NO: 91671 - DNA, 122 bp, Homo sapiens
aggagcaacctttgtttccagtttcatttgtccacatataccccaactgagatttgtttccgtgtcctgaccaaaaaatcacagattgcctctgtgacccagcctactgcaggttgtttctc

SEQ ID NO: 91672 - DNA, 122 bp, Homo sapiens
acgcagccaccgacacccaaacactggagcgttttacccaaatgtaaaagtctaaacttccggcttctcgaacaaaagaaaacaaaggaaaacgtcagacgccccgttgacgccgggcgcgc

SEQ ID NO: 91673 - DNA, 122 bp, Homo sapiens
tcggagggaggatgacgcgccgggtcggggttttagagacggagctttgagtgcggattccgccagatgggggtcgggaactccgggccaggccctgacgtggattgtgtttgccgcctcct

SEQ ID NO: 91674 - DNA, 122 bp, Homo sapiens
aagggatgcagatgtcgggaggaagggagaagccagatttctgctgactttaccttaccccggccttgttcttgggagagtttaagagtgagcaagacagatgggcaatgttttacaatgtg

SEQ ID NO: 91675 - DNA, 122 bp, Homo sapiens
tgcctgtaatcccagcactttgactggccgaggtggatggatcacctgagggcaggagttcgagaccagcctggcaaaatcccagtctctactaaaaatacaaaaattagccaggcatggtg

SEQ ID NO: 91676 - DNA, 122 bp, Homo sapiens
ggtccctatctcgaacggctcaggattcgtggtggctgccgatgggctcattgtcaccaacgcccatgtggtggctgatcggcgcagagtccgtgtgagactgctaagcggcgacacgtatg

SEQ ID NO: 91677 - DNA, 122 bp, Homo sapiens
acgcctcctaaaaatttgtaggaccacctttggttttcttccagatattttttttgtcatcgcttttcctgcgcccaattcccatctgtctagcccttctgcctccgctggtctttttcgcg

SEQ ID NO: 91678 - DNA, 122 bp, Homo sapiens
gacagtctggagtagttggggaggctacaggctttgggtgagtttcttggctgccttacgcgggcaactccagccatgcaaatgatgttttcaggccccttttgttgaaccagagccaggtc

SEQ ID NO: 91679 - DNA, 122 bp, Homo sapiens
gccggatatggtggcgggtgcctgtaatctcagctacttgagaggctgaggcaggagaatcgcttgaacttgggagcagaggtgagctgagtgcagtgagccaagaccatgccattacactc

SEQ ID NO: 91680 - DNA, 122 bp, Homo sapiens
ctagatcacactcaaaagcaaagcattctcttcccagtgcctatcggacagtgcggcggtcgaggtgggtgtgaagggggcagcacctctggtaccctcatgacccccatgtccttcacagg

SEQ ID NO: 91681 - DNA, 122 bp, Homo sapiens
tcttgggaagaatgaaccctgggagggtaaacaggactctgggcaacattgtctaagcggcgtccccagcacgggcctgaacaggaccagcagcccctccgttacttacgcaggcagttcca

SEQ ID NO: 91682 - DNA, 122 bp, Homo sapiens
aatacttacaaaaggcagcacatcagatagagaatttgataggcagaaattaggtagctccggcaagttatttttcaatggaagactaaggggtagatccgagtacattagcagaaaaagtt

SEQ ID NO: 91683 - DNA, 122 bp, Homo sapiens
ctgttgtcagcctgctgtgactttcctcttcagcagaggaatctagactctaatagtctccgccctagttgtccccacttttctccactgcccagcacttcagcaacaagacagaaaagcag

SEQ ID NO: 91684 - DNA, 122 bp, Homo sapiens
tgctacgccatcctcttcagacgcaccgtgtccagcaagacgcccaagtgccccacgggccgcctgctcatgaacctctgggccatcttctgcctgctggtgctgtccagctacacggccaa

SEQ ID NO: 91685 - DNA, 122 bp, Homo sapiens
agggggcggggtggccgttgggcagcgggtggacctcgggctctaatccccagcagctgccgtttccctcagatcgattcctttctcactttttttctcagctgctggttctgcggcttgga

SEQ ID NO: 91686 - DNA, 122 bp, Homo sapiens
aaatggacatctaaaaatcacaataacacaaaaactccacaatgtttaaatgctgtgagccgaagacggagggtcctccgagcctttgcctggccagagtacaggtgaaaagcacatgcctg

SEQ ID NO: 91687 - DNA, 122 bp, Homo sapiens
ggtccagggaggcgcctttccaaccgtgccagagagggcaggtcgcagacgccggggctgcggggaatagaggccctcaccgcagatgccacctgccgtgccctgctctgcggccaacgcca

SEQ ID NO: 91688 - DNA, 122 bp, Homo sapiens
cagctgactttgtcattttgtctgtcctggattggagccgtccctataaccatctagttccgagtacaaactggagacagaaataaatattaaagaaatcatagaccgaccaggtaaaggca

SEQ ID NO: 91689 - DNA, 122 bp, Homo sapiens
gccggccctttaagttcctcccccgagtaggcggagccacgtgccgacgggcgggcacttcggcctatcgcagctgcggactgacctggcctagttaggagcccaatgagaggcggcaattc

SEQ ID NO: 91690 - DNA, 122 bp, Homo sapiens
tgctgtgtaaaataaacaatgatagtatcctgtctgaacacagagaaggcatccttaacccgtcttaggatatcagggaagcttcctgaggaaaattacccctgcactgattatctagggat

SEQ ID NO: 91691 - DNA, 122 bp, Homo sapiens
tgggatctgcgccccgacagccccaccttggccatcggccgcctgaggacggccagccatcggggcgattccccccacacattgtgcctgaattcaccctgcctggcgagccgggctcacgc

SEQ ID NO: 91692 - DNA, 122 bp, Homo sapiens
aaccaatcccctgggacctatgtaaatcaatcaccgcctcctcaagcctctgtacaaaatcgattgctctctgccacaaaccggagacccttcttgggcgatccgctttctcagcatgtgga

SEQ ID NO: 91693 - DNA, 122 bp, Homo sapiens
ccaacaccggccccccatccacccggagccccccgcgcccgcggatcccctccagcccgacgccgggagaacttaccacatgcagctccacctgggaactaacgcatcaggaggggtttccg

SEQ ID NO: 91694 - DNA, 122 bp, Homo sapiens
gacgctggtcctccccgtcctcccatagcgcttattgcctcaccctcaccccctaggggccggatccaaaggcgctgcactccccaagccttggggcatcagccaggaaggtttcctacctc

SEQ ID NO: 91695 - DNA, 122 bp, Homo sapiens
atgaatgcctgatgtgcccagaaacactcaaccgtctgggaatatttttctcaaaggcttcggctctcttctcggccgctggtggaggaaaattacaaaaataagtgccatgatggcgcatc

SEQ ID NO: 91696 - DNA, 122 bp, Homo sapiens
attgtacagcataggcttcaaacctgccacagcagagaaacacctgttgctgctggagcacggccagcacaggtcatctggagcaatgtgacactgtgctgcaaccctgtccgcccgtcaca

SEQ ID NO: 91697 - DNA, 122 bp, Homo sapiens
cggggagagggggccgccacgccgggcgcgggcgggggcctgggagtggagggacgcccccgaaagaaatccgagccagggtgagggtctgagacgcaaggagaatcccaggcaaggcgctc

SEQ ID NO: 91698 - DNA, 122 bp, Homo sapiens
cccaagtatgtctcattcccaattgacaggggaatgggccataaacctgggtgtcatcctcgggtggagcacctacagtaggaaacaggccctaggaagtggagtgaaatccagagctgtca

SEQ ID NO: 91699 - DNA, 122 bp, Homo sapiens
gacgtcgggcaggctcagcggcctcccgcgcctgcgcagcaccgcccttttcgggcgcggcgcccagtccctacaccccacaatcccccgcgccgttccggaggcgcgctaggagtgggtgt

SEQ ID NO: 91700 - DNA, 122 bp, Homo sapiens
catgggacagccatggctgagggtgctattaaccaaggaatgggtgcccagacagagcaacgtaggccacaggaggtaatgcaatcgataagaccctctgagcagggggagaagccagcctc

SEQ ID NO: 91701 - DNA, 122 bp, Homo sapiens
ctccgagagcgcccttccgggggaccgccggggtcggacgctccccactgcgcccaggaccgaggcctgtaaccccaaattctgatcgcaaacatttgattaagcttaagacgtctgatttc

SEQ ID NO: 91702 - DNA, 122 bp, Homo sapiens
aaactgtgaacgtttactccttgggcattctgggaagtgtcccaacggtcggtggggttgcgggcacttccggtcaggcaggcggatccggggaattctgggaaatgtagtccagacgctct

SEQ ID NO: 91703 - DNA, 122 bp, Homo sapiens
attagcatcaactcagagccagtgtttagtaaacctcaaatgatctgtgtatttccttttcgccaatgcagtttcactagtaaatggccacatgtcgttttggggaaagcttgaaagaattt

SEQ ID NO: 91704 - DNA, 122 bp, Homo sapiens
agggaactccctgaccccttgcgcttcccaagtgaggcaatgcctcgccctgcttcggctcgtgcacggtgcgcacacacactggcctgcgcccactgtctggcagtccctagtgagatgaa

SEQ ID NO: 91705 - DNA, 122 bp, Homo sapiens
gcacgggcgcagcaacgcgtcccgacatcgaaacacgtgattcctcccccccatatttatcgtatgggcagcccaagtcgcgacaccgcatcacccacgcatacacaaaacgcccatcgaga

SEQ ID NO: 91706 - DNA, 122 bp, Homo sapiens
gaggtggatggagttttaggaagcagctcagccttcgggaggcccaagtccaggctgccgcgcaagttcaagagcctttttctggtagctgggagcgagcttcgtctggcactggctctcag

SEQ ID NO: 91707 - DNA, 122 bp, Homo sapiens
ggaataagtgcgtcaccacaggcgcttctcttcctcctgcagtgcagccctagactaaagcgtgaaagccgagtatcgcgtgagagtccggaggcgctgaagggagggtcgcagcgccgtga

SEQ ID NO: 91708 - DNA, 122 bp, Homo sapiens
ttcacctagcctatgtgtttacattgtactttactaaacttctatttacatacacacacacgagtgctatgcattctgttcgatcaatattagttataatttttttctgtgaccttatatag

SEQ ID NO: 91709 - DNA, 122 bp, Homo sapiens
gagaaaggggacacctcatccagaaaagtgggaagcgtggggccgagtttcccaatggggcgagaaccagagcgagggaatgttgggctggagttgcccacagcaactgtgaggggttcgac

SEQ ID NO: 91710 - DNA, 122 bp, Homo sapiens
aagatgcctgttaccttcatggctgaagttctgcgtccagaggtcagttgaaaactgcaccgcacttaccacgtctcttcagaagcctgggactggaagggtcatatggcagatggcagcaa

SEQ ID NO: 91711 - DNA, 122 bp, Homo sapiens
gtactcgggaacgttcgtcctttaggttttctcctggcgcatgggcgccgccaatcatttcggggcttattttggttctaaagcccggggcagccaggcctccctgcctggcctcggcgggg

SEQ ID NO: 91712 - DNA, 122 bp, Homo sapiens
cgaggtgtttctcttggatattgtacccgcactgggcgaaggggctgtcatcgctctcggcgacatcgtcccccctgcaacaccaacagccggtgaaggagcaggagggcccctggcccttc

SEQ ID NO: 91713 - DNA, 122 bp, Homo sapiens
atcacaccgtctcttgcaggctgggccccaggtgagtggcttccctcctgccggactccccgggctgtcctctcagtggctgggcccagtatggccgcctggccaagacctgtgtggccaga

SEQ ID NO: 91714 - DNA, 122 bp, Homo sapiens
ctactccaggcctgcctcgcctcacctgggagcagagtgttgcttcctcatggaaatagccgtgcatgaactcacagtattcccgggtggtgatctcacagctaagggggtggtgaggcaag

SEQ ID NO: 91715 - DNA, 122 bp, Homo sapiens
gaggtctcacgtgcgcctggggatccctgccttcagtcacacctctatctctcatctttccgctcttagctgggagtgctccgcctagtcacttttcttaaggtggctcgtcgaggcctgac

SEQ ID NO: 91716 - DNA, 122 bp, Homo sapiens
acccatcttctatgtcagtgtgaaccaaagtgtgatcccagcaggggacggtttaaatcacgtggctaggatgacccattttgtggatactggtcagcgtctctctccagccacccctgtct

SEQ ID NO: 91717 - DNA, 122 bp, Homo sapiens
tcagccttgtgccatctgggagggacctggttccatcaggtttcacctcagctcccttatcgtgctgctaagctctgaccccaacgtgagtctccctgccgcagaccacatgggcaatgctg

SEQ ID NO: 91718 - DNA, 122 bp, Homo sapiens
tcccgcccctggcccccaggggacaccctattctagagacaatactgcccaatagagagtcgtaagcttatcctgatagacaatctggagaacagggcaggctgcattcataggaacctcat

SEQ ID NO: 91719 - DNA, 122 bp, Homo sapiens
ggaccgcaacagctgcaagctgtccagcagcttcatcatcacccagaacatgttctgtgccggctacgacaccaagcaggaggatgcctgccagggggacagcgggggcccgcacgtcaccc

SEQ ID NO: 91720 - DNA, 122 bp, Homo sapiens
cggtctcttttcggggtgggaggtctcccactgggaccgacacagacgcactggatgccgcggggtcccgggctccgagcggcggtgtccctgtccccttactcctacccacccccacccac

SEQ ID NO: 91721 - DNA, 122 bp, Homo sapiens
cctccccgatgtgaacaatgaaccgacggtgttattttcataggattgtcctggagcccacggagacgcgggcttgggatccaacgtgatgctgagcggatcttctctgcttcagaccaggc

SEQ ID NO: 91722 - DNA, 122 bp, Homo sapiens
agactgccggtcagtgtcagtaggcggcgggttagtgtccgcaggctccgactcggccgccgacaccaataagctacaaggacgagctttaccactgcctgtactactgctacctgcgcgac

SEQ ID NO: 91723 - DNA, 122 bp, Homo sapiens
gtggggcgggatgggtgagacaggacaaccagccgggaacacgggagcctcgcagaccatcgcctccctctggggcctagtccctccacaggctgggccgggaaggtctggtgtgggacctc

SEQ ID NO: 91724 - DNA, 122 bp, Homo sapiens
acaacaaagttacatgggaacagagttaaggttgaatatttattagaagaagccatctggcgtcaggctgtctgtacaggggggctcgtttctttagtaggctctcctctttctctagagct

SEQ ID NO: 91725 - DNA, 122 bp, Homo sapiens
agccataaccttgggcaaattactaaggctctttgtgccttagtttttccattggaaaaacgtgtttagaatagtatttcccttttattgttcttgagggggctcaaaaaactaaagtgatt

SEQ ID NO: 91726 - DNA, 122 bp, Homo sapiens
gcccttttcaaagccacttcagcttataaactccatattagaccatccaggcccagaagacgccaccggcctacaggcagagtcagcggaaccagcctgggctggatctccccctgcgaggc

SEQ ID NO: 91727 - DNA, 122 bp, Homo sapiens
gaccggagacggaatggcccagggtcagcctccacccggaaccggaggatgcagcgaagacgtctccttgaagtgggatacggatgtgaaccggcccaagtgctcgccggtccgtcaagacg

SEQ ID NO: 91728 - DNA, 122 bp, Homo sapiens
atgacgaatataacacagatggcctgttttcagtaccgctaccgcccggtggtgtgcgggcgccacgcctgaggcgggactttccagggtacgtgaatgcatgggctggtgtgacatttgtc

SEQ ID NO: 91729 - DNA, 122 bp, Homo sapiens
tggggcagctggccctggcctgtgcggagggcgcggttgagtggctgtacccggctggggcgctgcgcctgaccctgggcggccccgatcccagagcgcggcccggcatcgcctgtctgcgg

SEQ ID NO: 91730 - DNA, 122 bp, Homo sapiens
gaagccagtgcagccccaaggtgggagcatactggatgtgctggcaggtggcaaggaggccggggtggctggcaaggaagaagggactaggagaggaaaaggggcctccagctctcagaggc

SEQ ID NO: 91731 - DNA, 122 bp, Homo sapiens
tcgtgatcgtggcattggtactttctcttctcaattccctctcaataatggtacggctagcggaggggggaatagagggccctgggaaggcctcagggctcggcggctagtaccagtgcaga

SEQ ID NO: 91732 - DNA, 122 bp, Homo sapiens
gtaggggcagacctgctctgtcttggctggtggcgtgggtattccatgaagcctgcgctgcgccatttttaatagagacactgtgtcctggtagctactaggagaacgttcgttcttacatg

SEQ ID NO: 91733 - DNA, 122 bp, Homo sapiens
caatttaatgactataaatttactgaacacaggaaatcaaaccaatataatgacgaataacgcttcattaaaatgcttccctggtttcagaatttaataatacataaattgtttgaaacaaa

SEQ ID NO: 91734 - DNA, 122 bp, Homo sapiens
cggcttcagaagctttagagcgctgccctctgcgctcccgtctagaggccgcaccgttcacgccccacgtctgcgcccaggcgaggggatttcctgccaggcgaagtacagagagcggactc

SEQ ID NO: 91735 - DNA, 122 bp, Homo sapiens
ctcctgcagatgagctgcccccaaaagcacaagagaagccacttccaatgcctggcacaccgcatgtgtttccagccccaaagcctgctcccccactagagagcctcacagagccagtgccc

SEQ ID NO: 91736 - DNA, 122 bp, Homo sapiens
ccctgcaaaggaacctgctgtccacacacctggagccctggagcaggggctgggatttgccgctgccaagggtgtggggcacatgtggggggcagccccatccctcccaactggtcctaggc

SEQ ID NO: 91737 - DNA, 122 bp, Homo sapiens
ggattatgactttactttgttaagacatctaagtagacaggcccagcgagtcattggaaacgttcatctgtaactcataagagaagcaaaataattggtaatcctatgcaaaaaagcgaaat

SEQ ID NO: 91738 - DNA, 122 bp, Homo sapiens
cagcaagttcgtgctggtggtggcgggcccggtgtgcttcatgctcatcttgtaccagtacgcgggcccaggactgagcctgggcgcgcccggcggcggcgcgccgcccgacgacctggacc

SEQ ID NO: 91739 - DNA, 122 bp, Homo sapiens
ctgtgtctgtcctgtcatctggaggtgcacaactaccccatgcttcacagtgaagccagtcggctgaaggaaagatgaacgggcactttctctttgtagagatttccggaatctcctgaggc

SEQ ID NO: 91740 - DNA, 122 bp, Homo sapiens
ctcccctcgccgggggccgcgagttgcatttggtaaaacccagccccggaatatatagatcgttggagcgcaatgaagtagcctttggagagaagggagagggcccgtcggacagccacagc

SEQ ID NO: 91741 - DNA, 122 bp, Homo sapiens
tattgttgcgcaaaggatggatggatgaaaggaagagtgagccaataaacgagggaacgccgggaaaggcagcctcaagccggtgggccctgccacccccaccgtccctgagcatccgagcc

SEQ ID NO: 91742 - DNA, 122 bp, Homo sapiens
caggggcctggggacattgggccgggaggggtgaccggaagggaagacaaacccgggcctcggggccactccctgttctgcacagccgcctcaggcctttgtccaggtgctctcgcgtccta

SEQ ID NO: 91743 - DNA, 122 bp, Homo sapiens
gccggggggagggcgcaggggcgggaggagacacatgcgcgctgccgccgccgccgccgccgccgcagtccttagcttcccggggacaggaaaccttcaagaccgagctgccacggccgcct

SEQ ID NO: 91744 - DNA, 122 bp, Homo sapiens
gaccagcctggccaacaaggtgaaatcccatatctaccaaaaatacaaaaattaccagagcgtgatggcacgtgcctgtaatcccagctacttgggaggctgaggcacgagaattgcttgaa

SEQ ID NO: 91745 - DNA, 122 bp, Homo sapiens
ggttctttcttggcagcactggaaaattaataactcttcctcagttctcagcacctggcccggcacctggttgtggcaatctagcttctgttctggcttctcacattggagacacctggatc

SEQ ID NO: 91746 - DNA, 122 bp, Homo sapiens
ccaaggtcccagcctaagtctgaggttccagggctggtcgcaggccgtccttgcagccctcgccagagcgttgtctgcacctccgacactaggtggcgccataggaacatcctcgcggcccg

SEQ ID NO: 91747 - DNA, 122 bp, Homo sapiens
tcccggagcgcctctggctgggcgctactgctgctggtggcactttggcagcaggtaacacgtcccgcgccctctccgtcccctctgccgcgctctgggcctcagccccgggcaccagctga

SEQ ID NO: 91748 - DNA, 122 bp, Homo sapiens
ttaatgtctacccagcttcactctacaggtatacaatagaattcagttacaaataaataacgaggcaatcagattttttaaattgcagggattggctgttggagaaactcaaggatgccgtg

SEQ ID NO: 91749 - DNA, 122 bp, Homo sapiens
acatttaattagttataaagcttaggacaacgctagtgatctcaaacattagaacgtaagcgctgaagcctgctcgttagttccttttacctggagctttaaatttctaaagccatcatctc

SEQ ID NO: 91750 - DNA, 122 bp, Homo sapiens
ggggtctcgtccctctgcacgtgcccagggctgggaccccagacacagacctgccccggacgagggaacgcacggagcttcccaagatggtttgaatcagtaactgacggcaaaagcacgct

SEQ ID NO: 91751 - DNA, 122 bp, Homo sapiens
tgtctgcctaaatatgtgttgactctctccactcctttgagtctccacagacactaccctcgctgaaatgaccctcaccctcacctggatttggcagtgatctcctaggtaatctgcatgtc

SEQ ID NO: 91752 - DNA, 122 bp, Homo sapiens
cccaccgcccacctctgcccgcgtcctgacccggccaggcgttccttggccccagagcgacgcctccagctgccaatggggcgtagggccccaggcccgcatctcagggctgtctgaatgcg

SEQ ID NO: 91753 - DNA, 122 bp, Homo sapiens
tgaattgttccagggcgagcaagaggcgattgatcctagctgcgggtgctggagagatggcgtcagccctaggcagaatggactggaggatgggtggacatcccagggattttgctaggttt

SEQ ID NO: 91754 - DNA, 122 bp, Homo sapiens
attgaagctaggcatggtggtggaaaccactgggaaatataggaggtaattagaagaggtcgtttagtcagttcaggctgacagaatagaatagacttggtgacttaaacaacaaatatttg

SEQ ID NO: 91755 - DNA, 122 bp, Homo sapiens
acagagacagttaggatggtccaggcagggccaggacagaggcgcccatccccgcaactgcgacaaggtccttcctgcagggtcgccctggtgtggaggcccaaccccacagtcccccttcc

SEQ ID NO: 91756 - DNA, 122 bp, Homo sapiens
ccataatgaggctaacaatgcccagggctggcaggacagtcctggaaatcccgtggtcaccgtctgggtggagacagccctggaggggctgcctcttccaaagacatgagctctctcctctc

SEQ ID NO: 91757 - DNA, 122 bp, Homo sapiens
atgtctctttgtacatttctgtccccatctttgccaagcccctcctggaagaggccggagcgctatcattgcattatcttttgacttaactttctctagaacgtgccccgggcgggtggatc

SEQ ID NO: 91758 - DNA, 122 bp, Homo sapiens
ggccctcaatgaacccttgcagaataaaggaccggctcatccccagcacctggctcagtgcgtgcaagcggctacacactacggcataagatgttcccattttgcagacggggaaacggagg

SEQ ID NO: 91759 - DNA, 122 bp, Homo sapiens
gccgcagccgtcacggatgaaccagacccggtcagccacgtcagcctcggaggaggaggacgatgaagagtcatagttgtcattttcagccaggagaggatgatgctcgacgtcccggagcc

SEQ ID NO: 91760 - DNA, 122 bp, Homo sapiens
tgagagggctcggtaatgctagcgagacggcactggcaagacctgggtggaggaagcggacgtgcgggtgctccctcccagggttcctgcacccatggccttgagcaggggcgtgttcattc

SEQ ID NO: 91761 - DNA, 122 bp, Homo sapiens
cactgggaggagggcgcttgtaactcggacattccgggtgtcctggggcgcgtgcgaccacgtgagggggttctgtatctcccattttaagggccttccgtccgcttgccccgcctgtcccc

SEQ ID NO: 91762 - DNA, 122 bp, Homo sapiens
ggagccaatggcaaactgaagtggaccagcacttacttacttctttaagacagaactttgcggtgtattcttggttgttccttctctctaatcccttttcccgttagctggtctcttctctc

SEQ ID NO: 91763 - DNA, 122 bp, Homo sapiens
taacagaaaataattgtgaaggcaatttagctgacaagaattgtcacagggacgaaatcacgccttttaatgagggagaattgttgatgtagatgggtatgagtcgtatccatagcaagctt

SEQ ID NO: 91764 - DNA, 122 bp, Homo sapiens
ccctccccatgcctgaggatttcgccctcaagaggtgcgtctagtgtaagggccagaccccgctggtgccccggacaacggggtaggagtggggaccgaccggtcccgtagttggccgcgcc

SEQ ID NO: 91765 - DNA, 122 bp, Homo sapiens
aataaagacaccagctctgtatcctaatcatgcggacaccctcaccctcggcaaggtgaccgctccagagtgggcccagatcccgagccccaagtacacatggttcacacggtggcgggggc

SEQ ID NO: 91766 - DNA, 122 bp, Homo sapiens
gacgagcggtgtcatggccgccgacagtgacgatggcgcagtttcagctcccgcagcttccgacggtgagcggcttcccagaggtagccttcaaagcctctgcgctctgggagaggggaagg

SEQ ID NO: 91767 - DNA, 122 bp, Homo sapiens
cgtagcgctgcatgttggacataagcacgcggttctcgtactgcagctgcatgaccttgccgctgagctcgttgatctgcaggcgcgccgccttcagctcctcctgcagggcctcggtcttg

SEQ ID NO: 91768 - DNA, 122 bp, Homo sapiens
gagatgcactgcccagcttcccacctctgtgccccacaaaccttcctcttccctgtcatccgctctacaaagcccctgctagaagttgacaaagctgactggctgcttaatgtgctacaggt

SEQ ID NO: 91769 - DNA, 122 bp, Homo sapiens
atggggttggggtgtgatggcccaggacgctgatgggcacttgtcccccagcagtccggccgggccgccttggcacccaggcccttcccggaggtcagcctgtcccaagagcgctcagacgc

SEQ ID NO: 91770 - DNA, 122 bp, Homo sapiens
agcatggccctgatgatcggtatccagggtccccacagagccgctttgccaaacaacgcacgtttggggagcaccgctttatacagcgtgctctgctcggagacacaatccctccctgggaa

SEQ ID NO: 91771 - DNA, 122 bp, Homo sapiens
ctggggcttcactgtgcctctggccattaccttctaggacttgcccagcccacaccaggtcgcgcaccggcgatttctcctgtagaacaaagaaggaaatagagggaccgagaggggtggga

SEQ ID NO: 91772 - DNA, 122 bp, Homo sapiens
ccgtgcgggtcaggagttaaggttctcgggtttttagacaaacaagtggtgacagcacagcgaagtaattccaaagcatccgcctacaatctgcttgaaaatgtctgaaaacaattcatgcc

SEQ ID NO: 91773 - DNA, 122 bp, Homo sapiens
ggcacttgaaggccagtgcgagttccggtgggcgtgggcttggtgggcccgcactgggagcggcaggccggccccgccaccccgggcagtgaggggcttagcacctgggccagcagctgctg

SEQ ID NO: 91774 - DNA, 122 bp, Homo sapiens
cagggtttatgattctctgctccagtctagatgaattccagacatggttttagcacctctcggtcagccctatagtcttgatcctcaataaaattatctttttcaagtccctgcatgatcaa

SEQ ID NO: 91775 - DNA, 122 bp, Homo sapiens
ggggtctgggagggcgaggccattacttagggcttgcaggtagtcctccatgttcttctgcgagacaaagcggtagtagccagtgaggttgggaggcattgtgtggatgaaggtttcaggag

SEQ ID NO: 91776 - DNA, 122 bp, Homo sapiens
ggggccctggggactggacggaatcccagttggtcagaggagaccctgggggcggggccgcgcgagttgccgttaggacagttaaaaccgttagctgcctgtcgtggcggggcggggccctg

SEQ ID NO: 91777 - DNA, 122 bp, Homo sapiens
aatgactgagtttaatcagatcttcaactactctggtagtgaaggggcaccgatcatggacgcccaccgagggcccgaggtcgggaaaatcaccttcccgaggagcaggcgtggtgcagacc

SEQ ID NO: 91778 - DNA, 122 bp, Homo sapiens
ttcatgccactctcctgcctcagcctgccgagtagctgggactataggcacctgccaccacgcccggctaagttttcttagtacaggtggggtttcaccgtgttagccaggatggtcttgat

SEQ ID NO: 91779 - DNA, 122 bp, Homo sapiens
ggggctgggggcgcagatcagaaagaatgggcctgaattgctcccaggctgggcatgtggcgcccgcgtctggggctccagtgggtgggtggcccctcccgcatggacggcgggcgcagggg

SEQ ID NO: 91780 - DNA, 122 bp, Homo sapiens
cacttagtttatttccctgcagccatgccctgtattctactgctgggattttcagttacacgaacacttaactcctttttacttatttaatcttaaacccatcttaatggaaagactgacac

SEQ ID NO: 91781 - DNA, 122 bp, Homo sapiens
actgaaccaaaactcttggggggaggggtgataaggattttattgttgacttgaaacccccgatgacaaaagactcacgcaaagggactgtagtcaacccacaggtgcttgtctctctctag

SEQ ID NO: 91782 - DNA, 122 bp, Homo sapiens
gagactgaatgcgcaattaacgaagtcagcttgccaactggaaagccggccccgctttcacgttgagcagaatactccaccagctgacttggacgaagcaatttcctcctctctctctcccc

SEQ ID NO: 91783 - DNA, 122 bp, Homo sapiens
aggcgtggctcattcctcgcggtgtgttggttttgtctttcagtattcagttgtctccgccgtgccagggagagagacggtgccaacccccggcgctcggcttggatgccctgccctggcca

SEQ ID NO: 91784 - DNA, 122 bp, Homo sapiens
ctctgtcacattactcaactctgccactgcaatgcaaaagacaatatgtaaatgagtgggcgtgggatatgccgataaaactttatttataaaaacaggcagctaactgtagtttgcctacc

SEQ ID NO: 91785 - DNA, 122 bp, Homo sapiens
cccccactctgcctccaaccctgaagatgaatattccaaaggctgacactgtccatacctcggtactaaaggaaaagacagaaggcactcagggggttcgcactgcagtcccctttccttgg

SEQ ID NO: 91786 - DNA, 122 bp, Homo sapiens
aaagtagagactatacatttacctatgttgtgagttggttcagtgaagatagcaagttaccggaagacaggagctagaaaaagagccctaagtcacactaccattggcagcatacctcgaaa

SEQ ID NO: 91787 - DNA, 122 bp, Homo sapiens
gggatcgggggtccggttgggtcgggttgggctccaggtctggttgggtcgggtccaggtcgggtaggagtccggtcggggtccgggtacaggtcggggtccgggcctggatcgggggcggg

SEQ ID NO: 91788 - DNA, 122 bp, Homo sapiens
agcaaggaacctttagagttcacgaagttctttgcttggtctcttgcacagtgagtacctcggcagtgatctacagtctgtcctctaattcagtggctctcatcttttttttttagccctaa

SEQ ID NO: 91789 - DNA, 122 bp, Homo sapiens
cttcttaaacaaggtatgaggaccgtaatgtaagctgcttaattgaggactcagggtcatcgtgtgaacaatcgctggactattttgtaacacacgcgtgccctcggaggctcggtgccagg

SEQ ID NO: 91790 - DNA, 122 bp, Homo sapiens
gagggaggtgccgggggcgccgcccacggcctcctgggctcggcgcgcggggccgggctgcggttggccacaagaggcatccatcttcccggaccagccaggcgtttcctagcggagcaggg

SEQ ID NO: 91791 - DNA, 122 bp, Homo sapiens
ggggggctagtaaaaatgcatttttatagagatgttgggaaaggcttgcttgaaattacacgtgggacttttaatagataggcgctttgaccagctaagcaacagggctcccctcgtgtggg

SEQ ID NO: 91792 - DNA, 122 bp, Homo sapiens
gaacgaatattcttgagactttagatctgaaagtcagcctgatttctgaaagccttggaccgtttccaaaatcaaatcaatactccaggaacaagatctgcctcgactttgcctctacccaa

SEQ ID NO: 91793 - DNA, 122 bp, Homo sapiens
atgcaaacagtggattttatctctgtagaaaagtaacagcagacttaaagcaggcagaaacgaaagcagaaagagaacttaagaacattacattaataattgcaggcccacctttgggctct

SEQ ID NO: 91794 - DNA, 122 bp, Homo sapiens
tgtccccgcactgctgtcttcttacttccttgcatctgctgtcatgattagacagatttgcgtcagccttgctaaagtgcagtctcctgccagcctacggctcagcagcatttttcttaaaa

SEQ ID NO: 91795 - DNA, 122 bp, Homo sapiens
gatcctctgaggcggccaccgcgcgccggccgcgctctgcgcacaaaagccaaacgcatccgactctctaaatgtgatttatttcttgctttgagattggagaccactttgcattggccagg

SEQ ID NO: 91796 - DNA, 122 bp, Homo sapiens
agtgctgtaacaatatgtctgctcagaaatggcatttaggcaaccggcatcatagccaggcggagtatgcccctcagagtatgcggcctgctactgtagcctggaagcctgcaacgctttcc

SEQ ID NO: 91797 - DNA, 122 bp, Homo sapiens
gaaacctagtgtgggactctagtgcctcccttcaacctgaaacatagccatcagggcttacggtagcaaaggaaggtctttattcaggaggcgggggctctgggctggcagtcggggatgca

SEQ ID NO: 91798 - DNA, 122 bp, Homo sapiens
tcgcccgccctccctcccccgagagcataggctgcgtttgtgggaaaccagggctcagcgcgctgggagggagtcaatttattctggagaaaacatctttgttctgcgagtgaaggggagcc

SEQ ID NO: 91799 - DNA, 122 bp, Homo sapiens
cagggccgggcaagtacatcagcagcacagtcatcgactgagccaggcactgggctaagccgtccacatgcattctactcatcagcaatgtggccttggggaaggtatacacccctgtgcct

SEQ ID NO: 91800 - DNA, 122 bp, Homo sapiens
caatgcaagctgcacgtgttgtgtctgggtcactggtaactgacattgatatggctggggcgccctgtcttctccctctctccctccctccctctcgcccacctcccatctctgtgatcagg

SEQ ID NO: 91801 - DNA, 122 bp, Homo sapiens
tacaccaggattgctacaaacaagtgagtcatgcattggactacaatgtcatggcaaccacgtcactgggagacaggaatttttcagctccattataattttgtggagcttgactgaaacgc

SEQ ID NO: 91802 - DNA, 122 bp, Homo sapiens
agtgtttgggtttgaggagagcacgacccagccctctggggtggggtctagcggggtcagcgaccaatcgcgccgaggtctagtggggcggggccctcccgggggcggggcctgtgccagtt

SEQ ID NO: 91803 - DNA, 122 bp, Homo sapiens
tgacccggagcagccatcttaggcatcgcctcatagaggaactacatcttccagaatcctcgcgccctgcgtcgtgctggcacttttaccggccgggccttagagcggagcctgtagccagg

SEQ ID NO: 91804 - DNA, 122 bp, Homo sapiens
ctatcactggggagtgggaatttggaaagttccccaactagggacacacgtgacctccttcggaaagtagttccgactgtggcccgtgtatccttccacctccttttgaaccctcctaggtc

SEQ ID NO: 91805 - DNA, 122 bp, Homo sapiens
tagcgttaactgcgaccggggttcagcgctcgggtgaggagctggtggcgtcggcaggttcgaggcgattcgaggtgagggggtcaagcggagaggctcggagtcggagaaagctgtcgcga

SEQ ID NO: 91806 - DNA, 122 bp, Homo sapiens
cgctgcccacaaagcgccagctgaggggccgctgcgggtggagtgcggcggagtcggcctcgcgaccccagcttgatccgccgcctgctgcaccgcgcctccgccgcgttcctgcgcgtccc

SEQ ID NO: 91807 - DNA, 122 bp, Homo sapiens
actaaaatgtttgcattccaattggtaaacagccactgccggatccctagagggccctcccgccttctcttgaccaccaagtaatccagcagctgaggggttaagaacctgcaggggcctcc

SEQ ID NO: 91808 - DNA, 122 bp, Homo sapiens
aaaacaaatacacattaaatagataacaaacaactccaacttgtaaggctataatagatacgtgtagagcatatgtataatgcactgtattcaggaattccaagcagttcgaacgtcatgac

SEQ ID NO: 91809 - DNA, 122 bp, Homo sapiens
gccgggcgctcacctgggacatctgcggccggaagttgatgtccttgaggtcgatggagccgggggagaggttgtgcagcagctggcacagaaggaccccgtcgcgcagcgcctgcgccagg

SEQ ID NO: 91810 - DNA, 122 bp, Homo sapiens
tgctctcatctctggatcctcctcaagcacatccctgccggcagcatctgttactactgacgctcctctacttccctcttgcgctttctcaatggcgcaaatggatccagttcttaagttct

SEQ ID NO: 91811 - DNA, 122 bp, Homo sapiens
gcgcggacggcggtgccagcatctgcccagcgggcagagaggccaggcccacatttcaagcggcctgacagctccccacgcgggcgcccaggaggccccagagctccgggagcggcgggagg

SEQ ID NO: 91812 - DNA, 122 bp, Homo sapiens
ggtctccgtccaagtcttggttagcgcaaaggtggccatgccactctcaggttcaaagcccgtgctgggacagaacctagctttcccctgcggggcgtccctggggcctcttcctcccttag

SEQ ID NO: 91813 - DNA, 122 bp, Homo sapiens
cctgttccccttccaggtttgcataggggctggaggacaggtcagccagccttctctgcccgcctccatcctgccctgccgtcttctgactttgaggcctcgtatcccagtccaagaccatt

SEQ ID NO: 91814 - DNA, 122 bp, Homo sapiens
aactgacagaatctggggaatgggaaggaaagagggtgtaggtctgtgtaaaacccccaacgaaaagtcacagtaacatgaagaaaggcaggaattctccacttcgtttggatggcagaaaa

SEQ ID NO: 91815 - DNA, 122 bp, Homo sapiens
cggcccccgaggaaggcgggacagggcctattcccgcggtttggtccggccattggcgggcggtttgaatgacggaagtgacggcggctcggcgatggctctcccgcaggcgcagaaacggc

SEQ ID NO: 91816 - DNA, 122 bp, Homo sapiens
gagagagagcaagtgggagagcggagagcggacgcgcgctgaggagagcgagtgagagcgcggcgctacggggtcaggactcaaaccacccgctccagcccccatgcactgatttgcatgac

SEQ ID NO: 91817 - DNA, 122 bp, Homo sapiens
agtctggatgtcctcaaccttcagcacctcttagccctttagtctgagtggaagaggattcggttacttgatccacagtgcatgctgaacccactgtctggttcccgcccccgcctcctgca

SEQ ID NO: 91818 - DNA, 122 bp, Homo sapiens
attttctcacttttcaatgtgattagtgttttaggattgcattttccagcagtatcctcccgtgtacaactaaagtgcagtcagccctaggagccttgttcaatgaaaattattataaacca

SEQ ID NO: 91819 - DNA, 122 bp, Homo sapiens
tgggggacctgctgggggaaggctcttacggcaaggtgaaggaggtgctggactcggagacgctgtgcaggagggccgtcaagatcctcaagaagaagaagttgcgaaggatccccaacggg

SEQ ID NO: 91820 - DNA, 122 bp, Homo sapiens
cttgatctcctgaccttgtgatccgcctgcctcagccttccaaagtgctgggattacaggcgtgagccaccgcgcctggcctagcctagatattttttaaaaatcaccaattctttaatatt

SEQ ID NO: 91821 - DNA, 122 bp, Homo sapiens
agagtgagcagggcagagagcagcagatgagactagaagggtgtgccagagcccagtcaccgtctcttgatcatggtattaaaaaaaaaaaaaaaaaaaatcctgattttttttcagatggg

SEQ ID NO: 91822 - DNA, 122 bp, Homo sapiens
gagatggggactcgctaccttaggcctaaaggtgttaaagttgaagagacgccgccgccgcggccaagggcacctgcagaatgtgagagagcctgggaggtcttgcagcttggtgtcacccc

SEQ ID NO: 91823 - DNA, 122 bp, Homo sapiens
tggcagggacaggattcaggcttgcctggccggaatgagggtgctggtcccacgggagggcggctccggcaggcgggggtagggaagctggcggggagctgggcagggcgctgcagccggcg

SEQ ID NO: 91824 - DNA, 122 bp, Homo sapiens
tcagatgacaacatgccacttacaagggacacagctaggtgttgtgttggcttcagttaacgatcctgctagcagcccctaggaagcagcctatccccaaaagcacgaggcctgggatggcc

SEQ ID NO: 91825 - DNA, 122 bp, Homo sapiens
agccctatacatttttaatttcgatgaatctagacaccgtcggcgggtgccaggcttccacgagaacaattgacaccctaactgcttcaagattaaggcaggcgattcaaatccgaaggaaa

SEQ ID NO: 91826 - DNA, 122 bp, Homo sapiens
actcaaatgagtggatatgttgctgaacaagtagctatattttaatttaattcctgacaccgatttccaaagaaaagagggcaagagctcattgccctactttgggtctcttcccatggctt

SEQ ID NO: 91827 - DNA, 122 bp, Homo sapiens
gaagcacaaataagtgaaacactaagatgtttcagagcatagtttgaaaatccctgtgctcgatcaccaaagtcacttccaacagtaaaattctgtgtattttaaaagttctttttctattc

SEQ ID NO: 91828 - DNA, 122 bp, Homo sapiens
atgctgctgggcccaggagagacagttctgaggcagaaactcggcgtccaaggggggccgcgggtcaggcactgtggtgaagggaacgccggggagtccggccccaccttgcagctggggac

SEQ ID NO: 91829 - DNA, 122 bp, Homo sapiens
agataaaaccaaagctctaggagtgctgacagactgggtggcatcggacaaaggccctcgcggcccctcttgggccttgggcatctctccttcactccccgcctcaggataaagcttggagg

SEQ ID NO: 91830 - DNA, 122 bp, Homo sapiens
attaagtgaactgagcagaacaaatgcccccagttcgacggcactcagtcacaacagcaacggccaccattcacagggtgctggcttcgtgccgggaacagttccaggcgtcttctttgtcc

SEQ ID NO: 91831 - DNA, 122 bp, Homo sapiens
cccgccttctctctctgctccctctcgaagaacccaggctggagggagccggagggtaatcgtgctgctccgctatggacggtggtggcccaggagagtgcctcggggacccaggtgcttcc

SEQ ID NO: 91832 - DNA, 122 bp, Homo sapiens
ttccagtggctccaggccgttctcctcccctgagcatccatgaagacccccaccagaagccgcagccccaggggcttctgtcgccaaatactcccacactcggaggtaaaggtacaaatcct

SEQ ID NO: 91833 - DNA, 122 bp, Homo sapiens
catctccacaagctccccgcattgccctggtgctcagggaggtccgggcagagctgatcacgaccccggccggtagtcgggaatggcggcctccgtggtcaccctgacatgcggccgaaccc

SEQ ID NO: 91834 - DNA, 122 bp, Homo sapiens
tgtcctccgtcttgacgctggtggactcgttgaagatccgcaggcactcctccatggggtcggagtcaaagtccacctccttctccagggccgagtagtccacatccgcccccgcgctggag

SEQ ID NO: 91835 - DNA, 122 bp, Homo sapiens
gctccagtgccaccattgcttttgctgcttttctggctttccctttcggacatgcgcgctcggagcaaggcgccctcgcactcagcttaccgcgcatgtacgttgccaggggtaacgcaggt

SEQ ID NO: 91836 - DNA, 122 bp, Homo sapiens
cctagttccctccaaagctccctccaaagcgccctaagcgctaacccacgctacccaggacgcaggttaaccaccgtgctctgctgcctccaaagctggccccacttcccccgaagggtgtt

SEQ ID NO: 91837 - DNA, 122 bp, Homo sapiens
attataggtgtgagccaccatgcccggcctcatagcatatttttcatgtcagttggatcccgtggtatcaggcatgctcctatgcctatgtagtgacctcagctgccatcctaattgacaaa

SEQ ID NO: 91838 - DNA, 122 bp, Homo sapiens
ctctgtctcctcaggtttgtctactagggacagttcgtagcaacagagccagagtgtacacgagctctgtcactgggtgcccacccttagcgcctcgttctcaaggtctgtccacatggcac

SEQ ID NO: 91839 - DNA, 122 bp, Homo sapiens
gaaagaaactggtctctaaaatcggggcggaacttctgcgccctcacccccgcccacgaccgcccacccctggagcgcacttctggttggctccctagttctcaactcccggctacaggagc

SEQ ID NO: 91840 - DNA, 122 bp, Homo sapiens
ctcaggcgatccgcctgccttggcctcccaaagtgctgggatgacagacatgagccaccgcgcctggcctgtgttacagtcttgaggcagaatttctgcttctccaggaaacctcgggtttt

SEQ ID NO: 91841 - DNA, 122 bp, Homo sapiens
tgtgctcctgccaggagaaaacagccctaacagctgcctcctgggccatttccaaacattcgtgtgtcaggccagagagcgccagttcgttgcccttttgggtggttccaaacgtgtggagt

SEQ ID NO: 91842 - DNA, 122 bp, Homo sapiens
ccagaccaggtgaatctcaagatactaatcctcacatcatttgccttctcatatttccctcgtcttgaccatctggtgcctgttatgcagtttaacattctgcagcaataaaagtgttttat

SEQ ID NO: 91843 - DNA, 122 bp, Homo sapiens
cgctcacggagcgcctcccatacaaaatttatgaaagtgctctcagctcgcagtgccgagcgccgtcctattcccaaggcagcagcgctcagccgcgcggcgccgcctcccaaggtgttttc

SEQ ID NO: 91844 - DNA, 122 bp, Homo sapiens
tctgaaacaccaagctctgaaataccgagatttgaggaaacagagcctggggaaccgaaccgactgtggggtagggctatttacttcccaaagcaaggcatctttgccattcacagggggat

SEQ ID NO: 91845 - DNA, 122 bp, Homo sapiens
accacctcagaagagccagattccacttctgtggccaggacttttacattatggctggtccgattgttttaccctgcgttctatgctactaaaccttggatcattcctaaagtacaaattct

SEQ ID NO: 91846 - DNA, 122 bp, Homo sapiens
ccagaacgggcgttgccggcctgagactggcgcggttggcgaagacagcgatggctgctacgtgcaacttccacgttcccggcctgccctggagctgacggcgctgacggctcctgggccgg

SEQ ID NO: 91847 - DNA, 122 bp, Homo sapiens
agggccgactgtgagtgccgggcgccatgtggggtggccaggagggccgactgtgagtgccgggcaccatgtggggaggccaggagggccgactgtgagtgctgggtgccatgtggggaggc

SEQ ID NO: 91848 - DNA, 122 bp, Homo sapiens
ttggaaaattagttaagacatcactactagctagatataacttgctagccatacaaatttcgatggaatttggacaaatcatttatattcccgggccttattctcatcttatgagatgatga

SEQ ID NO: 91849 - DNA, 122 bp, Homo sapiens
ggcaccgtgccaggggctagggacaaggataagcaaggccaggtccgggcctccaagcagcgcgctgtggagtcgggtagagtagaccaagtgcaacaggcacctggctgcagccaggaagg

SEQ ID NO: 91850 - DNA, 122 bp, Homo sapiens
catctccgcgatcttccgcccagggttgtcttcctttagcagctgcacggatgatagtagcgtggccagctcctgccgcagggccccaaccttgaactccctatgggcaccagaggccgagg

SEQ ID NO: 91851 - DNA, 122 bp, Homo sapiens
ggaggagcatgcaaatggcgggcgggcctcaggcattagagcccaggcgggaggggttcccggggctgtctcaaggccggacagggtcacacatcccccgtcccaccccaggtctgcggggg

SEQ ID NO: 91852 - DNA, 122 bp, Homo sapiens
caacaacaatcacaatagtgaatgcatgtatcaatcacccacacaattatcacattttaccggccagtggaactgagtactcattggctcaaattggaaagtgtggacaaagaacacacagg

SEQ ID NO: 91853 - DNA, 122 bp, Homo sapiens
atgtaaccctgctgaggggctgtgcaggccgctcctacggtcctttggcctgaggcagggcgggaggcatgcaagccagtgggggaaaacccctctgaagctgggcagccctctacctgggc

SEQ ID NO: 91854 - DNA, 122 bp, Homo sapiens
gtaatttcctgggagttcttcagacaaggttaaaactaaagtgaggaagggcagccctcccggaagctcagaacagtgtcacggactagaaccattgtacccagaacagtcacatccactga

SEQ ID NO: 91855 - DNA, 122 bp, Homo sapiens
ctcagagctgcagccaaaacccggagagtggaataagcgccctgaagatgccggagctcccggctgagcaactggacacgcgacgaacagcagacgctacaggttctcctacccagagggag

SEQ ID NO: 91856 - DNA, 122 bp, Homo sapiens
gcgcggggtccggctccgtgggcagtttgggaagcgcccgggcaacgtactggcgagggccgcggagcgaggggctcggggagcgggacctccgggcggggctgcggggagcggggcccggg

SEQ ID NO: 91857 - DNA, 122 bp, Homo sapiens
tacacacgcacacacatggaccgaaccaaacacgccgtggaagctgagccacacacaccccggtctcaagaagcaaaggaaaaagcacaaagcgtctgagtcaccaattcatcatggcttgt

SEQ ID NO: 91858 - DNA, 122 bp, Homo sapiens
tgtctcactgtctccatagctcagccttttccagaatgccgtgagctggaatcctacagtcggtagccttttcccattggcctctttgaccaagcaataggtgttcaagtttgctccatttt

SEQ ID NO: 91859 - DNA, 122 bp, Homo sapiens
cgggagaacaatgcgtctgtcacacagtgactgatagggcagcgagcgctgaaagggaggcgcacgtctgtcctgtcttcccaccaggctggcttgtgcacctcccactgctcttaggcaaa

SEQ ID NO: 91860 - DNA, 122 bp, Homo sapiens
ctggaagattttgggcaacagtggtataggcagatgtatttaagtgtgggttcctggcttcgccaagtgcgcgatgttttgcaatcagatttttttaagctctgaaatgggtattcgtaatc

SEQ ID NO: 91861 - DNA, 122 bp, Homo sapiens
ttttcattcccatttccctgctgaccgatgatgttgagtgctttccctgtgctcatgggccgtgtgagcgtctcctttggagactgtctattgaagtcctttgaagtggcatgttatttgac

SEQ ID NO: 91862 - DNA, 122 bp, Homo sapiens
atgcgttcgtggtgcctccgctgcagcttggcgcactcgcggatgcgccgctccgcctcgcggaaggccttgtccttcagcttacccaccagcttggggttgaggctgctctgcttggccgc

SEQ ID NO: 91863 - DNA, 122 bp, Homo sapiens
cgtgagtaagtctagggcccagtttccggctgcgccattgctgtgtgggtcttgggacctcgagttggaggacgcgggagggtgggggcgggggcagggcagcgctgagatttccggggagc

SEQ ID NO: 91864 - DNA, 122 bp, Homo sapiens
acgttttcagtatcaaatgctgccttgggatcatggctggactgaagccaccatcagggacgtgaggtggggctgagccctccagggtaagtggaaagatggtgggccgcagaacatgtgct

SEQ ID NO: 91865 - DNA, 122 bp, Homo sapiens
aatcctagggccgaactaaagtctgacgggagctctaaccaaagccaaccagctgagatgcgatccggccgctgggcgggggcgaaaaaaacaacttccggtcccctctaccccggcattcg

SEQ ID NO: 91866 - DNA, 122 bp, Homo sapiens
aggaagatgcccgagaggaaacctgaggccccctggagcccaggggacaccctgcccccgcgggagttcacatccagctgggtcacagaattttggggcccccagtcctcaggccacctatg

SEQ ID NO: 91867 - DNA, 122 bp, Homo sapiens
cgcagagccccatgagcgagtcaataagaaagcagtgagacacacgcagagccccatgagcgagtcaacaggaaagcagagagacgcacgcggagccccaggagcgagtctcacgtgtgcac

SEQ ID NO: 91868 - DNA, 122 bp, Homo sapiens
ccctgggtgaggaacatcatagccaggcgccgccgccgtgcgagtagctgtgctcctggccggcgacgaagccccgcagcagctcggcctcacccccaaacaccaggctctccacatccacc

SEQ ID NO: 91869 - DNA, 122 bp, Homo sapiens
gccccgggctgtggtgactggcggtgtggggtgggtcagagggcagtaggtacctccaggcgggagcagcgtttgcaccgcggtgggttcctgcgagctggtgcagaggggccccagcgggc

SEQ ID NO: 91870 - DNA, 122 bp, Homo sapiens
gcctgggctgggctgaggcgggtgggtcttgggttagactgtggcgctcagcatggcctccgtctccggcaggatctcgttctggttggagtccaggccaaagaacttgacgctgaggccat

SEQ ID NO: 91871 - DNA, 122 bp, Homo sapiens
ataatgctcctgcctgtcaaagccgtgcccagccccggtctcaggcggccttttctgtgccgttgttgttttcatggagcaggttggagagcttccctgaccctggggcgctgagggccggg

SEQ ID NO: 91872 - DNA, 122 bp, Homo sapiens
aggattgctctgatgacagactacaggcagagcgagtggccggcaggagccacgtgcttccggagcctcctgcggccacccctgcctccgcactccccctacagtccacctcgacacagcag

SEQ ID NO: 91873 - DNA, 122 bp, Homo sapiens
tgccagatccaatgaaccagcagctggaatctgaaggcatcagtctgcatcttaggggatcgctcttcctcacaccacgaatctgaacatgcctctctcttgcttacaaatgcctaaggtcg

SEQ ID NO: 91874 - DNA, 122 bp, Homo sapiens
gacggagggctggtttcaggatgaaactgttccaccccagatcattaggcattagattcccgtaagaagcgagaaacttagatcccttgcatgcacagttcacaatagggttcgagttccta

SEQ ID NO: 91875 - DNA, 122 bp, Homo sapiens
cggtcccttcttcagctctggccgcgatcccaaaccctgacaagttcatggttccctacccgcccggcacccccatcttaggccaacaccagctagagacactgctactgcgctgagatgcg

SEQ ID NO: 91876 - DNA, 122 bp, Homo sapiens
accagtgggcagggtggtagcctctagtctttttggcttacctatccctgtgtgtaaccacggtcttatgagtgagatgggttgaaggcaaatggggcccctgtgttctaggcctgtcatgt

SEQ ID NO: 91877 - DNA, 122 bp, Homo sapiens
ccaggcgtggattggtatgtgggtatgtcggcctctcttcataggccgcgcaggattgctcgagaggctttgattggctcaacaggcgctgagcgttcattggctgcgctgggtcgtcaggg

SEQ ID NO: 91878 - DNA, 122 bp, Homo sapiens
atcgcgcggggcgggccgtgggccgggtcggagactactggagtgggccgggcaggcgcacgacgtcatcacgcgagcgttgtgtctcggctggcgggagccggggacgggaaaggagagtg

SEQ ID NO: 91879 - DNA, 122 bp, Homo sapiens
cgaagaacccccgcccccacccacactcgaacacgcacctgtgaacacggcagggggctccgagcctccgggcttgctcacgaagtaacaaatgtgtcctgaagtgtggcacggggtcgcca

SEQ ID NO: 91880 - DNA, 122 bp, Homo sapiens
tgactattttggtgggatgttgcggctttaggaaatccgggcagatactccactaccctgcgtcccttatgactctgacctgtcagccataagccctagcaaggcaggcgtggaggtgaagg

SEQ ID NO: 91881 - DNA, 122 bp, Homo sapiens
cccccaccccgcttcgaccggagcccccaccagccgggacccacctgcacggcagccttgcggcctccacactccggctcctgcaaacaacgcggctgacccgcagcacctctgctcccggc

SEQ ID NO: 91882 - DNA, 122 bp, Homo sapiens
ccccgggaccgccacctgtcgcgttccaggccgaggcggtccagggtccccgcggaagggcggcggccccccaaccccagcccaggcccactcacagctgcaggaacaagggcgcggcagac

SEQ ID NO: 91883 - DNA, 122 bp, Homo sapiens
ttccgtttcctctctagaaaaactcgctgactataaagcgctgatttaaaataataaacacgaggagtccagtgttcacagcaaaatgtcagggaaataatgtggatgaaaggtggggccta

SEQ ID NO: 91884 - DNA, 122 bp, Homo sapiens
tacagaaacaagttgaagtacctgggtttcctccgcaagcggatgaacacccacctttcccgaggtccctaccacttccgggccccccagccgcatcttctggcggaccgtgcgaggtatgc

SEQ ID NO: 91885 - DNA, 122 bp, Homo sapiens
tacatctgcagtgagtgcaaccgcaccttccccagccacacggctctcaaacgccacctgcgctcacatacaggtaggtcagtccagctgatgggtggatctgggtctctgggagccagcgt

SEQ ID NO: 91886 - DNA, 122 bp, Homo sapiens
tctaattctctgtataacttacatattttattgcctttctcctcaataaaatacaagttccgtgttttattggtagttggtaaatctgtgctggctaaatacatgaacacatgcctctgctt

SEQ ID NO: 91887 - DNA, 122 bp, Homo sapiens
tgcggtgaatttttaaaagatcacgtaaagtccatttctagcacccttttaaagtggaggcgctggtattggaagctgcagcccttaacgggctccgcaccgagtttcctttctccctcagg

SEQ ID NO: 91888 - DNA, 122 bp, Homo sapiens
tggaatttaggaagaagctagcctgagctcaaaacctcctgctaaacaaaccttaaggcgcgcatccggctctgtttcccacctgcaggttccgcattccttagcccagcaggcggggaggc

SEQ ID NO: 91889 - DNA, 122 bp, Homo sapiens
ggaaggagggtcagaaggggccggagcaacccaagtcctgagaacccccaaacgtccttccgagctctcttttagcacagaggagacacttcagacgatgaaataaaaactgacaaaggcag

SEQ ID NO: 91890 - DNA, 122 bp, Homo sapiens
gaacgggaccccagggcggggtttccctcgcgggggcggggcctcctgaccggccggagccggtttggccaccggagacccccatcggtcagctgccaggccccacgcgctcgcggtctccg

SEQ ID NO: 91891 - DNA, 122 bp, Homo sapiens
cgtgggacgctggctctagggttttcatcaaggccctggaggagcttgaggaagctccctcgttctagtccttgtttgctagcacctgtttgttttttgagtcagtgtttgattttgtgaaa

SEQ ID NO: 91892 - DNA, 122 bp, Homo sapiens
tctacctgctcccgaggcggcccttacggggttcacactgctggcacattcaccctacagcgccacactacagggcctacatagagccgcctgtccgaaaaccccctttcaactgtgaagtg

SEQ ID NO: 91893 - DNA, 122 bp, Homo sapiens
gctgctcccactagagcatttgcaaaggctgagtggggctgagcttccagccttggctcccggccccgccccttccctgtcactcggacaggtacctccaggacactctccctggaggaagg

SEQ ID NO: 91894 - DNA, 122 bp, Homo sapiens
gagggtgacagggcccacatctggggagctgacgcgaagtgctgcctgccatgcatcacacgttccagcttcccgggaccagcgtggccggtgggagccgggtgccagggcacattgctatc

SEQ ID NO: 91895 - DNA, 122 bp, Homo sapiens
cgatcttgtgccagatgatacagatactttttgagtaggtttccctggactgcagttgcccgtccaggagcaagaattcggttggacaaacaagcaaacaaaatagataaagcaggcgctgt

SEQ ID NO: 91896 - DNA, 122 bp, Homo sapiens
aaaaacaaacaataaaaaaacctcacgtcaaatgacttcagcacggactgggctcaggtgcgcacctgctcgtgtgcacgcgtgtgtacccacgtgtatgcatgcatgggcgcgcgtgggca

SEQ ID NO: 91897 - DNA, 122 bp, Homo sapiens
acctggcgcaaccctgggcctcaggttccccagtggcaaaggtaggataggggctttggtcgcctctgtgctatgagtctttgtccagtttgtcagtcaccatattcgttttactctccagt

SEQ ID NO: 91898 - DNA, 122 bp, Homo sapiens
gcaagtggcaaccggaacagtgccttggagtagcgagcacgctggacgcacagcacaccacgtgcagcgcgacgttgggtctgattcagggaattagggcaggtcgggatggggtgacggct

SEQ ID NO: 91899 - DNA, 122 bp, Homo sapiens
agaagggtagtggcgcgtcttggagtcacgctggccgagtggaaagaatagcgggcgaggcgcaggagaggggagcccaggtttggatttgtcaaacttgagtcacttctcttccctcccct

SEQ ID NO: 91900 - DNA, 122 bp, Homo sapiens
ctcttgagtgtgtagcccagaatcctcaagccctgtgagtgcctggagaacttgaagatgcgaaacacccggaacacacgcagggtgacaaaggcgccagagacatcgtcgttcttgggcac

SEQ ID NO: 91901 - DNA, 122 bp, Homo sapiens
ggcaggcacaaaggtttgcaattagactttccaaggagacattcaggctgtccacatacacggtatagatcaaacccaggcaagcctgcaaaaagataaatacatgtaattatttcatggaa

SEQ ID NO: 91902 - DNA, 122 bp, Homo sapiens
ggcagccctgcgggcctaccttgtcccctttgcttaggacctgccaaggccacgtctctacgcttccgaacagcgagttcttgatcatgcccaacatgttgtagccgagacgctcccgacgc

SEQ ID NO: 91903 - DNA, 122 bp, Homo sapiens
gctggagcctgagtggctgccgtggacacggatacacaggaagctggcgctggccttcctcgccgtgcccctcgtgtatttagggtgtttcccacagagagaggggatcacttctcctttca

SEQ ID NO: 91904 - DNA, 122 bp, Homo sapiens
gtggggagggaggccgtgagcacagccgggtgaaggaagtgaagcggcccagggcgctcccgggccagccaggagggttctagctctgggatatcccttattagtgttgtctcagagttcaa

SEQ ID NO: 91905 - DNA, 122 bp, Homo sapiens
cactggcacttcccggccagctagagttctgggtgggcgtgggcttggcagtcccgcactcggagcgtccggcctgccccactggccccggggcagtgaagggcttagcacccgggccagca

SEQ ID NO: 91906 - DNA, 122 bp, Homo sapiens
gggaggccgaggtgggtggaccacgaggtctggagagcgagaccatcctggccaacatggcgaaaccccgtctctactaaaaacacaaaaattagctgggtgtggtggcccgtgcctgtaat

SEQ ID NO: 91907 - DNA, 122 bp, Homo sapiens
cattcagtcgtcctaaaagtcctgtgtgtcaataataaattacacccactgaaaggaagacgtatatttacatttcatggcctttcattttctattagtgtccccttcattccactccatct

SEQ ID NO: 91908 - DNA, 122 bp, Homo sapiens
tcctgtcctggactttccctctcagggagcccctctgcccacagcgtcctctccattgcccgaaccagccaactcccagcagcgcttcagtcaccagaggcacagcctcggaaaagcttccc

SEQ ID NO: 91909 - DNA, 122 bp, Homo sapiens
ttgggtttcatcagcattgaaggtgggagatgaggtgggcatcgcgtcgatgctgagtctcggggagaaagctaggaaatgtccccagcaggtagggaaacgcttggcaaagcacaaaggca

SEQ ID NO: 91910 - DNA, 122 bp, Homo sapiens
ccaagtgaaagtttgcaaaccaagatccaagtgtatattgattcagtcagtcagtaatcacgtattgcctggtgatcctgggaagtgattaggaagtcaggctcttcaatgacatccacaga

SEQ ID NO: 91911 - DNA, 122 bp, Homo sapiens
tttttctttgttagtgctcttaggcaagtgattctcacagcgcagacccaggcccacccccgatcagcatcacctgggagtttgttcaaaatgcaaattcttgggcaccacctcagacttac

SEQ ID NO: 91912 - DNA, 122 bp, Homo sapiens
ctccaggggagggatttcctgcttaagtgtcgctgtgacggcctgggctccgggaggaggcgcagggatcctcggaaaggcctgtggtgcggtttggtggatttggggcgcaccacctccgc

SEQ ID NO: 91913 - DNA, 122 bp, Homo sapiens
aaactgaggctcagagaggccaagtgacttgctcgaggccatcggctgataggtggagtgcgggagcgtcacctgaggttggatccccaaacaggatccaagtggaagtggtttattcggaa

SEQ ID NO: 91914 - DNA, 122 bp, Homo sapiens
catggtaaagtttggttgttgtctgcaggttttccagcattgtgggccatccagatgatgcggaatggaggttccagaacccacctgccctgcccctcctgcgagggaccagccagctccca

SEQ ID NO: 91915 - DNA, 122 bp, Homo sapiens
ggaacagcccattggctgcctggccctcccccagtgactgcagtcgtcccgaaccaaacccgagaatcccagaaaagtcatctggggagatgccgctgggatccagctgggcgcgccgtcag

SEQ ID NO: 91916 - DNA, 122 bp, Homo sapiens
tcttgcccctgccaatctgtctggacttgtcccctggccgttaactgggttctagcctatcgagactcctcatattctccccacccccgaccactacctccatactgtccttcctaagtcac

SEQ ID NO: 91917 - DNA, 122 bp, Homo sapiens
gggcattggcccgcgatctgaaaggggctgtcctgttcctcatgggcgctgccagcgccacgcactcctctttctgcctggccggccactcccgtctgctgtgacgcgcggacagagagcta

SEQ ID NO: 91918 - DNA, 122 bp, Homo sapiens
tcattttgctgggactgaccagctcccaggatgtagagtttcttctctttgccctcttctcggttatctatgtggtcacagttttgggtaaccttcttattatagtcacagtgtttaacacc

SEQ ID NO: 91919 - DNA, 122 bp, Homo sapiens
ttcctgtctgccgtcccttgcggtgtgtgtcccctgtctgccgtccctcatgggtgtgtgcggcacctgcagctcccgggagcgggaacgtcggggacaagagctgaagggacgaaggacac

SEQ ID NO: 91920 - DNA, 122 bp, Homo sapiens
catctggtaccaagcttccgtcccaagaatttataagtaactagaatttctgtacgtttccggaatgagtgcacgttaagacccattgtgcaaactttgctgacatcaaggcaccaaaatat

SEQ ID NO: 91921 - DNA, 122 bp, Homo sapiens
cccatcgtcctgctggatccagtctaccacgtcggcattgacctccgcaaagacaaagggcgcatcgtacttggtgctcaggtcgccctccttgatggcacgaactggaactgggccacagc

SEQ ID NO: 91922 - DNA, 122 bp, Homo sapiens
tggagggcgcgcagccagcggctcccgcagccccgcccccacgcggtgacgtcggcgccccgtccccgcccactgtgtctggctcaggctcgcgcgatcgatgtcctcctggacgtgtccgc

SEQ ID NO: 91923 - DNA, 122 bp, Homo sapiens
aaggccctgtgggtgccagaagaagagctgctgagcggcggttcccacgcgtgctgcagacgcttttcagagacaagtcttggtctttgtgctggacggaggcaatgctgctaatgggaggc

SEQ ID NO: 91924 - DNA, 122 bp, Homo sapiens
gcccccaagggcttccaaggcccgtcccaaggtttacatgtgccagtgtgtgcggtgatgcggtgacaggccagggggctgcctcactggggcagggctgcgaggggctgtggatgccagcg

SEQ ID NO: 91925 - DNA, 122 bp, Homo sapiens
tttgagatcaggcgcaacaacttctcccgctcaggttaccctcagaaaggctatggaccccggactccgccccagattgcataacaactgaggggtgggtccctatttcctctctgggatct

SEQ ID NO: 91926 - DNA, 122 bp, Homo sapiens
gccagctgagggctagcgagcagaagctcaagagtgctgaggccctgctgctggagaagacgcaggagctacggggcctggagacacagcaggcgctgcagcgggaccggcagaaggaggtc

SEQ ID NO: 91927 - DNA, 122 bp, Homo sapiens
cctactcggcccaaatagcattgtgctttataattcattcttttcacatacagtaccctgcgttatcatggctaatgttttcctgctgagctgccatcatcttttgtcaagctgtcagggtt

SEQ ID NO: 91928 - DNA, 122 bp, Homo sapiens
cttgcagtgagtggagatcgctccgttgcactgtagcctgggcgacacggagcgagactccgtctcaaaaaaacaaaaacaaaaacaaaaaacaagctaggtgcggtcgctcacaatcccgg

SEQ ID NO: 91929 - DNA, 122 bp, Homo sapiens
gggggccgggcgcggggctgggtccagcagtcctgggcaggtccagccccgcgcatgctccgtcaggcttctctgctaaccagggagactggttgctaggagaccatgctaatgaaggactc

SEQ ID NO: 91930 - DNA, 122 bp, Homo sapiens
aaaccacgccgcactggacgccattcaagcttttacaggccctcaaattggggctggagccggagaggaaatactaaaatcctgtgtacacaacttctgtctgggcgcgccggggctctggg

SEQ ID NO: 91931 - DNA, 122 bp, Homo sapiens
ggagacctggcctcccagactcatcgggtcccctgattatatgctctttgggagaggtagcgcttcatgatattcctgggcacagctatcactctacatttgttttgtgagtacctgtttaa

SEQ ID NO: 91932 - DNA, 122 bp, Homo sapiens
ttgcgctaaagagattcttataaaatagacacgggggcagctagaagcttcgggctcctccgtgtccagtggccttgggcagcctcccagctccatgaagcctcagtctttgcatctgtgta

SEQ ID NO: 91933 - DNA, 122 bp, Homo sapiens
ctcagaacaaatggatgttacagtgaagaaaagcctgaattgtgaatgtttttccatcctcgtttgtttgaagcaggaaatagagtagctccttatttgtcctcatacatcagtccagctct

SEQ ID NO: 91934 - DNA, 122 bp, Homo sapiens
gagtatcgtttacttgatgagtatttgttgggtgatcccacgtggccgggactgtggtggcgtctctgtctctcagatccttccttctgtagccccgggcttagcagtttcccaggttgagg

SEQ ID NO: 91935 - DNA, 122 bp, Homo sapiens
gtctgagtcctaggaagtgaccgcagtgggagcaggaccatctgagtcctaggaagttaccgcagtgggagcagggccgtctgagtcctaggaagtgaccgcagtgggagcaggaccgtctg

SEQ ID NO: 91936 - DNA, 122 bp, Homo sapiens
ctgcagagctacagcacgagggattggggttagggcagcagcagcacttccggtgggagtcggggaggggcaggctgtggggggaggagaggaagagaccgcggccctggtgcccccaggcc

SEQ ID NO: 91937 - DNA, 122 bp, Homo sapiens
gggaactcggcctgaaaaccttccgtctccatccgccttcttcagacaggaggatatgggcgaaggaactttttcatgcggggtccgcccaccttcggccaaaccctccctcacaaacctcc

SEQ ID NO: 91938 - DNA, 122 bp, Homo sapiens
cctaatactgaccttctgaccatgggtgggtgagctttcttatcagtctgccctcattgtcggttttagggatttcaggaggtaggttcctgctccgggtagggctagagaccttcccctca

SEQ ID NO: 91939 - DNA, 122 bp, Homo sapiens
gattcatttccagtgtccaacggagaaggtgttgactcagttttgttcaatggatgacaacgtgaataagaaagtggccagtctctccctaagtgaatcctgcagatcagtcacttttctgt

SEQ ID NO: 91940 - DNA, 122 bp, Homo sapiens
cgcggtagagcaggggtcttggcccatggcccatatcacgccatccctgccatgcatgtgcggggtcccggacaccctgaggtcccagattcgcgaccccggagtggcctgaccccgcgggg

SEQ ID NO: 91941 - DNA, 122 bp, Homo sapiens
aacaaaaacagtttcaccacagtaaaagatttggacgcacaaaaatcagaaatcaatgtccgactgaatgtccttaagtgaagtgttttacacatagaaattattgccctacaaactctatc

SEQ ID NO: 91942 - DNA, 122 bp, Homo sapiens
cggccttttacaaacggggccaaactgttcgctgtaacgacaatcgttattggtcagagccgcccacgcgcggcaagtggccgcccacctgagctcgcgttgtcttatgggagttttagttc

SEQ ID NO: 91943 - DNA, 122 bp, Homo sapiens
ctgtaacatttatacagcacattttgtctgaggaattcaatgcactttataaaacacaaccgtctccctgtaacagtaagtactgtaaggtgccattcactccaaggaaagccatcttggga

SEQ ID NO: 91944 - DNA, 122 bp, Homo sapiens
aaatttcagaatttggggtgagatactcttctgtgacaataataatggcaacaaaaaccacgaaatgacagctgctgttttttgagtgtttaccaaattttagaacctatgccatttcttta

SEQ ID NO: 91945 - DNA, 122 bp, Homo sapiens
tcaaaataaataaacaaacaaacaaataaactcccagtatcctcatctgtaaaatggagacgacagaacctattgcctaagttattgtggggattatatgagttagtgcacaaaagggtggc

SEQ ID NO: 91946 - DNA, 122 bp, Homo sapiens
actccctgcgagcggggccgaacatcagcatttttgaggacgctccctgtggctgtgcatcggtgatctttaatcccctgctacttgttagaggagctggatgacacttcgtgggctcattc

SEQ ID NO: 91947 - DNA, 122 bp, Homo sapiens
ttttattctgtccactcttgagctaaatgtttccagagagctagcagaatttgttttcagcgttagatccctctgctaaacaaacgggtgctaatagaatcactttgctaaataaatgggag

SEQ ID NO: 91948 - DNA, 122 bp, Homo sapiens
gcccctctcccaccccttaccgctgggggcagctcccagggcgggtcactgccgcgctgccgctcgcagatcagacaggtccggatgcccttgcaaccgcattcccgaaggacttcgggggt

SEQ ID NO: 91949 - DNA, 122 bp, Homo sapiens
cccctcatctggatcccgtttctctgagagcacacgcactcccccgtgtgaaacggatcacgacgcagccttctggggtcaggcttccctggtcttgtatctgctattctgtgacttcctga

SEQ ID NO: 91950 - DNA, 122 bp, Homo sapiens
tgggaaggaggaggcggcgacttggggactcggtaacctgtccgggcagtgaggcgagcacggggaggggaggcgagaaaaggggagggtggagcaaaagctcgtgggtgtaggccttgggc

SEQ ID NO: 91951 - DNA, 122 bp, Homo sapiens
gtcccgcgcctgcagctttccccgaagacatttggtgtcagtataaggacggcttttcctcgcacgcagcgcggctcggtctcgccgccgccgcacgtccccgcaccgccaggcgctcgggc

SEQ ID NO: 91952 - DNA, 122 bp, Homo sapiens
ggggcggggtgggggttggggatgaaactgaaactgttccacctgagatcatcaggctttcgttagattctcataaggaccaccgcccacctagatcccttgcatgcgcagttcacattagg

SEQ ID NO: 91953 - DNA, 122 bp, Homo sapiens
gacatcaccgcaacagcagagccagagctgcagcgtctgcaggtgccctggtttgcctcacgcagtaccaaattgggattgggaacccagtgatgcctgcacacatatcggctgcaccttgg

SEQ ID NO: 91954 - DNA, 122 bp, Homo sapiens
ggcttgcatcaatgactgatcaacgtagggatgtaaaggcctgtcccccttgtcccaactcgggacatcccagctccagagcttcccatggggctggccgagctcttcattgggactgcatc

SEQ ID NO: 91955 - DNA, 122 bp, Homo sapiens
cggggaataatggaggagatggtctggtctgtgctgcgcacctcaaactctttggctaaccggccaaccatctattaccccaaaaggcccaaccagcccctcttcattgcgttggtgacccc

SEQ ID NO: 91956 - DNA, 122 bp, Homo sapiens
gtcagggtgaagtgggaggagacctcaaaccccagatccacctgtgccagtgagcagaggcgccagggtggggtcaagactgccaggtggagagctgggaggcagcctgcacaggagggctg

SEQ ID NO: 91957 - DNA, 122 bp, Homo sapiens
cctctcccccctttttcctccctaatctctcatccctgtcccccggctcccgctccttaccggtgtccagagacaggatagcctcaaagcactcatgaggacaggagatgctgggcagcttc

SEQ ID NO: 91958 - DNA, 122 bp, Homo sapiens
ctgttctttctggcttcccttgccgctaggtgtggccaaatatgactaagtcctcacctccggactggaaacagaagtgatgcaaaccacctctggatctaactcttgcacactctttccat

SEQ ID NO: 91959 - DNA, 122 bp, Homo sapiens
tctgcatcgtaggcttggcccggtgccactgtcgggtacacaaagtcctgtctggggggccggttgttcaggcagagccccaggcccgagctgcctcgagagaaaagcaactgtcatgctag

SEQ ID NO: 91960 - DNA, 122 bp, Homo sapiens
tgcaggtcagcaaacatttcggagcacccaatttgtgtctggtcctcgcttattgcaggacgacccgggttatcggacacccccccttcccaccccaatcccacccaactcctgtcacctta

SEQ ID NO: 91961 - DNA, 122 bp, Homo sapiens
gcagaatttacaagcttctcatggactaggctgttctgaactcttttgttacttaatcttcgtgagaattctccaagatgggtgttatcatcatctttactttgagtgactcatggaagaca

SEQ ID NO: 91962 - DNA, 122 bp, Homo sapiens
ttctcacagcctccccggaagccccagagcacagctgtgcccttgtttattactcagggacgctgacttagaggactgcagcccatccagctccttccttgggcccccgtggctatgggcca

SEQ ID NO: 91963 - DNA, 122 bp, Homo sapiens
ggaactgatgctgtcccgccggttccctggcgcttaggctcagcaggctgggcctgtctccggaggttctggtccttctgttaatcagagcttgtctcccacccccggtgtttgctaggccg

SEQ ID NO: 91964 - DNA, 122 bp, Homo sapiens
gggggcaccgcggagcaaggtaagatccagcccccggcggatgggccctgcgcatctccacgacgttatttggcgtttttgcaacagatctgccagcgctcttcgctccctcgctctctctt

SEQ ID NO: 91965 - DNA, 122 bp, Homo sapiens
tgacagggtgaatgtggaagccggcccgatgcggggcggactggggagcgccttgggagacgccaggtgttccgcattttcaaccacagacgcttccagggtgttgttacagccccaagatg

SEQ ID NO: 91966 - DNA, 122 bp, Homo sapiens
tagcgttgggcctgcccctgttttggggcagtcgcccaaacgacgccgcacgcctagtggcgagctgaacccagactaggacacccgaagaccaaatggatagagtgagaaggaaatggggg

SEQ ID NO: 91967 - DNA, 122 bp, Homo sapiens
tacaaagggggaaactgaggctcaggaggttacaaagctgccccaagatctgcagtgcatcggaagcacaagtccagcctcctggttctcccagcccgggttaggggccgctgtcctgaact

SEQ ID NO: 91968 - DNA, 122 bp, Homo sapiens
caacgtgaagtaaggtaaaccgaatccatgccgtgaagacttttaaacgccaaactgaggcgtcggaactttgctccgcgggcatcgaggagccatcgaaggttctcagcaggtgagtggcc

SEQ ID NO: 91969 - DNA, 122 bp, Homo sapiens
ggctttgaagacggtgggagggacctgcaagcaaagaaatgcaagggcttcttctaaagacgggaaagtcaaggaaacaaattcctccctggaaacaaatgcaggaaggaatgcagccctgc

SEQ ID NO: 91970 - DNA, 122 bp, Homo sapiens
ggggcaggagttgggggccaggtaggaaagccaggggtcgaagggatcgattctaggggccgcagaggctactctcgtgctctggagaagcaccgcatctttctccggacccccgcgctcag

SEQ ID NO: 91971 - DNA, 122 bp, Homo sapiens
gtcgagattgcgccaaacagaaatacgccccttagaatcttctcacgagttcttagctgccggacttcggtgcgggaaacaaaaatggtaagactgtttctggcctggagagggcttttgag

SEQ ID NO: 91972 - DNA, 122 bp, Homo sapiens
tgtgtaacctgctacggagccggcggagcggggcgggagaggtgcgggtggagggaggcccgcctgccccaggacataatgcctctaatgccttaagcttgagcaaaggaatctggggccca

SEQ ID NO: 91973 - DNA, 122 bp, Homo sapiens
acctccgtgagtcgttggagaaagcaaacgagtgcacagccgcggagtggccctttagttcgaaggctcgcaccacctcctggaactcccccttctttccaaagcagacttcccaaaccttc

SEQ ID NO: 91974 - DNA, 122 bp, Homo sapiens
cagaaaaaattatgtgccagtgaaagtgtttggacaaaaactacatgatctcaaaatgcacgtggatgtgagacacaaaagttgacaaaatggaaaagcaatgtgtttttccactggattaa

SEQ ID NO: 91975 - DNA, 122 bp, Homo sapiens
tttattttttgagacggagtctagctcttttgcccaggctggaatccagcggcaggatctcgggtcactacaacctctgcctcccgggttcaagcaattctcctgcctcagcctccctagta

SEQ ID NO: 91976 - DNA, 122 bp, Homo sapiens
gttgtttgtagttgaagaataacatcctgctgatatccactgcaggaccgctaggacctccgttagagattaagctcatgttttgattgtagacaaaccttagtgaaattagatttacccta

SEQ ID NO: 91977 - DNA, 122 bp, Homo sapiens
cctcccttggctgcagtgcggaggtgagtgagagctggggaggaggaagggagtaagcagcgtgactcaggcctggcacagtgccagggacagacccagatagacgcacccctctgccctcc

SEQ ID NO: 91978 - DNA, 122 bp, Homo sapiens
aaagaagcgctgcacagcaccagttccgtgtacatctgtacacctcggtaggaccactgccgatgacgtgtgtgacacacggcccaggcccaccctacccacctgcatggcgaagtctgtgg

SEQ ID NO: 91979 - DNA, 122 bp, Homo sapiens
gagacggggtttcactgtgtcagccaggatggacttgatctctcgacctcgtgatccacccgcctcggcctcccaaagtgctgggactacaggcgtgagccaccacaccaggcctactgttt

SEQ ID NO: 91980 - DNA, 122 bp, Homo sapiens
gcgcgtggaaccgcgggggtggggggctcccaggaggctgccctgccctggggggatgcccggaagcccccgcgcccccgcctggccacatgctccgtgggggattggaaaaccatcttctc

SEQ ID NO: 91981 - DNA, 122 bp, Homo sapiens
cgtattttacatatagaaagaacatgtgtttcatgatgttgaacttggaaagcttagagccggtgaatgccgggccatgtgtctggtgtcagccccagcttccgcagctgcccacagggtcc

SEQ ID NO: 91982 - DNA, 122 bp, Homo sapiens
ccaatgcatggtagcggtagaatggggaagctgaggaggctcaaaaatggagcagcaaaacgtaaaatcaagttagtggatacaggagaagtggatcatcatgataaggggattaaagaagg

SEQ ID NO: 91983 - DNA, 122 bp, Homo sapiens
atgcgcgtgcggctggcggagctgcagcggcgctacaaggagaagcagcgggagctggcccgcctgcagcgcaagcacgaccatgagtacgcctggcgtggcgggggggcctgggagggtcg

SEQ ID NO: 91984 - DNA, 122 bp, Homo sapiens
gcacatcatcgatgaatgagtgtggggcaaatgcttgcacagaagtccgtgcgtgagccacgacggtaaacagaggcgctcctcttgtcctaatgtggaactccccaagctacgggaaaggg

SEQ ID NO: 91985 - DNA, 122 bp, Homo sapiens
ttttagttagtctaatatctacagaaacaatgcttatcactggtttgccgttaataaatacgtgggtaagtctctgttcgaggctgtcagctctgaaggctgtgagacccctgatttcccac

SEQ ID NO: 91986 - DNA, 122 bp, Homo sapiens
tcccagcgggccgctcgcgcaccgcgccacgtgttttctcctcccgccaatgggcggaagcgccgcctgagcctgctcccgccccccaggctcgcctgagccaatcggaaggggcggggtgt

SEQ ID NO: 91987 - DNA, 122 bp, Homo sapiens
ggcccatcctgggggcccttctgaaggaaaggaaagaagaaacacggaataaaagagaatcggcacagacaggatttcagtatgagccctcatccttcaacgcctgttaggcttctcctgcc

SEQ ID NO: 91988 - DNA, 122 bp, Homo sapiens
tcccaacactttcaacaatgccctattatgcatggtgactcatgaatgggctcacatccacggaacagcatgtgtctctctgcagtgagcacagtgctttgctgtatgtttgaactaatttc

SEQ ID NO: 91989 - DNA, 122 bp, Homo sapiens
gggagccagcaagtgcgtatgaagccccttcacatggctagtggcatcctaaggacccggcgacaattagtcatggcgtcatcgaacaccaggctggaggaggtcttggatgccacagctcc

SEQ ID NO: 91990 - DNA, 122 bp, Homo sapiens
gcgtgtggcaccttgagggtgctccgcgcgtctccgtaaagccaacgagcccctcctcttcgctggcctctccggggccttgctgactagtggtcgaagccacaggaccaggtgcgggtggc

SEQ ID NO: 91991 - DNA, 122 bp, Homo sapiens
ccagagccggaggaagggccactctgtgacaccgtgagccggacgtctgtcctctggagccggaggaagggccacttgtgacaccgtgagcccggacgtctgtcctccggagccggaggaag

SEQ ID NO: 91992 - DNA, 122 bp, Homo sapiens
cccttggctttcatcacccacaggctagcgccaactcccagccaggtccctcctctcatccgcctcatcatgtctgtcatattttactggaaactcattgtttggagtgttttgggctttct

SEQ ID NO: 91993 - DNA, 122 bp, Homo sapiens
ccaggtttctgcagcgtctggatgagcgtgcacgaagcacacgcccgaaaatcctgagcacgtggctctaccgagggactggaagcgctccaggcctcgttttcccgctggagcgattacac

SEQ ID NO: 91994 - DNA, 122 bp, Homo sapiens
tctggggcaccctccggatgtagtgtgtcggggggtacgcagtctgtgggcggcagggaccgggtgtgggcaggcatggggctgtgtccccacccacgccactccctcgcagggccaagcgc

SEQ ID NO: 91995 - DNA, 122 bp, Homo sapiens
tccttgattatgcaaaatgacttgggggaaatccctaaattcattgcagcaaaatgcaggcgtcaaaagaaggctcagaacacatactaatgtcaaaccgcggtgcacataacaaaggcttg

SEQ ID NO: 91996 - DNA, 122 bp, Homo sapiens
ggaaagagagagagagagaaaggatgagagttaatgagaaagagaggcagagagagacgtcgaaccagctgggtcttcaggctccgtggcccgggcccttcagaaagtgccgtgagttgatg

SEQ ID NO: 91997 - DNA, 122 bp, Homo sapiens
cgagcttctcctcgcgagagacttagtgctcatgctcgctgcaggggtcggaggtcagggcgagcgtctcgcaggccgtaggaggaagatggcggtggagtcgcgcgttacccaggaggaaa

SEQ ID NO: 91998 - DNA, 122 bp, Homo sapiens
cgtgttcaccattataaaaccaactcgagatttgtccagaaaaggtgtggcagtttcaggcgtatttttattgtaccatgttttacatggctttgcagccattgaagtttgaacaatgccaa

SEQ ID NO: 91999 - DNA, 122 bp, Homo sapiens
gaccccaggaacccatgtggtggggccacccagccctcccctcccccaggagaacacacacgctcaggccacctctgggcctctctttattgagggcactgggcccaggtcttccttcaggg

SEQ ID NO: 92000 - DNA, 122 bp, Homo sapiens
ttaccttttgccttttccgcagggtccagttcttccagagcaaaagctgtatctgtctcacgaagcccatgctaatgaccacacgaagaccagattggtcagagctgaggcccctcagacag

SEQ ID NO: 92001 - DNA, 122 bp, Homo sapiens
ttgtacacacaacaagaaagtccatctttttatcgccatggccacccccactcccatccccgccacagtacggttgaacatcctggcatggctttgcagattgccagctctcattccccctc

SEQ ID NO: 92002 - DNA, 122 bp, Homo sapiens
tgcaaactacaagccccagaaggcaatgcgccagcagtgatgggagtgggcgcggaggcgcgggctccccgactacgcctgcgcagcggggctgagttggagaacgtcttagactacaagtt

SEQ ID NO: 92003 - DNA, 122 bp, Homo sapiens
tacagtccaaagtccctccctaaatgattggcctcacccacaatgactgggtggagccaccgaaagaaaggcatggagcaacacttcttcctgcatcgcccctcaaaagagcagatcccagt

SEQ ID NO: 92004 - DNA, 122 bp, Homo sapiens
gcgccaccctgtggacatcagcgccatccccgagcagcggtggaagctggtaggtccttgcggtcgaggcccaccctgcccgtgcctctagggctgccggccatgctcggctccccacctgc

SEQ ID NO: 92005 - DNA, 122 bp, Homo sapiens
gcacagcatggaggtggcccagaatggcatggccaaggaggatggcactggggagtcagccggtgggtcccctgcccgctccctcacccgcagctccacctacaccaagctgagtgacccgg

SEQ ID NO: 92006 - DNA, 122 bp, Homo sapiens
tggcgcgccgcccggggagggcgggagcagcgtcccgggtgcccctgtgaggatgagcgacgagatgactggagggtccctgaagacctcactagggtgcccccagccggtccgctcccagg

SEQ ID NO: 92007 - DNA, 122 bp, Homo sapiens
cctgatggagaacccgagacgggttccctccccccactcccaccatctctgtccccgccccgagccactcctggcttcaacaggttctccccagaacccaaacttgggcgaagtttcacccc

SEQ ID NO: 92008 - DNA, 122 bp, Homo sapiens
aatgcgccagaggggagagcagcgcaggcgcaaggccgctgttcccgggctgccgcgggccgctcacccattggaagcgagtggtcagcctaggtgacgaggcccttcacggagtgacccgg

SEQ ID NO: 92009 - DNA, 122 bp, Homo sapiens
cctgtgtcaaaaaaacaaaaacgaagatgtaaaacaaaacaaaaaaagttcgtttgtaaccggctgcatcttcccaaatggatggccaaatgggacactgcacaaccctgagtcagaggtga

SEQ ID NO: 92010 - DNA, 122 bp, Homo sapiens
cacagactccatcaggaggcccacccactagtggcttgggatgcctgaactgtaaacccccgaagctgacacatgggtgctcccaaaactttgcatgtctccctctctcctctaccttggct

SEQ ID NO: 92011 - DNA, 122 bp, Homo sapiens
ggaatcaggggctcctcattccccaaaggagcctctttggcaagcaggcacgtgggtctccgggctggtgcacatcacagggcagccagcccaagtgccatcttgatgcccagtcttcctca

SEQ ID NO: 92012 - DNA, 122 bp, Homo sapiens
ccgccggcgttattaagggcgcaccagtgatcagctcaacaccgtgctcaccaaagaggccgaccgggcctccctgaagtcagtgtccgacaaatagggaaacaaagcggtttccggaaggt

SEQ ID NO: 92013 - DNA, 122 bp, Homo sapiens
tagacgaggtcaagtcgtccctggtcaacgagtcggagaaccagagcagcagctcggactcggaggtaaggaagcaccgcggccacccccgggggatcccggccctgcgtccgctcacccgc

SEQ ID NO: 92014 - DNA, 122 bp, Homo sapiens
agtgatgacacatctctccaaactgatacggggtcagctaaggggacagaatatcggagacggccccattccggaaaatgctggcacatgcagctcagatccggaatttgactgtttattcc

SEQ ID NO: 92015 - DNA, 122 bp, Homo sapiens
cacttaacacctgagctcatcctgttcctacttcagttgtctagtgctcccttcgtacgacggtctttctccttggtctgctctgcattccccgcgtcccgcgcctcgctctcccagtcgcg

SEQ ID NO: 92016 - DNA, 122 bp, Homo sapiens
tgttgctgctgtgttcttggtattggggctttttgcaagtgtactcgtttagtcattcaacgcacatcttagggtctccctaatagctgtaggcccaggtgctgagggctgggcagacagcg

SEQ ID NO: 92017 - DNA, 122 bp, Homo sapiens
tttgatcagctgtcacacctggcgataatggcatcagagagagataccctgcgaggatgccgtgagatgcgccaggtaaagcacctggggtcagaaagccaccccctcctcctcttctccgt

SEQ ID NO: 92018 - DNA, 122 bp, Homo sapiens
attcctgctccttcttagaaattcggcataagcattgctccctccaaaagccttctctgacgcctgtaggcctcaccacattcatatccatgttacggaacttagcacactgcaacactacc

SEQ ID NO: 92019 - DNA, 122 bp, Homo sapiens
ctagctgtggaatcttgaaccactgatttaacctgagtgcctcatttcacatttgtagaacgagatgactaccatcacctgtcttataggagagtaccaaatgcatataaagtgcctagcaa

SEQ ID NO: 92020 - DNA, 122 bp, Homo sapiens
cggcggggatgaggtcatgccgagcgaaaaaagcccctgacgtcacctgcagccaatcagcgcgcgcggctcgggggcaggtgacgtcagcggagcccgggctcggggtgaagctgaggcgg

SEQ ID NO: 92021 - DNA, 122 bp, Homo sapiens
ctcccagccgtggtgacagccttgtccccgggccccttctggggtggccggcaggtctaacgacaggtccggcctgacactgcagcctccctgggcctctggattcttccctccagttacac

SEQ ID NO: 92022 - DNA, 122 bp, Homo sapiens
ggcggagccgcctgaagaggctgtggcttaagtctccgggcaggacttcagtgggtggggcggggcttaccttagaagggcgcgtgatccaaatgagtagggatttgtcaggcagggatcag

SEQ ID NO: 92023 - DNA, 122 bp, Homo sapiens
tagacgtttcgacttgcattaaaaaaaatgtattgataatagaattctaagttgtgtgagcgttagagaattaaagttcttagggaaggaaaaaagcaaaacatgctcagataatcaagacc

SEQ ID NO: 92024 - DNA, 122 bp, Homo sapiens
aagaaaacccaggcaagatcccgggcaagatcccagcactgccaactgtcatttgtagaccggggataggaacacctgtctcacagattgttacacaatagcgccggtgaagcgcttgtcac

SEQ ID NO: 92025 - DNA, 122 bp, Homo sapiens
agattaacgatggggttgttgtgaagatttcttgaagatagtggatgtcaaggtcacagtcgtgctgcagacattctcattaccatgcattcctggcagggctttgcttaggggcctgagga

SEQ ID NO: 92026 - DNA, 122 bp, Homo sapiens
cacgacccaatatctccagccattagcttctctctgcttgatcactcttgacccaggaagcgttctgaaataggaaactatgttgcaggaccaagggagccttagtctccctccctgtgagg

SEQ ID NO: 92027 - DNA, 122 bp, Homo sapiens
tcactgtgcgctgtggccttactagacacgtacgaacacacacgggcgagaagccatacacgtgtaaggactgcgggaaagccttctgtacatcctcgggccttactgagcatgtaaggact

SEQ ID NO: 92028 - DNA, 122 bp, Homo sapiens
aatgtcttcccccaagatcacccagccgagaattgagtcgagtctgctcaattctaaaaccgagtcctgtcaccagttccttatcttcttcctgggagtaaggcgtctatttctgcagcagt

SEQ ID NO: 92029 - DNA, 122 bp, Homo sapiens
aggagatgccacactcccctgcctggggtgctggcggggggaatggagggcagcgccagccgtacctgtgatgtccagctgctcctccatgctctgcatgtagagtgggcatttctgctgga

SEQ ID NO: 92030 - DNA, 122 bp, Homo sapiens
ctgctactccccaccccaggcacccgggtttaagtggtctaggggccccgagcctcggtgcggcttaaaaccagactgactgagggcgtgggtggagacaacaagtactgagaagtggtcac

SEQ ID NO: 92031 - DNA, 122 bp, Homo sapiens
gtttggggccgagaagtttgaggccgacagagaacaaagtggagaggtcgtggctttcagcgtgctcctgggcgacctaaacttcgataactgctggaaaggtccagcaggagaggagggcg

SEQ ID NO: 92032 - DNA, 122 bp, Homo sapiens
gagaaccactatttttgtttcacgtaatacacagtctctaataagtgcttccaaaacgtgcgttgtagcatattagtctccaattttataaagaatagttttgctcaaggtaaattaacact

SEQ ID NO: 92033 - DNA, 122 bp, Homo sapiens
gctacctgtaaaagaaaatacattcaaatgggcttaaactctgaagggaccttagcagctcgtgtgattgagttgcatgccagctccatatcttggactagcatctgagccctatatccata

SEQ ID NO: 92034 - DNA, 122 bp, Homo sapiens
cacgttttcacgtaggggtccgagtagccgttggcgtccatggcggccaggtgggcgcaccgcacgatgcctaccagcaggccttgcttctgtgagctgtacttgagggagatgaggatgcg

SEQ ID NO: 92035 - DNA, 122 bp, Homo sapiens
aagttttattggaacacagttacacacatttttctacatattgtctgatggctactgtcacgccacagcaatgctgttaaatagtccagacagaggcggtattgcccgaaaaacctagaata

SEQ ID NO: 92036 - DNA, 122 bp, Homo sapiens
gaattaggaacatgacctgcatttaacaacaaaaagagtttttgttaattagctagcacccgctcatcagcaaggcctaaacatctgccagtggaatctgagaagtctcttctaaaagttga

SEQ ID NO: 92037 - DNA, 122 bp, Homo sapiens
gcggaattgcctccccaccgcgcatgcgcgcagcccaggtgatcctgagcctcttaggttcgcacttacagagcgcctcaggcccacgggagccagcctaaagcaacagggctgcttgaaag

SEQ ID NO: 92038 - DNA, 122 bp, Homo sapiens
ctgctggcgcgcagtgtggcctccagggggcagcagcagcccacataccacaatggccctcgccctggggagctgtgctcagtggtggcgtctgagagcgggctccacagccttgcagggct

SEQ ID NO: 92039 - DNA, 122 bp, Homo sapiens
caatccgggtcttacatttaccctggctccagagcacagaccttcctgcagttgggccggcgcgttgcggcgttgaggagctgcggcgcgcccctctcaccgcgattgttcacttgccaggc

SEQ ID NO: 92040 - DNA, 122 bp, Homo sapiens
agtttggtgcagaggcgtggggggcgggacgcgtctttgccattctgatagcggggaaagcggtgagaatcgaagtgaggagccgccagaggagagctgaggagaggagggggaggtcgacg

SEQ ID NO: 92041 - DNA, 122 bp, Homo sapiens
gaaaagatgagcccacggagggtgtctggaataaacggggaatcctcccaccagcacgcccgcctctgctgggagcatgaggcagcacgattctctgggcggcagcttgtctccaccgcggg

SEQ ID NO: 92042 - DNA, 122 bp, Homo sapiens
agaaatgaattacaaggaaataaacatttatgagtgcttgtaattcagtagaatacaaatcgagtgtaactttcaatttaagaagtttctgtatatttatttctggaacatagcaattctac

SEQ ID NO: 92043 - DNA, 122 bp, Homo sapiens
gggacagggcattaggagaatagtttcccttagctctaacttcttctccaggcagacctccgggcttagcccagccagcattgactgacttgcccttcctggaaagcattaatcactgaagg

SEQ ID NO: 92044 - DNA, 122 bp, Homo sapiens
gacttcgcgctcgactttgcgatcggggttagttgctgtgtgcagtgtcccccaagtctgcgggaggagcggaagggtataggctccagtcctggggttgggcccggctccgtgccccgaga

SEQ ID NO: 92045 - DNA, 122 bp, Homo sapiens
gcgcgaagccatggcttttgggcccggggacggaccgtagcgcgtagccggaagcggaggcgtggaggcgggtctgaggtttggtgactgcggggcaggccgggggcagctgtctgtctggc

SEQ ID NO: 92046 - DNA, 122 bp, Homo sapiens
atgccaacagaaactcatttcagaaacaagaagcaagccctgagcagttggagacgaaagcgttttctccgagattctctttccgctacttcggggggcgggtggtgaaaggctccgtaagg

SEQ ID NO: 92047 - DNA, 122 bp, Homo sapiens
ggcccgggagggaagagctgactgggagggtcatgctgggctgtgccatggtcagccgcccggatgatggcgcttacattctgcccccagttcctctccatttctcagccctcgacccgtga

SEQ ID NO: 92048 - DNA, 122 bp, Homo sapiens
aaggacaactgggttccgctttccttaaccctacaccctttagctggatgctgtcagaggcgatggagaaacgcaaaggtgcgttaattttactctagccagagtataaaagaactgcccac

SEQ ID NO: 92049 - DNA, 122 bp, Homo sapiens
acccagacgaaggaagtgacatcaccttcctgggtctttggagaggggctcattattggtcgcttgtgtgcatgtgctgttgcctaggagacaggacccgcccaactcccacccagatagcc

SEQ ID NO: 92050 - DNA, 122 bp, Homo sapiens
gccgagggacgtttacctggagagctttgtgtccacaacactaatccttagacactgcttcgttcagcagctgccgtcagtcgtgagggcactagtgtggggatgggggcgaattcaggagc

SEQ ID NO: 92051 - DNA, 122 bp, Homo sapiens
acttggaatgaacatgttggaaataaacgctctcattttgcaggcagataaactgggaatcgtgcgtgtaaagcagcttgctcaaagtcttataactatgaattggaaagtcagattcgagc

SEQ ID NO: 92052 - DNA, 122 bp, Homo sapiens
cagaagggagcgagagccaggcccagggagcggagtgcgtgggtgcagctggagggcaggcggctgtgtgtgtgccaagtgccgggaggacgaacaagactcaggcctgactcatctcatat

SEQ ID NO: 92053 - DNA, 122 bp, Homo sapiens
gggtggggcctgagattctaacattctcgctgattgggctgatcagagtcccatacatgacgttctcagaccttcccttccagcgcatcagaatcagggctcgttaaaatgcagatcgcggg

SEQ ID NO: 92054 - DNA, 122 bp, Homo sapiens
ccttgtatctcctaataagttaagtgagattatgtgtgggtcaagacagtctgaaaagggcgtatgtgtgaatatatgtgtatctatgattgcatatgtgtctctggggaggagtgtgtctg

SEQ ID NO: 92055 - DNA, 122 bp, Homo sapiens
atgaactaagataacacacagaaagtgctgggctcatcctcacactgagcaggaattctgcgttccaagctcctgcaatttccattttctcacccagcacacacagttgccagtcctccctc

SEQ ID NO: 92056 - DNA, 122 bp, Homo sapiens
tagcaattctgctgttttgtcataccctatatgagggttgagagctgtcaccagcattagcgactaattcattagcttcttgatcctttctttattggtccggattcccactatttagtttt

SEQ ID NO: 92057 - DNA, 122 bp, Homo sapiens
ggcgggccaggggccggggccaccccccgacgcggggcggagccgggtcccggagccgcacggccaggccaggccttgaacctgagctcccaccctctgggtcggcggaggagagtgggggt

SEQ ID NO: 92058 - DNA, 122 bp, Homo sapiens
cagcaaaacccctttagcgcgagtgtgggattgaagggcccagatttcccaggcagaggccgacgggaaggcggggggagagggagcgagcgagaggagagggagaggcggaggctttttcc

SEQ ID NO: 92059 - DNA, 122 bp, Homo sapiens
ggggcgattgggagggggttctggagctcatgcctggggtcggcccggcgggggtgaccccgcgccctcgccggtgcaaggagaacagctggttcccgccggggcagggaagcgtggacggt

SEQ ID NO: 92060 - DNA, 122 bp, Homo sapiens
gcagaaggaggaggcggcggcgcagggcgcagggcgcagcgcgagtccgggaccagccggcgagaaagcgctctgcaaacttctgcgctgcgccggccggcagcacagctgggtacccggct

SEQ ID NO: 92061 - DNA, 122 bp, Homo sapiens
catggaaaacgttaggagagctcatataatgaacggcaatagcaaccccctatcttgaaacgcgctctatcatcccactgaaattctaccacgtggaataatgcttggagggtcagagttgt

SEQ ID NO: 92062 - DNA, 122 bp, Homo sapiens
ggtttgcaaaatccagatttatatatcatggacctttgggggaagttgcttgaggttcatcgttgccataggtcattacagctgcattgcttatatatgtgcccatggttcttgatcaagac

SEQ ID NO: 92063 - DNA, 122 bp, Homo sapiens
gccccgcccattgcggtcggcgtcccggtgttcgggggcggggcctcggcggccaatgagcggcctcctgagcggcggccccgccccctgctcgccgtcacctgcgcttccgctggggtccc

SEQ ID NO: 92064 - DNA, 122 bp, Homo sapiens
catgagtaggggcacccacagtcagacaaacccaccaccaccatcagcctcggacggccccgttcaatctttaccaatgcagttcccccagtcacggccggcacgtgtcttcctgcctctcc

SEQ ID NO: 92065 - DNA, 122 bp, Homo sapiens
ctgagggcggtgagcgagggcgccaaggcacaggtggggcgggagtcgagcgcggaggctcggggggcgggacgcggggcctgggagcggccagggaccgcggcagcgcctcagtgccagcc

SEQ ID NO: 92066 - DNA, 122 bp, Homo sapiens
gaggtcctctcttgtgtgggtgctggcataacactggccgtatacaatggccaagcaaagcgacattctgtcctgctgtgctttacacgtaaatagagaatggatgaggttctcagcgccca

SEQ ID NO: 92067 - DNA, 122 bp, Homo sapiens
gatgtggaggtgacccgatgaaatactggcccggagatatgaggcatgaggcggggagcacgagggtgtcgaagggccaaaatgtggtaagagaagccggaggagtgtgaggacaggtggaa

SEQ ID NO: 92068 - DNA, 122 bp, Homo sapiens
ggtgatgcaccccccttggcctcccacagtgctgggattacagttgtgagccgccagacccggctgacattaagtatctttgatggcatctggttagaacagcagcaaactgtcaaaggtgg

SEQ ID NO: 92069 - DNA, 122 bp, Homo sapiens
gccatctggtcaaccatctggtatcttctctgacacgtcttgcttaaaacccaaccaaaacgtcaaaaggatcatgaggccctgctttcccggtctgtattcatactgaaaatcaagatcaa

SEQ ID NO: 92070 - DNA, 122 bp, Homo sapiens
acctggggccagggtgttctgacagactcactctcaggggctggatgcccttgggcaccacggcgggtgcctagcagaccgtgctgtacaccatacccctactctggccatctgtgggctcc

SEQ ID NO: 92071 - DNA, 122 bp, Homo sapiens
tcttgtcttacgtgttgttagaaacaactaggtgtggtgttctcagttccctcttcccggcgccccgcctcctccttcgcgccccgcctcctccttcgcgccccgcctcctccttcgcgccc

SEQ ID NO: 92072 - DNA, 122 bp, Homo sapiens
ggggaaggcctcgggctcatagttctagaggctcctcaagcttcagaggactgctccttccgcctgaactagccacgaggagactacaagttccgttgtacaccgcggctccggctgcaaaa

SEQ ID NO: 92073 - DNA, 122 bp, Homo sapiens
gagagccaccggggcccgctcgcgcgcctctgagaggctgtccgcgcgcgcgcgtgtgtgcgtgagtgtggatttgccgggactggagctggaaagttcaaactaaacgtgttgctctcgcc

SEQ ID NO: 92074 - DNA, 122 bp, Homo sapiens
gcagctgggatcggatgacatgaccagtgggacacccccatctgcagagggagacccaggcgagcagagttgatagcaggcatggatccggctcttagcacttcacccgccagctcttattt

SEQ ID NO: 92075 - DNA, 122 bp, Homo sapiens
ttagatttgtacctgagccacaggaatagtgatcatcaccaaaagatgaaagaactctttcgtaggggagaaagataacccatccctgtttatgggtaagagggttgcattatatcaggaac

SEQ ID NO: 92076 - DNA, 122 bp, Homo sapiens
atgatgggcaattgcttgtctttttcgagccttgatttctcatctttaagacaggagtgacgcggctgttgtcataattaagtgaggaaatgtagttaaagcaccgaccaccaagccctaaa

SEQ ID NO: 92077 - DNA, 122 bp, Homo sapiens
caggcatgcaccgccctgccttttgctatttttccccggctgcttttgactttctgggctcgctcaatgatttgaacctgggaagcggacgttgcattgagctgagatcacaccactgcact

SEQ ID NO: 92078 - DNA, 122 bp, Homo sapiens
cttgcctgggacgaaaggccccagactcagctgattcctccagactcttcctgtctaggacgccaaaaacatggccttcctaaacccagccttggcgcctcctgcacagcccagagacccag

SEQ ID NO: 92079 - DNA, 122 bp, Homo sapiens
cgcacggtcgccaggagcccggggccgagcaacagcagccaagtgcaaagtgtcaggaaccgcgccatggactgcgaggagagagggacgcgtgcttcgagcctgcctgggcgcagaacggg

SEQ ID NO: 92080 - DNA, 122 bp, Homo sapiens
ccgctgtgacccccagacgtgcagacctgctgagggtccagcgctgcggctgggcggggtcgaattgtgttctgggcaatgctggtgtcacttaaagtgaaatacacaaggggcggacgggc

SEQ ID NO: 92081 - DNA, 122 bp, Homo sapiens
tgccaaattcctgattcctggaggacagagcccccctcctgctccaaggccaggagatggcgccactggacagtgagtctgggattcctagcacacacttgtgattgctggtccaggaaaaa

SEQ ID NO: 92082 - DNA, 122 bp, Homo sapiens
aaaagatggggttggggtacggcgcgtagagatgacgtcgggttctacgcgcagtggtgacgtcacgggagcgccggcggctgagaatccgcgttgttccgtgttgggggcggcatggagcg

SEQ ID NO: 92083 - DNA, 122 bp, Homo sapiens
acacctctaggtgtaggcaagtccactctgtgatgttcatgcaatgatgaaattgcctaacgacaacgtgtctccctctttaaatcaagcatgactggcacatttttcactgacaaagaaaa

SEQ ID NO: 92084 - DNA, 122 bp, Homo sapiens
tatttcccagaaggtttactttctctttcaagctctgctggcttcttcctgccccgcatacggccaggaaaaaagaaaagcactgccttttctttcctgccttctctaaaactggggagatg

SEQ ID NO: 92085 - DNA, 122 bp, Homo sapiens
ccgggaggacagcagctccgggctgcgggcggagatgctgcgtcatggtgccaacatggacgccggccttttgtcctccttcgcgttgccagcgcaggcgcgccccggagccccgagaagcc

SEQ ID NO: 92086 - DNA, 122 bp, Homo sapiens
ggaaggctgcctggcttgattctgtagctgccggcccagaactgagctccttctcttccccgtacacagctgcttttggccctcttgacggttgtaccaccttctttcacttgtccccagtc

SEQ ID NO: 92087 - DNA, 122 bp, Homo sapiens
ggagataataaccactgtggttgcctttgaataggcaggcagaagagcttacagtagcaacggctttttgtgtgactactaccgaagaggattgaaaagataccatgtgccctggttttgtg

SEQ ID NO: 92088 - DNA, 122 bp, Homo sapiens
attgtaatagtgcgtgtttcacagtgtgcctgtgagcgttctgtgagataattgagatgtcgatgctcatcaccgcccatcatcagggaaggagagatgacctccaaggttgctctttggcc

SEQ ID NO: 92089 - DNA, 122 bp, Homo sapiens
ctttgcacgcgagtcctggcgccgagagcgttccgcgaagcctcccctcccgctccgcagcgctgggcggtctcagcctcggcctcgggctcttatccagtagacagggtccgccccgcccc

SEQ ID NO: 92090 - DNA, 122 bp, Homo sapiens
gcgggcggtgggaagcggagagctcggggcacgcgctgccgtctggaccgtggctctgctcgctgtgcagcagccttgtaccactacctgtttgttccttctgagggtcatgagggaaggat

SEQ ID NO: 92091 - DNA, 122 bp, Homo sapiens
tcctgctccccaagttttccctgttttccttgttttgaattctctagcacccagggaggccggccagagactgacaagggcacttagggagtggaaatgaaaaacaaaggcacctgcagagc

SEQ ID NO: 92092 - DNA, 122 bp, Homo sapiens
cggtcccggacgctagcttgggaaggcaggccgggggcccagccatcgatggcaagtgggcggcgcggcctccgcagacaaagctgggcgccccatcgaacaggaccctccgccccacgcgc

SEQ ID NO: 92093 - DNA, 122 bp, Homo sapiens
cggattccgggcgtcggcgtacaggatcccagagaaggcttcccgccggagcagcggtcgcgggcggttcacctggctgcgcaggggtcccagatattcagagaagagctgaggctcagcct

SEQ ID NO: 92094 - DNA, 122 bp, Homo sapiens
cccctaccagtagtaagaggccgaatatgcaccagccgatcaccagctccgccgaggccgcgccagaagtcgccatcttcgcttccggtccagaccaacctgagcgcccggggtggggaaag

SEQ ID NO: 92095 - DNA, 122 bp, Homo sapiens
ctgatggctagtattaagcgtccaggccacacaagcttccttgagttcctagcaaacaggcgttcacatcattaaaagactcactgaccctattctcccagttgcagataaactcaatagac

SEQ ID NO: 92096 - DNA, 122 bp, Homo sapiens
tccagcccttctcacagaacctggggtgtttcaggtcccatctctcctcccagaccagagcggctcccggcatcccgccgtcctgctcacagtatcttcacctcaccacttccacatagtcg

SEQ ID NO: 92097 - DNA, 122 bp, Homo sapiens
cgccacacagcgcggcccccggctgcagctccggctgggattggaactgcggaaggtaggcgaagaactctgcaagtcgcgcacacgccagtagaagccgtgcgcctgtgacgtcagggggc

SEQ ID NO: 92098 - DNA, 122 bp, Homo sapiens
tctctctgtttgggtcacttggcaggtctggtttcagagaaagtgtaagaactaagcatccgtaacctttttgaatgcatgcactttgcaaagtaacaactgcagaagggacaaaggaaaaa

SEQ ID NO: 92099 - DNA, 122 bp, Homo sapiens
ccgtgttaagcaggggcagtaaagggcagaaaaaactccccacccagaccaccgtctgcgcgtagatgagccccagcacctcgtcgggcacctggaactcctgggtccccgccagacgaccc

SEQ ID NO: 92100 - DNA, 122 bp, Homo sapiens
caacactcctgtcgcacgtccttccaggggggtcagggaactcttcctttttcaccaggacgagcacagatctgaagcagcaaagagccagttgtttattacattgaacaatgtttcacact

SEQ ID NO: 92101 - DNA, 122 bp, Homo sapiens
gcgcgctcattggagcctcggccgcccggccctgcgctgcgcgcccggccccgcccccgccgccccggcgcgcgtactcattggaccacgtcccaggccccgccccctccctttgccagcct

SEQ ID NO: 92102 - DNA, 122 bp, Homo sapiens
gccgccccctcattcatccccactgggctccctttccctcaaatgctctggggctctccgcgctttcctgagtccgggctccgaggacccttaggtagtcccggtctcttttaaagctcccc

SEQ ID NO: 92103 - DNA, 122 bp, Homo sapiens
caggtggtgtgggcgtgggtggcatgggcgcaggcggcaagggcatgggtggcgtgggtgcgagcaatgtgggcacggacggtgtgggcacaggcggtgtgggcacaggcggtgtgggcaca

SEQ ID NO: 92104 - DNA, 122 bp, Homo sapiens
gctccctagggacgggcctccctcccggccttggcccggggccgcctcctccaggtagggcgctggaaaccaggcggtctgccggtcttcgttctccaccagccaccagcctgtgcgcaaga

SEQ ID NO: 92105 - DNA, 122 bp, Homo sapiens
aggcgttgggaggctggggtccgggtccagaccactcaggccagcataaagaaagcctcgcgtgttgggacccaaatcccggttgagggtgtcgctgcagttgagcccttggctctctgaaa

SEQ ID NO: 92106 - DNA, 122 bp, Homo sapiens
accagataattagtttagtgtctttcatagttattttctattaaaacttttctggaaacccgacatctgttaccaccaagagacacttgtaacctcctctctccctgctaacagtgctgtcc

SEQ ID NO: 92107 - DNA, 122 bp, Homo sapiens
gggcccctcgcgtcccccttccctgtcacccgagcttcgtttgtgactgaaactctgctgcgtctgtcatcttggtgtcctctatgaaaaccttcccagagctcttcacactccacacgtgg

SEQ ID NO: 92108 - DNA, 122 bp, Homo sapiens
ctcgggctcaggcccgggccggagccggtggcgctggagcgggtctgtgtgggtccgaagcgttttactcctgttgggcgggctccgggccagcgccacatctactcccgtctccttgggca

SEQ ID NO: 92109 - DNA, 122 bp, Homo sapiens
tctggaccctgctgactttccccaggagcaaattctccttggaaatgttgataagacacacgttgccagtgcacaaatcatacacagcacgaatttcgtctttgcacccaccaagccccaag

SEQ ID NO: 92110 - DNA, 122 bp, Homo sapiens
tgcccggctctctcctacttccttgctcgctttcccctcggtggcggtcacgttcacttacgaaatcacccacacccacttgaagggtgcggagatggccgggatccaagcgcccgggaggc

SEQ ID NO: 92111 - DNA, 122 bp, Homo sapiens
tctataggaaagtttgtttttggtttcaaacatgcagaaaacccatttataacctgggaacgcctgaaatccatattatttttccttctgagtttaaaacagtttttagtagtcagtatcag

SEQ ID NO: 92112 - DNA, 122 bp, Homo sapiens
cgcgacgtagccggctggtaactgaagcgccttgactttttgggcgtggctcccggagggcggggtggtgggggaagggaaggatggagctggagcatgcgcagtgcgcacagcggcgaacc

SEQ ID NO: 92113 - DNA, 122 bp, Homo sapiens
agtaatgtgctggaaggggctaagtcaaaagaacgcacttgcatcctgtttgtgcccaatcgagtccagcgccgccagtggacggattctatttggattagagctgtgtgccccggggagcc

SEQ ID NO: 92114 - DNA, 122 bp, Homo sapiens
atagggacctgctttccagacctaatctctgtccccctcctctgcagcaattcctctcctcggcccccgcagcctatcatttccagctctaaatgggtagagggtgaagaaaagatacctag

SEQ ID NO: 92115 - DNA, 122 bp, Homo sapiens
gcacaagaggtgggttcttaaaaaagtcacccctggatgggaaagctcttcatcttctgccgccttcctctgcctcccgctgctgccgaggagagagatggagaggaccggggctatgccgg

SEQ ID NO: 92116 - DNA, 122 bp, Homo sapiens
agccattatgatttaaaacctctacttaaaaaagcatttaccacaagtctggccttattccggacagggcactctgttcttcgttctaacgctcatgatcccatttattaagcactataacc

SEQ ID NO: 92117 - DNA, 122 bp, Homo sapiens
agccaccacactgcggggccgggctgtcgcaggagcgggttcgacagaggcaggatcccacggcgctgccatctgtgtgcgtgcaaggcgtccacggagaccacacaccaaagtgcccatcc

SEQ ID NO: 92118 - DNA, 122 bp, Homo sapiens
gtttgcactcagggctgtgaggtcatggaggccagcattgccttctcatggcaggtgtcccggagtccctgaatctgtgggtttcccccaagccagcacctttgctgcaaacctctgagttt

SEQ ID NO: 92119 - DNA, 122 bp, Homo sapiens
cgggggatgagtaggggcgctgacttttaggaccagccatttgagtcaagctggagacgacgtcttagaacctaggatgagtctcgtttggttttagtctgcaaagctcgtctgcatcagac

SEQ ID NO: 92120 - DNA, 122 bp, Homo sapiens
gccgaggtcagcagcagtcagatgcgggatgaatgcctggcccaggcggcccccactcaccgcccgagggctctggaactctctttccaaataaagaaaaagtgcggcctgagaggaccagg

SEQ ID NO: 92121 - DNA, 122 bp, Homo sapiens
cgcttactatgggctcatggcaggccggcccaccagccacaactagggaacagccaagcgcgtttaaaagccaaaggtagaacttctgcagctgcacagtttctgagtttccatttaacaag

SEQ ID NO: 92122 - DNA, 122 bp, Homo sapiens
cggaaacggccttccccgcgtggggaacaatggcgttattttggagtctgcaaccgcgagcgcttcaagctctttgattattttcgaggagtgttaggtgcgtggctaactcccgcgttttc

SEQ ID NO: 92123 - DNA, 122 bp, Homo sapiens
tgcaagtgatgggctggggcccctccgccctccttgtcaagcagtgtccacggataagggcgtcccggggcgggggggggacgtgggcgaggagatggtggagctgggggaagggacaggga

SEQ ID NO: 92124 - DNA, 122 bp, Homo sapiens
tgactctcccggtggcagtgaccaccgcctgcaggggcctgctggcctcccttttgcacccggctcaggtgcctcctggccgagactccttgaggccactgtgtgacacacaccacacaccc

SEQ ID NO: 92125 - DNA, 122 bp, Homo sapiens
gatagacaagaccctagctcttgagccctttaggctacatgtatagatgaggaaacataacgtgacaagtaatcagatatgaacagggatacagaagagggacaatgagtagaaaaaaaacc

SEQ ID NO: 92126 - DNA, 122 bp, Homo sapiens
ccacctaccaagcgcccagtacagcacctggcacagtgcaagccccctgcacaggggaggcgttcttgtgatctgtgcctgcgtcgggcctttcttcctcaagggcggggtaagaccacccg

SEQ ID NO: 92127 - DNA, 122 bp, Homo sapiens
tgcgcagccgagcatcaggctccgcgccggggtaggcgagcaggtccccagccccaggcccgcagctgtaggccggtgaggaacagctctgctagagaaagcgcaccccacccccaccccca

SEQ ID NO: 92128 - DNA, 122 bp, Homo sapiens
cagctgctgaaactgctgtcacctgaaggcagcctcatctgcagcaactgcgatcagggccgcaactccggggccgactttgcccggcctggcccagcagtggggacttgcgggcccgagct

SEQ ID NO: 92129 - DNA, 122 bp, Homo sapiens
gggtccctcggtaatgaaattatgctaatttgcattcagcaccaccaggcatccatcacgcgggaccagccgggagcggccggtgaggcggcgtgaatgcgccgctaattatcaccgaaatg

SEQ ID NO: 92130 - DNA, 122 bp, Homo sapiens
cctcgggagcctcggtttcctgccagtatcctagccctggatcctctcttccctgccaaccgacatcatctgggaccacccaccctggctggcatgaaatgagatgcgagtgggtagcagtt

SEQ ID NO: 92131 - DNA, 122 bp, Homo sapiens
acaaaccttaactactgacgcaaggagtcaaggatctaatcccaaagcctctgcctggttcgctgcagatggatgtccgcgaggacgccagccctccgcctcccgccgggtccctgaacgcc

SEQ ID NO: 92132 - DNA, 122 bp, Homo sapiens
ctcaccagttcttgaccagctcccggtagcgtgggcccaggaaccgggtcaccatcgcggcggagtcgcaccctcaggatgaccctgtccagctgacccggctacactgcgcaggcgcggcc

SEQ ID NO: 92133 - DNA, 122 bp, Homo sapiens
acccgccggttggccttgggcgtcagtgagttgccgatgacatggaactcgatgatgccgcggcgctcctccaggcgggctgtctcatcccgggccgcattggccgaaagcaggctcgtctg

SEQ ID NO: 92134 - DNA, 122 bp, Homo sapiens
ccggcccctcctggggcggggtgggggtctctagcgtggcctccctggggcctgcgcccacggtgtcggcacgcgatgagcgactcacagggcagctgcagtcacagtgagagcagggccgc

SEQ ID NO: 92135 - DNA, 122 bp, Homo sapiens
ctcacgtctcttatgctggttaagcgcgactaccgctatgatcgggttctcttctggggccgcatccttggcctcgtcgccgattactacatcgcgcagggcctgagtgaggaccagctcgc

SEQ ID NO: 92136 - DNA, 122 bp, Homo sapiens
tccactgccttcgtgagtgtgtgacccggcaggactcagcagtgggggagtcagggctcccggggcagagagttttgtttgtttaaaataacagctttactgatataattcacacgccataa

SEQ ID NO: 92137 - DNA, 122 bp, Homo sapiens
caggcgtgagccactgagcccggcctgtagtttcttataagcagagacactaaccaaagacgttgagttcttcctcctgctctctgagcacgcctgctctgtgatggagtcctttctaatca

SEQ ID NO: 92138 - DNA, 122 bp, Homo sapiens
taaatatcatagtcctttgaacatctaaatatatgcagcattttacagaaataatgtaagcgaactaaccgtttgtggtcagctggaaaacttaactttcagagggatttgaccagctatac

SEQ ID NO: 92139 - DNA, 122 bp, Homo sapiens
tttggtcatgattaatgcggccggaaatgatgtgattgcaacctccactgttagccctaccggtattaatcatctccaaggtgatctcagtttccgtggcaactctaatatttatttttgca

SEQ ID NO: 92140 - DNA, 122 bp, Homo sapiens
ccctggcactcaggcatacctggggggtggcaggacaggctcaggggcccaagcagaccccggtgaggccccatcttaccccagggcgcagctcaccgtgtcccacacactggagctgttgc

SEQ ID NO: 92141 - DNA, 122 bp, Homo sapiens
cttgcagggaggtgtagagggacaggcgcaagtgggaaccggggctgcgtgcggcgcttgcgggccagctggagttccgggtgggcgtgggcttggcgggccccgcactcagagcagccggc

SEQ ID NO: 92142 - DNA, 122 bp, Homo sapiens
tgatcaaatcagctgcgctcaaatgccaaatgccgtggaataaacgctgttatgggggtgcgtgcagatcagcacacctcggaggactgtggcggctctgaccgcaagcccctaggctcttg

SEQ ID NO: 92143 - DNA, 122 bp, Homo sapiens
tgctgttcttttctcccgaagccggactactttagttctgtggccacagtggtgtatcttcgcaaagagaactgcatgtaccaagcctgcccgactcaggactgcaataagaaagtgattga

SEQ ID NO: 92144 - DNA, 122 bp, Homo sapiens
tggagaggcactcgaaggagccagggacccggcagccagcagaccccacctttccgcccccgtgtgtgcagttctgtcgctcagcctggtgcctttgggacccgggcctcattggttcttcc

SEQ ID NO: 92145 - DNA, 122 bp, Homo sapiens
tacttatgatgggttatggcccaagaacttcttaagttgaaagtgcattgaggccgggctcggtggctcacgcctataatcctagcactttggaaggctgaggcgggtggatcacctgaggc

SEQ ID NO: 92146 - DNA, 122 bp, Homo sapiens
caatttgctccccgtccaacacaggtcccctgggcgctgtatatttgaaggcacagacttcgcagccgccgctcacactgcatttccttgttggtggttggttccttcttggattttccatt

SEQ ID NO: 92147 - DNA, 122 bp, Homo sapiens
caagggtctagggtcctgggtatctctaggtactgagacagctgtgtggtctgctgcatccgtgcccctctctgagcctagagcctgggctggcccaggaagcaggaagaagtctgcaccag

SEQ ID NO: 92148 - DNA, 122 bp, Homo sapiens
ctggccgcctgccccgccctgccccgcgccccgccgcctgcttattcaggaggcgcgccccgctcctctgcggagactccaaggagggttttgctcagcccaggctcgcacctgcctgctcc

SEQ ID NO: 92149 - DNA, 122 bp, Homo sapiens
tttttgagcgtactttaatgaagaagataaagcggcccggctggtgtcccacaggctcggcgcagtaagttcagattattgctcagtctgtcagaatgggctgcttccctcagcagcagcca

SEQ ID NO: 92150 - DNA, 122 bp, Homo sapiens
gccttcggagttcggactgacccgggatgttgctggagcccgcaggaactgcaaactcaccgcgcgcgtccctgcacacccgcacctgcgcctcgagaactcctggccagttgaatacccgg

SEQ ID NO: 92151 - DNA, 122 bp, Homo sapiens
cggcctccgtctatggtaccggaatgcgcttgagggattcaggcagggaaatcctctgttcgccatcctggatcccgaagatgacaaaggcagttccctccactttcttcccgtagaggaac

SEQ ID NO: 92152 - DNA, 122 bp, Homo sapiens
cggataagacactggacactcaataaatattgagcttccgatgtggccagcactattttacgctaattacatgaggaataggggaaaagattcccactctttttcagtttttcttaagcccc

SEQ ID NO: 92153 - DNA, 122 bp, Homo sapiens
acgtcgggtgtccccagacaaagccagtggggagctcagcaccatcagtgtcactgtcagcgctgtcatgcaggagcctccagggagcttcagacacaccatgctggagaacaggacaggac

SEQ ID NO: 92154 - DNA, 122 bp, Homo sapiens
ttgattgatcaccctctttctgatgggctttcactaccgagctgggaggctgcagctccccgcctgctccccagacacagcattaaccaggggtgccctgacttcctgcctcgcttcctcct

SEQ ID NO: 92155 - DNA, 122 bp, Homo sapiens
tctgggcttcacctccaagcctgcgcgtccctctcccctcctggctctgcgagggttaatcggaaggtctctggagttgggtggacttactgctccagacctttaccatctcaccctgactg

SEQ ID NO: 92156 - DNA, 122 bp, Homo sapiens
aaaaaaaaaaaggaaaacataacaaagactaggcttagcaaacgttttctgcaaaggtcccgatgctctccgttggaactactcaactctgccatgaaagttcaaaagcagccacagataat

SEQ ID NO: 92157 - DNA, 122 bp, Homo sapiens
atcctgctcctcaaagggctcggcgcgggcctcaggtccctgtgaccagaggagcccaaccgtgtagtccggcagactcccgcggtgagcgcagcccgggccgcgggtcctgcgtgcggggg

SEQ ID NO: 92158 - DNA, 122 bp, Homo sapiens
ggcggtaataactgttttgcccagcagaactgcctcatgccatagcttgagaatgtgcctcggggcccgtctgcagagaccaccccccagtcagggcagccgggccagacctcgcccaagcc

SEQ ID NO: 92159 - DNA, 122 bp, Homo sapiens
catttgattggagaaaagctgcaaaccctgaccaatcggaaggagccacgcttcgggcatcggtcaccgcacctggacagctccgattggtggacttccgccccccctcacgaatcctcatt

SEQ ID NO: 92160 - DNA, 122 bp, Homo sapiens
ggactcggggccctggagtagggacggcccccttgtcgatcacctggggacccctcggggcggtgggccacctctatggcccccagagtgcagccccaatgcttttcacgttctcttggggt

SEQ ID NO: 92161 - DNA, 122 bp, Homo sapiens
tccgagccctccaggtggccgcactcaggttggggtcgggggttcgggtacatcgaaaggcgcgggtgcgctccgcttcggggggcgattttcctgaaacctgttccgggcgttttggtacc

SEQ ID NO: 92162 - DNA, 122 bp, Homo sapiens
atttgagggtctttgttccaagaaaggcggtgctgggcccggggactggaactcggtaggcgaggatcccctttgacgcccccctacagtttcccttcaaacacgtaggtctcagctggtac

SEQ ID NO: 92163 - DNA, 122 bp, Homo sapiens
gggtgtgtgaattaacttccctcaccccagagtcctaatccaaaaaataggctcaacagccgcaccctgaagccagcagaggagctcaaaggtcaagagcaggacagaaggcagatacagag

SEQ ID NO: 92164 - DNA, 122 bp, Homo sapiens
ttctgaaaggaacctgaacttacagctggagtgaatgctgcctgagttgtggctgccagccggcagcctgcctcatgctgtgtccttctgcagagcagccatctgctgcagcattaatgaat

SEQ ID NO: 92165 - DNA, 122 bp, Homo sapiens
tttttctagtcctagatggaaataaatttcatctgcctcaggtctctggtataaaaggtgcgatcccagttacctcacaggcctaggcgaggaaaatgccaagagctgtaaaagggcttgga

SEQ ID NO: 92166 - DNA, 122 bp, Homo sapiens
ccgactcaggacgccacgggaggaagccacgcaaaatagcaaaccgggatcctagaggggcggggcccacctcagcgcgcaggcgcaaccaggcccaggtggccgccgcggaagcgaagcca

SEQ ID NO: 92167 - DNA, 122 bp, Homo sapiens
aggtgggaggatcacttgagccccgggggtgaagactgccgcatgggtgacagagcaagacgctatctcaaaaaaaaaaccacccacatccacccacttcctgccaggcctaacccctgggg

SEQ ID NO: 92168 - DNA, 122 bp, Homo sapiens
cagcaacgccaccatccagtggctgggcacaggagacaacgccagcctggccatggtcaccgctctgtccccgaccccaaacccgtgacaacgtccgaggctccttggaggaaaacgtgtaa

SEQ ID NO: 92169 - DNA, 122 bp, Homo sapiens
gctaacgcagacattcctgctgaaagcttagatggttttccaggggaccacagttaacagcggagcccatgaacgcaaagaaactcgccccttatctcagccacgaggcgccgccgagcccc

SEQ ID NO: 92170 - DNA, 122 bp, Homo sapiens
ggcgacagcgccaggggcagcgagagcgggccagagcccatggctggtggccgggctggccgcggacccggacggtcgggagcgggcgcggcggtcgcagagacggcctctccccgcgcggc

SEQ ID NO: 92171 - DNA, 122 bp, Homo sapiens
ttacgccttttcttgctaatgcagaaacacggccaaatcctgggctgccccaggaagtgccgaggcctctttccgctctcagtggaaaagggaaatgtggctgccttgggtctggggtgccc

SEQ ID NO: 92172 - DNA, 122 bp, Homo sapiens
ctgtcgggtccctaaggaacgcttggcggggagcgtggacgccctggggccaggccaccgcggtcactgagagccacccccccggaaactggagaaaaacggagtagaagagacctagggga

SEQ ID NO: 92173 - DNA, 122 bp, Homo sapiens
tgcatccaaactcaggctggctgggtccaaattctgtattgtagcttattcccaggtcaccgatgttaactgagcatctactctagggtggcccttacaaacactgcctgctcccagctcct

SEQ ID NO: 92174 - DNA, 122 bp, Homo sapiens
agggcacgaaagccagacgagtgcacagtagagcgaggaggtggcaggagacctgccactcggtgtgtgctttttggaaagagctccagcatgaaaatgggaggggctccttttttattttt

SEQ ID NO: 92175 - DNA, 122 bp, Homo sapiens
tccagtgtggggaagcaaaggagtgcctactaggatgcgaataccacttggccctgggctcgctccgctttagccttcccctctcgctggggagaaacaggcggtttgtgagggagactgag

SEQ ID NO: 92176 - DNA, 122 bp, Homo sapiens
cttttagtctctgcatttaattttaagcaagaaaccaggagactaaagatgtaagactgacgtagaacagcagagggcagtatttactcatgactgaaccctctctgggcgcagaaagtttt

SEQ ID NO: 92177 - DNA, 122 bp, Homo sapiens
tactgtttaaattttacataataatacgttgcagcatttggcgtatgcatctttttaaaacggtatatgcaggagggtttcctaatatacaggtagacctattgcccaagggatactttctt

SEQ ID NO: 92178 - DNA, 122 bp, Homo sapiens
gcttctaggagagcactgaggtatgctcggttcggttcccgaggaggccagaagcggccgcggcggcgcgggctggagctccctcctgcagggagacaccgcgctctagggtgcgggcttcg

SEQ ID NO: 92179 - DNA, 122 bp, Homo sapiens
ccaagaagcgatggggtcgctgttagggggggcgccagccccggggatgcggggagccttcgcagcctccgggtcagccctgctcctttcccctctgcgcggccgggatgtggcctcggcct

SEQ ID NO: 92180 - DNA, 122 bp, Homo sapiens
gccctctgaggcccctcaagggacagggcatgggtgtgaggggtcgcgtgcgccccctggcgccgggtccgctgggcggggtggtgggcggggacggtgggcggaggcggaggcgggaggcg

SEQ ID NO: 92181 - DNA, 122 bp, Homo sapiens
tccctgaccatctagatgccaccttcctggtcagtatttccctcaagtagtaatcaatgccggaaagaatactgttcatttattcatccgttattgtcatcgcttcattggaatttagcttc

SEQ ID NO: 92182 - DNA, 122 bp, Homo sapiens
gagacagggcaggatcagggagcccgccaaggcccctcgccctctcgttcggcccggggccgtgggcagcactcaccgatgaggttgggcacgaacaggaagatattttcgtctggcatcgc

SEQ ID NO: 92183 - DNA, 122 bp, Homo sapiens
agcgcacgtcgcagtaggagcagcggtagggccgcgctcccgagtgcaggttgaggtggtcgtgaagggtggacttctgtgtgaagcacttgccgcagatgccgcacgagtgtgacttgaca

SEQ ID NO: 92184 - DNA, 122 bp, Homo sapiens
cgccgacgccagggaaattcccgtaccacgcgggctgagtgcaggcgggccaggccaggacgcaggggtcggccctcccccgccccgttcccctgccctctcctgccccgctccgctccgct

SEQ ID NO: 92185 - DNA, 122 bp, Homo sapiens
ggccccaggctggcgatgactcatgttggaggggctatggccagtgccgtggaggacaggcgtgggagcagtctcaccagattaagtttacttccagcatttgggtctaaaccctccaatga

SEQ ID NO: 92186 - DNA, 122 bp, Homo sapiens
ttcagcgagggtggggagttgcccaggtcagcagggatctgcgtgggttgggggggctggcgaaggccgtctgagctccagtccggcagcgcggcagaaaccagcggggcactgtcatgggc

SEQ ID NO: 92187 - DNA, 122 bp, Homo sapiens
acctggggtcgaggggaatgacaggctgcagtgagccaagatcatgccactgcactccagcgtgggtgaaagaacgagactctgtctaaaaaaataaaagaagcctggcgtggtggctcacg

SEQ ID NO: 92188 - DNA, 122 bp, Homo sapiens
cacccagcctggccaggtccctgcctgccagccccctgcccccaccgctacagcccgccccggatctacgaggcccagccagccacctctggactcctgagaccgaattgcaaactgcccgg

SEQ ID NO: 92189 - DNA, 122 bp, Homo sapiens
cctgagatctggtcagaggggcggctgggcctgcctgcaaagtggctctgctaagttagtcgtgtgtgtgtgtgtgtgtttctgtgtgtgtgtgtttctgtgtgtgtgtgtgtgtgtgtgtg

SEQ ID NO: 92190 - DNA, 122 bp, Homo sapiens
ttaaaaaattccacactgggagacatttggtgtaggactgaatccccgtattttagaagccgccttgtctcttcttgcctcgatttcccatcctgttaatcaggagactcagggcgggagga

SEQ ID NO: 92191 - DNA, 122 bp, Homo sapiens
gctgtggctggccgggcttctcctccattgaaagcggctgggactccctggctgaggctgcgggctgctgcaccgtcaggatctgagactgcttctcagggctcactcagtatatctgagcg

SEQ ID NO: 92192 - DNA, 122 bp, Homo sapiens
gttgagagaagcagacaatagcagcagatgggtcagctccctagccaaggtgtgtgaagccgtgtagtcctgggaaggattgggcttttacattgagataggatgggaagtcattggagggt

SEQ ID NO: 92193 - DNA, 122 bp, Homo sapiens
gccggcagccgggcccgtgagaatcagcgcgaggcgctttgaaaacgactagaaatggcgcgcgcgccaccccctcccccccctgatggactgagacgcgatcccggcagcacgcggggttt

SEQ ID NO: 92194 - DNA, 122 bp, Homo sapiens
taaaatacaactttatatgctagtgcatgcccgtagtccaagctgttcaggtggctggggcgggagaattgcttgagcccaggagttcagggctgcagtgagccgtgttaacgccactgcac

SEQ ID NO: 92195 - DNA, 122 bp, Homo sapiens
tccctcagtgcccaccgggtgatggtggcagattttccatccgcattgctcccggacatgcggatgtaggtttcagcagttcccatcattagacacagttgccgtaggctgggttcttagta

SEQ ID NO: 92196 - DNA, 122 bp, Homo sapiens
ttcttttgaggctgacttggaccaaggaattgagggcaggtgtttggggacccctcataccggcaccagatcaggctgtgctgaacgctgatgccggcctccctctgcgtgtgaacggggtg

SEQ ID NO: 92197 - DNA, 122 bp, Homo sapiens
gactgtgctgtattttatttatgaaaaaatgcaggcgcctccctggataccgagccccgtcgtttctgtttgtcagtctgctttttggcattgagcatctcaatgcaagattgtggaattaa

SEQ ID NO: 92198 - DNA, 122 bp, Homo sapiens
agtcttcaggcccctatctgggtgcacttcctggtatcccagcatctgacatgtgcctggcgcgcagcaggaactcacggctggctgtagcctggatgcatcagagacgatggcaaaccctt

SEQ ID NO: 92199 - DNA, 122 bp, Homo sapiens
gagaggagaacaagccttaacttccccagccctggaatgtcactgacagagcactcttggcggtgtctctcctctaagcagccacctctcaagaaaggtggtgtgagatgtggaaaggacag

SEQ ID NO: 92200 - DNA, 122 bp, Homo sapiens
actgtagtttatgttaagtgggattagctcccggtggtgtttcactgaaaacctgcttaccgcttagttgattaactgctactccacataacacattccttccttatgaccaaattactgcc

SEQ ID NO: 92201 - DNA, 122 bp, Homo sapiens
cagaaatgggacggggctgccgagggggccgggaactgaagtgcgcccctcatctgccaccgcttcagaggaaaccaggcccctcggctcagcggcggcttctgtctagctggggtgggtat

SEQ ID NO: 92202 - DNA, 122 bp, Homo sapiens
cagacgccgggcgggggagggggcggcggggcggcgggacggtgggtgggggccaccaggcggcgccggagaccaccaaactttacagcgagcgagcctgcttcctggagggagtgcagaca

SEQ ID NO: 92203 - DNA, 122 bp, Homo sapiens
aaggtcacgtcgctcgacgggcgccagctgcgcaagatgctccgcaaggaggcggcggcgcgctgcgtggtgctcgactgccggccctatctggccttcgctgcctcgaacgtgcgcggctc

SEQ ID NO: 92204 - DNA, 122 bp, Homo sapiens
gagccaagaccgcgtgggccgcggggtgctggtaggagtggttggagagacttgcgaaggcggctggggtgttcggatttccaataaagaaacagagtgatgctcctgtgtctgaccgggtt

SEQ ID NO: 92205 - DNA, 122 bp, Homo sapiens
aaagagaaacccaatcacaaatgtcaaactcggaatccatcagtcatgcaaactcattgacgatttttgctgtaaaaaaaatgatcaaataatgtgttaggaataaagtcctccaaccgaca

SEQ ID NO: 92206 - DNA, 122 bp, Homo sapiens
taacccctgaaactcacagtttggtgccgtgtgcgtcaaaccggggcgacgttgggagcacgcggcgtccccgcgtcacacgccgctctgtacgctactcggctccagcggcccccctccgc

SEQ ID NO: 92207 - DNA, 122 bp, Homo sapiens
cagatgggggcagacggcacacaaggctgcgaagtccccaagggtggggcgggggcggggcgggggggggtttgcacggcacctcggcaagggcggcatctgagctgagagggtcatgatga

SEQ ID NO: 92208 - DNA, 122 bp, Homo sapiens
ctgggttccatgaccttcctacagttacatttatgacactttaaggctataaaccatgggcgaggaggtggactgaaaccctcacatgctgctgtggcagatgaaaaggctgaagccacttt

SEQ ID NO: 92209 - DNA, 122 bp, Homo sapiens
caaattaaacgtgaaattggccctctccggctgtggagacaaagcccctattgtcctgctcgggtagcggcagcagcagtgcccaccccgccccggccagcctggtcggtccccgccgctgg

SEQ ID NO: 92210 - DNA, 122 bp, Homo sapiens
tttccaaaagagagggacttggggcacagaatctctggcaggtgggggagaaacggctaccgtcaccccactgggcaccgcatgaataacccagatgtcggcgaaggggagcccctggtttc

SEQ ID NO: 92211 - DNA, 122 bp, Homo sapiens
gattaatatgctgagagctctaatggaaaatttacacaacatacaaaaacagatgggtaacgtaagcagagacatggaaattctaaaaaataataaaaaatgctagagatgaaaagcaccat

SEQ ID NO: 92212 - DNA, 122 bp, Homo sapiens
gagcgccgttggttccgtcatagcagctgtcggagtgggggttcctccccagcgtccaggcggcctggtggtcctgagaagccccgggctcgccgtgccctgcccccacgctcccgccccga

SEQ ID NO: 92213 - DNA, 122 bp, Homo sapiens
cgaacgtgggacacaggaggcagccgtggccggaggggcacgagggtggtgggcagccagcgctagcccaagctcccggggtcactccaaggagtagtgagggctcccctgcaggtgcagtg

SEQ ID NO: 92214 - DNA, 122 bp, Homo sapiens
aagtcacttgcaacattaaggaactgcccttgaatcttggcctagggcttgcattgggttcggtcccacttcagaggttcagtttgaagtgctcaagtattgaaagcttcctctttgcagtt

SEQ ID NO: 92215 - DNA, 122 bp, Homo sapiens
agtgggatgagtcaccacaaatgcaatgacaaatgatagctgcccactcagcctgaaagccgggggacttcagggagaggtggagactggcaaactccaagccatgtgccccaagggagcag

SEQ ID NO: 92216 - DNA, 122 bp, Homo sapiens
gtttatccaagacccaggcatacttgaaggagccctttcccatctgtaaggattaagagtcgttacttggttactaaaacacaaactccagcttcaatttccttgtccccagcccttaattg

SEQ ID NO: 92217 - DNA, 122 bp, Homo sapiens
acctgtcagtgtcatccacggggatccctttatccccaagcccacagtagcagccatatccgtaatatgagaagaaggcacttcgccccgtgatgtgtttgaccctcctctgaaactgccag

SEQ ID NO: 92218 - DNA, 122 bp, Homo sapiens
aggttgggtcgtgaggtctctgaagacagtgggtgaaactccagtgtaaggcgctgcgtccgcttggtagagagccggccgaagtccgagtctttgttgcgaggcgtagggccaccctgcgc

SEQ ID NO: 92219 - DNA, 122 bp, Homo sapiens
gccaggctctgcttcctcctggggcggctgtgcagcaggaggctcaagctgtcccaggcccgggtgtactttgaggaagcgctgggggccctggagggcagcttcggggacctgttcctagt

SEQ ID NO: 92220 - DNA, 122 bp, Homo sapiens
tcctcacagtactagaattacttaactaaatttcatctctattgatcacccctaacatgccgccacagctgtacagtttccttggtattgcctgtcagccactagggggcatcctggggcag

SEQ ID NO: 92221 - DNA, 122 bp, Homo sapiens
aggcgggcgcagacacctggaaagaaaccaggaagagcaaacgtccttccctgttttccacgctttcccagtctcctgcggtggatgtgcttactttgcagtcagaagaaaataagccacga

SEQ ID NO: 92222 - DNA, 122 bp, Homo sapiens
aaaagtagaagctggaatgggcctcctccttccggacggaccgttggccgggctccgccccggcgcttctgattggacaaggtacaaggccccgccccctcagaactgagtgacggcagaag

SEQ ID NO: 92223 - DNA, 122 bp, Homo sapiens
ggagtgaggagcttggatgatgcggtttctaagtgtcctttagctctggattccagtgcacgtgcatgtgcagactcgtctgtgtgtatgtgtgtgtcctggtgttggtcatcccgaaactg

SEQ ID NO: 92224 - DNA, 122 bp, Homo sapiens
gcaaaagccttgccaaggcaacttgtatttttaactctccatcagcctacttaagtcacacggcgccgtttccagcacagcagagttcagccgcagcctcgttaactgcaggcaggtgggga

SEQ ID NO: 92225 - DNA, 122 bp, Homo sapiens
gtggatggtcccatcagacaacagaatgaaaaagtacagcctggactgatccttgtattccgtgtggaaacacaggtcactaaaactggaaagtctgtcgcttagatgatcttgggctccag

SEQ ID NO: 92226 - DNA, 122 bp, Homo sapiens
agacttttatagtctaatccccagggacccgctttaataagagacttgtgctctgctaatcgggggaggtgtttgtcagcagagatggcctccgttcccctccccctccctcccctccccca

SEQ ID NO: 92227 - DNA, 122 bp, Homo sapiens
tgggtgagctgagggaacgggggcgtggtttgattccgcgggcgcgagccacgttggacgcgccgcagcgtcgccgaaaggtccctcccaggccccacaatgcacttcggggcgcgtcactc

SEQ ID NO: 92228 - DNA, 122 bp, Homo sapiens
gagaagaaaccgaggatgttcaagctggagaagggggagggggagggcggaggaaggactcgatcactgtcttcgtagctgaagggctgtcaggtggaggtaggatagacttgttctagctt

SEQ ID NO: 92229 - DNA, 122 bp, Homo sapiens
tgagaagttgcattgtcttgggcccctctttcacaacaggggaaaaggtaattgacagcccgattgtttggctgggacccctgctgttttaaaatcctagaaggccccagtcacacgttgtc

SEQ ID NO: 92230 - DNA, 122 bp, Homo sapiens
tgtgtcactggttaacctggactgaagtttcattctaaacataaagagatggccgggtgccgtggttcatgcctgcaatcccagcactttgggaggctgaggtgggcggatcacctgaggtc

SEQ ID NO: 92231 - DNA, 122 bp, Homo sapiens
agcaaagggctccccagaggcaggtcacctgtaccctaagaggaaacagcagaatgttgccgtccgcggcaggagatcgcactcggcccctggaagtggacctcagtgggtggcctgccctg

SEQ ID NO: 92232 - DNA, 122 bp, Homo sapiens
tgcgcgggcaaggctgcccaatttccagggttcttcatgccccctctgcgccccgacgtgcgagaacactgcccttggcagtgcagggcgcccccacttattactcccctcggctgggcccg

SEQ ID NO: 92233 - DNA, 122 bp, Homo sapiens
gagggcctgggaacctgcgagatgttcttggagggaaaaggggagagagctgctggacagcgcatgtgccaaactgctgatgggtttgtctgcccagcaaattgtttctttttttttttttt

SEQ ID NO: 92234 - DNA, 122 bp, Homo sapiens
cagactctgagcaagaaatgaaattgggttgtgctaagtctcagagatttaggagtggttcgctacttgcaaggggcagaacctaccctatcttgacttgcaagcattagaagaaatgcaat

SEQ ID NO: 92235 - DNA, 122 bp, Homo sapiens
cgcagctaggcgcgcaggaagggctgcacagagtttgaagacacggcagctgtaagctggcgtgaggaggccaaaggagcgcgcagagctgcaagcaaagggcggtggggcctggaccctga

SEQ ID NO: 92236 - DNA, 122 bp, Homo sapiens
gtgttcttggcagcctatcacgtggtgctcttgtgagtgtgggctccagcctacattgaccgtgaaccagagcagccctgttactaaagtcaatgcttgtaattctcttacagtcctcatac

SEQ ID NO: 92237 - DNA, 122 bp, Homo sapiens
ttttttttttgagacggagtcttgctccatcgcctaggctggagtgcattggtgcgatctcggctcactgcaacctccgccttctgggttcaagcaattctcctgtctcagcctcccgagta

SEQ ID NO: 92238 - DNA, 122 bp, Homo sapiens
gtttcatgcagctttctggttgtgaacaagacttaccctgagagtggagtggagcgtggacgacaaacagaataattttacttacggagcctcaagttttagtaaaccaggaatctgaacat

SEQ ID NO: 92239 - DNA, 122 bp, Homo sapiens
agctttgagaaccatattttgttttcatttttcattttaaatttggagaaattaaggtaacggagtttccccagaataggagagggatgggaagtgttgtttttagctgaagtactatatgt

SEQ ID NO: 92240 - DNA, 122 bp, Homo sapiens
gggtgagggttgacatgaatgcacgcgtggcagtcactggcaaatcccaggcaaccccagcggcggctgggacggaggacaccactacatcccgggtgaccccgacggcagctgggacggag

SEQ ID NO: 92241 - DNA, 122 bp, Homo sapiens
taaaggataaatattctagtgtcttttttactttgtgtgtgcttgtggcaggattgctgacgggcaccaccctttctgcagagagtaaacatcgccttgctaaggaaactttttgtctgatt

SEQ ID NO: 92242 - DNA, 122 bp, Homo sapiens
aacaaaaaaaaattaaaattaaaagtaccacttcttacctatcccagcagctacagcattcggcccacacagaaggcactcaggaaatgtcttgaattatgtctgaggaaggaataaatgca

SEQ ID NO: 92243 - DNA, 122 bp, Homo sapiens
agagcgtctgacctcagaggcagacacactgtcccagaggtggtctatgaatggagtccccgtgccctccccacacacagggaacatccaaatgccatcatggaagggtggccacctcccca

SEQ ID NO: 92244 - DNA, 122 bp, Homo sapiens
agcaaaactcaaccagtgtcttagtgcttgtgggacctgctttgtccccttttgtggcatcgaaggggtgatgaaggatgagacaaacctggatgtgagtcccaactctgctgtgtgacctg

SEQ ID NO: 92245 - DNA, 122 bp, Homo sapiens
catgtgtggccctcccctgtggaggcacaggggagcaggtctctaatccacagacatcaccgacgacctgtgcagggccaggctctggggatcagcagagaacaaaaggggcagaaagcact

SEQ ID NO: 92246 - DNA, 122 bp, Homo sapiens
aggtctctagagctgaccgcggcatctcagaaaagggatggggaacctacaagtcgccgtcgcctgcctggctcattctgtaccactgaatgtaactcctcacagcaagctggaaatgtttt

SEQ ID NO: 92247 - DNA, 122 bp, Homo sapiens
ggtgcagaaagttaggtagacgggataaagagtaacttctttgagaccaagtagaggaaccgagatggaaacccaagtctgtctgactcccaagcccaagctgctcacttaaaaatcctaaa

SEQ ID NO: 92248 - DNA, 122 bp, Homo sapiens
gcacgagctcctgggagcggccctgcaggcggcagtacacggagaacaggacgatgcccacgaacaccaggatgttcaccgtcagcaaagttcggatcttcctggccaccgccatgaacacg

SEQ ID NO: 92249 - DNA, 122 bp, Homo sapiens
caagagattctggtcagctgccgggagcgtggaagagcaaccaaagccaccaaggcgccgcgccaagtccccggagcagtcacctcagctttccgttctccctctagttacaattactccac

SEQ ID NO: 92250 - DNA, 122 bp, Homo sapiens
ccaagcagaccccggggagcagcggggacttcatcatccgaaccagcaagctgctgatcccggtgacctgcgagtttccacgcctgtacaccatttctgaaggatacgttcccaaccttcga

SEQ ID NO: 92251 - DNA, 122 bp, Homo sapiens
ctctgaattaatgtccaagatcttttcctccacttggcagggctctctcccttcagggaccggtggccttggccaggactcttcccagcccagcgccacagccttctcgggaaagccggggg

SEQ ID NO: 92252 - DNA, 122 bp, Homo sapiens
gtgatgagatcctcgaggtcaatggcattgaagtagccgggaagaccttggaccaagtgacggacatgatggttgccaacagccataacctcattgtcactgtcaagcccgccaaccagcgc

SEQ ID NO: 92253 - DNA, 122 bp, Homo sapiens
gggccctgccccacggcgcccactgctgcttccaggcaagcctcagattccactgggattcggagaagttgcagctgattcaatgctgagagcccatcagagaaaacatcttccttcccttt

SEQ ID NO: 92254 - DNA, 122 bp, Homo sapiens
gctcttccaccagccgcagccggcaccgccgcaggagccgccgatccgcttcgtccatggcgagtagccaactaagactccaggccgcctcagtccgcttccgggcctcggccgcccgcccc

SEQ ID NO: 92255 - DNA, 122 bp, Homo sapiens
ggagacgtacagagggaggtcacacccaggggaaaccacaccccacgcctctgcctgcagcgactcttaacacacctggcctggggattctcaaatctgttcacgctctgttagactaggag

SEQ ID NO: 92256 - DNA, 122 bp, Homo sapiens
gagcgagactccgtctcaaaaaaataacaagtaaatcagtgtggaactaacgagcgccctcgtccctcgcgctgctgggactgacgtccgggtacccccaacgcaaccacggcctcccggtg

SEQ ID NO: 92257 - DNA, 122 bp, Homo sapiens
ttatgaatagttccgtgaatagtcaggaagcgctgtcctccaagttcaagattaaggaaacgtggcatgcacagctaaagcaagaggtgacgtcttgtatcttcccccgtttcctgggacat

SEQ ID NO: 92258 - DNA, 122 bp, Homo sapiens
gtgctgctggttgtaaacttgattggcattggctgcgcccactgaccccgacgctgagtccgctgaagatttaaggtggatccgagaagctgcagcttcaggcggagtctcgcgctctagtc

SEQ ID NO: 92259 - DNA, 122 bp, Homo sapiens
tctccagatctgtaaactgggctcaaggactgtacaagcagagtacaactaccccctccccggtgccagggcgcctgttgggtttggtcctgtgtagatgattcccagagtctcattcatcc

SEQ ID NO: 92260 - DNA, 122 bp, Homo sapiens
ggtgagtcaaagccacatgcaagctaaaagctatgcagtagaggagattgcatgagtaagcgaagaaagctagctggcaaaaagaatcaaaatcacagagaggacagaaacagagacaagag

SEQ ID NO: 92261 - DNA, 122 bp, Homo sapiens
agcccagggcctgcagctcccgccgcagttccaggtccgacaggccggccatggccaggacgccgccccccgcccgcccctggcgcgcaccgcacccggaactgctccctcccgcaggcgcg

SEQ ID NO: 92262 - DNA, 122 bp, Homo sapiens
cccaagaaacccccagggctggggccaggtcgtgcatcgtcattgggggtggggccaggacgagcatcgtcactgggggtggggccaggacgagcatcgtcactgggggtggggccaggacg

SEQ ID NO: 92263 - DNA, 122 bp, Homo sapiens
gtgaacccacggccacagagaggcaggacggcagagccatgatttcccaccgagcgattacgagaacctcttcccccaatagtagacacatctccaatacaaacacaggtttataataagta

SEQ ID NO: 92264 - DNA, 122 bp, Homo sapiens
ctgggccctttgctttgtacccatcctgcttattcccacacaacaaaagcgctgctcagccgcctggccagctccattgtgcacttaccacaaagtgctgagtccaagggcttccctggccc

SEQ ID NO: 92265 - DNA, 122 bp, Homo sapiens
tcctgtctttcctagtggcctcagcggcccatcgccacgtttggctggtctcttcgcagtcgtagttgccattcccaagccaacacctctccaaggaatgggcattttcctgagtccgaggc

SEQ ID NO: 92266 - DNA, 122 bp, Homo sapiens
ggacgtgggagcactttgtgaactgggcatgggaaagagtgaaggtggaaactctccccacgtcaagtagaattgcattcaggagggcactttgctatgtgccgttctaaagagaatcggcc

SEQ ID NO: 92267 - DNA, 122 bp, Homo sapiens
tgcctacataaatattaccaggctttgaaggaaggtctgacttgcttcctaatcatcagccgaccccatcctctgtagagtgggaaacaataatggagagagagagagagagagagacggag

SEQ ID NO: 92268 - DNA, 122 bp, Homo sapiens
tgagtcctctcggcacccagcaaggtaggcactctttgcgtctggttttagcggtggggacgcctgggcgtggagagggggtgcggcgtgtcgggtctcatagcttagcggccgagcagagg

SEQ ID NO: 92269 - DNA, 122 bp, Homo sapiens
ccttactctagagacaggaggcgctatgcagcgacggcggcagagaaagcgtgggagcgacgctcttgctctggacgccgacgtgcccacgtcgaggccgcgcccagacccggaggcggggc

SEQ ID NO: 92270 - DNA, 122 bp, Homo sapiens
cttgggacctggtgttggccagaggtgccgggtgcggctgcctccttccaagagttgacccgaaccggactccacggcccacgtgagctgcagtgcttctcagatggagggggttcagcgac

SEQ ID NO: 92271 - DNA, 122 bp, Homo sapiens
agatgctagaggtggagctgcttataatgaaaacctggtggcaacctagatgtttaatatcgtttagctttaaagaatgttgatgcagctctttattgataggaagaaagttcagcatatgt

SEQ ID NO: 92272 - DNA, 122 bp, Homo sapiens
tccccagcaggggcaggggcctctggccagcccgggaggtgctcctgggctggctgtgcccgccgccctccctagccaatgcacacaccctgccagcgccctggggaagggactgtctttcc

SEQ ID NO: 92273 - DNA, 122 bp, Homo sapiens
cactacgaaataaatagagaaggaaaagttatcagctggtaaatatcgtagaaggtagagcggtccagggactcacaggtctcactaaagaaaagtctagcgtaggttcacggcacggagag

SEQ ID NO: 92274 - DNA, 122 bp, Homo sapiens
ttttctgcccacttctttggtggcactgagatcttcctccttacagccatggcctatgaccgctatgtggccatctgtaggcccctgcactacacagccatcatggattgccggaagtgtgg

SEQ ID NO: 92275 - DNA, 122 bp, Homo sapiens
gctcgggcagccaccctggagagcctccgggagctgaagcagctcaaggtgttgtccctccggagcaacgccgggaaggtgccagccagtgtgaccgacgttgctggccacctgcagaggct

SEQ ID NO: 92276 - DNA, 122 bp, Homo sapiens
gaaggaacacagatggtgctgcgaggccgtctccagactgtggaagccacaagccactggcgtctgcttctgtggagaaacaaacttcagccacccacgggcgcccccgcaagggccgggct

SEQ ID NO: 92277 - DNA, 122 bp, Homo sapiens
cgctttcctgtgccgcccaagggaaatgggtctctcttgagcccgtctttctctagtaaacgaggtgggtcatacgtctatgtcaaattgaatcagccaggacagcttccgtggtaattaaa

SEQ ID NO: 92278 - DNA, 122 bp, Homo sapiens
tccccaaccccctcttcccgggcccctcctcccctggtcctccccccacgaccttctgtacggatttgctctccggaaggaattctggtttcgcgtgatcctgcctgcgtccgtgtctctga

SEQ ID NO: 92279 - DNA, 122 bp, Homo sapiens
ctctgaggctctcggattggctgggaagcctctctctggctgagcgaacggtgggtgctgcgcatgctcatctacagaaacgccgcttggcctttggactacaccatctgtcgctcgctcta

SEQ ID NO: 92280 - DNA, 122 bp, Homo sapiens
gccggagctgcccgtcctgagcgccctggagctgctagacttcagcttccccgattgccacgtaggctccttcgccatcaagtcgctgcggaaactgacgtgagtcccagctgggcgctccc

SEQ ID NO: 92281 - DNA, 122 bp, Homo sapiens
cgcgcagcccccgcccccatttggccgctcgcaaacttgggggcgaacttggaggaggcccgccgagcgctggtggagggagggtccgcccgaggaatccccggttcccgcgcctttccctc

SEQ ID NO: 92282 - DNA, 122 bp, Homo sapiens
cgtttccacctcgcagttccagtgcaggcgggtgggactcagtggtgtgtgtgtgtgcggcgagtgcctgcctgtaggtggccccggccaagccagccccgccccaggaggaggctgaacat

SEQ ID NO: 92283 - DNA, 122 bp, Homo sapiens
caaatagacggtccaaggcaggaaactgaacgtacctctacccccaccttaattgccagacgagtccatgctgcctgccacacctgtgagccctcgggtcctgatctgcctgccacgcctgg

SEQ ID NO: 92284 - DNA, 122 bp, Homo sapiens
gagactacgactcccagcagctccgcgttccccctttcctcaaaagaaaaagatctacctcgaggtagttccctacagacacgccctatccctattagttatgctgcgctgtgtggccctgg

SEQ ID NO: 92285 - DNA, 122 bp, Homo sapiens
aggccgcggtcggggatcggtgggaggttgggaggcctggcctcggcgggatcctgggggcgggcgaggagatgagggccccggaacgacccagagttcgccggcggcgcctcgagccttcc

SEQ ID NO: 92286 - DNA, 122 bp, Homo sapiens
ctcgtgacactgggaggagagaacgtcctcaaggtccggaaactcaaggacgtgctgattcgggagctttcaaaaactatttttggaaaacccagatcccggtcttcagccagcgtcgcctg

SEQ ID NO: 92287 - DNA, 122 bp, Homo sapiens
gcgactgcctcctcctccgccgagagccttacctgagatcagcagccaagctttaaatagcggagcacccagtcccgtttccatgacctcctttaaacccttctctctgcaaagttccccct

SEQ ID NO: 92288 - DNA, 122 bp, Homo sapiens
ctagagggcctgctcagtggagctggggccaagctgggcctctccagtcggctgcgggggcgcacccccgggcgctgggagtccaggcccggttttgcatcaggccctgccgaggtgtttcc

SEQ ID NO: 92289 - DNA, 122 bp, Homo sapiens
cagtagctggaaccagaactgaggtctctgggtcctagtccaatactctttccagtgtaccgcaagccccatcaataatcacaggagctaatgtcaatgtcagggcataatggtgatccatt

SEQ ID NO: 92290 - DNA, 122 bp, Homo sapiens
aatataacagccatttttgctgtaattaaactactgtgacaagacctaatgacagttgagcgaaaccagtcactgacaggggacaatttcccataagaaatcctactgaagggaaaccaaat

SEQ ID NO: 92291 - DNA, 122 bp, Homo sapiens
gaaagttaggcagcagtttgacacaaagcaattaggggaggagacggagtgtcaaacctgcggcaggcagacatacaaacatgatgtattgattttggcagtggttcccattactttttgtc

SEQ ID NO: 92292 - DNA, 122 bp, Homo sapiens
gcggatgtgggcgagcctgagtcagggtggtgacgatcctggagagaggggagcatgggacgctcgtggtccccaggaaactggcgggcgctcaataaatgtgtgtaggctcacgcctgtaa

SEQ ID NO: 92293 - DNA, 122 bp, Homo sapiens
gatggatagttggaaggagggagggagggaagaatacagggcaggagaaaggcgactccccggctagtacaatgcagcttctctgagctggaaggcccctcaacaggtgcgtcagcccctgc

SEQ ID NO: 92294 - DNA, 122 bp, Homo sapiens
ggcaccaccagcatgtggagtctgagctgcccacctcctccaggaaggtcacttcgagtccgtgaaggaggcaggcaggtgtgggggagtgaccacaaccaaagtagcaaaagcacccctgt

SEQ ID NO: 92295 - DNA, 122 bp, Homo sapiens
tgaagactatatgctcagataaagtatgtttaagaagatcacactaaagcatggtgcctccgaaataaaaaaaagttgagggaatagctctctgggttgcagataaataaatttgtattcaa

SEQ ID NO: 92296 - DNA, 122 bp, Homo sapiens
aaaggaatcagagtggaacagagaggggctcccgaaaaacccctggcaggcaagaggcgacggcgggaagttaacctcatgatggtgagcatgaggcatggaaatgccactgctccactttt

SEQ ID NO: 92297 - DNA, 122 bp, Homo sapiens
gcacggaagacacacccaggctgtggggattggctgcctcagcccagcccagcccagccccgcctcctacggccttccctagatcaggggccagggccaaagacctcccagcagaagaggag

SEQ ID NO: 92298 - DNA, 122 bp, Homo sapiens
gacgagtctgtggcacagactcgtccccggccccgcgggcttaagttgtctgggggctgtcgctttgagtacagatcatatagttatgaatacattttaacgcagatccaaacacatagtat

SEQ ID NO: 92299 - DNA, 122 bp, Homo sapiens
cggagaaagctccgcgggggaaacaaggaaatccccaccttctatccctgtctcgtggtgcggtcccctgtgacggcctcagacctgcggggaacccaggactttgccgcctaccacggtct

SEQ ID NO: 92300 - DNA, 122 bp, Homo sapiens
tgtgtacccatgtctgtggaagtggcacacgtgtgcatgtgtgcactcagtgtacgtgtgcgtgcctgtgggtagctccgtgcgcacatgcgtacacatatgcctggtgtgtgtgtgcacac

SEQ ID NO: 92301 - DNA, 122 bp, Homo sapiens
gcgtgaggggcccacaagtcaggctttccctaaaacactcacttgtggggttctggagaccgcgggctcttatgagctctgctcctcacaaagtttttgaccttgagtgagtttcccgagac

SEQ ID NO: 92302 - DNA, 122 bp, Homo sapiens
gtccaggaatcaaaactgctgctttttaggaaaactatttggctaaaatcaatagtttgtcgcagtagtcccctggcactgtgatgtcatgtggtggggaatcaagatctctcccatgggct

SEQ ID NO: 92303 - DNA, 122 bp, Homo sapiens
gggcaattctgaatgggagtcgccaacgccccactgagtgaagcctgtctcggaaccgctcgcccagaccctggaggctccagacagccagctcccggaccccgcgcgcaaacgctgcggcg

SEQ ID NO: 92304 - DNA, 122 bp, Homo sapiens
cgtaaagcgcggcggggagtccggggggctcccgcctggagggctgtgtgagcggcgggccgcggggcggcgcggggggcgctctccactctgcggaagctgccccctctgccctccggtcc

SEQ ID NO: 92305 - DNA, 122 bp, Homo sapiens
gtggatccttcatgaatagcttggtgctgtccatgagtgaattcttgctctattagttgccgagacaactggttgttaaaaagaacctggtacttcccagctctctctctggcttcctctct

SEQ ID NO: 92306 - DNA, 122 bp, Homo sapiens
tttggcacctacatataaaatgatattgacccgattcagtgacatcactgaagacaaagacggtcacattttggcgtttgcggcaaaaggaggcggtggggtgccagcacgcccaccgcccg

SEQ ID NO: 92307 - DNA, 122 bp, Homo sapiens
catttttcaacctgtacaagaccagtttcacgaacttgatcccacagccaataataagtccgcccctttgaaagtctaaaaccacaaacctagggaacgcccacacctgaagggctcatatt

SEQ ID NO: 92308 - DNA, 122 bp, Homo sapiens
gccggggcgccgcgccctgggccccggggtagtcagggcgccgagaccgggacccgaggccggcacggagacctttgttcctcgtggaagtctcatgaattgcagagtccacggagctcccc

SEQ ID NO: 92309 - DNA, 122 bp, Homo sapiens
cgcccgatgccccgaggctctctcttggactctggccctgagttcttctgcgcgatccttcggagacgtctggaggcctgctttatgcatctctcttggacctcagtttccccacacgtggg

SEQ ID NO: 92310 - DNA, 122 bp, Homo sapiens
aggaccctccgagccaggtgcgggatataatgtcgtggtgcgctgttttttaagccagtccgaaaagcgcaatattcgggtgggagtgacccggttttccaggtgcgtccgtcacccctttc

SEQ ID NO: 92311 - DNA, 122 bp, Homo sapiens
tcggtggtcggggctgtaatttgcacacgtgtttgtgatttagtgattccgattgtcgtgcgaggccatggagtaggtgcctggctgctccgtgtatttttgaatgaaggcatgtgaggagc

SEQ ID NO: 92312 - DNA, 122 bp, Homo sapiens
aggctccccaaggcctctgaaagaaatggagcccagccagctgagtcaggctgggtcccacgcctctgtagggccgaagtccaaagcaacaggcaggcagttcttgcaggctttttctctgc

SEQ ID NO: 92313 - DNA, 122 bp, Homo sapiens
tcacgatcgaggtgcagcagtcaggccgggaagatcctgcatgttgcgctagggactgcgcgcggcgccaagcgacaaccccccagcggccactgccccggcagcagcagctgcagcagcgg

SEQ ID NO: 92314 - DNA, 122 bp, Homo sapiens
gggctggcgcaccgacgggggcgggcagccgggcgggtgaaggcagccaccccagctccccggcagaagccaggtctgggcttgccagtcaattctgcatacttcagcgtctggtaatgatt

SEQ ID NO: 92315 - DNA, 122 bp, Homo sapiens
cacagctcacacagacgacaccatgtccttcaagccagtatgacaggggttattgtcccacgtttcaggtgggaagacagatgcatgataaactgttataataataccagctgctgatcaca

SEQ ID NO: 92316 - DNA, 122 bp, Homo sapiens
gagcatgaaaatcctccaggtatccctggctgccctcacttgctgctggtcatcaccttccgtgtcacatttctgctcaaaacagtcaatattcagctgctgtccctggagtggctgccatt

SEQ ID NO: 92317 - DNA, 122 bp, Homo sapiens
tccagttgagcggcaaggtctttgagaaaagacttcatttcccaaaaggctccgcgtctgcggagtcgcagggcaccataggaaatgcagttccctccgagcaccagagagtggatttccgg

SEQ ID NO: 92318 - DNA, 122 bp, Homo sapiens
ggaggttgaggcttggaagccacagggccccgtggaaggagtgcatccccccaccctcctcgttctttgtcctcactatttaaagtccagggtcaagctgggcacgagacaggtaaacaacc

SEQ ID NO: 92319 - DNA, 122 bp, Homo sapiens
tctcaccccgagcagaggggacagctgtgggtgcacagtcagcagcgggacgcggagactcggctgttctctcgcgcttcttgagcgggtgtttggccaattgtaaatttccatgtcgccac

SEQ ID NO: 92320 - DNA, 122 bp, Homo sapiens
agccattaatttctgggaattgcccacaaaatatactaaaatttattccgacccctgactcgttttcctgtttccgaaagccctcctacttactgtcaagtgaacaaagttaggcgcccacg

SEQ ID NO: 92321 - DNA, 122 bp, Homo sapiens
tgggcgtcgctcggtcgttggggtgccggggacgtcgtgatgagaacggcgtcccagagacggcggtgacagagccgggacacgtgacagtcacagggtcacattctgcggtccacgagttt

SEQ ID NO: 92322 - DNA, 122 bp, Homo sapiens
ggcaacaaattgtccacagggagattatctctgtggattaaccatagcaaaatctaaattcggggtcaacttcctcttgctactattccagtcactgcactatctcttggtgactcacagtt

SEQ ID NO: 92323 - DNA, 122 bp, Homo sapiens
ggagaactctttcacaagacagcactagggggatggtgattagaaagcacctcatgatcccgtctagttcctgcagagaacagattagccccctatgcagcacacacctttgtgaggtccct

SEQ ID NO: 92324 - DNA, 122 bp, Homo sapiens
ccctacgtggagagtgaggatgcacccccacagaagaagataaagagcgaggcgtccccacgtccgctcaagagtgtcatccccccaaaggctaagagcttgagcccccgaaactctgactc

SEQ ID NO: 92325 - DNA, 122 bp, Homo sapiens
tgcaagcggtctctcacaaacgcggtggccaggccccgcagagcatgggatgcgagagtccgtttctagaaaattcagaatcaggcagcaacactctgtgatgctagaggtcaggaatggtg

SEQ ID NO: 92326 - DNA, 122 bp, Homo sapiens
ggaagaaccgcatcttggcacctagacttgtgaatggcagctctcctgcatcaccctccccgttccaagaggaggcacgagaggccgacgattacaattcactaaaaatccccggcccctct

SEQ ID NO: 92327 - DNA, 122 bp, Homo sapiens
ataatcttatatcacttaaacgcttactttattatggttgtaaagcagagggagataggacgtgacacaaaaggagaggtctcgatgagtttcctaacaacagtagttgccatatacttcac

SEQ ID NO: 92328 - DNA, 122 bp, Homo sapiens
cttgccccagctgggacagccctgctctgaggaccagacacaggcaggtgttgtgctatccgcagtggctgtttctggaaggcaggagcctgccttcacttctgcaccacttagcacagtgc

SEQ ID NO: 92329 - DNA, 122 bp, Homo sapiens
gggaggctggagcagctaggatccacagtaaactccctccctgggctcctgggagaggcccggggccacgggcagggcatgtgtctatacctgctggctcagttccacctgatcccctctct

SEQ ID NO: 92330 - DNA, 122 bp, Homo sapiens
ataagaagttttttctgtttaagacagccttcttctccactatttgtctggtaaatacctcgtcttcaagccccagcctaaggacgcctcctccgggaagcccaccatgacttttccaggca

SEQ ID NO: 92331 - DNA, 122 bp, Homo sapiens
tacgctccagagctgcttccaggcagggaccccggctgagagaagccagagccagagagtcgcaggcttgcttgctcttatcttccctctgctgggggggtcgaggggagatctggcccctc

SEQ ID NO: 92332 - DNA, 122 bp, Homo sapiens
tcactgcaccccagctgctgctgaccctcttctgggtcgccacgtatgggactagaaggccgtcccatgccccactcccagacgcagcccttcggagtctcttgcgttctgggggcagtcgc

SEQ ID NO: 92333 - DNA, 122 bp, Homo sapiens
atcccgtgacttcgttaaacctttctttccccttagaatggtgccaggttagtcattccacgctcctggaaagggaaatgagctttttattccaacgcccctacccaaccctactccttcag

SEQ ID NO: 92334 - DNA, 122 bp, Homo sapiens
tcgtattttgagctgctggttacataagtgggagctcatatgaggccatttggcatttcacggaccccttgtataatcacctctgggaatcaaagggtaatctcagggcctttgtgctgttt

SEQ ID NO: 92335 - DNA, 122 bp, Homo sapiens
gaaataattacatggtggacactgacattttccactgggccattccatgtattaatatatcgatcaattccgggtttatttaccttaggccatctagacagaccaggtgtaccctgctaaaa

SEQ ID NO: 92336 - DNA, 122 bp, Homo sapiens
tggggtcagggcaggaaggaacttcactctgctgcttccgagaacctcggccgtgacattcggggccgggcgggacccgccccacagactccaacttcccctccaaaccccgaagtgaaacc

SEQ ID NO: 92337 - DNA, 122 bp, Homo sapiens
agcttagccctgggtagcgcggccaatggccgtggagcagcccctgtaaactggctcgggcgcccccacgcccgcccttccttcttctcccagcattgccccccccacgtttcagcacagcg

SEQ ID NO: 92338 - DNA, 122 bp, Homo sapiens
gggctgtttgaacgtggaataggatcctattcagaaaagtgctttgtaagccacggtgcccgctggacaatgttttcacaattatcctgcactgctgccgggatcagactgagagactgctg

SEQ ID NO: 92339 - DNA, 122 bp, Homo sapiens
cagagtggttctgagaagcagtcccagcctaggaacccggggatccggcctgtggacccacgggcagggcctgcggggtgcaccggcgctttcgggcggaaggcggggcctcccggccagtg

SEQ ID NO: 92340 - DNA, 122 bp, Homo sapiens
cacctgctcaccacccccctctgctcgtaggtctctggccatcaccctcccagagcccaacggcagcgcaatggggctcacagtctggctgcaccggctcaccgctagtgtgctcccggggc

SEQ ID NO: 92341 - DNA, 122 bp, Homo sapiens
tcactgtatctattatgatcttatcctctttcaatacgatcaaggatttcacattgttgtcggctttttttctatacagcagtcaataacaacacttgactgagagaagtgacagtcttcgt

SEQ ID NO: 92342 - DNA, 122 bp, Homo sapiens
cgggggaggccgatttgaggaagttctgggcctggagatgtcgccagaagggaaaagctgcgcctcaagaggccgcggtgaggcaaagccaggcaaaaaaaggccatcgggacacaggagct

SEQ ID NO: 92343 - DNA, 122 bp, Homo sapiens
ccacttccgacctgtgccggaaaagcccatagagaagccacctggctgctagagtgccgccgcgcgtgccatagaggagagtggcctctcctgcgtagagccggggaggggctggagagcgg

SEQ ID NO: 92344 - DNA, 122 bp, Homo sapiens
gacatggctttcagaaaacgggaagcgctcagaacagtatctttgcactccaatcattcacggagatatgaagagcaactgggacctgagtcaatgcgcaaaatgcagcttgtgtgcaaaag

SEQ ID NO: 92345 - DNA, 122 bp, Homo sapiens
ccctttctggctactcctttgagtccaagtacagaaagctcagcaggtgagcatgtcacacgttagcagacaaataccaaacatacttttacttctggaatcaagagcagcagaagttattc

SEQ ID NO: 92346 - DNA, 122 bp, Homo sapiens
gatgatcctgagcatggtgctgtgctgtggcatccggaacagctccgtgtactgaggccccgcagctctggccacagggacctctgcagtgccccctaagtgacccggacacttccgagggg

SEQ ID NO: 92347 - DNA, 122 bp, Homo sapiens
cagttttgtcttctaaattttgaagctgtgttgggttgtgggagagtgcagtcatattaccgtgcatcttgtatgtacactttttgaaaactgggaaaagtgaaaggtagcccaggctccca

SEQ ID NO: 92348 - DNA, 122 bp, Homo sapiens
tcagaggggaaagaattcttctggtgaacatcacaacctgacttggcccccaagcttccacggcaatttaaatagagaagtactcaacctttaccacctagagagccaggcagtctagaaag

SEQ ID NO: 92349 - DNA, 122 bp, Homo sapiens
tggtgttggctttcagaccgatgagcagaacgagagcgtccagaaacaggcgcccgcacgcggaccactgacttgatgaaggctcaaagaccatttaatggcatcttttaataaggatactg

SEQ ID NO: 92350 - DNA, 122 bp, Homo sapiens
attcagtaagacgagtgacgaggcgcgtctcagcggaaccccacccactgccgtcaccatcgctgaccactccattggttgatgtggtgagtgagttaggattccacctggcagtgaccttc

SEQ ID NO: 92351 - DNA, 122 bp, Homo sapiens
aagttaaatcacttgcctaaggtcatgcagatcattaatgccatagccaagacctgagcacgttctcctaaagccaggtcaggcctcttgtcacatactccattgactctagtgcctaaccc

SEQ ID NO: 92352 - DNA, 122 bp, Homo sapiens
cccttaaggaatgaggggagcacgtgacccgctgggggggcggcggggggagggggcgggcggactccgagccattttggagccggtgtcagtttccactctgccttcagcggtgcattttt

SEQ ID NO: 92353 - DNA, 122 bp, Homo sapiens
gagagggccgggaggagcgagcggggctgacctccaaggggccgccccaagtctcaggaccgccgactctgcccttcctctccgccgtctggggccaacccgcctcgttggcgcgctgcgcc

SEQ ID NO: 92354 - DNA, 122 bp, Homo sapiens
aagaattgaagaaccagaaattgggcaatctcctgccatgctattgggtcttgtggaaatcgcgggcccggcgctggcacacgggtgggtccaggtgggaggccactcttctccctggcttt

SEQ ID NO: 92355 - DNA, 122 bp, Homo sapiens
taggaaaaccgagtgacttttttcgtgaggggaacccatctttgtaagcattcgcggaaacggcagttttattaccgccgggaagggtcccctgagtgtgtgccccatctgagttccgagct

SEQ ID NO: 92356 - DNA, 122 bp, Homo sapiens
caccccaataccgcgcttttccgatgggcttaaaaaacggctcaccacgagattatatcccgcacctggctcggagggtcctacgcccacggagtctcgctgattgctagcacagcagtctg

SEQ ID NO: 92357 - DNA, 122 bp, Homo sapiens
ggaggaccaaagcggcgcggaccccggcagggcaccgtcggaaacacgctccgcgggcgccgagcccgagacactgacagacccacggagaacgtttccaaacaggattatagcttttaacc

SEQ ID NO: 92358 - DNA, 122 bp, Homo sapiens
actgacgattgtttcttagacggtgttggctgatgggatttctggggcttgcgggttcagcgttctcaacaatctctgacgagtgaggtggttagagagattacccacttttgcagcggatt

SEQ ID NO: 92359 - DNA, 122 bp, Homo sapiens
ggaagagggaggcgggggccgaggggcggggttgagactcccgcggtgggctcggtgggccgcgaggctgtccgggagcacgggaggagggtctcggcccggcctcccgcccctcccgccgc

SEQ ID NO: 92360 - DNA, 122 bp, Homo sapiens
tcactccatcctgagcttcccagctgctgcctctgctccgaactcccacggggaaagcagcgtctctaggaccaggggctccgagcatggcacagcgccaactctcgtctcttgccgcctcc

SEQ ID NO: 92361 - DNA, 122 bp, Homo sapiens
atagttcacatcagtcagttctttttatctgagtccttcttatacaaagtccttcttacacgaagttgtgtgcaaatgtgcgtgcgtgcatgtgtgtgtagaactaactctggcactagata

SEQ ID NO: 92362 - DNA, 122 bp, Homo sapiens
tcacctcgagccaggctggtgatggagatgggcacactcactaggccctgctgggaccatcgagacactgagatccccacagcggggagcggctgaaccagcctcgggggacgacccagcag

SEQ ID NO: 92363 - DNA, 122 bp, Homo sapiens
tgttggtccagagtcgaggcccctgtgggtctggagtcgaggcccctgtcggtccggagtcgaggcccctgtgggtccagaatcaaggccatggtacaccagctgctccggagaccttggtt

SEQ ID NO: 92364 - DNA, 122 bp, Homo sapiens
acctcaggtgatccacccatctcagcctcccaaagtgctgggattacaggtgtgagccaccgtgcctggccaatttttactggagtaaggatgttgataccatcaagcctcacacttctgct

SEQ ID NO: 92365 - DNA, 122 bp, Homo sapiens
caggggagggcacggcgcaggtacgagcacgggaggcttggaggtggaccctgcccaggacgggaaagctccccagcccctgggagtgcgcacaccaccactgagtccttggggttctgagc

SEQ ID NO: 92366 - DNA, 122 bp, Homo sapiens
tggctcatctgcccgcaccgtccgccccgccgactgagctccccacaaagcacacagaggcgcagagccagcgctgttggagtcttttattgtgttctgtcaccgaggtcgcagccccgagc

SEQ ID NO: 92367 - DNA, 122 bp, Homo sapiens
tctcgcggttcatgacagcggtggcgacagtggcgaataagcgggagcactagctccacacgccagacacacgacggaaccagaatgcaactcgccgcctggacggtacggcagcgccttgg

SEQ ID NO: 92368 - DNA, 122 bp, Homo sapiens
aggatggagggggccacgtggaaaggaatgtgggtagcatcctggggctgagagcatccccgggctgacagcaggtgaaagaaaaggggcctccatcccacaatcactaggtgcctgaactc

SEQ ID NO: 92369 - DNA, 122 bp, Homo sapiens
gtcagcagagcccctgcccctctcccagggcctggaggctgtacctggccttgccttcggcggaaatcctgaggtctgagtcgctcttatgaagcaggcacttgtcggagacactctctatc

SEQ ID NO: 92370 - DNA, 122 bp, Homo sapiens
atctcgtggagtactcagatacagccggtatagtgaaggctaatagcatcagcacactttcgcgcattaatcttggagtaattaaaaataaaaacagtgagctatggggttttgttaaacaa

SEQ ID NO: 92371 - DNA, 122 bp, Homo sapiens
ccacgcacacccccacattgttgtcactgcgagaacggagggcccagagccgagtacactcggccagggtgagtgatgggcaggcacagagctgtgtctctgaccaccctgctacccagctt

SEQ ID NO: 92372 - DNA, 122 bp, Homo sapiens
aaatgggaggttacagcagctgttagagtgtgtgcaaatggttggcactgctggcggcgtcgcttgggcatccgtgtcgctggttcttcatgtgaggcctgagcttgatcccatggaaaaag

SEQ ID NO: 92373 - DNA, 122 bp, Homo sapiens
gacggctgcaggccccagagtccacgagggtgggtacaaatcccctgggcacaaacagcccgggatggacaccatccagctctgcaccccctcttcccgcactcccctggcaaactcagtag

SEQ ID NO: 92374 - DNA, 122 bp, Homo sapiens
attaggatgtggttccttttgccctttgtcccttgcctgcctggtttcctttgcagcactcgtcacagtctgacgcggtcgcctgcatctctctgtgctttggttgggcgtctcctttagag

SEQ ID NO: 92375 - DNA, 122 bp, Homo sapiens
ctagcgcagagccccagcccacctcttcctgggctctatgaacacggagggcacgctggccgtggggtccaggatcttgtcgatctgcatctgtgccctgcggtacacccggtgtcgctcct

SEQ ID NO: 92376 - DNA, 122 bp, Homo sapiens
aaataggggtttaaatagagatgtatgctctgtcagttttttttttgttttattttgaaacggagttttgctctgtcttgtgctcactgcagcctccgcctcctgggcttaagtgattcttg

SEQ ID NO: 92377 - DNA, 122 bp, Homo sapiens
ccctcccggccgacagcttttaggtagacgtggaggcgactcagatcgcctcgcggttcccgggatggcgcggtcgcccccaacgcgaggctgcctggggcacccggctcttttcctgggcg

SEQ ID NO: 92378 - DNA, 122 bp, Homo sapiens
cctggggtccaaggcactgctactctcccggccgcccgcaaacaactgaatctgccacgccgcgccctggccaaggacttttcaaatctcccgccccggccccattgggcaagctcgtcgcc

SEQ ID NO: 92379 - DNA, 122 bp, Homo sapiens
agagcggcccggacgggaagctgggcccatctggagagctcatgtcacctgcagcatctgcggggacaggtggctgcgggacactctactctgcagcctgacaggggctcaccctccgccca

SEQ ID NO: 92380 - DNA, 122 bp, Homo sapiens
cccgagaggacagtccccaggccttgctaagcatgcgtggtatcaagaggtgcattgaggcgctcctgcagcctcctcccggcacgggactcctcacaacccccagcctcagcttccctgac

SEQ ID NO: 92381 - DNA, 122 bp, Homo sapiens
agggcccaatgagacaccctccagagcgccagggcagtgtagccagggggccgtctaaatcgaatggcgcacagaaccagagggcggggggacgtggccatccaccgggagaggggatgaaa

SEQ ID NO: 92382 - DNA, 122 bp, Homo sapiens
cagccagccagtcaatggctgtgtccagagcttcccgcctcgggctcagcgtaggtggagcggacgcctccactttcatttctgattttagtcttctgcgtctcctctcttgtttatttgtt

SEQ ID NO: 92383 - DNA, 122 bp, Homo sapiens
ccactagcgtttctcatgtccccgctcatttaatccctgcaacagtctatgagctggatacggttattatccccactttgcaggcaagtgaggtagaggcatggacagcagaagtgacttgc

SEQ ID NO: 92384 - DNA, 122 bp, Homo sapiens
cgggtgggcgtgggctcggcgggcgggcgtgggcttggcaggccgtgcattgggagcggccggccggtgctgctggccctgggcagtaaggggcttagcacccgggccagcagctgtggagg

SEQ ID NO: 92385 - DNA, 122 bp, Homo sapiens
aggggcccggccgccctcactgccgccgccgtagtagcggccaccgccgcctccgccgcccgccgccgccatcttcaccatcgctcccgaccgcctccgctgctcgtccggctgctgcctct

SEQ ID NO: 92386 - DNA, 122 bp, Homo sapiens
aaggggtgacagatggcacctggaaaatcgggtcactcccaccctaatactgcgcttttccgacgggcttaaaaaatggcgcaccaggagattatatcgcgcacatggctcggagggtccta

SEQ ID NO: 92387 - DNA, 122 bp, Homo sapiens
gcatcgtccaatgcccacctcgacctcccaaagtgttgggattagaggcgtgagccaccgcgccctgcctgcatgtggctattgagatgtgctgtatgatacacaccggactttgaagactc

SEQ ID NO: 92388 - DNA, 122 bp, Homo sapiens
taagataggaggaggagacggggcctcaggctggcagggccttaaaatcctgcagccccacggccagcaccaggcagtggggacggagccccaggtcactgaaggctcccttgttacttctg

SEQ ID NO: 92389 - DNA, 122 bp, Homo sapiens
gaactcccggtccccattgtggggaagacagcccgtccactggaggcagggcagcggctgcgacagccactctgggggcctaagttcagggtcctgcagacacctgcgcctagaggtggctg

SEQ ID NO: 92390 - DNA, 122 bp, Homo sapiens
aggtcagcgctcctgcccctcggggcactacaaacccacaccctgccttccaccgcacaccgtgtctccccaggcccccagggccactctctgaaacatacagggctctgtctaggaaatgc

SEQ ID NO: 92391 - DNA, 122 bp, Homo sapiens
gagaagaagaggaggcctcttcaaagaacactgagaagtggccagtgaggaggaggagaacgaagggagtagactctattatttcaagaaagatggcgtggataaactgttagatgctgctc

SEQ ID NO: 92392 - DNA, 122 bp, Homo sapiens
ccaagggtgggacgcccgcccgagccgctccgagcctgactccgcgcaagggcccgcgggcggacctcttggccttgtctctcgtgggaaaagactgccccagcctccctttgttcaaccca

SEQ ID NO: 92393 - DNA, 122 bp, Homo sapiens
tgtgatcctcccgccttggcctcgcaaagtgctgagattacaggcgtgagccagcgcgctcggcctgtttctccgaaatctgaagactcaatatcataatcaagagaacgcctcagcaccgc

SEQ ID NO: 92394 - DNA, 122 bp, Homo sapiens
tgtagatggatggagaggctggccgaggggaatgggagggagaggtcctctctagaggaacgacttgggaaatggaggcttttacaagttggagcatccagactcatcaagctaattgtccc

SEQ ID NO: 92395 - DNA, 122 bp, Homo sapiens
cgccccttcctgccctcaaaaggtcaagtctcgtcttaatggacagatgatgggccagctcgccaccgcctaaacgttccagcgcccagggagccactgtctcgccatcaggccgccggctc

SEQ ID NO: 92396 - DNA, 122 bp, Homo sapiens
caacgtggcaagaagtgaagtttcttcatcctcagttccattcctcagaaaaattgatgccgagtttgttgtatgtacctccaacctatttttaaaatgtacatacaaaattgagtacaata

SEQ ID NO: 92397 - DNA, 122 bp, Homo sapiens
gcagcagctgactctgatattccccatctcaccttagcagtctatatcaagcaaagggcacgcagaatcccatgcacccatcatgtatgtaataaaaggcagatattatgtggtctcttgaa

SEQ ID NO: 92398 - DNA, 122 bp, Homo sapiens
atctacagtaaagcattccagagtgctagtggttcccaaagaattcttcttggcggggtgcggtggcttatgcctgtaatccccggactttgagaggccgaggaggatttcttgagtccagg

SEQ ID NO: 92399 - DNA, 122 bp, Homo sapiens
gctatgctaaagccacacataaacaggagcacaaggcggggatgttttaacctaaatgagcggaggtagagcgtttcaggaagaagaatacagaagtgaacatgccgaggaacagatagaat

SEQ ID NO: 92400 - DNA, 122 bp, Homo sapiens
gattagacgcagacagctggaatgccaggtctttgttgcagcatggacaggagccaacgtcgttcaaccacagccaagagggacctgggaaagtcttcttaagaaggaggggaaggcggggt

SEQ ID NO: 92401 - DNA, 122 bp, Homo sapiens
ggcataagggcagcatctaaggtgcagaaatgcttctgacgggtcagataacacctagcccgcagccgacgctcacagccgccgattcagacccgcccgggttccgcaagccccaggctgcc

SEQ ID NO: 92402 - DNA, 122 bp, Homo sapiens
caaggacaagaccaacctgatcgtctacatcatctgcggggtggtggccgtcatggtgctcgtgggcatcttcaccaagctggggctggagaaagcgcaccggccccaaagggagcacatgt

SEQ ID NO: 92403 - DNA, 122 bp, Homo sapiens
aggggtcagggagttccctttccgagtcaaagaaaggggtgacggacgcacctggaaaatcgggtcactcccacctgaatattgcgcttttcagaccagcttaaaaaccggcgcaccacgag

SEQ ID NO: 92404 - DNA, 122 bp, Homo sapiens
tcgaatcgtctggagttgtaagtggtttctgattgaacacagctgtctagctgctggccacggggtgcgcggaggaggcggggctagagggagaaaagggtgggggcgagtagcctggaggc

SEQ ID NO: 92405 - DNA, 122 bp, Homo sapiens
agacgcggggctgcaggcgcggagctgcccagagagggctccagggtcggggcccacagtcgcccgcgcaggaacagaacaggaggacgcccggggtcccggctgccggcccagccgcaccc

SEQ ID NO: 92406 - DNA, 122 bp, Homo sapiens
ggttttcattattcacagtgtcagaatacagagcagcgttctgtgcctccaaacccaggccgcgctggcccgttcagagggcccgaggctcaaggatggcagggaagctctacgggttaagg

SEQ ID NO: 92407 - DNA, 122 bp, Homo sapiens
aggtctgacacacccccacctcccctagatacaccccctactgatccgggaccggaggagcgagtccagtcgcaacaaactgctgagacgcacagtctccgtgccggtggaggggcggcccc

SEQ ID NO: 92408 - DNA, 122 bp, Homo sapiens
tattttattttttttttttgtggcaattgtgaatgggattgtgtttctgatttggctctgcgcttgaaggtagttggtgtacagaaacacttctggtttttatacattaattttgtatcttg

SEQ ID NO: 92409 - DNA, 122 bp, Homo sapiens
atgtgagccagaatgctgccaatgcctcttactatctcctgcttaaccgggctgtctcctcgtggccagcaacgggcaaggagatagtctctctgtcaattcagctacttatctgacataaa

SEQ ID NO: 92410 - DNA, 122 bp, Homo sapiens
agccaccctcctgcttcagactcccaaattgctgggattacacacgtgagccgccccgtccggctggggcactgtgatttttaataactctcatgccacccagttgtctacaatccagggac

SEQ ID NO: 92411 - DNA, 122 bp, Homo sapiens
agtaaggataaaggggtcagagaaaagagaggtccgtgggggtaggggggcagtccgtgccggctgtgggccaggctcacccgctgactccggacacaggtcctgagtaacgtgaacctgcc

SEQ ID NO: 92412 - DNA, 122 bp, Homo sapiens
ctggaaatagcatttttgacctttgttccctcagttcttccaatagttgcagaagcctttcgttccctttatggaaactctctttactcaaaaaatgagaaataaagtaaattaatgtttta

SEQ ID NO: 92413 - DNA, 122 bp, Homo sapiens
tcccgccccgggggtggggctgggcgggccgggcggggcggggctgcgctatgcaaatgtcgcccacgggcggccaattgccggcgctccccgcgcggctctgagcgccccgtcccgccggc

SEQ ID NO: 92414 - DNA, 122 bp, Homo sapiens
acgcaccctaacctgctacacacatgcactctctcagtcccacaggctaccagctacacacgcactgtcttggtcccaccggctagtcgctacacatgcactctaacccactaagcatgcac

SEQ ID NO: 92415 - DNA, 122 bp, Homo sapiens
aacagggaacgcgcaggtataggagcgctggctggaggctcctcgagagctccccagacacgcccccgtgcgtacgcccccgtgcgtacgcccccgctgccgccaccttcggttgaccaccc

SEQ ID NO: 92416 - DNA, 122 bp, Homo sapiens
tcacagggagagggttagagggtacccggctgtcctcttagggaggtaggacttgaagcacgccctaaaggaacagaaagctcaaaagagggggcagacatcccagggaggaggtcgctgtg

SEQ ID NO: 92417 - DNA, 122 bp, Homo sapiens
gcaaggcagcgggggcggggcggggtggggccgggcctgccggggcggggcggggcggggcgggacctcagctgcacttgcaggagcgcacgatcatgttggacagctgctccaccttgggc

SEQ ID NO: 92418 - DNA, 122 bp, Homo sapiens
tccccaccggcttcagcctcgggcctcggctctgctcctccctcctacacacaccccggacgcgtctgtccaggtccgaaatccagatccacacgtccgtatcccgaggcgggcgtgaacta

SEQ ID NO: 92419 - DNA, 122 bp, Homo sapiens
cccagagcgccccagttaggtaagaaagcgcgcgaggaccggactacgagtcccagaaggcgtggcgtcagcagccatgttggtaaagggcgcccggaaaatgtgggaacggctagagagtt

SEQ ID NO: 92420 - DNA, 122 bp, Homo sapiens
tgaacccaaggctgtgtgattccaaaccctgggaaccattatttgctaacctcccccctacgccccccccttttcttttggtagggacgaggtctcgctatcttgcccagactggtctcgaa

SEQ ID NO: 92421 - DNA, 122 bp, Homo sapiens
ctgcaggaaggctccatggcccatgtggaggcgctgggccgggccgctcagtcctccaagcgcccctagagccatgatcaggcccaggccacggcccctggggggagacagaggaggagctc

SEQ ID NO: 92422 - DNA, 122 bp, Homo sapiens
attcaacagtcttgtctgtttccatttcggagtgtgcttcctccttcaattgcacattgccgtattcccttccagtttgcattccccctaatgactgagttaactaaactggcacagcctgc

SEQ ID NO: 92423 - DNA, 122 bp, Homo sapiens
ccgatcccagggggtgacaggcgcgcacgcctttcaaacacgtgttaaaatccaagacgtcgtctcaaatgccagagatttgcgggaatgctcctggaaggcctcaaaatcgccgcaaggtt

SEQ ID NO: 92424 - DNA, 122 bp, Homo sapiens
gttgaatgcctcaagaggaagtaaaaagttacatttgcatcatttctgtatttgatcagccgttgtttacctgacttgttcttaggctgccttagattctgagctggcttccctttaggctt

SEQ ID NO: 92425 - DNA, 122 bp, Homo sapiens
gcggtggccgccccttggggcttggggtgtgtttatttgcataagcgggcgcgcgccgtccgggctgggtggatccggcgggatttgactgctccgctgtccagaggcggagaagaagaggt

SEQ ID NO: 92426 - DNA, 122 bp, Homo sapiens
cgtaaagtctcatgcaaaggcgcagagacccaggggcaggagcccaggctcccgctccaccgcgactgccctactcatgtgggcacacggcccctgcccttctgcgctgcccacccccagcc

SEQ ID NO: 92427 - DNA, 122 bp, Homo sapiens
ccctctcagaacggctgggcggaacggtgggtttgtgagccctccaggctcagggtgggtcgctcaggggccatctggggactttgggaagcaatgaaagttgtaccctaggatttttttct

SEQ ID NO: 92428 - DNA, 122 bp, Homo sapiens
ctgggagaatttagtccagtatatatatttaaaaaacaaaacaaaacaaaacaacaacaacgtaaagctaacgtctgtgtaaagagaaatctaaccaaattaggccatgtgtcaaagaccat

SEQ ID NO: 92429 - DNA, 122 bp, Homo sapiens
ttaaacattggccagcgtgttccgaaggcttgtgctgggcctggcctccaggagaacccacgaggccagcgctccccggaccccggcattaggcgccagctgccggctatctgcggtctttt

SEQ ID NO: 92430 - DNA, 122 bp, Homo sapiens
ctccagacatgactgtgtctcctgtgcggggtggggtagaatcacctccgggtgagaccccggcccagtcacctgctcccgagatggtactgctgcagtcattgtgtcagcagctcagagag

SEQ ID NO: 92431 - DNA, 122 bp, Homo sapiens
ctttccgcgacaaagcgcagctccgggccagacggtcctgcccggccctacccgcagccccggccccaaccagaggccccacttcagcccaccaggcaggactgcagcggggcacgccccac

SEQ ID NO: 92432 - DNA, 122 bp, Homo sapiens
aagctgttgagcagtctttaggatatgtaacagcctattttttggacgatataggaaccacgacctcttaagtctcttagttctcctactttatacccatgaggtagaggcaggtgcactcc

SEQ ID NO: 92433 - DNA, 122 bp, Homo sapiens
taaatggaatgacatggaagttatagttggctacgataataatttatcagtggcatctgccggtttatcattaataatgaaaagccaattagatgtggaacagttatgaaagcatcagtgct

SEQ ID NO: 92434 - DNA, 122 bp, Homo sapiens
tgcgagaacggcggttcgggaggacccagcaccagacgcctcaggtggcgccaataggagcgccgcagcgccgggccctcgacgccgtccggggcggccgtggagctgcaagcccggacacc

SEQ ID NO: 92435 - DNA, 122 bp, Homo sapiens
actgtttattaaaggtgtgttaagggggcagccacttccctccgtgattacagcccccagcgtgggtggacctgtgtgggtccgtcttggggttccctcgttgaacatgctgtcaaaccagg

SEQ ID NO: 92436 - DNA, 122 bp, Homo sapiens
acttggggcaaagcgtggcctcccaggggtgcgtgggcagcgggacgcccatggtgtgaccgggtttgtgcctccatagggaccgtctgccctgtgcagagagcccctgtggggcgggaagt

SEQ ID NO: 92437 - DNA, 122 bp, Homo sapiens
atgaggtggggcggctgtctgccaagacccggagcatccgcatcattaacacgctcacgtcgcaggagcacacactggaggtgagaactggtgacaaggagcaggttagaaggaatggggaa

SEQ ID NO: 92438 - DNA, 122 bp, Homo sapiens
gctgccttgcttcctgctcaccgaacagaaaaccaacattaagactctgagaaatgccagcgaggccctgagccagctgctcccacatctgggccccctgcccaagtgggccgtcgcgcacc

SEQ ID NO: 92439 - DNA, 122 bp, Homo sapiens
cctcagtggtctgctggatggtagcaatcttcttccagccccacttttcaaagagtttcacgcgggtagggttgtggagtgtggctgatgggtgcgttcggaagaaagtggggaaacgctgc

SEQ ID NO: 92440 - DNA, 122 bp, Homo sapiens
agccgggccggaggtgccaagtacatccagcacctcagccaggtcgggccgatgcagcaacgagccaggtagtggcgggcggcccgatggcaggaacgtctcccggaagcgctcggacatgt

SEQ ID NO: 92441 - DNA, 122 bp, Homo sapiens
aaagtagattgagcatctctgaacatactacaccggcacacacacacacaaacactcatccgatgaagggtaacaattcaatagccgggtgccagggatttcctaaaacggtccagatgtta

SEQ ID NO: 92442 - DNA, 122 bp, Homo sapiens
ggagaaaagaatagtgacacatagaccaggcacctggggtctaatatcttgagctggtcccgactccttctgcaacttctctgtctgtcctagttccaccagcactgcttggatactggtgc

SEQ ID NO: 92443 - DNA, 122 bp, Homo sapiens
ccagacccccaatcccacagaagcgccgtcccccagcggcacagcaccccctccccggcgcggtggtagggcccgacgtgacgtcacccattgtttacaaatcaacccgagccggcaggatt

SEQ ID NO: 92444 - DNA, 122 bp, Homo sapiens
ccggccggtcctgccatattagggcttcctgcttcccatatatggccatgtacgtcacgacggaggcggacccgtgccgttccagacccttcaaatagaggcggatccggggagtcgcgaga

SEQ ID NO: 92445 - DNA, 122 bp, Homo sapiens
agcagtggcacacgctgccagttccagaccaagttccctgcggagctggagaaccgggtacgcaacctggctccccacgcctgctctggcgagggagagagactcaccggggacgggaaggg

SEQ ID NO: 92446 - DNA, 122 bp, Homo sapiens
cagctgggggctctctgtctcgaaaggggcctctgtgctgacagccccagtccctcagtgcggatcacacatgtggccttgccctgtgccaggtgcttgactgggcccttgctgaatcagat

SEQ ID NO: 92447 - DNA, 122 bp, Homo sapiens
ccaattagttggcttcgaacagtccagtggctcctctaactggatacagccctcctgtcacgttgctttcgtggggcccttgttatggtaattacgataatacacgtttctccagcccacac

SEQ ID NO: 92448 - DNA, 122 bp, Homo sapiens
tcagctcgtgggctgccagcgtgcaacctctcacctagataatggtatataatataaatacgtttcccttccccccttttttctcttcctcctctttctcctttccctcccattttccacat

SEQ ID NO: 92449 - DNA, 122 bp, Homo sapiens
gtggcccaggatgacctggtggcccagcagggcccctgtcacctggaaggaaaaatggggcgtaactaagtaatacatgagtctggggactgagggcacaggtagccggtgtggcaccagca

SEQ ID NO: 92450 - DNA, 122 bp, Homo sapiens
agggtagcaggcgaggagtggcaccagtttggggactctctccccgcgttctgtaagaatcggcggcagccagcaggcggggaggcgggggcacgtgtttggatgtgggtgcttgtgtaacc

SEQ ID NO: 92451 - DNA, 122 bp, Homo sapiens
ggtgttcccgcgcgcctcacccgctcagagcccgcggcctccacttccggcggggcaggacgtgcagaggtgcctagtcctccagccccgccccatatccatgattgacgctggcgaggacg

SEQ ID NO: 92452 - DNA, 122 bp, Homo sapiens
gccccaggccggctgagacggccggtccagggaagctccgccagtactgggcacactcaccgaacatggcttccagcagccgcgtctggacctggaacacctctggatctttcaggtcttcg

SEQ ID NO: 92453 - DNA, 122 bp, Homo sapiens
cacagctcctggtttacgagcgcctccagcaactggtaggtccaggccccgaagcagggccgttggttgctttactgtgaagcgggtgactccagggcaaagaggtgatgaagcaagccctc

SEQ ID NO: 92454 - DNA, 122 bp, Homo sapiens
tccgcctatccttggccccctccgctttctccgcgccggcccgcctcgcttatgcctcggcgctgagccgctctcccgattgcccgccgacatgagctgcaacggaggctcccacccgcgga

SEQ ID NO: 92455 - DNA, 122 bp, Homo sapiens
ctaagcagacaaaaggcctgctcaagtgtgcaactatttgggggcaggggccactccctccgcgggtggttaagggctgtgctgcttggagccagctgctgagtcctggagaagaatagagc

SEQ ID NO: 92456 - DNA, 122 bp, Homo sapiens
aggagcagcccagaggggagccgggaagggaccctcgcccttaccatctatccccatttccgcatctcttgcactggtaccccgggcgccacgttctcagttcctgggactgaaaactgcag

SEQ ID NO: 92457 - DNA, 122 bp, Homo sapiens
atggagaaatgtctgatgttgaagctaatgatctctaaattctagtgatgactagatcttcggagttataaacacctcacagatagttgatgcttgacattagtgtctaaataaaccttatt

SEQ ID NO: 92458 - DNA, 122 bp, Homo sapiens
cgccgcacctacttcccaatataaccaactacggcgtgggggagcggaactgcgagaaggcggcagccaaagtgccattaaagctcggggcggagaggatgcgttacctgggtcccgtctgc

SEQ ID NO: 92459 - DNA, 122 bp, Homo sapiens
tctcgggacgtcccggagagcccccagcatgcggccgacacccccaagtctggggaaccgcgggtaccagaggaggctgcccaggaccggcccatgtcccccggagactgtcctccggaaac

SEQ ID NO: 92460 - DNA, 122 bp, Homo sapiens
agctttgtaacttgggcctgttatttaatcttcagagccttggtttcttcatgtacagaacgtgaatgcagatagtaacagagctgtaaggggtctgatgatggatataaaagccaagcata

SEQ ID NO: 92461 - DNA, 122 bp, Homo sapiens
aaatcatcagctgggtggatagaaaatcagctccctcggacttggatgggggcagagatgcgacctgagaaagcaacattttccagaaatggccttttaggagcagggccagagggggtgag

SEQ ID NO: 92462 - DNA, 122 bp, Homo sapiens
cacggatggagaagaggtcgtgggtcttctgagcccagctgatacacaccaagtaatccacgttaaggggtccgcagccccccacccaattccccactttccatccaaggccaaagagcagc

SEQ ID NO: 92463 - DNA, 122 bp, Homo sapiens
aggtcataaagttcactgtgctaggagatacagaaatactttcttgatgacggggccaaacgttcattaagtgctttcatgtgccctgcatttgaatttattcatgatagcttcaacattct

SEQ ID NO: 92464 - DNA, 122 bp, Homo sapiens
accgatggctacagcatgtcctgacctggggacagctggggacaggttgtggggctgtttcgtcacagctgctgtcacattaactgaccccagccctgggggagggtggctgcaaccccagc

SEQ ID NO: 92465 - DNA, 122 bp, Homo sapiens
ggagagcggggagtcagagggtctgcggtggccgagggagggaccctacgacggggagcccgcccggtgccgctcttcttcccctccccgcccctccgctccccccaccccgtcccttccgc

SEQ ID NO: 92466 - DNA, 122 bp, Homo sapiens
ccggtgccgcacccaacgtgggcgtggggagtggctaagtcagggtctgaggggcagggccggggcctggctgcgagctggggccgggggactcggaggagcggggacccagccccgccgcg

SEQ ID NO: 92467 - DNA, 122 bp, Homo sapiens
agcttatcagaagtaaaagccttgtcaggatggcacattgtgtgtgagtgagtgtgtgagcgcaggagggagaggagagaagccaacgtgcatcagggtgattacaatatcagcagggccca

SEQ ID NO: 92468 - DNA, 122 bp, Homo sapiens
aaacaacccaagagggtgcctcctctctgaggtccccttttctttcaaggaccactggaacggccaagaaatcccctccccccaggcaactaagcatcaatccttgcagctccgaccccaca

SEQ ID NO: 92469 - DNA, 122 bp, Homo sapiens
gtggaccgcccaacacactctctgtagcagtggatttaaaactgccccatttccaggcagcgtatctgacgtttgctgtgcaaagtcagtggctcttcggagagcgcatagtgcagctgctc

SEQ ID NO: 92470 - DNA, 122 bp, Homo sapiens
gcaaaggggccgcgcattggacggggctcccaagccacagccctgggggccttgaggagtcgtggtacggtccagggcagtcggggctgcggggcccgtgaagccagacgaggctacggact

SEQ ID NO: 92471 - DNA, 122 bp, Homo sapiens
ggcgctgacgtcacctcgcctataaaatgtccggggcgccgctagctgggctttgtggagcgctgcggagggtgcgtgcgggccgcggcagccgaacaaaggagcaggggcgccgccgcagg

SEQ ID NO: 92472 - DNA, 122 bp, Homo sapiens
ccgcgggcgcgtgacgcgtctcgggcctgcccggctgcgctggtctccgctcgggtgaggcggcttggcttcgcttttcaggttaggaaagctccctttactgcgcgttggggggctggggg

SEQ ID NO: 92473 - DNA, 122 bp, Homo sapiens
ccgggccatcaccttgtggctgcctgatgtttactggtggtggggaaccctctcgggccccgctccacacgtgtgactgagagggacacctgacaggattgaacgcgtggcagatcatccga

SEQ ID NO: 92474 - DNA, 122 bp, Homo sapiens
ttggtggatgtttgcaattcccagaatgcttattcttatttagtcctcataggagagtggcgaagggcagcagctttggagcaagggccaccctgcccctccccaccaagccctgagtcgtc

SEQ ID NO: 92475 - DNA, 122 bp, Homo sapiens
ccgtgcgtgcaggtggcgtgggcgcagacgggcctggtgctggcagctacccgccctggccggctgccctccgcagttacctggccgattagttttaaggtgggccctcagagcagatggag

SEQ ID NO: 92476 - DNA, 122 bp, Homo sapiens
ccctgtacacaggcccagcccctatctgtgagctgagcacaggactactgctaacatcctcgctgacaacctgcttctagaaagtacattagggaaatggccctatgggcctggctgggtta

SEQ ID NO: 92477 - DNA, 122 bp, Homo sapiens
tttcagagatggggcagcaggttctcccaggaggagcctgtcagtcccaatgggcgggcacgtggcaaatgaggtggcagggtgcagggtgagggcagattagagttcagtagttgagtctg

SEQ ID NO: 92478 - DNA, 122 bp, Homo sapiens
ggctgccctgcgcctgtgccagtcacaccccaacgtggtgaatctgcacgaggtgcatcacgaccaggtgatggcttccggccaggggagggcggagagaaaaggggcaggcggcggggctt

SEQ ID NO: 92479 - DNA, 122 bp, Homo sapiens
caacgaaaccttcttttgccccctccgcagcagtcgcctccgggctttattgcaagtttacggtaacgagttcatctatttaattcgcggttgcagctcggggatttctattagacaggacg

SEQ ID NO: 92480 - DNA, 122 bp, Homo sapiens
tggaagggtcgtctacgatccggtaaacgtaatctgtagtttgaaccaaggaaagcccaccgtgcctcaaaggaatgacacgagtatccattccaatgccaagccttggcgtaacggctccc

SEQ ID NO: 92481 - DNA, 122 bp, Homo sapiens
agccaggcccttccggcagccccctcaagctccgagctccctcccagcagggcgtccctccgctgcaccctcatggatgccccatccacctgatggcagcccctccttagttctggccactc

SEQ ID NO: 92482 - DNA, 122 bp, Homo sapiens
tcaggaactgcatagtctccttctcgctgccgttgaaggagccctcgcagaaccagcccccgctccccacaaagccagaggtgtggcactcagaagacaggtaggagccaggcaagcagctc

SEQ ID NO: 92483 - DNA, 122 bp, Homo sapiens
gctcgccagacaaaaagaggccgaatttggagagcgcgtcgcgggctcacctctgggctgcgctcccccggcccctccgtcggtctccgagccgccagccgcccggccggagcattgttcgc

SEQ ID NO: 92484 - DNA, 122 bp, Homo sapiens
gggggccagcgaaacgggaggcctctaaatctttaggttggggctgcattgccctggagccgcactcttgagtccgaggccatcttttgttggagaaggcgtcggcgttggcgttttcccga

SEQ ID NO: 92485 - DNA, 122 bp, Homo sapiens
gggcgcgcgtgtcagggcgcaaggaccccgcgataggacccgggcgctcccggcggcgcgcggaggctgggcatccccgccccacccgagagtgcccagttcccaggagacccggcccggct

SEQ ID NO: 92486 - DNA, 122 bp, Homo sapiens
ggaaggcgcgggagccaggggcctccaccccaaccccggctcagagactgggcggcccggcgggggctccctggggaccccagatgggctcagtgctgccacccagatcagatcacatggga

SEQ ID NO: 92487 - DNA, 122 bp, Homo sapiens
ccggcgagaccgccactttcattcctcccgccatggttgcctcaagccacctcctcctcacgtgccttaccccagcaactaactccgaacgggcaacgacagcagcctatcctctacgaaac

SEQ ID NO: 92488 - DNA, 122 bp, Homo sapiens
gcctggccttgcagagcgggagttggcagaggagccgtggaacagaagcgacacctctgccgggggcacttgggccagcccagggcttccctccctgtgcccggatgctgccagctgagtct

SEQ ID NO: 92489 - DNA, 122 bp, Homo sapiens
ccgctgtcccacatgcctgacccgcacagcttacacagatcgtgcaggctgcaggggatccggggcaggaggcggaactggtacagcaaactcctcgcctgcagacagaggacggggggtga

SEQ ID NO: 92490 - DNA, 122 bp, Homo sapiens
catgaaatgtctcactgccttttctgttgtcccgtgctgtggtctgtcccggcgagactccgagggaccgcacattctggatttggggagctgaaatatggcatcctatctgcaaacggggt

SEQ ID NO: 92491 - DNA, 122 bp, Homo sapiens
ccagtaaccataaagtgctaagaatttgttttcaggctcactgttcatatggggagcaggcgtgtagaagaatggaatgtgtgttcaaggacaatgtacttggccctcgggccttgaccaat

SEQ ID NO: 92492 - DNA, 122 bp, Homo sapiens
gcacgttcgcacgtggccatgtcagctccaaggaggatgctgacatcctgctggctggcacgttcgcacgtgtccatgttagctgcgagggccatgccgacatcctgctggctggcacttcc

SEQ ID NO: 92493 - DNA, 122 bp, Homo sapiens
taataagagttaaaggaaaaaaaaaaacaacattctttctggcatgagagacccatgaatcggtctatggcaatgacccaggaaatgctgagtaccttctgagtacaaagcacagctaagtc

SEQ ID NO: 92494 - DNA, 122 bp, Homo sapiens
agtgtccttagccccgcgagaccccgggtccccgtgccgcccaccctgaggctccctctccgacctgatctcagggctaggtttctccaacttgaggtccctggacctgcggggcgtgggtg

SEQ ID NO: 92495 - DNA, 122 bp, Homo sapiens
ttcctgcactaggatcaggaggtctggattttagttcctggggtctgtcttgtctggcttcgtgattctggggaacacatttatctgtttgggcttcatattcttcccttgcaaagatgaag

SEQ ID NO: 92496 - DNA, 122 bp, Homo sapiens
aatatgcattagcaattactttttccttgggcaacgctcaccgcatgcaaatgtgtacctcgcagggcctggtagcttttgttttagctcttgaacagtgaaacaaaagagcacaataaaca

SEQ ID NO: 92497 - DNA, 122 bp, Homo sapiens
cctggctggcaaacagcggacttgttaattacagcctttcaactaagggcgcctgaaactcgcaaacattttgctcgggtgtggattcgctcccgttagttacaaacttgggatcccgggac

SEQ ID NO: 92498 - DNA, 122 bp, Homo sapiens
tgcaggtttgtcactgggtgtactgcaggacgccgatgtttgcggtacaggcggtcctgtcgcccagctcatgagcacagtccccaacagttagtttttcagcccgtgtccctccccagtcg

SEQ ID NO: 92499 - DNA, 122 bp, Homo sapiens
aactcatgccagcaaagatggcatgagttaactcaacccagaaagcccaaaggtttggtgcgcagttctaacgactaccacattatttatttggttttgcctgtctcccctgaccagaacgg

SEQ ID NO: 92500 - DNA, 122 bp, Homo sapiens
cagggcgctgcctttatacgtactggagccgccggccttgtcctcagtgtggccggaagacgactcggggctgctgctgctctcggggcgccgccgccgctctttctcctctgctgccgccg

SEQ ID NO: 92501 - DNA, 122 bp, Homo sapiens
cccaccgcccagtccccggaccgactgtcccacccgcgacccatgctggccccaggttaacgcctgcaaccccggagggccacaaatcaaaggtctggcatcttgacaacaacgctgttctt

SEQ ID NO: 92502 - DNA, 122 bp, Homo sapiens
ccacggctgcacaacattgagaatagactaaaagtcactagtggtaaatgttatgttatgcgtatcttaccacaagaaaacataaaattgccacacaggaccacaaggaccaggggtatcct

SEQ ID NO: 92503 - DNA, 122 bp, Homo sapiens
tactccaagatccgccagttccaggagcacttccagttcgacgtgtgccgccatgaggtgcgctacggctgcctgcgggaggacagctgccacttcgcccacagcttcatcgagctcaaggt

SEQ ID NO: 92504 - DNA, 122 bp, Homo sapiens
cgcgagacttgacaggcaccctcaactttagcccgccggaagcggaagtcaggtggttgtcggattttagaggaaggcgctcggttacattggagaactggagtggtctggagttccacggt

SEQ ID NO: 92505 - DNA, 122 bp, Homo sapiens
cgactccccaggtcagctgacgctgcgtcctcagcgggctgtcaagtgcgtcaggtgacgcgcaagcgcctcacgtgaccataagggggcgtggctctgagcggtgcccggcttccgggtgg

SEQ ID NO: 92506 - DNA, 122 bp, Homo sapiens
ccctgggaaccacaggtgccaacaaaacctttcattgatcgcaggtctcctctgagcctccggcctccataagacccaaaacagatgacacctcttcccagtcccccgcgccttccgaaaag

SEQ ID NO: 92507 - DNA, 122 bp, Homo sapiens
cacagctaacgacgggggcatccttgagtcctgacaaagtcacatgcggaagggcggttgcgtgtagtaagtccttttaggaacacaaaggggccgggcgcggtggctcacgcctgtaatcc

SEQ ID NO: 92508 - DNA, 122 bp, Homo sapiens
gccccttcttagcttccagagcggagccgggaggcaaattccaagcggttgtgggacccacgcctcacccggaactttaagccctgccgtctcgcctggcgcccaaactctgcggacctcca

SEQ ID NO: 92509 - DNA, 122 bp, Homo sapiens
actttcctaaaccagggcatttcccccttgactacatattgttgatccccaccctttccacgtataaaccaaggcctgtgcactccctgtgtgccaggctaaagcccaagtcctgacttccc

SEQ ID NO: 92510 - DNA, 122 bp, Homo sapiens
ctgtcaaggaaaacgccttcaacaaagtcgagggaaaccatgccttccacactggtgggacgcagctggtataacccattctgcccctctttgagagctgcggggcacccagaggcttttgg

SEQ ID NO: 92511 - DNA, 122 bp, Homo sapiens
aatggagcgaggcggcaggtcatccccgtgcagcgcccgggtatttgcataatttatgctcgcgggaggccgccatcgcccctcccccaacccggagtgtgcccgtaattaccgccggccaa

SEQ ID NO: 92512 - DNA, 122 bp, Homo sapiens
tgaagtcacccgtgcctgtcaagaggcacggcgctaacagaaggctcccaggagcttaaccggatgctcatctggcaacaacggcaagaatcaggcccggcgttccctgcgcagcccggtcg

SEQ ID NO: 92513 - DNA, 122 bp, Homo sapiens
agtgtaacggcctggtagagttcaggattcgggttccttaaaacatcaatcctggccaggcgcggtggctcacgcctgtaatcccagcactttgggaggctgaggcgggtggatcacgaggt

SEQ ID NO: 92514 - DNA, 122 bp, Homo sapiens
accctctacccttctggaaaagtgttactttgtaccactacattagtcagaaacacacaccgccttgtacttgcataactgttaaaatgctctgctttcctgcaaaattaaaatagctgggg

SEQ ID NO: 92515 - DNA, 122 bp, Homo sapiens
aacagtcttgagtttcataccaaatagtctcttaagagaaggaacgtctccaggccacctcgtatttagcatacagtgagccacatatttgcacagagagagtgtatgtggatatagagatc

SEQ ID NO: 92516 - DNA, 122 bp, Homo sapiens
ccaccagggcttggggaagaaggttggaaggcggcaccactctctagagctctggccgcacggagccacccgctagggttttctccagacgcaggccgcgaaagctgcacacggggcggggc

SEQ ID NO: 92517 - DNA, 122 bp, Homo sapiens
gacttacttctgctttgctttcctgcacctggcccggggcaggctttctagtttctgcctcggccagaggagccgacttccgcaggacgggcttggggcagggggtgccggtgggggcagcg

SEQ ID NO: 92518 - DNA, 122 bp, Homo sapiens
tgagggcacaggggtgggtaggctggcaggcacgtgaagttgccatcagccccgagggaccgtgagcgagttgggacttgggggagaaaaaaatgggggcggacgtcagctccctgggcggc

SEQ ID NO: 92519 - DNA, 122 bp, Homo sapiens
gcccctctacggtgggagatcaaaaaggttatgggaggaaggggagaaagctgtgagaagcgcctcccacctaaagtatgccttttcccgttgtggctgggacttccgctccgccatgacac

SEQ ID NO: 92520 - DNA, 122 bp, Homo sapiens
ccttaattttacagaggaaatggcatcttcaagcacttccacacctgggctgtggccaagcggggctctacacccacagcccatgctcatcacctctgcaacctgcagcctccgctatactg

SEQ ID NO: 92521 - DNA, 122 bp, Homo sapiens
actttgtgctattaatatgtgaggtcaaataactctttattgtggaggggctgtcctgggcgttgtagaaagtttaatggtccctctggtctctactcaccagatgtcagtagcccctctcc

SEQ ID NO: 92522 - DNA, 122 bp, Homo sapiens
tccaagttgtaagcacgctaaggaatataaacaggatgaactgacaaaggatgactgttgcgggtggagagctactttacattagggtggactgggaaggcctctctgaaaaggtaacaatg

SEQ ID NO: 92523 - DNA, 122 bp, Homo sapiens
gggggcgagagttctcaccccacagccttcgaccggagtccgcctccgcccaagcccctgcggttctgacctgagccttcagcccgcagcgcgcctcccttgagcccaagcactgggaacac

SEQ ID NO: 92524 - DNA, 122 bp, Homo sapiens
cctctggacccgcaggcgccacgagagccgtactcaccagtgccgggtaggaggggtagccgctgcacttggcccacaccaccttcagaggctccagcaccgaggcggcggcatcagtggag

SEQ ID NO: 92525 - DNA, 122 bp, Homo sapiens
ggcctgggctgctgaggcgggaaagcggtggctgtggagggcacgtgctgcccccacctccgtctcggggcctggcttccccactggatggcagaggccgctccaggtgcttccacttggtg

SEQ ID NO: 92526 - DNA, 122 bp, Homo sapiens
ccgtgccaccaacgccgactaccgcggcagtggcttcgaccgcggtcacctggccgccgccgccaaccaccgctggagccagaaggccatggacgacacgttctacctgagcaacgtcgcgc

SEQ ID NO: 92527 - DNA, 122 bp, Homo sapiens
attttaacagaaacaccttcagagatcttgcggcgctaggaatttccatgagggcaacaccggggaggcgggtggcttttcatcttgcagctgtcttatttaggaaccaaaagtgcgaggca

SEQ ID NO: 92528 - DNA, 122 bp, Homo sapiens
gtggttttggcttggggtcaggagagccagtggggcccacgtggcatcaccagcggagtgcggcaggtggagcgccagcgtcctccaggcaggaagggtctacattcttcatttcccgtctg

SEQ ID NO: 92529 - DNA, 122 bp, Homo sapiens
ggcattgcaccccctgtggcaatgagggtggctgaagggctcggcttgtcggtggggcagcgagagccgggtgcacgcgccggggaggtagccaacagccgttgggacgcgacgctggttcc

SEQ ID NO: 92530 - DNA, 122 bp, Homo sapiens
gatgagatccatcactactttccttccttatctctctcctctgagtctttttttcagcagcgtgctgctgtttgctgggctgtgtgtgtggagctttcctgccctgcacagcagtgattcag

SEQ ID NO: 92531 - DNA, 122 bp, Homo sapiens
tccaaagcaaaagcccgcgcgctcacgcacgcatcacccaactcggtggctccccccttgcgtctcccccagctcagacccaggaaagcggaaagagaaaatcccccctccgctcggattca

SEQ ID NO: 92532 - DNA, 122 bp, Homo sapiens
tcaggaaaacctgataaacttgaaagtgttgtttcccaatcaccttcagaactggagaaacgctttcatgctgactttatccatgggactgaagaaagggagagtgtgctcacaagcacaaa

SEQ ID NO: 92533 - DNA, 122 bp, Homo sapiens
ccacgtcgcggcctggctggggtaggagagggcggtccccagtgcagttgggtgaactaccgttgcacactggagtttctggtgtctttgcttggaactgacctagctcgtggcagggggaa

SEQ ID NO: 92534 - DNA, 122 bp, Homo sapiens
cggcctaggccagcccctctccccagtcattcgctcggggctggctccgccccagaactgcgcaacctccccgcccacatccgcgtcctaaccaatgagcgctcgaaatttgggtccacacc

SEQ ID NO: 92535 - DNA, 122 bp, Homo sapiens
atgagatgggaaaatagcatttgcagtaattttgtgtggctataactgaaattccatgtgcgtgttttgccttatcgcttttaagtaagtacaaagggacagataatgcttccaaatgcatg

SEQ ID NO: 92536 - DNA, 122 bp, Homo sapiens
ctgggagtggtgagcacacagtcacggtctccgggggacacctgcccgtgcagagaagcacgcagatcctgacgaggagccggcagcagagtccctgcgacagctcctcgtccccgaaagcc

SEQ ID NO: 92537 - DNA, 122 bp, Homo sapiens
aagaagaagaaaatgcaaatctatgatttggaggctggttccttggtgaggccgagaacccggtccagtgtttctaaggtggtctggaagagtaagcattcaggaataacgaagggcacaga

SEQ ID NO: 92538 - DNA, 122 bp, Homo sapiens
gagacccggggagggccgggggtactttctgcgaggcgccttccccgcggcttctgcccgcgccaaagcctggtggaatccagcgcagacctaaagcacgcttgacaccccgatttttcgag

SEQ ID NO: 92539 - DNA, 122 bp, Homo sapiens
cccaagacacgcgtatctcatctccgcccagagccttctgagactggagtgtcccatctccgcccagagcctcccaagattctggtgtccagtctccaccaggcacctcctgagagtagcgt

SEQ ID NO: 92540 - DNA, 122 bp, Homo sapiens
ttgttccagtttcataatactgtcaactccaaactgaaattacccttatgtaagataaagcgaggtgtttggagactactgaggaacagctttgtttaggcattttaccccacagcaaagaa

SEQ ID NO: 92541 - DNA, 122 bp, Homo sapiens
ctgagctggacccagccccaccctggcggtccctgccacacagcagtcagtttggagccacgtggctgccattcctggtgacttcccaaagctactgcaactttttaaaaagataagcacat

SEQ ID NO: 92542 - DNA, 122 bp, Homo sapiens
cacatagcgagcggcacagctgagctccccgggggcgaggggggcgggcggagctggagacgctggcacagccctcataggtactctgccagcaattagtgctggggaagggtgccagcctg

SEQ ID NO: 92543 - DNA, 122 bp, Homo sapiens
tcggatctcgtactccgtgtcattggccccaggggctccggcagggatgggctcccgccacgacagggacacgctctggggttccactcggtccctgcggatctcatcctcctcccagggcg

SEQ ID NO: 92544 - DNA, 122 bp, Homo sapiens
gccagctcgcccaccccgcggctgcccagcccggcccgccgccccccctcacctgtcaggcgcagcttgacgggcccgttcctccggcctccggggttagacatgtccccggcggcgggggc

SEQ ID NO: 92545 - DNA, 122 bp, Homo sapiens
gggtctcgctgagcaaagtcagagtaggggcggggccaggactcaggggcttggccagagcgggaagcggggttgagcatggccttgcggagcagtgttatggtaggggcggggctgggatc

SEQ ID NO: 92546 - DNA, 122 bp, Homo sapiens
tcgcctggttcttctgcctgctgctggtccccccatgcggcagcgtcccgccgcccgccccgccaccctgctgccagttctgcgaggccctgcaggatgcgtgttggagccgcctgggcggg

SEQ ID NO: 92547 - DNA, 122 bp, Homo sapiens
cgctccaatgaggtgacgtgtccgtgcatttggccgggacgaccacctcagaggccaaggcgcggggactgggccccagccaggccggggtgccgtccaggaaggagacactgcttcccgtg

SEQ ID NO: 92548 - DNA, 122 bp, Homo sapiens
gtaatttcggctcctgtgcgcaagtgcggaagtgcgctggccaggagcgtgatcggtttccggtcagtggtgtggtaccgggtacccggagacgtgtatcggacggtgggccgcagccatgg

SEQ ID NO: 92549 - DNA, 122 bp, Homo sapiens
aaaatgctggcttctgttggtatttgagagaaatgaaactgcagatgcaagaagtcagggcgattctaccccagagcaggacgtgtcgagctacctgtgcaaagccccgagcgtggggtctc

SEQ ID NO: 92550 - DNA, 122 bp, Homo sapiens
acttcagtcctggggagggtctggaacaagcccccgcacagcacggcctggctgaaggcccgggagccagtactgaggctgacccctgagcagcacttcagccacatctcacccccagaccc

SEQ ID NO: 92551 - DNA, 122 bp, Homo sapiens
cttcccgcgacagccttccagggctccccttcaactccagaacaaaggtgcagtgcctggcgctctggatcaagtctcctcccgagctgcattcccaggctctgaccttccgtcctcgcccg

SEQ ID NO: 92552 - DNA, 122 bp, Homo sapiens
agtttatcaagtgcaccctagaatgtaaagagctccaaatcacgagtagcccagctccggcgctccctcactgagtgcctgggaacagcttccggatggctcggtacctgacccggagatga

SEQ ID NO: 92553 - DNA, 122 bp, Homo sapiens
ctcacatcttctggactttttttttaagtagtgagtaatactgcacttttgaaacttgctcgggcttttacaaataggtggaaactaccagtgattcggaatgttgcaagaggaaactacca

SEQ ID NO: 92554 - DNA, 122 bp, Homo sapiens
tgttgggatcatggctaactgcagtctcaaacccctgggctctagtgatcctccctcttgcgcccctgagtagctggatctacaggcaagcaccactacacctggctagatttttatttttt

SEQ ID NO: 92555 - DNA, 122 bp, Homo sapiens
cttcctcacgcctgagtccagtggtccaggctgcgcacactgaccctgggggacctctagcgtcacagcaatcgccaggctggacgccctgagaagcacctcggggaagcaggacctcgaca

SEQ ID NO: 92556 - DNA, 122 bp, Homo sapiens
gaaggagccggaaccggagcgggcaggacctgaggcttccctcgccggggcaacggctgccgccgcaacccgggtcccaccagcgccgctccacctgcaacggtccctcaggctttaggaga

SEQ ID NO: 92557 - DNA, 122 bp, Homo sapiens
tctcaatattctctgcgtgtttcataggtgacgcctgtaccgggttctcaatattctctgcgtgttttgtaggtgatacctgtacggggttctcaattctctcttcttatttcataggtgat

SEQ ID NO: 92558 - DNA, 122 bp, Homo sapiens
gcccgcgagaagcatctcttggctcgaagcgcgctgtaggtgaaccgcccttgacttaaacgccaacacatctaaaagggggcgagggacgctttattttcatttccctgaccactactgag

SEQ ID NO: 92559 - DNA, 122 bp, Homo sapiens
cttggggacagggggccacagcagttgtggccacatggtaccccagggccgacgcagggccgacgggcaagaggctgttatctccagcctggcgcttccgggcctttcttgaggccaccatg

SEQ ID NO: 92560 - DNA, 122 bp, Homo sapiens
tcggaggagatgcccagggatcttagcaagcagcctgcggctgccagggatcggacctggcgagtttcccgacggaatctgagggatcccgaacctcggcctcgagggggcgctatccggcc

SEQ ID NO: 92561 - DNA, 122 bp, Homo sapiens
ggccagcccacttgggcttctcaggaatgacaccccggccctgcatctggccctgagtcacgcacaggaggcagggtgagctcacccgcccactgactggcacagtcatagcaggctccagg

SEQ ID NO: 92562 - DNA, 122 bp, Homo sapiens
acgcctgtgccggaggagttccagtcaccgagcgaggggcgcaagggtgggtgcatcctgcgctgcggcgggcgcgctacccagacgctggtgtgcagagccacatgaagcctgctggggac

SEQ ID NO: 92563 - DNA, 122 bp, Homo sapiens
gaatttttcctgtttatttttttaaggtttacggatgacaggacaacatgggatatagaccgtcagttcatgttgggccctgctatcttaatcagccctgtgttggaaactgtgagttcttc

SEQ ID NO: 92564 - DNA, 122 bp, Homo sapiens
ggacgaggacggggaagggattcatccctcagcccctcacaggaacggaggtggcggcggcggcggggggtctgggctccactgcgccgggaacggcggcgggggaggcggcggcccgcggg

SEQ ID NO: 92565 - DNA, 122 bp, Homo sapiens
gttctgcttaatacaatactggcagcctaaaaatgcttcaagaaaccatatccccaacagcggcagagcatcgggaggagaccctctgtctctgaggcttcggtgcacttctgctcagacgg

SEQ ID NO: 92566 - DNA, 122 bp, Homo sapiens
gcactgaggacagcagccaggacacagctgtgctgttgtacatgggagctgccactactgcgggtcgggggtgacaggtggaaaggaagaagaggcccagacacagcaaaagctgtgtgcag

SEQ ID NO: 92567 - DNA, 122 bp, Homo sapiens
taaggaagcgctttttggaagtcagggcagccagcgctggaagggcttttccggaggcgccgagggccccgtcagcggccgtgagagtaggagttgggaacgtcgggtggaatctgaatccg

SEQ ID NO: 92568 - DNA, 122 bp, Homo sapiens
tccctaggagcggcggtaacgatgcagcctgcgggtagcgcaggtgtctgcagaaccacgcgtcccacggggcctgccaagcaggccagctctgccgaccagctgctgcccagaccgcgcca

SEQ ID NO: 92569 - DNA, 122 bp, Homo sapiens
agggcggggagcgcggaccgggtgtgggaggccgaggtgacagcaggtgagggccgggtgcggatggggaagtgagacaagcaccgtgtgggtattactcattccgctctactaaggaggct

SEQ ID NO: 92570 - DNA, 122 bp, Homo sapiens
ggagagacagtgcagcgcgagagggccgggagaggacgccggagggaaaggaagggggagcgcgcccagcatcgcttgggcctcctccacccgctcaggaggggaaacaggagagccgggag

SEQ ID NO: 92571 - DNA, 122 bp, Homo sapiens
ggtaaaatacttcttcaggtttttgataatcatgacaaggaaaggaagtttaattcccagcgtcttcttggggtctgcagggcatgtgatatatgtggtgctgtagagagaggaaatactaa

SEQ ID NO: 92572 - DNA, 122 bp, Homo sapiens
ccagcgcggtgcagcctggaagacgaacctctccctcttctgctccgccgtctgcacagccgctgtggacccgaggccctgcattccccaggctcaggcccgccaggcagccccctgagctc

SEQ ID NO: 92573 - DNA, 122 bp, Homo sapiens
actccgggttgctttgcccatcggcggcagggccggacctcagggctctcctgacactggcgtgttccagtcctggctgcatctgagaatcacctggaaactttaaaaacgcgggtgcacgg

SEQ ID NO: 92574 - DNA, 122 bp, Homo sapiens
ttattaccacaatctgtagctacttggtaaacggcagctcttattttgactttctgctaacggagtttccacattccttagcctaccaaggctctttcctgaacagctgatggcattaggat

SEQ ID NO: 92575 - DNA, 122 bp, Homo sapiens
cctcaccttacgtgtgacacgctcgtcgaacttgccagcaaacccgggaggtgaggattgcgtgtgatgcccaggcagacacagtggcttttcatgagaacaaagcgttatcaccttgtgca

SEQ ID NO: 92576 - DNA, 122 bp, Homo sapiens
tcccgaggaggactgaaaagagactgaaaagcagggctgaggagtggcggcaaccggcagcgtccagctcccgcacctcgctgcacatcgcacctgagccccgccgcgaccgcatcgcgctc

SEQ ID NO: 92577 - DNA, 122 bp, Homo sapiens
gggagacagaccctcgcgacctggttcaggccttgccctgggggacactgcagtccaaggcgaaaggagacttgctcccggcctctgggtccctaggtcaaggcacctccccgccccgccgc

SEQ ID NO: 92578 - DNA, 122 bp, Homo sapiens
gcacggccggcactgtggagacctgcagaccctgcatcctgttcatccgctccacggttacgttgtagttcacggtgacgttgctcacgtggttggaggccgtcagctgcagggacaggcgt

SEQ ID NO: 92579 - DNA, 122 bp, Homo sapiens
taagccttgggaaaaaagggcaaaagctgcgcctaacattcaagtgcaaagcaactgggtcgcagcgggagagggaagcggctatttcttagcggaaagaggaacagtggcccaaggcggcg

SEQ ID NO: 92580 - DNA, 122 bp, Homo sapiens
tgcctttgcgagggcggagctgcgttctcctcagcacagacccggagagcattgcgagggcggagctgagttctcctctgcacacacttcggagatacagcgaaggcagagcaatgttctcc

SEQ ID NO: 92581 - DNA, 122 bp, Homo sapiens
aagttggggcgcgccgtggctagaacacggagagcggcgggcagtgcagccaatgggaggcggcgctgcctagcggctggtaggcggtgcctgcgcgggtgttaggttagcgcgaggcgtga

SEQ ID NO: 92582 - DNA, 122 bp, Homo sapiens
gccgtgagctagacctggggcgtggtgaaagcaagcaaaacctgcgcctgaagcccgctccgccacaccttgccccctgcagacccttctagctgggccgcggccctcttgcacggactctt

SEQ ID NO: 92583 - DNA, 122 bp, Homo sapiens
ggtgctgtttcctttgaaagggataacagaaaagtgggggaaaagatccaggaaggaaaacgtgaatgaatcctttggaaatgatttgagacagctagagcagaagacatttgctgggtacc

SEQ ID NO: 92584 - DNA, 122 bp, Homo sapiens
gcgcgggaggcgctgaccgcccgtgagccggctcgcaccttgcgcggtctcagttgcttgcgctttgggggaaagcaaggagtaacaacagactcagagatagctgtggggcaaaatgtata

SEQ ID NO: 92585 - DNA, 122 bp, Homo sapiens
aggaacgcaccccagaagcagaaagacatgcaggagtgtctgcttcttccccccagctctcgccccagggcagctgagcggctgatgaggagggcgcagcgggttggagctcggggaggccc

SEQ ID NO: 92586 - DNA, 122 bp, Homo sapiens
ccagccgtggtcacatgcggggacacgcaggacacccagccgtggtcacatgcggggacacgcaggacacccagccacggacagacacggtgacacacaggacacccagccacggacagaca

SEQ ID NO: 92587 - DNA, 122 bp, Homo sapiens
agggccgtagccgcaggggaagcggcgtggaccgggcggggcgcggcgcctcgagcgcagcgggagacaaatgggaccggctcctctcccaacgccaagatgtggatccaggttcccatcac

SEQ ID NO: 92588 - DNA, 122 bp, Homo sapiens
tgggtaagatggcaagaccccgtctccacaacaaaataaaacgtaagcctggcaaggtggcgcatatctgtagtcccagctactccagaagctgaggcacgaggatcccttgagcccaggag

SEQ ID NO: 92589 - DNA, 122 bp, Homo sapiens
ggggagcaggaggggtgccatttggcctggtcccgaactccagagtttcaggcctgagtgcgctgctcacggggctctgagggagatgtggacagggggagattcagggtggacgggtcttc

SEQ ID NO: 92590 - DNA, 122 bp, Homo sapiens
ggctgtgctgggcaaggtctcagccacccgcggggaggagccctgaatcgcagcacctgccggttgccgtggtgtaaatgttccccagctgagttcgccctaaaagcgtggtgtggctgaac

SEQ ID NO: 92591 - DNA, 122 bp, Homo sapiens
cctacaggcaggtgctccgggatcacaactgtctgcagacgctgctgcagcatctgacttcgcacagcctgaccatcgtgagcaacgcgtgcggcacgctctggaacctgtcggcccgcagc

SEQ ID NO: 92592 - DNA, 122 bp, Homo sapiens
cccctcgctgcccatgctgtcactgctgtcctgaccggcttcctgcgccctgcactcctccgtctgagagcacttctgcccagctgcctctgctcacttggcgtcagggaccatgtcccccc

SEQ ID NO: 92593 - DNA, 122 bp, Homo sapiens
tgaaaatgtttcaggatctcgggttcgaccatgagtcctgtccaggtccaggaggaaattcggaaggaccacatgttcactctgagatcccactttcatttccctcctggttgagcagcatt

SEQ ID NO: 92594 - DNA, 122 bp, Homo sapiens
agcagctggcttacttgagatgcatctggcaaattccagggcaaagccagtgactcccagcggctccagtgttggtaggcggacactttgggctatccaggaagagaggtagcagggaagaa

SEQ ID NO: 92595 - DNA, 122 bp, Homo sapiens
agacttcacctgttagtgactggcttcacgtcatgtacctggaggagctggcttcacatacgtcataaagatgcactctaataatgtatttagaagttgttggctaaaggtctaagcctgat

SEQ ID NO: 92596 - DNA, 122 bp, Homo sapiens
taatatgaatatgctagtgtaaatagcagagttgtaggaacacccattagaagagattgccgagaatgattatgaatggaccaagacagcttgggccccacctctaagacctccaattaaaa

SEQ ID NO: 92597 - DNA, 122 bp, Homo sapiens
ggcagataagccaggggctgttgacagaggctgcctgagtccgtgtggaagggcccagggcggactttgcctcgccgcaggtcccagagccgcacagcgcgccggcccaggccaatttaggg

SEQ ID NO: 92598 - DNA, 122 bp, Homo sapiens
tcatgggcctttcagttttgaaagaatttctggcttgacagcctttgtgtgagtagttttcgcagtcctgaatgtgctttctctggttgcctcctgcccaccttagtgatcttagctcactt

SEQ ID NO: 92599 - DNA, 122 bp, Homo sapiens
ggtcccggccagggcgcatgtggggtcccaggggccgccatcgggctcagcagcgtggtgcgcaagccggccacgaagcgctcgaaggtcaagtagccgctggcctgggccacctggcacaa

SEQ ID NO: 92600 - DNA, 122 bp, Homo sapiens
ggaaaaaaaaaaaaaagtgatgagttgtgaggcaggtcgcggccctactgcctcaggagacgatgcgcagctcatttgcttaaatttgcagctgacggctgccacctctctagaggcacctg

SEQ ID NO: 92601 - DNA, 122 bp, Homo sapiens
ggaatttttaagaacatgaaatttgcctatgctttagacagtctagaatttttaaaagagcgagttggcatttcaaaattctccatctgctaaagagaagaatgcttaagtccctgttcctt

SEQ ID NO: 92602 - DNA, 122 bp, Homo sapiens
gccacccaaggggagaggccgcggacgccagagggagcaggcgcaggagctggagcacatcgcccccgacacagacgcggtgtggaaaggcagggagtaaggctgggagaaacctaaccctg

SEQ ID NO: 92603 - DNA, 122 bp, Homo sapiens
tgggggcaaccaggcggcggttttacctccattttgagacaggactcacctcttccaactcgagatcaatatgggaccgagaggaaggtggccagcgttttcatttaggcaactctgcctgg

SEQ ID NO: 92604 - DNA, 122 bp, Homo sapiens
ccgaagcctgaggacaccattttacagaggttctgactgctgcctgcttacttttagtgtcgatgattcacaaagcttccagaacttaagtaactggaagaaagaattcatatattatgcag

SEQ ID NO: 92605 - DNA, 122 bp, Homo sapiens
ctgattggcggacgagggacttctagacccctgccaaaacaccaagggggcggtgtcgcacgccatgctgctcagcggaagcagggcttgtatagaaatgggcgtagcagccggcgggagtg

SEQ ID NO: 92606 - DNA, 122 bp, Homo sapiens
gctgataagaagctcagaatcaaatatgcaacaaatctttaccaagtgtttaagcctttacggtcactaatatatattttagctcttcccctagtgttgattttctcttctaattcttaact

SEQ ID NO: 92607 - DNA, 122 bp, Homo sapiens
aggagtagtctgaaagcctgaactccctaccaccctgagggggtgcgggtgcggcggggccggctgggggcttcccccaccccctgctcctgcgccctccccccgcttccccctcctcccct

SEQ ID NO: 92608 - DNA, 122 bp, Homo sapiens
ccgttaaagccgttatccactgttatcaggaccaggtagtctcgcccaactgggacagagcggtcgcccgaggaccggatctgcgcggcgcagtggcctaaaaaggaggccgagccagtccc

SEQ ID NO: 92609 - DNA, 122 bp, Homo sapiens
ttttctcggaagccgctgctcaccaacttctcgtatttctccttgtacgcgtccctctcgcgcaccagcctggagatctcctgcttgaggtggtcgacttgctgcagcagctggttcttctc

SEQ ID NO: 92610 - DNA, 122 bp, Homo sapiens
ggggttcgggactctggaccagaaatgtgggcagcagctgggtacctgcgacttctgccccgtacctgcgcgcgcggcagagaggccttaggtcacgcgccgccccgcctacctccccctcc

SEQ ID NO: 92611 - DNA, 122 bp, Homo sapiens
agcggatgacgtgggcctcttcagggtctaggcctcgcatgcagtgcagcagcttcagctcgttcttgatgatgcggttgcggtaggcgtcattcttgaggatcttgatggccaccatctcg

SEQ ID NO: 92612 - DNA, 122 bp, Homo sapiens
ttaggtggcagggagcgcggcagccctggcggagggatgcaggtgggccggaagatcccacgattccgatcgactgccaagcagcagccgctgccaggggctgcgtctgacatcctgacctc

SEQ ID NO: 92613 - DNA, 122 bp, Homo sapiens
tccatgttttctttctttaaaaattttttttctttctttttttttttggagacgaagtttcgctcttgtcccccaagctggtgtacaatggcgccatctcgtctcactgcaacctctgcctc

SEQ ID NO: 92614 - DNA, 122 bp, Homo sapiens
catcagctaaactgcccttgcgccgttcaggagttcccagggctgtactagacaaggactcgccactctgtcgcccaccttcttctgccttctgaggtgaggtagatgagttgtgtggggca

SEQ ID NO: 92615 - DNA, 122 bp, Homo sapiens
ttcctcatgacaggccgggaagcagccacacccagcacccacaggcgctccagagcaccccggctcctcctgagggcccagccggccccacaagtcctcaggcccactggggcccatctgag

SEQ ID NO: 92616 - DNA, 122 bp, Homo sapiens
acatttcctttgttaggtgcttcatgacatggggtaccctcagacagaggccacagctagcggacagggcatactctttttaaactggttctgcagaaggaggcatggccctctcccctgtc

SEQ ID NO: 92617 - DNA, 122 bp, Homo sapiens
aaagctctactctactgcaaaagctcctcttttatctgctataagaagttgtttgggagccgggcatggtggttcacgcctgtaatcccaacactttgggaggccgaagtgggggaattgct

SEQ ID NO: 92618 - DNA, 122 bp, Homo sapiens
gaacacagagttgggacaaaggtttatgagtctggatacccacagtgtcctcacagcctccgaggacctccactcagacctccactccatctatcccctactctgctgtggcaatcggatca

SEQ ID NO: 92619 - DNA, 122 bp, Homo sapiens
tccagtcatcgtttctcccaattcttgccttttggttttttggcataacggaaatggtcccgttcttggaccgtctctccctctcaataccctgttttcccctcagtttccctttctctaca

SEQ ID NO: 92620 - DNA, 122 bp, Homo sapiens
caatgcttaaaatgactttgctccatgtccctaatttatcccattccttacttaatatcccgctcgtatgctagccccttcatgaatccctcctgagattactgaaggaaaatatgcctttc

SEQ ID NO: 92621 - DNA, 122 bp, Homo sapiens
ggagtcagctcgaactcacctgcttggcaggtgcgcgcttcccgaggcgtgacaagggagcgccggcgcggtgggtggggggcagagaatgtgaagctccagacgcatggcacccgccgcca

SEQ ID NO: 92622 - DNA, 122 bp, Homo sapiens
cggctgtcgtccgcgccgccgtcaccgccctcggcccgcacagagagccgcgtggcacgccgggaaatgaagtccacaaaagcctcagagtagaccgcgggaatgatgggcgggaatgacgg

SEQ ID NO: 92623 - DNA, 122 bp, Homo sapiens
gccttatacctccaccacagggggtgccgtgagacttcaaggcttggcccttcttgaccacggcagcctcctgtcttctaggagctatcaagggtctctaagaactgggcatggggcactcc

SEQ ID NO: 92624 - DNA, 122 bp, Homo sapiens
ggagctgcagcagccgccgcgaatggctcgccgcgcggctgcagaaatgtacaagtgctccgagccttacgaaacgcacgggttatcggagcgtcttcctcggctccctccctcccttcctc

SEQ ID NO: 92625 - DNA, 122 bp, Homo sapiens
cgccctctgtgagaaaactgacaatgacatccgggcctgcatcaacaccctgcaggtgggcggccggcaggcaccgggtggggtggggtggggtcaggagttggccgcttctcatgcccccg

SEQ ID NO: 92626 - DNA, 122 bp, Homo sapiens
gagtgccagtgtctgtgcccacgcaggggtgagatgcctggagatcaccctcactacagtcgagtgaaacgcagtctcggttttcatccagacacaaaccatgccatgcaacttcaagtaac

SEQ ID NO: 92627 - DNA, 122 bp, Homo sapiens
gagcgggcgcgtgagcacatcacggcgcccgtgacagagccagcttaacggattaataagcgcagccaggtacccgcgcgaggcacttgctggcaatggcgggaggcggacgtggggggtca

SEQ ID NO: 92628 - DNA, 122 bp, Homo sapiens
atgatgtgtgttgaaacagctccacctgcagtcctctgctttcccacacaggagtttccccgtctgcccctgcccaccttctgcggcccttgcctgccatcactgcccagggcatgcagcat

SEQ ID NO: 92629 - DNA, 122 bp, Homo sapiens
ttacttgctaacaagttaatgtcttcccctctcaaaaccacccctcaaccaaagagtgcacgtgggattgggggtgggagtcaaggagggaagggattggggagttaaggctggaccggggg

SEQ ID NO: 92630 - DNA, 122 bp, Homo sapiens
gagccttctccacctccgtgatgcctccgggttcgtgcatggccacttgtgctgcgtgagcgtcgtaggtttaggggaacagaagtagagggatttacatgagcttttaaaatcccaaatag

SEQ ID NO: 92631 - DNA, 122 bp, Homo sapiens
accgccaggggctggcggagcaacagagcccgtgggtgctcttatgtatgcggaccggtgcgcgggcgcaagataaggttgtggtttatttatttgtgtgtttattcgccggccggctggga

SEQ ID NO: 92632 - DNA, 122 bp, Homo sapiens
acagtcccacccgatgcagacactgctcccggcccacctcaccacgcccgcccctggctgcgcccacagtcccacccgatgcagacactgctgctgacccacctcaccacgcccacccctgg

SEQ ID NO: 92633 - DNA, 122 bp, Homo sapiens
gactctatgtctctctgtctctctctcacacacacacacacgcacgcacgcacgcacgcacgcacacaatggtgccctaggaagaggtaacaagcgctggcaaaatagagcaattcctgctg

SEQ ID NO: 92634 - DNA, 122 bp, Homo sapiens
cccgctccgtgtggggatcctcacagtcacacctctttgagccagctggtggccagcctgcgcacaggagggacctcctggggtccccaagggaagccacacacacaaggccccaactcagc

SEQ ID NO: 92635 - DNA, 122 bp, Homo sapiens
gagcccgcggcagaggaggagcgcgggcagcggaacgcggcgggcccgggaccccgtttccgggggtagtctaatgaaaaggcactcgggagctatttctgaacggacctgggcttgtcgga

SEQ ID NO: 92636 - DNA, 122 bp, Homo sapiens
aaagaaataaatggaattgttaatccaaaatacgatgttaaatatacactgtaggccaggcgtggtgctcacgcctgtaatcccagcactttgggaggctgaggtggacggatcacctgagg

SEQ ID NO: 92637 - DNA, 122 bp, Homo sapiens
ctttgactcctactgcaccttgtcccactgtctgcattgcagccacttttctgggttactcgtatgcctcccctgccccactgcagtgcctttgcacgtgcttctctatgtaacgcgttcca

SEQ ID NO: 92638 - DNA, 122 bp, Homo sapiens
tacgcacagcaccgcgccctgcaccgcgcagcctgatacggtgtgccagcgtcctccccacgaggcaaataaacacagaaaactcacgcatggaatctggtgtttattacactcgggggaga

SEQ ID NO: 92639 - DNA, 122 bp, Homo sapiens
atgtttctctcaattactgattttcaagagcctggtgtttcctgacatgagccaggatggcgggcggcgcccaggggaggggaagtgaaccggggctccgtttccaaggctcttggacaaaa

SEQ ID NO: 92640 - DNA, 122 bp, Homo sapiens
gcatgatgagcgggtacagagaccaatgaaaaggcgggaaggcggatcccgcgcgtggggcgcgaagagttgctgacgagcaggctgtttgtccaatgcaaggcgaaagtcgctgaaggggg

SEQ ID NO: 92641 - DNA, 122 bp, Homo sapiens
tcggccctggggttgaagatcctgtgtggggcagctgcgccttcgggacagccccagccgcggagcgcccagaccagggcagccggagtcgggtcatacgccgcacgccgccggggccgccg

SEQ ID NO: 92642 - DNA, 122 bp, Homo sapiens
tgagggtgaagcaagagaaactcggctccagtgaaaaggacccatcattgcattccagaacgtaatttgcatttcatatgtaaatgaggaggcttcctagaggctggactgggctgggctta

SEQ ID NO: 92643 - DNA, 122 bp, Homo sapiens
ggtttaatacagcagcacacgtacccgcagtggcggatgcgctcgggtttaatacagcagcgcacgtacctgcagtggtgggcgcgctcgggtttaatacagcagcacttggggcacttgta

SEQ ID NO: 92644 - DNA, 122 bp, Homo sapiens
agtaagagggatatggctctctcacctcgctggatggctctgtggagagacgcgatgactcggagctgagggaggaggaagagcagggggaagatggctcagacttcacctgaagatctgga

SEQ ID NO: 92645 - DNA, 122 bp, Homo sapiens
ttttaagacgcaagaagtcattcaacattcatgcattcatttagacaacaaatgttttcacgttctaactaagtggcagacaccatgctgggtggtgctggggatactaagatgaaaaagac

SEQ ID NO: 92646 - DNA, 122 bp, Homo sapiens
caactcttaggtttgaacactttttttaatggtatttcaatagatccatctacagagcctcgcagggtgttacttgcagttggcctttaataccttaagtgggtctgcttaaaaactaattg

SEQ ID NO: 92647 - DNA, 122 bp, Homo sapiens
tcaggtattggatggcgaggtatctttcaatctactttctagtcaccgattgttcctatgcgtgcattatatagatgacagaactgaggtacagagaagacaaagtcacagagctgctcagt

SEQ ID NO: 92648 - DNA, 122 bp, Homo sapiens
gcactgggtggaggagtcaggtggaacggcagccaggagccaaacctttgcagctgtcttcgttcaccgcctggaaaatgtctttctctgagcaactggttttgctgctttctttaattaga

SEQ ID NO: 92649 - DNA, 122 bp, Homo sapiens
tcacagaaccatggtggtatcaatggttgaaagtcaagagcagaaaatattaatgactaacgggcaggtagtctatagtataaatatgttggacaaaaggaggattcatgtcccaggcggga

SEQ ID NO: 92650 - DNA, 122 bp, Homo sapiens
aatttgatcatgaggcttttccatgtgaagagagaaaagggggtgtctggggattatccacgagaatctggggagggctccaactgcacaaactagctgtgggccacagaatgcttgctcag

SEQ ID NO: 92651 - DNA, 122 bp, Homo sapiens
gagaggcagtatgacctggaggcacagagccctagagcccctcagccctagtttgaattccggctctcctagttgccagctgcatctttgggtaagatatctacactctctaagccttggca

SEQ ID NO: 92652 - DNA, 122 bp, Homo sapiens
cgccaagcgggagaagacggagcctgggagctgggactggaggagcgggaagcgcagtatcgggaccacggctctgggaccaggaaaaacgcagactctccagagtcaatgtctacttcagc

SEQ ID NO: 92653 - DNA, 122 bp, Homo sapiens
tataaatccatagggactatgcagattctagtaacatgaaaaagaatagaaggaaaacttcgaaccgtgtcacagtggtggaagaagcaatacaagtgcataaaaaaatgaatcttcattgt

SEQ ID NO: 92654 - DNA, 122 bp, Homo sapiens
cgccgcgcttccggggccaaagaacgaaaactgccttctttttttctggcggacacggagcgcgcccgcggcgggccgaccagcccgggagcgcagcctccgcgaaggggcggcggggagcg

SEQ ID NO: 92655 - DNA, 122 bp, Homo sapiens
cagttgccgactggagagggatgggaggagataccatagggtttggggggcttggcacagcggccctggcctctgcactgtgatagctccaagccagatggtgcaaggcagctgctgggctg

SEQ ID NO: 92656 - DNA, 122 bp, Homo sapiens
gggctccccctccccttttggctagccgcagagtccagcgggtctctagtccagggacgtcgtgggagaatcaggaagtcgaagccacacagccgagaaggggcagctggcgtctcggaggc

SEQ ID NO: 92657 - DNA, 122 bp, Homo sapiens
tctataaggcaaaaaatctgaatttaatgggattttacaacaagagactgctgtttccctcgctgattcattcccctgtataatacacattgaaaattcttgtgtttggttttctgaagcat

SEQ ID NO: 92658 - DNA, 122 bp, Homo sapiens
agagtccagtacaaagttcctgtagccctcctggtgagaaacactgcatgaggctcagcacgaccatgagatcaggctgaaacacttaaatagatttcataaaagcttaaagccagaacatg

SEQ ID NO: 92659 - DNA, 122 bp, Homo sapiens
gaatactctaagagaaagagaatcagagttaccagaatgcaactctaacaagccctgttacgggaagttcaggaattctagatttttagccttacttggaaaaatattctaccaaatgactg

SEQ ID NO: 92660 - DNA, 122 bp, Homo sapiens
gccagggtggccgggccctgccagtgggcggcgtgtgctagcaaggcctgccgggtgtgccgcagtcaccacagggttctgagaacatttcacagaagtgcctgagacgcggagacatggct

SEQ ID NO: 92661 - DNA, 122 bp, Homo sapiens
acatagcaatggatgaactcaagcgaccatgaggcacagtgacaagcaatcgaacgtggccgcggagcagtggagtgtcgttgcataacaatagacccagccgtagaagcatgtcacacagc

SEQ ID NO: 92662 - DNA, 122 bp, Homo sapiens
ttacagaggaatatattttgtaggcagtttttctgggaggtaaggacaggttcctagagacgatctttgacgccttttcaccactggaagcaatgcttcagaccactgtatttggaagacaa

SEQ ID NO: 92663 - DNA, 122 bp, Homo sapiens
tccccatgtgctaggggaagacctgccttcccagccagtgtccacagggcagcaattccacgctctgaggctcagggaccaaggcagggctgggtgtggggcccagactccaagctctgggg

SEQ ID NO: 92664 - DNA, 122 bp, Homo sapiens
gggacgatcttaaccaccaacgccgttgcctcagagacagtggccacgggcgaggggctgcggcagaccatcatcgggcagcccatgtccgtcaccatcaccaccaaggacaaagacggtga

SEQ ID NO: 92665 - DNA, 122 bp, Homo sapiens
atggtgcactccttacaataataggcatcagagaccccaggtcctccacagatcacacagcgcccctggtaagatccatagttacactcatcacatatgcgcaccagagtgcagggacgcac

SEQ ID NO: 92666 - DNA, 122 bp, Homo sapiens
cgctctctgtctcgtctgttatctctagggcggtctcgctctcgttcccggtctctttcacggggtctacttctccggccactgacaacagcttgtgtgcgacgaaggaaatcatccaccct

SEQ ID NO: 92667 - DNA, 122 bp, Homo sapiens
cctcgggcgggccgcgccggcagcgcttgctttgtttagccaaatgccggggctgcagggcgcctccgggctgaccctgggaaagttcccccaagccggcaagaacacccggggcccctcct

SEQ ID NO: 92668 - DNA, 122 bp, Homo sapiens
aaatgaatcccgaggaacagctgtttctctaccggagaagtgggcagccaggcggaaacacgcagggaaatagttctgtttgggacagaaggcatcaacctcgtaagacccagcgatcagca

SEQ ID NO: 92669 - DNA, 122 bp, Homo sapiens
attccctcctcactctaaagccagccccccgtgcacctgagaggccagtccaggctgtgacgccgcatcctcacctcccgcaacagggaggtcagcaggcggccgagcagcagggacagacc

SEQ ID NO: 92670 - DNA, 122 bp, Homo sapiens
ggtatgactgcagaaagagcctgggagatcgaggggcgcagagtggggccggaccaggggcgtttttagggatcccagtagttctcgtggtgctgcgcggcgatgatgatgactacggtgag

SEQ ID NO: 92671 - DNA, 122 bp, Homo sapiens
tcaggccgccgcgcagcccggccgtatacacgggccccgcgggctcgcagagcaggagcgcgcccgcctcagtccccgacggggcctcaatgcctggctcggcctgcagccgccgcagccag

SEQ ID NO: 92672 - DNA, 122 bp, Homo sapiens
agaaactaagtgtgatggagagctcaaaatcacacgccgcagagccagtcagatcacacccgccagcctgccttgcatccagctctgcgctgcacagacagccacgaggggaccgcaacaag

SEQ ID NO: 92673 - DNA, 122 bp, Homo sapiens
gtcttgaagaaaagttgactcatcagatgtctgaggcttggtgaagacatttctgaacgtcgtccaattccctttgctccaatttcctatccatgaagcatcttcttaaccaaagattactt

SEQ ID NO: 92674 - DNA, 122 bp, Homo sapiens
gcaaggtctccaggtgtttccggcgcacagtcatacttgagaagccgcctggctccaggacgcaggtttcccctgggggtgtgcactcatgcaatggcaggcatgtaccctgactttaggtg

SEQ ID NO: 92675 - DNA, 122 bp, Homo sapiens
tcagcgtccgctcgtaggtgtatgcagagatgtcactgttatgctggggacagggttggccgtgaggacccagctgcacgggacatggtatccacggggccagggcagggcagagggctcac

SEQ ID NO: 92676 - DNA, 122 bp, Homo sapiens
gtgttaccttgcgtgtgtagttctgtgagctcagggctatggtctgccagaactagggggcgtggggccccagtaccagcccaaggcctcctctctgcaggtatggacctgtctgccaatca

SEQ ID NO: 92677 - DNA, 122 bp, Homo sapiens
gggccaggacttacctcgcaaggccccacgaagaggatcttggctttcagcatagttgtccgccgcggcttagccggccggagcccacgggaggcggcgcgtcaggacggagctctacttgg

SEQ ID NO: 92678 - DNA, 122 bp, Homo sapiens
ccagctggtggcgcgcatggaggggtatggcaggcatggcctgggctcccttgcccagctcggcgtctctggggttggcccacttcaggactggccggccttcccgccctgttcccagactc

SEQ ID NO: 92679 - DNA, 122 bp, Homo sapiens
catcgccctgcgctccctgctggccatcgacctgtggctgtccaagaagctgggggtgtgcgcgggagagagctcgtcgtggggcagcgtgcgaccccttatgaagctgctggagatctcgg

SEQ ID NO: 92680 - DNA, 122 bp, Homo sapiens
tagacttttcatagccatagagaagaaatcaacattgttttcctcctgtgggtttggaggcgcctcctttccagagcgtggcagtggtgtctaagtgatgtttcctgtgtgtatcgtcagtg

SEQ ID NO: 92681 - DNA, 122 bp, Homo sapiens
tttcctggccccttagttgtgggttttcctgcgggcggcgcagccggtttccatcagaaccgcccagaggcggacgctgccttcctggggtgacggagcagcaggaagcgttttcggatcct

SEQ ID NO: 92682 - DNA, 122 bp, Homo sapiens
ttttccttagtgatcttgggggcccaggatatcttcctttcacagctgatttcacaaagccggctgggtaggagggccccagggccgggtggccgtccgcgtggcagggcgggggtcccagg

SEQ ID NO: 92683 - DNA, 122 bp, Homo sapiens
ggtcagcagatggaaaattgttaagaggagatatcaagtgtagagggattcttgcttaaccggcctaacaagattcttcttagaggcagattaaggacttagacattaacggcgaggggtga

SEQ ID NO: 92684 - DNA, 122 bp, Homo sapiens
ggcggcggggaacgaccgttgggtcgcgggatggggagggacccggctggcggggcggggcggagccggctgttgcccagacccacggagtcaaggcctcgctgagtcctcaaccccggccg

SEQ ID NO: 92685 - DNA, 122 bp, Homo sapiens
gtgtggccaggagctgccagggcagaaactggggcgcactcgtccacaggcggcaaacgacgcagctggaggacttcttgcttcagccggagctctggcatgaacccccggggaactgtgct

SEQ ID NO: 92686 - DNA, 122 bp, Homo sapiens
aggaaaaatgaaaatccacgaacttggcgatgctccagagaggaaaccagcaagtgttgacgctaaactggcagaaacatcaatacttcctggctcccccactgggtgcatcaatttaccac

SEQ ID NO: 92687 - DNA, 122 bp, Homo sapiens
gctggctgggcagcctgcgccgcctgggttaacagggcgagggaatgggcgtctcggtgccgcctttgctagagctctgcccaaacccggtttccatccgtgtatctctggggtgacaacca

SEQ ID NO: 92688 - DNA, 122 bp, Homo sapiens
tgccagtctctgtgtgcatatagatctatgcccagacgcacacatgtgcatataaacacacgtaggcatcaaggtagacgtccgtcacattatgtgtgtggtcttctgtagacacgcccggg

SEQ ID NO: 92689 - DNA, 122 bp, Homo sapiens
gggccgtgacgtcaaagatgtcccagagggggcacttccggcgggggcgtgggggcggggcgggacctgggaggccccgcccccccggtcctgagaggacagctccgctcgcagaggcggga

SEQ ID NO: 92690 - DNA, 122 bp, Homo sapiens
gtaaaatagcagtgcgtggagaccgcgtgctagaggccgtggcgcccgcgtacaatgagtcgcagacagcacagacgggagtagggcagaatagacaatatcccgtgaattgcgtggggcgg

SEQ ID NO: 92691 - DNA, 122 bp, Homo sapiens
ccttccctggcctcggcccggccgccgaccccctgccgcccgcgccgcccagcccccgcccgccgcaccttggtctccttcacatgctgcttgacgccctccgggtaccactggacgcgcac

SEQ ID NO: 92692 - DNA, 122 bp, Homo sapiens
ggcggggacggggggaacccatttgaaataaatacttgtgagtctctgacagactccagacgggccgtcgacgccgcctggcaatgtctgggacctgtcacactctgtgatcggtcttttta

SEQ ID NO: 92693 - DNA, 122 bp, Homo sapiens
atgtgaggagcgcctctgcccggccgcgactccgtctgggaactgaagagtgtctctgcccgaccaccaccccatctggtaggtgaggagtgtctctgccctgccgccccgtctgagaagtg

SEQ ID NO: 92694 - DNA, 122 bp, Homo sapiens
gatggcggatgaggctgcctgtgagcgtgtccgaggcggtcctgtgatgttaaaggtacacgtggtccggacaaaaggcgccaaagtcggaacgatttccatttagcggacggagtcttggg

SEQ ID NO: 92695 - DNA, 122 bp, Homo sapiens
tcaagtagaggcgaggactgtgttcctccggccagcaggtggcaccatactcgtttggtgcgttccgctggagaattctggcccttccgccgcgccgtaggtttgttgcctcaccagtgcgc

SEQ ID NO: 92696 - DNA, 122 bp, Homo sapiens
tcggcggccccgccccctgcccccgagcgtggggccagttggttctgattgcgcgccgcccgggctcccgtggatcgggctggtccttcccagagttaaagctcctcccagtcgctccggag

SEQ ID NO: 92697 - DNA, 122 bp, Homo sapiens
ccattgaccagaagggttttcctctgaatcctgttaattctgaaatgttctggaatgttacgcaaagaccttccaaaactctaaattcctgccggtaacagagttggctatctcaagcccca

SEQ ID NO: 92698 - DNA, 122 bp, Homo sapiens
gtattaacttctttttccagccttacataacaaagtcttcagaaacagaaaccgtatttgcgtggtttgctgtaagtaatgcctagtatggagtcatgtaatgattcttttaaatttaaatt

SEQ ID NO: 92699 - DNA, 122 bp, Homo sapiens
cagcctaaatgctatttactagagtagctaagccaaccctggatcagtttctaatttcaccgagagagtgcaattttaagttggaatccagccagagattcaactgcagtgcctgacacgga

SEQ ID NO: 92700 - DNA, 122 bp, Homo sapiens
tcacgtgggaggtctgcccaggatcccggcagtgaggctgccctggaggcaggcttgctccgccacaggcgcgcaggcaacagcagcggagccgagaatggcgaggccagcgggcgaccagg

SEQ ID NO: 92701 - DNA, 122 bp, Homo sapiens
gatctgctgccctctcctggcaatgtgaagcattgtcctaagcacagacacttccctctccgctgtacaaaaacaactgcaggatcgggaagctggaaaaggagctgatggaggatggggga

SEQ ID NO: 92702 - DNA, 122 bp, Homo sapiens
tgaccgggtgaaggggtcttgggctgagggcacccgggctgagggtcgcgtctaccggagcgcgcactaggggcggagggcgcgggcacagagagccgcggccggtgccgactcgagtggac

SEQ ID NO: 92703 - DNA, 122 bp, Homo sapiens
gacacgcagagcgtgcgggacacgttatcacaaagcaacctcctgtagtctagagtggggcgtgtgggtcagggaggtggaacgtgagagctgaaggctgaggagatgctgggctactaaga

SEQ ID NO: 92704 - DNA, 122 bp, Homo sapiens
atgcagcgacaagcggcccggagcccggcactcggcctcctccccgcgtcagcgtccgcccgtgggcccggcctcctcgcagctcccggggccctgctgccactcagccccacccggcgctg

SEQ ID NO: 92705 - DNA, 122 bp, Homo sapiens
attcaggcatctggggacacacgtgggcctgtctgtgcaggggatcataggggaggggtacgggccgccaggctgtcatgggccgcggaatgacagcaattgcctctactgtgactgcagcg

SEQ ID NO: 92706 - DNA, 122 bp, Homo sapiens
agaggggccgcagcgtccccgagaaggggatctcgggaaagatgaatagcagtgacccatcggtggcactgtagaaagagagatgtccagcctcgtagtccagaaagatccccacgcgcctg

SEQ ID NO: 92707 - DNA, 122 bp, Homo sapiens
ctgctggggctacatggaggggcacgtggtgaggccagctcccggcccagacccccaccccggacccctgacctgccagagccctgcccacctgatgtggtagccctgggctgcgcagtggc

SEQ ID NO: 92708 - DNA, 122 bp, Homo sapiens
tcgagccggttaatgggggtgggccgggaatggaccagtcgagacaccaattccagggttcggttgcgcttccgtcgctgtttcctttcgtcactttgtggggaaaagtggtagcaatcata

SEQ ID NO: 92709 - DNA, 122 bp, Homo sapiens
gtttcagcggaattcagatgacagtttaccagccaagctggggggagactttactttcttcgagttaggctgcctcagggctcgggcagccagctggaattgccagcttcctagaagagcca

SEQ ID NO: 92710 - DNA, 122 bp, Homo sapiens
gcgtagagggcgaggctgacggaggcgttgtagatgagggtcacatagaggtagccgctgcggacactaggacagacgggggctgtggtcagggcggtcccatgaccccgccactgtcccca

SEQ ID NO: 92711 - DNA, 122 bp, Homo sapiens
cggcccgccggtccgcgctggctgtgggttccctctgagatcagtgcggagctgtcaaagcgagcaggggtggcgccgggagtgggaacgccacacagtgccaaatccccggctccagctcc

SEQ ID NO: 92712 - DNA, 122 bp, Homo sapiens
ctggagagcgccggaggtgagggtgaggattagtggaactattgaggtcctccttgagcccggaggctggggaggtcttaactctctgctttccggaacctgtgtttctatttggttcagta

SEQ ID NO: 92713 - DNA, 122 bp, Homo sapiens
attgtctggggctgctgctgttgcacttaggctgggtctccgagccccggaggaagcaggcgtgtgttgaatttctctctgcccctcaccttggaataaacaggaagcgacaagcacccagc

SEQ ID NO: 92714 - DNA, 122 bp, Homo sapiens
ataattattttgatttcaagggcaaaactcccgaatctaagcacattattcctgattctccgttatcaatccaaggattttcctcatgatcattcccttctatgggaaataattattgtttt

SEQ ID NO: 92715 - DNA, 122 bp, Homo sapiens
gagcgagcgggcttggctggggcttcctgccctgagcgcgacaccgactgccccggaccgcgcctccaagcaggctgaagggcttccgctcttggcttccagaaaagtttggagaaagagaa

SEQ ID NO: 92716 - DNA, 122 bp, Homo sapiens
aaggaccaaccggaaggcgcggcgtgggcgtgccacccggcggcggccgagtagagggggcgagagttctcaccccacagccttcgaccggagtccgcctccgcccaagcccctgcggttct

SEQ ID NO: 92717 - DNA, 122 bp, Homo sapiens
gtagtgagactgtgtcatttgcaacctatctgaaatgtgttcacttgccaaagctctttccgcttgtttctaactatatgtttcaaattgattcaataaaattaaataagccgtggagctca

SEQ ID NO: 92718 - DNA, 122 bp, Homo sapiens
ctgtagtttctgaggaaatctaaggcacaactgaggaatgaagtcaggctttccaattcccgaaatactcctccactgcttactcatgtcccttggaaattaagaaggaagccaggagaata

SEQ ID NO: 92719 - DNA, 122 bp, Homo sapiens
tcttgctgagtcactgagctgggcgaggcattcagaccccctgactgggcccagctggggcggcagatggtggagaggcctcagctgtggggggtgttggggagattatccactgatgaacc

SEQ ID NO: 92720 - DNA, 122 bp, Homo sapiens
tgatggaagggaggtctgcccgttctgatgtaaccatggccactacaccaagtgactcttcgtaaaacttgaagctacgttatcctcaaatggtgctgagatatgacagtaaggggtgtgag

SEQ ID NO: 92721 - DNA, 122 bp, Homo sapiens
tggatcccactgcagatggaaggttgagaaacgtggaaaagaaaaacacgaaccgagatacgaagggtgataccgagctcccgcgatgagaagcagcttgcaaggcttccagggcacagcac

SEQ ID NO: 92722 - DNA, 122 bp, Homo sapiens
ggtgtggcaggcggacgcagctaggcagtgacaaggacctcggctgagaggacacctggccgcagcgggatgccatcagggccgggtggttggggagctggtctccagggagtgagtcggga

SEQ ID NO: 92723 - DNA, 122 bp, Homo sapiens
ttccctcaggtgctaccccttggattctgtagccagagactgggcagtgagcagtgagcccggcttctgttcttgaggtgtttggggctgggcaagcttgcttttattggtatgtgtgagtg

SEQ ID NO: 92724 - DNA, 122 bp, Homo sapiens
agaagttctggttggtcaatgttcaaagtcttttctctgacagcatctgtctctaaaggccgaacaacgggagatgcagcggaattggattaaaagactctgaaagtacagtcgttcatctt

SEQ ID NO: 92725 - DNA, 122 bp, Homo sapiens
ggcaggggcaggggctgcaggcggccctacagagccggtaaaggtgaaggcggtgctctgcggtgggaacgggaagcttccccaatcagactgcatcctgagggacaggagcggacacacga

SEQ ID NO: 92726 - DNA, 122 bp, Homo sapiens
acctaagatgcactacaaagtggtaagagctgcagaggtacaggagctgcagaccgtttgcgctacaaataaagcagccgtagtgggacatgagctgcggagtacaattcctctgttttctt

SEQ ID NO: 92727 - DNA, 122 bp, Homo sapiens
gcggcggcgcggcgcggcgctccactccggcctgactccgcaccggcttttgcgggcggccggcggcgcggggccctttggaaatagaatagccaatgtaatctgacacttcaacttgctcg

SEQ ID NO: 92728 - DNA, 122 bp, Homo sapiens
ggcgggacctgagggccgctggaggggcggggcgtctatgaggtcccgcccatgcgggggcggggcctgcggcgcgcgggaagcggcgcgcgctgcgcgggaggtgacggtgcctctgactg

SEQ ID NO: 92729 - DNA, 122 bp, Homo sapiens
ttattgttctcatcctggggagcaacctgtaggagagacactcctccacgaaaaagcggtcgtgggtcatgaaaacattaattcttgaggtggctgaatggccatctggggaacgctcgcca

SEQ ID NO: 92730 - DNA, 122 bp, Homo sapiens
gtttaaaggtgaaacacaatcatttcataaaatccagggaaggctgggtgcagtggctcccgtctgtaattccagtactttgggaggctaacgcagttggatcacttgaggtcaggagttca

SEQ ID NO: 92731 - DNA, 122 bp, Homo sapiens
tttagttcccaggggacagagacgacttcttcattagaagaccccggggggtccccagcccggaagggctcacagttggagctcaaacatttgccactgttcaggctcatctttctttcccc

SEQ ID NO: 92732 - DNA, 122 bp, Homo sapiens
agcagggacgtggctttaattggagcactcggctgggctgcttggggagactcttccgtgcgttcttcctctggatagaaccaccacctcctgggcgtcactgacaagctccatcttaacct

SEQ ID NO: 92733 - DNA, 122 bp, Homo sapiens
cagccccagccgctgtcgctcgtcaccaagtctttagaatagctttagcgtcgtgaaccccgctgctttgtttatggttttgtttcacttttcttaatttgccccccacccccaccttgaaa

SEQ ID NO: 92734 - DNA, 122 bp, Homo sapiens
ccaaaacccgagctgggtttcctgcttggagtcgcagggtgtggcaatgttgaagttcgccgtgcccctgctccctatgggaattagaatccggtccaggacaagcatcgggaaagggggac

SEQ ID NO: 92735 - DNA, 122 bp, Homo sapiens
cacttctctaacatctgggtggtggcagcactggggcctcagtgcgtgaggcgtgatggccgcttcgtaaacaccacgttgtaagacatgcagtcttttttactctcctgtcccaaaagact

SEQ ID NO: 92736 - DNA, 122 bp, Homo sapiens
gagattattacctaaataacttccattttgccatataatgtaagtaaatcatgggagtaacgccaggtggcagagatcatgggggctggatcagtttcctattgttatgcaacaataaccac

SEQ ID NO: 92737 - DNA, 122 bp, Homo sapiens
gcagagccgcggccgcgcgccggcgagtgggacccgggcgtcgaacccgggcgggctcctcgaccatcactgccgggcgtgtgtcaccctcccggccaagacggccagcacccgctgcccga

SEQ ID NO: 92738 - DNA, 122 bp, Homo sapiens
ctcctggaagaggccggagcgctatcattgcattatcttttgacttaactttctctagaacgtgccccgggcgggtggatctccctccttcccgcgaatcccttatggagcatggaaggata

SEQ ID NO: 92739 - DNA, 122 bp, Homo sapiens
ggagcctcggtttccacatctgtaaggatgagacaggaacggtctctctgggggcagggccggtggtacctggagccctccccactgagcacctggcccagtgcccggcacgtggcaagtga

SEQ ID NO: 92740 - DNA, 122 bp, Homo sapiens
agaagcgaagccattggctttctgagacttgctcatcagaagccttgctgctgccacctgcgcctctgggaaagcttgccgtgggagaggcgcaaccgcctggagaggccttcctatgagga

SEQ ID NO: 92741 - DNA, 122 bp, Homo sapiens
gcaggagagacgcgtcccagcggggagttctggagccaggatgcggggtggggcggtgcgcgggccggtatcagagtcctggcttccagcctcagctccaccacttcctaactagatttctc

SEQ ID NO: 92742 - DNA, 122 bp, Homo sapiens
ggtgacctttccagactccctgggaaggtgggggggggggggtggtcctcagagccccagcggggtcggagacacacagaccaccctccccgttcccagaagtcgcggtccctgcgccaccc

SEQ ID NO: 92743 - DNA, 122 bp, Homo sapiens
tggtgcggggccggccctgcccgtcaatgtactgcgtgagccggatgtaagcgatgcaggcggcatcctctccaatgacgtgcacgtgtgggttcaggatggtcgtgtggatcggcttgctg

SEQ ID NO: 92744 - DNA, 122 bp, Homo sapiens
cagagagcaagcgatgggggaggagagttgtgagagttagaattggtccccgtccatgtacgacagtcagggagtccctctggccctgctcccgcccgctcccagctcccctaagggtagcc

SEQ ID NO: 92745 - DNA, 122 bp, Homo sapiens
gcatggcataagcttgcgaagagggagaccgggtgctcttaaaggttgtgtgtctaacaccggagagttgcatgacaggcccgtgtccctcgtgcctcacctttgattccacatctgcattg

SEQ ID NO: 92746 - DNA, 122 bp, Homo sapiens
gctaataaggaggagagacctctcctttgcaatgtgctgcggcaggagaaagcaggctgccggcccctgcctccctgaatcctcagtggctgactggataccgcttctgggggttgctgtgc

SEQ ID NO: 92747 - DNA, 122 bp, Homo sapiens
ttcagatcccggccgcctgggctccaggagccccggaaccaggataagttggatggctgccgcggcgaagcggggggcggggtggaccgtgcccggtattttctatacgggttccggggccc

SEQ ID NO: 92748 - DNA, 122 bp, Homo sapiens
ccacgcgccgcagcaggcaccttcaggaggctttgcggacccggcgcggggccttcagggcgcaggcgactcagcgttgaatgcgtgaaaactgagccagcaaacatttccaaaactgccag

SEQ ID NO: 92749 - DNA, 122 bp, Homo sapiens
caccttttaagcttcattcggaacatgacacagccacacgagtcctagccctgaatctcacgaagacctcagtacacctggaaaaggcagcacacccagttacgacactactagagacgtca

SEQ ID NO: 92750 - DNA, 122 bp, Homo sapiens
accgcgtgacagaccacacctgtcccagcggaggccccctctcacccagcctcaccaccccgctgcccccgctggacatctctgtggctgagcagcagcagctgggctacatgccgctgcgg

SEQ ID NO: 92751 - DNA, 122 bp, Homo sapiens
ggactgcctttgttctcaagatccctttgatgctcctctttctcccagctttcatcaaagcgtgagtctgtatgcttaatgcctcttcttgatccaaggtgttaatgatgataagggtatta

SEQ ID NO: 92752 - DNA, 122 bp, Homo sapiens
ggggaggaaggagggccatgaaggggaggagggtcagccaagatgctgtgagttttggagcgggacactatctgagtcctggaggcatatgaaactgtccataaaggacggatgctggggtc

SEQ ID NO: 92753 - DNA, 122 bp, Homo sapiens
ccaagggtatcatgagcaaaaggaaggcaacagaatgtacaaactggtagctcagagatgcgatctgactggccactcagtgttttaaacaattttaagttaggtgccaatgtttaatattg

SEQ ID NO: 92754 - DNA, 122 bp, Homo sapiens
gctgcaacatggccaatccattcatttcagcatctctttagcaacagctctgatgactgtcgccaaaatagttgtgtgaggacccacactgatcatgaaatgatttaaccaaacaatcagct

SEQ ID NO: 92755 - DNA, 122 bp, Homo sapiens
ggagccgtggggagggaggccgtgagcacagccgggtgaaggaagtgaagcggcccagggcgctcccgggccagccaggagggttctagctctgggatatcccttattagtgttgtctcaga

SEQ ID NO: 92756 - DNA, 122 bp, Homo sapiens
tttcaggattttactactagactgcgaaagtctgggcctcctttttcagcacaaggcgggcggcccccgcgtgccctagtccagtggtctgcctgcacgtgggggagtggggaggtcaggaa

SEQ ID NO: 92757 - DNA, 122 bp, Homo sapiens
ggattcagggcgccattctgaaggaccggccttcagcaggggactccgtattctggtttccggtctatttacagcatctctctctctctctctcgctttctctcccctttcctgccacactt

SEQ ID NO: 92758 - DNA, 122 bp, Homo sapiens
tggctgcaactccgacagcccaggctgccggcaccagctggctcctctctgcaaggcctgcggaggtgaactcagacactgactccccacccccgccccggtcccacaaaccattgggtagg

SEQ ID NO: 92759 - DNA, 122 bp, Homo sapiens
agcattgtcaccaacggagccatagagggacctcggcccaagctggggcctcttcattgtcgaagaaggcctcttgccagaccaggatctgtgggcgcggccaggctggaggactagggcgg

SEQ ID NO: 92760 - DNA, 122 bp, Homo sapiens
tggtgctggtaagttgattcggccaccctgcagttataggatctagtgtctttcttctcgcggttacacctagttgcaaatagcaccataataaccagcaacactgcacaaattgctcctaa

SEQ ID NO: 92761 - DNA, 122 bp, Homo sapiens
tacaggaggtgggctaggtttatcttccaggtaatggttcaatttatccagcaggtcaaccgccccttcaaagtctctctgcgcaatgcagacatccaggtcttcaggtaactcctggatcc

SEQ ID NO: 92762 - DNA, 122 bp, Homo sapiens
gtggtgggtttgcctccctcctgctccaggccctgccgcggtgtggtctcagctcagcatcgctgctgccctctgagcctggctggtcctcaattaggaacagcaagatctggctgtcggca

SEQ ID NO: 92763 - DNA, 122 bp, Homo sapiens
gccttctgttcccagctgaggggccccctcccacggtggcgttagcagtggggtacagtgcggtaagagaggtgctaagggacgggatgagggtctttcttgctttaaaggtgtctaaatat

SEQ ID NO: 92764 - DNA, 122 bp, Homo sapiens
agggggaaagcgtggaccatatgcagcgggccaaaggagccacagaaagtccaagaacagcggaggttgtggtgcagtgagtgtagcaaggcaagcatgagagtcctggtttttcaaaagcc

SEQ ID NO: 92765 - DNA, 122 bp, Homo sapiens
ggatcctttccctgggactgggagctgccgcctttgcattctggtctcccagggtcagcacgactgacggcagcacggggcacgtctccacaccgaccccaccgtgacctaccagggccagg

SEQ ID NO: 92766 - DNA, 122 bp, Homo sapiens
cgactgtgatgggggcaaatctggcatcccagctgcccccatgcagggtgagtggtgccacggcagacacccatgctgggctccccacagacctccgtgcagcgcagggggctgacatgggc

SEQ ID NO: 92767 - DNA, 122 bp, Homo sapiens
accctcccttccttccctcaccccgtcctttccctcatccctgccccttcctctgtcccacgcggctttcagacatgcatagtgcagcccctcagtaaaggtgcagctaatggcccgtgggc

SEQ ID NO: 92768 - DNA, 122 bp, Homo sapiens
atgggatgacaagtgtgcaccactgcgcccaggctttgcccatttttgaatcaggttgttcgttgttaagttttagttctttatgtattctggattgtaatcccttattagatacatatgat

SEQ ID NO: 92769 - DNA, 122 bp, Homo sapiens
atctcattccaattctaaaaggcacctctgaagccttgctgaacttcatcaagattttcacgtggtttccttagtaaagtgtgatgagaaggtccatccttctcaggatgaaggagtggtcc

SEQ ID NO: 92770 - DNA, 122 bp, Homo sapiens
gtcaaagaaaggggtgacgggcggcacctggaaaatcgggtcactcccacccgaacactgcgcttttctgaagggcttaaaaagcgtcgcaccacgagattatatcccgcacctggctcgga

SEQ ID NO: 92771 - DNA, 122 bp, Homo sapiens
ttggaggccagcactcactttttcatcctatgatttatttgagaagcagagagcacctaccgggtgccaggcacgagctaggtgagaacagaatcaggtagaaatctcagcctagccacacg

SEQ ID NO: 92772 - DNA, 122 bp, Homo sapiens
caaaccttggggcagacttcccacaggtgaatttgaactccccaagattaaaatcaagcccgtattcaggaaacacttgggagtccttgaggttcaccgagagggaagttggaaatttttca

SEQ ID NO: 92773 - DNA, 122 bp, Homo sapiens
tccccacagtggggacagaagaccatcccattcagctgagacacacaggccttgtggaagcggtgggccacacggaagtcagggtggcactccaggaaggtgccctgggagcagggaaacga

SEQ ID NO: 92774 - DNA, 122 bp, Homo sapiens
gatgccttgatatgaaatgagaacatatatgtggaaaggtataaaattaagagacaccctcgaccctcacctgagttactgctcctaataaattcacgcatacctgagtgctgtgttttcta

SEQ ID NO: 92775 - DNA, 122 bp, Homo sapiens
tgtccaagcgcggggcgagccgggctacagagggcaagaccgggcacagcgctgggatgtcggggtccccaccgagggaagccgctgtacgctcaaggtcgcccccgcagcatcagggaggc

SEQ ID NO: 92776 - DNA, 122 bp, Homo sapiens
ccttccctccaatgtatctggttcccttctgaccaagtgtgtgtctagaaatgtcgtctgcgagctagggcctagaatgggatcctcacaacattgactgatgcttatcctgctgtggctga

SEQ ID NO: 92777 - DNA, 122 bp, Homo sapiens
ccacatgattctagttgcagccaaagctgagagccactgcttcaagcaagtgggaatgctcgtgtgtgagaggatttttttcctctctattccaggcttcctttattgaatgtatctgctgt

SEQ ID NO: 92778 - DNA, 122 bp, Homo sapiens
ggccacctaaacagctatcgcaatgtgggcattgatcaagccagctgccagggcagcgggcgcagggcttgggcactggagcccagccccggaccgcacctccagcagtgctgggtgcagaa

SEQ ID NO: 92779 - DNA, 122 bp, Homo sapiens
gggggacctggggactcgggtgctgggagtgtggctcctgtgggcccaggaggtctggtccgagtctcagccctgaccttctgggacatggtggacagtcacctatccaccctctgcatccc

SEQ ID NO: 92780 - DNA, 122 bp, Homo sapiens
ccctcctaggcgaggtcataaacaccaacgtctccaagcagaggcccaaggactgcagctcggaggaaaggccgcgcccaggcctcgctgccagagccagagcggggcggggggacccgggc

SEQ ID NO: 92781 - DNA, 122 bp, Homo sapiens
gatgcagatctgttcttcctcttcttaatcccagagaagttcctaataagccagtaatggcgcctccgcagaggcatccgcagcgcagcgagcaggtcctgctcctcacgctcctggggacg

SEQ ID NO: 92782 - DNA, 122 bp, Homo sapiens
ttgggtgcctccttagtgcgcatgttcattgggcaccttgccattggcccttcgcccacccgggagctgtgatcctgcacttcgggtccctgaggtctggattctttctcccctactgagac

SEQ ID NO: 92783 - DNA, 122 bp, Homo sapiens
cagaaggtttcgtgtcctggacagactggcacagttggtggccctggagaagcgaggccccgctgggaagggccctgatgtctttgaggtcacaggaactgaggagtcacggatgggtcact

SEQ ID NO: 92784 - DNA, 122 bp, Homo sapiens
tgggcgatttaaaaacccgcgagtgtagttgtgaccttcgcggtaggtgccggttggggccggctgtgattgttatcttggtgctgcagaggacagcagaagaggagattgggtcagaaaac

SEQ ID NO: 92785 - DNA, 122 bp, Homo sapiens
agcagcttggagaggaagtcggacttcttttccaggcggagcctccacgatgggcgtgggcgcctcgtgcgtgggccgggggcctcgtgcgtgggcggggatcggggcctgggaaaaacggg

SEQ ID NO: 92786 - DNA, 122 bp, Homo sapiens
cgggcggaagaaatgtctgggggagctcatcggcactcagaacgcggccactgtgcctgccgacaccaaggtgatttgtgctctcgccactgcgtataacgagttggcccggcagaagctag

SEQ ID NO: 92787 - DNA, 122 bp, Homo sapiens
agccgtgaagcccaggctgtccctcttgggtgggcaccctggtgtactgagcacacagcccggggagcggcggcgctacggggaagcaaaggattgcacaaatcgggccatgcagtgctgcc

SEQ ID NO: 92788 - DNA, 122 bp, Homo sapiens
gccaatgaagatgacgatgagcttctggagctgcccgcactgctgcagcgcccggctggccgcagcccctgtgccaccctccgtggccgccgcatcacccccaccaccaccatccttcttct

SEQ ID NO: 92789 - DNA, 122 bp, Homo sapiens
aagtgggacgtgctgacgcagtcagatggaagcacagccccccaacactgacggcagcctcggtctgcagaagactcgctgcaccccactggtgggcatttgaaaactgctcagaaaaacgg

SEQ ID NO: 92790 - DNA, 122 bp, Homo sapiens
cagtctctggctgctggggaccggcgagggctttctgttttgtcaggggcacaggggctccggtgggcagctggggcagaaggagcaccaggaaggagccaagaggtgctgggctcctccac

SEQ ID NO: 92791 - DNA, 122 bp, Homo sapiens
gggtgacagagactccgtctcaaaaacaaaacaggaacttaaaacaatggaacccattcacgttcttctatttgtctttaataatcctgggtaatagtcaactaataatcctgggtagtagt

SEQ ID NO: 92792 - DNA, 122 bp, Homo sapiens
aatgaagagcaagcggtccgggccgggtgcggtggctcatgtctgtaatcccggcacttccgcaggccaaggcaggaggatcgctggagcccagcctgggcaaaatagcaagaccccctgtc

SEQ ID NO: 92793 - DNA, 122 bp, Homo sapiens
ccgccccggcagcgcaacaccagcagaaaacggacagtctcccccaagtacagatggttgcgccggggcagcgcccggtaccggcccggatcccctgccagctccgcgcgcggcggcagcgg

SEQ ID NO: 92794 - DNA, 122 bp, Homo sapiens
taacgaatgctttaatgatgatgtctcctgaaagtgagtgttcctctctggggactcctgcgaaatacatgatgatgagctcgtgacgtagatgaagctggcaagacggcctcagcgctggt

SEQ ID NO: 92795 - DNA, 122 bp, Homo sapiens
aaacccaccttctcttcagaacactgctttgcttttaagaatcctacctgtagcaaagaacgtctctgtggtagatttaaaaataaaagaaaaaaatatatgagatgagaatcctgcctgcc

SEQ ID NO: 92796 - DNA, 122 bp, Homo sapiens
tcctgtactcgtccccctgccacttccacctgtccaaggcttctgaggagctgtctggtacggaggcacctcagacccgccaggacgttctgtctgacttgacgtctgacttgacatctgcc

SEQ ID NO: 92797 - DNA, 122 bp, Homo sapiens
caccaccttcctgcggcagagcccgccctcatgctttctctgattggcccgaggcgctgccggccgaaccccgctcccaacccattcttgagtgcacttggagagatgtttcctccaaccaa

SEQ ID NO: 92798 - DNA, 122 bp, Homo sapiens
cggggtccgtgctttgcctcccccggctccgaggaaacgcgccaaggagctgaggaaatccggcgcagactctcccagctggcaccaaagccttccgcttcgccgagatcctctcaggtgct

SEQ ID NO: 92799 - DNA, 122 bp, Homo sapiens
gtcagtggtactgaggcagacgttgtggcggagaagggcagtggctgtagctgccctttccgtttccagggttccgaccaggtaatagaattttcacacttttcttcaagcttcttgggtcc

SEQ ID NO: 92800 - DNA, 122 bp, Homo sapiens
aatctgagacagctcttagttaatttagaaagtttattttgacaaggttgaggatacacccgtaacacagcttcaggaagtactgtggtcaaggcacagcttggctttatacattttaggga

SEQ ID NO: 92801 - DNA, 122 bp, Homo sapiens
caggtgtggagggagaggcgtgggcgggaaccggggctgcgctcgttgcttgagggccagcgcgagttccgggtgggcgtgggctcagctggccccgcattcggagaggtcggccagccggc

SEQ ID NO: 92802 - DNA, 122 bp, Homo sapiens
catctcgctcttgggtcatgcctggccagcagaaagcagctccataggggaggagagccacgcaggatctcacagctgcagtctaatagtaacacagaggtaattttaactttttacttttc

SEQ ID NO: 92803 - DNA, 122 bp, Homo sapiens
gaaatagagagatatgaatcatgccatgtaggttccagggcgggggcgttccctccctctcgtccttcgctttgccttgcattattgcagacgacagcagtgcagggatgaactcactttct

SEQ ID NO: 92804 - DNA, 122 bp, Homo sapiens
gagctcctttagtcaaaatcagtcctttgcacaatgttttcagaggacaggaggttgccacgagccgtggattcggggcggatgcatcatgcgtgacgggagacagctgctccggccccgcc

SEQ ID NO: 92805 - DNA, 122 bp, Homo sapiens
cctttttgtgtcaaaaggacatttaaaattcaattaggattaataaagatggcactttcccgttttattccagttttataaaaagtggagacagactgatgtgtatacgtaggaattttttc

SEQ ID NO: 92806 - DNA, 122 bp, Homo sapiens
tgcctccacctcatgctcacataggctgatgctgtctgtttgcccgggggtcccctccctcgactgtacctggggtggggacaataacttatttctgtatacctagcggttaaaatgtagtc

SEQ ID NO: 92807 - DNA, 122 bp, Homo sapiens
cagctgcagtgatgacagacggccactagatggcggtgctgccccatcagaagtccgccccgcggctccagcacacagggtcgcgcttggaggccagttcctttaacccccaggggtcaggt

SEQ ID NO: 92808 - DNA, 122 bp, Homo sapiens
cagtgcatcagcaatgagcagccgctgaccatcaggcagcgtttcccacctgccagagaacgtcagagccactgcgtctggaccagctgaaggcagccacggtgcccaggatgctgctgctg

SEQ ID NO: 92809 - DNA, 122 bp, Homo sapiens
cacctagggcaagagtgttagatagaaaagagccctctagattggctccgggtgtgtgaacgttagagtctcagcaaaaggagcagccagccaggtcagaggagaaccaggagggggtggtg

SEQ ID NO: 92810 - DNA, 122 bp, Homo sapiens
cgtggcatgcatgcggctgcggccaccggcggctgccaggcgctggttccgggaggggtccgcacacctggttgaacttcttgtcgcagtgtgggcacttgtgctccttgtccgtgtcgtgg

SEQ ID NO: 92811 - DNA, 122 bp, Homo sapiens
ccccttgcgtccccctctaccctgcttgctgggaaatctctgaggggccagtacagcagtcgcgccaggctgcaagaggcgggctgcagctggcgccggtcccggcgacggccacggcgtgg

SEQ ID NO: 92812 - DNA, 122 bp, Homo sapiens
tcagacattcgtatcatctggtatcccaaagcttcagggtctgtcatccctttctatagacgggcaccttgatcacggctccagtcttagaaatcatctccagtacctaaaaccattgtttc

SEQ ID NO: 92813 - DNA, 122 bp, Homo sapiens
agaaattagtttctactaagtgaattttccctttaaattacaattacataattttaaagtcggaaggatctttaaggtgcctttattttaaattcatacttttgtatggtgacaaatggtag

SEQ ID NO: 92814 - DNA, 122 bp, Homo sapiens
tgatggaaatcacagtaacatcatggaggtggcgctggtaaaaaaaaaaccagctctgcccgatgtgcatcgattacaagacctggtggcgaacatatgttttacagccctaaattgcattc

SEQ ID NO: 92815 - DNA, 122 bp, Homo sapiens
tggaaatagacatgcttgcagcaggttgctgaagtaaatacagcatcaaggtggtggacacgacttggttgagttccaagagctcagcaacaagctactcacctggccttcccaagtgatta

SEQ ID NO: 92816 - DNA, 122 bp, Homo sapiens
tgagtcctactaatttctccctttctgcttgtctcccttgtctctccttagtaagcgatacgaatcccagcttcgggatcttgagcggcagtcagagcaacagagggagacccttgctcagc

SEQ ID NO: 92817 - DNA, 122 bp, Homo sapiens
tccctgctgcacgttaaagctgttctcttttgcactctgaaccggtcttttaccaccacacgtgattccgccacaccccacatcggtcatgtgagaaacgtgggttcactgagctgcgtgtg

SEQ ID NO: 92818 - DNA, 122 bp, Homo sapiens
tgagcggacttaactggccccaagacacacagttggcatttgtgatcatctggctctcgccgaggactttgccagtggcctaaccttcctgccaagaagctgggagggcgggggttgggggt

SEQ ID NO: 92819 - DNA, 122 bp, Homo sapiens
ggtgtgggcaaaaggtaatgaaatatgatagggttacatgtatatcactattccttcactcggattgaaagtaactggcacttgaggaaagcttactcttctacaggcacgcaaagggaagc

SEQ ID NO: 92820 - DNA, 122 bp, Homo sapiens
cccgcccccttgtagttggcagcggaagtccggagcggcccccattcccagccgccaccccgacactggctgccattcagtcaagcccttcccagactgcgagctcactggcgccgccgcaa

SEQ ID NO: 92821 - DNA, 122 bp, Homo sapiens
gcccggcccaaatgttatcttgaattgtaatcccataatccctacatcgtgggagggacccggtggaaggtaattgaatcacgggggcagttcccctcccctccatgctcttctcgtgatag

SEQ ID NO: 92822 - DNA, 122 bp, Homo sapiens
gtggcgagcgcaggacgaggctaggcgaggcggggcgggaaagcgcacgcggcagaatcccgccaccgcctgccgcgtgtgcgcgaagcgagccgccgggtacctgttggcggggcgctgag

SEQ ID NO: 92823 - DNA, 122 bp, Homo sapiens
gaaagcggagtagggcagtcagaactccggggtctcccagatgcctcggggtctcgctgccgccaacttcgcaaactgactcaccggtgccaaaagatgaatgctgccccctcctctagtcg

SEQ ID NO: 92824 - DNA, 122 bp, Homo sapiens
aagaaaaatagccgctgccacacagtcccgacttgccagcaaggttttccctcagcgcgccgcaaattttctggaggatcctggggttatgaaagctcagaagtcagggttattcctggtcc

SEQ ID NO: 92825 - DNA, 122 bp, Homo sapiens
tgctgtgctgggtgttgggctgggaaacgtttagcagcttgctcaccagtgggaaaagcccggatttgcagcatttgctgacttccatggagacattcccaccatgactgatttttatttgc

SEQ ID NO: 92826 - DNA, 122 bp, Homo sapiens
acttctttcccttttcggggatccgggtggggcgggcgccgctgagcgcgtctaggtggccgcaggtcgcggcatcgcgtcccggatcaggacgcgaacatccctataccgcagacaccccc

SEQ ID NO: 92827 - DNA, 122 bp, Homo sapiens
gtaccgcctcccgcgcaggtatgtgacgtcatcgcgccgacgaaggcgcccgctaggccccgcctgctctatttaaacttctggactcaacctggccgctagaccggagcgtcctccagcgc

SEQ ID NO: 92828 - DNA, 122 bp, Homo sapiens
ataggatggtgctcttttgttgaacctgtattgatttttttttttttaactatattgattcgtttactagaacagtctaattggggcattgaggaaatgaagactggatacttctgtatctg

SEQ ID NO: 92829 - DNA, 122 bp, Homo sapiens
tacaggcgtgagccaccgcgcccggcctgaactagcagcattttaagtgctcagtggcaacgtggtaggtggccaccatgctgtgcagtacaggtagactctcatgtctagatccacttgct

SEQ ID NO: 92830 - DNA, 122 bp, Homo sapiens
cggagaaggggtctggtcgaaccacggctgtgcgctcacgagaggaaacctcacctactccgtctgccgctgcactcacctcaccaactttgccatcctcatgcaggtggtcccgctggagg

SEQ ID NO: 92831 - DNA, 122 bp, Homo sapiens
gcgggcccgcgccggttacctggctgcgcgctcccgctctgcctcgcgattctccggaatcgtacctcttcgtgggctcgcgccagcgctgtgagcgcacaattagtttaaactatggcccc

SEQ ID NO: 92832 - DNA, 122 bp, Homo sapiens
ctctgccagacagccgcgaacactggtaactagaaaacggaacttcgataaagaatgacacgtttgatgctatgcccaggtgaattcagttgcttcgagaagactcagcttcacagcctgga

SEQ ID NO: 92833 - DNA, 122 bp, Homo sapiens
gttactcctagcagagctaaacattagttctcctgaaatacaaatgatgaccatccttaacgtgctttagaagtgacccagaagacaaaatcctagtcccccaacaaaaagcaggcaagggc

SEQ ID NO: 92834 - DNA, 122 bp, Homo sapiens
gttctgcggcctaggctcagcttcctggatgaatcaggcacaggtccagttccatgttaacgcccactgaaactgacgcactaatgtgtgtcacctggttaaagtccagactgggcccagga

SEQ ID NO: 92835 - DNA, 122 bp, Homo sapiens
aaatcagtttcatgaacaggcaaagtaagaatccctacttaaataatatttagtttcatacgtttttcctagcgacgttttaatgtccctactaaatgttattattcaatttcacacttaca

SEQ ID NO: 92836 - DNA, 122 bp, Homo sapiens
ccccatatggctcgacacctccaccacaacaagcaaaagacacacacacgcacacacacgcgtacacacacacaaaacctagagagagagagagagagagagaaaagcatcatttgtctcta

SEQ ID NO: 92837 - DNA, 122 bp, Homo sapiens
gagaacgaagaggggtgggggaacggggaaagagagaggaaaatcaagttttcttcagcacgagggacagctctccaccgaccgaaggaggagaatgctatttatttcagcaccaaatatcc

SEQ ID NO: 92838 - DNA, 122 bp, Homo sapiens
ggacaggcatcatagcaactcacagtggtcccctcttcttggagcccatagtctagtaggcgccctctcccgcacatcgcagcctctcctttcacctggcatcatacgccctgtactcccaa

SEQ ID NO: 92839 - DNA, 122 bp, Homo sapiens
gtctgcaccaaccccgctgggtgggcggcgggggctgcggccgcgaagctggggtcactccgcgcatccagacacccggacaccggactttctaactgagtggcaacttgtagcggaggtcc

SEQ ID NO: 92840 - DNA, 122 bp, Homo sapiens
agtgggaggtctctcgggcgttctccagatgtggttgagactttcccagtgctggggtggcgggtgacatttgtaaataaatgccagttggtccgggtacaaggagaacactatttaaaccc

SEQ ID NO: 92841 - DNA, 122 bp, Homo sapiens
ggcaagaaggtggaggtaactcagcgagaaagccacacagcctcatctatttataggtcccggtggtgaaaaagtaaaaccagagtgcagcttcttctacctgctgctcccaactgaagctc

SEQ ID NO: 92842 - DNA, 122 bp, Homo sapiens
ggtgggggtcgtggagtgggggagggaggccagccgggctccagaggggtcagggcgcgacgagaaccaactctttacctaactttgcatggtgcttagtcaaggactcctgcgacctggct

SEQ ID NO: 92843 - DNA, 122 bp, Homo sapiens
ttaccaggcatcctctgcactccaggctagaatgtggagtatgtcgaaaaggtcaatcatcgcccttgctagatcttttcttaaattctggcccatatgctgagaaggatcagtggtgctct

SEQ ID NO: 92844 - DNA, 122 bp, Homo sapiens
accacgggcattttcaccccattacccttccagcttattgccgactgctcccgaagggagcgaaaaggacaggcaaagggtttcaccaaaccctttgtaatgggagattcttgccttcttac

SEQ ID NO: 92845 - DNA, 122 bp, Homo sapiens
cccgggctccctgttagagccaggcctggctcttcagccttgcagctcaggaaaccagagcgcagcgctatagccgcgactgcggcggcggcggcggcgcagggggcgggggaggagagaag

SEQ ID NO: 92846 - DNA, 122 bp, Homo sapiens
aaagctcgctcgtgacgtcaccaagctccggaagtctcctggcgtcggcgcaagggccgccgggaaaaccattgagaggccaccgggaaaccattgagaagccccggaggaccggcctgagc

SEQ ID NO: 92847 - DNA, 122 bp, Homo sapiens
aaaaacattccttcatctgctggtagacattgtcatatctgtgtgggattcctggaatcgcggaactgtgaggggagttggccaaagaggatatacagtgaatggtagagaggaaaatgtaa

SEQ ID NO: 92848 - DNA, 122 bp, Homo sapiens
tgccacacacttggacacatctcaatccccacacacccataagaggttcaaattatttagcgctattttacaaagaggtttaagttcacataaatatctgaatcaaggatgacagctctgag

SEQ ID NO: 92849 - DNA, 122 bp, Homo sapiens
tggactctggaggagaagtgacgcggtgggtgagaaggtcatgcgtaagaaacccagccacggcgacagctccctctcctgagatgtttgtctttcctggtagcatttggcttcatcttacg

SEQ ID NO: 92850 - DNA, 122 bp, Homo sapiens
accatggagtcaatggaccaatggaagaatgccgtgggctgcgtcaagccaatagggtcgcgcggcgaggggcggggccggcgggagcagggcggggcctgagcactaggcggcggcggctg

SEQ ID NO: 92851 - DNA, 122 bp, Homo sapiens
accaggccccaggctgccccaggagaagcagcggtccttgtggtctttggccatgcccagcgcacactgctcgccagccccttccgctacaccgccaacccccagcttgtagcggcggagcc

SEQ ID NO: 92852 - DNA, 122 bp, Homo sapiens
tcagtcacccatccaatcatttcttcattcattcaactattgtttattaaatgctcgccacgagccatgaggggaacatatttgaactcagctttgaatatgtctttgtttccaaaaagtgt

SEQ ID NO: 92853 - DNA, 122 bp, Homo sapiens
gcaaaaagcatacatttttatatctcttcttctgctcctacaaacttagtcatacatttgcggaggccaacgcacatatacagatatcttctattaaaaaaccttggaattttgaaggatga

SEQ ID NO: 92854 - DNA, 122 bp, Homo sapiens
gagaggcaaatctcaaaataccttgacatgaaacattttgtttttctgatcaatttaacgcgcacgtttccccacatcgatgcgctctcccaaacaccctgcattagatcctaataatgatc

SEQ ID NO: 92855 - DNA, 122 bp, Homo sapiens
ttaaaacaccaaccctaaaacagatctgggtgggggctaagaatctgcatttccaaaaagcgctcccgaacgagctcttcgcagtgatacaggttggacgggattaacgcttgccttcaggc

SEQ ID NO: 92856 - DNA, 122 bp, Homo sapiens
ctcgccccgagggtgaccagggaaggctcccgggccacgggattttcacaaagacagactcgcctccgtttctagcggctttatttttgacatacacgacctcagacacaagcggggcgggc

SEQ ID NO: 92857 - DNA, 122 bp, Homo sapiens
tgagggctgacatgagttggtagtgaattttttcatcccccaccaggctggatcttgttccgattaaccggtcagtgggactcaaggccaagcccaccaagcccgtcacggaggtgctgcgg

SEQ ID NO: 92858 - DNA, 122 bp, Homo sapiens
ttgccagcaagattcctctccaggacatccgtggagccgcacgtttccctgtttgttcagcgagcacatgcacacaacctgtgagctccaggaacccccagaacgccaccttcctggctcct

SEQ ID NO: 92859 - DNA, 122 bp, Homo sapiens
ttttcctttatttccatgcttgccccctccccacttcctgcaggcctgtaagaggggtgccggctccatgtcagtttggaagaataaatgaagtgattctagccaagaagttatgaagaata

SEQ ID NO: 92860 - DNA, 122 bp, Homo sapiens
ttgacaaatattttcatcctgcagtctgtctcatactgtcaaaaaaatgtctgactataacgtaatagaactgaggttctaagtaccacacaagcccaggaacacacagctgagtgtcgctc

SEQ ID NO: 92861 - DNA, 122 bp, Homo sapiens
tttgttacccaagcctggggcaatcagccataaataacaaggatggtggggctgcggggccggggccgtgtggcataaagatggatcagaaggaggtgtgggcatggctggcttctcagcag

SEQ ID NO: 92862 - DNA, 122 bp, Homo sapiens
tcgcccccgggtgggagcgtgacaatggagcccggatatttggtgggccttttgggggatcgcctggcggtcctttccatcatcgtgatgggtacagtcatcagtatttggatcccgtggaa

SEQ ID NO: 92863 - DNA, 122 bp, Homo sapiens
gaatcacattccatgccaaatgaggcaagcagtcgggcagcctgtgaaaggccagatatccggctatcatatgcaggccagtatccagagcgggtcatacaaatagagcctgacacgaccac

SEQ ID NO: 92864 - DNA, 122 bp, Homo sapiens
ccctcatccagcactaccgcgagacgcacctgcgctgcgccgagttcgagctgcggctcacggaccctgtgcccaaccccaacccccacgagtccaagccgtacgtgtctgagggtggagca

SEQ ID NO: 92865 - DNA, 122 bp, Homo sapiens
caccccaactgaccgctgacagtgaggccactgaccggatgtcccgcaccgcctccatgacgttgatctcgcacataagcttctttgttacccaatcaagggcagccacatgacctcggcgc

SEQ ID NO: 92866 - DNA, 122 bp, Homo sapiens
gccaccgtgcaggacatcctgcgggactttgtgcagaagctccgggaagcccagcgggagcgggtaatgggggctggggtcctcccgcccacggcggcaccccccgggggtctctgggaaga

SEQ ID NO: 92867 - DNA, 122 bp, Homo sapiens
agacagtgatttaaccccctccttcctcctctacagcccgatccactctgttggcggctgcgccttgccttgggtgcagtgggacgtgtccctcccatgtttcccttaattaggaggaggca

SEQ ID NO: 92868 - DNA, 122 bp, Homo sapiens
aggagaaaagggaagggaggatggcaaaaatcacgctctagaagatccaggcaacgtcgtcgtgaagaataaagggaatcaaaatgggcactggaacgctgctaagggcttgctttgttaac

SEQ ID NO: 92869 - DNA, 122 bp, Homo sapiens
gccgcgcgctgcacgggtgtgaggggccccggggccggcgcgtcccacgatgcgcccccgcggccaccgacgctgctgctgggacttctgctgctggcggccctcctggagcacggccaggc

SEQ ID NO: 92870 - DNA, 122 bp, Homo sapiens
ccttctgtcttgggaaaaccaattagggcctctgcagcctcaacacaggggcactgttcccgcctattaatgacgcaatgaacccgggaagacgaatctcgaccactgtttcgcaaataccg

SEQ ID NO: 92871 - DNA, 122 bp, Homo sapiens
ctgaccacctgggtatctgtggctttcagcggaagccgaccaagagatgcagagaacgtccgccagctctctgggagaagcgagcaggcggctggtgacactttccagggcagaaataatgc

SEQ ID NO: 92872 - DNA, 122 bp, Homo sapiens
ctctttttgtaagcagaggtggctggctctgcagccttaaggccattttttaagtcaccacgtctagaagtcacatgaactctgctcagcaataatctgttctcagaacagacttttcaacc

SEQ ID NO: 92873 - DNA, 122 bp, Homo sapiens
gggagaagcgggtttgtttttgaatctgcggaggcggcggcggtggcagcggcggcgcggcgactgaagcgcgcgaaaagctgaggcggcaacgtcggggacggctgcgcgggacggctctg

SEQ ID NO: 92874 - DNA, 122 bp, Homo sapiens
aacccagggccatgcctctttcacagatgaaatgctgagacctgatcctctctctatggacgcaccaggcagtgcgtgggatgcagcgtcctcaggagtgtctgtggagggaggtggggaaa

SEQ ID NO: 92875 - DNA, 122 bp, Homo sapiens
gagttagattccaagacggtaggttgctttttgttgttgttgttcgccccttttcaggaacgatctgggcattgacagccccatttaaagggacagtgccttcttttgcttctgtgctagaa

SEQ ID NO: 92876 - DNA, 122 bp, Homo sapiens
atccccccaccctcctcgttctttgtcctcactatttaaagtccagggtcaagctgggcacgagacaggtaaacaaccatctgagtaaaggtgagtctcccaagccttcccagggttgcgtg

SEQ ID NO: 92877 - DNA, 122 bp, Homo sapiens
acgcagataacactaattgtaactgatctttctgagggcacctcctgagcagcttggaaacggagggagaggagaggaagccagcttcccaaagtggggtgtggcaggtggccttaaccctg

SEQ ID NO: 92878 - DNA, 122 bp, Homo sapiens
tttgagcatgggatcaccaaccagtgggaacttggtacctccaacagagttagaaggttccgttgaaatgggtaatagaattttgcacctcaaataaaatcctagaaatagcagcagccttc

SEQ ID NO: 92879 - DNA, 122 bp, Homo sapiens
agctccagcacctcccgcagctccagctctagcagctcttctggctctccaagtccttctcggcgcagacacgacaacaggaggcgctcccgctccaaatccaaaccacctaaaagagatga

SEQ ID NO: 92880 - DNA, 122 bp, Homo sapiens
ttgctcggcatcctgtgggccactgcacatctgcctctctcagggacctccctgccccaacgtctcccaagggccacaggtaggtggacattggggtcagttagctctgcagcagcagctgc

SEQ ID NO: 92881 - DNA, 122 bp, Homo sapiens
taactctgtaccgggggctccagcagcagccggggaggagaaggctgataatgggatttgcgtttacccagcaaaaccaacagggagcaatcttcagtgggtggaggaagaatgtgagctca

SEQ ID NO: 92882 - DNA, 122 bp, Homo sapiens
gcagcccaggagctcggcgagaaactttgccatatacaagcggtgaggcagggtccctcccgatgcgccgtttctgtcctttccccttgccagagcccgagcgccaggatcctgcccgcagc

SEQ ID NO: 92883 - DNA, 122 bp, Homo sapiens
gaagcgcagcgagttcgggaagcagtgcaatttctcggaccgccaggccgagctgaacatcgacatcatgcccaaccctgagctggccgagcagttcgtggagcggaacccagtggacacgg

SEQ ID NO: 92884 - DNA, 122 bp, Homo sapiens
ttgattcgagtgaccacgtcactcttagccacaagacccggatctgccggctcccgcgggcggcggcgcaacagattgcagcgcctggagactccagctgccccgcctgccgagcatgcgca

SEQ ID NO: 92885 - DNA, 122 bp, Homo sapiens
ggagggggcggggctagaggggaaggaggggaaggtgagctgggcctaggaggacagagacggaaacagagtgggtagaggggggcaaacagcttctagaagattccaagggtaggaggagg

SEQ ID NO: 92886 - DNA, 122 bp, Homo sapiens
ctgctttagtggtggctcgcggctggagtctcagctactcttcaggcagggcccgaagatcgctcgtgcccaggagttcgagactaccctatgcaacatagcgagaccctttcttttctttc

SEQ ID NO: 92887 - DNA, 122 bp, Homo sapiens
tccagtgtgcactgaactcggtgggtcggacccattcactgtgcactgaactcggtgggtcggacccattcactgtgcactgaactcagtgggtcggacccatccagcgtgcactgaactcg

SEQ ID NO: 92888 - DNA, 122 bp, Homo sapiens
tagccaagcaaagaaaggggaaagtggaaatcagggaaatagaacatcaaatgtaaaagacgagagagaaagcacattacctgagaggaagcctaaagtcagtaagagtggattaaagtatg

SEQ ID NO: 92889 - DNA, 122 bp, Homo sapiens
tttctaaagtacacaattctctagggaaagtttcaaatttattacagcataaaataagtacgtggagtgatatcatattagaaattgatgctggaattttctttatttggtttttaccaaga

SEQ ID NO: 92890 - DNA, 122 bp, Homo sapiens
gggcgccagccatctgggagcctgtcggggtggcagaaacaatcatccctaaggtcttggcggcaggggtgggtttggggcagtctgtcattctgttccacggctggaaggagggcacagtc

SEQ ID NO: 92891 - DNA, 122 bp, Homo sapiens
ggagaaggactggagggctggtgggctggagccgacagggaccagcctagttgttggcttcggacatggaggccacgtggttgaggccggcgagcccagggaggccggccaggccggcggcc

SEQ ID NO: 92892 - DNA, 122 bp, Homo sapiens
ccctcgtggcactcaggcagcgcggagcgggcggggcgcgggggtggagctgcgggagcccgcgggcggcgctgcacaccagggccctccgtgccccggccgcggagccaagcgtcccgccc

SEQ ID NO: 92893 - DNA, 122 bp, Homo sapiens
agagaggtaacatgatatgacaatatttaacatgttccactcaagaaaacaacaaacacacgcatgtccctcagatgacaacagccacaccaagtctgtgtctgtggcggcatctcctacct

SEQ ID NO: 92894 - DNA, 122 bp, Homo sapiens
acggatcatctcccctttcaagtcttattgttgaagaagtccatttcataaagctatagccgccatagagagcgattcctctgatgcatctgggccaatccaacggaaaggactcactgttc

SEQ ID NO: 92895 - DNA, 122 bp, Homo sapiens
agaaataggttggagaaagggaccggagctacagtcgagatgcgggaccggccccgcctccggctacaatcagaaaaactacagtgtgtcagtggttttcggtttcctgtttgtaaagcgag

SEQ ID NO: 92896 - DNA, 122 bp, Homo sapiens
aagtcccgcttgcagcgcccttaaaccggccacaacagctcacccatcctgtcggcgccacgggcctgagcgaaagagagaagcaccgcaggaaggagccacaagccaccgcgagcaagccc

SEQ ID NO: 92897 - DNA, 122 bp, Homo sapiens
cgctcggccgcctcccgcctgcatcagtgtctgtgatccccacctcccgcgccgctcgggcgccacccctccctagagcccctttggaaccaggaggcttcaccagcctgcacctcctcttc

SEQ ID NO: 92898 - DNA, 122 bp, Homo sapiens
ggaggcagcttctctgctgctagagaaggcattgccacctcccttcagacaggggatttccgctagttgctttctgtcatttcgtctctattctgcactcagtcccttgttctgtctggagg

SEQ ID NO: 92899 - DNA, 122 bp, Homo sapiens
agggaagaataaacatttcccgtttgctaactgcaacccagggtgagtcctgctttcccccgattttataaaatttgagcctctttgcctgctttaatagttttccagagaatttgaactgg

SEQ ID NO: 92900 - DNA, 122 bp, Homo sapiens
caacctcatcgcgcacaaccgcacacacacaggcgagaagccctaccactgcctcgactgcggcaagagcttcagccacagctcgcacctcaccgcgcaccagcgcacccaccgtggcgtgc

SEQ ID NO: 92901 - DNA, 122 bp, Homo sapiens
gctgtattttccagggagtgaaagaaagagaatcaatgttctttattcctgggcattattcgtgtgacattctgtaaagtgatgactcaggctatggctgttttagcaaacattctgactct

SEQ ID NO: 92902 - DNA, 122 bp, Homo sapiens
aaggcattaagttcaaaatagcacgtgatattccaaaccaagactttgttatgatcttctcgggcaataatatgattatcaggtttttttttcacaggcaagttgattctaaggtcattaat

SEQ ID NO: 92903 - DNA, 122 bp, Homo sapiens
ccctagctccgccttcccgggccctgcgccctagtggcctctgcgcggttcttcccgacccgcaaacacgccgccacccaaagcctctgtgtcccggcggccacccggtcaccgaggtgtga

SEQ ID NO: 92904 - DNA, 122 bp, Homo sapiens
cgtccggcaactgaagcattgctcttgggtcctgagagctggagggcatgttgcaacccccggcgcccactcccagacacttacacctacatctacttttctgcaaaacaaagttctgttcc

SEQ ID NO: 92905 - DNA, 122 bp, Homo sapiens
ttttattaatttgcctgcgaaggcatctcagtatgtgtaatgcatcccctctttttttcccgccgtgtctttgacttctggcttttctattatgagataccttttggaatacagagcccaaa

SEQ ID NO: 92906 - DNA, 122 bp, Homo sapiens
taggagtttgcagttcagagaggtcccacaagtaaatgccagagccacgactagaacccacgtagagaatctctctgcagtggctcacgcctgtaatcccagcactttgggaggccgaggcg

SEQ ID NO: 92907 - DNA, 122 bp, Homo sapiens
agcccaagccgaggcagttggaagagacgcgctggaattaatacctgatgatcactctctcgtgttctccttggcaaacgtgctggggaaatcccagaaatacaaggaatcggaagcctgac

SEQ ID NO: 92908 - DNA, 122 bp, Homo sapiens
cacactctgtccagccgggaggcaggagggtagcaggcagcacaggctgaggagcaccgccgccagccactggttcgagcaacaagcaccctgcaccaacagcatcatgtccatccctgcta

SEQ ID NO: 92909 - DNA, 122 bp, Homo sapiens
tgcggccactctaggacgccggagggtcctcctctcagtggttggggctgggccgccctgcgccgggagccgcccaccttcgggctgggccgggcctggccagagtctgggctaagcgcagg

SEQ ID NO: 92910 - DNA, 122 bp, Homo sapiens
ggctccccacggcgagggagggcaggcggagccccagctcctcccagccggctgagcgctcggcccctcctatggccgcaggggaaaaggaggagagacctacatttaaaaaggcaggaacc

SEQ ID NO: 92911 - DNA, 122 bp, Homo sapiens
aaccttgccaaagatactctagcaagaaatacgagtcgggtttacacgtgccacaccctacggaattttttgttatcgtaagagactcagagcgattcacatgtgcatcagagagggcactg

SEQ ID NO: 92912 - DNA, 122 bp, Homo sapiens
tgccaatgttttatatgtgtgtgtgactgtgtgtgcagagatgtgtgaaaaagctattttcgtggaagtaagagataactctgtattgattgaactaaagaaaaatcctatagaaatctctc

SEQ ID NO: 92913 - DNA, 122 bp, Homo sapiens
tcctctgccatggcgttgatgcgcttgttggccaggacctgcacgtgcttcccgctggtgcggctgtagagttggtaggtccggatgaggcggcggctgagctgatccgtcaccaggctctg

SEQ ID NO: 92914 - DNA, 122 bp, Homo sapiens
ggggcgccagccccgcccccccaacgtgacgcaaatctcccggacagaggcttaggagcccgggccccagtccctgcagtggctgtaacaaaacccagacccccaggtcccggccaatggag

SEQ ID NO: 92915 - DNA, 122 bp, Homo sapiens
ctggtagcccgcctccaagagcactacactccccccagccccaccggccacactacatgacgtgggaaggctgtccgttcatccttaccctggggactcaagtgtgctctgcggagtgagtc

SEQ ID NO: 92916 - DNA, 122 bp, Homo sapiens
catttttataagcttgctttttgttactgtcataatccactcagctcttataaatgccttcgcctgccttccaaatgccatggcttttgcagtgatatttgcacctgtggtgttacgctggc

SEQ ID NO: 92917 - DNA, 122 bp, Homo sapiens
cccgcccgccccatcctcctctggctccgccccaccagcctcgtgcggtcaccgccccgccggcgcacctgcgctgtcactcagccctcggccccggccccgccccgcctgccccactcgca

SEQ ID NO: 92918 - DNA, 122 bp, Homo sapiens
tcgtgccgcagcgacctgccatcccgggaaagggtgggccaccaccccagcctcacaccacgtgtgagtggcagcccaggagaccctggacctagaggtagaagcttccagaagaaaacaca

SEQ ID NO: 92919 - DNA, 122 bp, Homo sapiens
acaatttatccagtttgcgcagtgactgaggtgccctgaaattaattcactgtcttccaacgccgtggtaacagcccttccgggttctctggtgggagtcgccgagatgggcgtggccatga

SEQ ID NO: 92920 - DNA, 122 bp, Homo sapiens
gtagtcgcgctcctctaccccgttcccatcgcagaagtaatgcgtcttcgttcgtcgctgcgccctagaaggagcagtgcatgctgggggttgtagtcacccaggtggccaccttgtcctcg

SEQ ID NO: 92921 - DNA, 122 bp, Homo sapiens
tcgccccaaggggggtaggaaaaaagatgcttcattgatcccccgcccactaactgggcccgcccatctcccgccaccccaatggctcatatggctgccgctcatttgatgagtctcatcca

SEQ ID NO: 92922 - DNA, 122 bp, Homo sapiens
cgaccccgccccgcagagggaagactcagcttcgttccaatacaggacgcaatacccgcccgtcaaagactcagccaaccaccgaggcctgtcttatgattttcccgccccttccccctcga

SEQ ID NO: 92923 - DNA, 122 bp, Homo sapiens
acttttttccatccttaactgacttcagtcttcttaaacatctggttcctccagatcttgcgcttaaaagagattatgtttcttgtgagtatcttcaatgcaggaactttactttaggggca

SEQ ID NO: 92924 - DNA, 122 bp, Homo sapiens
ggtttttggaatatgaaaatacatggaatgaggcgcacctcatgcttccaccaaacggaacgtctttggcttcttgccttaggatctttctagctcctacctttaacatgcctttccacctc

SEQ ID NO: 92925 - DNA, 122 bp, Homo sapiens
gcacagggcggggcgggacggcagtgcgggactgagattgatcgaccgcgggggctgccgcgcagagatatccgggccgccggtgggtggtcgctagggctgggccagcctcttggaggtcc

SEQ ID NO: 92926 - DNA, 122 bp, Homo sapiens
ctgcactgtggctaacatgatagagggtacgtgaccacttttttgtctttaaggagcagacgctatgttcagaaaaaaggtgtcactacctgtagaacaacaaataaaatatataataataa

SEQ ID NO: 92927 - DNA, 122 bp, Homo sapiens
acctgctgctgctaagtggccacgtactgctgcaggtgacccaggtactggcctcgaggccgctgcagactctgagcctgttggctctccagctccacctgcaggaagtccctgggcatgag

SEQ ID NO: 92928 - DNA, 122 bp, Homo sapiens
acttcagaacaagggcgggcccgttgatatctctcacactcattggttgagaggttgcggcgcaatggaaggtcttaaaccgagagtatccgggattatttttccccgccgtgcggtgcgtg

SEQ ID NO: 92929 - DNA, 122 bp, Homo sapiens
ttttgctacaggaccttctttccagctcattccaaacctgaccgtcactctccttgaccacgctagtcaactgggacctattcagtcctgagctcccagcaacctcatggactccagggcag

SEQ ID NO: 92930 - DNA, 122 bp, Homo sapiens
ggtgaggacccctagtggagacgaagggaccagcaacgctagaacagtgacgtccggtagcgtccagccgtcagccctcagacgccacgggctgccggatgtgagtcatcctgacttccgct

SEQ ID NO: 92931 - DNA, 122 bp, Homo sapiens
ggcttctggtggggctggcaggcctctgtgaggcgcagctgtgcccagaactccaagttgcgtttgccaccactaccgatgtggctgcgccagccagggaggggaggcgggtagcgggcact

SEQ ID NO: 92932 - DNA, 122 bp, Homo sapiens
cgcgctgccggcagggcttgggggcgccttagagccgaaccccgttttttcaggaaagggcgctgcgaccacccccgtcccgggcctcagcccctctgctgcagaccctcgggatcgtcgct

SEQ ID NO: 92933 - DNA, 122 bp, Homo sapiens
caggtcccgagccctgtcccgcaggaaggcagccaaggcctggtgagaaatcgagcgcagcgtcggtgggttggcactgctgggggacccagtacaccctccgcagcctctggcccgggtgc

SEQ ID NO: 92934 - DNA, 122 bp, Homo sapiens
ggagttcactgggtttataaaagagaaaactaaactcaagtgtcaaataaaaactggagccgtcaagaatgactgcttgtggcaacacaggtgtaacatgtgcttgtctaaagtcgttctgt

SEQ ID NO: 92935 - DNA, 122 bp, Homo sapiens
agagccggatacttacttttgaggtgagctaggaatgagaccccgcagctgtccgtgaagcgcatcttgtatattgctagttgaatagagcccaattggcgagttataggaagcgctcacta

SEQ ID NO: 92936 - DNA, 122 bp, Homo sapiens
aggccaggatctccgctgtcccgggtcctggagctctctcggcccggcaggtttcgctcccgcccctccggccttccacagctgtcctggccgcagggtgttcaaggcgggacacaccaggc

SEQ ID NO: 92937 - DNA, 122 bp, Homo sapiens
ccgcagccggagggccggggtgggcttgcaccgctatcgcgagagctcgtgaggtgggggcggcggggagctggggaggggctcgcggagagcctgccccgcctccctttccttcccctccc

SEQ ID NO: 92938 - DNA, 122 bp, Homo sapiens
gcaccgccagggatggagaggatctggacagccaaggagacggcagcagccagcctgatacgatttccatcgcctcacggacgtctcagaacacgctggacagcgataaggtgagtcactgc

SEQ ID NO: 92939 - DNA, 122 bp, Homo sapiens
gcccaagctcacagctgaaagcactgcggaggagccggcgcgggcgggccggggagggggcgctgcgggcagacggggcggggccgtgtcgggctccgcccccacctagggacctgggaacc

SEQ ID NO: 92940 - DNA, 122 bp, Homo sapiens
ccaccgcaaggaaggagccggcggtagcttggttcctgagcggatgctggggctgtaaggcgcgcgcggtcagctgttggcggtgcagggaggaggacgccggggctcgccttccctcctct

SEQ ID NO: 92941 - DNA, 122 bp, Homo sapiens
tcctttttctctgccagcctacctgcctgtcacctttcctgatcatgcctccttcctctccggcctacccgcagacaaaggtgatctttgtagcttagccactggttctcaactctgcccct

SEQ ID NO: 92942 - DNA, 122 bp, Homo sapiens
gacggcgtcatcccgctggaggagctcagctctgggatgatgtggtggctggtggtcaaccgtccgccgcagggggtggccatgaagatggagtcgccggtgcggggtgggtgctgcgggcg

SEQ ID NO: 92943 - DNA, 122 bp, Homo sapiens
tacaattaactctattaaaacaatactacttgattaaagctctatgattaaaaaatattccgggttaccagaagaaagttcgttaaaagactactccaggtccagaaggatataaggtaatt

SEQ ID NO: 92944 - DNA, 122 bp, Homo sapiens
actgcagcctcgacctgctggggtcaggtgatcctcctacctcagcctcccgagtagctgcgaacacaggcacgcattgccacacctggctaatttttaaattatttgtagagacagggtct

SEQ ID NO: 92945 - DNA, 122 bp, Homo sapiens
atccaggtaacctgaactccagcccagagtgtttgccacaacagcaccaggttctcaggccggcctgcacgggtacagggccaagagaaaacctcagacaaacgggaaccgcccttcccagg

SEQ ID NO: 92946 - DNA, 122 bp, Homo sapiens
acctcttcgctgtagttttacttggccttagtcacgtgatctttgggaggttttagggaacgttatctagaaaaagaaatcactttagatattaacaaatgcagaaatgaatcagtccattc

SEQ ID NO: 92947 - DNA, 122 bp, Homo sapiens
aattatgaaaacagattgaccccttctttttaaattctacccagtggttctgggggtccacggcagtctgagggctgcgggtccacactcgcgggagcgcggggctgggtttctctgcgccc

SEQ ID NO: 92948 - DNA, 122 bp, Homo sapiens
ctcagcaagacaggagctgaggcagaatcacagagagatggcccttatctctgcccccgccgcctaatatgcaacattagggcagctacgataccagctttggaatactcgcctatcaagga

SEQ ID NO: 92949 - DNA, 122 bp, Homo sapiens
tgctactctgtccccgctttcccaaaggcagaacaaccctgagcctaccttggatctgcacgagactcccatgggcaaggactggtcttgggcaaacgacgtgcctttctgcctgcacacca

SEQ ID NO: 92950 - DNA, 122 bp, Homo sapiens
tgcgggagggcgcggagcacgccgggaagctcgcgggtcggcaccgggacagctcccgggcgccgtggaatgcacacgtcccgcacccggaccttccggtcagcttcccggctcgctgtctg

SEQ ID NO: 92951 - DNA, 122 bp, Homo sapiens
tcccgaagtccagggctgcctctgtggggctcctcttgacttggggctcccactccctgtcgcacgctttctttctccctttctctcctgcagcacaacagcaactcgtggcttttcctcta

SEQ ID NO: 92952 - DNA, 122 bp, Homo sapiens
cacacaaacatagcttaaaaaaatgcaggagctgtgtgcactcaattgcaatggggaggacgttgaaaccagtcctgtgcaaactgtagagagtttccctgctatatgtagaagtccatgct

SEQ ID NO: 92953 - DNA, 122 bp, Homo sapiens
cggcctcggaaatggggtgaagaagcatcgctgataccatgcagggacctgaggacagagcgcagggttgagggaggggctgggggagtcctcagcctggagggttgtggcaggctttggag

SEQ ID NO: 92954 - DNA, 122 bp, Homo sapiens
cgccccactccggctccggctggacccctgcccgcccgccgtcgccgcccgcgggcgccccggaggccctcaggcccccggcctccaccacccgggcgccggccccactcaccctttcattc

SEQ ID NO: 92955 - DNA, 122 bp, Homo sapiens
ggcgcggccccaggctctgtctcctgtagccgccagggggcggtagagctcggcttcaaccgcgtgtcctggagccccgcccggccccgagcgcccgtccgcgtcctcgtgcgtcctcggcg

SEQ ID NO: 92956 - DNA, 122 bp, Homo sapiens
atcaatgtctctacccccgacagtcattctgaccagaggctctttggggacgcttgagcccggtctccctcagtccaataacccttctgcgaggttgagccgggccccttcctcctagtcca

SEQ ID NO: 92957 - DNA, 122 bp, Homo sapiens
tgcccactttaaggtaactgtctttcaccaccaattaaacacccacaagtacacccagagcgagtcatgcaaatttcagcggagacaccgaatccaggcgagtccttgatccccacaggcga

SEQ ID NO: 92958 - DNA, 122 bp, Homo sapiens
gcgcgcggcccggcctggcgcgcacagggctccgattcaggacgccggggctggccggggcgacccgggctgctttttcagcaggccccacaatgaggatcggctgaaactcgctttcattt

SEQ ID NO: 92959 - DNA, 122 bp, Homo sapiens
ccttgtggtgaagaggtcaggaatactctgctggatgcgaactggcattgtccgccttgtcgaggccgtgcaactgcagtttccgctcgcagcgagatagactgtgggaaactggggtcctt

SEQ ID NO: 92960 - DNA, 122 bp, Homo sapiens
cccaagaatgagaattactgttaggaggaaggcagatgattctcctagaccaagtggcctcgtgctcatgacagacctgctgctgggagggacagctctccatgcagtcgtttccgcttcct

SEQ ID NO: 92961 - DNA, 122 bp, Homo sapiens
gtgcagcagccttcaaacccaggcggggctgagggaggcttggtctccgtgtccagtcgccggacaccctcctggtcctgcaaggagccagcctggtccaagctggagcagggcagaggctg

SEQ ID NO: 92962 - DNA, 122 bp, Homo sapiens
ccccctggtttgggtgcaataatccggcaactcaggggggctcaaagtcagctctgggcccgtaactctgggaggaggccgcgcagagcccagggccgagcccggccttgccccccgccccg

SEQ ID NO: 92963 - DNA, 122 bp, Homo sapiens
tccttcatgtcctgcagccaattatagagattggtgcaggcctgacccacctgtaccagacggtataaacacagcgcaatgccctggagaaatcagttggagtctccagggatcagggttcc

SEQ ID NO: 92964 - DNA, 122 bp, Homo sapiens
atgcctgcggaagagaagacccggggaatattcgaaaccccgagcttttacaacataaagcgcatggtgtggccgcggcgagtaatggcgctctgggagccctgcccaggcggcctctgctc

SEQ ID NO: 92965 - DNA, 122 bp, Homo sapiens
aactggatgaggtagctgctatttgtagttcagttttataagatgagcaaagagaggctacgagaggtaagttacaaccagctaggtagtgatggagcctggagtttgtgggtaccaaagtg

SEQ ID NO: 92966 - DNA, 122 bp, Homo sapiens
agcaatccgcctcccttggcatcccaaagtgctgggattacagatgtgaaccaccacgcccggccttaagcaagtttttattgatgagagagcagtgtattgattcatgttctggtgcaaac

SEQ ID NO: 92967 - DNA, 122 bp, Homo sapiens
tcttgactctagttctttatgtctactcttctgactccagcgtcttttctctctttgaagcgttaacccgacttgcctctgtcttctttgctacagtttggtgaagatgtttatgcttcctt

SEQ ID NO: 92968 - DNA, 122 bp, Homo sapiens
ggcgggcttaaggcttcgtggagtaggttgaaagaacggaaaaagtttgtagaaggcttgcgggagaaaggttttgcaggcaggaaatgctttctaaggattaggagggagcggactgtcgc

SEQ ID NO: 92969 - DNA, 122 bp, Homo sapiens
gcgtggttcttgctcttcactcggccgttttaaagggtgactctttcctgtcccggcctgcgtggtgtgggcttgtgggtctttgagacccgaaaattgagagcgttttcgcactccagcgg

SEQ ID NO: 92970 - DNA, 122 bp, Homo sapiens
tactggcaagctgactctatctatattaatattaatatttccaaatattcaggaaacaggcgtacatcaggggctgttcttttgctgcaaatgaagttgatggaattacactgtgatacgac

SEQ ID NO: 92971 - DNA, 122 bp, Homo sapiens
ctcacggcagctggcaaagcaccgggtggaggacagagccggtcggcccaactgtagcttcggggctgcccttggctggtctctgggcagagcccggtgctgagggcttgcagtgggaaagg

SEQ ID NO: 92972 - DNA, 122 bp, Homo sapiens
caacgggttctcagagggtgaggaggaggtcgggggctgggttcaagccgcactgggccccggattcaacaacagaaagtgctcccgagggtcctgtgcatcagaggggtcctggctcggcc

SEQ ID NO: 92973 - DNA, 122 bp, Homo sapiens
gtgatccgaggcgggtgtggggtgggggtagtcggggaaggggcacatgcagcaggagcacgggaaacaggagagggatcccacctctgccgaagctcttggcacggaggggtcgtggttgg

SEQ ID NO: 92974 - DNA, 122 bp, Homo sapiens
cgaactcctgacctcaggtgatctgcccgcctcggcctcccaaagcgctgggattacaggcgtgagccactgtgcccggctgaaaacatttattaataacttcttaagcatttgtctgtcct

SEQ ID NO: 92975 - DNA, 122 bp, Homo sapiens
cttcgcttttggagcttggataaactgacaggagttgatgacaagacgaatgaggcacagcgaccagcttgtaatcggagcactgttttccaggcacgctatgatcttgggcaagtcatctt

SEQ ID NO: 92976 - DNA, 122 bp, Homo sapiens
ctgtgaggagctgcgcctggcgcttgtgcagctgctgggcctggccgtggacctgtgcggcgccgcgctcgcgccccacctggacgacgctctgcgcgcgctgcgctgctccctgctcgacc

SEQ ID NO: 92977 - DNA, 122 bp, Homo sapiens
cacagagggggaaaccgagactcagccagctgaggggctagtccaggccccctaggaagccgaggtggcctcagcctccaggccagggcttcctaggactgcagtcctctcctgcccctctt

SEQ ID NO: 92978 - DNA, 122 bp, Homo sapiens
aaagcaagctgggcagctctggtttactctcaagacatgcctgcctgggtgctggggacccgttgaagaacatggcagtctgaagccatatgtgactggaccatcttgacctctaaggccag

SEQ ID NO: 92979 - DNA, 122 bp, Homo sapiens
tagaatacaaagataaatggcttctggttgctgctcccagctgaggcttttctcctggttcgtaggaggaggctctagaatctggagagctggctgctagccctggatcccttgtttcctga

SEQ ID NO: 92980 - DNA, 122 bp, Homo sapiens
ggaagaggcagcccggcgaggggcaagcgggggacccagccgggctgggcccctgggccccgggtctgtacaatacggtttgctataaaactcaaaatcttccagccggggctgcggagttc

SEQ ID NO: 92981 - DNA, 122 bp, Homo sapiens
acttcctcggggaatcccgtcccaactcctacccacgcaatgcccagtggaggatgacaccgtcatgctgtgggccatgaggtgaccatctctcgcttcactctggtaggctctgaggccag

SEQ ID NO: 92982 - DNA, 122 bp, Homo sapiens
tttctcctccagatgcattcatctaggaaggtaagaatttcagggagagaaagatgtcaccgtggtagaaagacagggatcacctcctctgggctcttgagtttacttattcattctggatt

SEQ ID NO: 92983 - DNA, 122 bp, Homo sapiens
attctagagcccctaactcagctccgtgctagggaagaccgatcaccacaggctgaattccggggtcacggcagcgtggcacccagcctggcagtgtggggagtggggccaccagagcctcc

SEQ ID NO: 92984 - DNA, 122 bp, Homo sapiens
cagccggcctcttagcttctcggctttgggtggcggagaccgtttagttctgggacagaccgtcgggggctgactccgggggtttgcgggcgccgagctgcctccgcgcgcgttccactcct

SEQ ID NO: 92985 - DNA, 122 bp, Homo sapiens
ttagaggctgctggctggtccagttccttctccgagaaacaagggtcagccagattcagtcggcaggccagcagacaagtggaggtgggcggggaatccaggcaggagtggcctggcatttc

SEQ ID NO: 92986 - DNA, 122 bp, Homo sapiens
gccattttaaacacttgcgccagttaattaccataattggtttgttcaattagcaggaggcgaactggcgctttcacacagggatgcctctatttacttggagataccgtcactgtcatgca

SEQ ID NO: 92987 - DNA, 122 bp, Homo sapiens
acaaacctctgtctggccgagctctgtccaggcagctatttatacttgctctgaataccacggctgctctgcttgcttcctctcaccgcctccctccggccccacccgacaccctctcacct

SEQ ID NO: 92988 - DNA, 122 bp, Homo sapiens
cacccggcagtttctccactctgaaccgcgtgctgggggtcacggggctcccgctgctgacgaggaagcagggcccaccctgtccagcctcggcctctgcagacctgagcgcagccccacgt

SEQ ID NO: 92989 - DNA, 122 bp, Homo sapiens
aggctctgagacagcccaggacttctcacccatgttcttcggccaagaccagagcttccacgagctcttctgtgtgggcatccagctgttgaataagacctggaaggagatgcgggctacac

SEQ ID NO: 92990 - DNA, 122 bp, Homo sapiens
taacatgttcttttgtaggaaaagtaacactgaagggcagtatctctcatgacatctttgcggtataagtggtttatgagaatgctgtctaatatttataactttcatggtattattttaat

SEQ ID NO: 92991 - DNA, 122 bp, Homo sapiens
ttttaaagaaaataaaggtgaattccaggcatgagctttcgacggggaatggggcttccccgactcgcccccacgccccccgcccttctccccaggtgcgcagcccgcgccgcccaccccgg

SEQ ID NO: 92992 - DNA, 122 bp, Homo sapiens
gccggggcagaaggctcagagccgctgtctcacacagcttcttggtgctccaaagacgggcggtaggaggaagatcaaagaagcgagaaatggatgctggaggaacgcagtgaggccaggcg

SEQ ID NO: 92993 - DNA, 122 bp, Homo sapiens
tccagtggcgcaatcggttagcgcgcggtacttataagacagtgcacctgtgagcaatgccgaggttgtgagttcaagcctcacctggagcagttttactattctccgacctgtagaaattc

SEQ ID NO: 92994 - DNA, 122 bp, Homo sapiens
aatacataaaatcatatgatataaagacacagatggtgtgttcccactcactatgctgcccgccttttaattttactctcactgctgtcctgtgactttaggaaagggcggttattgtgtac

SEQ ID NO: 92995 - DNA, 122 bp, Homo sapiens
gaacagtggggaacagcactgatcccccagtggggccccgagttcccggagaggaagactcgctccctcccaggggacggctagagactcactgactcatgcgtgtgtggtaggaatcttcc

SEQ ID NO: 92996 - DNA, 122 bp, Homo sapiens
ctgacgacctgttggaagagggggtagcaggtctgacagaggcgcacgggccgggcgctgcgcaccagacaccctgtcagctctgcgctgctgttggcgaagtccagcaggagctcccggca

SEQ ID NO: 92997 - DNA, 122 bp, Homo sapiens
tggtagatcactgtagttaaccttcgttctggccaagaccaagaagggttaatggacacccggctcctgacaccttccaggtcagcttggcttgcgaacttccaacgcaggaattggaggat

SEQ ID NO: 92998 - DNA, 122 bp, Homo sapiens
attctcaagtcccattaaaggaagaggtcagagttaaagagagtgctgagcccactcattcgcatatttattttggccagacgtctgccttctaacctagaaaactgcagttttggagctgg

SEQ ID NO: 92999 - DNA, 122 bp, Homo sapiens
gctgtgcggctctgcgcgcgggtggcggcgcacgaagctgggggagctgtcggaggagggcgcggagcgcggcggagagcaggaggcggcggccaggccctcgtgcgacgcagcgttgtgca

SEQ ID NO: 93000 - DNA, 122 bp, Homo sapiens
atgttgacaatagaggagtccctgggctttctattttttcagttggtggtagaggttaagcgctcctgttttgggacccagatcaagtaacttaccctcttagtttcaatttctttaggtta

SEQ ID NO: 93001 - DNA, 122 bp, Homo sapiens
cgggacggggcagtgggcggagctgagcctgcggggcacgtcgagcaggcggggtcgcagcgctgacggcctctctgcggctcccggttgggggcgtggctaagccagcggcggacctatgc

SEQ ID NO: 93002 - DNA, 122 bp, Homo sapiens
ggcatctttttctgagagctcactgtataccaactgctgctctaagcttactgtatacctcgcaggagggagaggaattgagtgggtggttatggttaatggaaagaggctaattgaaggtg

SEQ ID NO: 93003 - DNA, 122 bp, Homo sapiens
gttgggacaatgtcctgcaaggcaggcgagagtgcagtgaatgtcagaacaggagggtcacgttgtataaatcactcccactccgcccttagttgtgtggagtgtggtttgttgttgttgtt

SEQ ID NO: 93004 - DNA, 122 bp, Homo sapiens
gttcctcttgggatctgcctatgcagccagggtccagaccactgaagcagtgtgcagattcgcgagaggaagagagctgagccgctgtaaccctgggcctgggattgcggggacgggacggg

SEQ ID NO: 93005 - DNA, 122 bp, Homo sapiens
gtctgtgcctctttccatgttataatgtcctattcctcttccctgccacaagtatgcccccggaagggacctattgcagaggcacggtgtgatgtagaactgatactgatggaatagactag

SEQ ID NO: 93006 - DNA, 122 bp, Homo sapiens
caatgagtgataaaaagtctctcaacaaagaaaagccccaaggctgaatggtttcactgccgaattctaccaaacttacaatgaagaactaacaccaattcttctcaaattatttcaaaaaa

SEQ ID NO: 93007 - DNA, 122 bp, Homo sapiens
gggttcccgccaaaagcaacagcccttctgtgggacagcaggcagggttcccgccgaaagcgatggctccacagccctgctgggaataagcgtccagacacactgctggaggaaggcaggag

SEQ ID NO: 93008 - DNA, 122 bp, Homo sapiens
agaagacttggaagaggagccaccctcagggaaagacaggttttggataaggggaagagacgccaggaagcgagtgtctgcggcttcctcatgcaacgtggcctgccttcccaatcccctct

SEQ ID NO: 93009 - DNA, 122 bp, Homo sapiens
gaggcataggtgggaggattgcttgataccaggagttggagacaagccttgccaacatagcgagaccttgtctctacaaaaacaaacaaacaaacaaacaaaaaattagctgagtgtggtgg

SEQ ID NO: 93010 - DNA, 122 bp, Homo sapiens
cttaagttgaaatttctgccctgtcgttccaatgccatgatggagaaggacccctaaaatcgcctttggcgtgtgcagctcgagcgttacaacgatgcaaagtgcggtctttggaggatgcg

SEQ ID NO: 93011 - DNA, 122 bp, Homo sapiens
accggatatttcattattatcctgtccggagtcggcaaactacggtctactatctgtcttcgtatacgtcaaaagctaagaatggtttttacatttttaaatgactggggagggagggccag

SEQ ID NO: 93012 - DNA, 122 bp, Homo sapiens
agttgatttctccttagttttggaggattgtttctgcagtgccttcatttccaggtgccacggagacttaacgtttgggcacaaggactgcaattgtaactcattatactgttccttaaaaa

SEQ ID NO: 93013 - DNA, 122 bp, Homo sapiens
ggcggccttttagtccccgaggcccctcgctcgaatcccctccggtatcagcttgagcaccgagtgacctcacgctgatgactcagcaagtctccctccgggctctggcacgcgactgacgg

SEQ ID NO: 93014 - DNA, 122 bp, Homo sapiens
ccatcctcaaagagtggaaggaacagcaaagtagaaggaacaaagcactgacgtcaattacgagattaaccccaagcacaggcagctggaggaaaggcctaaacatcaatatccacgcacaa

SEQ ID NO: 93015 - DNA, 122 bp, Homo sapiens
acaggcggccaggaaagaagcgggcctgaacaccatgatccctttggagaagccaggcagcggcggctcctccccaggcgccacctcaggctcgggccgggcaggccggggtctgagcgggc

SEQ ID NO: 93016 - DNA, 122 bp, Homo sapiens
ttgacagacttgtcatcaatagagagaccttcacaaccatattattaatataataacactcggtcaggcgcagtggctcacgcctgtaatcccagcactttgggagggcgaggcaggtggat

SEQ ID NO: 93017 - DNA, 122 bp, Homo sapiens
ctggcccagatgactccccggctgtagtatgcgcgcgccttcccggcttcagcgggatcccggccttccgccccatagactccccgcaggtggaggctctgagcgcagccgccgcagagtcc

SEQ ID NO: 93018 - DNA, 122 bp, Homo sapiens
cggacctttcttcagcctctgtgcgaccgagccgcgcgccaggctcctgtgcgaggaggacgcgctgactccctccgacctgggctccgatggagcagaaatagcgggacctggacttgtgg

SEQ ID NO: 93019 - DNA, 122 bp, Homo sapiens
ctccagaggctgtaaccaggaatctccaattagggcaccctgggtttgtggggcccaggacggggagcagccctccttgaaagaaaggaacggagaggagggggagcgactgctcactcggc

SEQ ID NO: 93020 - DNA, 122 bp, Homo sapiens
cccagcccaaccttcagctttggggcctgaccctggactgcaggttctcacctgggccgtcggttttgactctgggccacaggacctcaccctgggctggggaactctgggctgtgggttct

SEQ ID NO: 93021 - DNA, 122 bp, Homo sapiens
caccagttactcaaaggaagaatgaatgtaggtggaactatatcatatgtagcccacaaccgagggtgcctgacttcaccagctttcgtggttttacaaaattctgagtgcaagagaaaatg

SEQ ID NO: 93022 - DNA, 122 bp, Homo sapiens
gtttggagatagcgagagcaacgaagagaaaacattaattacccggtattagtattaatacggcggctccattcccacatggacctgggggggacaaacaaagtctcctaatcttggacagc

SEQ ID NO: 93023 - DNA, 122 bp, Homo sapiens
gcagttcatggaaaggagttacagcaaatatttcacacggggacagatggcagggtctaacgggcaaactcactgatgtgtctcagagcttgtcagatcctcggggcttgacttcacctgag

SEQ ID NO: 93024 - DNA, 122 bp, Homo sapiens
gttgagggttggatgatactaactcatgcaaacaccaaaccctgcctttcttccccttcccggtggcaagagggcttttcagatcagtgatacattcgctgattctagtgttttccacccta

SEQ ID NO: 93025 - DNA, 122 bp, Homo sapiens
cggccgatgtgtaggaagaggcagatgaagaatattgcgactccgttagcgtggaggtagcggataattcagccatagttcacgtcccgggtgatgtgggcgatcaatgagaaggcagttga

SEQ ID NO: 93026 - DNA, 122 bp, Homo sapiens
cgcccctcttgaccccgcccctggtcgtggccccgccccggcccgctcctaccatctttccggtagaaggcgatttccactttgcgctcctcggcgcccagcagtgcctgcgcgatctgcgc

SEQ ID NO: 93027 - DNA, 122 bp, Homo sapiens
agggcccagtgacctaactgggccggcagggtccgaggaagaccagggtcagcggcggcacggtccgttccgcgacccctctcctgtgaccccaggtaggccgccgatcggttcccggctga

SEQ ID NO: 93028 - DNA, 122 bp, Homo sapiens
cacagcccagacttaacccttcttgtggagaaagtctctgtcttcttccttaggtcaacccgtgccacacgacgataatggtgtccatccatcaaactgaagatccaaagctacaaaagcaa

SEQ ID NO: 93029 - DNA, 122 bp, Homo sapiens
ccgcagctggcaaccaacccctgcgttctaccgatgacagcctcctgttgaacaaggagccgcactgctccctggggcacgggcctgagaagctgggaccacccggggttgggggctggagg

SEQ ID NO: 93030 - DNA, 122 bp, Homo sapiens
ccctctccctttgaatcattccccaatgaggatgcgttctgaatggcacgcgcctgacaccgcacaccagcggctatagcgcggttcctcacggcctcccagtggctctgcacacctcctcc

SEQ ID NO: 93031 - DNA, 122 bp, Homo sapiens
ggtcggcggctgccgggcggctggggcgaccgcggaccgtgcgggaccggtagggggtcgcgggccggctaggctcccccgcgcccctcctcgtggtatagcctgcatttctaatacaatgc

SEQ ID NO: 93032 - DNA, 122 bp, Homo sapiens
gtgaatgctgaaaagcaaataaaaatgaaagctttgcggaggccgtgggccggacgggcgcggggcgcctcctgccatcttagcgtctgccgggatccttcccgcgccttcgctgcccgaac

SEQ ID NO: 93033 - DNA, 122 bp, Homo sapiens
gcgggagaacaggggctgcgcagggaaagcggctttgaaaaagagcttcttggcgtcgggcggacgcccaacacatgcttgtcggccaagtacaggataaggttaaagggaactaaccaata

SEQ ID NO: 93034 - DNA, 122 bp, Homo sapiens
taggggttgtgtgaggtgatagagtgttgctagcattccatttctgacttaggaaccctccgtccccaaagcgacaaatatggaaaggcaaccttgcaaatatttatgttttttatcaaggc

SEQ ID NO: 93035 - DNA, 122 bp, Homo sapiens
ccagtgccctagtggaggctgatggctcccgtggggtgctggctgggcggccgggctctgcggtcactgctcttgtgcacctctccaggcaggcagcggccccagggccccgcggaaccctc

SEQ ID NO: 93036 - DNA, 122 bp, Homo sapiens
cactgccctcctcgcgatgtggcggcggcggccaggtctccttgaccctcaccaggccctcggccccggccctggcacccaagctctgcacttaccacctggcgagctatatcggtcgctgc

SEQ ID NO: 93037 - DNA, 122 bp, Homo sapiens
acatcctcaccaatacttgctgtcttttgattttttggtaatagtcatcctgacaatgtgcgttctgttcattttaagtctctagcaactaatgggatatttgaacagggtgtctgaaactt

SEQ ID NO: 93038 - DNA, 122 bp, Homo sapiens
tgacctcgtgatccacctgtctcggcctcccaaagtgctgggattacaggcgtgagccaccgtgcccagccagagggcattgtttttaaattgtggtaaaacacacataacatgaaattaac

SEQ ID NO: 93039 - DNA, 122 bp, Homo sapiens
tccagattgtctcagtgaatgccccagcaaccctgttgttcaccgtttccattttttaaacgaggaaactcagactccaatgtgaaacagccgcttcaaagttcaaagtgcaccccgatgat

SEQ ID NO: 93040 - DNA, 122 bp, Homo sapiens
agccctacgagattcacaccgtcttcggtctcctggggtcggcgccgagtgggaggatggcggaagtaagtatgaaggtgcccttccctcccgccgctgttctctatggtctcttccttcag

SEQ ID NO: 93041 - DNA, 122 bp, Homo sapiens
ttgcaacacctaaaagagcctctaggcctgagcctggatgcaccctccgccctctggccccgtagtgtgtgtctgagacagagtgagacaccagcaacatatgcttggatcagggacggaag

SEQ ID NO: 93042 - DNA, 122 bp, Homo sapiens
tcactggggagcatcggaaattgggtgcaggacagtgggtgcaatgcactgagcgtgagccgaagcagggtgaggcattgtctcagccgggaagcgcaaggggtcagggaattccctttcct

SEQ ID NO: 93043 - DNA, 122 bp, Homo sapiens
ctggtgaggtgcatggcttctctctgggcctgctgtgtctgtgatgtggggctccctgaccgcctgggcctcagtttccccaccatcctacagggataacggggtatagtgagagaaagtca

SEQ ID NO: 93044 - DNA, 122 bp, Homo sapiens
cacaagatgacagcacgggactttgggaacatggttgtccctttcctgcctgggctaccgcgtggctgcccggaatccctgatggggtcaccagtgtttcacgtaggacgcccccaaccctc

SEQ ID NO: 93045 - DNA, 122 bp, Homo sapiens
gtgccgtgcctgaccagggaagcgcagcctgggctctgcgcacgagagagacttggggagcgcaagtgtaggtgcagagagaggcgtgggcggcggggcgggggctggggggcggaactcct

SEQ ID NO: 93046 - DNA, 122 bp, Homo sapiens
gggagaaagggaagaaatgaaggggtcccttgagtttacctgataatcaggggttgtccccgtagtcatcacatcataataggggggctcgtagtcatagtagagagactcagtgggctggg

SEQ ID NO: 93047 - DNA, 122 bp, Homo sapiens
cttctgaattctctgactttgtctcagctattacctattgaaatatatatgtcccttgaccgttctcctgtggatatgagaaagaacgagcaagcattaagttttgagtgtttcaaacttta

SEQ ID NO: 93048 - DNA, 122 bp, Homo sapiens
gggcccttgttcacagatgcgctgggaaactcttccccagcagatgcggggctgggcgcccggcgcagtgctccgaggctgctctgcgagctcgggggcgcactttcccggcctccagcgac

SEQ ID NO: 93049 - DNA, 122 bp, Homo sapiens
cgcgttgcccactgggagttgtagtcagtggcgcgttgccctgacgcctgccgggccgggcgtgggggcctgtgggaggtggcgcggccgggcccagctgcggggcggaggcggaggcggag

SEQ ID NO: 93050 - DNA, 122 bp, Homo sapiens
aaggccaaagctaagatgcctgtgcagaaacagataaaaagttaacttggcaatgcctgccgtggtataatttcacatctgtcaattgtttttgtttgcttaaagttgaagaaatagaccaa

SEQ ID NO: 93051 - DNA, 122 bp, Homo sapiens
cgtcagcagggaagatgttaggcacgtcacctgtgttcagaagcatgttgatgtcctccacgaatgattcatccttgatctggttgtcggcgaagaggaacacggtgctcttggtggccaca

SEQ ID NO: 93052 - DNA, 122 bp, Homo sapiens
ctgggcactgcaccttccagtatgtgggccggagaggcgggggatcttgcccagcgggtccgacagggcatggaaggaagtaaatggaagccggtaggtaagtgttattttaccgcgcaccc

SEQ ID NO: 93053 - DNA, 122 bp, Homo sapiens
gtccccactccgcgagaccctggtgcacctcaatcttgctggtaagcacggtcccccatccgtcctgccagcctgtggatccccacggccagtgccaaccccttgctcacctgcctggtctc

SEQ ID NO: 93054 - DNA, 122 bp, Homo sapiens
gaacctgacaactccaggagttcttgggaggaccagtacaacgttctaaaaagcctgagacgccttacaaaaagcaagtatcatttggagtacaattcctaatctgttcatgtcctgctgaa

SEQ ID NO: 93055 - DNA, 122 bp, Homo sapiens
atcaaaccaaagccaaacaaaaacctagaaatccagaatttgacagatacaaatgtgtgacggttgccttataacagtcagcttggaaagctatatctatatatcaacaatgtcagatttgc

SEQ ID NO: 93056 - DNA, 122 bp, Homo sapiens
caccccgatcctccctcgatcaggttccccagctcgcataagactttgcctgccagacctcgaaagtcataaacccgggggatgaagtgggaagactgtccaaggagcaatggagggaacct

SEQ ID NO: 93057 - DNA, 122 bp, Homo sapiens
agttacaggaaatgggagtgccgctgcggctcagctgcctctgtcagtaagaatacgaaacggtgatgttcataaaacattctttgcaaagcacagtccgtccaaaccctggtatagtttcc

SEQ ID NO: 93058 - DNA, 122 bp, Homo sapiens
tatctgggaacagcagaggagtcttgcgactttgctgtcctacaatttactctgagagatcgctctcccaagtcagcgcttgctacctgtttgtccatttgaagaagtcgcgcttcattgca

SEQ ID NO: 93059 - DNA, 122 bp, Homo sapiens
aggagagaaggcaggctgttgccctggatgctagacctgtggtcttggtgtttggggatacgggtgggagctgcaacatcgttcccttaccctgacatattcaaacatcttcatggtaggaa

SEQ ID NO: 93060 - DNA, 122 bp, Homo sapiens
gggctctgacagttttccttctggaaaataccatttttctgctagaagggctgctctgtgcggaccaacggtgtttacgagctaaacagagccccaccagacagattcagactatctccatt

SEQ ID NO: 93061 - DNA, 122 bp, Homo sapiens
gccagggccgagggaggcgggcggaacacggagggtgttttgttaaatgctcccgtcgttcgcaggggctgggacttgataaaaggagacagttttctgaaaagatttgattgaaatggcgt

SEQ ID NO: 93062 - DNA, 122 bp, Homo sapiens
aaatcagtgccctgactcctacaaagcctgagtcatgagatgggggaaagggcgtgaagccgaaagtacagatgttcacaggaaatcccaacccttcaagcctgatgtctcatcttttgcaa

SEQ ID NO: 93063 - DNA, 122 bp, Homo sapiens
taccggcgtctccgggctgcagctgcgctcgctgggagtagcagagaggcgcgcgaggtgcgggctcagtttccctaggagctctgggtaatctgaaagtagttacgaaaagaaattcaaaa

SEQ ID NO: 93064 - DNA, 122 bp, Homo sapiens
cgtttgaaggcggtgcagggcggggagcacacccctgcgaagtgccgggcaccctttgggcggctcccgccggcgagctggacagcggcgcgcgccaggcgtggctttctcggccggtgggc

SEQ ID NO: 93065 - DNA, 122 bp, Homo sapiens
agtaaataatttactctagtctgaaatatgagctccaggcaagaaacatgagatcaaacacggggaactgtagtatgatagcaaacatactgctatcctgtgaagggtttttctaaattcac

SEQ ID NO: 93066 - DNA, 122 bp, Homo sapiens
ggaaacaagatgctgagactcctccacctccagaccccccggctcccgagacccttcttgcgccaccacccctgcctagcacccccgatccccccaggagggagctgcgcgccccctccccg

SEQ ID NO: 93067 - DNA, 122 bp, Homo sapiens
gcaaccggcatttacagctcttcaattttaatatatcaaaggctaagggtaatttcccagcgagaatacaggagggtggatttctcccctctttattctttctgccggtcttttgccagtac

SEQ ID NO: 93068 - DNA, 122 bp, Homo sapiens
ttcaagaaccgccgcgccaaatgccgccagcagcagcagagcgggagcggaaccaagagccgcccagccaagaagaagtcctctccagtgcgggagagctcgggctccgaaagcagtggcca

SEQ ID NO: 93069 - DNA, 122 bp, Homo sapiens
ctccctcagctcctctactccctctactgagccacagctaaactgcatccaattcgatcccgagtacctttctctgggtaagcaagctaccacatgcaaatcagggccactcaaagatatct

SEQ ID NO: 93070 - DNA, 122 bp, Homo sapiens
tctttcaccgtttaaccggtacagaataaccctgacccagaaagacaacagggttccatccggctttcctcccgtgcctctcccagctctattctaccgtcttatggcctctggcgcctttg

SEQ ID NO: 93071 - DNA, 122 bp, Homo sapiens
ccctggcggccggcccccgccgtattcctccgagccgcgggacgcgcgattctgccctggcgccctggcacccccgcacccgcttcaggtcgcccccggtacccccagctcattcccaccgc

SEQ ID NO: 93072 - DNA, 122 bp, Homo sapiens
gccctgggactgcccactcggtcccgctgcagcccggactcccaggctcgcaggcgcccgcgaggggcaggggccggcaggctgcaatccttgcatcccagcttattaacttcctgactctc

SEQ ID NO: 93073 - DNA, 122 bp, Homo sapiens
ctgggaagggggccttgctgggcccacaccacggatggttccccggtttctggagatggccggttccccagggtggtctctctgcaccgcctcgaactctcaggaagcctcgcttggagctg

SEQ ID NO: 93074 - DNA, 122 bp, Homo sapiens
tttctccgcccctgctggaccccacgtatccagtggagcccaggtagctgctggcgctgacgggtctgaaggtcacgtggcccccactcgaggcactggtggagccgaaggtcacgtggcca

SEQ ID NO: 93075 - DNA, 122 bp, Homo sapiens
gcacacatttacacaacagacctgttttctttctgtctggtgcaaagttttgtcaggccccgcaggtattgggtagagctattctctgaggcaaagagcttctcagcacaggcagtatagta

SEQ ID NO: 93076 - DNA, 122 bp, Homo sapiens
gagtggtcgccctggagcctctgctccagcacctgtggccgtggctttcgggatcgcacgcgcacctgcaggcccccccagtttgggggcaacccctgtgagggccctgagaagcaaaccaa

SEQ ID NO: 93077 - DNA, 122 bp, Homo sapiens
ccagggtacccaagcctggcgccgatcccactcagggaacttgattctgagtcctagactcgtgtttttcacctccccggctcaagtttccatcttcctagcccctggctccccctagtcct

SEQ ID NO: 93078 - DNA, 122 bp, Homo sapiens
agctcacagccttacaggaaaggacgggggcgggcgcctgccctcagtctgatttctgagcgtccctgggtctgaccttaagggcaagggcagggagcttcacatttcaaatacagttgtgg

SEQ ID NO: 93079 - DNA, 122 bp, Homo sapiens
ctagaagctccggcgccgagagtgggcatggcgacttggtctcagccggactcgggtatccgggcagggtgggaccagcctcaggctatgggccctgcacctacttgatttttaagggactt

SEQ ID NO: 93080 - DNA, 122 bp, Homo sapiens
tgtcactagggacctgaactgccttatagatctcagggttttttcttctggtttcgcttccgcctcctgaccccacgtggaggtaggcacctcaggctgagggtggggagcaggggttgctg

SEQ ID NO: 93081 - DNA, 122 bp, Homo sapiens
acatgcaaagctgaccgcaatgacagcagctgcttctttgaactgttggcagcagccaagcggcagcatgaagtgacagatcactcctgagctcaagatgaactccaccttggatggtaatc

SEQ ID NO: 93082 - DNA, 122 bp, Homo sapiens
aggacaagcccagactttcgtcacagggacagaccaacgtgttaacacaaagggagaacacgggagcatcctgcaccgtgcatttcagccacagatcacatggcccctccgcgggcccagcc

SEQ ID NO: 93083 - DNA, 122 bp, Homo sapiens
gacgtggggcggagcgtctggaagctccgcccgtcgcactggagagtcggccgaggcgcacgaggtatttttcacgctccgccccactgcaggctaaagtgcgtgggcgggaagcggtgggc

SEQ ID NO: 93084 - DNA, 122 bp, Homo sapiens
aagaactgcagatggtaatcacggccaccaggaggaaacttcctctgaatcttccactaccgtggtgtaactagggagggtgttggagcattcagcgagataaaaagcctgcttttgtctac

SEQ ID NO: 93085 - DNA, 122 bp, Homo sapiens
acaccttagcctctttaaatatactttcctttgctccttggttaacagggtctgtctgctcgcattagagaaactgcccagtgactcagatcctgaaaggatctgctttagagaaaaaagga

SEQ ID NO: 93086 - DNA, 122 bp, Homo sapiens
ccaccgcgccccatcctccgccgcctccgccccggctcccgggacttccccggccccgggcgattgttgacactcacctgccatgtcccggaccccaccgcagagggaggtgcatcacggcc

SEQ ID NO: 93087 - DNA, 122 bp, Homo sapiens
atctgacctgtgaccaggtgtccctatcacaggaaacttgattatattggaagattccctcgtggttcttgtgtgatctgtgtatggtttacccacgccaaagccgccacgctgtcagggag

SEQ ID NO: 93088 - DNA, 122 bp, Homo sapiens
tcttggaaacctttctcttctaggccgtttccttggggctagggaggctgcgctcaccgtcgcccgcgtgggtctatctgcagcaggcaaataacatcttgggggttccaaaggaggcacag

SEQ ID NO: 93089 - DNA, 122 bp, Homo sapiens
cacgccccgcccacagccccactgtgtgtgaaccaagagagttggaaggccttctgcagacggacccattccacctgaatctccatgacatattggacttctccatataatttcatttggaa

SEQ ID NO: 93090 - DNA, 122 bp, Homo sapiens
tggatggcgtgcatgtgtctgcacagctgcgtgatgttcccctgtggactcaacctcccccgcccctggccgccccacatcatggacagctgggctccaatcttctgcttttataaatagtg

SEQ ID NO: 93091 - DNA, 122 bp, Homo sapiens
cagccggatcctggagcccctggcagccgcggggagggacgtggcggcctgcgtgagtgacggccgcgccccgccgcccctcgcccccgccagcttctctgcatcctcaggcccatggcgag

SEQ ID NO: 93092 - DNA, 122 bp, Homo sapiens
ttcttcggggcctgttcctgccctcgtgcccgggctgcggccaccccgagctgctgcaggcggtgggcattgttggcgccatcatcatgccccacaacatctacctgcactcggccctggtc

SEQ ID NO: 93093 - DNA, 122 bp, Homo sapiens
tctaacagacacgctggataataactgatgaaagtacttttttaagtctaacccaaaccacgctttctttttttttttcttttttgtctttgtagcacacataagctacctcagattcaaag

SEQ ID NO: 93094 - DNA, 122 bp, Homo sapiens
gtggaccaagtgggctacgtgacctatgacatcctgcagtgccctgaggactagggctcccgtcctgctttggcagtgccatgtaaatccccactgggaccaaccctggggaaggagccagt

SEQ ID NO: 93095 - DNA, 122 bp, Homo sapiens
cccgcatcagctgctgcgtgtccacttggtcggccttgttcagcacgacacggatcttgtcgtcctggccccggaaggccttgatggcctctgagaattcatctgagatgtccagcttgtga

SEQ ID NO: 93096 - DNA, 122 bp, Homo sapiens
gaaaggtggatgcctggattcagggaaacctgcagctgaagaaaaatgctttgcttgccgcggctgttgagaacaatgataagaaaaacaccctctgttgtaagcactgtgtaggcttgggc

SEQ ID NO: 93097 - DNA, 122 bp, Homo sapiens
atgcctatgaaagaagaggactgcaattaattacactattctgcttactttacgtatgtccgaattttccataataataaaaaaaaaatgcttaaagaagtcggggagtgtgaagccacaat

SEQ ID NO: 93098 - DNA, 122 bp, Homo sapiens
gctgctcttccgaatcgggttagtgcccgggctccgaagcgtgcgggctcgggaggcgggcgcgctgggagaggggactgggaggcgggggctggagctgggggtgggcgtggcggttagga

SEQ ID NO: 93099 - DNA, 122 bp, Homo sapiens
ggggccttgcccgagaccagaggtggctgggggccgagggtcggcaggaagccaggcgaccgatgggcgcagcacagactgcctccacgtggccctgcacagcctggcctcactaggggaag

SEQ ID NO: 93100 - DNA, 122 bp, Homo sapiens
cccagatcctgttttgctgcaatcttggccctacatgacacagcggcattcaaccgaacacgtaaagacgagaataactttctcacgagtctcatttcctgtgttttatattagagctcatt

SEQ ID NO: 93101 - DNA, 122 bp, Homo sapiens
tagggcattaattatacttttcgttttctcaccgccaccctgcgcgttcggagaggccggcgtgactggggatctcagtgggttggaggaattcttaacgcccccgaggcctttccaactcg

SEQ ID NO: 93102 - DNA, 122 bp, Homo sapiens
ttagctgtcagggtaatgctcatgagtggccagcagggagcagaagcctgccattctagccgcttacatcctttccaagcccgtagaggtctggaagttagtgcaggaaaaccattgagagc

SEQ ID NO: 93103 - DNA, 122 bp, Homo sapiens
gcaggtagatggagaaggggcccttcttgatgcggaagccgaggttccagagcaccagcccgttacctaccggtcccccgaggcccacgatcagcgtcaggtagaagaccacactgtcgaag

SEQ ID NO: 93104 - DNA, 122 bp, Homo sapiens
gacagtcctgtgagcctcgccaaggcatggcagctcagacatcccagtgccgtgccacagcgcccaagggaggcttcctaatggctgcagaatcgtccgtgaagaggctggggccatttacc

SEQ ID NO: 93105 - DNA, 122 bp, Homo sapiens
tatccctgtgccctcaactaccacctgcaccctttacctgctcctctgcttccgccatggcgccacgggagagtcacctgacagacccggaaataagaggaaaccacacacttggcccaggg

SEQ ID NO: 93106 - DNA, 122 bp, Homo sapiens
tataatcttattcagtttcttactttttttcactcagcacactacttttaagagctatcacgttacaatgtctacatctagcccactttttctaaaaactgcatttttttgatgttgtacat

SEQ ID NO: 93107 - DNA, 122 bp, Homo sapiens
gtgggtttcgctggctgggagcaccatcttgtcacttggcaactggaaattcctccttcacggatggatttctttggctgccttcggcactccacttcttccgtgagagcccatttcacgcc

SEQ ID NO: 93108 - DNA, 122 bp, Homo sapiens
tagcttcccaaaggagagccctccttaaattcaagctctgttgtttttgcatagacttttcggtgtcaactctattcctaacttcaccatctgacaaaaaattgtgtgggtcctttaagaag

SEQ ID NO: 93109 - DNA, 122 bp, Homo sapiens
cacaaatcagccaagtgtgcatgtggtttttttccaagtacgcacaagagtggaacatttcgttttacgagtgtgagatgtttgaaatacaaatctgccaagagcttcctccacattggtct

SEQ ID NO: 93110 - DNA, 122 bp, Homo sapiens
ctccttccaaattagaagaccagttggtgacacacagcacctctggacatgccccctgtgcggggccggaggcgggccgggccctgggactgctctcagatgagaagcggccgccgagctcc

SEQ ID NO: 93111 - DNA, 122 bp, Homo sapiens
ctccgcgcaggtaggtccccaggcgctcaccggtgctgcgtctccaacccgtggcgcgcgcggttggcatcctccaggtggcgctgcagctcctcctgccgctcccggtcggccgcctcctg

SEQ ID NO: 93112 - DNA, 122 bp, Homo sapiens
gtctgcaatggtcagtttcttctgttttttttttcagccaggctcagtgctatgcaatcacgctgacagtctgtagtaatgattgggtttgttaccactggattacacaaaggcttctaact

SEQ ID NO: 93113 - DNA, 122 bp, Homo sapiens
ggggcgcggaaggggagcctgtccggagccgctgtcacggccgcgactacccagcggggccgcccagccgagctttcgcgactctgcctctgcctgccgcctggacccttgtgggagcgcgg

SEQ ID NO: 93114 - DNA, 122 bp, Homo sapiens
cgaacgaggggggagtgggccagggaaccccctccgcttccgggtagttggcgtcacttccgggcgagccccccaatcgcacggcgcccgcagctccccagccctaccctcccggccaagat

SEQ ID NO: 93115 - DNA, 122 bp, Homo sapiens
gccttcctgccctcctaccctcctgccaggacatataaggaccagacccctgcccccgggcgcaacccacaccgcccctgccagccaccatggggctgccactagcccgcctggcggctgtg

SEQ ID NO: 93116 - DNA, 122 bp, Homo sapiens
aacctcagtaacattgtaaacaattctaatacatcaagtatactcctagcttatggccctcgcacaggctcttctctctgcctgaaatacgtttctccacatatacatatggctcactcctt

SEQ ID NO: 93117 - DNA, 122 bp, Homo sapiens
taccaccccactagaaggaggatggacagattcgcttgctgaaatggcgaagcaagttcccgcagctggccaggctgagctgtttctgaagctcagagcagctgtgactcatccctcctgca

SEQ ID NO: 93118 - DNA, 122 bp, Homo sapiens
actatgcccaacaaaatgtttccaaattttatacctttctttaccacttatgaagtatggcgtaactgttacactttaagagttctttaaaagaaatgtgaaatttaacgttttactttgaa

SEQ ID NO: 93119 - DNA, 122 bp, Homo sapiens
tggagaagacgtgaagcccatcgatctcacagtgcaagtggagtttgcagccgcagagggcgcagccgctgcggccgccgcgtcggagttacaggctgctaccgcagggctggaggctgccg

SEQ ID NO: 93120 - DNA, 122 bp, Homo sapiens
ggtcccgggccgggggagaccgctgggcggggacgcgaggagggaaggggcgtctgtgggcgggacctcccgggattggagtgaagagggtatctgcttgacagtggatccctggggatcta

SEQ ID NO: 93121 - DNA, 122 bp, Homo sapiens
caaaagaactgggttttttctcaatatttatttatcttttcaaaccaaagagacattgttcgtaatctggtcagtgtctttagctaaagattgttcatttgttaggatgcttaaaagacctt

SEQ ID NO: 93122 - DNA, 122 bp, Homo sapiens
ccagggccggactgcgagtctctttgcggcgctacactagagcagagtacgagtctgaggcggagggagtaatggtgagtcccgcgtggccccgaggcctgcaggcccgggcctgtctgagg

SEQ ID NO: 93123 - DNA, 122 bp, Homo sapiens
catacctgctgaggcccaggctgaggcgctccccgcaggcccggatcttgttctgagcttcgatgtgtgtgaggctacccgcattctcgccatcgatgctcagcacccagtcacccacggcc

SEQ ID NO: 93124 - DNA, 122 bp, Homo sapiens
ggtgggaacctgacctcctggaaaggacggactcggagtcagagccaacgtgtcccggagcgcagaggcccagggggtcgcgctaaacactgtacctcggggaacaaaaccgtgaaggctaa

SEQ ID NO: 93125 - DNA, 122 bp, Homo sapiens
agggggcgggcggactccgagccattttggagccggtgtcagtttccactctgccttcagcggtgcatttttttccaccctcccctccccctcctcccctccccccgctcgcacgcacacac

SEQ ID NO: 93126 - DNA, 122 bp, Homo sapiens
cgccagcgccgggcggagaatcgccctccctcccactgcccagactggagctgcctgttccgttccaccccgccccaccccactgcatgctgggagtcgtagtcccggctggcagcgtccgg

SEQ ID NO: 93127 - DNA, 122 bp, Homo sapiens
cagattgacatcacagcgggaggccttcagtgtccctccactctcagccctgtgctgcaacgaatcagagggatcccagcctgatgcctccagtgtaaagtccaccatcagcctttcttcct

SEQ ID NO: 93128 - DNA, 122 bp, Homo sapiens
ctctttgagctcttcttggagttcagccacaggacctttgcatatgtgcttccctttgcccggatgactcctgggttaactagatttggctacagctcaagtaagggcacttcttcagacac

SEQ ID NO: 93129 - DNA, 122 bp, Homo sapiens
gtattactatgagtaaaaatgttctaaatgtcccaaaagtatccgagtcacctgcaggaccgaaatggaggagagagcacagcactgcctgtccagattactagacaactctgccctgaagc

SEQ ID NO: 93130 - DNA, 122 bp, Homo sapiens
gtctccttcctttctgtctacatagcatcagctctggccctgtcaccctcccgtgggccccggcctcatcacccttctgctgcagttcatggcacttgctggcccggagtccggccctgggt

SEQ ID NO: 93131 - DNA, 122 bp, Homo sapiens
tccttttttaactaatggaataaacggcaatgtgccaagcatacagcaatgcccattccccggccttcagaaagcctcgggcgcaggcgcagctcgcgttcaagcgctctctcgctggcggg

SEQ ID NO: 93132 - DNA, 122 bp, Homo sapiens
cctccccgcgcatgcgttatgcgccatcaccggcaagcaggggcgggagggggaactgcgcgtgcgcagagtctccgccctcctgaccgcagcggctagaggttccattgcagacccggagg

SEQ ID NO: 93133 - DNA, 122 bp, Homo sapiens
ggctcaggagagctgcagttacacagccccctccatccaggaccgtgatgagtagttcctcgcagggctccctggaaacgtgggtagtagatgaacaggcctccaagcagctgctgacataa

SEQ ID NO: 93134 - DNA, 122 bp, Homo sapiens
cagggtctcccagcacaagtcctctgactgcaataaccatcctctcacaggacacagggccggaatctctgcggcacagcctcacccacgagtaaaaatagccccggaggcgaatgtgagag

SEQ ID NO: 93135 - DNA, 122 bp, Homo sapiens
cgtatgtcaacccccagtttgtgcaccccatcttacagagtgcagtatgaaactcaccagcgagaacaaacacctccccagcccccagccctccccgcagtgggaagtgaatccttaaccct

SEQ ID NO: 93136 - DNA, 122 bp, Homo sapiens
ctgaaatcaaggtgtcgtcagcaccatgttctctatagcaactctaggagagaattgttgcgtgcctcttccagcttctgggggttgctggccatccttggcgttccttggcttgtaaatgc

SEQ ID NO: 93137 - DNA, 122 bp, Homo sapiens
tgcccagcactctgcagacctgtgtggccagtgggtggcttccttttggatgtggccatccggtccctccccactcaaactcctcctgcatctcttgtccctgcacacccaccacctcatta

SEQ ID NO: 93138 - DNA, 122 bp, Homo sapiens
ttgtgaatcatgcttctatgtatatgggtccatggcatggttcagggtccatggcaaaaacgcactcaacgcccagaaaagaaaccatgggtgtataaatatctcttcacgcccctgctttc

SEQ ID NO: 93139 - DNA, 122 bp, Homo sapiens
gccgcggcccagtcttgctcaccctcgcagagtctaagcgcaggtttctcagatacctgccgcaaggggtccctgtttttctcatctttttaggcacctgccagatttaaaagggcaggaaa

SEQ ID NO: 93140 - DNA, 122 bp, Homo sapiens
gctcacgccgcgcagtcgcagttttaatttatctgtaattcccgcgcttttccgttgccacggaaaccaaggggctaccgctaagcagcagcctctcagaatacgaaatcaaggtacaatca

SEQ ID NO: 93141 - DNA, 122 bp, Homo sapiens
gttgggtgtgtgctctgcaaatattttctcccagtcagtagcttgctttttcatcctcttcgaggtgtcttacacagagctaaagttttaaatgttgatgaggtccagtttatcaatttttc

SEQ ID NO: 93142 - DNA, 122 bp, Homo sapiens
aatataagcggacggggaaccgatttttaaccagatcaagttttcaaatatagattaacacgttttaattgtcctataaactattattcttaaagtcactcttaacaaaacccagacttgga

SEQ ID NO: 93143 - DNA, 122 bp, Homo sapiens
ctctgaacgcaagtgtgagtgcaccttgtgccctgcgtgggtgaatgtgtcactgtatctcgtgtgtgcttctgtgtgcatcactgtatgggtgagaccatgtatctgattttgtgtccagg

SEQ ID NO: 93144 - DNA, 122 bp, Homo sapiens
agacacatggtttccacatggagacaaacttctttcctccgactggacttgacctagctgcgtcgttcagccaatcggcagctccagcctcttctgacgtcacgcgttgctggggccggagg

SEQ ID NO: 93145 - DNA, 122 bp, Homo sapiens
gctcctcacgctgtgaaccgtatcttgcggttgctattctcagggctggcgggtggctctcgccaccccacgtcctcgcctatagacagtggaacggtgatgactccccaaggccccttcag

SEQ ID NO: 93146 - DNA, 122 bp, Homo sapiens
tcactttactaattttattaataaattgattatagtctcgtgtatgtttcataacctgttcgattaggaggcatgtcatatagtttgaattagtggagtgcaagttagtggaaattcactgt

SEQ ID NO: 93147 - DNA, 122 bp, Homo sapiens
tgaggggccagcgctggggctgactccgtcctgtgtgaggctaagaggccctgagaaacgcggggggaaagcgggaaacaaccttcgcaggggcatagtgtgtgtgtgtgtgtgtgtgtgtg

SEQ ID NO: 93148 - DNA, 122 bp, Homo sapiens
ctgaaggagggaacctggaaacgcacttcagattcctcggtgcttatgtactgtttggggcgaggcctggcacattccagaacaaatggaattagcaggcagtgaggggggagtaagctcca

SEQ ID NO: 93149 - DNA, 122 bp, Homo sapiens
cggccatgccacgatccacccgctggtgaggaggctggacgccagcttccaggagcaccccgacctgcccgggctgtggctgcaccaggctttcttcagcccatggacattactccgtggag

SEQ ID NO: 93150 - DNA, 122 bp, Homo sapiens
ccaaggggcccatgcaggagcaggcagcagccactgggtaacttgatggcttgggagaggcggcctggcctgacacattgggaggctgggcaggtccccgctttgctcctattgtgctattt

SEQ ID NO: 93151 - DNA, 122 bp, Homo sapiens
gcagcacggggtgccggggggacccacatggaggcagcacgcggtgccggggggacccaacgcggagcggactcgcagggcctgtgctttttcctttggaaatgagatctcggttttaaaat

SEQ ID NO: 93152 - DNA, 122 bp, Homo sapiens
gggcgggggtgaagcgcttagggcacggctcttgtgaggattacggcggaggctgtggaccgcggcggcgctcgcagaggctgcagccattgcacagccgagcatcccacattcaacaggag

SEQ ID NO: 93153 - DNA, 122 bp, Homo sapiens
taagattgtgtactggagtagtgttgtgactttatgatctttgcacttaacaggctcctacgatccacatcgcaggggaatgcacacgccccgccatatgggaagtaggagcaacccccctt

SEQ ID NO: 93154 - DNA, 122 bp, Homo sapiens
cagccagatcttgagccgcttttcatgcttcaggtttcccgccgcacgcaggcaggggagcgggggctgtcttttctgcacgccttgcccttgatcttccctggctttatcttccagcctga

SEQ ID NO: 93155 - DNA, 122 bp, Homo sapiens
gccagggtcgggtctgacggggcctcgccgggctccccagggttgggtctgacggggcctcgctgggctgcccaggtcacaccagcacatggtttctagacacaggaaggaaaattcctttt

SEQ ID NO: 93156 - DNA, 122 bp, Homo sapiens
aacttcatagcagttttttccccagcagtcccgtgagaagagttctggtctagctttcaccgtctgctactggttggcctgagggggatgagaacatggcagagtggctgggaggaaggata

SEQ ID NO: 93157 - DNA, 122 bp, Homo sapiens
ccgctcaggagccccccccagagccccaccgggaactcatctctccgcctggtgacgtcacgttggcccgagcactgcagcccgagtccagctgttcatctccctcacattctgctgctcgg

SEQ ID NO: 93158 - DNA, 122 bp, Homo sapiens
ccggggaggtgcccaccacccccactcccaggcaggcaggaccccggagagcagcaggtgcggcagtcatgtaaaacacaggcaacgagagctctagaaagagcaccagctttagagtcagc

SEQ ID NO: 93159 - DNA, 122 bp, Homo sapiens
aagttgtcctctggggtgtgtcctaatccaaaacaggttcatcctgggaccacaggcaggcgccacccctacacgttttttgacgttggaatgtgccttatgtgggctcccctaattacctg

SEQ ID NO: 93160 - DNA, 122 bp, Homo sapiens
gaaatgatcaaagcttagaagctcatgaaaagtgcctttattggtccaattcctttcatacgtgagagagggtggcacttctgaggcttacaaaaggcatttgggaacactttaaaaggcac

SEQ ID NO: 93161 - DNA, 122 bp, Homo sapiens
tgaccatggctgttgccctctggcccctcttgggaagagcaacctgtcaggtgttaaagacggtcttcatttctcttctccaagtaaacatgactagtttccatctcaccatcttctggccc

SEQ ID NO: 93162 - DNA, 122 bp, Homo sapiens
tggggctcatcccacactcagggccacaaggggaaatgagactatccccaacacagcccccgcccaccctcattgccagccccaagccaggggcagggtgcacacacctgcaacactgcctt

SEQ ID NO: 93163 - DNA, 122 bp, Homo sapiens
ccagaatagcccctggaggtttgaagaggccccgtcagaaacccaaacagagctgccagacgggaatgccgccctcccccgtccacactcatggccgctgctcagcccccagccgcatccct

SEQ ID NO: 93164 - DNA, 122 bp, Homo sapiens
cagaatccagccaccaactgccacaataggcagcaatggactgatgttctttagggaggacgtgaatctcgttccaaatgctggccagtcattgggtttctgcagcactagaaacatctatg

SEQ ID NO: 93165 - DNA, 122 bp, Homo sapiens
ccatatttccttcaaccctgcagatttaaagaagtaccggcgctatgaagtaataatgaccgcctataacatcatcggcgagagcccagccagcgcgcccgtggaggtctttgtcggcgagg

SEQ ID NO: 93166 - DNA, 122 bp, Homo sapiens
tccgccaggaagatagcgggaaatacaactgccgggtgactgagcgagagaaaaccgtgacgggggaattcattgataaggagagcaagcatcccaagaacatccccatcatagtcctcccc

SEQ ID NO: 93167 - DNA, 122 bp, Homo sapiens
aacatagtgagcctgtagggtcgttctgttgcagtccagcagttggggctcaaagtgaaacgaaagggaaggtgaagccccctctccctcactcagggagactgggtttcggggtggggggc

SEQ ID NO: 93168 - DNA, 122 bp, Homo sapiens
cccattcagggaccccaagatgaggcacattacagggcctcgaatttagggacctaagaccgcctgttcctgatgcacccggccaggccctgtgagggcaggtggctcggccgccgcaggct

SEQ ID NO: 93169 - DNA, 122 bp, Homo sapiens
cctgttgttctttcccttggatttttgtatcttcaatggcaaaacccaggactatgaaatcgcacttttattctgaattattattaagccagaaaatgaaatgaggacaaacaacaagatga

SEQ ID NO: 93170 - DNA, 122 bp, Homo sapiens
cccaggcggagggaagagccagtcctccggagacgctgggcaccgagcctcctccaggcccggagaacgagcctgtagcctgtcgctgtttgctgagggccctgacctctgtgggaacacac

SEQ ID NO: 93171 - DNA, 122 bp, Homo sapiens
ttcggagtcccagggccggcagcgttgctccacaggcagctggtattaactccgtgtcggcgtaactgacccactgttggacaaggacagccgcccggctgccccctgggccccccaggcct

SEQ ID NO: 93172 - DNA, 122 bp, Homo sapiens
gtccaagatgattgccccaatgtgcaaaatagaataaaattggtcctggacttctgagcacgcataaaagataagaacatggagtcaggccccatccttctctccacagtcagcttctatta

SEQ ID NO: 93173 - DNA, 122 bp, Homo sapiens
gtgaacgctctgggtttgcagacagagtggatgttcctagtgcattgcactcattttcctcgcccaacataagctcatgacttccgccatcgttcccaaacaagcaggaagcttcacactga

SEQ ID NO: 93174 - DNA, 122 bp, Homo sapiens
aaggctgtggggcagagtggggtgacaggtgttgaggggtggggcccagccccgggcacccgcatgttcctctctgcccctgggagaagtgttgagagacggagctcgggatcagctggcat

SEQ ID NO: 93175 - DNA, 122 bp, Homo sapiens
cagcccagccacacctgctctggaaagccctgtagctcctgggcggggtttgccagtcaccgatgctggaagggtttctttggccctgagtgaagagagacccagagggaacactgaggtgc

SEQ ID NO: 93176 - DNA, 122 bp, Homo sapiens
gggtcgtggcggggggcagggtcccctccggagggccctgggttagagtctgggcgtggacgcgcccctcataggggtcattggggcatagaggcatagagccggcttctccagcttgggtg

SEQ ID NO: 93177 - DNA, 122 bp, Homo sapiens
cttgaactcctgaccttgtgatccgcccacctcggcctcccaaagtgttgggattacaggcgtgagccaacagagcttttaaaaacaaatacacgtgagaggccgggtgcatggtggctcac

SEQ ID NO: 93178 - DNA, 122 bp, Homo sapiens
gcatttttgggaaggacttcctgctcaactaccctttctcaacatcagtgaagttatccacgggctgcaccggcaccctggtggcagagaagcatgtcctcacagctgcccactgcatacac

SEQ ID NO: 93179 - DNA, 122 bp, Homo sapiens
aagagtggcatgtcacctattgtgtgtggcctgcacgtaatgcactaattcttaatccctcgctgatcccagtgtaaagtggagacaccagtacatactcagcctcacaggactgactggtc

SEQ ID NO: 93180 - DNA, 122 bp, Homo sapiens
ctgcgggctgcctaggtgagccgtctcgtaccgattccttcagggcgaaaagcgtggggccgtgcggagggagtagcggcgcggccccagcatgcacctggcctgagggttgttcccggcaa

SEQ ID NO: 93181 - DNA, 122 bp, Homo sapiens
ccggggcaggagggagccgtggaggcggtgccttggctggggcagtcttgggatggccatcgtccacatccctgaatggggcaagccgggaggggttgggtaacacctttattgagatacaa

SEQ ID NO: 93182 - DNA, 122 bp, Homo sapiens
tggttttatttcagtaagttctatatcaaaaggatctggcagctcctttccccgcccgggcgctataggtgttgtgacccttgggacagaagttcagagcgagggtgggggggggggaatac

SEQ ID NO: 93183 - DNA, 122 bp, Homo sapiens
ataactgcagaagaaagagacaggtagagaacattcccagaggctaaggatctaggcagacgaagctgaaggattgtcatatggaagaaggtttaactatattatatctaacttcagaggac

SEQ ID NO: 93184 - DNA, 122 bp, Homo sapiens
tgagccagtccgggctcctagaaccgcgtttacgtgccgaagtctcaatcagattaagagcgtctggggagagcggggcggggatagaaggaggtgttggggctaggggtaggactgttctg

SEQ ID NO: 93185 - DNA, 122 bp, Homo sapiens
ccgaggaggactccgaggactggtgcgtgccctgcagcgacgaggaggtggagctgcctgcggatgggcagccctggatgcccccgccctccgaaatccagcggctctatgaactgctggct

SEQ ID NO: 93186 - DNA, 122 bp, Homo sapiens
gccggctgccgttagggctgggagccggctgggcgcgggggtagtgagggtgcctctcgccgtggctgcgcggcggcctcgtccgagaggccggcgccggggcagtgaccggcccgtgccca

SEQ ID NO: 93187 - DNA, 122 bp, Homo sapiens
tcgcccctcggccggcgccctcctcccacagcccactcgcacgggcccgaggggctgctgcgcttctgcaggagcccaggctggcctgagaggcaccaggaatgagggcacagggtccctgg

SEQ ID NO: 93188 - DNA, 122 bp, Homo sapiens
agcgattctcctgcctcagcctccaaagtaggtgggatttcagtcatgcaacaccatgcccggctaattttgtacttttagtagggatggggtttctccatgttggtcaggctggtctcgaa

SEQ ID NO: 93189 - DNA, 122 bp, Homo sapiens
ctggtcagagcgcggatggccgtaaccccgaaggaaatgtgagtccttacatcggtgatgcgcatcagccccgggggctctgtgtctcgggggctcccaggtcggaatccctctctctatcg

SEQ ID NO: 93190 - DNA, 122 bp, Homo sapiens
tctcaaggctgtttccccatctgacaaaggggtctcacgtgagcccccaaccaagtgagtcgaggagggctggccccacccccgtggattcggagtccgtaggaggggtgtcacccgtcatg

SEQ ID NO: 93191 - DNA, 122 bp, Homo sapiens
tgggactaggatggtctctgcttttctccatgtgtctttgcattcctccattgggctagccgggacaagccgtcatgctgaggcagagatgcactagtgagcatgcagaaatgcacaggtgc

SEQ ID NO: 93192 - DNA, 122 bp, Homo sapiens
caatgagaaagtcaagatcaccttttcaaatctcatgctctcctgaatcataatggggaacgcagagggaaagctgttggtctccaggtactgattcatgaggtagaccccgaggtacacat

SEQ ID NO: 93193 - DNA, 122 bp, Homo sapiens
caaatgcctgttaggtaccagatactgtttcagatgctacagtcatgttagaaaataagacggtaaaattctttattttcatggtccttaaattctagagagggcaaggggagaaaggcagt

SEQ ID NO: 93194 - DNA, 122 bp, Homo sapiens
ccagtccttctcctccacgctggtgctgattgtcctggttaccctcatcttctgcctcatcgtgctgtccctctccactttccacatccacaagcgtaggatgaagaagcggaagatgcaga

SEQ ID NO: 93195 - DNA, 122 bp, Homo sapiens
ctttatagagtgaccacttaaaagaattatagaactgatttaaaaataaagttaataggtcgtgctctgggagagtctaataatatgggtctttggtggggcttgaaaatacatagttttaa

SEQ ID NO: 93196 - DNA, 122 bp, Homo sapiens
gattaaaaaacataatggaagcaaacatgctttgtacagggctacattgctatatatgttcggttgcattactccatctctcaacttaaggtgtcttcaatatagacaaaggatctgaagga

SEQ ID NO: 93197 - DNA, 122 bp, Homo sapiens
ccctcactgcccagggacggcggggctggctggccgatccgagtgtgggcctgccgagcccgtgcccacccggcactcgcgctggcccgcaagcgccgcgcccagccctggttcccgcccgc

SEQ ID NO: 93198 - DNA, 122 bp, Homo sapiens
aaagctggaaagttgcctctggacaccagacccactggctgcagatggtgatgacctggccgtcgggtggctcatagctcttctccagggacgagaacacggcggtggccagctcccgcttg

SEQ ID NO: 93199 - DNA, 122 bp, Homo sapiens
cttggaaccgggaccttagctactggtggggctgaagcccaccctgccattgttctgccacggtcagtggggcttgctcctccctatgggaagcacttacggccgggagcgggaatcccgtc

SEQ ID NO: 93200 - DNA, 122 bp, Homo sapiens
agtgaaggggagggcattgcagtgcgcgcggtaagggtttctcatctcacctgagtgtggcgttcgattcactggcagcaggaaagacggggatcagagaagagttaccactggcgcccagc

SEQ ID NO: 93201 - DNA, 122 bp, Homo sapiens
ttctggtgggtgctggggctgagaccccatttctgggaggctcttcccagtgctggagaccggtgggaagggtgagacagtagatggacattttatgggacatcgtctgcggcttggcatca

SEQ ID NO: 93202 - DNA, 122 bp, Homo sapiens
gcagacagacaccgcccctaccctcccccaaactcttttgttatcagttgaatcacgtctcgtgccaagcaaaaggtcatttcaggtcatcttggagatgaaaggacggggtaatgtatatg

SEQ ID NO: 93203 - DNA, 122 bp, Homo sapiens
cctgtggctatggccctcctctgatgggtgcaagcttgatattttaggggatcgcgttaccggcatgtaaacaccgtgagtgacagccaaagctcccaggcgaccacagaggatctcaaacc

SEQ ID NO: 93204 - DNA, 122 bp, Homo sapiens
agtgatccacccaccttggcctcccaaagtgctgggattacaggtgtaagccattgtgcccggccagcattaatttcatattaagttggagtgggtggtgagaggaaatctgcatttattga

SEQ ID NO: 93205 - DNA, 122 bp, Homo sapiens
tgggactgaggcagacactcccagtcagcccgctcgatcctgaagatcgtgtgaaggaagcgttcttggtgctacacacagtctggaaaagcagcctgggcttcactggcaggaagcggccg

SEQ ID NO: 93206 - DNA, 122 bp, Homo sapiens
gcaaaactcggggccgaaggcgtttcccgcattcggaaaacaaagcatccgtaatcgctgcgttcatctccgcgcaccgctagcagtgtaaaaggcagcttcaagaccgaactcaccacttg

SEQ ID NO: 93207 - DNA, 122 bp, Homo sapiens
gggctgccatcaccaagtgccacaaactgggtggctcaaaacaccagacatttcttctctcgccgttctggaggccagaagtccgaaatcacggcatcagcaggcctggttctttccggagg

SEQ ID NO: 93208 - DNA, 122 bp, Homo sapiens
ctggagagtttacactccccccagggcaagagagagccaccaatagtttaagctgaggagcgaccatctgacatgatcagatggtcactccagctaaaactcactggcagcaaatgaatgga

SEQ ID NO: 93209 - DNA, 122 bp, Homo sapiens
cccgcgcaggtggagggtgcgagtgtgcatgtgtgcggttgtgcgggtgtgcgagcatcacgtgtatctgtcctcaacagccgaagcttgctgtgcatgctgctgatgcgctctcctccctg

SEQ ID NO: 93210 - DNA, 122 bp, Homo sapiens
tgtatatatgtatatatgtgtgtgtagatataggtatataagtgcctggtatccagtgggcgtttacaaatgttactcggttacaaaattctggcttacagaaaggacgctaaaaatctccc

SEQ ID NO: 93211 - DNA, 122 bp, Homo sapiens
cctccaggacggcccctacctccgagaccgccccgcctccgggaccgccccgccccgcctcgcctccgacccgtcccccgcgcgccactgcagagcctgtccgtcagtccctaggtatccgc

SEQ ID NO: 93212 - DNA, 122 bp, Homo sapiens
gagacacaaatcagggcctggttggcagcagcgagaccgtcagggtgccctccccacctgcgacaataaacaccgcatgatgttaccctccagggatgacccaggattgtgtgaaaccaaaa

SEQ ID NO: 93213 - DNA, 122 bp, Homo sapiens
aggagcaggacaatgtgacaggcaggacaggaacagggcaagggccaggctgggtggctccgttcttttcagaacaatagccggaaaggcggtggggaagaggctcagagtgaccgggctgg

SEQ ID NO: 93214 - DNA, 122 bp, Homo sapiens
tggccctgctcccccgggtccgtgtctgcgcatcggtctgcactgggcagcgtctgactccgtttctgttctgggcctctgggcctcggcatctgcctgcctcctccgagttcacgcggggc

SEQ ID NO: 93215 - DNA, 122 bp, Homo sapiens
cttttcctaaagtaaactcataaatagagacaaccaaactttcgctctcagcccagagaacgacgctctcctcccaagaggaacctcggctcttccgcggcagaagctgcacggaaccaaga

SEQ ID NO: 93216 - DNA, 122 bp, Homo sapiens
aggggcagggacttgcttgaagacacacaggactgttggggctcagacttctttgaaaggcgccttaattaggctcctcaaggctcaaccttagagccacaccctcccctcttgctcacctg

SEQ ID NO: 93217 - DNA, 122 bp, Homo sapiens
cctgattctgaactcatctgtcctgaaaaacagttgctgacaccctctgaccctcagaggcggtccgggctagaaggggattagtggaggacatctcggcagggctgctgtaggcggatgtt

SEQ ID NO: 93218 - DNA, 122 bp, Homo sapiens
agtgtgaaacccggacgtggcagggcgtgtccgcgcccgaccgaccctcagctgctggggcgaaaacacaagtggacctcagtctttagaactaggggagaaacattagagcctttataggc

SEQ ID NO: 93219 - DNA, 122 bp, Homo sapiens
ggcctacaacttcggctggtcttcttgaggaagaggactatggttccctttctttcttctcgccactaaattttggccgcatagtgctcctaataaatggaattgtaaagttgccggattaa

SEQ ID NO: 93220 - DNA, 122 bp, Homo sapiens
gtgatcctggggggagataatcatggccctgtgtgatcccgggggagataatcatggccccgtgtgatcctgggggagacaatcgtgacaccgtgtgatcctggggggagataatcatgaca

SEQ ID NO: 93221 - DNA, 122 bp, Homo sapiens
tcttctacagatgccatcaacgagcaggactctgggtggctccactgtctaaggttagcacgtgggacccccaagtcccacattttgattgaactgggatctttggtactcattgaaaagag

SEQ ID NO: 93222 - DNA, 122 bp, Homo sapiens
cgcactgggatccagtaagatttttctcacgctgtctgtccagcttgagtggcgcgaatgcgcacgcgccaattgcgcctgcgaggaagaagtcacgtggcagccggaaagcgtggcggctg

SEQ ID NO: 93223 - DNA, 122 bp, Homo sapiens
cttccctcccctcccgcatcctcagcctgtgatctaggttgtggaactacccaaatctatcgccgctgcaagccttgcatcccgctccttcacctgcgtctccctctggctgccgcctcacc

SEQ ID NO: 93224 - DNA, 122 bp, Homo sapiens
gaaccctcaatataatgtcacatccgactgtacacaatgtttctatgatgaatacgttttcggtgcaatgagaaaatgaacaatcagcacaagtgtgagctgtgtcttagagttactttatt

SEQ ID NO: 93225 - DNA, 122 bp, Homo sapiens
gtgtgctcccttgaggccgagcggggccctgatgggcgtagctttgttattgccaccactcggcagcgcctcttccagttcataggccgagcagcagagggggctgaggcccagggtttctc

SEQ ID NO: 93226 - DNA, 122 bp, Homo sapiens
cagcgccttcccgtcaaccctaggggcgtcctggtttccggtttgggtgtggccgcatggcgtgctgtggtgcaggtggccgaagggggcgttactgttgcgactggcatccgcatccggca

SEQ ID NO: 93227 - DNA, 122 bp, Homo sapiens
tctatatcaaccaacaccttttctgaggtctgatgagcattggcatcgggcatcttaacccggcatttggttcatcccacagtgccagttctgcttaccaaaagtagcctacgaagcactcg

SEQ ID NO: 93228 - DNA, 122 bp, Homo sapiens
tacattacttggaaacagtgccaactcatgtctttgaagctcaggctgaaacacgcagcccgggttctgaagagctgtcctgtgcattaccaattggctattgcccaataaaacattgtaaa

SEQ ID NO: 93229 - DNA, 122 bp, Homo sapiens
tccgcgatccgcctgtccccggctccatctcctttttcttgacagtctctcaggtagggccgcggcgctcagcggctggaggtcgacgggattcggaggaagcctacagagtctcggccttg

SEQ ID NO: 93230 - DNA, 122 bp, Homo sapiens
tccctaaaatcaatatttccccaagagtttcttatatttcagatgtacgagtaatatctacgcctatcaatgcctaccaccaccactggtaaacaagataactctagaagaaacttggatat

SEQ ID NO: 93231 - DNA, 122 bp, Homo sapiens
aaatctttacctcacgtcccctagaaccgcccaacacaataaaatttggggatcaaaaggcgggagggggcctaaatctctaaaacccagaggactgggcttccttcaataggccactccgc

SEQ ID NO: 93232 - DNA, 122 bp, Homo sapiens
cccgggctgagtgccttgttgtttggcggcagagacgcgactcctttctagactgagctgcgaggtgcctcctgcgtaactgcaacaatgatggttataccggccccgtatccagatgagag

SEQ ID NO: 93233 - DNA, 122 bp, Homo sapiens
gaggtgaagagcagcaccctgaaccccgtctggaaggagcacttcctcttgtgaggccctcgcccgtctgggtgcgggaggggggctctgcctggggtccagagctgggctgtgcctggagg

SEQ ID NO: 93234 - DNA, 122 bp, Homo sapiens
tcagcccccagagacaccagaagcacgggccacccacagacgcaaaggctaaggagctgccgcctcactcacagacgcacacacgccgccctatgcccagaaatacatgtgcacgtgcatgc

SEQ ID NO: 93235 - DNA, 122 bp, Homo sapiens
ggccctgagtctgctgaaaaggccataggtcggggaggaggggagacctgggtccccttacgctgtaacctgactctccagccagatggacacttagtgctgaggcagcacctcgggggcgc

SEQ ID NO: 93236 - DNA, 122 bp, Homo sapiens
cccgcgctctctgccttcatcctctccccagcgctgctttttcccccggactcgcggccccgcccacctcacctgcggccgcctttaacccttgagggctcggctggaccggagcccagcca

SEQ ID NO: 93237 - DNA, 122 bp, Homo sapiens
cggctgaccgctgagccttgcaggcgcttcgcgcttctgcgcatcgtgaacgtggagaagcgccgggactcggcgcgagggagtcgcttcctgctggagctggagctgcaggagcgcggggg

SEQ ID NO: 93238 - DNA, 122 bp, Homo sapiens
agcaggcaatgaagaatgagtttgtagcagagatgcaataaattgataactgtattagtccgttctctcactgctatgaagaagtacctgagactaggcaatttataagaaaagaggtttaa

SEQ ID NO: 93239 - DNA, 122 bp, Homo sapiens
ggggaggcaggcgtcttctccgagacccgcggcgctgggagctccgcgtgcgaacttgcccggggcgaaatctgttgcccaccctggtcccaccgtgcgagcacacctaggcaggtgcgact

SEQ ID NO: 93240 - DNA, 122 bp, Homo sapiens
tccctcttcccataacatatgcaccatgccagaagggacaaccaaagtaaacgatctagccgtgagtaatgaatactttgggctggttggaatccagttagttgaggaaagagaaaagagaa

SEQ ID NO: 93241 - DNA, 122 bp, Homo sapiens
ctaaagcacacaaaccaccccaccgccacccgcgttctccaggagttggagaaaaaccaccggggcgcatacaacctctgacagattcgagtaaaagtaactgcggttctcgactttcaagc

SEQ ID NO: 93242 - DNA, 122 bp, Homo sapiens
cttccctcagggcagggctcgggacctgcagcccgccatgcctgagcctcccaccccctccgttggctcctgtgctgcccgagcctcccggatgagcgccgccccctgctccagggcgccca

SEQ ID NO: 93243 - DNA, 122 bp, Homo sapiens
atctgacgaataccttgtccttaatctatgtgaatcatactgactacacatatagtttaccgcactttgttcttagacaaaggtgcatgccagaaaaatggcttgcaatccttttgcaaagc

SEQ ID NO: 93244 - DNA, 122 bp, Homo sapiens
tggccgcgcgtgccccaggtcccccagtagcgccccagcgccgctgctgctcagacacaccgaaataggaatgatttaatccaacgacacctcccagggctgcccagtcccggttccgccgg

SEQ ID NO: 93245 - DNA, 122 bp, Homo sapiens
ccatggcccactcgccggtggctgtccaagtgcctgggatgcaggtgaggaagcgcaggccgcccccgccgcccacgtgactgcttgggagcccggtgcgccctcggtgctgggcaccggcg

SEQ ID NO: 93246 - DNA, 122 bp, Homo sapiens
gttaagcacctgaagtttgttcttatggacactcagcctgtgttttccataaacactcttcggatgattgcaaacctgaccagatttccacagctctgaaaacactggttttgatggttttt

SEQ ID NO: 93247 - DNA, 122 bp, Homo sapiens
tcatcaaatgttcagtaatttcattgcactgtgtaattaggtgaagaaactccacccgagcgtccatgggtcagctatgtggactctagctgccaaaggcgcttctccttctgaacagagcg

SEQ ID NO: 93248 - DNA, 122 bp, Homo sapiens
gggcagcgcgcgctgacctatgacgtcatcgggacgttaagcatcgtagcattacctggacgtagccccatttctcttcccggacaggtcctctgatagtcgggtaggttctcaatcaagcc

SEQ ID NO: 93249 - DNA, 122 bp, Homo sapiens
aacaaaggctcattgctgccgcggaacatgcctgcgcctttcagggccgggttcgcagagcgcgccgcctccagcccgcgccgaggtaacacctggtccgccaactcctggcgcctaatcaa

SEQ ID NO: 93250 - DNA, 122 bp, Homo sapiens
cattatggcaaataagagtataaactttggagacagaaacaagtcctgacttcacacctgcgatttgtgacaagttattaagccactttgagcctctattttctaagtcataaaaaggatat

SEQ ID NO: 93251 - DNA, 122 bp, Homo sapiens
agggctatgggagctggagcggagaggagagaagcaccttgcctttgctggtgtttttcccgcagcaggtgggtgggactgagccaacggtctcttggcatcaacaaagcatcaacaaatct

SEQ ID NO: 93252 - DNA, 122 bp, Homo sapiens
ggagcttatgttctttcccggagaataaacaagtacacaagctattgccagccttgaggtcgcagcctgtaggctacttagaagaaaacattccccaactcattcagggagaaaaccaagct

SEQ ID NO: 93253 - DNA, 122 bp, Homo sapiens
caaggctcaaactttaagccacaaagtgaagcctaggtagtggaaattttgccagtagaccggggcagaattttaggggcaaaaggttttaattaggctgcagcaagccttaccagggaggc

SEQ ID NO: 93254 - DNA, 122 bp, Homo sapiens
tgtcggccgcctccttgaaagcctgctgctcctgcttgaggctcaccagctcgcggacctcggtgtagatgtcagactccatagtctgaagggtacttctcagggcctccatgtcccactct

SEQ ID NO: 93255 - DNA, 122 bp, Homo sapiens
tcaaggaagtggtgaccggagggaagccaagtgcactcaaaccctcgggtgagtcatcaccgccgggtctttcacagctgctgaaagtgagcaacagtgatgaaggtttgtgagtttctgcg

SEQ ID NO: 93256 - DNA, 122 bp, Homo sapiens
attgattctagtgccctttggatgctaggcatcagagttaataagcatgttaaaagtcaccgggatgtaaattgacagtcatttattttgtattgtaaataaaagtgatttcatcttccacc

SEQ ID NO: 93257 - DNA, 122 bp, Homo sapiens
tccagcaccaacaattccaggatctgctccttggtatgtatctctgggttcagccactgacggcaaagttcccgcagttgactcagagcctccctgggcccaggtgtctcctgatagcagaa

SEQ ID NO: 93258 - DNA, 122 bp, Homo sapiens
cagtctcgctttccagggcaggcggcggccaggagctacagctgtgggctgcactcccggcgtggagtctccttcctgcccgcgcaggccccggcgccccagcgaaacgctccggccgctcc

SEQ ID NO: 93259 - DNA, 122 bp, Homo sapiens
ccgcagctgcctctgcggctgccgcctgggtgacggagggtggggcgggggtgggtcgctcgtagctcgagagccacgatctgatttcagggaccgtgcctatgtgctgagtcaaaccccgc

SEQ ID NO: 93260 - DNA, 122 bp, Homo sapiens
cgcccacccagcagggctcaccagcctccctaggaagcaggcaggggtcctgggctcaaacgctgccccacccatcatcgcccaggcaaccagctccctaagggctccccggactagacaga

SEQ ID NO: 93261 - DNA, 122 bp, Homo sapiens
agcacctcaccccggcaccttgacttaaaccgtgtggttcatgcatctgttcagagctgtcgatcaaaaaatgttcagagttctctgtccagatgagaccatttatgtctgtgtacccctag

SEQ ID NO: 93262 - DNA, 122 bp, Homo sapiens
tgtctccttgctgccctagtctgtgcctccccattgccctcaagtgcgccttgcaggacacgtgggcactcacctcggcactccggctcctggcctccatggcgttgctgggaggcacctgc

SEQ ID NO: 93263 - DNA, 122 bp, Homo sapiens
taaattactctcctcgatagccctcagcaatcacagaggcttatctcaaattcttcttgtcgaaatgggatgtgtacttggtcttaccacttgaagaaaaaatgtttaaacactgcacagtt

SEQ ID NO: 93264 - DNA, 122 bp, Homo sapiens
acaggtgaggaactgaagtttggacagattgagtcactttctcagggacacatggctggccggtgatggagaaggtacttgaacctgggtctgcctctgctctctccacactcccttgcggg

SEQ ID NO: 93265 - DNA, 122 bp, Homo sapiens
ctactgcctctcggtgtctggagctgggctccgaaatggacccagatgcttaatgaacggcgagtggggctaccacttcgaagacaccgcgtaaggtttagcctgtattcgtgtcctccatt

SEQ ID NO: 93266 - DNA, 122 bp, Homo sapiens
caaagggaatgccattcttggggcgtctcatttcacgattattgcataagctcacccagacgacacagatatatagaatgtccttagaatagaaaatcctggaattggaaagaaaacagtgg

SEQ ID NO: 93267 - DNA, 122 bp, Homo sapiens
tcaatctcctttctagaatatatcaatatgaagaaatgtgtgatcaggtgttcattataccgtggagagctggataacacacaaacagaatacctatggcaggtaactttcgggattggaat

SEQ ID NO: 93268 - DNA, 122 bp, Homo sapiens
actcaatcttcactctgcagttttcatgggagacacttaggcggcttttctgtaagataccgtcttgtcttactccatgaaaagaggctaacttttatcatgtaaaacgttacagtggagaa

SEQ ID NO: 93269 - DNA, 122 bp, Homo sapiens
acagctcccctccagtgaccggggtcacccggtgctgctgctggatcaaattgaggacaacgccaggggccacagatctgaccaccaccctaccgcattgcaaatactccccagcttctctg

SEQ ID NO: 93270 - DNA, 122 bp, Homo sapiens
atctggcccccgtgctgagtcaccctctccatctgcctgtcctccctgttggacggtggccgtctccttcctggctctttcggagccacgtggcagcccacgcgtggagcgggtgccagagc

SEQ ID NO: 93271 - DNA, 122 bp, Homo sapiens
tctacatgtcacatgagaataaaataatgcctatctcacagggttctggagaatattaagcgagataccttaaacttaatgactagcacaaagaaggtgaccactaaaatagagttcttact

SEQ ID NO: 93272 - DNA, 122 bp, Homo sapiens
attctgaatagatactgggataggctccagctgtgaagaacaacaggcttttcagaagcacgtgattgttacctcatcctcacaggtaatttttgagtagctaacccaatgacattgttttc

SEQ ID NO: 93273 - DNA, 122 bp, Homo sapiens
acggcgggccgagggaggcccgagaaaaccccaagaggtgcgggccggaatgcgggaatgcgcccttaccgccctgctctggggctgcccgcctcccccggcacggccagacacggcctggc

SEQ ID NO: 93274 - DNA, 122 bp, Homo sapiens
acacgcgtgtacgcagctcctccgcttgcggggctcctggcatctggtgcagcacctgcgcgtgtttagtgctcagtaagatgccccctgaaaaaacaaacacaaaccgggaattggagccc

SEQ ID NO: 93275 - DNA, 122 bp, Homo sapiens
gcaccatccacacagcagccccacacgtggggagcgtcgctgtggttatggccgacttgccgtgtaggctaagattgttccccttacacacacagacatcctctctctcacaccctcacgca

SEQ ID NO: 93276 - DNA, 122 bp, Homo sapiens
ccgcgcccaagggccgcgcccccgaggcagccaatcacaaagaggcgctgaggtcacgtccgagagagacgctctgtcgtccccacccttaagcgcgagatgtaacgtcagcgcgcgcctgc

SEQ ID NO: 93277 - DNA, 122 bp, Homo sapiens
cccgggggggcgggggccgcggccgccgaggatggggaaatccaacagcaagttgaagcccgaagttgtggaggagctgaccaggaagacctactgtgagtgctcccagcccccagcccgcg

SEQ ID NO: 93278 - DNA, 122 bp, Homo sapiens
attgcctctcccggcaggcccatttgcataaatcctccgagctcctccaaacacgattggcgcgtgcgtgtgcgcactgcatcaatcctgatgatttggtaataatagttaaatcggcacta

SEQ ID NO: 93279 - DNA, 122 bp, Homo sapiens
ccatttcttgatctgactactcaagacaggcgcttccctaggtactttcacacctcattgcgaggtaggtgttgttcccattttacgggtgcagaagctgagctgcagaggcgttaggtacc

SEQ ID NO: 93280 - DNA, 122 bp, Homo sapiens
tgggccccggcaatagccaatgagacaggagccacgagaacacggaccaatcggcggcggcgacagtgtggaacgcggttgccaggaggcgggacgcggcggcgtgccagcctagccactct

SEQ ID NO: 93281 - DNA, 122 bp, Homo sapiens
tgccaagacaagaaccttgctttccaactcatccctaaagcaaaatactggtctcagggccgggaagtgcagcttcagacgcaagccagatgaggcaaggctccaggttgggatgtgggatg

SEQ ID NO: 93282 - DNA, 122 bp, Homo sapiens
tgcctctgaatcgaaggcaattaggcgctgcttatctgggcattagccgtgtatgcaaaccgggctcccgccccctcctcctgggcttataaacgccgccgcctggcgaggcccgaggtgga

SEQ ID NO: 93283 - DNA, 122 bp, Homo sapiens
ctgggtgtggcagagaagggggttgtgtctgtttcgcggggtccctgctggagacgtttccggcacttcttgatagtgactttaatcctcaaggcagctgcgtgtttttcatgtcacaggca

SEQ ID NO: 93284 - DNA, 122 bp, Homo sapiens
ctatccactgacccccaccctgctccttggctctaaaccccacttgcccatgctgtattccgagttgaggccaatctgtctccccatcactgcaagactccactgcagtgggtctctatacc

SEQ ID NO: 93285 - DNA, 122 bp, Homo sapiens
tcccagcaccccgtgctccctttgagctttggccagatccagagcgggaaggccagcccccgcaccttcccccgacgccaggctctctgggactccccggatcagggcatgggagcagcggc

SEQ ID NO: 93286 - DNA, 122 bp, Homo sapiens
ctgcactccctctcttctcccatgctcctcgccgcgcagacgtcctggggcaggtccctacgcctttctggacggaggaggtcagatgagatgcaggaacgcctgctgatggagagcagggc

SEQ ID NO: 93287 - DNA, 122 bp, Homo sapiens
cagataggacgcctagaaatctaaagccctagttgttccagcttgagtagcaagtggaggcgaggtgtacaggaagactcggtgccgtcgggacaacagtctgcccccacttcctggaaaat

SEQ ID NO: 93288 - DNA, 122 bp, Homo sapiens
cgagcgctgccctcccacctgcctcctggaaaacatggatgtggaccgagcacagaaaaccgccgggcgcctgggcacagctcccgggccccagcccttcacacacagcagggactgccgag

SEQ ID NO: 93289 - DNA, 122 bp, Homo sapiens
ccctcgggccggggggcggggcctcctaatccggaactgaaggtcttgcgtagccggcaccgcccatctgcgtcccggaaggagcgagcttgcggagcgtgaaccagtgagtgaaagcggcg

SEQ ID NO: 93290 - DNA, 122 bp, Homo sapiens
ttgacttttgagtgactgagccctcctggtgcccgcactctggccgggagtgccaagcagcgttctccctcccgccgcacgggggcacaatgggaagcctgcacagtgaggaagagcggctg

SEQ ID NO: 93291 - DNA, 122 bp, Homo sapiens
tgctgaacgaagggtagctgctgaaccactcccacggtgacttggaatggcttagccagccggccttgggccacctggctctggcccccctgcccaccaggactttggccggctctcgctcg

SEQ ID NO: 93292 - DNA, 122 bp, Homo sapiens
ctggcccgcagttcgagccacccttgcgaggctgcccacccgcctacctggcttgggcaccgcctgcagtgtctccttcagctggctggcctccaagatcttctggggcctggggttggaag

SEQ ID NO: 93293 - DNA, 122 bp, Homo sapiens
tctgagactcgggtggtgagagtcgccgagatgcgcactgggaagagaaaagagccaggacgcacctgcatttatggcgccatcgcccgggcggaatcctccacggaataaaaagtatgcag

SEQ ID NO: 93294 - DNA, 122 bp, Homo sapiens
ggagttgcagtccgaccgcgagggggctgcgaggccggcggcgcggttgcctccctgggacgctgcccctaggcggcggccaaacgctgcagatgagcagacgcagatcagccgaggtcacg

SEQ ID NO: 93295 - DNA, 122 bp, Homo sapiens
aggctcgctgtatgcaggggaggcagcaagccctcttggaggggcctgttgtctgagcttcgcctacagctgaagagataagaacctacaactgcagccacaggaaatgacaaagcagtgac

SEQ ID NO: 93296 - DNA, 122 bp, Homo sapiens
tgtgcgccacctggtggctatttgctgaactgtggccacaaacccctggtcagcaggaaccggccctttcactgccctgcagctccctctcctccggggtggcatggcagagaagcagcccg

SEQ ID NO: 93297 - DNA, 122 bp, Homo sapiens
gccatcctcacatctgtgggttattaatggcgtctccccatatgtgaggccaatacccagcgcaccagtaggtgttcagtagattcccaaatgcaccaacagttgccgagtgtctactgtgt

SEQ ID NO: 93298 - DNA, 122 bp, Homo sapiens
aagtgcagtgatcttgattgtaattggccattatcaacttgcattccttctagggtaagtcgagctggatcagcctcgcatctgtagctgattggttcagtttatcatgcggacgagaaaaa

SEQ ID NO: 93299 - DNA, 122 bp, Homo sapiens
agaaggaatgtttttattttcctgctagaggccaggccaaatgggccccctttcaagatgcgctgagatttccctcagacagggaagacttggcacccacccacagtgaccgctgggcagag

SEQ ID NO: 93300 - DNA, 122 bp, Homo sapiens
ataaaacataaactcctttctgcagcacacaaggctcttgaagatctcgccccaattagccgtgcagcccctttcccggattcctgagctttaggcttgcactccagcggactgacctactt

SEQ ID NO: 93301 - DNA, 122 bp, Homo sapiens
tggaccccagcctccacctgcctgtcctcttcctggcaaggttcctgaagctcccagcgacgatgctggggctgcccttctgcaggccaagggaaggacctcaagggcaggaggacacaggc

SEQ ID NO: 93302 - DNA, 122 bp, Homo sapiens
aagagcccggcctcatcccccaggcccaaatgctccttacaatcctttttgcctttaggtcgggccgacccgatccaacgcgatcgcgggagcacttgctcaggcgtaagccccaggcagac

SEQ ID NO: 93303 - DNA, 122 bp, Homo sapiens
cctcctcctgctgtgactagtgtgcatggaagggcacagtggtggcagaaagacttgtggcgagatatcaagatccacaggaagtcataagagaaaaagcattttgtttgaactccacccac

SEQ ID NO: 93304 - DNA, 122 bp, Homo sapiens
tgccccaggactcctgcacccgcggctgcacgttcccgtttccgccagccaccggaactgcggcccagcaaaaagggaagtaggggagagcacggcactgttcagccaacactaagagacag

SEQ ID NO: 93305 - DNA, 122 bp, Homo sapiens
actcttaggaggtaactattagaagtgaaattgagactccatagatcgggggtcttactacggcattttaaaagttctgactgtgctcatttttgaggaatagttgtttaaggctttctatt

SEQ ID NO: 93306 - DNA, 122 bp, Homo sapiens
gattacatgcacgactcagataacaaagccctaagcaagctggtggcagcatgtggtgggcgaatctgtgcctttaataaccgtgctgaagggagcaatcaggatgaccaagtgaaggaact

SEQ ID NO: 93307 - DNA, 122 bp, Homo sapiens
cccgggcgcggggggggactcggctcggccggccgggagcgcagggatgtggggtccggccgcgcgggctgtgcctcagtgcgctgctctcccttcccaaccgtagctcttgctcgctcgtc

SEQ ID NO: 93308 - DNA, 122 bp, Homo sapiens
gcttccagcgcatgcgctgctaacgccccttaaccccccctccgcgccccgcctcccccacgcgccgctctccagcctctaggagtctaacccttagcggtccaccgacctccttcacttct

SEQ ID NO: 93309 - DNA, 122 bp, Homo sapiens
cccaggctatataaggaattacacgtacatttcggaccgaggggctcgctttggttcctgcgttatttttaaaacgacttttaagagaggggcaataaatgcgtctataatgggaccgctgc

SEQ ID NO: 93310 - DNA, 122 bp, Homo sapiens
cgtcggtctactcatttctgatgttaagaataacgacagcctggttgccaagcgcttttccgtgcctgtctcctgccagctctttgggaggcgagcagcgttgtctccccattttgcatata

SEQ ID NO: 93311 - DNA, 122 bp, Homo sapiens
tgtccgctggcgtcatggtgagcaggggcgggagcggggctggggtcctcggcaggggcccggagacctcggggcagggaggcctcggtacacggagaccctgggaatgggaggcctggagc

SEQ ID NO: 93312 - DNA, 122 bp, Homo sapiens
cacgtggcacaggaaaaagcgccgctgagcggatctaaagaacagcgggtgtcggggagccggaaagcaggaatcatctcagcaatccgtctctggattgggaggaagaacatgttcctaaa

SEQ ID NO: 93313 - DNA, 122 bp, Homo sapiens
cttcggcgcgggaggtccggatgatcgcaggtgcctgtcgggtcactagtgtgaacgctgcgcgtagtctgggcgggattgggccggttcagtgggcaggttgactcagcttttcctcttga

SEQ ID NO: 93314 - DNA, 122 bp, Homo sapiens
cacagggccattcattacccaaggactaatgagactagactaatgacctttggctcctgacggaggcaattctgccctgaacctcaggctggtcactccggggatgtgccggccagatgcac

SEQ ID NO: 93315 - DNA, 122 bp, Homo sapiens
agagtcgccagatcacgcaggtctatggcttctacgatgagtgcctgcgcaagtacggctcggtgactgtgtggcgctactgcactgagatctttgactacctcagcctgtcagccatcatc

SEQ ID NO: 93316 - DNA, 122 bp, Homo sapiens
gggtggagcctttataaatgggattagtgcccttataaagagaccccagaaagacccttgcgcctttcatcatgtgaaaatacagtgagaaggtgccatctctgaaccagaaagcaggccat

SEQ ID NO: 93317 - DNA, 122 bp, Homo sapiens
ttgaagaccttgcagacgaattctgaaaagattatagcaggggccgggcgcggtggcgcacgccttaatcccagcactttgggaggctgaggcgggtcgatcaccggaggtcaggagttcgc

SEQ ID NO: 93318 - DNA, 122 bp, Homo sapiens
gtcgctccgcgcctgcgcaggagaggtggtaggctcgggtggctggctccggggagatagcgcctgtcagtcggtgggtcggtcctcgcgccggccctccccctccccggtctccgggggag

SEQ ID NO: 93319 - DNA, 122 bp, Homo sapiens
ggggcctgctggccagcgcggaaaaagctcgggcctgcgcattggagctcttgactggcccgccccccaggtgcagcgggccaatcggagtctagacgtggaggtagacagcgtggagggcg

SEQ ID NO: 93320 - DNA, 122 bp, Homo sapiens
aagctacatagtgtgaattctggtacaggtcacaggcctggggctttctgacaccaggggcgctcatcttgtatgaaagaaatacttcctcaaacaggatttttaacagtcaagatttattt

SEQ ID NO: 93321 - DNA, 122 bp, Homo sapiens
gagccgggcgggggtgactgtggccttgcctctcccgtccctgtagtggctgtcgctgggcgcggactccaacgggagcggcgtctctgtgctgctggagctggcacgcctcttctcccggc

SEQ ID NO: 93322 - DNA, 122 bp, Homo sapiens
ggctgcgtgaagaggcggtttctgaagcttaggccgcccaactcggcttataagtggtaacgcgtgctgcgcttgcagtgagcctactgggctttctgcagctgggggattggtatgggtag

SEQ ID NO: 93323 - DNA, 122 bp, Homo sapiens
tccaaggcctctttctcatgactttttaatctcctgctcggaagtctacgaggacgcttccgggtcacgcggcgcggacaccaggagtcatgtgatgtcaagatggcggcgccgcggtagca

SEQ ID NO: 93324 - DNA, 122 bp, Homo sapiens
tacttgggaggctgaggcaggagaatcgcttcaacctgggaggcggaggttgcagtgagccgagatcgcaccagtgcactccagccttggtgacaatgggagactccatctcaaaaaaaaaa

SEQ ID NO: 93325 - DNA, 122 bp, Homo sapiens
caagactcccactgctgctgatttcaggataccagcatgatgccactgaatgcagagtttcgagatgtgcatggtctgctatgttgagccaggtctagcataccgctgtgccctgctgtgtt

SEQ ID NO: 93326 - DNA, 122 bp, Homo sapiens
ttgttgagcttcaacatagcgtacacaagagttgtcttaacaagctgcacaaactcaggccgaactacgcagcacactgctccagaaaagttaaactgaaggaaaaaaagggtccacatgaa

SEQ ID NO: 93327 - DNA, 122 bp, Homo sapiens
cgctgaaataagtgcagccacagcagcccccggtcacgacccgagacggccatttttcaacgctcaacttcactttcacagaaatgcaccaaaggcagcctcgctctgtggtctgcagcgat

SEQ ID NO: 93328 - DNA, 122 bp, Homo sapiens
agacgggctttcgccatgttggccaggctggtcttgaactcctgacctcaggtgatccaccgcctcggactcccaaaatgctaggattacaggcgtgagtgagccaccgtgctctgccacgg

SEQ ID NO: 93329 - DNA, 122 bp, Homo sapiens
gggccgtgtggacctcagcacacctgagcataggagggcatggcagagcccggggtcacacgcgtgggaacacgccgtgggtgcgctccgccgccggctgccatgtgcgtgactatgtgcgt

SEQ ID NO: 93330 - DNA, 122 bp, Homo sapiens
ctgcgtttgttcccatggcaacaggcccctcatggatgccgccacgtaccgttcttcctgcggcttggctcgtcctcaggtctaagggcgacctcaaagacccctttacccgcacccccaag

SEQ ID NO: 93331 - DNA, 122 bp, Homo sapiens
gcgctatgtgcctttaagatcggtgcgggggcggggcgtcctgggtagggctgcaggtgacgtcactccgggccttgggactcggagagcgtctggaggcggggcctggacttcacgcccgg

SEQ ID NO: 93332 - DNA, 122 bp, Homo sapiens
gaggagcaggaggaccggggcgccggtgtcctgccgcctccttctccttgctctcacctgcgcctattagtccacgcgccttcaaggccaggggctacagcccagacagagaggggacagca

SEQ ID NO: 93333 - DNA, 122 bp, Homo sapiens
gtaatcacagcgctgggagagaacgcataaaagaagggtagctcaggagttgtggggcaccggaagagacataacagaaaacgcaggcctccactcagcaaaaacaagccacgcgcgaagtc

SEQ ID NO: 93334 - DNA, 122 bp, Homo sapiens
agccagcccagcgtcctcagctaacggaggcctccttgctggccgccagataggccaccccgcagatacaggaaccaggcacgggcccgccaccctgtttccagggtctgagcgggtcacca

SEQ ID NO: 93335 - DNA, 122 bp, Homo sapiens
gccacccacactgccatccccacccgcactgccatcgccacccacactgccatcgccacccgcactgccatcgccactctgactgccatccccacccgcactgccacccggaccccctccaa

SEQ ID NO: 93336 - DNA, 122 bp, Homo sapiens
gcggagcaaccccagtggatgggtccgcgggggctgagcgggcggaggacgcgggaactccgtgacaccgaccagctgacgctgcccgcgtgaaaccagagccgggcatcagggcctcatct

SEQ ID NO: 93337 - DNA, 122 bp, Homo sapiens
cacccagacacgtctccatgcacgcacgtgcgcggctgtacttacctgtccttccagacacgtctccgtgcccgcacgtgcgcggctgtacttacctgtccttccagacacgtctccatgca

SEQ ID NO: 93338 - DNA, 122 bp, Homo sapiens
gtaaggctgggtcatggaaagaaagaatgaatgcagactacgggcggtgaatagaggtctcggatgccagcaggcgtcccaacccagcaggaactggctcaattctcagaagaaagcgatcg

SEQ ID NO: 93339 - DNA, 122 bp, Homo sapiens
tggactagctgtatagacctgcgttcggtcaagtcttgcactctgccccacctcgagggtcgccagggaaaaggaagcctcgctcgcagtcccagctgttggccgcgcgaaggcggctcctt

SEQ ID NO: 93340 - DNA, 122 bp, Homo sapiens
acttctagagcgcatgcgtttcgcccacccaggcccgggcgcggttaggggtgactcccacgatccctagcggctgcagagtggaacatggcggcctccttgccgcttgcgttaccagagtc

SEQ ID NO: 93341 - DNA, 122 bp, Homo sapiens
aagctgtgtctgaggattccctggatggacctttgtgtgaaaagaccaaaatcagaaaaccggcagtggcttcaaggatccgagagggaggtgacgagggcctggatttggggctggcctgg

SEQ ID NO: 93342 - DNA, 122 bp, Homo sapiens
aattattctaaaatgattttaaaaacaatcattcattttcaaaatcatggtatcggaatgcgtgaaaaaagacttgctatggcacagagaacattgtaatggggtaacccgccaggctagga

SEQ ID NO: 93343 - DNA, 122 bp, Homo sapiens
cggcgtacgtacccagagcgaacagggcgagctgtccagccgaggggaccattttacgggcgggcgggcagcaggctctccagcctcctgccctacctgcggtgcccgagtggcggagcggc

SEQ ID NO: 93344 - DNA, 122 bp, Homo sapiens
gggctgcgatctccccgggaagaatcctcagttgcaggtactgcttggggtattgagccacgataattactttaaatagttatctttcaaatgaatttttaaaaataaaagatttcaccttc

SEQ ID NO: 93345 - DNA, 122 bp, Homo sapiens
ggaaaggcgccactgtaagaggtcccgtctgagccaggcagccccagtgaggcaaggactcgggccatgaggcatcctctcctggcaggagtgtcctttggccagagaaggggattgtgatc

SEQ ID NO: 93346 - DNA, 122 bp, Homo sapiens
ccgcctgcagaccccagcgagcacatgtatgcgcccaagtacctgctgaagaactacgaccggttccactacctgctggacaacccctaccaggagcccaggagcacggcggcgggcgggtg

SEQ ID NO: 93347 - DNA, 122 bp, Homo sapiens
ccagcctagcggcctccgctcagcggaaaaaaaagcagacgctactccccgctctaggtgcgggacctaagaggtttggcccaatcaggcatcccacctaaccagacgggccggagtctgtg

SEQ ID NO: 93348 - DNA, 122 bp, Homo sapiens
tgggcgtgggccaggtcctggctggaggtagacgaggtcggcgagctgggcgcggggccgcggggttaccccggggcaccgggcacagagccgagaagtctaagctagggaaaatcgaggtc

SEQ ID NO: 93349 - DNA, 122 bp, Homo sapiens
gaggtgactgcaacctgcgccgggagccatctgggctatgaaaacgagactggcctccagcgcccccggcctccacacaacactcttacactgcccaggagagcagcggtcactagcaagtt

SEQ ID NO: 93350 - DNA, 122 bp, Homo sapiens
accgacgggcccgtcctgcccggctccggtccggatctcgagtaggcgctcaatgggattcggggagacgtagtttactttgttcagcaaatatttaaccgatgcctattttaatgggagat

SEQ ID NO: 93351 - DNA, 122 bp, Homo sapiens
ctccacctccaaacagctcgggtctttgcggtcgcggcggctgctgctcctgctgcctcacgttggaattggagatgccttgtcctgctctcaggacagaaccatgaaaccagcagcagcgg

SEQ ID NO: 93352 - DNA, 122 bp, Homo sapiens
ccctctgctcggtcagtttttttcggcccctagcctgccctcgcgctgggttgcgctgcccgttaatccaatcccacttggtgagaaaagaagtggaattggagccccgggcacggtgcttc

SEQ ID NO: 93353 - DNA, 122 bp, Homo sapiens
gtgctggtggtgcagtttgtcgaggccatcgtggtgttggtacggcagatgtcccatgtgcgggtgacccgagcactgcgctgcattttcctggtggactgtcggtattgcggtggcgtccg

SEQ ID NO: 93354 - DNA, 122 bp, Homo sapiens
cccaacagcaaggaaaatcgaattgagtgcgggctcattcggcagcggccggcagagaagcgctgaatgtggaggtgccccgagacattgcaattcagcaacacgctcgctgacttttcttt

SEQ ID NO: 93355 - DNA, 122 bp, Homo sapiens
gccctgtgctttagacccaaggacccgattcttgggctaggaaagagagaacaagcaagccggggctacctgcccccaggtggccaccaagttgtggaagcacatttctaaataaaaactgc

SEQ ID NO: 93356 - DNA, 122 bp, Homo sapiens
gagtgaggcggagacccaggcgggcgggcagagcaggcggcaccgcacctcggccagaggcggctgcagcagctgctgcccttgtccctgccgccgcctctccagtcccttctgtgattacc

SEQ ID NO: 93357 - DNA, 122 bp, Homo sapiens
atctagacatttctctaatccaaattgcttaggaatatgtgccaacaatagcttggaaatcgagtaactatgttttacgaaaataaatggcaataagaacaaatgcattcttttcttttgtt

SEQ ID NO: 93358 - DNA, 122 bp, Homo sapiens
ggtaggcgttaggtgaccaagggggtcggggacccagaggataggacccaaagacgcaagcgtcgcgcgcccaaggctcagcgcgcctgcgcagggtagcggccgttcagccagcggctcgg

SEQ ID NO: 93359 - DNA, 122 bp, Homo sapiens
tgaacacggctcctgtggccacagtcctgtgttgctcccgtggttcggccggcgaagctccgtgttcatgtgcacagccacattggccattttgacccaacagacactcaagcaactcttgc

SEQ ID NO: 93360 - DNA, 122 bp, Homo sapiens
aatgaacgtccctgtcaggccaattccagcactacagtgcaccacgaccggccctgcatccgtgatgctcccctgcttatggtacacctcctccaggaagtccagcacgaccccggggtcgc

SEQ ID NO: 93361 - DNA, 122 bp, Homo sapiens
cacagggatccaccgcggggcttctggaactcacaggctccctcggagccttcaaagacgcgacctgattgacaacaattttgtttacacaccacacgccctgggaaagccacacaccagtg

SEQ ID NO: 93362 - DNA, 122 bp, Homo sapiens
atggcttgaaccccggaggtagaggttgccgtgagccgagattgcgccattgcactccagcgtgggcaacaagagtgaaactccgtctcaaaaaaaaaaaaaagaaaaagaaaagttgacat

SEQ ID NO: 93363 - DNA, 122 bp, Homo sapiens
cccacgcgcccacccacctcgagcagggtgtccgcacgcagacccgcctggagggcgccgcgctgcacccccacgccaagccccagaaccctggcggcgaggtccaccccagcccccgcatc

SEQ ID NO: 93364 - DNA, 122 bp, Homo sapiens
cagcagggtcggcgggggctgtactcacgtagtgcttggaggggttcctccgcttctccacgtccaccacggtggcatcctgcacgcagtaggcgagcatcttcccccacaaagcgagtggc

SEQ ID NO: 93365 - DNA, 122 bp, Homo sapiens
cttggttccgaggtgtatctttcacctcatcagtatgactatatgccccaggacacttcccgcatggtcctaactgccgggctctgggacgacagccccaggcggtttagttttttaggaaa

SEQ ID NO: 93366 - DNA, 122 bp, Homo sapiens
ggtctgcacgttcttcaggtagaagctccgcaccagaaagtcctcgcaccagatgtgctccgacaccaggttcacctgcccggcaggggcccaggcctgagcgccgcgggctgccccagtcc

SEQ ID NO: 93367 - DNA, 122 bp, Homo sapiens
ttgaaagtgagctggagagaggcccatggaaagcgatttggggccgggcattgtggctcacgcctgtcatcccaacaatctgggaggccgaggcgggtggatcacctaagtcaggagttcga

SEQ ID NO: 93368 - DNA, 122 bp, Homo sapiens
ttactgaattcctctaagactcagtttcctcatccataaaatgtgagcaatgatggaaatcgcatggctgctgaaaaaaatggatgtggccaggtttttgtttttcgtttttgaaatagcaa

SEQ ID NO: 93369 - DNA, 122 bp, Homo sapiens
ttgttatcagttactccacctagaggaccagcaggtggagtctccatgggcagagtctcgcggactgtcatttggtgtggggtggccaagagggactgaacatctggagaacatggttgtcg

SEQ ID NO: 93370 - DNA, 122 bp, Homo sapiens
tgcccgcactatcctcaacaagattgactcaggtgaggccccgaccggcccgagtgggagcgaagggcaggcccgggggtctccaggcaaccaatgctgacctctccccttccccacaggcg

SEQ ID NO: 93371 - DNA, 122 bp, Homo sapiens
cccagaagagggaaagaattgtgcagatgagaaagaggctctcagcgggagggaggcaggcgggcttgattgacacaggagagggctggctttttggagggctcttagcaacggccctggtt

SEQ ID NO: 93372 - DNA, 122 bp, Homo sapiens
cccacccaccccgagcccgaggcggggctgtggatgtagccgctgattggctgactggggcgcagcttgacggcgtcgggctggagagccgcagtcccggctgcagcacctgggagaaggca

SEQ ID NO: 93373 - DNA, 122 bp, Homo sapiens
gaaggcacgggcgcgaagcccggctgcgggagagctgggagcctgaatgtcgctggctgccgttcacagcaggctctctctgagcaccgtggggaggcagtgacacccgctggcctcgcagc

SEQ ID NO: 93374 - DNA, 122 bp, Homo sapiens
catcctggctaacatggtgaaacctcgtctctactaaaaatactctacaaattagcccggcgtggtggcaggcacctgtagtcccagctactcgggaggctgaggcaggagaatggcgtgaa

SEQ ID NO: 93375 - DNA, 122 bp, Homo sapiens
tcccgtctaggaagtgaggagcgtctctgcccggctgcccatcgtctgggatgtggggagcgactctgccccgccacccgtctgagatgtgaagagcgcctctgcccggccgcgaccccgtc

SEQ ID NO: 93376 - DNA, 122 bp, Homo sapiens
gctctgcaagggtgaggcagagagggctgctgaggggcgtgagcccgcagccccccagagcgctgcgttttctgcgtcgggtgttgatgacgtggaactaacgcttccttgaagttcccgcc

SEQ ID NO: 93377 - DNA, 122 bp, Homo sapiens
gggagcacaacatcaggcaaagccataaatagccctgactggcccagctgtcagtcaggccgggtgggggaattagggaggggcaggagaacaagtgaggcctgagcccgccaaccctgagc

SEQ ID NO: 93378 - DNA, 122 bp, Homo sapiens
taccccccaccccccaccactgccccctttccttttctgacctccttttggagggctcagcgctgcccagaccataggagagatgtgggaggctcagttcctgggcttgctgtttctgcagc

SEQ ID NO: 93379 - DNA, 122 bp, Homo sapiens
gtgagtgattaatctccacaccctcctggtctcccgagcgcctggcacagtccttagctgcgtcctggagaactggtcttccgggccctgcctacctctctgccatcgctgctaccattctt

SEQ ID NO: 93380 - DNA, 122 bp, Homo sapiens
aatgcaaatttgacattctttttcaatagtttttgaatggaaaatagaaactaccctaaccgattgaaactgcaatggaatgtagatgggtggaatgtcctttctttggactgcagtatgaa

SEQ ID NO: 93381 - DNA, 122 bp, Homo sapiens
aggtaggagagcttggatgaggttgtgctgtcccttgaatgacactcaaggctgtggccccgcagcagaggaagcagtggtggtggcgtcggcggcggcggcggcggcagccggagcgagca

SEQ ID NO: 93382 - DNA, 122 bp, Homo sapiens
aaaccctgtgcttctggagaccatgtgtacttttgtcattgtcaaaaaccagtgattgcccgagctcggtggctcacacctgtaatcccagcactttgggaggccaaggcaggcggatcacg

SEQ ID NO: 93383 - DNA, 122 bp, Homo sapiens
ctgtcccggtacttactgacggtgcacatgcggggcttggggaagctgagtgtctaaccgcggtgcagctacggatgggaaattctgggcagggacgagcctgtcttcacctgaggaattcc

SEQ ID NO: 93384 - DNA, 122 bp, Homo sapiens
aacgtccaggcattttgttgacttctattgttgttgttcactgtcagtaagttcagtcagcgaatatgtcattttttggtattacatgtaatagcttagaatattccattctattaggatcg

SEQ ID NO: 93385 - DNA, 122 bp, Homo sapiens
tacgtttgcaccaaccttacacaagggctttcaccaaactgaacaggaaagaaagcttcccgactggctttataccaggggctgctccaggcatgctggggactgtcctaggtgccgatggc

SEQ ID NO: 93386 - DNA, 122 bp, Homo sapiens
gccttcacaaatagaacttctccaagaaagtggcaaaggaactagtgatagcattctccacggtcacagctaagcatagaggggaggtgacacatttgtcaaagctgtgaagagggtccctg

SEQ ID NO: 93387 - DNA, 122 bp, Homo sapiens
tggagccaggcgtgtgggcaaaaactccaacaagaagaccagagcaaaacaaagaggacgcggctgctgtgggccaagactgaggtccgtctccgccctccaggggcacctgagctccaagg

SEQ ID NO: 93388 - DNA, 122 bp, Homo sapiens
agaaaacaaacccaccttttcagtcactacttgtcaaagtaaccatcaaggcagctgctccgggaaagacttcggccccaaaactcccacactctattattttttcacgttcccttcgctta

SEQ ID NO: 93389 - DNA, 122 bp, Homo sapiens
tccagccgctgctggacaacggcgagccgtgcatcgaggtggagtgcggcgccaaccgcgcgctgctctacgtgcgcaaactctgccagggcagcaagggcccgtccatccgccaccgcggc

SEQ ID NO: 93390 - DNA, 122 bp, Homo sapiens
tcgttgcggcaggtggtgttgagtgtgtattcgtgtggcccctcccttgtgtgtaagcctcgaaaatggataggtgaaaggagatacgcgccagggctgctccccggaaagatcacgtatgt

SEQ ID NO: 93391 - DNA, 122 bp, Homo sapiens
tataaacgttaagagctcatttctcttagaacatacagaaacagggcacttccacaccttcgattcattctccaagcttaaagagctttgccctaaaaccagatcctctcatacgatgggac

SEQ ID NO: 93392 - DNA, 122 bp, Homo sapiens
ctacccacaccggcgcgagcgcgtcatcccggtggccctgggcattcctaactgtcagagcgaatatttttgggaataacctctccaaaatgtgaagatgttcagtggtctcctccgcctcc

SEQ ID NO: 93393 - DNA, 122 bp, Homo sapiens
tgggagaccccacaactatactggaggtgtctgaaacataatgaaagggaaaggtgtctgcggtctttgtagccagtgagcactgtatgaagctgtatggtcttaaacacaattgctacctc

SEQ ID NO: 93394 - DNA, 122 bp, Homo sapiens
cgggccccgccgccccagcagggggcagcagcgacgcagacaggaagcccaggtcctgggcgctggacacctcggcggcctccgcgaccaatgagcgccacaccaacctccaggcggcgctc

SEQ ID NO: 93395 - DNA, 122 bp, Homo sapiens
gcgtggggttggactgggacgtgggactcggaccacggcctgggcgtgggcctaacgacgcgggaccggcccgccctcgccgctccattggccacatctgtgcagaaaaggccccgcggccc

SEQ ID NO: 93396 - DNA, 122 bp, Homo sapiens
tgacttaatgcacacgagccaaccataccccaacaaagcaggtactagccttatagtacacgtgaggaaactgaggaatgaggcatctcattcatgttgggaatattaattgaaaaacctgt

SEQ ID NO: 93397 - DNA, 122 bp, Homo sapiens
tctcgatcccttgacctcatgatccactcgcctcagcctcccaaagtgctggattacaggcgtgacccaccttgcctggcctgaattttctatgtatacagccatgttgacagccaataaca

SEQ ID NO: 93398 - DNA, 122 bp, Homo sapiens
agctcctccagcgccgcacgctctgccatcccggctgtccacttgagccgcctgctgtctcgacctgcggtggttgccccagcctcagcaaggatgacttccggctatcgagtcgctgggtc

SEQ ID NO: 93399 - DNA, 122 bp, Homo sapiens
atctgggtgacacgtgagcggattgtgctggaggaccgagtcatgctgtgagccgagccccgtgggtgtgctacgtgataggggaagactcctgtacgagaagcagcagggccgggggcatc

SEQ ID NO: 93400 - DNA, 122 bp, Homo sapiens
ttgacctcagacatcttgacgctcaaaccaggattctagcagttgagttattcagtttcacgttaatccacaggcagacgggacttttctttctctgtttcttcccttcctccctacccttt

SEQ ID NO: 93401 - DNA, 122 bp, Homo sapiens
actctttgggtccacactgcctttatgagccgtaacaggtctgcagtttcactcctgagccggcgagaccacgaacccaccagaaggaaaaaactccgaacacatccgaacatcagaaggaa

SEQ ID NO: 93402 - DNA, 122 bp, Homo sapiens
gccctggagcagctattttaagccatctcagattctgtctaaaggggttttttgggaagacgttttctttatcgccctgagaagatctaccccagggagaatctgagacatcttgcctactt

SEQ ID NO: 93403 - DNA, 122 bp, Homo sapiens
cattagctactgccctccagctcccttcagtgttgtttccgtaaaggacttataaactggcgagggcggtggcttccaaaagcgcacaggcgtcccttttccaacttggtcttcttattttc

SEQ ID NO: 93404 - DNA, 122 bp, Homo sapiens
aatgcttgctatgtgtctgacacacagtagatgttcaataaataactgcagagtggaaggcgagcctacctgtttatgcacgtgtatttgtatcccagttggcagctgatttgcccaggcag

SEQ ID NO: 93405 - DNA, 122 bp, Homo sapiens
ccactccgtgtggacagctccaggggggcaggcgtttactggaggagggatatctgagctcgaatggggcaaacgctgccctgattgtcgggatcagcagctccactgcttcttaccagcct

SEQ ID NO: 93406 - DNA, 122 bp, Homo sapiens
ccgcctccacccttgacttgaatcactgttggcgggggacggggcgtgacccattcatgccgggaatcggatccagatgttcccgcggcgtgtgcagctgcatccttgccttttttggcaaa

SEQ ID NO: 93407 - DNA, 122 bp, Homo sapiens
tttcataatttaaaagactggtatttaaaagagtcaaacactataaaatgagtaagttgacgatgttttaagattgcacctggcagtgtgcctttttgcacaaatatttacttttgcacttg

SEQ ID NO: 93408 - DNA, 122 bp, Homo sapiens
ggaggacgactggacagtgttggcatttaggttgcatgactgactcgctttgtgttcgtacgcaagtgatgtaatctctgaaattttcatagtctcagcacagggagggtttgatggatgac

SEQ ID NO: 93409 - DNA, 122 bp, Homo sapiens
tggggacgtgactcaggatgtgaaggaggatctcatcagagaaccctaggaggtggaccccgtctgccatcccggctgctgcagggtgcatgtcatcatcatcattggatatgtcctgaaaa

SEQ ID NO: 93410 - DNA, 122 bp, Homo sapiens
ccgtgctgtggccgccctgagcagcagcggctagcggctggctacggtgacggctccctgcgcatcttcagcgtctcccgcacggccatggagctcaagatgcacccccacccggtggcgct

SEQ ID NO: 93411 - DNA, 122 bp, Homo sapiens
tgaagttagtgaaacggtagcttagtttgctcccatctcctgttccgcgctgctggttttcgattgtgcgtcactgaattgccatcagaagtccagtcccgactgcgtgtgcgaggccaggg

SEQ ID NO: 93412 - DNA, 122 bp, Homo sapiens
ctgacaccgcgccccgggttcccaggccacctcctctgttctgaggctgggctgggagaccgtggggctgtgaggagcgcatagaaccgtggtggagggcgaggctgggccaccggctcttc

SEQ ID NO: 93413 - DNA, 122 bp, Homo sapiens
cgatgttggggtaatgggccctgggctgtcccctgtgaaaggcttgggctgcagcaggtgcgtgtctccccacatctcacacatctccagtgcctctcctaccagctcccagaccaagacct

SEQ ID NO: 93414 - DNA, 122 bp, Homo sapiens
gtgggggggtgggagggacacactgaaggctttgaatatgggcaggtataaatcctaaaacgtgattgagaatatgcttggagatagtttagacccatgagttcatttcccagacggtgaga

SEQ ID NO: 93415 - DNA, 122 bp, Homo sapiens
tccctgatttaggtttcttgaaatccagaagcccagactctgtaaggtgattcgtgtcctcgcctttgcttatccgtacacctgggactccctccccatcttctacagggtaaggactggct

SEQ ID NO: 93416 - DNA, 122 bp, Homo sapiens
atgggaagcctttgcgtgtggctgacacaaatggttgtcacacgccatctagtggccatccgtgaaactgtgcatatgccgtgggaaacgcttttggaacaagttggattgctccgaatttc

SEQ ID NO: 93417 - DNA, 122 bp, Homo sapiens
ggctgcgcccgcccccgccgggcttctaagctgtccagagcggggagcctcagacccagccgagccccacttctgggcttagagcttgacccaacacgttcgcaccgtagcgagcgaggtcc

SEQ ID NO: 93418 - DNA, 122 bp, Homo sapiens
agctgaagataagtctccaaatcgggctaagctgggagtggggacagcgagggggagggccgggaagcaatgaagtcagaggcacagcagcgactgcagctgaatcaatttggagataaaaa

SEQ ID NO: 93419 - DNA, 122 bp, Homo sapiens
acctcggaccccagaatacaccactgcaattgaattttggttccaccttaaggtaaactacgcagctgctgtgagcctcagtttccctacctatagaaagaggatcgtagtggggaattgtt

SEQ ID NO: 93420 - DNA, 122 bp, Homo sapiens
gctgagcagaaaaccaggaaatggatggactccacctccgcagccacgcctgcccgtttgcgcttactgaacagaggtcctcaggaacgtggtgagacaaagagaaaggagggcgttttcgc

SEQ ID NO: 93421 - DNA, 122 bp, Homo sapiens
agcaccatcgaggccctggccacctgccgggtgctgggtagtctggaagagtctggagcccggtctccgcctccaggcgccccaccctggacccctcctccacgcgggtcccgccccacggt

SEQ ID NO: 93422 - DNA, 122 bp, Homo sapiens
ccatcctctggatttgtgggcctgagagtgtgtgtgggtgtgggtgcgcgcgtgcgcgcgcgtgcttttgagaaggcatatgctgggtgtgtctgtctgtgcctatatctttgtttgggtct

SEQ ID NO: 93423 - DNA, 122 bp, Homo sapiens
aattggctgtttcgaggaacgcgccaaaaactgccaagggctgtgggaggtgtgttcttgcgtcatttccgagagacttccgcgccgcagtttccctgcttccccagctccagaacttccgg

SEQ ID NO: 93424 - DNA, 122 bp, Homo sapiens
ccaggccccctcctccgcaccggggccctaagagggaggccaggtggcctggagccctggcgagcggcacgggctcagggccaccccccacacccccgacaccttctccacctcaggcccgt

SEQ ID NO: 93425 - DNA, 122 bp, Homo sapiens
ttgatgcagaagtgagtgaagcactgcctctcacctcaggtcaaacaggagaatcaggcacgtgataattgacaaataccatgcaatgttgagtggattataatggagatgcgaaaggcatg

SEQ ID NO: 93426 - DNA, 122 bp, Homo sapiens
cagcaaccccctcccccaggatctggagctggacctggggggctggaggcaccctgttgccgcagcaaggagaggtggggtgcgcttcatctcagctgccccagggctgagctcagctttgc

SEQ ID NO: 93427 - DNA, 122 bp, Homo sapiens
tctcacctggataggttccttaattttggacaggtttaactggaggagaaaattgctggccgtttgggtcatgtcaggcacagagctcacagtgctgagtcacctgttttagtgtcttgaaa

SEQ ID NO: 93428 - DNA, 122 bp, Homo sapiens
caaaatcgcactttcaaacgtaaaacgcaattccaagaagactgggatgtagggagtatgcgatgcctctgttcaataggtcactgtcaggaacttcagtttctggtgttcagatatttgta

SEQ ID NO: 93429 - DNA, 122 bp, Homo sapiens
cctcactgtgactcaactgtttcctcgctatcttggccacctctggacctatggcagcttcgatatccgccgggtccacgtcgtcaaaccacatgtcttcctcggtgggtggggcagggtct

SEQ ID NO: 93430 - DNA, 122 bp, Homo sapiens
tgggaagcgccttgctattattgaagccaacaacaccctctttcttacagaggtgggagccggaagtccagagtgctggagcaacttagcgcagcttacaggaccaaggtcctgtagccttg

SEQ ID NO: 93431 - DNA, 122 bp, Homo sapiens
agccaggccaggccagtcagaggtatgagcagccagacagagccttccagatagaggctccgaggggtgggggacaatgggagagagggagagaggcaaggagcaaggttccggggtgctga

SEQ ID NO: 93432 - DNA, 122 bp, Homo sapiens
tgaagcaggtgactggaacagttccaggtccctgctgttctggggtgtcagcatcagctccgttcaggggtgacagacagcaaggccccagccgggagaggccaaggggacgggagtgagag

SEQ ID NO: 93433 - DNA, 122 bp, Homo sapiens
cagttgccaacattccagaatcatgagagttcacataagaatctagactcccaggccaggcgagatggctcccacctataataccaggactttaggaagctgaggcagaaggattgcttgag

SEQ ID NO: 93434 - DNA, 122 bp, Homo sapiens
ggggaaaggatttgccccatggacacactgggcatgagtattaatataggtccatcagggcgtctctcctgatctctctccctgacttatctctttccattaaccaacagaaatggttgtgg

SEQ ID NO: 93435 - DNA, 122 bp, Homo sapiens
tccagagaataagtattttaggctttaggggacatactttatgccaactccaactccaaccgtgctattatagatgaaatgcagccatagacaacacacaagggaatgggtgtggttgtgtt

SEQ ID NO: 93436 - DNA, 122 bp, Homo sapiens
ggcttgaattctttaggaattgggcccgagagggctaggatttttgaaggattgggtgaccggcactggaagttgattttcaactccgaggaagagattcaccgttctaagcttctttccag

SEQ ID NO: 93437 - DNA, 122 bp, Homo sapiens
acggcaaggattacatcgccctgaacgaggacctgcgctcctggaccgccgcggataccgcggctcagattacccagcgcaagtatgaggcggccaatgtggctgagcaaaggagagcctac

SEQ ID NO: 93438 - DNA, 122 bp, Homo sapiens
tcctctttccattttaacagcccttactgggcttcacgaccaaattgatgccagcataagcgtggctgcctctgaatgtgtaattgagaagcagcgtggacactgatgtctcagtattaatt

SEQ ID NO: 93439 - DNA, 122 bp, Homo sapiens
aaagtctggaagtcacaactagcccccagtgtgcagcatgtgaaaacagtgaggcagggccggctctttttctttctctgtttatgcaaatacctggctcagcttctgtggggttaatgggc

SEQ ID NO: 93440 - DNA, 122 bp, Homo sapiens
tgtgtagcacccggtagggcagctgagctgggggcactgggcggtggggctagtgagagccgggctaggtcgctcgcctgcgtcctggactctcgagcctttcccgccttgggctgctcctt

SEQ ID NO: 93441 - DNA, 122 bp, Homo sapiens
ggctccgctggctccgcgcgcctgccgcgcctctgtcccttgcagctccgccgcccggcccggccgtcaggcccccgccccccgggccccgcccagccccgctggcctccccctccctcacc

SEQ ID NO: 93442 - DNA, 122 bp, Homo sapiens
gcccccagattccatcttggggagacaaatttgagtattgcctctggtttccctgctggtcgaccttacgataaagccttttctcaaaaggtgatgacatagtattggcttctatgtgcatc

SEQ ID NO: 93443 - DNA, 122 bp, Homo sapiens
gaaagatcgaagaatctggcagccagatctcaagagctggcggggttggagtggtctgtccgggagaggtctggaggttgctggggccggaaggggttaaaattcgactgggaagagggtgt

SEQ ID NO: 93444 - DNA, 122 bp, Homo sapiens
ccatggggcgctgggtgctgggggcgccgtctgtatcctctgcctggtaactgcccccatcgcgccccactgcgccccagcccaggctggaaaactgggccaacagggaggcttggatgggg

SEQ ID NO: 93445 - DNA, 122 bp, Homo sapiens
ggagggtgtaggggtgggggagcagttttcaagtcaggaaattgcaaaagttccagcgtccgcagccaaaggctcagtgtggaaaatttcaggctccaagcagggttccagaggaggaggaa

SEQ ID NO: 93446 - DNA, 122 bp, Homo sapiens
taatacacttcccagactttgaaaaataatcatgagttcacttcccggctcgcagcacatcgtggcggccctgccgggaggagcgaggaaacgagtggaaacccgaaagtgtgctcatggaa

SEQ ID NO: 93447 - DNA, 122 bp, Homo sapiens
tcagtgtccacgctgtgaagcccgggcaatccaaacagtgagccgtggtttatggaccatcgaggtggtcgctctgcagttctctgagctctctgtgtgcagagctctcactctgttcatct

SEQ ID NO: 93448 - DNA, 122 bp, Homo sapiens
tctgtaccagaccggaagcggtatgtcttcactgcaagaggaattttattttgctcccctcggcgggtggcagcttgattgtagtcatccagtgaactgaaaatgcgattttaagtatattt

SEQ ID NO: 93449 - DNA, 122 bp, Homo sapiens
tttaggattttatttttatttctaggattcaaaccaaccagtctggccccaaagtttatgcgcttaaccacaacactagaatgaattagttaattaacaaacaaaaaatgtcacgtctgtca

SEQ ID NO: 93450 - DNA, 122 bp, Homo sapiens
gcacctcgtggccacagccaatggctcgggtctgagtcctgtccgcacagaggacagtcccgtatgtcatgacatgagaacagacatgatgagtgtgaagccagccctgggtgagcaagggg

SEQ ID NO: 93451 - DNA, 122 bp, Homo sapiens
attctggaaaagaaaatagctaacaagtatgtcgggctgcaataatgcattacttccccacgtgcggccaccacccccgaaacaggaggaggcccgactccccaccgagggtcgcccctggc

SEQ ID NO: 93452 - DNA, 122 bp, Homo sapiens
gtttcctccaagagacagtgtgatccaacaagaaagattttttttgttattctttctccccgtggaccagcacagtgcctagtaaaaaaataattatctgcataattaacatgtttgaatga

SEQ ID NO: 93453 - DNA, 122 bp, Homo sapiens
cactgagccgatgtttctttagccaaaggcagtgggctagtttagacggcctttcattcccggcagcgcctgtgggtgcgtgtgacctgggacagaggggcaaaggaacctggcagagcgag

SEQ ID NO: 93454 - DNA, 122 bp, Homo sapiens
aaaggggtgacggacggcacctggaaaatcgggtcactcccacctgaatactgcgcttttcggacgggcttaaaaaacggcgcaccacaagattatatcccgcacctggctcggagggtcct

SEQ ID NO: 93455 - DNA, 122 bp, Homo sapiens
atgctgtgctgcagctccaggagggcgatgtccccgctaaagttatgggactcattctgacggtagtcggggtgcacaacgacacggtggacagggtggttccccagtttcagcatctcatc

SEQ ID NO: 93456 - DNA, 122 bp, Homo sapiens
ccggggtttgggcctttgcttcagatctcactattcacagacacatgaaccccgggcaggcgagtgggaggcggacaggggagcggttcttccggcccccacccgtggcgatcccagcctcc

SEQ ID NO: 93457 - DNA, 122 bp, Homo sapiens
ttccttctggcatgaattttctcgtggttttgcagcctggtcggcgggacccgaggaacgcgggcgggcggcgcggctgctaggctggggccctcctgtcagcagctggttccatgtgaatc

SEQ ID NO: 93458 - DNA, 122 bp, Homo sapiens
ggcggggcgccgggagggggctctggctctgtaaatcggccctttcaccactggaggccgcgcacgaaagaaaaactttgttttattaaagcaacatcagggctgtggccgccggccgagag

SEQ ID NO: 93459 - DNA, 122 bp, Homo sapiens
ccctattggcaaactctcctgcttcctgtccgcgagcaccacaccgggctcccgaggctgcgccgttccgtactgggcggttttgcccgttccgcatcttcagaggctttgttcaggaagca

SEQ ID NO: 93460 - DNA, 122 bp, Homo sapiens
attctggaccttgctcgccccccggtatggcgggcattcctctgcagtgataaaaccaagcgaaatctcagcagcccaggcagccaccggcaggggagtgcggaggtcacacagatactaac

SEQ ID NO: 93461 - DNA, 122 bp, Homo sapiens
ccctacggagcctgatgggtacactcaaaacccggaaactggataacttgctaagaagcccgatgtcattgagctgcgcaactaggcgtgcgcagagtcgcacacatgctcacttaggtatc

SEQ ID NO: 93462 - DNA, 122 bp, Homo sapiens
cctgggaactcggttccgtaaacctgacaccctcgtgggaggagcgcgccccgcagggcccgcccccgggcatgtggtctctccgctgccagggcgccccctgcctagaggtgaactgcacg

SEQ ID NO: 93463 - DNA, 122 bp, Homo sapiens
gagacttctgttgggcttgcttttcctgggccagtgtccatcagccaggtgctcagccatcggtgcgctgaagctccagcccttcctggtgccctgatctcctgcactgagctgtgatgagt

SEQ ID NO: 93464 - DNA, 122 bp, Homo sapiens
gaatccgggaggcctctgctgggatcttgtcagggcgctagagctgcctttgctccaaggcgaggcgccggcggcagggcagggccgggcccctggagcaccgtatgtagcagtgtgcgagc

SEQ ID NO: 93465 - DNA, 122 bp, Homo sapiens
ttgtaggagcctgaaacttctacattagcagttgagtctatgaaacatgaattacaactgcgtcttaacaccagacatgtgtataaactgggaagataggttaattctggtgcttacagtca

SEQ ID NO: 93466 - DNA, 122 bp, Homo sapiens
ggcagggcggtggcgccttcctgacctttggaagacatgacaaagctgcctggacacggacgcccctgctgtacggccacagcacccctgggtttgcagagcacgcagccttcctagggctt

SEQ ID NO: 93467 - DNA, 122 bp, Homo sapiens
cacgcgccatgatgggaaggtcggtcgccatgttgggaaggtctgcacttggcctttggtcggccatgatgaggcggtctgacgtggctcttagagccgccatggtgggaaggtccaagggg

SEQ ID NO: 93468 - DNA, 122 bp, Homo sapiens
cactcaggctctccgatggggtaaggataaacgtattaacatttacactgacagcaggtacgcctttgctactgtgcatgtacatggagccatctaccagaagcgtgggctactcacctcag

SEQ ID NO: 93469 - DNA, 122 bp, Homo sapiens
cccctcccctctggcccgggcctggaacactgggtgcccgagccaggcttgggaagcctgcggcctggcccgcctggcgccgccactggacacactgcatgcacgtcccatgcccgcccgcc

SEQ ID NO: 93470 - DNA, 122 bp, Homo sapiens
gtgcggagaggggcggggaggcggggacgtgcaaaggaacgtgacgtgacgtcagcgcgtcgccctgccgccctcagcccactggtacctggaaggagtcttattcagggattaggttaccc

SEQ ID NO: 93471 - DNA, 122 bp, Homo sapiens
acaggtgagggatggaagggggtggcggggagaaagcccccagacggcggatcgtctgcgcggggttcctgccccaggcctggcgaacctctgagcgctcaaggagcacggcggcagtgcgc

SEQ ID NO: 93472 - DNA, 122 bp, Homo sapiens
gccattgcgctccttagaagcagccacagccttggtgatcagctctgagactgggggccccgtcgctttgcgcttagcagcgccggcgccggcagccttcttagttgccttcttcttagccg

SEQ ID NO: 93473 - DNA, 122 bp, Homo sapiens
ctgagtccagaaagagtgggtaccttgcctatcactcactgggtcaggaccagagccgagcggcagccacgccgactccaggtttccacttgagggaggcctgccctgtgtttgaagcttcg

SEQ ID NO: 93474 - DNA, 122 bp, Homo sapiens
ccacccaagaacagggacgctgaaccctgacactcacatcttgtctatgagggcaaggcacgcactgatccaggtgctcacagcttcgtggtttaggccccatggcctacagtcctttatta

SEQ ID NO: 93475 - DNA, 122 bp, Homo sapiens
gagaattctgggagatgtagtataaccgtcctcagccataagcctgtcccatcgagacgtcgggacaccgaaaactaccattcccgccggcaaagcggctccggcctctcagcacacttccc

SEQ ID NO: 93476 - DNA, 122 bp, Homo sapiens
tctttaagataacagccagcaaaaacaatttagtattcattgtccacatcattcaagcaccgctgagtcctaccgtacacttcctccaagtcacccttctgaaaccctaggaacaacacttg

SEQ ID NO: 93477 - DNA, 122 bp, Homo sapiens
ggatagaaatgtgaggatgcccagataggaggtctgactctggctactcaggaagtgacccgggggctggagaggagtaggagcaacctgggaactgtatgctccactaagtggctccttca

SEQ ID NO: 93478 - DNA, 122 bp, Homo sapiens
agtccaagactttatatatatatatatttaagtatacacacacacatattttttaaaatgcgtactgaaatatattttgacaaaggagactcgggtctctagtaagacaattagtgaaatga

SEQ ID NO: 93479 - DNA, 122 bp, Homo sapiens
tatcccagtacatctgggaaaagacacatgaaacaagaataagaatgtttacagataatacgacagcatggccagctcccacagcatgtcctctgtaaaggctttcttccatcagaatgaac

SEQ ID NO: 93480 - DNA, 122 bp, Homo sapiens
gcccctctgctccggctcggggcgggcactggcggagggactggccagtcccctcctccgcgccggccccaaccctgtcgctgccgccgcgctccgagtccccattcccgagctgccgctgt

SEQ ID NO: 93481 - DNA, 122 bp, Homo sapiens
tgtaatcagtttaactgtttgtgtccaaggttcagaagaacacactatcatcttcacaaccgagcaatgactctattccacaattttaggaactacatattgataagaatcaagacctttcc

SEQ ID NO: 93482 - DNA, 122 bp, Homo sapiens
ttcccatttactgtatttaatatggtcataataacttcagggtcttagaaatatgacaatcgtattcagattgaggggaaaaaaggccaatttcataagcccgggacgaccagtggatgcag

SEQ ID NO: 93483 - DNA, 122 bp, Homo sapiens
tttagggggtctggtgcctggctccgccaaaaatggggactttcgggattgtgatcatcacggcggattgagcagggagagccgtggagggacaagagagggccgaggcagggtggggggcg

SEQ ID NO: 93484 - DNA, 122 bp, Homo sapiens
gcggcggcctcgggagtccctctcccaggcagtttcctcttttgcagaacaaggtaatgacgcccacctagagtcccagtctgtgagtcctggtgggtgccagggcccccggcacagcaccc

SEQ ID NO: 93485 - DNA, 122 bp, Homo sapiens
cctccttccctcttgaccccctaggtttgattgccctttccccgaaacaactatcatgagcgcgaggctgccggtgttgtctccacctcggtggccgcggctgttgctgctgtcgctgctcc

SEQ ID NO: 93486 - DNA, 122 bp, Homo sapiens
cgggcgactgcgccgggcggggcagggcggggaggttccggtgcctgagccaatcggagccgcgccccggggaaccgcagccaatcgccaaggagagaggagaggggcgtggccgcagggct

SEQ ID NO: 93487 - DNA, 122 bp, Homo sapiens
gggaggggcctggagtcttgcctggggcatcacttttgcaaatttattttgtgcgggcctcggtttctctggcagcgattccaatggaagccagcttcaagccttggaacaccggcatttcc

SEQ ID NO: 93488 - DNA, 122 bp, Homo sapiens
tcctcctcagccccgcgccccatccagcccaggcgaggccttcgaagcccgtgatagcctcggaaggggtccctggcaggggctcagaactactgtagagtacttaaagtaaataagtagaa

SEQ ID NO: 93489 - DNA, 122 bp, Homo sapiens
ctgcctggcctggaactccgatctgctctaccaggagctgcacgtggactccgtgggcgccgcggccctgctgggcctgggcccccatgcctactgccggtcagcaccacgccgctccaggc

SEQ ID NO: 93490 - DNA, 122 bp, Homo sapiens
gtcaactgctgagaagaaacactggggtttccctttctggttgtgggctaagcaaaagttcgccctctgcactatgggctctctctgcatttgagtcacagaaaatcagtgagcaaaaaggc

SEQ ID NO: 93491 - DNA, 122 bp, Homo sapiens
taaactttactaaaagtgccgtttccatctggcctctttaagggctgccaccctgcctagcgttcgataccagaacaacaggcagtgggcggccctgggtgggcgagcgagcgtgtccgggg

SEQ ID NO: 93492 - DNA, 122 bp, Homo sapiens
cttgcagtcaccgctctattctgaagggcttttcagttcatccatgcctaccgacactcccgtcccccccatcaaagtccacgtttaattttttgtacctgctttaaaacagcgattctcaa

SEQ ID NO: 93493 - DNA, 122 bp, Homo sapiens
tgagggaggaaaaggaaaatggcaccgaagttgtttttatgtcgccgcaacagtgacacccgccgccagcttgtcttgacagcggagatcccgaacgcactgcaatttacagctccaggggg

SEQ ID NO: 93494 - DNA, 122 bp, Homo sapiens
tttgagcaacaaaacaaagaatgatattggcagattaccactgagtgagcaaaatagaaacgcatgagttgagtccacactgatgtagatcaacaaaccagtgatgaatgcagggaaaataa

SEQ ID NO: 93495 - DNA, 122 bp, Homo sapiens
ttttatatgtttggaaggaaggagaaaatacttgtaaaaaagcacttctggagatgactacgtggaaatgatcaggatgtagatcaaagtaacagttttgaattatttgggtttggtttgcc

SEQ ID NO: 93496 - DNA, 122 bp, Homo sapiens
gggcgtggcaagaccttggcgaggcggccggtaggcagggggcggggcgtgggaactactcgggagcagagggggcgtggctagaccttagggggcgtggtttaacgccgggagcgaaggag

SEQ ID NO: 93497 - DNA, 122 bp, Homo sapiens
gccaccaggtggtgtgggcatttacctttggctagctctgagctcaccgcagcatggtagcgggagcgcagctgcgcgggcaaccgccgggtttgtggccggttggcgggctcagtgccgcc

SEQ ID NO: 93498 - DNA, 122 bp, Homo sapiens
attaaatctctatcccagaatccacagtttaatatatcttaaatgagtaagtgggaagtacgcataaggtatttctactacattccaaattaggatgtttgaggccaggcgcagtggctccc

SEQ ID NO: 93499 - DNA, 122 bp, Homo sapiens
ctcttcagcgtctgctgccgggaagtcactctcagatgtgtgagggtgacccagcaaggccgggttccgcctcggcaggtgtgatgcttccacgagcctcccggcacctgctccttggtggt

SEQ ID NO: 93500 - DNA, 122 bp, Homo sapiens
atttagcccattaggatgaaaatgtaacatgtattcaacatttacaaataacaggctgggcgtggtggttcacgcctgtaatcctagcactttgggagcctgaggttggtggatcacctgaa

SEQ ID NO: 93501 - DNA, 122 bp, Homo sapiens
ggtcggccgcgcagaggtggcgtctcaggacttcctgtggcgtcacacagatgggaagaccgaggcccgggagtggactcccggggctcctcggcgcagagctgcagccgcgcttctcgcac

SEQ ID NO: 93502 - DNA, 122 bp, Homo sapiens
ttaagcagtcctccagcctcagccttctcaaagtgctaggatgattggcatgagccacctcgtctggcctgcaggtctttttaagcatttgctgttcaataataagcatcttctttatgcct

SEQ ID NO: 93503 - DNA, 122 bp, Homo sapiens
ggtgtaattatttggttataagtagcatttacatatgcttgaaaacttgtgctatatatacggtaagattaatttattctagcaatgatcttgataatccccctgattcccagactccttgg

SEQ ID NO: 93504 - DNA, 122 bp, Homo sapiens
ctgaggacacttcagcctggggaggacgcagtcagagcagtgaagcaacttcacatgggacgggccttttatggcctgaactcgagagccttgataccagctcatctaccagaaatagccct

SEQ ID NO: 93505 - DNA, 122 bp, Homo sapiens
gcaagtctggaaaggccacgttgtggaccttggcgcagaggttatgggggcgacccggagcggatggtttcaggaaaactagaacccaccctcatggcctgaacaactggagagaagaggat

SEQ ID NO: 93506 - DNA, 122 bp, Homo sapiens
aactttttgttgcacacggggcagtcaaacggccgcagattgaggtgcatgttcacgtgccggtcccgcatgctcttgtgggagaaggccttcccacaatggcacagaaagatcttattccc

SEQ ID NO: 93507 - DNA, 122 bp, Homo sapiens
cttcggggactggattgacagtatcctggccttctcaaggtccctgcacagcttgcttgtcgatgtccctgccttcgcctgcctctctgcccttgtcctcatcaccggtgagtgaccagcac

SEQ ID NO: 93508 - DNA, 122 bp, Homo sapiens
ccgcagccaacagggaggaggttcagcaaccggccctggggcgggcaggggaaagaaaggcgcttggccagcgccacctggtaggagccactccggggcagagatgacaaggtccggagcag

SEQ ID NO: 93509 - DNA, 122 bp, Homo sapiens
ctcccaaccagcttgtgcttgatgctgaaactgtgtgcttacccaagctggtgcaggggacgtggggtccctctggcagctcacagagcctctacgaaatctgtgtgtgtccagatgggaag

SEQ ID NO: 93510 - DNA, 122 bp, Homo sapiens
tcgtcgctgctgccaccgccggtagtcgccgtggccgctgcgccccctgcccaggcggcccgtcgcgccccaggccatccctgccattattaacttctgtttgattagggtaattgttcaaa

SEQ ID NO: 93511 - DNA, 122 bp, Homo sapiens
ctctccactgctggtcagtcagtgccccccttctgcttggccagggtgtgcttcagctcccgcagattctctgtcagcacctctacctcatccaggcggccgcactgcttggcatcaaagat

SEQ ID NO: 93512 - DNA, 122 bp, Homo sapiens
cgtgtctgctctgggcccttcttcgggggagcagcctgccagggcccccaggatgagtaccggcagtgcggcacccagcggtgtcccggtgaggcccctcctacctgggctgggctctgggg

SEQ ID NO: 93513 - DNA, 122 bp, Homo sapiens
gttagcgttgcagctccttagacgagtaggctaaccacagcccacccgcctttcttccagcgatgcaacgatctgttcgccgctcaatgccgcatgctgttcaaagcccagaggctggagtg

SEQ ID NO: 93514 - DNA, 122 bp, Homo sapiens
cctgctgcaacctgctcaccctgtctgggttcactggtgtcctggcaacagcgtgggtgccggggcaggcatctggagatggagtcggcagagagcatggctctgggctccgcagacccggc

SEQ ID NO: 93515 - DNA, 122 bp, Homo sapiens
ccctgttttgttatctttgaactccacaaggccgtgtttttgaaatttaaatgtctcaaacgttttcttacactctacccaaagacagaagcttcctgttgtccttgctcacttaattcttt

SEQ ID NO: 93516 - DNA, 122 bp, Homo sapiens
ctgtgtaggtagaaagtgttgttggtgcttacaaatttaatggacttagtacagggaatgcgcaagaaagtattgtaactgtgtgattcaatgttctacttttgaggagtgtaatcactttt

SEQ ID NO: 93517 - DNA, 122 bp, Homo sapiens
tgcctgcctccccccctcctcctggggcagctgggacaggggacccctgtttgaagacagcggggacaacggcccgggaggcagctgaattgcccattgtgaggcccttcttccttggcact

SEQ ID NO: 93518 - DNA, 122 bp, Homo sapiens
tgtggtggcgcgtgcctggagtcctagctatttgggacgctgaggccgaggcaggggaatcgcttgaacccgggaggcggaggttgcagtgaggccagattgcaccgctgcactccagcctg

SEQ ID NO: 93519 - DNA, 122 bp, Homo sapiens
ggaagccccgcgcgtaccagactcctcgtccttcttgtcgaattttttaatcatcttggacgacttcccagcgcccagacccaccgcaaccgtcccaggcgccgcagccggcgagcggaaga

SEQ ID NO: 93520 - DNA, 122 bp, Homo sapiens
ccccaacactgctccccgacactctccgaggcacccctcctccgtgctcacacccaaacacgtctgctcacccgtgggcttcccaccccgaacacaacgaggactgtccaggtgtcagtgac

SEQ ID NO: 93521 - DNA, 122 bp, Homo sapiens
tgcgaggcctccccaagccagctccacaggtgccagccccgtcagtgtgtgctgagcttgcgggtggtgccgaggccccttcttgggtgaatgcagcctcaggtctctcggccctcgggtcc

SEQ ID NO: 93522 - DNA, 122 bp, Homo sapiens
ataaggctatattccatcagtgctcccataatcccggggcaagggagcccctgttaaaaccggaaacaaatgcttcgtgtgtttgagctaatgaggtaccaacttttaccctatgacaattg

SEQ ID NO: 93523 - DNA, 122 bp, Homo sapiens
ggaactgcgtagaggtgacggcggcgcaggcgcagtttagaactgcggagaggtgatggccgcgcaggcgcagtttggaactgcgtagaggtgatggccgcacaacatgtgatgcattcagt

SEQ ID NO: 93524 - DNA, 122 bp, Homo sapiens
tccacttggccttgacttgtcttttcggatatttatcacacggtggagacccattgtgtccgggagtggaaatcagggaggcaggacgttagtggtgtttcctgaaactggttctttaaagg

SEQ ID NO: 93525 - DNA, 122 bp, Homo sapiens
cagaataacaactcaccagggactcaaggccggaaggtcattctgtcccctccaatactgcgcagccttccagagcactcccagggcccggggcaaggacagggaaaccgaggatggagacc

SEQ ID NO: 93526 - DNA, 122 bp, Homo sapiens
cttgttgctccctagccgcttgctcgtgcccttggtggttaccggtagttaagcttagggcgcatagggccctcgtggctcgccacctctcacggttcagtacccacgcttcgaacgaggga

SEQ ID NO: 93527 - DNA, 122 bp, Homo sapiens
gacgtggaaatgcattttagaactgataaaaatacagtattactattaggtgctagaggccgattctggattttcagtatgctcaggttactctggctcatgaaggtttagtttaaaaccca

SEQ ID NO: 93528 - DNA, 122 bp, Homo sapiens
gacgactgggaccgggacctgctgctggacccggcctgggagaagcagcagcgcaaggtgcgcggcccgcgggccggacgggctggaggggcttttctgagggggcccggggaggggtggga

SEQ ID NO: 93529 - DNA, 122 bp, Homo sapiens
tcaagagtttgggggtcaagtcacagcccctaccaccctctgctgtggctccagggcagccgggaagaaaggcgctcatcttccctgagcctccctgcactgtccccgcgaactttattccc

SEQ ID NO: 93530 - DNA, 122 bp, Homo sapiens
agttgggatcagcccagagagggaggtatgggaggaggaggcataagggtacagccccagcggcaataggaactgggaactcagcgtccaaatgcttccctaaccacatctattttcccatg

SEQ ID NO: 93531 - DNA, 122 bp, Homo sapiens
tacattctcgcagggcagggtgtctggtgaacagaagagtccaacacaaaggtcgcaaaccggtgggcatggcggcatccagcccacagatgtgttttgtttggccttctctgtcgtttttt

SEQ ID NO: 93532 - DNA, 122 bp, Homo sapiens
agctaagactttagtaagccccaggaaagtcataaatttgctttacctcagttattctttcggcaaaatgggaatggcattagacttttgttgaaggcacctggaagatgaaaactgccaag

SEQ ID NO: 93533 - DNA, 122 bp, Homo sapiens
tgagaaaaactgaactagatggctatgaactttcagggtccctacctagtacacaggcagcgcctagaattgctaagttcatcttccgtttggaaaggcagcatggggttagtgagaggaag

SEQ ID NO: 93534 - DNA, 122 bp, Homo sapiens
ctcagagaaagggaagacaggggagaggcagagggagagagatatagggaaaagactaaccgtcaataggaaatccttcagtgaggcaaaagcttgagcgacatctaccctaacccaaaggt

SEQ ID NO: 93535 - DNA, 122 bp, Homo sapiens
ggaggaggctggggatcgcagtgccggtgctgcattcagaaaagactcagccgcagccggcgatgtgtgaagttcccagcacgcactcagcccggctgctcctcaccctcaaatgttgatga

SEQ ID NO: 93536 - DNA, 122 bp, Homo sapiens
tgaatttaaacacaggctacatgcccttgcctgcagacatggagaccttccaaaattgagcgtccaactgaattccaagagattaaaccagacttcatgggacaggatgcaccagactagac

SEQ ID NO: 93537 - DNA, 122 bp, Homo sapiens
agcttccgacaacaggaccacttgccaaagctgcctttaaacaggcaccacccaacccatcgggctctgtctgtccttaggaagccccaaggcttcccttggcagaaaagtgaagggacttg

SEQ ID NO: 93538 - DNA, 122 bp, Homo sapiens
tgacctgggggtctcatgcaagacatctaaagcttcagactgagccccattggtcttaaccggggtaacagtttgcttagaccgtctgggctgaagtagttttgaattctgtctgtgatatt

SEQ ID NO: 93539 - DNA, 122 bp, Homo sapiens
ctagattcgaatagttaaaaatccaggtgatcaaaggcggagcagcgtcttccaagagcccggagagagaggacaccccactcctggacgttatattctgcagcccgctgctgggaaatccc

SEQ ID NO: 93540 - DNA, 122 bp, Homo sapiens
ctcgaggctggccggcccagcctcctatcagcttgacctctccagcggcaactgtcacttcgtcctgaaagtttgttttccgaaccattccggaaactccccatcaggggcctgatctgagg

SEQ ID NO: 93541 - DNA, 122 bp, Homo sapiens
gcaacgacgaagtgattataaagcctccgccccgcgcgccgctgccctgcgcaggcgcttcgctcaaacacctcacaacccttgcgccccggtctaggagtgcgctgggcagggccgagcgg

SEQ ID NO: 93542 - DNA, 122 bp, Homo sapiens
agcccgaagtgcccagactggcacttaaagagtgaagaaaggcagcagaggggtgagcgccgggccccgcactcctgggggagcagcagcagcaagggctctgccttacctgacgctgtagg

SEQ ID NO: 93543 - DNA, 122 bp, Homo sapiens
cagcttctggggagacgtcaaggagcttttactcatggcagaaggcaaagtgggagcaggcgtgtcacacagtgagagcaaaagtgggaacaaggcagggagaggtgccacgctctttccaa

SEQ ID NO: 93544 - DNA, 122 bp, Homo sapiens
caatgcggaactggggcaggttgtcctccaggagataggtgatacgagcattctcacccacgtcatcatcagaggcactgatgaccactatggtgctacccattggccgatcttcattcaca

SEQ ID NO: 93545 - DNA, 122 bp, Homo sapiens
cgcggccatcagatcgcacatcaagaaggtcctaatgtctgcagccatcagatcgcacagcgagaaggccctaatgtccgcggccatcagatcgcacagcgagaaagccctaacgtctgcgg

SEQ ID NO: 93546 - DNA, 122 bp, Homo sapiens
tttcccctgagcagcgcctggaacctaacccttcccactctgtcaccttctcgatcccgccggcgctttagagccgcagtccagtcttggatccttcagagcctcagccactagctgcgatg

SEQ ID NO: 93547 - DNA, 122 bp, Homo sapiens
cgcgtcagcctaaaaccgggatccacccaagctgccccgctcaggattaaccacgcaagacgccgctgcctgggactggcatgggaaatgtttccttccgtgactggaaaactctgttcctt

SEQ ID NO: 93548 - DNA, 122 bp, Homo sapiens
tctctgttacatgggctcagtgacacgcatgcttggcgtcggttcagtcccagaaagacgcgctgccctctgtctgggcaccgtccctggcagagctgtccgtccggagggcagctgttggc

SEQ ID NO: 93549 - DNA, 122 bp, Homo sapiens
gctggcgttccgtcattgcttcctgagctgccccactgagagacacgccggggattcccacggcctctcacctctggcaagacaggacaggttcactatttgattatctcagcatttcacat

SEQ ID NO: 93550 - DNA, 122 bp, Homo sapiens
tttgtgaatagaaataacatcttgttcctaactgacttcagagtcagacgactggcttcacgagggcccggtgtgcagacagcctgccagggcctgcgggctctccccacgtgctgtgcccc

SEQ ID NO: 93551 - DNA, 122 bp, Homo sapiens
atgtccatcactccgcatactaacatctgtgaaaacatttaaaatctatgcttggctgggcgtggtggctcatgcctgtaaccccagcaactttgagaggctgagatgggcggatcaccaga

SEQ ID NO: 93552 - DNA, 122 bp, Homo sapiens
ttagatcaccaataaatagcatgggttcccagaactccgggccttcgcagcctccacactcgcgatggcgccccgctcccattttctctctcaaactgtctctttctcattcctttgactcc

SEQ ID NO: 93553 - DNA, 122 bp, Homo sapiens
ccccacccggctgtggcctccctctcgctgtgggcggtttcgtgggggagcgggggtgggcgcctgcgcccggtcccaccctttccacagcatttacgagggagggtttcagggccaattgg

SEQ ID NO: 93554 - DNA, 122 bp, Homo sapiens
ctcgcccctctcaccccccagaggcagctcccatgcatccaagcaaggcacccaggattccgggcttcaaaagaccaggcatggggcccataacaaatttcttgccataacaagacttctta

SEQ ID NO: 93555 - DNA, 122 bp, Homo sapiens
ccaaagcccatgcccccaaagttaccagtcctcctcccctgcagctgcagacgcagacgccgccatatcttcaccggcccgcagccggaaccggaaatgcccttagggaagtcggaggcgga

SEQ ID NO: 93556 - DNA, 122 bp, Homo sapiens
tcagtcctaatccaacgttcctattggtcagttcccaagcggttggagacaaagctcgcgcgcacattggacccgggtgggaggtggtaccgcaggccgcgttgaccggaaagtaggtccgt

SEQ ID NO: 93557 - DNA, 122 bp, Homo sapiens
tgttcacatgtctgcaagaagttctgctctattcatctttctttcctaggttcatcccaccggcagttctacccctgtcagaaatataatggctcacagttgcgaagctgccctgtgcttgt

SEQ ID NO: 93558 - DNA, 122 bp, Homo sapiens
cccacgtgctgggtataactttattgagactggccccgtggggccgaaagtatttcactgcgatctccctaagtatccacttgaaggcttgaacagaacagatctgtgtccctttttgtagg

SEQ ID NO: 93559 - DNA, 122 bp, Homo sapiens
gcctagcctatccggactgtgcgggaggcggacggggagcagagacacaataaaaattcccggtcaaacctcttcgcgcgtgctcctctgcagcattcttcccgctgatactgactacagca

SEQ ID NO: 93560 - DNA, 122 bp, Homo sapiens
accaaggagtccccgatgaagacgacttcgggttccttatctttgctgtcagccacgaaccgatggtgctgcgggagcgcgcgagagggagtcaatggcatgcacgctccagggcccgcccc

SEQ ID NO: 93561 - DNA, 122 bp, Homo sapiens
gagatggcccctcctccgagccttcctgtctgaggtgttcccgtccccagagcatcatcgcgctgtgtgaagagaagctgcagctcacatcctcctgtcgcgtgtgccggagcctctctgct

SEQ ID NO: 93562 - DNA, 122 bp, Homo sapiens
gacaaggcccttccaatatgtttacgttttcaaagaaatcaagtatatgaggagagcgagcgagcgtgagagaacacccgtgagagagacttgaaactgctgtcctttaaaaaaaaaaaaaa

SEQ ID NO: 93563 - DNA, 122 bp, Homo sapiens
tcatatgggtgtcatttggggccaagcttatctgatctgaaggacaggccccagggcttgcgttgttttttcgtcattgccaggcacctttgctgagtcatttggggttggcagacctggaa

SEQ ID NO: 93564 - DNA, 122 bp, Homo sapiens
cttctccaagagatggctattgccaaagtcatctgtgcagtgaccactgcagggcctgggcgctcccgggagccgcagcgcagggacagtccgtgcagacgggtggcgggggaggcggggga

SEQ ID NO: 93565 - DNA, 122 bp, Homo sapiens
cccagtgtttcaactgctcggggaatgcttcaattgctcggggaagacactttccccaggcgagggcaagatcaaacgccgatccgggcagtttgtggctggcagggtgtaagaggcatgga

SEQ ID NO: 93566 - DNA, 122 bp, Homo sapiens
gaggctgtagtgggaggcccagcggattgtgagaagccaggtattccaatgtcgggctctcgctgggggcttctggtgcttcttctgtctcactgacaagctttcataggggagcaggtggg

SEQ ID NO: 93567 - DNA, 122 bp, Homo sapiens
gcagccctgagttattctggggtcaggaacacagctggcgccgggtacaggggacgcagtcgactagaaggtcaaacaccctgcttagagcaagaggagaaattcgccactgggatgaagtg

SEQ ID NO: 93568 - DNA, 122 bp, Homo sapiens
cgcctgggtgttcccgtccccctttcctcgagccttccccctgtagggcccgggtggacgcggccgtcctggctgacctgtccctgcccccgcaagccgccctgggcatgagcgacttttgc

SEQ ID NO: 93569 - DNA, 122 bp, Homo sapiens
atacaggatatgtgcaaatgcttttattacaagctgagttgaaagacacccgtttgctctcgggtccttttggtgagcgccgcaggaagccgggctcctctctccccagaggcggccgcagg

SEQ ID NO: 93570 - DNA, 122 bp, Homo sapiens
ccatctaaagaaatacataaaaaatcaagcatttgtggcccatactcttcctgccatgcccgttggtctctacctcatggctcacatggcatgtaatagcgagtcagtgtttttgttttaca

SEQ ID NO: 93571 - DNA, 122 bp, Homo sapiens
tgaccccatcagcacccgctgatccttcttgaacttgataaccttggtgaaaacgccaagcgttggagaaattcaaggaatggctgttgtaatgtacatttcacgcttagcctttcctcccc

SEQ ID NO: 93572 - DNA, 122 bp, Homo sapiens
tgaacaccccgttgccggtgaagtgcaagcgcagggaggccggggaggaacttaaagccacgaagacactgacttaatgggctctaagtccttccagttctgggatcccacctccgggttaa

SEQ ID NO: 93573 - DNA, 122 bp, Homo sapiens
atcagccccccaactcccccccacattcatttctgattactctgaagcataaaccctccccggtagccacaagggtctcctcggtcaggggaatggattctccctggtcctaggggagcaca

SEQ ID NO: 93574 - DNA, 122 bp, Homo sapiens
cggggcggcctcggcaggtgaacccggccccggagggggcgtggcctgggaagggcctggcggaggccgggagggcgcttcgacgccgctggactcctgggccgcagcctgggccggactcc

SEQ ID NO: 93575 - DNA, 122 bp, Homo sapiens
gggctgcaaacggcagagcacgcggccctgtcccgggcaggctcggctccaggtggaacccgggacacgtgtacgtcctcagtggggcctccgcattccacactcgagcacatttgaacccc

SEQ ID NO: 93576 - DNA, 122 bp, Homo sapiens
ccagatgtggacttttcctaacgctctggcgtctctgggcttgggtcactggagtgggggcgggggcagcggctctgttcccagcttcccccaactaaatccttaaaggaccctaggttgtt

SEQ ID NO: 93577 - DNA, 122 bp, Homo sapiens
acgaacatgggggcgtggtttgaggcgcaggtggtcagggtgacgcggaaggccccctcccgggacgagccctgcagctccacgtccaggccggcgctggaggaggacgtcatttaccacgt

SEQ ID NO: 93578 - DNA, 122 bp, Homo sapiens
gaactctaccgaactcttaccctgaaagcccctgagagtccaaaatatatttttccagcccgaaatctaaatcccagttctctgtatgaaaacctccagaaacccagactcttacttccttc

SEQ ID NO: 93579 - DNA, 122 bp, Homo sapiens
gctgctgcgtggcacacgggcaaactggcgggctttggccttgggcgcggcccgcagatgcgtgcagcatgcggggctgtggagcgcttattggtttttctgtgtgaatctgggggttttca

SEQ ID NO: 93580 - DNA, 122 bp, Homo sapiens
agcgcgtctaggtcggagtaacagtcccaaatgccctcggctgtctgcagtggctcagcacgtgggcccgctttgcaagtaagcccggctcccgtccgccccgtccgccccgccccgtcccg

SEQ ID NO: 93581 - DNA, 122 bp, Homo sapiens
aagtgtcaagacggcagcagatgtggtgtgtggtccactttatgtcaacacccaaaacctcggtgttgcaaggaatgaagtgtccaaaacaccactaccactaacagaaactcctaagctca

SEQ ID NO: 93582 - DNA, 122 bp, Homo sapiens
gccctactgtcctttgtcccacggcttctcgagattatctctgtgttttaatagataaaacgccttctctccccacccgtggggtgcaaagcacagcgcatggggctggtggcgcccgagag

SEQ ID NO: 93583 - DNA, 122 bp, Homo sapiens
gagagcatgatattacgttcaatatcgcagtagctgtacacccacccggtgatattgatccgaatctcatctccaggggatggcgtatgacgttactcccaatatagcactgggtgcgcatc

SEQ ID NO: 93584 - DNA, 122 bp, Homo sapiens
ttttattttttggcagtgacaaagtctcactatgctgctcagactgatatcaaactcctacgctcaagcaatcctctcgcctccacttcccaaagtgctgagattacaggcgtgagtgagcc

SEQ ID NO: 93585 - DNA, 122 bp, Homo sapiens
ctgtggtgcgtggcctgggccccagcggtgagtcgactctggggggctccgtgcccgtcacggggcctgtctgtagccctgacagcatccttcggcggacggaattgtagttctccacgacg

SEQ ID NO: 93586 - DNA, 122 bp, Homo sapiens
cctagacctggcctttacagctgtatcaggtttgtctgttgccacagaaccttccttcaacgcttacagcttgcctcgtactgcacctcagggcctctgcctatgctgtgctctctgcctgg

SEQ ID NO: 93587 - DNA, 122 bp, Homo sapiens
gaaacagcccttagttctacctgggagcccaggtcagcagcctgcggccatctgccgccacgtgagactacccagcacttgcagagggctcctgcttcatgcctttgccccggcacccgttc

SEQ ID NO: 93588 - DNA, 122 bp, Homo sapiens
tggacttgccagtctcctgactccactgttagatcattttccttgggtgtgggggcggggcggggcgcggcggggagacggggtagcaaaaagaaccgtgaagaaaccacgcctgccccctt

SEQ ID NO: 93589 - DNA, 122 bp, Homo sapiens
ttacttttgtctttttttttttccctgagaaattagtgaaaacagtttgaagtcttgccacgttgtaaggagatttgcattatttaaggaaacagctggcagatctctataatgccccacct

SEQ ID NO: 93590 - DNA, 122 bp, Homo sapiens
tacaataggtgtcactgttttgcttggtccaatcatgattggtgacttcagctattggctcggagcactggctgtctgactccatctgcagggctgtaatacctactctcctccgatccatt

SEQ ID NO: 93591 - DNA, 122 bp, Homo sapiens
tctctccacgtgactcttaaggtgagaagcctcttgcccatccctttactccgtaattaacgggtgttgtgaccagatgaccagtctgccccactaccaggaaaattgggagtttgggatac

SEQ ID NO: 93592 - DNA, 122 bp, Homo sapiens
gactccgtgagctagattatagaattcctgttgacagttataattggtaggcacagaaagcgtaaagatggagtttggaatggaatctggcctgtctgactctaagccctggatccactgta

SEQ ID NO: 93593 - DNA, 122 bp, Homo sapiens
ctttgcagaagcgcaaactgaggccagaggggcagcggatctcagctgggtccccacgctcggcaggagaccgggtgctccccgcggggcctgtgagcgggccgccagggctgggctggggg

SEQ ID NO: 93594 - DNA, 122 bp, Homo sapiens
cgacacacagagtcaatagcagaaaggcactcacaaaagcagaggtttcggcaataaagacgccatcacacacctctttccacacagtaatctcgtgggcagcaatgtccatgaccgtgaac

SEQ ID NO: 93595 - DNA, 122 bp, Homo sapiens
ggaaggagacacctttgataatttcatttctgtctttttctctttggagacactaagttccggaagaaggcaagccacattctcaggatcatgtgggtctgccccagctaaagatgtacaag

SEQ ID NO: 93596 - DNA, 122 bp, Homo sapiens
ggtgtgcgcgagtgcgagtgtgcgagcgcgccggtggcgctgcccctgcccgctccctcccgctcgtgcagctccggcatcagtttcggggatcgtgtaatccgatcccttctgactcacaa

SEQ ID NO: 93597 - DNA, 122 bp, Homo sapiens
ggggtgcaggttaagggaggaggcccggagagggagcaggaggggcgcagaccctgttaccggggagatttcagccacccacgcccgctggccttggctcctgcagggagttggagagaaga

SEQ ID NO: 93598 - DNA, 122 bp, Homo sapiens
ttcccctttcccctgctgctgggtctcactttattgcccttaattgtttgttgtcttgtccgggctgttatctggcagccttccctcccatcaggcttgttcctggcttgctcaccttccct

SEQ ID NO: 93599 - DNA, 122 bp, Homo sapiens
gcggccgccccgcccctgcggagcacaggacgcttcctgccacccctgcagagcatgggacgcttcctgccatggtgccgtggcaatgggtggcacctgcctgtggccccttctcagaagga

SEQ ID NO: 93600 - DNA, 122 bp, Homo sapiens
gcgccgggcctccgtcggggaacacgtgaagtgtgtgtgtgtaccacagcgtgtggcctccgtcagagaacatgtgaagtgtgtgtgtgtaccacagcatgtggcctccgtcggggaacacg

SEQ ID NO: 93601 - DNA, 122 bp, Homo sapiens
tccagcgcagaggggagggggtggaaattccagacacgtaggctttggagagggcagagccgggctgggagtttcgctctgctctttgcttaggagtaacctcaagctctttaacctccctg

SEQ ID NO: 93602 - DNA, 122 bp, Homo sapiens
cccacctttacttcttgccaaaaccttcctggattcagtattgcaatcaatgttatggcccgtttcctttcagatgcacttcaagattagctctgtcactgacaacatggggaatacatttc

SEQ ID NO: 93603 - DNA, 122 bp, Homo sapiens
ttgctttaataaaaccccccaagggctgcggaagaggcatatctggtgctcctgatgggccggccagtctgggcccagctcccccgagaggtggtcggatcctctgggctgctcggtcgatg

SEQ ID NO: 93604 - DNA, 122 bp, Homo sapiens
cctcagcgcccgctgctcccaccccaaatcgaattcgtgctaatatttctctgggggcggcgggctgcctgccttccggggacggagggcgggggagactggcagggaggccaggcccaacc

SEQ ID NO: 93605 - DNA, 122 bp, Homo sapiens
ttgttttaaatttagctcttagggcttagctatttgggttttcttgcggtgtccggctcccgtctccctggctcccccgcccgccctgcggccccagcgcccctcgctctcatccagcccgc

SEQ ID NO: 93606 - DNA, 122 bp, Homo sapiens
tgagattcaaggctgtcatcttgattggacttatccagggacctagctcaatcttttactcgcttccttacctggttcctcccttaacataccttataccccaggaaaaaggcaatgtatta

SEQ ID NO: 93607 - DNA, 122 bp, Homo sapiens
ccccatcccggatgccggcctgcacaagcgcccacacctcccgccagtcagcactgctctcgttgaagaacgcatccagtaggaccccgtggaatgtcacgttcttcaggaagatagccatg

SEQ ID NO: 93608 - DNA, 122 bp, Homo sapiens
gtatttttagtaggggagcagtcggactctggactatatttcctggaggatcctgcaggccgataccacgtctcgcgagattttggcttcctcttagccaggtggcagaatctttcgctgtg

SEQ ID NO: 93609 - DNA, 122 bp, Homo sapiens
tgacgccagggagcgtgaggacgtggggcttccgtgaatgcgcagtgggtgcgtcggccacgaccttttggccaggttagggagggggcgacgctgagatgggggcggcggcggcggaagcg

SEQ ID NO: 93610 - DNA, 122 bp, Homo sapiens
cccccaactgtcgggaggtccccatgacttctcccctgggctcaccccgaagtagttccgcggcacgtagccctcctggccgtgcagcgcggcccaccaccagtcggtctcctccggcccgt

SEQ ID NO: 93611 - DNA, 122 bp, Homo sapiens
gaaacaaactaagaaggacttgagttttacgtagggctgatgccttgactgagaacctgccgcacatataagttaatgactgtcatgacatagaacaaatctatatacagtaaaaaagatgt

SEQ ID NO: 93612 - DNA, 122 bp, Homo sapiens
gcggccgaccggacgcagggggctggcgggaacgtgaagctccgcggtgcctgatggggccgttgggcggccggtagctgttgctgttgggggaccccctcattcctgccgctgccgtccct

SEQ ID NO: 93613 - DNA, 122 bp, Homo sapiens
aggcccttcgcgcgatctgccgtcatatcagcttatggcgccggtcgctgattggctggccgctccagcctcccggcccgcttgctggctgcccagctgctaggacagtttgcagagcagtg

SEQ ID NO: 93614 - DNA, 122 bp, Homo sapiens
tgctcacatctctgctgagcctctcttgatggagacctcctgagcctggcttcactctgccggttccacctgggtggaatgcgtgtgtggaaacaggtgacgggttaagcccttaggaaggt

SEQ ID NO: 93615 - DNA, 122 bp, Homo sapiens
gctggtgctgcctgcatctgtctgtttgcatatggagaggagctgaggttctcacgggagcggcttctgcatcctgaggaagtttactcacgcagttctggttgtaataactggtggcagct

SEQ ID NO: 93616 - DNA, 122 bp, Homo sapiens
ctgtccaagacatgtgcggcgaaggactggctgacgatgaaatgtgggtgaggggaggcccgcaggcagccaccccaccagacctgggcactcaccatggggagttccaaccactcccacct

SEQ ID NO: 93617 - DNA, 122 bp, Homo sapiens
aaacgcctgcgcccgcgcgcttccctaccctagggaggagcattcccgggtccgggctggcgcctgcagcaggacttcccgctcagagcccgggagtagctgttggcttccgggcgcgccgc

SEQ ID NO: 93618 - DNA, 122 bp, Homo sapiens
ccccaatatacgtttcctctgcggctccccgtaaccacacacaggaacgcttgccttgaacgaggagaatgcacttccagtctcgtctgctaagcagttgactccttcacccaataattttg

SEQ ID NO: 93619 - DNA, 122 bp, Homo sapiens
actgcacatttccagacacacaaagtaacttcaggtagaatgtttacatacgttacctatcgggcagctcaaagctctttgcaaattaattctaagcaacacattaaacccttaaaaaaaat

SEQ ID NO: 93620 - DNA, 122 bp, Homo sapiens
ccacctccctcttcgcggaggtctagctccccaaagcgagcccgtgtttgtcggtggtcacgggcatcctgcacatttgcggcagcttggcctagaagtgcgaccatgggctttgggttcga

SEQ ID NO: 93621 - DNA, 122 bp, Homo sapiens
caccccacccacccccgcctttcttctgcccctcctggggtagtgccccggctgctccgccggagtagtgatggctctgaaggtgaaagtcaccttctgccgctctcccgacggcctgctgc

SEQ ID NO: 93622 - DNA, 122 bp, Homo sapiens
ttttagagctttacgagacttttgacctcttctgggagctgtcctgattcctcttcaaaccgaatgatagcaccttttgtgtgttaagtagcctaaacagtcatttgtttagttaccacctg

SEQ ID NO: 93623 - DNA, 122 bp, Homo sapiens
aaaaaaaaaaagaaaaaagagaaaaccggatcatggtaagtttgctatattaacatatcacgaagaaaactggaaacctattgatctatggaattgacatcttcgcatggatgctccacgca

SEQ ID NO: 93624 - DNA, 122 bp, Homo sapiens
ggcctgacccctgtccagcgcctttcctttctccagcttctgctctgccccaagagtggtcgccttcgtggcagggcacgactctctcccagctcgggtcgccgcccacattagtgtggggc

SEQ ID NO: 93625 - DNA, 122 bp, Homo sapiens
cgggaggttgatgctataaatgagctgcccgggaggttaatgctacaaatgagctgtgatcgcgccactgcgttccagccagggtgacagagtgggaccctgtctcaaaaaaaaccaaaaac

SEQ ID NO: 93626 - DNA, 122 bp, Homo sapiens
tgagtggtgtttttaaacttttaaaaccttgcacaaccccagaagcgggcactattgttacgcacccaggggccactgaggcccacgccagtgaggaggccgacccttgtcccacggtcact

SEQ ID NO: 93627 - DNA, 122 bp, Homo sapiens
tgttggagatttactaacaaatatgccacgcagccaacccaaatacagggcctagttttccgagaatccctctgaaacaaaagtaaatatttagtgtaaaataggttaaaaagttatttcag

SEQ ID NO: 93628 - DNA, 122 bp, Homo sapiens
ggtaaaactaaagaccagacttaatgtttaaatccattcattcctcctgcaagcaattatcgtacatagaggcacctctgggcttctcatgactttctgttctgctgcctgaatctattctt

SEQ ID NO: 93629 - DNA, 122 bp, Homo sapiens
cgttggggggcccggggagcggcgcccgcggccgggccgcattgtgacgtagcggggccgcggcagcgcctccaccgcccgcctacttcggctgaggctgttctgctcctgccgctgcggtc

SEQ ID NO: 93630 - DNA, 122 bp, Homo sapiens
gccgcctccagcccgtgcgtcctcctcctgcactgcctactcctcctcctcctccgccgccgccgccgcccccagctcctgcgggaagggcctccgccgctcctcactctctcgcctctgct

SEQ ID NO: 93631 - DNA, 122 bp, Homo sapiens
gcgctcacctgagtcaccgaagccttcctttggggcccctcccggagcttgttcgcagcccgcaggcacaaccttccttggagaaaaaaagtagcgcaagggcagagagaggtagggctgct

SEQ ID NO: 93632 - DNA, 122 bp, Homo sapiens
attggacgatggcctttgtcaatcactgagggaaatagatcttgagtgtggccggacatccggggctttccaccctcggcgtggggcgggcttgaggtggggaagatggaaggatgcgatac

SEQ ID NO: 93633 - DNA, 122 bp, Homo sapiens
gccagcttgaaagacatcataaaaggccttcgctgtcctttgagttaattatctaacacccgaagagagtgccagttctagttagaatccgcgcgtcaggttctccaacagtcagaagggct

SEQ ID NO: 93634 - DNA, 122 bp, Homo sapiens
accccagcgagcgtaagggcgcagtgtccgcctggcggatttgggtcagcaggcggaagtcgtcccaggctgctagatactaaggtgaggaaccctagtggggacgtagggaccagcgacac

SEQ ID NO: 93635 - DNA, 122 bp, Homo sapiens
gcatgaagttcgacgagctgcagcggctgcggctcaacgactggaagatgatggagtccccggaaagaaaggtaagggcatccatgcagggccggctcccagcaaaccccctttctcactgc

SEQ ID NO: 93636 - DNA, 122 bp, Homo sapiens
ccgggtgccgcagcagggcgctgacgagtcccgccgagccccgccgcccgggttcaaggccgccttcacgcccacgattccttgttttttgggcagaggtcaaggctcaacggagagggagc

SEQ ID NO: 93637 - DNA, 122 bp, Homo sapiens
atagcacttaggtcatattatatgattgttatttatgttcttcattctcttctctccccacgaaactgcaggctccttcagaacagggtctgtgcctccctaacctttgctaacaccctcgg

SEQ ID NO: 93638 - DNA, 122 bp, Homo sapiens
tttgtgtatctctccctttctgcaaagggccagtaacccctcagttccctatctactttgcgactataattgcaagcctcattctgtcctgttacagtcgtgcggcaattaggctgagggac

SEQ ID NO: 93639 - DNA, 122 bp, Homo sapiens
agtttcaagttgaagtgactctcctgctctcgtttcttttcattctttacttttgttttgcgcagtctgttaggcaactccatgctttacgtttccagcaggagggccacattagctaattt

SEQ ID NO: 93640 - DNA, 122 bp, Homo sapiens
gttttgtgccaccagtaatgtaagcctgcaaaggggaccaaggacttgggggccccggggcgtggtatctaggagctggggttccccttagtgtggctgtgactcactccacagtgtatctg

SEQ ID NO: 93641 - DNA, 122 bp, Homo sapiens
agggccacggacaccgtgaagatgatggcggcaaagaagaagagcacctggttctgggtccggaaccagctgcccaggaaggtctgggtccagtccagcccacccagcacgtagccgatggc

SEQ ID NO: 93642 - DNA, 122 bp, Homo sapiens
attagaataaattgatttccttcataatgggctctgtctccacgttaatttgactgcatgcgctctaggggaggattcatgcctggagaaaaggtggggcagggcgaggaggcccacaggaa

SEQ ID NO: 93643 - DNA, 122 bp, Homo sapiens
atccggaagggctgtcccaatctacgaatcagatctcgaagaagcacatgggttacttcacgagctttctcagttcgtgttagataagcctccacccacccagagtaggtacgcccaagaac

SEQ ID NO: 93644 - DNA, 122 bp, Homo sapiens
aagtaaaggcagcactcaagttcatgcaaaggttatgttgatagcagtgtctaaaggagacgtggagtctacatgttgcctggtgggcagctttgttctgagggcttgcttgcaggagggta

SEQ ID NO: 93645 - DNA, 122 bp, Homo sapiens
taggagtgggtcccagcgtacacgggtttgcacccaggaaggggtctgcttgtgggtgggcgcgccagctcttccccaggggccgtttcttgagcgcctcccgtggggtcctgggcacctcg

SEQ ID NO: 93646 - DNA, 122 bp, Homo sapiens
ctctatgtcctttgcctataatgttttagaagttatcatctatcaagcacttactactggcggacactaaactaagacctttaattaaaccaaatgaaattgttattttgtaataaaaaaga

SEQ ID NO: 93647 - DNA, 122 bp, Homo sapiens
gagtctttaaaatcctttgaactcaagagttcagcattaaaagcaaaacagtcggcgggtcgtggtggctcacgcctgtaatcccagaactttgggaggctgaggcaggtggatcacctgag

SEQ ID NO: 93648 - DNA, 122 bp, Homo sapiens
cggagagcttcccgggcgcggagagcgcagagaacttggccaggaggtgctggacagctccggaacccgcgcgccccctgccaaataaagcgtggagacccggactcgggctctctgggacc

SEQ ID NO: 93649 - DNA, 122 bp, Homo sapiens
ccatcgctcatgccggcctgaatcggccgctgacctggcccttattaagatgctgggggccgattctacacatagtgcagagggaaaggaattatctaggccattgttagctgaccccaaac

SEQ ID NO: 93650 - DNA, 122 bp, Homo sapiens
ggacacacacaagccagtcctccgtgctcagttctccctggaggcctctgtcttcaccgccgctgtctcacagtcacctgcagcagcccaggccaggcctctgggctggtattaaccctctg

SEQ ID NO: 93651 - DNA, 122 bp, Homo sapiens
cagaccccgcccccagccccgaacttccagcaagacgggccgcttcccgccctcgagccccgcccatttccaggagccttgagcccagagtctccgtcccgccctcaggccccacccacagc

SEQ ID NO: 93652 - DNA, 122 bp, Homo sapiens
ggaaaattttatgtcacatatattttaccacaagaaaaaaaggggaccaaaactacataccgtgtgttggatctgtttatagtcacactgggagtaaattcagatcagtatctgcacagcct

SEQ ID NO: 93653 - DNA, 122 bp, Homo sapiens
acaattggctcccttctcactaggaatttgcacagaaaaggcttgggctctaatgagacccggttctggtctaggccatcggtcttgggcaagtcatttaacttctgagcctcagaggctcc

SEQ ID NO: 93654 - DNA, 122 bp, Homo sapiens
tgagcccacagggcacagactgttcatccgcttctcatggcagcggcggtgctgatggaccgggttcaggtgagtgggggcatccctcaagcgcaccccggcctggttggtgtgtcctggga

SEQ ID NO: 93655 - DNA, 122 bp, Homo sapiens
atggggcaggccagggcacctaggacttctcagaggtgccagttctttgtttttgccaaccgggcttgcctgctctgtcagccaagtggcgtgtctggggtaggggggtcgcttcccagcca

SEQ ID NO: 93656 - DNA, 122 bp, Homo sapiens
tgctacaggcacatctgctctttatagtgaagattggccccaggtgtctatactgctctccgcctgggaactggtgaaagcaggtatattcctagctatgtatctctagacttcaccctggt

SEQ ID NO: 93657 - DNA, 122 bp, Homo sapiens
gctgcctgctgggaggttaggtcggggctgccccggcgagtggagcatgagcagaaccgccgagggtcacttctgggcagaagctttgagagcctgggtccaggttgccacatagaagcagc

SEQ ID NO: 93658 - DNA, 122 bp, Homo sapiens
agacggggttgtgatccgggactaaggccctcccccaacttccccagggtggcagagttccgggaggccccaggttgtccccatctgcaaaatcgacagcacatggggtaggggtaggggac

SEQ ID NO: 93659 - DNA, 122 bp, Homo sapiens
ccgacggcgacgtcggggtttgtgtgcgcgagaggccgccgataaaggttgggtgcctcgcgccgggggccgttgggagggagtgcgcccctgccccccctccccggtccccacagctgcac

SEQ ID NO: 93660 - DNA, 122 bp, Homo sapiens
caataaagtatttccttggtgatcgggactaaaaaaaaaaaaaaaaaaaaagccacaggacggtaaagcattccttagttaggacgtaccaaggagagagaaactgcagggtcagtagatta

SEQ ID NO: 93661 - DNA, 122 bp, Homo sapiens
gggctgcctgggggaaaggtcctaggtggggaggtggtgaaggtccagttgatggggaatcgtgtctgtaccggcgggatttgggggcctgctctgacttctaccttgtttctgccaccagc

SEQ ID NO: 93662 - DNA, 122 bp, Homo sapiens
caatacaaaataaattttataagaacagaataagccacttgaaaatcttactttccaagacggccccatttaggggtctgagggtccacagaattagtccagttctgctggaacagtatgga

SEQ ID NO: 93663 - DNA, 122 bp, Homo sapiens
tcgcactcacattgtgaacggggcagggggacgggcgaactggtgggcgggcctctctggcggcggctgctgctagggagtcgacttctctccggtggcgactccgctttttctctccggtc

SEQ ID NO: 93664 - DNA, 122 bp, Homo sapiens
tttctacccactaccatgcaccttcattctgagtcaagctgacctgggatcctaggtccccgctttgccaccaggaggtaggcatagggatggtgacggtttctacagcagcaaagaatctg

SEQ ID NO: 93665 - DNA, 122 bp, Homo sapiens
tggccctgcatttccttgggattcccagagatggcgcatgacccctggcaagatgggaggcgtctatctaccgttaggctgggccctgggtctgaaactctgccgcctttacccattcgcat

SEQ ID NO: 93666 - DNA, 122 bp, Homo sapiens
tttcaggtattttaacctccagattttaccagaaacccacagaatgagttgttatgctttcggtatcccgtgactgaaaataaaacccatcacaacaaaatgaccaaaaactgctatgaatt

SEQ ID NO: 93667 - DNA, 122 bp, Homo sapiens
gtggccattctgtgactctgcttggataattagccttccgggtgttttgccacactgcaccgccacccacccttctcggacaactttggtgtcagagagttttcagttgcccttcctaggtc

SEQ ID NO: 93668 - DNA, 122 bp, Homo sapiens
acattgcccccactccttggctcagaatatcagttggtctacatccacgtcgaatcctcgcgctttagacttgcacacagtacttagaagctcattaaatcctactcctcaggcctcttttt

SEQ ID NO: 93669 - DNA, 122 bp, Homo sapiens
tagccatgaagtggatgatcactgagtgccgggataaaaagcaccagcggacactgatgccggagaagctgtcacacaagctgctggaggctttccataaccagggccccgtgatcaagagg

SEQ ID NO: 93670 - DNA, 122 bp, Homo sapiens
ttgtgatggagtctcgttctgctccccaggctggcatgcagtggtaagatcttgggcccacggcaacctctgcctcccgggtttcaagcaattctctcacctcagcctcccaagtagctgag

SEQ ID NO: 93671 - DNA, 122 bp, Homo sapiens
ccgctggcggccaggccggggcgggacgggccggggagagggccgcgtgcgggtggggggcgtcgccctcgccctcggtgcccacccgggtccgctaacaaagctacatttccagatcaatt

SEQ ID NO: 93672 - DNA, 122 bp, Homo sapiens
tcaaaagcacctcaaatactttatgtccaagacagaactcataattaaacaccctcttgacgagttaatgggtgcagcacaccaacatggcacatgtatacatatgtaacaaacctgcacat

SEQ ID NO: 93673 - DNA, 122 bp, Homo sapiens
agctgctgccccggcggggaccacgtggaggggcctggtcagcaagtggcaaggacgcggcgcaaagccaggctttctaatgtacaatccgcggctctttcgatactgaacacccacctctt

SEQ ID NO: 93674 - DNA, 122 bp, Homo sapiens
ccggggcgccccctagtggtggccaccgggagtaagccttgcagaagaggaagctgtccccgcccgccccgcgcctccgtccggtttctgcatctttgcccctggcattccttcctcctcca

SEQ ID NO: 93675 - DNA, 122 bp, Homo sapiens
agcaccccaggggcgcccgtggccccatctgtcctgaggttgggccggggagcgggtttgcggggtgacaggagggtggtgcggtccgtgaccaggggaaaggtggtgtaaaagtcctcgtc

SEQ ID NO: 93676 - DNA, 122 bp, Homo sapiens
tactgtggacacgagtccgcggagcgccagtcacacccccgcacccctgcaagctcccgccgtagagggggctcggcaccatcctggtcacaaagtacgtgcccccaccccccacccccagg

SEQ ID NO: 93677 - DNA, 122 bp, Homo sapiens
tgactcgtctcccaggtcgtttgggctggagtaggcggaggaacgcaccgcgagcaccaacgtcccgcccctgtcttggcggtcctcaggtgttttgtggaagccgggcctgggtggcgggc

SEQ ID NO: 93678 - DNA, 122 bp, Homo sapiens
agatgtgcagagatgtggcacattgccctaggttatacacaagtgggatttgaattctagcggaatctgtgtccctcatgccatgtacactcatcaaaaaaatgagagccaaaggataaagc

SEQ ID NO: 93679 - DNA, 122 bp, Homo sapiens
gatgagcttgctcttttgtgggaatgcattttttgctgcttgccctggggaaaagaactgcgagaatggaattaacgtctggtttcgctagggctactggttgcttctactaagaatagaag

SEQ ID NO: 93680 - DNA, 122 bp, Homo sapiens
tgtgctgggggtaccacccttgccgctccaccctgctctgagggccctgggtggccagggcgggcacagagtgggtggtgatgccagctgcatccctggggttcatagtctggggagcacat

SEQ ID NO: 93681 - DNA, 122 bp, Homo sapiens
ggtatattcatgtgtgctgtctcactgtcccctcatttcacgctatttttttaggctagacgtccaggaacagacttgctccgtcaaccacagggcatgggcgtggggaaacagtagaccac

SEQ ID NO: 93682 - DNA, 122 bp, Homo sapiens
cttacacagaacattcacggtgaatgaggccttgatgggggcctccagtgctgggctagacgcctcacagaccagcaactgcctattatctgagctccggggtgtcaccctgggatgagaag

SEQ ID NO: 93683 - DNA, 122 bp, Homo sapiens
agcactaattaatagtcaagaattgggagatgaaaaaatacagattgttacacaaatgctcgaattggtggaaaatcgggcaagacaaatggagttacactcacagtgtttccaagatcctg

SEQ ID NO: 93684 - DNA, 122 bp, Homo sapiens
taccagccacaggccacctcctgctgctgacgtcgaactcggggttcctgccatctcgggcgacccagacaagttcaagaggatgcacgctgggacatttacactctaaggataactttcaa

SEQ ID NO: 93685 - DNA, 122 bp, Homo sapiens
ggtagctgaatagtttggaccagaatcctggctggggagaaaattgttatgaaaagctatcgattaggtgtccacagctgctgaaactcaactgcggaagcttctggagctgcatttatgaa

SEQ ID NO: 93686 - DNA, 122 bp, Homo sapiens
tcctgtattaacaaatgctcacacgccttacaaaccgctctgtgtaggagccgacacagacggagccctggctgggctcccgctttccattttgcaatcagggaaaccaaggcccagaggcc

SEQ ID NO: 93687 - DNA, 122 bp, Homo sapiens
ccgtccggggctgaggtcggctgccctctccgcaggctgcagaacagggttagagttcaccgtggggcagggcccgaaaatcgcccggtggcctcagacaggcgacacctggccgggtcgga

SEQ ID NO: 93688 - DNA, 122 bp, Homo sapiens
gggccctcttctttaagacaggggaaactctccgcttctccaactggactaggactggagcgcatgcagtcacctattcaggccaggcgtggcagcggctcacacctgtaatcccagcactt

SEQ ID NO: 93689 - DNA, 122 bp, Homo sapiens
acgctgcgtgtgttacttactggttatattgcagtggccacactgagtcccgtatggcgccgtattaacgaatggcatgcaagcaccttctgttgaaacatctgcgacagggaaattttagg

SEQ ID NO: 93690 - DNA, 122 bp, Homo sapiens
agccccatctccagccttggcttccaggaaaccctggcaaaggctggatgcacctaacctcggatgaaaggtccagggcctcttgctcatctaagcctcagatctggagcagtgaactattt

SEQ ID NO: 93691 - DNA, 122 bp, Homo sapiens
caattcgcataccacagaggtagttatcccacccaagtgtgggcttttggttttgagtggcgacatctccatccagtgctcagagcgcacacaagctttgctgctgtatctctggctcagca

SEQ ID NO: 93692 - DNA, 122 bp, Homo sapiens
cccgctgggcctccctcggtatttgagggccaggccaatcatctgtcctctccttaccaccgcggtctctccgcaatgacagcccatgtccagggactgtctggattcacggaaaatacttt

SEQ ID NO: 93693 - DNA, 122 bp, Homo sapiens
aagaatgatcagtgggtaggttggatggatggatcacattgtctaagtatctttttccatcggttttagggttagcctctgtcatttttgtgtgtgtgtatgttttatggctggaggtatat

SEQ ID NO: 93694 - DNA, 122 bp, Homo sapiens
gagtccagcatgttcggggcactttccccccttcttggtgatggtgcgctgaggcccacccgcagtagctgaccgtgttggtcttgaccgtgttggtcttcagagtcctttggtgtttattg

SEQ ID NO: 93695 - DNA, 122 bp, Homo sapiens
gatgattccaagaaatgtaagtattggaataggaaaataagacaataggtaaaaaggctacggaaggtagattgtcagacaattactacagtgggcctgctttccctgagggaacctgaaac

SEQ ID NO: 93696 - DNA, 122 bp, Homo sapiens
aaaattttttttaggtggcaccccccaacaagccggccgtccttctgggggagcccggagcgagcccggctctcgcctcatggcgtttctcgctggggcctccaaatgttgtacttgaaaga

SEQ ID NO: 93697 - DNA, 122 bp, Homo sapiens
aaccccctcacggagagccccgccccaaacactgcggtcccaggtcgaggggagggctctcggcgcgagcgggactatcagggtgacctcacctgtgaccttcaccaccgtgaggtaccgcc

SEQ ID NO: 93698 - DNA, 122 bp, Homo sapiens
attttcaggccattcccactggcaatcaaggtttctgggcccatagtaccccctgatggccgacatggggaactttcttttcccaacaattcctttctcctccccagtgggacctccctgtc

SEQ ID NO: 93699 - DNA, 122 bp, Homo sapiens
caggtcatctgtgtcttatccttcagcagcaggaacttgcttgatatccgagaggggcttcggcaccaaagcgtgatgttctcccaaggggcctgggggtagttggactctatccacaactc

SEQ ID NO: 93700 - DNA, 122 bp, Homo sapiens
ctcccctcaacctatccacaggccaaggcacttgggcacaggagccattcacaggagccacgtgttacctcctacatccccaagggccagatgtaccccaaggtacagccaccctgtcaata

SEQ ID NO: 93701 - DNA, 122 bp, Homo sapiens
tatgcattcatggatgctgaagccattcggatttagcggccacactcctattcacgtgatcgatttctgcatattccactcgcctgaaccgccgcgcgctgactggttccgcctcaccgccc

SEQ ID NO: 93702 - DNA, 122 bp, Homo sapiens
acgcgtctaggctgagatggttcgcgtggatattgctactcattctaagactgctgcctccgccgccgccgccgccgccgctgctgccgccgccgccgccgccaccatttgccatagctagc

SEQ ID NO: 93703 - DNA, 122 bp, Homo sapiens
cactctctgctccttctctcatcccacacgctttaccggttccttcaacagcacccaccgcgttcatcctgtgaacacttccttagtgataaccttgtgccaggcctgcgctgcctctagga

SEQ ID NO: 93704 - DNA, 122 bp, Homo sapiens
ggaggtggcactccccgtagccccggccccctccccttccggtgtcaggtactccccaaccgtggtgctgggtgtctgtatcacattcagcctccctgggcccatcaggccaagactattaa

SEQ ID NO: 93705 - DNA, 122 bp, Homo sapiens
ggcgccctggtccgggcgatccatggagctgggagggagtgagatcacagatttggaggtcggctttgatccctgatccccgcctcaggctgcagatgcgagtctgtttccagctccacggg

SEQ ID NO: 93706 - DNA, 122 bp, Homo sapiens
agtggggcccggaagcccctgcccacccgcccacccccaactcacccacacagttcttgccgtcagggctgagctcgaagcctgcattgcagacacactggaagctgccctctgtgttgaca

SEQ ID NO: 93707 - DNA, 122 bp, Homo sapiens
tgactctggcccacacttcttcccaaattctatactttgttctttgtatatctggacattcggcttacttaaaagtatgtaatattctccccaaggctttgaagagctacattatttccaaa

SEQ ID NO: 93708 - DNA, 122 bp, Homo sapiens
acaggcgtccaacccaggcccacctcccaccgcctggaaggcccaggtgtgactggagggcgactgaaagggtcagaccatgtgactgttctcaactttgggcttttacacagcagtttcaa

SEQ ID NO: 93709 - DNA, 122 bp, Homo sapiens
tcccctcacaggcagagctatcagtagccacgtcgggtagaacagaaggcattctgggaacgcggtgctctcacatcctgcaaagtacaggcctgcagagcagatggcagggacttcaaaag

SEQ ID NO: 93710 - DNA, 122 bp, Homo sapiens
gcgcctgggagtcacccgcggccgctcgccggtaggtgcctgcctgagtctaatcgtaggcgtgtctgtgtgtcccgcagcacccgtgccgcatcgcctgatgctcaccgcaggcccagccc

SEQ ID NO: 93711 - DNA, 122 bp, Homo sapiens
caagccaggacaggtggcagaaagcacccgggggtgggtgctccccctggagggttcacccgcagtcagcctgctctgttctcccgcaggggcagccctcatcccggctgtttgggcctcta

SEQ ID NO: 93712 - DNA, 122 bp, Homo sapiens
ctggcacacttcggggtctgagatgccatctgccttgcctaacctgggcaagaccactcgcgtcctttcccttgaggagcagcgtgggaaaggtgccgctgcgcgccacgtttctcccagtt

SEQ ID NO: 93713 - DNA, 122 bp, Homo sapiens
tacgctcagaaaaaataacgtccaccttaattatctctccaaccctgtttttccctgtcccggctagttccctcccttgactccatcaacatcggcacctgccagacgcccaccacccacca

SEQ ID NO: 93714 - DNA, 122 bp, Homo sapiens
tggcggcggcaggcgccgggaaagcgctcgccccgccccgccgacggctggctctgccgccgcaggcttcccatgaccccaggggaactgaccccgtggccacagggtagaaggaggggcaa

SEQ ID NO: 93715 - DNA, 122 bp, Homo sapiens
aaccgtctccatggcaacggtgcagccttgagctggggtctgcgtcgctgtggcctgagacgcttttcttaaaggtcccgatgacaaggacttggggcctggaagcaccactttcattaacc

SEQ ID NO: 93716 - DNA, 122 bp, Homo sapiens
gagagggtgggaagaaggtctccagtccctctccagccttggagcttcccatggtccccacgaagtccttcccactgtacatctgattagtctctctcaggccagaagctacccccagctgc

SEQ ID NO: 93717 - DNA, 122 bp, Homo sapiens
tgagcgctttctctggttggccccacttctccagtcttttaggagattcccgttctattacgtaggtgagagggcgaaaggttctagctttcaaaattgtgagtggtttggctgtgtgcata

SEQ ID NO: 93718 - DNA, 122 bp, Homo sapiens
ggcgcgtgtggccagggccgatcctgcactgccctctgcgggatggcccggcccagtcctcgacccccagcacctccgccgcccggcctggccaccacctccgctccacgcgcccaggccgc

SEQ ID NO: 93719 - DNA, 122 bp, Homo sapiens
ggagcccaaaacagatcctcttctctgctcctcccctgtccccgcgcggcgaatggttcgcgccggcctatatttacccgagatcttcctcccggacggcaaggatgtgaggcaggcgagcc

SEQ ID NO: 93720 - DNA, 122 bp, Homo sapiens
gggctgtgcaccgtgttcgcgagttggcgagtcagcacgagttccgggtgggcgtgggctcggcagcctctgcacccggagcggctggtcgtcgccgccagccctgggcagtgaggggctta

SEQ ID NO: 93721 - DNA, 122 bp, Homo sapiens
gagtccggggtggagcgcgatgtggaatctgactcgcttgaaacagcaccgcggtggattcggatccgggtgagtagggaaatgcgcctcagcccctcccacgggccgcccacggattccag

SEQ ID NO: 93722 - DNA, 122 bp, Homo sapiens
aggcttgagaacggtcaagcagctcgccctggctcccctgggagccaccctagcctggaacgctgcacaccagacaggggtggtagagctcctggccattcccaaatgccccacacccagca

SEQ ID NO: 93723 - DNA, 122 bp, Homo sapiens
ggcggggcggggagggctgccggaggcttgattaggtaggaggtggcgaagcgccggcggcggccggaagtagccgaagccagcggcggaagtagccgaagcggctggagcgggcggcaagg

SEQ ID NO: 93724 - DNA, 122 bp, Homo sapiens
tgtgtgacactgcatgtttgattgagtgactgaggctctgggaatgagtggcggtgggggcgggtacctgtgggtgggacagcatgagagattgtacacacttggtgcaggggtcctcagga

SEQ ID NO: 93725 - DNA, 122 bp, Homo sapiens
tccgacaggccgcacggggctgggcgctggcgaaggggtggcccagcggggagccccgcgcggaggtggtgccccactcgtccccccgagagagggaaaaggctacaagccgcgcttcgctc

SEQ ID NO: 93726 - DNA, 122 bp, Homo sapiens
ccccctcttagcagtcctctctcgggaagaaaacaccctatttctctccggattgctaagcgtcgttgactgtgcggttgccgtggaaaccgttactaggcaacgaggaagtggcaggcagc

SEQ ID NO: 93727 - DNA, 122 bp, Homo sapiens
ccccgccccgccccgccccgcccaccgcccccaccccacccaccccccctcctgtcctaccggagcctccctgacgagcgccgccccccgctctgcggtgcccagtcccatcgaccacccaa

SEQ ID NO: 93728 - DNA, 122 bp, Homo sapiens
tctgccttcctgttcctctgtctcggtgtgctctcacacacacacaatgcagaggacaagcgcacgtctttacaattcaaaaccagaaaagaccagaacatttttaattagtctgaaaataa

SEQ ID NO: 93729 - DNA, 122 bp, Homo sapiens
cccagagcatcctgcctgcaaaaaggaaccccacccagctgatccggagcagatgcagcccgcctggtgtggcagggcgtttccatcatctcccacgtcccacgcctgtcgagggaacggca

SEQ ID NO: 93730 - DNA, 122 bp, Homo sapiens
accgttctacctgtgattctcgctggtggagtcaacctggaatggattcccgccgaaccacgcctccctttcctggttcgcccgcagtttcggcctatcaggttgagtcgggtaaaccagga

SEQ ID NO: 93731 - DNA, 122 bp, Homo sapiens
ggctgcttccgcccgccccaacagcgcgcacgcggccaccgagctggaggaggcggcgggcgtgagaccgggaatgcttggggcccccgccttcctcgcagccatccagcactcggtgcacg

SEQ ID NO: 93732 - DNA, 122 bp, Homo sapiens
cgcctcccccagagccgctgcttcgcctcgtttctcgccctcttgacgggcgccgaggtgcgtgggcttctgagcattgaacaatggttctgcctcctctgccaggcgcagtgttgggaagg

SEQ ID NO: 93733 - DNA, 122 bp, Homo sapiens
ctgtaacagtggaatgaaaggggttcttctgcctgaaaaacaaattatgcactgggcttccgtctagtcaggaggatagggggcaaggcaatgggctgattgaaagaaggatgactttgact

SEQ ID NO: 93734 - DNA, 122 bp, Homo sapiens
gccagggggtgtggcgtgagtgtgtgtcccgccaggacgttccggtggcgccgcctgacgcgggaggagaaaccagctccagctcctcatctggattttacataaatccatggctcaaagtg

SEQ ID NO: 93735 - DNA, 122 bp, Homo sapiens
gaagtgaaacaacaatacacacacacacacacacacacacacatatatatatagtttattcgtttttagtggggtcatgtgcctctctagccgctccctgaccccagttccactatgttttc

SEQ ID NO: 93736 - DNA, 122 bp, Homo sapiens
ggtgagcccggctagctcagtcggtagagcatgagactcttaatctcagggtcgtgggttcgagccccacgttgggcgctctggttttcaatcctaaaatgttttcaggtttctcattgcgg

SEQ ID NO: 93737 - DNA, 122 bp, Homo sapiens
ttaccttgtgattaaacggttctgctgccggcgtttgcaattcagagctggcaacgtggacgtttttaggactgttagcgcatttgcagttttgcgggtctataagattccgaacccgggca

SEQ ID NO: 93738 - DNA, 122 bp, Homo sapiens
tgacaatttatcttaataaacagttcttaaacaaagcctcgtacaggccaggaggtaagacgttcttctgtaaagtcaaacttccaagatgtactggttcaccaaaaccaatgggcgattca

SEQ ID NO: 93739 - DNA, 122 bp, Homo sapiens
gaaagatgtggaaacatataaaacaccatttgcaaaaataacagagaagcccaggagcagcgcacacaggcaaagtaaacagcagagacagtttccagctctgttaaaagactggccattaa

SEQ ID NO: 93740 - DNA, 122 bp, Homo sapiens
aaatcagcatagtgcctctcacaggatgaatgctcagctattgttcttctaggtgttctccgcagggcctaatgacatgcacacagtggtgcttgaccagaactggttcatgtcatcttgaa

SEQ ID NO: 93741 - DNA, 122 bp, Homo sapiens
acccccgccccttgcctcaggattcctcccctccctcccctgccccccaaccctgccctgcgcctgcgcaatgaaagacaaagtttttgctgacccgggcagcagactttggcagctgctct

SEQ ID NO: 93742 - DNA, 122 bp, Homo sapiens
gagagcagggtgtttgagttcagacaggttccgagcgctttctggctgttcggggtttggcgtgccaccacttgggacttgttgtaacccgtctccactcccgccccctccagcgctgcacc

SEQ ID NO: 93743 - DNA, 122 bp, Homo sapiens
aaaacaagtggcctcatgtgtagccagctaaaagtagcttcctccaacaggctacaaaaccgtggtcaaaggcttgggcatctgacctctccctaccttgacaagtgataggaatcaccttt

SEQ ID NO: 93744 - DNA, 122 bp, Homo sapiens
gtttcgctcttgttgcccaggctgcagtgcaatggcacattgtctgctcaccgcaaccttcgccttccaggttcaagagattctcctgcctcagcctcccaagtagctgggattacaggcat

SEQ ID NO: 93745 - DNA, 122 bp, Homo sapiens
taatgacaagctgggagcaactatgtaaatgtccagagagccctccaaacagcagaacagcgggtgcggaggggaagggtggcttgagcttaatgagagtaggccacaggcaaaggctagat

SEQ ID NO: 93746 - DNA, 122 bp, Homo sapiens
taatatctggttgttctgccattatgttaagatttaccacggtgttatggtggtaagagccggggcacagttaacttaccccttaggaccaggaagtaatctttgtggtacttactctttct

SEQ ID NO: 93747 - DNA, 122 bp, Homo sapiens
atgggctatgcagattgacagaaaggtcaaattctccctttccggttggagaggagaagccgccctgagtttgccccgagtttgctaggacctttgaggcatgagcccctccccagggccct

SEQ ID NO: 93748 - DNA, 122 bp, Homo sapiens
aaccattccacaagcctcagcccagtagcctggtaagtcctaggcatggcagtgattccccgagactccacctgctcctccagccatgcatccactgctcgctactctcctcctcacttcat

SEQ ID NO: 93749 - DNA, 122 bp, Homo sapiens
agatgcgcccggggccttcgcccctttccaggcttacttctcaacgcaagaagactctcacgtgttgctacaccgcaagtctccaattaagagtggaccggcaagcgaatgcgtccttaagg

SEQ ID NO: 93750 - DNA, 122 bp, Homo sapiens
tgtcacaggaagagaaatatttagtcagtttttcccccacggctaaatttgcactgaacacgaagacctagttttccatgcacagaaggctggactctcatctggtgtcttacagaccccaa

SEQ ID NO: 93751 - DNA, 122 bp, Homo sapiens
ggaggatgctgaacagtagagggcgctggagacacgctgcgggaggctggcgctcgggtccggctgcgggccacaggccgcggatcgcgttctgccagcgccccacgcccgcaagcgcggcc

SEQ ID NO: 93752 - DNA, 122 bp, Homo sapiens
tttgcactgggattagttgctctttgcatgaggttgtagctgtggacgtgggttttgtagcgattgggacgactctggagatctattggctgctgggtttgtaaatttcattcattttggtc

SEQ ID NO: 93753 - DNA, 122 bp, Homo sapiens
cgagctggaacgcaggttcaagcagcagcggtacctgtcggcacccgagcgcgagcacctcgccagcagcctgaagctcacatccactcaggtgaaaatctggttccagaatcgcaggtaca

SEQ ID NO: 93754 - DNA, 122 bp, Homo sapiens
accaacatgggttttagtgtcttttcctagtggtggggaatttctacaaggtgggtaggacgtgttaagggtggccttagcaatttgtaggcctagaggccgtctaggagaggcctgcagtt

SEQ ID NO: 93755 - DNA, 122 bp, Homo sapiens
gagaaacagaactattaggagatagagagatagagatgtattataaggaattgactcacacgattaagaaagctggtgagttcagaatctgcagtatgggctagcaggctggagacccagga

SEQ ID NO: 93756 - DNA, 122 bp, Homo sapiens
gactgatgttccagttagactctgggcctcatatgcaaaggaagttgcattgctgcagagcgcagagactgtgcacgttgcctggaaaaggaataagccttttctttttttttttttttttt

SEQ ID NO: 93757 - DNA, 122 bp, Homo sapiens
ttaatgcaagaggcaaggtgtagacatacacctcctgcagttggagtgcagcagttcttacgaggaggaagagttggtctgaggttgcaccacaagaagtttatatgcacctgacctacctg

SEQ ID NO: 93758 - DNA, 122 bp, Homo sapiens
cttcattccatcttccattttaacgtactcatgaagagtcaaagaaaagcacctgagatgcgtcagggcccaccgccggcgctgaggatggaacagtgaacacagcaagccacgtccttcct

SEQ ID NO: 93759 - DNA, 122 bp, Homo sapiens
ctcactcacggggcgctgccgtgggccatgaggacgcaggcagctcctgcaggaagcgcacggtcatttccaggacgtctgccttctctagcttcgagcagttggagttctgcgcccggcca

SEQ ID NO: 93760 - DNA, 122 bp, Homo sapiens
catccgttacacagcctctcccagaccgccctctaggaaggacaccacatttaaaaacaccggcctgcctccagtccttggctgcctcacagcgatgctcagagccggtttcccaaggtccg

SEQ ID NO: 93761 - DNA, 122 bp, Homo sapiens
gccggctcccagacacactcaccatgctgggtgaagatattgaagccggtctctgtggtgcgccccgccgggtcccgcctgcggccggagggcctggctgcactgctgccccggatcccgcg

SEQ ID NO: 93762 - DNA, 122 bp, Homo sapiens
tactggaaaaatcagatcacacgtgggcttggagaacggacgcgaagttttattgaatggcgaaagcagctctctcagcagatggatgggaaccagaagagaggtggcctcccctggagact

SEQ ID NO: 93763 - DNA, 122 bp, Homo sapiens
atctcgtggtccctgtggtccagcacgcggggcaggaacagggaggacttctgtgtgcggcgggtcttgaagcccctgcggggccggcccttgccgttcacagacacgtaccacagtctctc

SEQ ID NO: 93764 - DNA, 122 bp, Homo sapiens
tgataaaaagagctcccctttgctgacagaactgctggatttggttctcattggtccagacgaggaaggtatccagcctcaagtcatcattgtggccaggaagatggaatacaccaaatgga

SEQ ID NO: 93765 - DNA, 122 bp, Homo sapiens
tattctcaggaaccaccaatcacagctgctgagcatcccccaccctgtcttgctggccaccggctgcctgggcctcacaggctgaggacgcggggtcaacccctgcccacccatgcgcggag

SEQ ID NO: 93766 - DNA, 122 bp, Homo sapiens
gtctgtttccctgccttctcccgtcgagaaggaggctatggccaggcctgtctcctcatacgagtcgctgagactggcccaccagagatgcagccactcaagaaagaggggacccccaaccc

SEQ ID NO: 93767 - DNA, 122 bp, Homo sapiens
cagttaactgccacaattaactacatgcgaacctgaggaaggtcagtccaaaacaaacaacgctactaaataagatagaaattttccccacagtgagtcctacctgtgaagatgagttcaga

SEQ ID NO: 93768 - DNA, 122 bp, Homo sapiens
gctgccccaagccctggatccctccctccctcccaaccctcctcagcttcctcgaaaaagcggagaagcggaatctgcacgcccagaaactcgcgtcagaagccttagtagtccgactgggc

SEQ ID NO: 93769 - DNA, 122 bp, Homo sapiens
cctcgagaacacctgtcaggttatgaaggttagaagttctttgctgggcgcggtggctcacgcctataattccagcactttgggaggccgaggtgggcagatcacgaggtcaggagttcaag

SEQ ID NO: 93770 - DNA, 122 bp, Homo sapiens
ggccttgtcccacccaccccgtccccgccccctgtccgtctcgccctagtcccacctcctcgtccccagtcagtcctgcctctcgaaccgccccctgccttcgccgaggcagggagaggtgc

SEQ ID NO: 93771 - DNA, 122 bp, Homo sapiens
ggtgagggtttgggttcgcgtctcacttcagaaaagttgactgctgtctctgaaagggttcgccaagtagggccaggagcagagaggagggacaccccctaacgtgacgggccttagaggac

SEQ ID NO: 93772 - DNA, 122 bp, Homo sapiens
ggaccccgtggcgtgagtggcccccatgacgtgagtggcccctgtgacattagtggaccccgtggcatgagtggctgccatgacgtgagtggcccccgtgatgtgagtggcccccgtgacat

SEQ ID NO: 93773 - DNA, 122 bp, Homo sapiens
gtagatatgaccactcagggcatgtagatcaggaaatagaaaccctaagaaaggacttggcggggactaccaaggccatgttggtgaggccaattctatttacactggtaaatcttattttt

SEQ ID NO: 93774 - DNA, 122 bp, Homo sapiens
ggtgtccttggagatgatgagcctgttcttcagagacgtgctgtaggatttttagtcattcgaaaaaatgtgagcaagccactccagggccttccctgggggctgacggatccagctcatac

SEQ ID NO: 93775 - DNA, 122 bp, Homo sapiens
cttcattcttgacttttggagttgctggagggttaatgagagaggaggtcccctgctttgcgaaaacagatctcatagcagggtgaacaagaggcttatgccccaagctactacaaaatggg

SEQ ID NO: 93776 - DNA, 122 bp, Homo sapiens
gagagatgctatttttgtataatgccacaggacatatgcatagaagtttttcacatcttacgttatgtaactgaaaggcattagagctagttccaaatgaatctttttgtttaaccagttcc

SEQ ID NO: 93777 - DNA, 122 bp, Homo sapiens
aggccatcgatggaaatgaggaagaaccctccggccagaggaggggctggtccatcaagacgtcatgggctgaggggagtgagtcacaggtgcccactgcccccagatggggtgagggtggg

SEQ ID NO: 93778 - DNA, 122 bp, Homo sapiens
agccaggaggggaagcaggtccagcgcaacgccgccaacgcgcgagagcgggcccgcatgcgagtgctgagcaaggccttctccagactcaagaccaccctgccctgggtgccccccgacac

SEQ ID NO: 93779 - DNA, 122 bp, Homo sapiens
cccatcccccgccagacgtcgtccccacccccatccccctccaagccccgcccgggagggcgtcctgcccgctcattgggcctcccgccggctcatttgcatggtccgaggggggcggggct

SEQ ID NO: 93780 - DNA, 122 bp, Homo sapiens
agtttttcctttgagtgatttttaaactctcctaacaggccgttctgccgctggtattgccgctcctctgtacactgtccgcgccgcgtgcgggtccctctgctaggaccgcgccttcaacg

SEQ ID NO: 93781 - DNA, 122 bp, Homo sapiens
cacccacccatctgtttatctacttgtctatctaaccatctatatgtccattaatcagcccgtccacctgctatcagtccatcagtccacaattccatctgtttatccatctatgaatctgc

SEQ ID NO: 93782 - DNA, 122 bp, Homo sapiens
aggtgggtagatcactaggtcaggagttcaagaccagcctggccaagatggtgaaacccccgtctctgctaaaactacaaaaattagccttggtgcggtgcctgtaaccccagctacttgga

SEQ ID NO: 93783 - DNA, 122 bp, Homo sapiens
tctgctcgcgccacgcgggcccatagcgcgccaggaacacccctgggggtgggacgggcacgtgcgcgtggccatgaaggcattagccccaccatccaccacccactccaaccctatgctcc

SEQ ID NO: 93784 - DNA, 122 bp, Homo sapiens
cggcccccgtcgccccttaccttccgaggccgtcgggaggacaagagcgcggtcatgccgcgtgaacctcctcccgctgcctcccgcaggaggcgtgtttccaagagaggaggagggttgag

SEQ ID NO: 93785 - DNA, 122 bp, Homo sapiens
aacctccagggtcacagggctgcagtcttctcctttcggagaccccattgcagagaagagcgaaagcaggggcggggtgggggtgggagtggtctcttccggttcttgaagatagcgtccct

SEQ ID NO: 93786 - DNA, 122 bp, Homo sapiens
atccatttgattttgatgagcattttgacaagtgcctcaattatctaccacattaccgtacgagtgctggtaagttactttgtccttcctacctaagccccaaattttaaacattaattttc

SEQ ID NO: 93787 - DNA, 122 bp, Homo sapiens
aagccggcaccgggcggacagaggtgagtcggctcggaggcggtggctcccgttcctgcccgcgcgccgaggggcgaatcccaggcagcgaggtcgccgcccccgcccctcggccggcccct

SEQ ID NO: 93788 - DNA, 122 bp, Homo sapiens
tttttgaactggaaggaaaacacagtcttgtttccgcccggtttcgaaccggggacctttcgcgtgttaggcgaacgtgataaccactacactacggaaacagatgcggagaggttactcta

SEQ ID NO: 93789 - DNA, 122 bp, Homo sapiens
cgctgcacctgcctgccgctgcaggaaacatttctgacaccgtcgaccaggaaagccacacggagaggccactgtgggtgaagcgcctcagttacacaggaaccctaaagcaaatctgccac

SEQ ID NO: 93790 - DNA, 122 bp, Homo sapiens
cagggtccgcgtggcaggtgtgcaggtagggtgagtggcgcggagggccgggggttgctccgtcatctctgcccgtgtgcaacttgcagttttgtgcagcagctgaggcgctggcacgggaa

SEQ ID NO: 93791 - DNA, 122 bp, Homo sapiens
tgtaattaaagaagttaggatcaacagacagaaacacaggtaggaagaaaatgtgatttccgggtgattggtgctgagtagtgacacacagactctagtgctacatgatgccggtgttgacc

SEQ ID NO: 93792 - DNA, 122 bp, Homo sapiens
tctctactaaaaatacaaaaatcagccgagtgtgttggcaggtgactgtaatcccagttacgcaggaggctgaggcagggagaattgcttgaacctgggaggcagaggttgcagtgagccaa

SEQ ID NO: 93793 - DNA, 122 bp, Homo sapiens
cgccccccaccctctttctcgcttcccgccactgcgtcggccaatcaggaggcaggcgcccgcccccggcacggcctcctgcggccccgcaactcccaaatgccgagttttcgcgggaaaaa

SEQ ID NO: 93794 - DNA, 122 bp, Homo sapiens
gggcggctactagcgaatgttcagcaccgctatctacaagaaaaacaatgtctctaccctcgactgtcattctgaccagaggctctttgagaacacttgagcctggtttccctcagtccgat

SEQ ID NO: 93795 - DNA, 122 bp, Homo sapiens
aggttcaggtggaaccattggtagtcagacatgcaaaatatctgaaaagatatctcaaaacgccaatcttagggtctacaatagtgatattatctggaagagtaatggaaaagttgcatacc

SEQ ID NO: 93796 - DNA, 122 bp, Homo sapiens
gctacccggtgagaagtcctggtgctggtaccgacctgctgtccctgcagctctcctgtgcgcctgtacctttcccttcctcccaacctcgtttgactccatctcaccttccccgacagcat

SEQ ID NO: 93797 - DNA, 122 bp, Homo sapiens
tcccccacagctggcaccaaaggcccctgcgtcccccacagctggcaccaaaggcccctgcgtcccccacagctggcaccaaaggcccctgcgacccccacagctggcaccaaaggcccctg

SEQ ID NO: 93798 - DNA, 122 bp, Homo sapiens
ttgcaggtgctccgaaccctgggttatgtggacgaggcgggcactgtgaagctggcagggcgggtggcttgtgccatgagcagccatgagttgctcctcactgagctcatgtttgacaatgc

SEQ ID NO: 93799 - DNA, 122 bp, Homo sapiens
ctgagcttcggactcgcagccagcctcccacaggccaccgcgcgcgctcacttgcgcatgcgcctcggagctggcttcaaccagcgaaggctgaacccgcttccagggtcctcgccgagctg

SEQ ID NO: 93800 - DNA, 122 bp, Homo sapiens
gagcgagagggcgcagagggcagcgggcttgggcagcatgaggcccggaggggagcggcccgtggaagggggcgcgtgcaatggccgctccgagctggagctactgaagctgcgctcggcgg

SEQ ID NO: 93801 - DNA, 122 bp, Homo sapiens
acgggctgggaggagaagcagctctcatggagcaccgtggacgccaggctgcacgggacccgaggatcagcagctctcagggagcaccacggacaccgggctgcacaggcctggaggaggag

SEQ ID NO: 93802 - DNA, 122 bp, Homo sapiens
ggagggagaaggagcaggaagtgatgcttccatctctgacagcatagggaccgggagctccgatggaggaaaccctttccgggcaggacgagtagagggacaggacatggccggggaccatg

SEQ ID NO: 93803 - DNA, 122 bp, Homo sapiens
gggcgatttagaagaaagtcctaaaagtacccaccttcccccgattctcattacacaaagcgaccaaatgcaggaggcccactggttcctaagcagaaatggcacacttcagtgtcattagg

SEQ ID NO: 93804 - DNA, 122 bp, Homo sapiens
tggaagaagtgaggttggcacaagggaaggaatcctgaaaccaagtctgtgtccgcgcggcgttggtctgggccacctcgcaatgaggctttagtgatcttaacgacaagcagcctcaaagc

SEQ ID NO: 93805 - DNA, 122 bp, Homo sapiens
gcccgcgtttcaggacctgcactaactccatcttgcctcgctggccccgcctcccgggtgcgccgagcaaaacccaccggatggaagctgccactcagccgcaggaagcccacgcccagaag

SEQ ID NO: 93806 - DNA, 122 bp, Homo sapiens
gcagagagtaagagcttgatgtcagtattgcagggtcatgcgtgagccccctgctcctgccgtttgtgagaggcgggagtcccggcgctcacctgcggcaggatgtgctgtgtgtgatgcac

SEQ ID NO: 93807 - DNA, 122 bp, Homo sapiens
gatctggcctcagagccaccctccaggtgcggctgccccgggccccaggtgcggctgcaccgtgctgtggtgacagccacagcaggatcagagcagcctcaaggcccttcaggagccggcag

SEQ ID NO: 93808 - DNA, 122 bp, Homo sapiens
agctgtgagactcacatgaagatctgcagcttctttcctgagtggagaccacgagcccaccgagaggaaggaacaactccagacgctctgccttaagagctgtaacactcactgcgaaggtc

SEQ ID NO: 93809 - DNA, 122 bp, Homo sapiens
tatttctctttctcttctccctattcctcatctgggggtttgtgaatactctgagtggggcggggggtggggggggagggggagggagagggagggggagggagagagagagacctcctgtg

SEQ ID NO: 93810 - DNA, 122 bp, Homo sapiens
gcctctagtttgagcaactcactccgctgagttattgattgcaggcagcaacaatccctccggttgatttgtgtgaaaagtgaatccgctctggctgggcgttcagcagaggcgcaacagct

SEQ ID NO: 93811 - DNA, 122 bp, Homo sapiens
accggctgtggtgaactgagcccatcctgcggacagttgtggtgcccccccggcagctcccggcactgcccccgacgaacggaaactcttctgtgaaatagcaataatgtcctactgcccgg

SEQ ID NO: 93812 - DNA, 122 bp, Homo sapiens
cctggcaaggcttccagcagaggtggcacttgtggctgttcctgtggaatcccacctcctcgagaccctccaaggcagcaactatgacagctgatgccagccctgaaatctctaagcaaata

SEQ ID NO: 93813 - DNA, 122 bp, Homo sapiens
gaaggaccgcctggctcagcaccgcaaggtccacaccgagcacaggccctactcgtgtggcgactgtgggaaagccttcaagcagaagtccaaccttctcagacaccagctggtgcacaccg

SEQ ID NO: 93814 - DNA, 122 bp, Homo sapiens
tgaggccttcaggggtggcttccggctctcccagtagctgtcataggcatccactgacctcgagggcttggtcacgcggggcttgtagtagtccttggccgcccgctcgctggccgacttct

SEQ ID NO: 93815 - DNA, 122 bp, Homo sapiens
ggagccggtggtgatgtggtgttgttgccctgaccagggctgagcacatccatgcctgcgcgcccggcgcgggaagggggagggaagaaaaagcagcgcgaagattcgcctcgccccttccc

SEQ ID NO: 93816 - DNA, 122 bp, Homo sapiens
tttcccttttttttctttttgcccagtaaatttcattattctcacccttccacgtgtctgcgagcctaatatttcatggccatgtggcaaggacccagctcttagctgaaccaagaagaaag

SEQ ID NO: 93817 - DNA, 122 bp, Homo sapiens
cagccaggtacccgcgcaaggcacttgctggcaatggcaggaggcggacgtggggggggtcgtgcaataggtactggagggagagacgtgggcacaaaggtcgcgggaggaacaggtgccca

SEQ ID NO: 93818 - DNA, 122 bp, Homo sapiens
aggaagataaggaaatcatccttcgagtgtgcctcttccaatgtgaagatgcctttgcagcgttggggttgcctcggaactgcaaaaccaaaatgctgcctagtcaagtacttctgatcctg

SEQ ID NO: 93819 - DNA, 122 bp, Homo sapiens
tcctgagccaagctcaatgcagactgtggcactgggcttccagaaaggcctgactattctcgtggaactctcccctctatgatgtcaccagcaggccagggcctcattcccaaatgcctctt

SEQ ID NO: 93820 - DNA, 122 bp, Homo sapiens
cgtgcagagaacaagccctctctgcgttgcatttgggaaggggcctcccttgctgttctgcggggctggctggatcttgttctcctctccgagttggaggaccccattcctgagcagccgct

SEQ ID NO: 93821 - DNA, 122 bp, Homo sapiens
acagtggagaaaggtttaggaaatagcagaacaaacgcaaaggccttgagaaggcccttgcgagactcagcccaggactcttctctctgtcctatcttcagccctaaagcaaagggctgagg

SEQ ID NO: 93822 - DNA, 122 bp, Homo sapiens
gcctcccaggttcaagcgattctcccacctcagcttcccttgagtagctgggattacaggcgccggacaccacacccagctaatttttgtggttttagaagagacagggtttcaccatgttg

SEQ ID NO: 93823 - DNA, 122 bp, Homo sapiens
tgacaaatccgatttcagtgatctttgcatacaccctttaaacacaccagttgccgcctgcgagatatcatcagactcatgctaagagccactccctaccccagctttccccagacctctcc

SEQ ID NO: 93824 - DNA, 122 bp, Homo sapiens
agcgcttcaaggagctcgagtaagtgcgcccgcgccccccacgcgccctgcgcccctccccgccctcttgggtctgagcgtggtcagggccgtgccccccaggtgtcctccccaggcttccc

SEQ ID NO: 93825 - DNA, 122 bp, Homo sapiens
caacaccacgcctgagaggttctggtggccccacctggaagaaggtcatggtggagccggcgtggatggtgccatactcgatgttggtctgatctgccaggtcatcggccgactccacaggc

SEQ ID NO: 93826 - DNA, 122 bp, Homo sapiens
atgtcactcaaagccaatgagtgacagaatcagaactagaatccacatcttctggtaactcgtctagagtttgttacactacataaaacttcccaaacgtaagaagggagaaggggaaacaa

SEQ ID NO: 93827 - DNA, 122 bp, Homo sapiens
ccctggggattgctggggtgtctcctttccctcctccttcccccgactccccggcctctccgaaatcaggtttccagcagcctgggcttccagcaacatctcagccacatttttaaatagct

SEQ ID NO: 93828 - DNA, 122 bp, Homo sapiens
tgtgcagagaatatccaatgaagtgagaaaaatatgcaaccctgtagctctcagtctagacgttagttatctaaatcacacactcatcctgtggcagctgccggggctgcgtccacttactt

SEQ ID NO: 93829 - DNA, 122 bp, Homo sapiens
tttgtccctcttctttcctgtcgttttcagtctctcatttgttgagattcggcgtctctgcgctttgttcgtgtttttacgtggcatcactccagatgcctgttagctttctgggggatgac

SEQ ID NO: 93830 - DNA, 122 bp, Homo sapiens
tccggtgactgcaggggttttcccggtgctcggtgtttcctccccgtcggcctttaaacgcgaatgtgaccctaccaccaaagtggagtgcagtccagaatcaccaaacctgggcttccagg

SEQ ID NO: 93831 - DNA, 122 bp, Homo sapiens
ggcccgagaggggagcggtacgagcgggggcgctggcaccgcgggtggaacctcggccggcggggtcccgcccctggcccctggcccgccccgcccgcctcgctttgcttctcgctccgccc

SEQ ID NO: 93832 - DNA, 122 bp, Homo sapiens
cacttctgagatggaggtggttactgtattctgaagatgaatgtgggatgggccactggtcgtattcctcgtgcgtaacgctgtatttcattagaaacaaaggggtttcggtgctgccttcc

SEQ ID NO: 93833 - DNA, 122 bp, Homo sapiens
cgtcatctccgtgagcaggattggccctggaacagtgtggggcctggaccgctgggtaggcgcgtccagcggcctgagcaggggagggtaatgaggctgttacgcgccttctccgcatcttg

SEQ ID NO: 93834 - DNA, 122 bp, Homo sapiens
accgtgttaagacaggggacagcaaactattctgtaaagggctaaatattttaggttttgcgggccatacgatccctgtggcaactattcaaactcgagcgtcgtagctcaaaagcagccat

SEQ ID NO: 93835 - DNA, 122 bp, Homo sapiens
ctgccctgctacctgcgcatggacgcactggcgctgcttgggggactggtaaatgtagcccgtctgcccgagcgctggggacctggccgctttgactactggggcaactcccaccagatcat

SEQ ID NO: 93836 - DNA, 122 bp, Homo sapiens
ttctaatgggggtaacttcctccctaagggaagcctcagcttcaccagcaatggcagacacggccaggcatgtagacacagaggaagtgagatagaaagtgtgcacagcccagagagcctgc

SEQ ID NO: 93837 - DNA, 122 bp, Homo sapiens
ctctgcagttaatgcacgtattttaaactcccgggcctgcggacgctatgcacaggtaaacggattgcaaaaaggggaagagcatgaaatggaccctcttaataattcttttaggccgcgaa

SEQ ID NO: 93838 - DNA, 122 bp, Homo sapiens
ctgcatgcctgatggagcagatgaaacacatggctgtaattagctcccaccccttcgatacgttctcaactccaccaaagcctcagcctgtatgagggtggaaagtggggagggagagtgca

SEQ ID NO: 93839 - DNA, 122 bp, Homo sapiens
gccgcagcacgcaaggcaaacacagccggaggtgagcacatacctgcttcgcaccccatgcgcctaaccacaaggttccctccctccaggaaggccgttgtcttccctgggacgacttgcca

SEQ ID NO: 93840 - DNA, 122 bp, Homo sapiens
cccagttcctgtcccagcctgcgccggctccagcgcccccggctctccagctgctcttcccgactcctatccttggccgcccccagcgcggaaccgacccgcgaccctaccgccaacatcgc

SEQ ID NO: 93841 - DNA, 122 bp, Homo sapiens
tctcttggtccctgggtaaaataccttccttcccatgcctagatttaccctcccaagtcccgttgaggttcactcccttctatgttggaaaggacctacacctctgagtcctagatagagac

SEQ ID NO: 93842 - DNA, 122 bp, Homo sapiens
tttattgtcgatcgattgattgatttttgagacagagtctggctctgtcacccaggctgtcgggcagtggtgcgatcttggctcactgcaacctccacctcccacctcagcctcctgaatac

SEQ ID NO: 93843 - DNA, 122 bp, Homo sapiens
tggcttcaggggcaagatgggcaagtggtgctgctgctgcttcccctgctgcaggggaagcggcaagaacaacatgggtgcttggagagaccacgacgacagcgccttcacggagccaaggt

SEQ ID NO: 93844 - DNA, 122 bp, Homo sapiens
tgatggttgctgagtacttataatgtcatataacacttgggtatcatgaaatgatagcagcgaggcttttgttagagttcggcaaaatttatccttgtaaagcttcaaggctggaaagatta

SEQ ID NO: 93845 - DNA, 122 bp, Homo sapiens
agacttgtggaaccggggctggctcagcacagtcttgcagccgtcttgatggggtgagatcggggaggatcaagagctcccaccttccactgccccaccctccagctttgcccgccccagcc

SEQ ID NO: 93846 - DNA, 122 bp, Homo sapiens
gctgtattatagtatttcaacactccatgaactctgaactgtgactttcataaactgtaacgaaaaaaccaggaatgactcatcattagtcatttaatagatccaaaaaagcaagttaggag

SEQ ID NO: 93847 - DNA, 122 bp, Homo sapiens
ccggcagggccgggaaccggaacgggggcctggcttacctagcattagcagcagcagcagcggcagcgaaggcggcagcagcgtgggcctgagggcgcccatcctgcgcggccagctctggg

SEQ ID NO: 93848 - DNA, 122 bp, Homo sapiens
cactacatcaacctcatcaccaggcagaggtgggtgggaccgcgggaccgattccgggagcgccagtgcctgcacaccaggagatcctggggatgttagggaaagggattgtttcttttcct

SEQ ID NO: 93849 - DNA, 122 bp, Homo sapiens
ctctgtccctcgctgcttaatttttctgcatagtgtatagcgccatcagcagaccatacacgttgtatttatttacttttctttctcttagaaaggcagggccttttgtctgtgtcgttcct

SEQ ID NO: 93850 - DNA, 122 bp, Homo sapiens
cccaatatctctttccctactgcaagtctccattgcagtcagtggtccctatacctgttgcgatggtcctgaataaagccctctttttgtgctttaacaagtgtcactaaatacttttttct

SEQ ID NO: 93851 - DNA, 122 bp, Homo sapiens
acgatgcccgctaggagccggcgccggggcgccccaaggctgcctccccccgcagcgctgcgcagtgcgccctggtgggatggggacgctgcacccctgaacccccccaaatccggcaggcc

SEQ ID NO: 93852 - DNA, 122 bp, Homo sapiens
gccgccctccatagctgaaaaagccggaagctctgggtcagctttacctgcagggccctgcgcctcccatatgagtcctgccgggacactcatgcttttcctcagtgacatctctgtggttg

SEQ ID NO: 93853 - DNA, 122 bp, Homo sapiens
gagggaggctagtgtggactactggggagccgagagtcagacagcctggagagctgtgcccggtgctcaaaaccacacatttgtcatggttaatgttaggtgtcaacttggctggattaagc

SEQ ID NO: 93854 - DNA, 122 bp, Homo sapiens
taaagctgttaattcccttttttttatttcccatctaattcctggcaggagaatagacagcggggaataaaaacctctgttgagttggcaattttagtactcatatacaagactgttttatc

SEQ ID NO: 93855 - DNA, 122 bp, Homo sapiens
accccagctggagcgtgaagtcggtctggttacacagctcaggcccaaattagcactgcacggttagagagatttgccagtacattctagacagggttatgaccttccccttcttacagaac

SEQ ID NO: 93856 - DNA, 122 bp, Homo sapiens
gagcgagcaggcgcgggccctgcgcggtgaggccaggagctcctggaagcggctggtgggcgtggagagcgcctgcgacgtggactgccgcttcaagctcagcactcacaagatggtgttca

SEQ ID NO: 93857 - DNA, 122 bp, Homo sapiens
ggcctccatagactgagagtccattctcttaagcgcttggaaggctctttatcctggagccgcttaccccaggggcagtcgtagatatttttaccttctggaaaaataggaaacgcgcacct

SEQ ID NO: 93858 - DNA, 122 bp, Homo sapiens
ttattatctgcagagcgatttccggcgatgggactcggagagagtccggctgcgaggtttcgagattctgggacgcaatcctaaagaaaacgtgccccctgctggcgagcaagccacatctc

SEQ ID NO: 93859 - DNA, 122 bp, Homo sapiens
taaaagatggtgatacaattcacaaaggaagaggaaaagaaactggtttggttacaaagacgatgagttcagtttgcacacatgaccagtgcaaattgccagtggaatatcctggagaagaa

SEQ ID NO: 93860 - DNA, 122 bp, Homo sapiens
aagtgaggatatgcaaagagagcactaaccagcctttctttaggctccaaagatactcatcggactgtgactcatctgatcattggttgaaatatgagtgacacagcatatgatatacattc

SEQ ID NO: 93861 - DNA, 122 bp, Homo sapiens
gagttcggggatgtagcctaagcagggcgggggccaaacctgggaggttgtggactgcagcgggtttcagaggaggggaggcttctggaaggaccggcgcgatctccctgaacgaacatcgc

SEQ ID NO: 93862 - DNA, 122 bp, Homo sapiens
agcatagggagagggctgccaatggatggaaactgaaaaggcctagctagtcactgactccgatgaacagtaagtgcttggtttcccatttagttctgtcaaggggacggacatttcgtgtg

SEQ ID NO: 93863 - DNA, 122 bp, Homo sapiens
agcaaccctacaattattatttctctctctaaaatcttttaatagtccactgtaaactttcgcatgattctttagcattccattctagactcttcatggtgctgcctaatttttcagcctca

SEQ ID NO: 93864 - DNA, 122 bp, Homo sapiens
tttccccctttttgtgtcctaagcctgcgccgaatctgtgccttctttgaaatgctttcccgccttctttctccgggtcccacactacctggggccgcactcttcaagcactggatgctgac

SEQ ID NO: 93865 - DNA, 122 bp, Homo sapiens
tcattagacaagcgtccgttgagaatccaccaggcaggctcagggctgggatgaagaagccgcggcctgtctcctcacagtcccgccgttcggccccggacacggggtggcatctggtctga

SEQ ID NO: 93866 - DNA, 122 bp, Homo sapiens
tctgcactgacttcccaggttctgcatcattattggtttactgagacaatgcacttcacccgtccttcaatcccaaagtagcacagaatatcaggagttctttgagcccctaagtgccctac

SEQ ID NO: 93867 - DNA, 122 bp, Homo sapiens
ccccagaggataaaaggccggagccagacagaactacacacacaggccacacagataattcggtaccagaaacatgatgctgagtgacaaaggccagctgcagaagtcaggtaagaagcaca

SEQ ID NO: 93868 - DNA, 122 bp, Homo sapiens
caagtgttgtgggaagagatgcggagataaattttgcgagccagaccccgacactttccccgtccgtttgcaccgtctccggaacaactggcggccagcagcactctccaccccggccgcaa

SEQ ID NO: 93869 - DNA, 122 bp, Homo sapiens
ccccactctacccagcaacagtttgggggaggttctggcctctccaggcgaaggcccaggcgccctctccctggccgcttctgggcattctccagccctccgtccctctgcccctcggccgc

SEQ ID NO: 93870 - DNA, 122 bp, Homo sapiens
tcagtgactcaccggaatcccctcagtctcctccaggaagcgggcgctgacggacaccagcgcatcttccggccactcgtggaaccagtcgatggccgtgcagttgaccacagctgggaact

SEQ ID NO: 93871 - DNA, 122 bp, Homo sapiens
gaaggtcgggcttcggccaggggcagccctcggcctggccgcgcttacccggctctgcggcgccccgagcaccatcgccgccgccgcttcacacaaaggccccggcccgccgtgcccggccc

SEQ ID NO: 93872 - DNA, 122 bp, Homo sapiens
ccccgccccgactgtgaatgaaaggcgggcgccgccgagggctggctgggaacgccgcagcgacgccggcctctcgagaggcgcgcgccccgccgagatgtacggtaaggagggctccgcgc

SEQ ID NO: 93873 - DNA, 122 bp, Homo sapiens
gcctgtagggccccagacttgggtaccccagtcccgcttcccggacagaaagaacaaggacggaagggaacttctcctgaggtcactgaggcatgagagtgctgggtgcagtctgcctttat

SEQ ID NO: 93874 - DNA, 122 bp, Homo sapiens
ccaagcgcgagttcctgcggcgcaccgaggtggacagcaaaggcaacaagatcatcatgacgcccgacatgtgcatcagcttcgaggtgggcctgggggccacggcgggcaggggtcggctg

SEQ ID NO: 93875 - DNA, 122 bp, Homo sapiens
ggccagcaacgacccggatcgcaaccacctgacccgggcgcccagggtcaagtgggtccgcgcccaggcagtcgtgctagtcctggaacgtgagtggcgggcacctccctccccgcctccct

SEQ ID NO: 93876 - DNA, 122 bp, Homo sapiens
cgagggggcggccaggttattcacgggagtggggagaccccttaaagcgccctcagggaccggccacagtgggcggggccacccccagccacccacctccccccccaggccccgcccccggc

SEQ ID NO: 93877 - DNA, 122 bp, Homo sapiens
gtaagttgcgaagtttttagaccgtttcagacaatggggcgggcggcagtgggggcgtttcggggagagcccggggaggagagggcggcgggactgcgcgggggccacggacacgcgtgcac

SEQ ID NO: 93878 - DNA, 122 bp, Homo sapiens
ctgacagcatgcgataaattctaaattattaaaaatatctcggctgggcaaggtggctcacgcctgtaatcccagcactttgggaggccgaggtaggtggaccacttgaagccaggagttcg

SEQ ID NO: 93879 - DNA, 122 bp, Homo sapiens
gcggaggacaggcgttatgcaaagattggcaatcctttgacgagcccaggtagtacagcacgtctcccccgtgatgttttttggcttttatcttacatataaacaagcgtacccaggtggac

SEQ ID NO: 93880 - DNA, 122 bp, Homo sapiens
agggcccggtcacgccgccggcgccgccattttgttcctccacctcagccaaccacaaatcgagaatttttggagaagctgttattgtctgagacctctgttaggtgttccactcatctcac

SEQ ID NO: 93881 - DNA, 122 bp, Homo sapiens
catttccccacctctgtgcggctcctgggtcatctcaaagacacggtgcccgctcccccccgtttctcggttacacaattcgaaggcgatccgtattttcaagcagcttacagtctggtcgg

SEQ ID NO: 93882 - DNA, 122 bp, Homo sapiens
ttgcaacattgcctgaagtttatggaataagatgtattctcactcccttgatctcaagggcgtaactctggaagcacagcttgactacacgtcatttttaccaatgattttcaggtgacctg

SEQ ID NO: 93883 - DNA, 122 bp, Homo sapiens
aagacttcagacaccgcacagttaatattgagttccctgtaactccttgtaaatctaacccgcccctcgcccctctttaaatccgtggtcttgttcacgatttcttacttgacgtaaaattc

SEQ ID NO: 93884 - DNA, 122 bp, Homo sapiens
aggatccatagatgaggagcgtgtgtaggagcgcggcgagacaggcaaagagcactgcagcggtgtccccagcgcttcgctcgctggccgtctacctccctgttggtggcggccacccctca

SEQ ID NO: 93885 - DNA, 122 bp, Homo sapiens
agctcacgtttttaccctgggaggttttttgttgctttctttttcaccgatgcgtgaggtcgtgttggtaacgtttctcacgtgcacttggcccttggcctctggtcaccacgggcagtgct

SEQ ID NO: 93886 - DNA, 122 bp, Homo sapiens
aagtacaggagtagacaggatatgtgcttgttgcccagctctctgccccctagtgcccaacgaaattgccagtcaggcacaataataattgtatacatttacagaaactttattacatacca

SEQ ID NO: 93887 - DNA, 122 bp, Homo sapiens
actccatctcaaaaaacaaacaaacaaaaaacaaaacaaaacaaaacaacaacaaaaaaacgaacagcgagggaaccttaaggatccaagattcccactgagaaaccaggtctctatttctc

SEQ ID NO: 93888 - DNA, 122 bp, Homo sapiens
tatcccgcctgggtgggctctgcggcgacgcgcgccaagaaggggtcgggagttttttggcgctcgctaaagggcgttgagaagggcgggcccgcgtcgcttcggaccactcaggagccgag

SEQ ID NO: 93889 - DNA, 122 bp, Homo sapiens
catgtcctctcggtgcccttagccactcactagtgcacatgcatcatccctgctccccttcgtggcagcaccacctggaggccaccctgatttcctcaagtaaggcaggtgccatcctgtgc

SEQ ID NO: 93890 - DNA, 122 bp, Homo sapiens
tgttgattttgcacgtgggaaccccaggaggacactgctctgaacccccccggcccatgccgatagcaagagagtgaggcagagggaggcagagaaaaagagaccctcactcgccgccacag

SEQ ID NO: 93891 - DNA, 122 bp, Homo sapiens
cctgggctgggccgctggctggccctgcctctccccgcactccactgcccgacgtcgcctcggtggtgttggatgagccctcggaggactccatttgttttgatgatggattcttatgctcc

SEQ ID NO: 93892 - DNA, 122 bp, Homo sapiens
tgggcccaaatgagccaccttgggaccccagatggctggtgtagacctaccacccgatgccgttggctcctttcctatcccctgggtctccccctcccttcgtggtgtctgatcccacgatt

SEQ ID NO: 93893 - DNA, 122 bp, Homo sapiens
tgccaggaggccgctctccagcacagggtgcgtctgggacatggagccacaggtggatcccgaggctgaactggctgccctgtccctcagtcttgaagccggcatgaggagggccaccctca

SEQ ID NO: 93894 - DNA, 122 bp, Homo sapiens
gtccgagccgggacccatcgggaagttggaccggctgcctccaggcggcaccggattaatcgttgtgtagatgtcgctggaatttgttgaatctgagggactgggcatagtgggtgttcctg

SEQ ID NO: 93895 - DNA, 122 bp, Homo sapiens
aaacaaaaagcctgtttaaggctaagccttctcccatcactcatcactattcaacaacaccgtttaagcactgaatatgcactaggtgctgggaacacaaaagttggtgaggaaagggtccc

SEQ ID NO: 93896 - DNA, 122 bp, Homo sapiens
gaaccggcgtctcagccgggggcagaagtatataactgcacgcgctgcctcatgggtagacgccgactccaccccctgaacatccggggccttttaaccgcccacggacggacggctggtac

SEQ ID NO: 93897 - DNA, 122 bp, Homo sapiens
gcagatgtccatccagatctatctgctggtgtatcaaatgagaactcctgttcactttttcgcttataggattgctgttccacaaacttgaaagattcactccctgaactgtttgaattccc

SEQ ID NO: 93898 - DNA, 122 bp, Homo sapiens
ggcgccctgcgggtttgctggtggcatcgaggggcagcgcggggccagcgctgggagctccgaacccacacgctccggccagctgcccgggaagcgcccaagcacacgtcccgagtcccaga

SEQ ID NO: 93899 - DNA, 122 bp, Homo sapiens
cctattgattatgcagattgtgatcaatcttctcccctcgcccactgcccaagcctctttcggaggacctccaaataagttggtctgcaactagctattctcccaaagtagggaggaaaaaa

SEQ ID NO: 93900 - DNA, 122 bp, Homo sapiens
gtccacccaaaacgcaacagtaccccagttacacgctcctggtgcaaatgaccctcctctcgtgcttggtgcaaaggctgttagcaacgggccacacaggagatgctgccacgtcactccag

SEQ ID NO: 93901 - DNA, 122 bp, Homo sapiens
ggtcccgtggcagaatcactgggctgtgggctggggcctcagaaagcacctcttccaggacgtgctttgcacataaagggacttgtcaaagtccacccaggcacctggtagcacagtgtgtg

SEQ ID NO: 93902 - DNA, 122 bp, Homo sapiens
atatttatgatactgcatgctgcagaaaagtcacagctccaaatacgttgaatctcatgacgcgatgcatgtcgaaggtccaagggcatgtggaaatggtcagttatattcaggcaattaaa

SEQ ID NO: 93903 - DNA, 122 bp, Homo sapiens
gctcattggcccgatacctcccattgtcctgaccagagcccgtttgctattggctgtctccggggacacgtcatcaaggattgaaacagcgcgcaaatctgaatgtgtgtgtatgccgggca

SEQ ID NO: 93904 - DNA, 122 bp, Homo sapiens
ccaagcttggcatccctggggaggagggaagtgggccagtctgcagcctctgctgtcccccgcctctgacaaccacgttcatgggaaccagccacctccacatgttgggcaggagggaccct

SEQ ID NO: 93905 - DNA, 122 bp, Homo sapiens
aaatgggttttgtgtttgtgacagaaagaaaaatggcacggggggggtcacaaagaccagcgctctagccagaactgccccatggttgtcatgtgaccttggacaagtcacttattttccag

SEQ ID NO: 93906 - DNA, 122 bp, Homo sapiens
ccctcatgctatgatgctgtcgcaggccttgtgtgcttaggtgggggctttgcagggctccggcctcaccacacctcagtcctgatgctgccagcttgttgctggtgctctgtgaggtcatg

SEQ ID NO: 93907 - DNA, 122 bp, Homo sapiens
gtcactgagtttcgggacaaggccacatgcaggcggctcgctgtcctgccctatgagctgcggttcaaggagcccttaccagaatacgtgcagctggtgactgagttttcaaagaaaacagg

SEQ ID NO: 93908 - DNA, 122 bp, Homo sapiens
caagaacacagggaccagccacttgctacttttccagtgtaacggacggaaggtgtggctcgtatgacatctgctatcctcagctgtggctggcattcgaagactgtgtctctattgccatc

SEQ ID NO: 93909 - DNA, 122 bp, Homo sapiens
cgcctcgacaaagcggcaaccacccaaaagttcatgaaaatgcacttggcaaaagtgggccgctagtccccgcggacagctctaagcgaccccgtcccagccgaggaaagcgcccgggcccc

SEQ ID NO: 93910 - DNA, 122 bp, Homo sapiens
gttccagggccattaggaagaatcttaacccaaaacatgggcttttgttcaactacaactcggtttatttcagattcatccattttgagttgcgtggctttggccagtgttgaactctgagc

SEQ ID NO: 93911 - DNA, 122 bp, Homo sapiens
gaaagagggaagtggggatgcaacactggggtaggtggatgcactatcagaccaaaactgcgatcctgtgactagggaaaggaaggacgctcttggggaactgggggaaaagcgggataccg

SEQ ID NO: 93912 - DNA, 122 bp, Homo sapiens
tggggcagcggcgttgcaggagatgagctcagcgcaaagggaaccccgcagcggcgagtgcggctgctggcctgcgcgctgtggccccaacaggctggcagggcgcgggcgggtggcggggt

SEQ ID NO: 93913 - DNA, 122 bp, Homo sapiens
ccgcccagagggagggacctccccttcgagggagggcgccggaagtgacgcgaggctctgcggagaccaggagtcagactgtaggacgacctcgggtcccacgtgtccccggtactcgccgg

SEQ ID NO: 93914 - DNA, 122 bp, Homo sapiens
tgccacagctggagcaggaacaggttggcacacggcagcacacgggcttgcagcagcagacgggcacacagcagctggagccagaacctccacagccagagccacagcccccacagccggag

SEQ ID NO: 93915 - DNA, 122 bp, Homo sapiens
gtcctctcgccagcaacaggtagggaaatgagaagcagtttagtcccgtctttccctgaacgtgcacccagatcagctcatggggactgggaaagagaaatcatctgcacacacccaacctc

SEQ ID NO: 93916 - DNA, 122 bp, Homo sapiens
caaatgtgggaaaaacagctgtttcaaaccgcaaggtgtggaatggtggcccggacaggccgggccttgaaggaatcagagctgggggctgtccggggtggtttgaaaaataaaacttagaa

SEQ ID NO: 93917 - DNA, 122 bp, Homo sapiens
catccaatccaccactaaggaagggctgcacgatcttgaaagtccaagaaacgggccgggcgcggtggctcatgcctgtaatcccagcactttgggaggccgaggcgggcggataacgaggt

SEQ ID NO: 93918 - DNA, 122 bp, Homo sapiens
ctagtaatgagatttgaggcctctgagtcgactcccaagcagaatgtgagagaagggtgccggctcctgctgggcagctgcagttgctccgcagctcctggccgagaatctccccctttgga

SEQ ID NO: 93919 - DNA, 122 bp, Homo sapiens
ttaggattagggtggagacggaggagctggagtgaacgggacttggctggaacacgtccacgcacgagtatgaggtgaggtatgcaggtcaatgggaacgccactcccctcgggaaggacac

SEQ ID NO: 93920 - DNA, 122 bp, Homo sapiens
gcacatctcgcccacgctgagtgtgagcggcctgggcgctccggaacactcggtgatgcccgcacagatccatccacaccacctgggcgccatgggccacctgcaccaggccatgggcatga

SEQ ID NO: 93921 - DNA, 122 bp, Homo sapiens
gtcgcggcccgaccctgctaacggtatttctagaagatgggcagaggacaagccaaaccccgggagggaccacgcggcctgggaaacagttcggcaaggaggccgggcccctgtcccgcctc

SEQ ID NO: 93922 - DNA, 122 bp, Homo sapiens
tccatccttgaggctcgcctgcccccgggcagctctggcagaggaagcctggccctggcgcgtctcctcaggagcgctcatgacgggcacgggcgtcacaaacacaccaacagaaacaacct

SEQ ID NO: 93923 - DNA, 122 bp, Homo sapiens
tagtaaaatgtaaggtctcagctgagagccgaacatggagaaggagccagctgtgcaaggcgccaaggagagcattcccggcagacaggaagcaggtgcaaaggccagggaggaggagagag

SEQ ID NO: 93924 - DNA, 122 bp, Homo sapiens
ttaattgcatttagtaacttaaagtttgatatacaatgtagactactctgcattttcttacgttattaaaaatgagcatttttacttcccatggcaccccttctaccttaaactttctacat

SEQ ID NO: 93925 - DNA, 122 bp, Homo sapiens
ggttgaagtggcagggaaggacagtgttggggcgaggcctccagtcacccagttcctccccgggctgctcctcccgactggaccagggtaggttgagctgctgggagtggagtatcatgggt

SEQ ID NO: 93926 - DNA, 122 bp, Homo sapiens
ggcagcttgtcctcagctcagctcagtccctgattggagcgaggaggtcaccctccttaccgaggaaatgggggaccctctccgccggctggaacacagcgtcatccagagcaggctctgcc

SEQ ID NO: 93927 - DNA, 122 bp, Homo sapiens
ggccggccgtccttttaggcgccggaagggttaagccagggcggcaatgaaacgtagcctcgctccatagacactgcagcgggaagaggagggcgagagcgcgacgcacaatagccgcggta

SEQ ID NO: 93928 - DNA, 122 bp, Homo sapiens
gcgggcccaccgggccactccgagtgcaggcccgctgagcccacgtccacccggaacttgcgctggcccgcaagcgccgcacgcagccccagttgccaccggtgcctctccctccacacctt

SEQ ID NO: 93929 - DNA, 122 bp, Homo sapiens
tttccctcacccagctgagaatagttacttgggtttgaaattctagttaagtagcaagaacgcttggctgctatttgcaacaagggtaagcatgaagagggtgatttcagcatctggaaagg

SEQ ID NO: 93930 - DNA, 122 bp, Homo sapiens
cctttcatcagcagatagttaaaggcggagaattgggttttcttgtttgtaaagatagtgcgtgtaaacaagcatgcagtaaattatgttatctgcagtagagtcttccattggtagctttg

SEQ ID NO: 93931 - DNA, 122 bp, Homo sapiens
cccaacgtcccttggatgggaattttaccgaccatgtgtttgcaaaactacctagtcggccgggcgcggtggcttacgcctgtaatcccagcactttgggaggccgaggcgggtggattacc

SEQ ID NO: 93932 - DNA, 122 bp, Homo sapiens
agcgggcgcgggggacgcgggctccagtcccacggaacctgcagagccagtcccaggagccgccaccctcccagcgcgccctcagcccctcacctgctgcaacatggcggccctacgccagc

SEQ ID NO: 93933 - DNA, 122 bp, Homo sapiens
cgggttcaagcgggcggtttgcaccaaaaactcaggtcagttggccaataagagcaagcccgttaagggtctgaggtggccccaaagaccaaggctgaagaggtgacagtctgggcaggaag

SEQ ID NO: 93934 - DNA, 122 bp, Homo sapiens
caaatcactactgctgaaatcaggcccataagaacaccaaagatcctggctcataaaagacgttttaccagtccttcaaccaaccaggaggaatccagttttcaaacaaactaatcagcatt

SEQ ID NO: 93935 - DNA, 122 bp, Homo sapiens
ctacaggcacacgccactgtgccgggctaatttttgtatttagtagagacaggatttcaacgtgttgcccgggctcgtctcaaactccccagctctggtgatccacctgctttggccttcca

SEQ ID NO: 93936 - DNA, 122 bp, Homo sapiens
aggggagagttaagctcccgttctccaccgtgccggctggccaggtgggctgagggtgaccgagagaccagaacctgcttgctggagcttagtgctcagagctggggagggaggttccgccg

SEQ ID NO: 93937 - DNA, 122 bp, Homo sapiens
cagtgaaccaaaagcccgcaactcccctgagtgggtcacctactggtccctcaattatcacgtcagcattcactgagtgctcagggttggatgtacatcatctcatggaatcttcacaatga

SEQ ID NO: 93938 - DNA, 122 bp, Homo sapiens
cagacacgcggggatctggggctggagctgactttccgaggacatcacagccccagcacccgagcccagagccacgctgttttcccctctgatgcttcagggagcgcgcgagcagggagcgg

SEQ ID NO: 93939 - DNA, 122 bp, Homo sapiens
tttttgggacgtgtttgctgcacttgatatcctgtttttccaggggactgcctccttcctcgcctttaagcctttttaggcttttaagccgcaggcaatgataacctttacccactgaggaa

SEQ ID NO: 93940 - DNA, 122 bp, Homo sapiens
gctcttgacagggggagggcctggggcctcctgcgggcgggccgggggcgggcctggggccgggctcaggccttgtaaggagtgggctggggcggctgccagctccctgctccctcttcccc

SEQ ID NO: 93941 - DNA, 122 bp, Homo sapiens
ggtgtgggtggggccttagggcgaggcgcagacataccccgaagtggttggattgtataccgcaaggggctggatcgaaccccccaaagacactggaaggctgtgtggctgaggagggcccg

SEQ ID NO: 93942 - DNA, 122 bp, Homo sapiens
caacatcaaacaggatttcataataaaacttttggtcaagtgaggtcatactttatatatcggacttgatttctcacagtggctcaaatagacatctgttgaccaatggaaaactatatctg

SEQ ID NO: 93943 - DNA, 122 bp, Homo sapiens
ctgtagaccgcgttacatacactttatggtttctctatcaatgatcctaacaggtcacatcgccactgccattagatctccgtagctttggtcttctccaaattaagacgtggagaaggagc

SEQ ID NO: 93944 - DNA, 122 bp, Homo sapiens
ctccggctggtcaatggcgaatgttggccagccggtcatggttcacctcggtgggccatgcggaggcctactgcagaccctgcagagacaaaagtagggggactgtttttagtgatcttcag

SEQ ID NO: 93945 - DNA, 122 bp, Homo sapiens
tgccagtggttttaccctatggtaggttacgtcatgctgttctaccacagggtagaaccacggacaggataccggggcaccctctgcgtcgacggactcctcgtctgcccagccacaaacag

SEQ ID NO: 93946 - DNA, 122 bp, Homo sapiens
tcctgacctgggacttgtttccagctctcgcgagactttcaggggtcggagcgcgggggccggccgagaggaaagctggaggcgcgggtggggaacatgtctgagtcggagctcggcaggaa

SEQ ID NO: 93947 - DNA, 122 bp, Homo sapiens
gcccacctcctacctttgagtctctcctcttctccagggtacagccaaccctttctccaacgtagccggagtccgagagtcccagttccgcccctccagcccgccccaggccaggtggggat

SEQ ID NO: 93948 - DNA, 122 bp, Homo sapiens
cccagcccctcccttcctttctctcttcctccctacgattgtgcgattgtgtggcatcgccggcatctcctggagtttgctcatctgtcctgctctcccagggcagggtgagcgaaggctta

SEQ ID NO: 93949 - DNA, 122 bp, Homo sapiens
ttcctgatttgcacattaaagagctccattaattaagaatcttggtgtttggcatgttcccgcaggatctgtgcattatttacatggtgaaagtgcaagatgcaagtttctcagttgtaagg

SEQ ID NO: 93950 - DNA, 122 bp, Homo sapiens
cctcagacagagcttgcgccatgttcctccccccacccccccgccagctttctgcgcagacgcagctcgcgcctcctggcagtattaaggtcggaccaaaccactggccaggaatggagggg

SEQ ID NO: 93951 - DNA, 122 bp, Homo sapiens
tttctctcctatgcttagactttaagcctagatgaccagatggagaatggctgcccaggccgctagggaaaatcaggacatgtctccaggggcaaatgcctaggctccaaagctcttgctac

SEQ ID NO: 93952 - DNA, 122 bp, Homo sapiens
ctcatgctgttaataaagacatacctgagactgggtaatttataaaggaagaatgtttaacggactcacagtgtttcacaaagagagtttcagaactaccttggtttttaaaattagagttc

SEQ ID NO: 93953 - DNA, 122 bp, Homo sapiens
attgttttttggcttctcttcaaggatttctcaaaggcctctgaagtcccttctccctcccgtcttactcccaagccattggtcccgtatgtaagctggtggctggaggcatttaagttttt

SEQ ID NO: 93954 - DNA, 122 bp, Homo sapiens
gacggagacacagcctccctacaactcacccagccccagaggcacgtgcatgcactcacacgtgcacggcgaggggacctcatgtttgacacgctctggacttcacaagctcatctcctgga

SEQ ID NO: 93955 - DNA, 122 bp, Homo sapiens
actctgtgttctcagtggccagacacagcaagcaaggctcacagctgtgcaacatgtggacggtcagaccatgcagggggctgcaaggatgctggaagaccgaaatgggaatttcacttcac

SEQ ID NO: 93956 - DNA, 122 bp, Homo sapiens
cccgcgccgaggtggccagcttcgtggcagaccgcttgcgagctgtgctcctggacctggcgctgcagggagcgggcgacgccgaggcagctgtggtgctggaggcggcgctggccacgctg

SEQ ID NO: 93957 - DNA, 122 bp, Homo sapiens
aactcgtcttttggaatgccgtagttagttgcagtttggtattcaagctgtagaatttttcgttgagtgtcagatgtgcatttatggtggatgctgggaaaccttgtaaaattggttattaa

SEQ ID NO: 93958 - DNA, 122 bp, Homo sapiens
gttccggggacgctcgggcggcagcagcttggccatgagggcagttcgagtagtctaactcgcggctgtcaccgccactgcagcggagccggccggccgggcgctgcgggacgggcgggcgg

SEQ ID NO: 93959 - DNA, 122 bp, Homo sapiens
aaattaggtcaagcaatattctaaaactttaaattaaagatgaagggaaacagcataacacggtgagcagagctcttgactagaagtttgtagctcatattttaaacctgagttttctgcta

SEQ ID NO: 93960 - DNA, 122 bp, Homo sapiens
ggccaccgcctgggtgtggtgcccggggtcctgagtccaggcgggggctccaccctgaggcgtgcgtgggtgacgggctcccaagacatgaccacgctgggtgtgaagacaaggccacgtga

SEQ ID NO: 93961 - DNA, 122 bp, Homo sapiens
agtattactgatggctgtctaatccggttagctcccagtcactacaccccagcctcccagcgcctgcaggtggattgggttatcctcacatttgagtgaaactcctgcacaccagacactga

SEQ ID NO: 93962 - DNA, 122 bp, Homo sapiens
gcccaagcacaggcctgcgagaaccttgttcgagccgccgtttaggatggttgattaggacgcgttgcagtggcggtagctcaccaatccagtgcgtgcacccgctcctttattaggctaaa

SEQ ID NO: 93963 - DNA, 122 bp, Homo sapiens
ctagtttgtgtcattcaataccatgcacaagttatataaatggatttctattgagttcttcgccctggagcaaaaatctttccacagtcatttaaaccttcttatcagtggcttacaagcaa

SEQ ID NO: 93964 - DNA, 122 bp, Homo sapiens
gggagcgccccacacgcctgaccccagcgcctcggatcccccacctgcccgcaacctccgcgccgcagccacaccgagtccccgcgccgagccgcggagtccccactcaccggcgtccggag

SEQ ID NO: 93965 - DNA, 122 bp, Homo sapiens
gtgacacagagagggcagcgagagcctgaaggtcacacagcaaaccagagagcacacacccgatgcgcagcacgcttccaccttccacgttcccactgagggccgcacagttccgggaggtg

SEQ ID NO: 93966 - DNA, 122 bp, Homo sapiens
ctgggtagagcagggagtcactccacaccgtggcatcgagcagggagagtcaccccacaccgtggcatcgagcagggagagtcaccccacaccgtggcatcgagcagggagagtcaccccac

SEQ ID NO: 93967 - DNA, 122 bp, Homo sapiens
gcaccagcccacctaccacaccccacctcgcttgaggctgaatgggtaacaggatgaacccgcccctgggctggttttctctgaaccctaactcctgccgttacgccccaccagctctaggc

SEQ ID NO: 93968 - DNA, 122 bp, Homo sapiens
aaatggtgttttgcttcggttgagaatttttaaggcacaggctaattttaggttttccaacgactcttatcatttacttttcgttgggtcctattgatgatattccaggataccacccccac

SEQ ID NO: 93969 - DNA, 122 bp, Homo sapiens
gtcagacaaaccctcgcgaactctagcggaagctgcgggcgttctggagctggacggcggcgacggcagcgcgacagtgtcactgtgctgcaagtcaacgaactgttcatggaaacacggtt

SEQ ID NO: 93970 - DNA, 122 bp, Homo sapiens
ggaagggttttgctgggcccggggagaggggcactcagtggctggctcacaccagcacaccgggggcattcgtgcatacccactctgtgccactgaccaggagtatgatgtctgccaagtca

SEQ ID NO: 93971 - DNA, 122 bp, Homo sapiens
acgaccaactgaaaaaaccggaagggatggaagcagcggatcatctcgcgatatctggagcgtctgcgcctgccttcctgacctgggacttgtttccagctctcgcgagactttcaggggtc

SEQ ID NO: 93972 - DNA, 122 bp, Homo sapiens
agccatggcccggactcacctctgtcccagcgtcagagccaccagctcacagccacagcccggactcacctctgtcccaccgtcagagcccccagctcacagccacagccacagcccggact

SEQ ID NO: 93973 - DNA, 122 bp, Homo sapiens
ggggtgtcttggtggagcacctcttgggaggtgatctgacctgttggttcaggagcactgcgcgtattcactctggcgctcctttgtgcaacaggagaccagaggactcccacggtcccact

SEQ ID NO: 93974 - DNA, 122 bp, Homo sapiens
tgcaactcgctgcacctctttcccctatcctacaggggttaacagggggcatcctgaggccgagaccaagcccagccagctcctcctcacatcccacctcccactacatattctccccagta

SEQ ID NO: 93975 - DNA, 122 bp, Homo sapiens
gaaaagcaccatctccacggagctggccctggcactgcgccatgcaggcaagaaggtgagcgccctacccctcactgggcggagccccgggcagctgcccgcatcccggtggaggcctggcg

SEQ ID NO: 93976 - DNA, 122 bp, Homo sapiens
actatggacccaactgtgtgactctagtgacgaggataacaggctggtgctcactgtgaacgggaaaggtgaccacaacagcccacaagccccatggggcatggcaggactggctgccttct

SEQ ID NO: 93977 - DNA, 122 bp, Homo sapiens
tcatgcaagacttagtgccagtgaaaggagcttctttgcagcagggaaagtcaggccgcccgggcagcccagagcaggcctttcatgttttcctgtttgtttacttggtgatgtttcaggat

SEQ ID NO: 93978 - DNA, 122 bp, Homo sapiens
accccaagatcgcagccatcttggctgccctgactcagcattcccggattcgccagttcccgccatcccagcagccatcttggctaccctgacttggcattttcgcctgttcccaccattta

SEQ ID NO: 93979 - DNA, 122 bp, Homo sapiens
ttcccatgccagcttgatgcgggaccaagtggagagatgccggccttcaaatctcgagcccgtggggagagtgacctgcctgcaacccctcccccggcaaatagtctctatgggggaattta

SEQ ID NO: 93980 - DNA, 122 bp, Homo sapiens
ctcctaatctgctgacaagtatgaacccgccgctgttcgaacccagcgtcgccgcagccccggccaagtaaaagaaagaggtggctgccagcaagccaacgagccttccccgagctccgcgc

SEQ ID NO: 93981 - DNA, 122 bp, Homo sapiens
agtaatcttttttcttgtttcactgatcttgagtactagaaagtcatggatgaataattacgtctgtggttttctatggaggttccatgtcagataaagatccttccgacgcctgccccaca

SEQ ID NO: 93982 - DNA, 122 bp, Homo sapiens
gagttgaaggggtccaaggcctgcaccaccttgttcatgggcccactgtaggtcctcactcgctcatacactacatttttttctggaggctgctgggcttggcttgactgatggtagcagtg

SEQ ID NO: 93983 - DNA, 122 bp, Homo sapiens
gacaaacccgaagtaaaacgactatacttacctcaagttgaacttttcagagagtgaccacgtccctctgtctggcctccttgggttggagaacgtgtgagagaggaagagagagaggagtg

SEQ ID NO: 93984 - DNA, 122 bp, Homo sapiens
gagccgcatctctaataacaaaagcctccagctgtgaaaagtggagctaaatctctctaccgggccgcagcatctctcaagaaccttttccccgcagcacccgtcaaggcccagggccagct

SEQ ID NO: 93985 - DNA, 122 bp, Homo sapiens
ctgctacccctgcagagtgcacggcctggagatagagggcagggactgtggcgaggccaccgcccagtggataaccagcttcctgaagtcacagccctaccgcctggtgcacttcgagcctc

SEQ ID NO: 93986 - DNA, 122 bp, Homo sapiens
acacggcactttcttgggtcacattcggttggaacctcacaagcctcagcaaattcccatcgattccacggtctcatttggcgcatccacaagggcatacactctgcgcgagaagcctcaga

SEQ ID NO: 93987 - DNA, 122 bp, Homo sapiens
tcccggccggggcgtcaggaatgggccccaatcgccgtgggccccgcaccctgcgtcgcccgtaggccccagtagccggaggccgaccggcctcccactacccctcgccctagccaagccgt

SEQ ID NO: 93988 - DNA, 122 bp, Homo sapiens
tacttgggaggctgaggcaggagaatcgcttgaacccaggaagcagaggttgtggtgagccgagattgctccatggcattccagcctgggcaacacaagcgaaactgcatctcaaaaaaaaa

SEQ ID NO: 93989 - DNA, 122 bp, Homo sapiens
tgccatgaaggagacccaaaggcagagcccctcagcactgcctcacaagaatctgtgaaccgccgggccctccgacaggagagaaggaagatgatagagacggacatcctccagaaagtcac

SEQ ID NO: 93990 - DNA, 122 bp, Homo sapiens
ggagtcatgcagaagccaggctggcaggggctcgggccgcagtggacacaggggctgccccgtcccgcgtctcccgcagccggattgtgcccgagagtctcccgggtctggactgggcctgg

SEQ ID NO: 93991 - DNA, 122 bp, Homo sapiens
tctcatccagtatcaccttcttcccaccccttaagtccgccccttttccccgcccttcctcgccattgtgggcagagacatgaccgtccacgtgatgccgtgctcccgccctcctcccgact

SEQ ID NO: 93992 - DNA, 122 bp, Homo sapiens
gctgtagggctggtgggagagggtggcgggcaggaatcaggctgcatttcaggaatcagacggcaggctgtgggaggagagagactggcatttgttcacaccctgaggacagagtccatgct

SEQ ID NO: 93993 - DNA, 122 bp, Homo sapiens
attcatctgagagatgggctaggtccacagtcactgactaaatacggaagattcagtaaccgggtggatgctgtcggggagaggagggctggggccggagaggggtggacgttgtacacacc

SEQ ID NO: 93994 - DNA, 122 bp, Homo sapiens
gtttgcaggttccccgggaaaggaggcgctgagaggcggcgccaccaatcccagggctggcggaaattaggcggtccgaggacttctcaacctgcagctgcttctctttgggggatgctctt

SEQ ID NO: 93995 - DNA, 122 bp, Homo sapiens
tgctccctggggaatgcccgagattctttaatggctttcagacttggtttgatctcaccccgatgcacccctccaccatcacttcccatctcctctctttataatccaggctgcaaccactg

SEQ ID NO: 93996 - DNA, 122 bp, Homo sapiens
aaagtgggtggagtttctctttttgccggtgcagagagaacttgtggcgggaagttggggcgcggggttggccgtaggtccccggcgtgctaagggcggacggaccaggcggctgggccgcg

SEQ ID NO: 93997 - DNA, 122 bp, Homo sapiens
ctttcccaggcagaggcagctgggcatgctccatcggctcccccggggatttcagggccacgtgactctccctccccaagctgtcacttaggatcaggagtaaatagtccccgaaaaggttt

SEQ ID NO: 93998 - DNA, 122 bp, Homo sapiens
cggctgacccctgaccccgatccgcgcaccggagaggctgacccctgacctcccacctcacggggtaaaccctcagctcctcgggctgcactcggcgccaggccccgcccaagtactcccgg

SEQ ID NO: 93999 - DNA, 122 bp, Homo sapiens
ctgttagcttctgtggttactgaccaactggtggcgtttatttaccttcttccacatccacgctttctgtcttgggttttccttttcagagagaactgagctgcttttcccaggcaagacat

SEQ ID NO: 94000 - DNA, 122 bp, Homo sapiens
cctctctatggttttggagccggcggagagcgcgcaagggttggcgggactgcgagtttccggtctgggctttggcgggtctggtttgaagctctcctgtttgacgaaagtatgtctcagga

SEQ ID NO: 94001 - DNA, 122 bp, Homo sapiens
aggcctcagtttccacactggaggagaactaagagctccagctctgaccatgtgtgagtgcgtatgtgactcaggagagccctgccccaggccaggcaagtttcataatcagagtgacggtg

SEQ ID NO: 94002 - DNA, 122 bp, Homo sapiens
tccggagtaattctaacccaggttgcccgccagtcacaacgacctcaggcttgttttcttcgcttggatccagctgccctgcccccagtcactcccagaatttcagggcgcgccccgtggcc

SEQ ID NO: 94003 - DNA, 122 bp, Homo sapiens
agcttcgtggttcatattcttttctaggagaaaggaagggtggatgaggccccaatccatcggttggaaataatgggctatgttttattcctcagtgcactgagaaggagagcaacatttaa

SEQ ID NO: 94004 - DNA, 122 bp, Homo sapiens
attcctaggtatacatccacgagaactgaaaacgtgtgtccacacaaacactcctatgagcgttcacagcagcattattcatgagagctgaaaggtgcaaataacccaaatgtccaacaaaa

SEQ ID NO: 94005 - DNA, 122 bp, Homo sapiens
caaccacagagaagccggactgggccacgtctaggaagaggtaggaagggatcggcgcatcgtttctccaatgggaaaggatgtgtttgcgggccaataagtagccgagaataacacccgcc

SEQ ID NO: 94006 - DNA, 122 bp, Homo sapiens
aggtggaaacagggtccttgggcccctaagtcatgttgggaatgtttccttctctcaagccggaagagctgaggtttatctgagaaatgcctatgtctcttttgacacatcgtagtcactaa

SEQ ID NO: 94007 - DNA, 122 bp, Homo sapiens
ggcacccaccaggcatgaggtccaccaactggaccagtctcctcgcccacccactggccacggccaccaaggggctggccaccaacaccgcacccacctgtggggcctccagcctcttggag

SEQ ID NO: 94008 - DNA, 122 bp, Homo sapiens
tctccacctttaaatgttgacaagtacattttcccataatattttgcaggcctaaggaaacgtgtcgtctggaatgggcttgggggccacgcctgcacatctccgcgagacagagggataaa

SEQ ID NO: 94009 - DNA, 122 bp, Homo sapiens
ggagcctcatttgcaggagatgagtgttcccttgctctattttaatcctggcagcccagccggggaaggttttgtcagaaatggtggaaaacagtgacaaccaagctttctggagtaaaggc

SEQ ID NO: 94010 - DNA, 122 bp, Homo sapiens
tagtaagagcagagctcgtcacactggcacttcttgtccacgttgaagccctcagtgcagcggcccttgcatgactctatgaggaaggagtgtcagtcggtgccaccaagcccagaccaccc

SEQ ID NO: 94011 - DNA, 122 bp, Homo sapiens
ccttaaagggctctgaatatggagatagaacactggagtcgaagtcccagccccctctgtcgctctctctgaagctcagtgttgtcgtttgcaagatgaggacaatatagcatgcaacctca

SEQ ID NO: 94012 - DNA, 122 bp, Homo sapiens
agcctatagctgcccgggagtacagactgtaactgctcctcactgcgttacccagtaatgcgctgatcgggggagggggcgggggggccggggagcgagcgggagagcgagcaagcgagcga

SEQ ID NO: 94013 - DNA, 122 bp, Homo sapiens
tgccaggtggagcgcacatctgttcagaccatgccacagacgacgaagaatagaaggtggcgtgccaggtacaaagcaaatcccagcaagtggccaagaatgcccatgtttaaacccacatt

SEQ ID NO: 94014 - DNA, 122 bp, Homo sapiens
agttgaggagatgcagagaagccccttgaggcaaactcagcccaggggatctgagctgggcgtggagatgaacagaattccgggtgcaccaaaagttgccattaaatgtcctatttacgtga

SEQ ID NO: 94015 - DNA, 122 bp, Homo sapiens
ctaggactacaggcgcgtgtcaccatgtcccagctaatctttctttatttttagtagagacgtgttagccaggtttcaccgtgttaccgtgttaccgtattccagccgggctccgcccctgg

SEQ ID NO: 94016 - DNA, 122 bp, Homo sapiens
cgcacacgcattcacactcgtgcacacacacactcacaccgagacagaggagggcctggccggagcaggggtgtcagctccaggaccaggagttcccaggcagaacctgatggtggggcggg

SEQ ID NO: 94017 - DNA, 122 bp, Homo sapiens
gggctgctggcctggctcagccgaggggaagaggctgtgcttttcctctgagaaagatgacgttgcactttcatattgaggaaaccgcttgtggttggtggtggggactggtttttattttt

SEQ ID NO: 94018 - DNA, 122 bp, Homo sapiens
gtgcgggcttctcggtccctggcaacccgctggtcactgtcttccaggactggtagagggcggccttgggcccctgcaggcgggaggcaggagacggggcctgcccacctcgccccaggctg

SEQ ID NO: 94019 - DNA, 122 bp, Homo sapiens
ggccagcctcggcctgcagcacatcccagattggtctttgtaacaaggagagaggctgtgcgggtgtctcttgtccaaggccaggagggatgtgtccaacccaaggactggactgtgggcag

SEQ ID NO: 94020 - DNA, 122 bp, Homo sapiens
ggggcagccaggtttggagcagggttctaggattacacggcaaatccccaacttcagcaccgcggacagcatcacctcccgcccagggagaggcgcgcgcctccttgctccgcccccgcccc

SEQ ID NO: 94021 - DNA, 122 bp, Homo sapiens
ggcgttcctcgaaatcccgtagtaatctgaccggaatcatggagctaccatccagatactcgcggaacaacagctgccggttaatttctaagaaagcgagctgctgatgggggtctggcgcg

SEQ ID NO: 94022 - DNA, 122 bp, Homo sapiens
ctttcagaaagtttcctctcccaagggactcaaagaagctaatgtcgttaggagctcctccgacttgcgccaaaagcgtcattccacgtggacccgcttagtttaaacggggggttgggggg

SEQ ID NO: 94023 - DNA, 122 bp, Homo sapiens
cctgagtctgacccctgcgctgtacacggcactgttcatcacacacgcggctccagagcccgacccccgcatgcacacagcgctgttcaccacacagggctcctgagtctgaccccgcactg

SEQ ID NO: 94024 - DNA, 122 bp, Homo sapiens
ttcttctcaaggtttgttcagcagcttcacttctaggcgaaggcttcatgaaccaagtgacgtcaaccaacaaggcttctctctctctcctctctctaacaatgaaagttgctgttaacaag

SEQ ID NO: 94025 - DNA, 122 bp, Homo sapiens
gagggagaaaatatcatatcctgagaaaacactccagatttgctatcttaaatctggagccggttatcctacttaattaccatatcctgagaaaattaccatctcctaagcaagccgccttg

SEQ ID NO: 94026 - DNA, 122 bp, Homo sapiens
tgcgctttgccagcgggcgccccgccttcgtccgggtacggaggggacactcccatctagcgcccagtgaggctaaagccgctgacagccccactaggaacgatctggagtctggtctaggg

SEQ ID NO: 94027 - DNA, 122 bp, Homo sapiens
gctccctttccattctgttccgttttgatcccggccatcctcacgggtgagcaggtggctcgctgcagctgggtctgcgtttccccggtgagcagggattctgagcctgtttcatgcttgtt

SEQ ID NO: 94028 - DNA, 122 bp, Homo sapiens
ccaacccccgccttctgtcatttatcctgacattttccaggtcagtgtaaatagccaaggcgctccagttccgcagccctgtacccatccgatgttatcggctctccccgcaagtaacaatc

SEQ ID NO: 94029 - DNA, 122 bp, Homo sapiens
tacacgcacacacatctaagtgaaccagacacgttacataaaatgggtgcctgcagcagacgcagtgtgtgcatccacgcatacgcatagaagcaaactagatgcttgtatataaattccgt

SEQ ID NO: 94030 - DNA, 122 bp, Homo sapiens
attatatatcattagtatgttgacatatattttcagtaacattgttttatgttcctccagcgtaacatgtagctgaacagtagaaggtagaaaataaattatgacatctcttctaaggcctg

SEQ ID NO: 94031 - DNA, 122 bp, Homo sapiens
gcacaagagagaagggagagaagctattctagagtaaaacagacgtaaagtcttaagaggcgttaacaacgaattacggtgctgaacaaaccaactatagaaaagacattttgagataatca

SEQ ID NO: 94032 - DNA, 122 bp, Homo sapiens
ttcgttagggtgctgtattacagaaaaagaaaggcctaaaaacacccccagccctggtcgcgcctttcgctaccgcctgagtctggagccgacagctccacctcttctgctccctggaccgc

SEQ ID NO: 94033 - DNA, 122 bp, Homo sapiens
taactggccactctttcacaaatcatggcaatgaatgtggtgatttctcccttggttacacgatctaaaatataataaatgatcgtactggtttgcttccataagtccccaaaatgttttct

SEQ ID NO: 94034 - DNA, 122 bp, Homo sapiens
ttctttttggcgatgggctgttcccggtgagcgatccggctgtgagccgtcctcagcagacgctccaggctgcagggacattgagcgccttggtcccagcctgggtggcgactacagttgtc

SEQ ID NO: 94035 - DNA, 122 bp, Homo sapiens
ccgcccgcagaggtttggaaatctctgagacccgttgtaattatttctgcccagtggatccggctcttcagcgtcacgagagccgggcagaaatgaaatcaactgtggcaaggccttggctg

SEQ ID NO: 94036 - DNA, 122 bp, Homo sapiens
cagcccatcgcgcgatcagccggcccctgccttccttcccagcccgccaagcccctagcccgcgccagcagcccccggccactgaccgctgtttacaaacacagcctgggggtggggtgggc

SEQ ID NO: 94037 - DNA, 122 bp, Homo sapiens
ctgctgaattcattagcgaatgtttaaatttacaaataaagtaacataaaatagcatcctcgcaattttttaataatcagagataatggaagtcatacactaagttcatcctgttccttttc

SEQ ID NO: 94038 - DNA, 122 bp, Homo sapiens
atggaattttactcagagataagtcagactttccccattcagttacctaatgttgaaacccgattttttttaatggagaggttctgagtcaagagcctggtatgctcatttatatctgttaa

SEQ ID NO: 94039 - DNA, 122 bp, Homo sapiens
tggtgggaatatagtaccttaccagagactcatctatttcctcatctgatccatcgtcatcgctgtcttcatcatcttctcttactcttccataccctgaagacccaagtagacttttaaac

SEQ ID NO: 94040 - DNA, 122 bp, Homo sapiens
caggtgtttaaactcaatctgctaaatatggcttgataccttgtactcaagcatcagtcgcgatgatctgttaatcacatatgttactcataacaaggattcttcttcccattaccatatta

SEQ ID NO: 94041 - DNA, 122 bp, Homo sapiens
tggcagccctgggagcaggccccgctggcccctgggagaagacctccatgggcctcagcacgacactcctaggctggcagccgaggcctggttcacgtgatcccttgatttgtgttttctga

SEQ ID NO: 94042 - DNA, 122 bp, Homo sapiens
tccttttgaaccctcctaggtctcctcgccccgcccactcgctgggctgcagcttcctaccgttccgtactttccactcaacccggtaaccccaaacgtgcacggtccggccggggcgcgcg

SEQ ID NO: 94043 - DNA, 122 bp, Homo sapiens
gtggcggccctggtgcggtgacagtgccatctagcggtggcctgggggcggtgctggtcccgggctctcgggaaagtccacacacctggctcagccaaggaggtcagcccacggctggtccc

SEQ ID NO: 94044 - DNA, 122 bp, Homo sapiens
tgagagcaaaaagccggctgggcagaaagagggggagggggctgggcgcgccttcgagtgcgctggggtagccgcggcgccccaagttgaaccacagacgaacccctcttcatctgaaacct

SEQ ID NO: 94045 - DNA, 122 bp, Homo sapiens
agctccgcatcagcagggccttcaccagccccgctctccctgcactgtctgtgctggcaccgcggccagacacatgaaatggtaggtgctgcttaaggatccactgagcaaccgggcacagt

SEQ ID NO: 94046 - DNA, 122 bp, Homo sapiens
agaagaaggacaaggcgaaggtacatggggggtgctccggctggaagctgtggggggctccggtcagtcagaagctgcgcggggctccggtcggaagctgcggggggtctttcgtcccagcg

SEQ ID NO: 94047 - DNA, 122 bp, Homo sapiens
tagaaggttcctccatgacgtgtagacataaccagaaagccgtcacgctgggaggtcggccgcgggtgcgtcttggctccgtcaggatcctggtgagggtggcaggtcaggattgtaaactc

SEQ ID NO: 94048 - DNA, 122 bp, Homo sapiens
gggagagagcagtaacccccgtggagcctgcacacgtcctcagaaagtccctgatggaaccgggtcccaactgcctgccaggacgagcgacagtcctggcttcagttgattctcctcgtgcc

SEQ ID NO: 94049 - DNA, 122 bp, Homo sapiens
gaagacagacactgttaactgtcctaactagggcaaatgtttgagtcaccagagcttatgcgaacatgtgtagttccgtatttgaatctagtgagcccattgctaatgatggcatacagttc

SEQ ID NO: 94050 - DNA, 122 bp, Homo sapiens
caatgggaagagcaagccgtgggagccctttgtggcagaagagtttgcacatcagttccacgagtcagtgctgcagtccacccagaaggccctgcagaagcataaaggtaatgaggctgcca

SEQ ID NO: 94051 - DNA, 122 bp, Homo sapiens
gctgagcgcgcttgaggagaaaaggtggaaagaggataggaagggaggcacagagaggagcggtgacgggccaaggtcacacagccggccccctgggtgcccgacacctcgaaccggggtcg

SEQ ID NO: 94052 - DNA, 122 bp, Homo sapiens
ccccatgagccactgccagcagctgctgtggagcttggttacccatatccgtgacatgaacggtgtcctttggagaatcttgttccctgtggctgtaagtattcttatttttataatatttt

SEQ ID NO: 94053 - DNA, 122 bp, Homo sapiens
ctgccaccgctttactgcaaaactgacgggcgcaaaaacatgagtgactccgcgggagggcgcgctggtctccggcgttaccccaagctcccagtgtgggtggtggaggatcatcaggaggt

SEQ ID NO: 94054 - DNA, 122 bp, Homo sapiens
ttaaggactgtttgtgccgacccttccccaggaagtgacggcatctgcttctgggtcgctcgggtgctcttcagcctgggctccaaccttatctcatcgtggcctacttgaaccgagtgtcc

SEQ ID NO: 94055 - DNA, 122 bp, Homo sapiens
tgttccctcttgccaggaccttctcctggggctgcctgcctataatttaatcaagtccctcgtccatattttatattttatatatttttctgccacccctaggaagagttgcttcctgaatc

SEQ ID NO: 94056 - DNA, 122 bp, Homo sapiens
catttatattcatatagtgacaggctgtgctccatattttacagtcattttggtcacaatcgagggtttctggaattttcacatcccttgtccagaattcattcccctaagagtaataataa

SEQ ID NO: 94057 - DNA, 122 bp, Homo sapiens
ttttatcacctctgaaagaaacccagtacccatttgatgacaccctcctttccccccttccgccaaccacgaagccacttctgtctctgtggattgacctggatgtttcatgcaaatggaat

SEQ ID NO: 94058 - DNA, 122 bp, Homo sapiens
ggagctgggcctcaatgcgcaggcgccggcggaggggcggcggacccggctcctgccctccggggtctgtccccaagcctgcctgccatctgcccccgaaggcccccgtgggccccagcttc

SEQ ID NO: 94059 - DNA, 122 bp, Homo sapiens
aacacattggctcggaaatgtacagtcataggcaatttataaaactgacaaaaattattccgctaatgccaggaataacggaggatattcagaaagaaaaacaggaatattttcttgtgtaa

SEQ ID NO: 94060 - DNA, 122 bp, Homo sapiens
gcagttgggttggttacagctcagctcttgccttatttgaacgtggtctgatcagtggggcgcctgtgattgactgaagcttggctgctgtgattggctgagactcagctgtttgttacaat

SEQ ID NO: 94061 - DNA, 122 bp, Homo sapiens
tcatcaactcagtcaagggctttagttggcccggcgtcggtgagtggcgggtcttagctccgccctggccgtccgctgcgctgcctgggtcggcgccgtttccagttgagagatggcggccg

SEQ ID NO: 94062 - DNA, 122 bp, Homo sapiens
cctccctgggaaacgtcagtgtgaagtcctcacggaagcctggggtgttggtgtctgacacggtgttttaggtatggctccgtgaccccttccacttcatcttgaaaattatcttcaatgat

SEQ ID NO: 94063 - DNA, 122 bp, Homo sapiens
ccagttgcacagctagtatttggcagaacctggatgcaaacctggctctgattccaaagccgaggcctcttggccctccagtctcccatttctcagcgcttcccttggggagttgcctctcc

SEQ ID NO: 94064 - DNA, 122 bp, Homo sapiens
ccccgggaccacgctgcattcacccttcagggctgcagctctgtgagttttgagcagcaccgcctctgtcccctgcatgtgggcatctccaccgcccagaactgctcatgggccctggcact

SEQ ID NO: 94065 - DNA, 122 bp, Homo sapiens
tcccaattcctatctgtcagttccttctcggcttttggccatgttttcgaacctcctcagcggccgccgctgcactcgctgggtcttgggtgccgcgaaacccggggcgcagcggcgcaggg

SEQ ID NO: 94066 - DNA, 122 bp, Homo sapiens
gaggtcttgtgaaaacctggctccttttaacacggccctcaagctccttaagtgaattgccgtaactgattttaaagggtttagattttaagaatggtgctctttcatgcctattatcagta

SEQ ID NO: 94067 - DNA, 122 bp, Homo sapiens
aaggtgattgaataagtcggtatttagcatagctcagctgtaacatcctatcagtgctttcgtttgaaccatagaaaggtatacgcagccttatcttgagatactgtcttcagtagacaaaa

SEQ ID NO: 94068 - DNA, 122 bp, Homo sapiens
catcttgctggacaccagccaaacgttcatccgccaaggtaagtccctgtgaaatggacccgcgacctgatgcgctgtgcggctgtcacatgatctcggcacaccccggaaggcgttctgaa

SEQ ID NO: 94069 - DNA, 122 bp, Homo sapiens
tggaacggccgcagttggaggctcagccacagataaaagccagctccctaaataggcccccggggaagctgctcccgctgcccccagaacagaaaggagagcttcgcacagcaacaggcgag

SEQ ID NO: 94070 - DNA, 122 bp, Homo sapiens
agggccgccttcgcaggttgtttctggcgatgcctgtctgaaggcctcagactgaggccccgcccactctccctctcctctgccctttggacgcgcgcctcggttccgaacgcagcggacgg

SEQ ID NO: 94071 - DNA, 122 bp, Homo sapiens
tccatcccccccaaaaaagtcaggaagctgctgagatcatccaggtgaacggtgaacccacgtggccccaactggaacagggacagcagaaaagatgacaagaggaggttctggagatagaa

SEQ ID NO: 94072 - DNA, 122 bp, Homo sapiens
tccctcctcaggccgcgcatcttccaccaccatctcccaggtgtgtccttcacgagcaaccgctactgaaagacgcctgaccctcggctgcccatgggacggttcttttcttcccatggctg

SEQ ID NO: 94073 - DNA, 122 bp, Homo sapiens
ctaacgaaaggtcctcccagagtgagcctctcacctcaagtcttaaaggactttggcctgcgcctccagcctctggccagttggctgcgctccaccagtaagggttctcgagcccccgggca

SEQ ID NO: 94074 - DNA, 122 bp, Homo sapiens
gggagccggaaggttgagggcctgtcatagggaattagaggccctgagcgcacatgctcccggtgggggcaagtgggatctgttgacactgtgagtcagctgctgagctggaaccaggcccc

SEQ ID NO: 94075 - DNA, 122 bp, Homo sapiens
atgaggaattggatgagggagacgaagaggaagaagtagcgcaggtaataccagcagccccgagagctgccccccgcccgagcgtaggaccctccgtgctccatggccagacccatttgctc

SEQ ID NO: 94076 - DNA, 122 bp, Homo sapiens
cgaagctgctggtccctgaaaagctgccgcctaccctggtctggagcccctgcgagctggcgtagagcaggaaggggttgcatcacagctgagtcctcccctgcgcagcacatggtacgatg

SEQ ID NO: 94077 - DNA, 122 bp, Homo sapiens
acttgtctccatccgtcactgatcacatagacccgcagcactcagccaggcccctcaccccggctctgctctcaagccgggcttggctccccgcctgcccaaatgcgttcaacatcccccga

SEQ ID NO: 94078 - DNA, 122 bp, Homo sapiens
gaaggcaatttattaacagaaaatattttgaggaatcttgttcacagacggcgaccacggcgaccccccttcctgcgagtgctgtcagaggggatgggggtgacatcctctgtggggaggaa

SEQ ID NO: 94079 - DNA, 122 bp, Homo sapiens
tgcgcatgggcataccgtgctctgcggctgcttggcgttgcttcttcctccagaagtgggcgctgggcagtcacgcagggtttgaaccggaagcgggagtaggtagctgcgtggctaacgga

SEQ ID NO: 94080 - DNA, 122 bp, Homo sapiens
gggcaggtgggcgccctgggcaggacgcaggggaccctgctttggcacagatgctagagccggatgtagtcatgcttccagggcaccctctgggcccagtgccccacagcccggtactagct

SEQ ID NO: 94081 - DNA, 122 bp, Homo sapiens
cccggccgccgaggtatcggtgactaagcactgattgtgttcctgactcagaccagttagcggatcccgcgggtctccattcctctctgtaccccttttcccgaccgttttagtggttcctg

SEQ ID NO: 94082 - DNA, 122 bp, Homo sapiens
gtgtgtggttcctggtcccgggcccaggccggctggtgcgtaagagccttgacttggactcgcgtgagcggctgctcagaggagctattgaacccaccacgtggaaatctggaggcattgat

SEQ ID NO: 94083 - DNA, 122 bp, Homo sapiens
tattaagatctgttgttttccctcatcttttgtagtagctaaccacagtatcacctctcccgtatttactatactctttgcctgtagccagcaaagtaacatccacagaggcagtgagagaa

SEQ ID NO: 94084 - DNA, 122 bp, Homo sapiens
gacacaggggaagcaccagtggtcagagagactacagcagctggggatgggtgggaggggcgtattgccctaatctggagggtaagacctagaaaagggcctggaaaggccattctccctca

SEQ ID NO: 94085 - DNA, 122 bp, Homo sapiens
gaccagaggtccagcaccttgcctaaaccacacctgctgggatttggattcaagtccaaccgtacagctcaaacgctcagccacttccctaaagtccacccccagctacattaagtaaaaaa

SEQ ID NO: 94086 - DNA, 122 bp, Homo sapiens
agcctgaactccgaggtggtcatggagacggccaaccgtgtgctgcgtaaccacagccagcggcaggggcggcccacgctgcaggaggggccagggcttcagcagaagcccaggcccgaggc

SEQ ID NO: 94087 - DNA, 122 bp, Homo sapiens
tctgtctatttctctgtttatctttctgtccttcaatctgtgtttttgtttctggctctccgtcagtgtctttttctctcctctctctcttgctctgccatggctatttccactgctctatt

SEQ ID NO: 94088 - DNA, 122 bp, Homo sapiens
gcattctgtgaaccgcagcgctctgggtccctcccgctggtctagtatcatttcagtgaacgtcactctacattttttgtgtgtgtgtgagatggagtctctgtcgcccaggctggagtgca

SEQ ID NO: 94089 - DNA, 122 bp, Homo sapiens
agctggaccgaggccgcgtcgttcctgggcttactattcccagacccggactcccgattccggagtcacggcccaggacgcgaaaagactctacactggcaccacgctcctccttaggcggg

SEQ ID NO: 94090 - DNA, 122 bp, Homo sapiens
tagaacattttttggggggtccctgagagacctcccaaaccagtcattaaccctttcagacgtgaattcatctgactgtgccataatttaacccatgaatcttcatccataaaaagagtttt

SEQ ID NO: 94091 - DNA, 122 bp, Homo sapiens
agctgccggagcgcattttcctggacaagggcactgagtacagcttcgccatcttcctgtcggcgcagggccactcgttccggacgcagtcagaactcggtctgcgcgggaccagagtggag

SEQ ID NO: 94092 - DNA, 122 bp, Homo sapiens
tggctagaagggttttccgtcaccctccattaccacgcagagagctgtaaagatgagtgtcgaacatttccagctccaggagttttcattttaaagttggttgatttgttgcggcttccccc

SEQ ID NO: 94093 - DNA, 122 bp, Homo sapiens
ctcttgccttaggtcttgctggagaacacaaatctctcggctacaacctccttgtctcttcgccggcctccagggccagcctcccagtccttatggggaaatccaactcagtatcccttctg

SEQ ID NO: 94094 - DNA, 122 bp, Homo sapiens
tcttttctgtgactcatccttttgtttttgaatgatgctattttgctcattaccctctcacgtaatgctttttttgtatctttggctctccctttgttgtttgtttgttttgtttttaactc

SEQ ID NO: 94095 - DNA, 122 bp, Homo sapiens
tgcggcggcgctgggaagagactgtgcccctgcagctcccctgtcaccggctccaaggagcgtcgggctccccccgcccagccctgcagcacccatccggcaacgccagactcggcgcaacg

SEQ ID NO: 94096 - DNA, 122 bp, Homo sapiens
ccacccctctacctcccctgccgcccggggggcgcttcctttgttcgcggggaagggctccggtgcccctaccccgaggcagctgctagatggcgctgttactccactctgcgcgctccgcc

SEQ ID NO: 94097 - DNA, 122 bp, Homo sapiens
atgacttaagaaagagaacaggaacaatacttcgttctctttttctcagatgagtaccttcgggaagaaggaaggaagggaggggagagggaggaagtcaacaaccctttgctttcctgaaa

SEQ ID NO: 94098 - DNA, 122 bp, Homo sapiens
gcactgcccacccctgacactggctgcgagcacttttcactgctgttctgcatgaataagcgccaggcctcttgccaattgtccccctcttaaaaggcagccccggcgaaaggccttttcaa

SEQ ID NO: 94099 - DNA, 122 bp, Homo sapiens
gaaaggatgcgagtggaagcgcttcctgaagaataactgggtgttgctgtccaccgtggccgcggtggtgctaggtgagcggcgcggcgggtgggcgatgcgcgcaccctcacgcgctctct

SEQ ID NO: 94100 - DNA, 122 bp, Homo sapiens
cctgatttctctgtgaatccttggcttggtttgtgacccggcttttgtctctcactcctccgcagagcccggcgtttgcacggtgtttggagatccccactacaacacttttgacggtcgga

SEQ ID NO: 94101 - DNA, 122 bp, Homo sapiens
cgctcccgggcccccgccgccaccgcgccccccgcgggagatggaacagcggaaccggctcggtgccctcggatacctgccgcctctgctgctgcatgccctgctgctcttcgtggccgacg

SEQ ID NO: 94102 - DNA, 122 bp, Homo sapiens
caaagcaaaggttttagtacgaggtaagaaccatcagcgtcgggctggctgctggtcctccgctcgagcgggtctcatagcaaccacttcaattgcttccaataaaaatctggcttttgcat

SEQ ID NO: 94103 - DNA, 122 bp, Homo sapiens
cgcaggatcaaaggctgtccaagggcacggatgcctccccactcccacccgggtgctcaccgacgcgcccgctcagaaatacaatatttgtagggtctttttcataaaggtctttatgggtt

SEQ ID NO: 94104 - DNA, 122 bp, Homo sapiens
gccagggctctgttcttctccttctgtggatgccggggtcctactgcctctcttgagacccggattgaattccgacctccccttgggagcttcccgggaccccaggtcttccttttccgaat

SEQ ID NO: 94105 - DNA, 122 bp, Homo sapiens
gaaagacatttcagattcttcatgtttttatttctctcagaactttaaaatgtgaacattcgataatctagccagtctttacttccaggtaacttcttcactgggttgcaattccctgtgtg

SEQ ID NO: 94106 - DNA, 122 bp, Homo sapiens
aggcggggagacggttgtcgggctggttcctgtgctggatcctgggcggcctgaggggtacggagactctgggggagggagacggcagcggcatggcggccgggtgtaagacgcccgaccct

SEQ ID NO: 94107 - DNA, 122 bp, Homo sapiens
cagctgtaccttccaaagagaggacggtataatgaggtatgtctgaccccaccttcccatcgtggcctcaactagattttcaggtttactttggaataaccttggccaagaaggaaggtggg

SEQ ID NO: 94108 - DNA, 122 bp, Homo sapiens
tcctgcccctccctacccctccctacccctaggccgctccccccttcctctgttgggatccgatccttgttcgctcttgcaatcccgcagcccggagttttgccccgtgcattaaaacatgt

SEQ ID NO: 94109 - DNA, 122 bp, Homo sapiens
cccacacacagggacagccccaggcacagccccagcagcaggagcatggcggggcgagggcgcgggacgctcggggacccggcgggacacgctttgcagcgcccagggctccagccactgcg

SEQ ID NO: 94110 - DNA, 122 bp, Homo sapiens
cctgcaggagcccaaagcgccggaccctcccactgccggcctggggcctggccgagggcacggcgaggaagtccctcaaggcagaacccaacttgaatgggtgttttctttgcctctgcaga

SEQ ID NO: 94111 - DNA, 122 bp, Homo sapiens
cagaggactctaagatgcaccgaacgccaccatgggcggttatggaagagaaaagctgcacgcacactacatgcacacacacatgcaagttcacaataaaatgcagggggatgtgtgtccac

SEQ ID NO: 94112 - DNA, 122 bp, Homo sapiens
actagagagacaaaaggcgagcgcaggaggctgccaggaagcgggagccccacggggtgacggccacttcccgccgccccggggctggcctcgctgccgtcaagcggcccgtgcgcgctttg

SEQ ID NO: 94113 - DNA, 122 bp, Homo sapiens
aatatcaaaggattcaagagaacctggaaaaattaaagatgctctcaaccattccggcagcgttttgcaagaaacaactgtctttctgagagtgagaggctgatgtggaggctgccgggtgg

SEQ ID NO: 94114 - DNA, 122 bp, Homo sapiens
gatcgggccttctaactctgtccctacctctctccagatgccacagggcccagtgggctccgggtcctgccccagggctacggctggaacctgctgtatggctccctgctgctgggccttgt

SEQ ID NO: 94115 - DNA, 122 bp, Homo sapiens
ggactaagcaggcgctctgtcttcgcccccgcccagggtgggcgtctcctgaggactccccgccacacctgacccgagaccgcgcgcccagcctagaacgcttccccgacccagcgtagggc

SEQ ID NO: 94116 - DNA, 122 bp, Homo sapiens
cttcgctccctttttgtgccagctcagcagtctcattgaagcgagcggcggcggccgcgccgtggtaaacaagtgccgggctgtcaatcaagaactagaccggagcaggagaggaccggcct

SEQ ID NO: 94117 - DNA, 122 bp, Homo sapiens
cgggccaaggcccgcggcccttctccatcgtgtgcgcccggggcggggcctgggtcgctccgccctctgcccaacccctcggctcctggctccaggggccccgagccctctcgcccctgtcc

SEQ ID NO: 94118 - DNA, 122 bp, Homo sapiens
tacagccagaggaagggccacaaagcacagcaagcagcactgggaagattcaggagatctcgatcaggccccatcacagtcctgtgtgactttccccatctgggcctcaggtgccttgtcaa

SEQ ID NO: 94119 - DNA, 122 bp, Homo sapiens
aacctaaaggaagatgccacaccgtcatccaacaatcaaattagaaaagcttgctctatgcgtcctatgactaaagcagaaaggccagctcccaaaaatatagaaaataaaataggattgat

SEQ ID NO: 94120 - DNA, 122 bp, Homo sapiens
gcacagggtgcaccgacatccccacccacggctggtggagagcaggagaagggattgctacgaccaacctggaaaagtaacggcgttatccattcacatgaagcattcacatgcctcgggaa

SEQ ID NO: 94121 - DNA, 122 bp, Homo sapiens
gcggggcgcagcggaggctggcaggcacgccctgggaggcaggcaagttgattccaaggacgagtcaccctcaacctcttttagcccacaactgggtggatcaaggcaggagccaacacttt

SEQ ID NO: 94122 - DNA, 122 bp, Homo sapiens
tcagggcttatcacggtggctcacctgctcctgcggcttcatcatcatccagtcagagtccgtggaagcggagctggagatgctggggataggggttggggtcgggtggcaggtagcatgac

SEQ ID NO: 94123 - DNA, 122 bp, Homo sapiens
aagctttggatcatattagatagcctactttccatggctctgactcagtcctttctcatccgtaggctgttttgttcattgccagtcttactccacctttcctctggcccagactgctccac

SEQ ID NO: 94124 - DNA, 122 bp, Homo sapiens
tcagggacattaggtgactgcccaaagccatactgctggtgggccccggagccaaggtttcgacccgaatctcttgaggacaaggtgcagttcctttggcccacacatttacaacagagaaa

SEQ ID NO: 94125 - DNA, 122 bp, Homo sapiens
agaattgctggggatcctcgaagccgccggcagcgcccgatgccagcttgtcccatcaggcgttggtcccgacctgcactcagccacctgcccccggttttgtaattgagcattgaggggaa

SEQ ID NO: 94126 - DNA, 122 bp, Homo sapiens
gcagagctgggctccgagccggatgcgccttcctttcctctccagagcaggctgcccgcccgcggaatcccgcacgtagagcaacctcgcagcaccctcagaacagccccgctggggcgcgc

SEQ ID NO: 94127 - DNA, 122 bp, Homo sapiens
ataatggagtgagaaccagatcagctggctgcagagtgtcctctttcagtctaaatagcacgtgcctgatcaactggaagaggagggtgctcccacactctttttttttttctttttttttt

SEQ ID NO: 94128 - DNA, 122 bp, Homo sapiens
agcgggctggactggggtctgagaagggtagctggtgccagggggtgtcattcatcacctcgaggcagctccctaagtctgagcgagagcccgagcacttcttatccaacggttccaaataa

SEQ ID NO: 94129 - DNA, 122 bp, Homo sapiens
tgcggcacaggcgtgctgtgtagctgccatgtgtggcttcctccactgaggctggtttaccgcgtctgttcccggggcccctttgttagagcgcaagagcccaggcagcaccgtggcagctg

SEQ ID NO: 94130 - DNA, 122 bp, Homo sapiens
tgctggctgcattccttaaatccctgtttggttatatccaccccaacaacaccagtcactcgggagtcctgtgccagaaacacaagccagggcctgcagtcctcggcctccagctccccagc

SEQ ID NO: 94131 - DNA, 122 bp, Homo sapiens
aggctcagaagaaaagggtggtaggacctcctaaagggacagcagatgccaggagagggccgcaaaggcacagcgttggaaccagagggttcctaccaagttgacaactccaaaagagcatg

SEQ ID NO: 94132 - DNA, 122 bp, Homo sapiens
ctgagaaccaggctggagctggcaggctcagcaggtggctgggagacagcccccgcacaccgcttcctccatgtatgctgttctcttggagcgaatagcttggtgatatgactgcccctaac

SEQ ID NO: 94133 - DNA, 122 bp, Homo sapiens
aaagcaagtctgctcaggagaacaacttgctaatttggacaagaatatacttcactccttcgtacaactttgtgctgattatagatctgcccgccttgctcgacacttcaactgagattgaa

SEQ ID NO: 94134 - DNA, 122 bp, Homo sapiens
gacctcctcagctgacaggattctaactcgggcctagaacacggagcctggagacccgcgcgccgttgaccacagggtttggcgccaaacgaggagggcggggcgaggaccaaggggccggg

SEQ ID NO: 94135 - DNA, 122 bp, Homo sapiens
ggtaggggcggtagtggggtttgtggcactccagcgtagcaggttgcatctgcgggtccccgcccctgccccgcccccagcccctcccatggtgctggatccaggcagctgatgtgcaggcg

SEQ ID NO: 94136 - DNA, 122 bp, Homo sapiens
tgggtatgccctggtgcccagactgggctcctcccagccgcctaggatgagggagactggcgcctctttgctggcctttcttgctggacactccttggagcagaggtccaaggacggagaac

SEQ ID NO: 94137 - DNA, 122 bp, Homo sapiens
gccgccgttgccgccattgacgtcagaggggcgggcacatgaccctgcggggaccaatcgcgcgggcgccccgggctccgggagcccggcgcgcggcccgccccgcccgcggccactctcgc

SEQ ID NO: 94138 - DNA, 122 bp, Homo sapiens
ccatgcaaaatggcggcacttaaacatctttcttgtggtggtggcccggcccagagagcccggagctgccctaggtttagcgcggtgcgccctagagctcggcggcctggggcaagcgaggg

SEQ ID NO: 94139 - DNA, 122 bp, Homo sapiens
gactcagggctgcataggggctatgaggaagagctcagggtgagtggggggccagcagtgcgacttgacaggaggcctggctagggctgtcttcacagccagaagctggggtgacctagaga

SEQ ID NO: 94140 - DNA, 122 bp, Homo sapiens
cagtatgcctcaactccttcatactagtaggaaattattatgttcattccttgagtctcgcggcgtcgggaggtcacggcgtcaggcttcccagacagtcgtaaacgccatgtgtttacgcg

SEQ ID NO: 94141 - DNA, 122 bp, Homo sapiens
ctgcgtccctgcacccttgccctctgtgtggtgtggcgtgtctatcccgactggcgaggccgcgagcccatagtttgctgctgctccttcaccgtccgtgctcattcctcagcctggtacag

SEQ ID NO: 94142 - DNA, 122 bp, Homo sapiens
gagcctgggggagtggtcagtgctgtgaccattctgctcggctgtggtcgtgaaggaaaccggtactggccgggagctcagtgaagggatgtagggtggggaaggagaagtagaggtctgag

SEQ ID NO: 94143 - DNA, 122 bp, Homo sapiens
tggccaggggaatgagagaatgcaggcagacacccacgccaggtcccaggtccctgatcacgctggtctagcttcaaatctgccccgtggcaccaaaatattggcctgttcgtggataggaa

SEQ ID NO: 94144 - DNA, 122 bp, Homo sapiens
tggtagctgctgaaacggcctgccctggctctgcgactggttttaactgctgcagtcactcgtctatcagagcttgccggctcccaaaagcttgtttagtgccaatgagcttccttccttcc

SEQ ID NO: 94145 - DNA, 122 bp, Homo sapiens
acagggtcgattttctgtgaatgcaagtgcgtggggtgggtggtggggcgtcgagctgaacgctggtctggacaggaaaggctcctgcttcatgtcccaccttgaccctcagaggtttccag

SEQ ID NO: 94146 - DNA, 122 bp, Homo sapiens
gcgggggcggggcccagcggggagggggcaaagggcgcatcggccccgcctcgaggccggcggctccctgacgacccccgggacaaacggggaaactgaggcacagagtcagacgcaactct

SEQ ID NO: 94147 - DNA, 122 bp, Homo sapiens
ctgctagggctcagcactgaagcgccacggaaggagtctatagaggctgcagctgtgttccggttcggaagccgaggaggagcgcgtgagagccacagccccggcgcgagaaccacagcccc

SEQ ID NO: 94148 - DNA, 122 bp, Homo sapiens
gaggcactcaggaaccagtcgggtctttggtccctcgagcgagatgcgagctgtgtgcgtcgacgtcagcgtgctgacgtcacgggccggaggtcccggggctgctgggtgcgggcggtggg

SEQ ID NO: 94149 - DNA, 122 bp, Homo sapiens
agcggttgcaggacaagagacgagtaagttatttttatacgcatgtgtgagaggagaaaccgataaagggtggatattattaaatcttaaatgatgatgttcaaattgaacagaacacccta

SEQ ID NO: 94150 - DNA, 122 bp, Homo sapiens
ctggcccgccaggggaggacaggggcctgtccctggggtcatgtaaggggatgtgtgtggcggtggggttctccaagttggggaatcccctgtcaccccaagagtctgcctgttgcctgacc

SEQ ID NO: 94151 - DNA, 122 bp, Homo sapiens
ggatataaattatttaaaaattaaatgaaaacgttgcacactgccccagtgtgtctgctgcgggtctaaggggcgcgccctttgcctgttctgctcagctgctgtgccctccccgccgcgtc

SEQ ID NO: 94152 - DNA, 122 bp, Homo sapiens
ctcttgaaagagggagcttttcactaccttttcctttgtcagcagacagggaatttcagacgtgcccttctccccactttgggagagggctggggaaccacaggacttttattctttattgc

SEQ ID NO: 94153 - DNA, 122 bp, Homo sapiens
taacgcctgctctgtagagtgtgactctacagaccactggggacacttgagatttggtggcgaggcaggtatggaataaacatgttttttaaaaatgtgtaattatgttaaggtaaattcgg

SEQ ID NO: 94154 - DNA, 122 bp, Homo sapiens
gcgtgagccactgcccctggtgttagtgtctgtctgtcaagtcaggagggcagccatgaacgttctgatgtctactgagcacgtgtggcccagaccgtgtgtcaggtgtttaggtgccatcc

SEQ ID NO: 94155 - DNA, 122 bp, Homo sapiens
cctcccctgtccccactcagccgcagcatcccccgctggcccccaggcccctcatccatccgctgcccacgaacccccagccccgcaccctccccgtggctcaggtctcccctatcccggcc

SEQ ID NO: 94156 - DNA, 122 bp, Homo sapiens
cgtttttttccgccagtcttggcggaagcctgagacgcaatagatggagactctccttttcgccttggcgtactctttttttttttttcctccctggtaagatgccaacgcctgttgaatga

SEQ ID NO: 94157 - DNA, 122 bp, Homo sapiens
tttgtccgtgcgcgctcggaaacctggaggcagctccccagttcctgtctcttccccgggcgggtccccacctggcctgtggcgtgactgtgagtcaggggtctggatcctccgaggcccgc

SEQ ID NO: 94158 - DNA, 122 bp, Homo sapiens
aagattcacagagcaaggacagtgctgcccaaacgcagacctgagatccaagacttggctcgcaatgacaccaggctgggtggattttccttcaggcagatcatacaggaagagcttgcagt

SEQ ID NO: 94159 - DNA, 122 bp, Homo sapiens
agtgcgcaggaggcgagcacaggcagtcactgcagcagccgccaggcaggcggctccacgcggccctggacgcccagcccccagctctttgttctggcgcagcctttagcctcagagcgcac

SEQ ID NO: 94160 - DNA, 122 bp, Homo sapiens
agatcgaagctgaggtttgcatttccttttacattgcacagctgcagccatgaggcagaacgctctaaattcttgctttcttacatttgataagcattgggacaaagaatgattaaggctgt

SEQ ID NO: 94161 - DNA, 122 bp, Homo sapiens
ggcagggtagctgcgctgcaggcaggattccctcttttttccgcagtgacaggcggattccggggcctcctcgccacctcctacccccgcagccacccctttctcagtcacgatctccccac

SEQ ID NO: 94162 - DNA, 122 bp, Homo sapiens
ccctgtgggggatgggggactcagagccccacccccagggcctctgaggctcaggacaatcgttgccttggctagattgttacctaggagacaaccccctggccccctggaagaggcctcag

SEQ ID NO: 94163 - DNA, 122 bp, Homo sapiens
tttatcccagcactgcccctaaccagctgaaaggtaggtggtccaatcacatcagctctccgagactcagtttccccatctataaaacaaggagtaggcttgacggtccctgtctcactata

SEQ ID NO: 94164 - DNA, 122 bp, Homo sapiens
tctggcactcccaggactcccggccggggtagctcttcactcctcagcgcgacgtcgtgtcgagttcccaaaaagctccgcaggggctgtagggaggtaagagccccccgtgaccggtcgtc

SEQ ID NO: 94165 - DNA, 122 bp, Homo sapiens
tgggagcccatggacttgccgcgctcctgttcagcttctgcaactttctagccacctgtgcgcccttgggtgtggctaagctcttagacctcagtttcctcccggagcaactcctgcggtgg

SEQ ID NO: 94166 - DNA, 122 bp, Homo sapiens
gaaggagaaatattactgagaagggagtcaggaaagacctggagtgtgttcatggtatcacgtatggtctggtttggcagaaacagtatgcaggagggatatagaaggcagtaaagctggaa

SEQ ID NO: 94167 - DNA, 122 bp, Homo sapiens
gctgtgccccacaagtcctcctcctgatgcccgccctggggcagcccccgaggcggtggccgcctccccgaccctcgcctgggctagtcggtggcacgaggcagctctccaggggttcccgt

SEQ ID NO: 94168 - DNA, 122 bp, Homo sapiens
cacctgcggcccctcagtgctgcgtggcacctccacgtggccatgtcgcttcctgtgggccgcagacacgtgcaggctctccggagggtcacggcctgtcttctgtttgctcatctgttgac

SEQ ID NO: 94169 - DNA, 122 bp, Homo sapiens
gcggcgggcagtgcagccaatgggaggcggcgctgcctagcggctggtaggcggtgcctgcgcgggtgttaggttagcgcgaggcgtgacctagttgacaggctctgaggtgctgctgtggc

SEQ ID NO: 94170 - DNA, 122 bp, Homo sapiens
tatacccagtaatgggatggctgatgacctggccatttttctatttacatagtgcttgcccgccactgaggtgcttctgtgacacctgagagagatagaaatacgttcctcgttgctatgtc

SEQ ID NO: 94171 - DNA, 122 bp, Homo sapiens
aagtccatcatctccttcagacagaaatatatatgacccacatttgtaagagacagactacgccttgcttctttctcccccctatgttgccagttctctttgtcagcaactctcttgtccta

SEQ ID NO: 94172 - DNA, 122 bp, Homo sapiens
ctccaaatctcaatgaagccagctcacagtgctgtgtgccccggtcacctagcaagctgccgaaccaaaagaatttgcaccccgctgcgggcccacgtggttggggccctgccctggcaggg

SEQ ID NO: 94173 - DNA, 122 bp, Homo sapiens
ggtgttcccgctgccgccctccagcattggctaccacggctccatcgtgggcgcctacgccggctacccgtctcagttcgtgcctggcctggatcctagcaagtccggcctcgtgggaggcc

SEQ ID NO: 94174 - DNA, 122 bp, Homo sapiens
cttccaacctagattagcagccgagcgagaggtggcgtctgaacagcctagattagaggccgagcgagaggcggcgtctgaacagcaccctgggatcaggcagcgcacgcttcccacatgtg

SEQ ID NO: 94175 - DNA, 122 bp, Homo sapiens
agatatccgtagaaggagacgcgaagccccgcccaccccaccggaaacgcatttgcgtcacgtccgccccgcccgctgccacttgtggctctgccgctctagcccccggcggagccagctgc

SEQ ID NO: 94176 - DNA, 122 bp, Homo sapiens
cctcccaccatacacctccaaaattgccaggacaaaggttcaaaagtgttctgtttaatacgctttgtctggtagtgcttgggtgcctgtggttggtttctctcactggaaccagtcctggg

SEQ ID NO: 94177 - DNA, 122 bp, Homo sapiens
cttttctgaacagaaagcccaaaacgaaaagagccaagagattccttgagaagagagaaccgaaactcaatgaaaatattaaaaatgccatgctgattaaagggggaaatgcaaatgcaaca

SEQ ID NO: 94178 - DNA, 122 bp, Homo sapiens
caacttggcaaagccggccggggagtcctggagcctgagacagcagtccgcgaaattgcccgcctcccgaaacagatctgctccagcatcccttcgcttccatcacgggctgggagccgccc

SEQ ID NO: 94179 - DNA, 122 bp, Homo sapiens
ttaggccggtctgaaaagcgcaatattcgggtgggagcgacccgatcttccaagtgcgtccgtcacccctttccttgactcggaaagggaactccctgaccccttgcgcttcccaggtgagg

SEQ ID NO: 94180 - DNA, 122 bp, Homo sapiens
agacactggctccccaacccttacagcacggcatccctcctcagacagtaacccgggatccgacccagtctcgcaggccacctgccagcacccggtccttggctagcttcaggtcaccattg

SEQ ID NO: 94181 - DNA, 122 bp, Homo sapiens
ccaacatgaggcaaaaggacgcggccaccgcaggacactgaacagatgtgggtggcgtgccgcgctcccaccccctcatccagtccctgggcaaggcaacagcctccacctcaggctgcaca

SEQ ID NO: 94182 - DNA, 122 bp, Homo sapiens
tgtgttagtggggaaaacgtaaggctgacggcctttgattaactctgtaattttcatgatcgtggtaaaatgagagtggataaattaatctggccagccgcaatccagccctccaggttggg

SEQ ID NO: 94183 - DNA, 122 bp, Homo sapiens
tcctgtggtaccctcaaataaacacaactgtgagtgcctgccattccaaatcagtcttgccggggacatgtggataggaaggtactaggaagacaaggactctgagctttgctgttactaga

SEQ ID NO: 94184 - DNA, 122 bp, Homo sapiens
cacgactccaagatcaagttcccgctgccccacagggtcctgcgccgtcagcacaaaccacgcttcaccaccaagaggcccgataccttcttctaagggcagggccctcgcccgggtgtgcc

SEQ ID NO: 94185 - DNA, 122 bp, Homo sapiens
tacttcctgtcacacccactcagatgactacatggtcaagattccagaatgtgatcccgacgacagctttctaagcatttaatattccaagaggcatcagcagataaaaatgtgcagagttg

SEQ ID NO: 94186 - DNA, 122 bp, Homo sapiens
ccccttggccaggaatggaactgtcagacctcaggcctgttgggaagcctctgggagccacgagcgaatccatcagcgtggctggtgctgaggccttgctgctctcccacggcgggcctggg

SEQ ID NO: 94187 - DNA, 122 bp, Homo sapiens
atagccaccacctcagtcaaggtacagaacttttgcatcaccccagccagccagtgtcctcgtgccacttctactccacgtccccctccccagccagacagtgtcctcgtgctacttctact

SEQ ID NO: 94188 - DNA, 122 bp, Homo sapiens
cactcaccccttcgcgctcgagccaattctcagggcccgcctctttctcccctttctcggcgggggcctctaccctgactccgccccgctccccgggcactgccccaccacgtgacccggtc

SEQ ID NO: 94189 - DNA, 122 bp, Homo sapiens
cctcccgcaggacctgctgctgcagccgccttctgggcgctaggcggacctggctgcagccgctgcagtccaggagctgtgcacgctgctgttacctaacacctcggaacggctccgtctcc

SEQ ID NO: 94190 - DNA, 122 bp, Homo sapiens
gttcaggaatgctccagggccattgccagatgatgtcctccttcatcatcctcccttccccgccagcaacttctccaactccaggtgggggtcctggctcccaggacgcagaggcccatgga

SEQ ID NO: 94191 - DNA, 122 bp, Homo sapiens
cctggggtgtggtcggccctagatccagcttgggagagtggcgcctcccagggaagcaggcggcgagctcctctgggttggggtcggtggtccaggcagagtctggggccttctccacggca

SEQ ID NO: 94192 - DNA, 122 bp, Homo sapiens
ttttggttaaaatttctcctaaatgtgctacagagtgcaaactctgtctccctgccattccgctatatacttactaactattattttattcaagatcatgcatgctctacttgaaggtctat

SEQ ID NO: 94193 - DNA, 122 bp, Homo sapiens
tccaagctggctgccctgtgggggacacaggcccatgccggcaggcctggggagagccaccgcttgctgaggttaggccagcaccagtgggtgtgaggaacccacctccagtctcaagagca

SEQ ID NO: 94194 - DNA, 122 bp, Homo sapiens
cgccgccgaggccctccccggccagtccctgcccctgggcgaagtttggtcttccgagggcgggttgcagtccatcccttgcaaccgtccaacctggccctagcagaggaaaggcgtcctcg

SEQ ID NO: 94195 - DNA, 122 bp, Homo sapiens
ccgcaaccgcaccctgggcctggtggacgtgtcatggaacgccatccgcatcggcatgtacgtgctgcacctggagagctggctgcagtacttcccgctagctcagattcacttcgtcagtg

SEQ ID NO: 94196 - DNA, 122 bp, Homo sapiens
agcaaccgtgggcaccgccccctcctttataagcaaattttattaggtgaggtctagatccgctccgcgtcaccagggcgatctcatcccacaatcctgcccaagcctcccttctcgccccg

SEQ ID NO: 94197 - DNA, 122 bp, Homo sapiens
tggggtttgggacctgcacacccccaggcccttcagccacagctgtgtttggaattcttgcgccgttgcagctgctgacctcggtcccaaaggctgtcggcttcgctgtgctcaccccggct

SEQ ID NO: 94198 - DNA, 122 bp, Homo sapiens
agcttatccattgcgttccggatgtgctgacccctgcgatttccccaagtgtgggaaactcgagtgcataatttgtgatagtagggaactacgttcgcgctttctcttggtgtttctgtggt

SEQ ID NO: 94199 - DNA, 122 bp, Homo sapiens
ctctttttggtggtgtctgaaagactacaagatttagggagagtgattcttggagtctttcgataatgttcctgtgaaccctggtgattttaacatgcttgtggccactcttgcctcctact

SEQ ID NO: 94200 - DNA, 122 bp, Homo sapiens
ggccgtcccgcctgattaaagtattgatgcggcctggacgctaagcatttagctgccagacgtggtgtgagtatcttcccgtctgttcacttcttactgttctgcacttatcaggattcagg

SEQ ID NO: 94201 - DNA, 122 bp, Homo sapiens
cggagagcgccagggcctgagctgccggagcggcgcctgtgagtgagtgcagaaagcaggcgcccgcgcgctagccgtggcaggagcagcccgcacgccgcgctctctccctgggcgacctg

SEQ ID NO: 94202 - DNA, 122 bp, Homo sapiens
aagttgaaaggttttgcgatagacgcggagagatgcatgccgggacttgtagtcccgagtcgtcatagtcgagctcttccggtcacttttagtgggcggcagggaaggtcaaggtgaggctg

SEQ ID NO: 94203 - DNA, 122 bp, Homo sapiens
ggtgggtggtccggccccgagccctcctgactctctcgccaatgcccagaggcgccgcagcgattccagggaggccgcgctctcgccccaaggcaaccagaagcccacgtgccaggagaggc

SEQ ID NO: 94204 - DNA, 122 bp, Homo sapiens
tcgacagcgagtggagggtgccctagggaggggcggcactgttgcggactgctggattcccggggaaggggacgctcgggcccgtgcagtgactttatccaccacttctctgggccgtccag

SEQ ID NO: 94205 - DNA, 122 bp, Homo sapiens
cacacagcagggtgggccaggtcccgtgcagccgttgtacagctactgtcacaccaggggcggtggggagccctgtcctcctcctcttcctcccctgtgccttcacttctgcctttatttca

SEQ ID NO: 94206 - DNA, 122 bp, Homo sapiens
ccagccagccaagccaggggctcagagctgcctttccaagtcttgactttgggagggtgacgaggaaaagcttccctggcccttgcttcagggcctgcattcagcaggactttcctcctgac

SEQ ID NO: 94207 - DNA, 122 bp, Homo sapiens
tcagttctctcgaaaaccactgctcaaaattcacaacactgctgcccctgtttaatacagcgctgcctgacccctccaccaccctgagaacccccaggacccctacagccctgccttcaggg

SEQ ID NO: 94208 - DNA, 122 bp, Homo sapiens
cacaccttacctaacattatctccctcagcagacagcgaatgtgtccatgctaaagcttgcgccttcctggtctttagaacattcaagagcctggcgcacagcagggcctcctagagccttt

SEQ ID NO: 94209 - DNA, 122 bp, Homo sapiens
caggcgaggaaagggaaccatgttgacggccagcttgcgcaggtcggcgttcagctggcccgggaagcgcaggcaggtggtgaccccgctcatggtggccgacaccaggtggttgaggtccc

SEQ ID NO: 94210 - DNA, 122 bp, Homo sapiens
ggggaggagctccccatccaggtcctctgtcccttccgccagcccctcgacctcggtcaccgtcagcagcatggtggcgtgcttggctttcatcgtcagcatcttgcacttggaattcaaag

SEQ ID NO: 94211 - DNA, 122 bp, Homo sapiens
ggtgtgcagggtgacagaatgggaagcaacccatggactgaggcatgaagaagcagccagcggagaagtccagaaggcactgtccctgagaccaggctgaaggagacctccactgtttgcct

SEQ ID NO: 94212 - DNA, 122 bp, Homo sapiens
gtagaaggatgagattccctacatgtaggcgtcttcagagtgaacctgttgctcagggcccgcgagcccacagggctccatgcccactgagcaggctcgtggacgtcggcacgtagctcaga

SEQ ID NO: 94213 - DNA, 122 bp, Homo sapiens
aaggtgacacgctggtctttctgtaaggcaagcctcccacaggcgctaacagtcaggccacgtgaacctcgaacagagttagagaaggcaggtagctcagtggagatgacacagagcggcta

SEQ ID NO: 94214 - DNA, 122 bp, Homo sapiens
cagatgcggaatctctgaggaggctgttggctctccccccatgatagctgccggccaggtcgctcggagggtctccctacccaggagacaacctcacactgccccctgctcctgctcctgtt

SEQ ID NO: 94215 - DNA, 122 bp, Homo sapiens
ctcccgccctagtcctcttagacccgcgaccggaggctccggaagaccccgagccccgcccgctccgtgaccccgcccccacccgtcccgcccctgaaagcgcccggaacgctgtgcgcgcg

SEQ ID NO: 94216 - DNA, 122 bp, Homo sapiens
aagtaccaagactattacttcagtctacagcggtccccgaggaacagacgtatgtgggcccgtggctatattgacctggccatggggcctctgctgaaggaaatcagaaatgtgtattcacc

SEQ ID NO: 94217 - DNA, 122 bp, Homo sapiens
tcccaaatccttgctttttggctctgctgacttattttgtgtgtctcgagaagtgagaaacgtctttcttacttaaaaaggaggaggaaagggggaaagagatggagttttaggaataggtg

SEQ ID NO: 94218 - DNA, 122 bp, Homo sapiens
gaggcggaaatcactgagggacaggcgctgctgaaatctcgcgagagggaccccctccctcgcccggtcgccgacttcctctgcttctcctctttcccccgcccctcctccctccccctccc

SEQ ID NO: 94219 - DNA, 122 bp, Homo sapiens
gaaggagaccctggcttcgcaggggccccggctggggcagaggcgaggggcctgggggggcgctggctttggccccgcctggggcaggatggtgaatctggagtccatgcacacaggtgagg

SEQ ID NO: 94220 - DNA, 122 bp, Homo sapiens
gagaacttcagaaagagccccttgtatattcagtttcttactatttaaatgcatgtgtatcgtaaaattacacaaggccaagaaaaccatcaaaaataagcaccaaagcacaaaaaggagtg

SEQ ID NO: 94221 - DNA, 122 bp, Homo sapiens
aggtgggagccctcgcctcttggatttccctgaactcccgcgttacaagttccctccaagcgataaactccctgtggcgctgaagtaatttgttttaaagccaaatggtgcccttcagctaa

SEQ ID NO: 94222 - DNA, 122 bp, Homo sapiens
gagcggaactgcgagaaggcggcagccaaagtgccattaaagctcggggcggagaggatgcgttacctgggtcccgtctgctgcgagaggcagggcaagctggaggattccctctgaatgat

SEQ ID NO: 94223 - DNA, 122 bp, Homo sapiens
cacacacacaaacacaccccttcctggctccagttccgcaccaccccacacccccaacaccggaagtagatttctcaataggcagggctgggtatgagtcacaggcaattccgttttgtttg

SEQ ID NO: 94224 - DNA, 122 bp, Homo sapiens
tgtgaaggcacttacggtgggtcttagtgtttacagaaggaaaaggtaatcattaacacacgtattccaccttccatgctaagtgtacgctaataaccgtggtttttctgagcaacagatca

SEQ ID NO: 94225 - DNA, 122 bp, Homo sapiens
caggcttccctgccccactctcagccagggccctttccaggacaggaaggcaggcccacacgtaggctggaggccccactagacacacagctcagccaggcctccagggaatggagaagagg

SEQ ID NO: 94226 - DNA, 122 bp, Homo sapiens
ctccctcggccccgctgtccgcttccctgcgacggtggatttcgctgctctgggcctttgcgcttctgtgactggcactgtgtgttatccggtgtcctcaaggtgcctctctgctcatgtcc

SEQ ID NO: 94227 - DNA, 122 bp, Homo sapiens
ccgcagactcggcgggcccgggctggacccctcagtcgctcacaggtttccgtaaggggtcgggggagcattggccttgcttcagcagtgataggcgcgtgccttcccacagcggacatgga

SEQ ID NO: 94228 - DNA, 122 bp, Homo sapiens
ccatttatgcagcccctatgtatgttgctcaaatgctcggaaaatgcacgcaaatccaaacgttggaagaggcagcaattcagacccgttcaccggctgttcccaaaagaagggaaccggtg

SEQ ID NO: 94229 - DNA, 122 bp, Homo sapiens
tgggggcctcgggcagcccctcgcgggaggacgcgctggcggtggcgttggggggatctgcgcgctggccaggctgctgcgtcctctgtgcctcccgccgggccccgacgcccccgaggagc

SEQ ID NO: 94230 - DNA, 122 bp, Homo sapiens
tggctttcccagctcctctggtctcgctgctccacggacgtgtgacgtacgctggtgaaacgaagcccgcttgaatgggggcttcactattgtgtgctgctgaacctaggcctagcgcctgg

SEQ ID NO: 94231 - DNA, 122 bp, Homo sapiens
tccgcgtccttcccggaggcgccggcgcgaggtcctcacacccaggcggctcagtggaggcgcagcagcccaaggagcgccgcccccagcgcccgcgcccatcctggagaactgcatctgcg

SEQ ID NO: 94232 - DNA, 122 bp, Homo sapiens
agcttaggcacgtgggttacttcactgttctctgtaccctttccaaataaaacccggggccgcctgtgtacccaagagcctgggcactgagcagagagagaaaacgtccagggcaacagcgt

SEQ ID NO: 94233 - DNA, 122 bp, Homo sapiens
ttacacaataggcgaacaaccagcgaaatagtcacaaggaattgactaccaacaatgagtcgattggatgaagcatttgtcacatactttaattccagggaataacagaacaggaattctca

SEQ ID NO: 94234 - DNA, 122 bp, Homo sapiens
aaatacatagatattagatagtccaataacttaaggcgcccgtgcaacggagcgaggatccgcgcgcacgggaagttcttctgctgcagggctggagagcgccggccacgtcctagcctcgg

SEQ ID NO: 94235 - DNA, 122 bp, Homo sapiens
ggtgtttggccaagaaagcaccatttgggtcgagggctgtatggaaactgggtgctcaggcggccctggatacccagctttggtttcccagagaccagttagatttctaagaaagaatccat

SEQ ID NO: 94236 - DNA, 122 bp, Homo sapiens
tggtcttgcccgcggtggtcatgtgcagggcgatgacgtactccttgaagtccagggtgccgtcgaggttggaatcgaagctgcggaacacatgctgggcgtaggccttggggtcggtgtcg

SEQ ID NO: 94237 - DNA, 122 bp, Homo sapiens
cagggggcggaacgtaaaacgccttgtggccgacgccctctctctttcacacgtcactggcgtgaccgtccgcgctacatactgcgcctgcgcaagggctgtggcccttttcccacccccta

SEQ ID NO: 94238 - DNA, 122 bp, Homo sapiens
tcggctggcacagggcctggacgaatgaggccagtgaggcatttcagatgcagagtttaccggaatgccagcaaattgcatgataatattttaatccaatgtggtaaaaaaaaaagttttta

SEQ ID NO: 94239 - DNA, 122 bp, Homo sapiens
ctgggatgtgggcttcagggtagctggccaaggagctgccccttcggctgggtcagcaggcggaaaggcacaagcatgaggatggtcttggtccctgggggaggcaccttctccggaggcca

SEQ ID NO: 94240 - DNA, 122 bp, Homo sapiens
gctggaggaggcaggcatcaaagtgcacgacgtccggctgaatggctccgcagctggccacgttttggtcaaagacaatggcttgggctgcaaagacctggacctaatcttccatgtggctc

SEQ ID NO: 94241 - DNA, 122 bp, Homo sapiens
gaccctggatagattagcccccaggtccttccaaagctggacccagacattcttagcttccgcacctgggctggcacggagacttctggaggagctgttggagcctggggctttgtggggtg

SEQ ID NO: 94242 - DNA, 122 bp, Homo sapiens
ctaacccgcgcttggctaaggtccgcgggaacccgtgagccaccgagagagcagagaactcggcgccgccaaacagcccagctcgcgcttcagcgtcccggcgccgtcgcgccactcctccg

SEQ ID NO: 94243 - DNA, 122 bp, Homo sapiens
agtgcgcttccaattgggactgagcaaatggaggaaaaggaaaccgcctttcagttcaaccgactcactgcatgatatattggcctttctgggtctttggtggctatactcgtttggctttt

SEQ ID NO: 94244 - DNA, 122 bp, Homo sapiens
aatcgagatgcccccaaaatgccgtcagtgagcaggatcgggtgcccaagggccacctcccgtcctccccggcccgcgccctgcgtccccggccgccgcctcacctggctcggcgagtcggg

SEQ ID NO: 94245 - DNA, 122 bp, Homo sapiens
aaggagcagggaccggcgatctagggggggatcagctacaaaagaaactgtcactgggagcggtgcggccaaggaggaagcagtgctgccaggctctgctccagggcacagctggctggcgg

SEQ ID NO: 94246 - DNA, 122 bp, Homo sapiens
tacatgttgagaagattcaatctgacttaggagataaagaaaaagattaaaagaatgatacggggaaagcatatggccactggtcatttgcagcagcacaagcaattccagatagttgttca

SEQ ID NO: 94247 - DNA, 122 bp, Homo sapiens
aagactgtttcccagctctgtctgaggttcagcttggcgacattccctggaagagcgtgacggaaagtgcaatggaggcgggaggagagcgatttcttagacaaaggcaagtcttgcttctc

SEQ ID NO: 94248 - DNA, 122 bp, Homo sapiens
aatgaaaccaaaagctgactctttgaaaagatccataaaatcgataaacctttagtcaaacggaaagaaacaaaagataaaataccaattaccaataccaagaattaaagtgggtacatcac

SEQ ID NO: 94249 - DNA, 122 bp, Homo sapiens
tcatggcctgagctagtttttcagtttaactttggaatgccctgggctgagaattattttcggtttacagaggagaacttatgttcattggtataggatgacaatgaggtcagacaaatacc

SEQ ID NO: 94250 - DNA, 122 bp, Homo sapiens
aactaaataaagaggattgtgacatggaccctaaatgtcgccacgtttgcgtctccatcccggaatatgacgctggtagctcattagctccattcaagcctacaaattgcatcaccctcctc

SEQ ID NO: 94251 - DNA, 122 bp, Homo sapiens
gcaactaaatgctcataggtatacacacctacatattcaaatctatactatacctacacacgtgcatgcatacacatacatgtgcaaatatgtatgcatatgcatagcaaaaatgctaggca

SEQ ID NO: 94252 - DNA, 122 bp, Homo sapiens
gctcggacccgccaagtccctcggagaaaccccagaggtagcgctcgccaaactctttgtcgtgaaagaggaatgccttttgggatccagccgattttaccttaaaggcacaggctccattt

SEQ ID NO: 94253 - DNA, 122 bp, Homo sapiens
actttataagtcatatacccacactgggcctcagtttcttcatctgtaaaaacaacgcagcgaatgccacagtacagctccttccagctctgcctagcgtcgttatcatcaaccttacaatc

SEQ ID NO: 94254 - DNA, 122 bp, Homo sapiens
ggggtggggggacaccccgggcacttcttacccgggcaaagaaggatgtgtccagctcatcggggaaatcagttgtgtcctcctccagaaagctagctggagtgaagcttcgacgctgtgcc

SEQ ID NO: 94255 - DNA, 122 bp, Homo sapiens
gtaaagtgcacgcactagtaggagctcagtgaacgtttgctgaatgaatgtgtgagtgtgcgcaggcgtttatgcaagtgccttcatgcgaattaatgcgtcctttgccgggtgtggcagca

SEQ ID NO: 94256 - DNA, 122 bp, Homo sapiens
aagtccgctgtaagaaagagtactctgaggtgtgtgtgtacatatgtgtgtgtgtatgttcgggcacatgttattcaacagtcacaggttctctagtaaacatttctgcagatattcacaat

SEQ ID NO: 94257 - DNA, 122 bp, Homo sapiens
ggcggacgtggtttggctctcggtccagctggaccgggctgggccaaccgggagtcagctcgaactcacctgcttggcaggtgcgcgcttcccgaggcgtgacaagggagcgccggcgcggt

SEQ ID NO: 94258 - DNA, 122 bp, Homo sapiens
tcgtgtgccgcttttccatgaaaactttgcagctttctgaaagcttttaaagaagactgtcgctgttggttatgccatggagatctggatcgtttttctccttctttaagcttttggctcac

SEQ ID NO: 94259 - DNA, 122 bp, Homo sapiens
aagcctaagtgcagacgccggcttctcccgcagtgacttgagaagggtcagtgaaaacctcggccactgccgcagcgtctctagggagagagttaggggagatagtggccacagtcacagct

SEQ ID NO: 94260 - DNA, 122 bp, Homo sapiens
attattactgatcttagaataaactcccatttaaaacaataaacaattattggccgggcgcggtggctcacacctataatcacagcactttgggaggctaaggcaggcagatggcttgaggc

SEQ ID NO: 94261 - DNA, 122 bp, Homo sapiens
aacgggactgggttttggctgggtgcaggggaggttgcgtcacgggtacctaagcggtagcggtgtggaggtgaggtgtacttggtccaaagctctgggctcctctggcgggcctccctgaa

SEQ ID NO: 94262 - DNA, 122 bp, Homo sapiens
tctctgaggaggagcggggacgggcgagactggcataagcgtcttcgcgagggagcaaggcggcctgtgggtcggcctcaccccggcctccgacctgaagatcccagcatgcagcgcgggcg

SEQ ID NO: 94263 - DNA, 122 bp, Homo sapiens
ccccggccgcagccgtcattgaggctcgccgccccctaggggaagggagtagggtgaaggcgacggaagttgacgtcaccctcagtcgccatgttggttgagaataaagggatggttttgga

SEQ ID NO: 94264 - DNA, 122 bp, Homo sapiens
acatcacagggtgtctctgtcactgaggactctgtcctcatttgtgtgggctgactgggtcgctggctgtgggaggcacacatttgctatcttggtgcagcagtttgtagtcagctgactga

SEQ ID NO: 94265 - DNA, 122 bp, Homo sapiens
gcattcaatcagcatgtgctagatcagcaaaaacacttcaaggccgcaacactacaaaatcgaggcttatgttgggaataacatcaagcagctgatatttgctgttttgttcacttgtctca

SEQ ID NO: 94266 - DNA, 122 bp, Homo sapiens
acctacctgctggcagaggagaaatgtttacagggtgcagctccttcattgtaagtgtggcgaagaagggtggatttggagttgagaggcaaaaaaattaattgactcaaccagcctccctc

SEQ ID NO: 94267 - DNA, 122 bp, Homo sapiens
cgaagagactccatgcttcaagcgctgtcgataaagctgtgcacttctgcagactctgtgcgtggttccgcggcgatcccggggttggaactggctctgggaccaatggctcgggcgagcgc

SEQ ID NO: 94268 - DNA, 122 bp, Homo sapiens
aaattgctgaaattcacacttcagctgtaataggaaatatcctctccattgggcaaaagccgaggaaatgactgtaactttccttcatcctcgtcatttacatagggcataccccaagtaga

SEQ ID NO: 94269 - DNA, 122 bp, Homo sapiens
gctgtccttggcctgaaggactgctgacaggaagcagctggtttccagtgacaggcgggccgggggtggtggcacctgtcatcatttctgccctgcctgctgagcagagctcaagtgtctgt

SEQ ID NO: 94270 - DNA, 122 bp, Homo sapiens
cccgacttccgcggtgtcccaggtcctccggacggctcccgctgccaatgcgggttcccgcgggacacaggctgccacggaacttccaggtcgtctcttagctacagagccgagcaccgagc

SEQ ID NO: 94271 - DNA, 122 bp, Homo sapiens
cattccccgagtggaggcatgaaaggaaaacggactggacggggcaccggagaagcgccacgtccatcctgacacccgttgggttgacaactcatttaagtcccgtaatggagtcgccaaaa

SEQ ID NO: 94272 - DNA, 122 bp, Homo sapiens
ccgtgaccctcgtagagcctgcggggtctgcagtggtgcctcctgcaccatcccccatatcgatgacctgggtcactcttcccagcagccccgggagaggtctgtgggcttcagaactggcc

SEQ ID NO: 94273 - DNA, 122 bp, Homo sapiens
ccgtggccctttggtcgtcgtagtttccaaggctcaaaatggacgcttggaagcacttctcgttcctcaatctagaactacaattcccgatgtacagtgcgcgagattgcgcattacaactc

SEQ ID NO: 94274 - DNA, 122 bp, Homo sapiens
aacctgttgcttctctgttcttggtagatgataccatattccgtttggttcccaaagccacgattcctaattcctctctcaccagcctttacatttaattactgagaactgatcatttttcc

SEQ ID NO: 94275 - DNA, 122 bp, Homo sapiens
gacgacaggagctgctttcggcagccaatggcgtggaggtttccgtgctgccagagggggcggggtcagaggcaaggcccagagtgtgcagccagccggagctcccacgtgagcaggcgcag

SEQ ID NO: 94276 - DNA, 122 bp, Homo sapiens
acttccccgcatccacccactgcctggccccatagctaccttctagtcctggctaagccccgtgagacatcttaagtttgtcttcagtgactctcaaccaccgcccgactgccttcaccttc

SEQ ID NO: 94277 - DNA, 122 bp, Homo sapiens
gccaagcagcacctaaggcaagaagaggtgaagtgcccacccctcagcctgtgggcctgccgggccaccagactgcagcgctcccgccacctagtggcaggcctgcggtcctcacctggaac

SEQ ID NO: 94278 - DNA, 122 bp, Homo sapiens
gctggaacttgggcagaggctgcagtgagccttgactgcgccactgtactccagcctgggcgacagagcaaggctctgtctcagaaaaaaagaaaaccctaagtcatagatcaaaggaatgc

SEQ ID NO: 94279 - DNA, 122 bp, Homo sapiens
gtcagacgtttcatatagtcgacaacacttcctcttcgggagtacagggtgtggccctctcgtgtgactccagactctgggaagtgagtcgcaggaacttccgctccagggaaagttgcggc

SEQ ID NO: 94280 - DNA, 122 bp, Homo sapiens
ctcacccagcagatgttcgatgcccgcaataccatggctgcctgtgacctccgccgtggccgctacctcacagtggcctgcattttccggggcaagatgtccaccaaggaagtggaccagca

SEQ ID NO: 94281 - DNA, 122 bp, Homo sapiens
ttttgctctgaatgaagtgggaagccatgaagagtgactaaacctgactctggtttaaaacgtcctctctgctatgctgaatagagcacaggaggatgagggtggaagcagagagcccagta

SEQ ID NO: 94282 - DNA, 122 bp, Homo sapiens
gacaccagcaaggcctaggagttggcagacagtacccacagtaccagtaataaaattaaacgaatcagtgttctcaagttagccgctctcctaatcacaacggctgcctagagtggggcagt

SEQ ID NO: 94283 - DNA, 122 bp, Homo sapiens
ttagtttatataattttatgtcttctgttgaagcatattaacaaacacttccagctataacgtttcccctgagaactgctttggacacatccagagattttgataggtcacacacttattgt

SEQ ID NO: 94284 - DNA, 122 bp, Homo sapiens
actctgtgtaaagcacttggaacaatatctggcttgtaagcactcaataactgtttgctacgattagactatcccactggtcaagctagccttttacctgggtctgctggatgggggaagaa

SEQ ID NO: 94285 - DNA, 122 bp, Homo sapiens
attgtttttctttcaaatgattaactttattgatcatcctcttgttcttctagcaaaagacggtgctttatgcactcagcttgaagattttgtgctgtagcatcacatttggcttgactatc

SEQ ID NO: 94286 - DNA, 122 bp, Homo sapiens
ggccccgccaggacggaaataacaacccactctagatccggcccaactggttctcagacccgtgggaactgcggtgcagccgggtcgggggaccccagatggggagacccccggcccggcga

SEQ ID NO: 94287 - DNA, 122 bp, Homo sapiens
tctcaaactcagatgttactgggtatcctgcgtttttgttggcagctctgccactctgcccgtctgcctgagtcctctcctgccatcctcctgaccagaggcgtgggcttgagttgaatgcc

SEQ ID NO: 94288 - DNA, 122 bp, Homo sapiens
tgcccgcggcccccgcgacgttcccccaagaagcagcagcagggcttggcgggcacagcgcgtgtctcgggttccccgtgggcagcgaccccaagctccagcctctcccaccgagagacact

SEQ ID NO: 94289 - DNA, 122 bp, Homo sapiens
gccggccccgcgcaccccggatggggcctcgctcgggctccgcgcctccctgcagacgggcgcttggggcggggtctccacacttgctcccacctgcacctcccttgttccctgggttcagg

SEQ ID NO: 94290 - DNA, 122 bp, Homo sapiens
cttcccgcctgggtcctgcagtcagatgtggcaagcatgatgtgggcgcaggtgaagtcccgaaggtctagtctacggggacccaggtggctccccctacttccaggtttagggcacagggc

SEQ ID NO: 94291 - DNA, 122 bp, Homo sapiens
gggagcggggagagggcagtctgggctcgcggttccggctgggggctgggcaccccggggcgaccacggcaggcccagatggggactccggttccaactctcctggcccagaggctctaggg

SEQ ID NO: 94292 - DNA, 122 bp, Homo sapiens
aaactatccaagtgtacaaccgggagggactgcttaaagaacacatgaggctccctgggccgtgctatcccggcactttgggaggccgaggcaggaggatggcttgggttcaggagttcgag

SEQ ID NO: 94293 - DNA, 122 bp, Homo sapiens
agtctcaggcaggaagagcctggggttccaggaagagaatctaacaggggcatagaaggccgggcttctgcacaggcagttacagccagcgcagaggggctctaacccaggcactgcagctt

SEQ ID NO: 94294 - DNA, 122 bp, Homo sapiens
ccagcctctatatggccaactgccgtgggaggagcacggcgcttgcgcagaggcggacaacgcggacgactctgggcttgcgcactcggaagccggccgcatgggggaggggaagaaggcca

SEQ ID NO: 94295 - DNA, 122 bp, Homo sapiens
aggcctgctcccctgcggccttcctactccttatctttgtgtgtcatgttttccagccagcgcatctaatgggaggtcatggtactctagctcggcattttcctctgagtgtttttccatga

SEQ ID NO: 94296 - DNA, 122 bp, Homo sapiens
gacgcttagcccgggagcgacccagagaaatgcgcaggcgcatctcctcgccctgagccccgcccacagggcgaagatgtgtgcgtggataactcccagagccccgcctgtgtggcaacacg

SEQ ID NO: 94297 - DNA, 122 bp, Homo sapiens
actgtaggtcatcatgagaggtgacacccgggctcgctctcggcgcctcctcggccttggcgcccactctggcttcagcccgcagctgcaccgtgggagcccttttctgggctggccaaggc

SEQ ID NO: 94298 - DNA, 122 bp, Homo sapiens
agcggggctggggggtcgcaggagcgggcggggtgcggggcatggtggggaggtttggcccgcggcagggcgctggagcgggtggggggcgggcgcctggggcgcggggcggcggcggtggg

SEQ ID NO: 94299 - DNA, 122 bp, Homo sapiens
aaccgccgagaagaaccaggtccaaagtaggcggcaaagaggtcatcagcaaggagtgttcgaccctggggagaatagcgggcgacggggctccagggaggccctttggattgactgttgcc

SEQ ID NO: 94300 - DNA, 122 bp, Homo sapiens
cggctccttgtcatccataatggtcggctgcaaattgtagcctgcagccgtatttcagctcgccttcggggatcgccgcctccgaagagcaacaacaggcaaagcagtctgtccacggacct

SEQ ID NO: 94301 - DNA, 122 bp, Homo sapiens
cgctgtccggcgaaactagcaaccagggcgggccagttgggcaatggagctgctggagcccggtacccactcagctctgtctgatgccctctccatagcccagctggagccgtgaacactgg

SEQ ID NO: 94302 - DNA, 122 bp, Homo sapiens
ttcagggaacggacccaccaagcccgacctgctgcaggagctgcgggtggccaccgagcgcggcctggtcatcgtcaactgtacccactgcctccagggggctgtgaccacagactatgcag

SEQ ID NO: 94303 - DNA, 122 bp, Homo sapiens
ctggcggtggctgtgtgggcagccctcggagtacagcggccacctcaactccagctcccgcgcctcctccagggccagctcggcccgggccagccctgtggtaagtcggcctcctggccttg

SEQ ID NO: 94304 - DNA, 122 bp, Homo sapiens
tggctggggactccagggcaagggatataagccagagcctagaccagtgagccaactgtgcgaaccagacccggcagccttgctcagttcagcatagcggagcggatccgatcggatcggag

SEQ ID NO: 94305 - DNA, 122 bp, Homo sapiens
aggttctttaaaacaaccagatctcacatgaagtaatagctgagagctcgctcattaccacggggaggacacgaagccattcatgggggatcaacccctctgacccaaacacctccctccag

SEQ ID NO: 94306 - DNA, 122 bp, Homo sapiens
caaaaaaagagatacctaggctgaaaaggcaactttaaggggggacatctagagagatgacgcctagaatcaaggcctctggctcgattgcgttcggcaagcgtctgcaacaaaggagcgtc

SEQ ID NO: 94307 - DNA, 122 bp, Homo sapiens
ggttgtgatcctgctcagatcaaaggagtccaatcctgtggttccggttccctgtagctccgtgagactctgagaactccactcggcctccagcgctgcctttgccgttgccttgaatgaaa

SEQ ID NO: 94308 - DNA, 122 bp, Homo sapiens
caaggaccactccccaccaacaggcgggtggcagaggcaacaggtcagaacgcgctgggccgctccagtgacaagattgacattggccacccagctcttatgatcacttctctgcagaaagg

SEQ ID NO: 94309 - DNA, 122 bp, Homo sapiens
gtgggttcttttagagccagcgccaagagcttcaaaaaatccttctaaggtgaacccctccggacccggatagcgagatggggctcagccttgcgcctcgggggtcgtaacagacggcaagg

SEQ ID NO: 94310 - DNA, 122 bp, Homo sapiens
aggcggaagcacattggggtcacagctattcatgtatcatgtgcaagctcagtaagtgtccgatcgggcacgggaattcgccccgggactccaggcaaggcaggtactggctggcgcggatg

SEQ ID NO: 94311 - DNA, 122 bp, Homo sapiens
ctgagctaacatttgggagccgtctacagtattcaggtatgaattttctctctgggggagcgcattcgttttcctagagcagtgtgcttttaattgctcctttaatatctttctcttttgtg

SEQ ID NO: 94312 - DNA, 122 bp, Homo sapiens
agtggggcgagtgctattgattgacgtgcattccaaccaacctacgacgcaaggagagcgcgcgcgagcaagacgatgcccaataaacactcagccccagcggcgggggcggggcttgtggg

SEQ ID NO: 94313 - DNA, 122 bp, Homo sapiens
cataaagctctatgaggcaggaaaataaggtctggaggcagggaatctaagactgtttcgcgctgatttcctagaatcaaattgaatggtaaagagtgagaagttcagatctggggatcctg

SEQ ID NO: 94314 - DNA, 122 bp, Homo sapiens
cataaaacaaggataatactgcaccatgcaaagggcgaccaccttcaaggccctgcatgtcggtgggggacacagcggtgggccgcagcaagatcgtccccgtgatccccacttgccaggcc

SEQ ID NO: 94315 - DNA, 122 bp, Homo sapiens
ggctgggggtccgggggtccggccagtgcaggcaccctggggcagtagcagggccagggccgacaggacatccacatcctgcagaaccttctgggcatccagcaggtcccccagaagcgcct

SEQ ID NO: 94316 - DNA, 122 bp, Homo sapiens
cccgcgaaaagcaatcagccagccatcctcactcgccctggaggccacgtagccgtggcgcgtcccaggctcgagctccctggcctgtgctcagagcgccctctacaggccaagagtggatc

SEQ ID NO: 94317 - DNA, 122 bp, Homo sapiens
tcagggaggggctgcgccttcacctccaccggctcctccttgcggtgctcagggaagaaacgctgacgcctccagccttccggcctggcaagctgtccccgcgttcacaccctcttcccggg

SEQ ID NO: 94318 - DNA, 122 bp, Homo sapiens
cgatcctcagaatactggactgatggggaagcggtgggggctgagtcatctcacctcctccggggatctgttccttaactccaggttaatcttcttcttcatctccatgtcctcctcttgct

SEQ ID NO: 94319 - DNA, 122 bp, Homo sapiens
gacagtgatatttatgagcggggagggtaaaggaagctccatgctataagttccgcacctcgcttgaagtaggaaaaggccacggcacgcaggactcactgagtggctaccaaaagaaacca

SEQ ID NO: 94320 - DNA, 122 bp, Homo sapiens
aggcaacgccggcgcggtctccactttcccgtttagcataacaatggaaccttcgtgagccgccgcgttgtccgcgagatgccgtttctatggtgacagccgggccgggggcccagaccaat

SEQ ID NO: 94321 - DNA, 122 bp, Homo sapiens
aggctccttggtcaccgcagcgcccaagaaccaggatggccgtggagtcagtgtgagaaccgggacagcccttgcatctggctgagcaaatgatggtgcgtcccgccagggagcccttcctc

SEQ ID NO: 94322 - DNA, 122 bp, Homo sapiens
ggtttgcgctcctgtgagaatctagcggggtggctgaactgagagggggtggagctcgtgcggtgatgctcgctcacccgcctccccgctcctgctgtgcggcctgcttcctaacaggccag

SEQ ID NO: 94323 - DNA, 122 bp, Homo sapiens
ggccgtcctggctgaatcacgacctccccagcccattccttctcacaagagctgttttgccgaatgagacttcatcacccaaccacggctcgcagccagacgcagccgaacaggcctagtgc

SEQ ID NO: 94324 - DNA, 122 bp, Homo sapiens
gcccacgagggtcccctctaatggtgcccaaagccgcagctgcccacctgccccggtcggcgttacctcgcatttgccccggaggcccgtctcctgcaggcgggaccagatgctctggatcc

SEQ ID NO: 94325 - DNA, 122 bp, Homo sapiens
cagcctctagaggcttccgcatcccctggtccttatggcacccaccatcttcagagcccacggcagccctggcggctcctcaacaggaagacgcagaatatcgggagcacaggctttatgcc

SEQ ID NO: 94326 - DNA, 122 bp, Homo sapiens
gtgtttcgggggaatttaagtcaatgagtattttgctttgtcaggtgtagagtccaggcccggggaagagaggcagtcaacagaggccagaaaggacgttgctatggtttccacgcacgttg

SEQ ID NO: 94327 - DNA, 122 bp, Homo sapiens
caaaagggtttttattcctgacaaataagttccttaaaatagcaccttctacaacgcccccgtcacaaccctacctatctttaaatagaatggcatgaaacatttttggcaagtgtaagcca

SEQ ID NO: 94328 - DNA, 122 bp, Homo sapiens
actttacaatggctaatttcacaaaggtttgtagcaggtgaattgacataatacaatttccgccagtgctctgaatgtcaacatgaagaaattcaatgaagggtgggtaaacatgtgggagt

SEQ ID NO: 94329 - DNA, 122 bp, Homo sapiens
tcaacgcttactgtcgctcagggcctcgaggctcagaaagtgtgtgacttaaacacgtcacggaggccgggcacacagtggggccaacactacggcttcctgagctgtccagcaggtttctg

SEQ ID NO: 94330 - DNA, 122 bp, Homo sapiens
acgggccatcgaagtgtttcgctgccatcttaaatcctggctgtggcctcaatcctgcagcgaagctgcccagatcattttgtgtttgggcggcggctgagttcccaaacgcgcgcggagac

SEQ ID NO: 94331 - DNA, 122 bp, Homo sapiens
tggatttttgcttttaagtgactctggaggcatttgtgtggagcagaataaagcagaaaccgacaggctgcatgacaaagttggcaagggtatctctctgtcagccctgtaggctgcctcga

SEQ ID NO: 94332 - DNA, 122 bp, Homo sapiens
ttccttgtctcctgggggattccagggtgggagcccttgctggctggctggctggccggccggccaggctgtccagcacacccctcaccccacccaggaagaatgatgttacagggggctga

SEQ ID NO: 94333 - DNA, 122 bp, Homo sapiens
aggtctgcagcttcactcctgagccagcgagaccacgaacccaacagaaggaaaaatctccgaacacatccaaacatcagaaggaacaaactccagtgcgccaccttaagagctgtaacact

SEQ ID NO: 94334 - DNA, 122 bp, Homo sapiens
tcatgggaagccaattcagcaaagtcggaggcacagcccccgtgtgaacgcaagcctgcacgcctgaatagcggcagctggctttggagaaaaatgggacaactgtctcctgcccggctttc

SEQ ID NO: 94335 - DNA, 122 bp, Homo sapiens
taaaggaccttctgcattcaaatagtgtgtcatgaaatgggaatgataaaatacagaaagcggacattgctgtctcttcttgatgaatgcagctttttgttacctggtatgaggccagaata

SEQ ID NO: 94336 - DNA, 122 bp, Homo sapiens
agtcctctgcccacgagagcagggagttggggccacgcagaaatggcctcaaggggactccgctccacgtggggccaggcgtgtggctgacgctgtccgacgaaggcggccacggacggacg

SEQ ID NO: 94337 - DNA, 122 bp, Homo sapiens
tgtccgcatcctgcctcccaccaccaccgcccacctcatcatagctaaatgattcagaggcggctactggcccaaatggggcgggtcagaccgtctgctctgaaaacttgaagttactagtc

SEQ ID NO: 94338 - DNA, 122 bp, Homo sapiens
ggaacctccccgctaaacctcggtttccctgaccccaaagggcagcgctcactggggaagcggcgccgccagctgccaggacgctcccgcgcagcccggtttccctacgccggggcggggca

SEQ ID NO: 94339 - DNA, 122 bp, Homo sapiens
cactacacacggcctcccccacaccctccatccacaaagctacaagtttgggggcgagggcggcagttcccttttggcacaaaatgaatggaagcccctgagaaggagggcagggctgatgt

SEQ ID NO: 94340 - DNA, 122 bp, Homo sapiens
aatccgcctctgccggcgtcctgcctcccgatctgcccctgcccgcggtcctcccgcccccgcccgcggccccgcctcctgacctgctcctgcccgcgaccccgcctcctgatccggccccg

SEQ ID NO: 94341 - DNA, 122 bp, Homo sapiens
tacccagtgtgggaggaggaaagagacacacaaagttagtttgactgaagtgggagaacccgaccctataggaaaggggccgaagaaagtgctggcagatgcagagatcatttttgcccctc

SEQ ID NO: 94342 - DNA, 122 bp, Homo sapiens
gtttaagcagtagttgggcaaaaccaaaattgataaaacttttttcttttgcctttgatccgtgaatttacagtgaaggcatgtctgaaatatcttagatgtttgtttctactgcattgctg

SEQ ID NO: 94343 - DNA, 122 bp, Homo sapiens
cccacagcaaggcaggtataaggagagtcgggggcctgcatcagcatccagtctcagctccgctctgggtatctgggccaggctcctcctcctaatgtcccttatcaaagccaaaaatggct

SEQ ID NO: 94344 - DNA, 122 bp, Homo sapiens
gtgtgtgtgggagccgccggactaaccagccaggacagggcggacggtgtgagacaaagccgttggggagagctgctgctgaataaaatcctttttcacctgcctacggcccccgagcgttc

SEQ ID NO: 94345 - DNA, 122 bp, Homo sapiens
cttcgtccatggcgagtagccaactaagactccaggccgcctcagtccgcttccgggcctcggccgcccgccccagtccccaggacccgcccccgccccagggcctgcccccgcgtcacggc

SEQ ID NO: 94346 - DNA, 122 bp, Homo sapiens
cagccaggcggcaataataaaacagccgcgggccctgctggcagaggaatggctgacagccgggcctctctccccaactgcgatgccgctcggctctggtttttaccgcaattacaatgtcc

SEQ ID NO: 94347 - DNA, 122 bp, Homo sapiens
ctgagcatctctggggatggagagtgaggcggcagagctgcatggggcagcgcaggtgcacgtcgtcaattctctgaatcagaaagtgaactggaggtgagtgtgagggaagagaataaaaa

SEQ ID NO: 94348 - DNA, 122 bp, Homo sapiens
gctgcaggaaagggaagcacaagcggaagaagctgccggagccgccagacagcagcagctcgaacaccggctctggtccccgcaggggagcgcatcagaacgcacagccctgctgcccctcc

SEQ ID NO: 94349 - DNA, 122 bp, Homo sapiens
tgccggccttcagctgcgacgtgaaggacagcaggcgggggtgcttcacggcctgctccgcgtccaggttcagcatcaccagcacctggggcctgcagccagggtggggcggctgttaccac

SEQ ID NO: 94350 - DNA, 122 bp, Homo sapiens
tacagaaataaatccaactctgagcgtctccccttgaggaccgtgttttgttcatctgcacgctctccaggtcctgcactgcgcccaggaccaagaagacgctggacccttactaggagaac

SEQ ID NO: 94351 - DNA, 122 bp, Homo sapiens
gcacaaagttgactccgccatttcatgatcaaattatagaggaaacttttattttacttacgtaatatttttcatacaatagaagaaggtgataaaatagattaccttttatccggtaagag

SEQ ID NO: 94352 - DNA, 122 bp, Homo sapiens
tattattataattattattattttgagacagggtctcactctatcacccaggatggagtgcggtgacatgatctcggctcactggaacttctgccttccgagttcaagccattctcccacct

SEQ ID NO: 94353 - DNA, 122 bp, Homo sapiens
atgctttaaccatattgaaactcagacacagagatgttaaaaggtgttaaataattttcccgaggtttcacaagcaataagcagcagaaccagaattcaaaccaaaacatactgatatggtt

SEQ ID NO: 94354 - DNA, 122 bp, Homo sapiens
tggcggctgagcgcttcaaggagcaccgggacacagccctgtacaagtcactgtcggtgccggcagccagcacggccaaaccccctcctctgcctcgctccaacacaggtgagtggcatggc

SEQ ID NO: 94355 - DNA, 122 bp, Homo sapiens
ataatatggggaagaggttttaattagtaaaacttagaaaccttaagaggaaggggtatccgaagctgaaactcagacccctgaagagagtgggctagcaggttattgctggtgctgatgtc

SEQ ID NO: 94356 - DNA, 122 bp, Homo sapiens
cggcccctcgcagggtggcgagtggggtccgtgcctcgagaagggggcccttacccacaccgtgcggcttgaattctgtcggagttgaatctgtggaaaggattgtcccattagagctgctg

SEQ ID NO: 94357 - DNA, 122 bp, Homo sapiens
agaaagtggctttttcttccctgatcagaagcttccgtgagggagccacacagaactcaccgagtccctcctggcagaggcggccgtcctctgttgcttccagggacgtggccctcttcccg

SEQ ID NO: 94358 - DNA, 122 bp, Homo sapiens
cccggggcaggagccgggtgtgggcgggcgagccgcttccttccgaagcctttgtggacgcgtttgcctggcgctcctcatccaacaaaaggaaggacagaatcttggatcctccgcctggt

SEQ ID NO: 94359 - DNA, 122 bp, Homo sapiens
gggactgaatgctgaggtcagtggtcttgaggtccccctgcatggaggggaggctcacgtcggctttcgccttcagctcagacacatccacggacgcctccatggacttgcctggggccgac

SEQ ID NO: 94360 - DNA, 122 bp, Homo sapiens
tgatcctggagagcaagtggaactgtccctgtagtacccgggggtgctgggaggggagaacggtctcagacagggggttacaagaactgggctctgctgatcctccctaccttcctccatgg

SEQ ID NO: 94361 - DNA, 122 bp, Homo sapiens
gcctgggcactggccggctgcgtgcacttttctgtgtataacacgcccgcaggaagcctgcgttaacatttatctcgtggaggggaaggtggagcccacacccacacctcagcgagctggag

SEQ ID NO: 94362 - DNA, 122 bp, Homo sapiens
cactgcctaacggtgccagtggtccacctgcggtggcgtcttttgagaacaatccgagcccggccgacccccagccccgtgaagacgcggccgccccagcagggagccgggtgccgagcggg

SEQ ID NO: 94363 - DNA, 122 bp, Homo sapiens
gtctctgctccgggctctggtgtgaactgagttgaatcggatgagatgcgtctggggaatcgtggagtccagaaccaaggcttgggtgtgtccagcttgggtgcttcagcccttgaagctga

SEQ ID NO: 94364 - DNA, 122 bp, Homo sapiens
gagcggcagagcccgcggtcagggtctccgggggctcacatagggaggtctctctgttcccggctatggcctagagcccctctagcagttcctccaccacccccattaggccgtaggggctt

SEQ ID NO: 94365 - DNA, 122 bp, Homo sapiens
cgtgaggggccttgcaggaagctctgaggcccagtgaggcccccgggagacaggcgagaccgctgtgagcgcccgtccttcccgcccggtgcctggcaggttcctatgcgctctcggggctt

SEQ ID NO: 94366 - DNA, 122 bp, Homo sapiens
ggcaaaccctggtcctctcttcttgttctacccctcataagccaacaagatattttaaatcgatgttgcctaattttttttcctaccaccacaccatatatacaggaagcttatgcccatta

SEQ ID NO: 94367 - DNA, 122 bp, Homo sapiens
ggaagggccgcgcccggccaggcagggttccagttccttggccccacgcgcgggggtaggcgtcgactccaggcccctcccaagcccccgctgtggctcccggaggggccatcgcgcccggg

SEQ ID NO: 94368 - DNA, 122 bp, Homo sapiens
aatatcctactgttatgagagtttcactgccatacaacatataacagcaccattcaatctcgcaatgttatgtcattcccttaccacgctggtgtagtctcacgacatccgggagtaaagta

SEQ ID NO: 94369 - DNA, 122 bp, Homo sapiens
ggttcgcagaccagcgcggggcgcgggcggcgctcacgctctccttcctggctgccttggcgctctacctgctcctggcggccgcctccagcccggccctgcccggggtctacctgctcttc

SEQ ID NO: 94370 - DNA, 122 bp, Homo sapiens
cagtggttagttctttttcttccatcaccttgttttccttcaaaccacctctgctactgacgtcctgggctagctccctatttctgttgacggtcccttggcctctttctccaataatgttg

SEQ ID NO: 94371 - DNA, 122 bp, Homo sapiens
ggcagcctgggcaacctggcgacatcccgtatctactaaaaatacaaaaaattagctgggcgtggtgacacctgcctgtagtcccaaaaggtcacacgctctctcacagcacaaactgaccc

SEQ ID NO: 94372 - DNA, 122 bp, Homo sapiens
gcctggcctgtactgcagatttacattaaaatcataacacctacaattattgtattttaacggtaagttttctattttaaaggtatttattttcactttactggtccagtttgcaaggcaaa

SEQ ID NO: 94373 - DNA, 122 bp, Homo sapiens
aacacagatccttttagaaaagcaggtttattggtcgggctgctcaccaggacacagcaacgtgagaggttccccaagcccacagaaaactgcatctgcccacagctcaggccccttcaggc

SEQ ID NO: 94374 - DNA, 122 bp, Homo sapiens
ccggccgtcctggtctgtgtccttttggtcgtcgttcttctgggaccggcagttgtcgcacgcatcgccccacttgtcctcgtccgtgttgcgctggtctgggttccgcaccagcgggcagt

SEQ ID NO: 94375 - DNA, 122 bp, Homo sapiens
tgaggtctggaggtggtgcggagggagccgcctagggaccagggactcctgccatgaatccgccggggtccctagaggccctggacccgaacgtggacgagcacttgtccacccagattctc

SEQ ID NO: 94376 - DNA, 122 bp, Homo sapiens
ccaggaagggaaggcgagcgggaggaagggggcgggcagacaagctgtgcggcctcttctcgcctctcctggctgcgccctcaggtccccgattcgagcttcctgcccccactgcctgcatc

SEQ ID NO: 94377 - DNA, 122 bp, Homo sapiens
cgagcgagggccgcgaagttacagttcgaggcagggatggctgccctctgtggccacccccgggtccccgtcctccccgggggcgcagggtgagccagaccccggccgcgcgcgctcgccgc

SEQ ID NO: 94378 - DNA, 122 bp, Homo sapiens
atagagggaccagctggcgttcaggagaaacaagaacccggctgccctgggatggagccccggtccctcctggaccccgtctgaagacataaaggcgtcagtttcttcctagtcacgtggga

SEQ ID NO: 94379 - DNA, 122 bp, Homo sapiens
ccaaaatctctcactcacaccccaaatcacctgggccccccacctcaaaccagaggccatcggggcagaacccagcaattgtcaccgccctctcacgaagcgtcccgtgccccccggagcac

SEQ ID NO: 94380 - DNA, 122 bp, Homo sapiens
aactccctgcagagctatcagctcagccccaataagcacttctccctaagagttcagagccgtgccaatggcgtcaagtacccggagctggtactggagcactccctagatcgcgaggaaga

SEQ ID NO: 94381 - DNA, 122 bp, Homo sapiens
ccttccctgtgaggaatgctcaggtcagctggtcttcaagagcgacacttattactgcaccggggacgtcacggcctggaccaagtgtatggtcaagacatggacacccaaccagaaggaat

SEQ ID NO: 94382 - DNA, 122 bp, Homo sapiens
tggctggcatttatggaaacaaccgctggtatgtgaaaaacaggtccgtcaccgccgtcacgacggccagagattatacccgccgagatgcccgcggcccagggcctacaatttcctccggc

SEQ ID NO: 94383 - DNA, 122 bp, Homo sapiens
ctgaataatgaatgacattccaacagttggggcttacggccttttctctcatgtatgagacgagtcctgagttctcaccaatcatcctcaaagtatgggtcgtggtcagtccaaccattctc

SEQ ID NO: 94384 - DNA, 122 bp, Homo sapiens
caattaggtcattgcaattcccctagcttttttgttccttctcccaaattatatatgtaacgtggggaaaagcaagttgaaagatgagtgtgctgctattaggggaaagacaggttaaataa

SEQ ID NO: 94385 - DNA, 122 bp, Homo sapiens
gaatggaatttctggatcatatgaaacccgactggtagctctatcctcgcccaccactgccgcctccttctgccgctcctggtgctgcttgtgtgctcgtttggtgcggacctggtacctct

SEQ ID NO: 94386 - DNA, 122 bp, Homo sapiens
ggctggtgggggtggcgtgtgcgtgtggttgtgagtgtgtgtgtgtgcgcgcgcgagcggcggagaatcaggaagtcacagcagcgaagcgcacacagcacacagacatgtttgattgccgt

SEQ ID NO: 94387 - DNA, 122 bp, Homo sapiens
tacattttacaaatgctttcaggtacatttttatctcactttttcttcacagcaactctgcgaggtagtcagagaaggcactgatagttccattttgcagatgaagaaactgaggcttactc

SEQ ID NO: 94388 - DNA, 122 bp, Homo sapiens
cggccggcccaaggtcacactgtaagcctggtgtgcaggtgcggctgccaggcccgcacccggcagcccccgccccctccccgcccagcggcctgtgttgcaaggttggtcccgacgggtaa

SEQ ID NO: 94389 - DNA, 122 bp, Homo sapiens
cggggcttcccagggtcccctccgagttcccactccgcacctccgagggcgtgaaaaccacgggagccgccccaccccgcgcgcccagccccgccccagcccagacaccgccccccgccagt

SEQ ID NO: 94390 - DNA, 122 bp, Homo sapiens
tctgagaaagttttctcactcctaaactggagacataaagaagagatgctccctctctttcgctgaactttggagtgggcttactataaggcagtagatattattttagcacatggaaaaga

SEQ ID NO: 94391 - DNA, 122 bp, Homo sapiens
cttcacctttcccggagcgccttcagtttccccacatattatctccagtgagaagaaaagcggagtctcccgcagcggcacccagcaacccccaggcccttcggcgccagtgcgccgggtgc

SEQ ID NO: 94392 - DNA, 122 bp, Homo sapiens
ctagacttttgcaagtcactgtgggaaccctcaaggcgagggtgttccgcactctggcggcgatacaccttcctattccctgacctaggccttcattcccccgccacagaaagcgctggaag

SEQ ID NO: 94393 - DNA, 122 bp, Homo sapiens
ctacagaggcctcctgatgcctcgccttttgcgacctgccccggctgaagaaggggcttgcgggagctcggctctgtggtttctggacaggctcccatccctgcagctggaaaaacaagaca

SEQ ID NO: 94394 - DNA, 122 bp, Homo sapiens
atggtggtgaacctatagccatgctcggtgaggatcttcatgaggtagtcaggcagttcccgcccagccaggtctaggcgcagggtggcatgggggagggcattcccctcatagatgggcac

SEQ ID NO: 94395 - DNA, 122 bp, Homo sapiens
caaaggctcccactctgggccacttcatttggtttctggagcccagtggtcctttctgcccggactcaggatcttttggggaaatttgggacctcgcaggacatctgcacaatccatagaaa

SEQ ID NO: 94396 - DNA, 122 bp, Homo sapiens
ctgtagcagccacgtagcttgtccacatgaacggccaggctgctcctctccgtggctgcacgtcctggccaccccgaggccgcagcactttcagcagctccgtctccacgtagtcgcccacg

SEQ ID NO: 94397 - DNA, 122 bp, Homo sapiens
aaatgattagagacttgtctcgtcgttttcttcgattgacaatatatacacacatacatacgcatacacacacacatatatacgcgcacgcacatgcacacatatacatgtccacacacatg

SEQ ID NO: 94398 - DNA, 122 bp, Homo sapiens
ctccccatcatgcttaggatttctcttcagtagaaaaggcaaataccataaagaaggaatcgctgtaacttattgcttgtaagtaaaattacctgtgactgtggggtaaaacccaattctga

SEQ ID NO: 94399 - DNA, 122 bp, Homo sapiens
tgtatgtgagtcagcttctgagaagtctacaaccaaaagagtggaagtgcaggcagagcgcggcagcgccacacacactcagagggaaaaggcctgtggttagcagaggctgtttccacctt

SEQ ID NO: 94400 - DNA, 122 bp, Homo sapiens
caggtgatgaattctgtatttgggggttgtcacacccctctccgcttgagaaaaatccagcgaggtaaagcagagtgtccttttcagacatctagagttttggggaatgtggctgaaggtag

SEQ ID NO: 94401 - DNA, 122 bp, Homo sapiens
ccagctccgagggagacggggccgcgcggctcctccagctctgagggagacggggccgcgcggctcctccagctccgagggagatggagccatgcagctctgtgtcttctgtgggtcagggc

SEQ ID NO: 94402 - DNA, 122 bp, Homo sapiens
gggagctactgttgctcccccaactttgcaaagttaagaagcagaagccctggccgggtgcggtggctcatgcctgtaatcccagcactttgggaggccgaggtgggccatcacctgaggtc

SEQ ID NO: 94403 - DNA, 122 bp, Homo sapiens
ccgccccgtcccgcctcccgctcgcctccgccgcggcgcgtcgggccggggcgcgccgagcggcgagaaattgtttccactgcaaacaaaaaaaggcgacacatgaccaggcaggaggaggg

SEQ ID NO: 94404 - DNA, 122 bp, Homo sapiens
tcagcagaaagaggaaaattacttaaaaagtgaaatggaaaggctagaaattaaaaacaccgtatcagaaatgaagaattctttcaatgggcttatcagcagactggacatagctgaggaaa

SEQ ID NO: 94405 - DNA, 122 bp, Homo sapiens
cttgtggctttccagagcaacggcgccccttcgtggtgataatgtgaactgcaccccaggcgtgattgaaaataaggcagaaaggaatgccggcctcgagcaaggacaccggttcatgccca

SEQ ID NO: 94406 - DNA, 122 bp, Homo sapiens
aggcggagtgagtggagcccagggcggctgctgcgttagaaatccgggtgcagcagatggcgccctttcctcagctatctcgccccagagctgggaggtggtgccacaggctgccgattctt

SEQ ID NO: 94407 - DNA, 122 bp, Homo sapiens
aggcgcagcaaagaggagatacagagatcagggccccggagcaagaaattcggagacatgcgtggaggccgaagcaacagggaactgtcggggcgcagagatataaggaaagaccacgcgac

SEQ ID NO: 94408 - DNA, 122 bp, Homo sapiens
tcaggtgatccgtccgcctcggcctctcaaagtgctgggattacaaggcatgagccactgcgcacagcctagcgttgcttttcaatctgcaattacaaaatcgtggcatgccacttcacgct

SEQ ID NO: 94409 - DNA, 122 bp, Homo sapiens
gtgatctcggctagctacaacctccacctcccagccgcctgccttggcctcccaaagtgccgagattgcagcctctgcccagccgccaccccttccgggaagtgaggagcgtctctgcctgg

SEQ ID NO: 94410 - DNA, 122 bp, Homo sapiens
cgactgtgaaatgtagggtggagcgcatgcgttcgaagccattcgcgcgggcagtccctgcgtgtccccctgcgtgtccccccacgtgctccccagcgcgcgcagcaccccgcctctgcgct

SEQ ID NO: 94411 - DNA, 122 bp, Homo sapiens
ttcagaccattttggatttctacgagcaatgaagacagtgctattcctctacaccctggccggccaactgagcgtggttaaacgtggggagggaggagggtgaggttaccaacctgatggtt

SEQ ID NO: 94412 - DNA, 122 bp, Homo sapiens
acaggccccgtaatcctccctggtcggcggatctcagtgggctctgtgcggcccgaggctcgggcgctttcatgtcactgcgggtttagagctgattcaaactcattgcgatgggggaatta

SEQ ID NO: 94413 - DNA, 122 bp, Homo sapiens
tcctccagacccgaccactgccccaggccccgagcgaccggaaggctcagcagcaggccgcggagaagggcggcgcccaccaggcccctagcactgcccagtctggcccggcacagctgctg

SEQ ID NO: 94414 - DNA, 122 bp, Homo sapiens
ccaaccagggctcctccagtgcccaaacgctccgcagaggggacatgcgtcagaggccagcgggcctgcagagggaagagtctgggaaagctccttagcgattaaaggacttcgagcaaaag

SEQ ID NO: 94415 - DNA, 122 bp, Homo sapiens
tactcaggctcacagaggccatgccacctgtcccacaccaccctgcagatggtacagcctcgccgaggacagggctccggctgtcccacctggtggtctcccacactcacaaacagggcaaa

SEQ ID NO: 94416 - DNA, 122 bp, Homo sapiens
gtacaacaggcacttcttttaactggaagaaggaagaggagccttttgccctgtcagagccgcacaggacacttaaaaacccaggctggccacggtcacatggcagtaacttctagattgtt

SEQ ID NO: 94417 - DNA, 122 bp, Homo sapiens
cttttgctgagacaaaaatcacatctttgcttacattcatgattgagggaaatgctaaatcgcagttaaggctaggaaaagtgaaagtgtagtattttctccatcactattcacaaacccac

SEQ ID NO: 94418 - DNA, 122 bp, Homo sapiens
gctaacagctggcagcctagtattctctcctgatgtttgcccttagctgaaaaagagctgcgtcatctgataacacgtccccttctcagcagcagtatgcctctaatagctgttttatgtgg

SEQ ID NO: 94419 - DNA, 122 bp, Homo sapiens
atgcacacctccacccgccccgggcccggccggtcctgaccccagagagcagctccagctcgcaggaagcccaacgggggtgtaggccttgtctccgcttaagatccaggaggagaccctga

SEQ ID NO: 94420 - DNA, 122 bp, Homo sapiens
gggcggaggggagatgagacccgcaccttagccctcttccctggttgcgcggtgcggcgacgctgtgtgccacacagcaagtttatgtgggggctttgtgacttcccgcaggggcttttcag

SEQ ID NO: 94421 - DNA, 122 bp, Homo sapiens
aatcagccaaggccctcccagggctgcctccaggagacggggcctgtttgaagacagcagcgccctagcaagtcttgcctttccactcgcttttcatctccacccagactgggctgcggcgg

SEQ ID NO: 94422 - DNA, 122 bp, Homo sapiens
cagtagggacgaaggccgccacgctggtttagccgaagttggggagccgcgtttctgtcccgatgattaaggctcccttctgacccccactgcaggagttgtaggtctgaactcaagaagac

SEQ ID NO: 94423 - DNA, 122 bp, Homo sapiens
cggccggcagggtgcaggcggccgggcggcgcagagctggttaggcaggttccggggccccgtgcccccccctccgcctccccgcccccctgtgttgtcgcctctccctctcgctgcttcac

SEQ ID NO: 94424 - DNA, 122 bp, Homo sapiens
tcctctgccaattctggggaagcactccctggctcttatatagacacactcagatgcatgcggtatttcccaaacttcagcagtgctcaatctacatgcagaattactgccatacccacaca

SEQ ID NO: 94425 - DNA, 122 bp, Homo sapiens
ggcgccgggaggaggccagtagagcccccagacacgagtgtcgggaggccagcggaggggcgggacgggacgggaaatgggacgaagagcaagagctgggggaggagggaagagggggcgtc

SEQ ID NO: 94426 - DNA, 122 bp, Homo sapiens
gcctgcccgtgtccttggcgccttggcgtctatgcgttctctgcacataggtaggtaccacgtgcacaccctgaatgtgagtgaactgcctgtgtgctatgtatttgccggctgaagagggg

SEQ ID NO: 94427 - DNA, 122 bp, Homo sapiens
aatacataaaatttctggcctccatggaggtgtgatggttaattttatgcatgtcaacttcgctgggccacaggatgccccatatatgatcgaacattatttctggttgtgttcatgaagct

SEQ ID NO: 94428 - DNA, 122 bp, Homo sapiens
ggcccgcgatggcgggggcctggctcaggtgggggctcctgctctgggcagggctcctcgcgtcctcggcgcacggccggctgcggaggatcacctacgtggtgcacccgggccccggcctg

SEQ ID NO: 94429 - DNA, 122 bp, Homo sapiens
tcagcgcctcctcggccttggtgcccactctgaccgcgcttgaggagcccttcagcccgccgctgccctgtgggagcccctttcagggctggccaaggccagagccggctcccccagcttgc

SEQ ID NO: 94430 - DNA, 122 bp, Homo sapiens
tccctccttccccaacaactcttctacagcccagcccccagggcccagaggcagggctggcgtcaggcagactgtactgcataaatacgtggaggccacagcccgaatcagcagcgtcaggg

SEQ ID NO: 94431 - DNA, 122 bp, Homo sapiens
ggccatgctgcggctcgagcggcgctggctcctcgcagggaagaccccggccagaggctgcggaagaggccaggctttctggaagcgcctcccaggcagggcctggcagccgaacgccgctt

SEQ ID NO: 94432 - DNA, 122 bp, Homo sapiens
gcatggcggcagcgacgaaagcagtcgtcatctgagatttccctggcagtggagcgggcccggcgacggcgagaagaagaggagcggcgcatgcaagaagagcgccgggcagcctgtgctga

SEQ ID NO: 94433 - DNA, 122 bp, Homo sapiens
ttgacgtccatggcagccagatgggcgcagcgcaagatgcctaccagcagtccccggcgccgcgagctgtagctgagactcagcaggatgcggccacgctcctccagcagcccctgcccctg

SEQ ID NO: 94434 - DNA, 122 bp, Homo sapiens
cctggcatccgcagcgtttctgacgcggggacttctctcttcggctctgaggtctccgcgcgcagaacccatggcagcttttggtcttacgcgtggctgtgagctgggctcacgctgcgtgg

SEQ ID NO: 94435 - DNA, 122 bp, Homo sapiens
gccaccatcttgccacccgggagcgcgggggccgccgggagttgcggttcggcgccggcgcgagcgcgttttcgtggcgcctgccccgccccctcactccaagcccgcctccccggccccgc

SEQ ID NO: 94436 - DNA, 122 bp, Homo sapiens
ggccttcatttacacttttgacggggcctcacaaataggggtggtctgcccctttccttacgtcccactctttcttcaaattaaattgctacagcaggaaattactgaactgtggctcttct

SEQ ID NO: 94437 - DNA, 122 bp, Homo sapiens
cccatcccgacggcggcccggcgtggggaagcaacggtggcagggacaggatggaagggccgcgctccgcatcctactgggaggggacgagttcaggctgcggcggctgcggtcgcgggaca

SEQ ID NO: 94438 - DNA, 122 bp, Homo sapiens
tgtgatcaggctgcaaattttccaaattttatgctctgcttaccttttaaatctaagttccggtttcaggtcatctctttgctcatgcttaacaaaagcaatctttgctccagttcccaata

SEQ ID NO: 94439 - DNA, 122 bp, Homo sapiens
acctcaggtgatctgcccgcctcgatctcccaaagtgctgggattataggtgtgagccaccgcacctggccttatctttagatttctatcttggctggataactggcctaatagagcagcca

SEQ ID NO: 94440 - DNA, 122 bp, Homo sapiens
gtgaccagtatgtctggacgtggcaagcaaggcggtaaagctcgcgccaaggccaagacccgctcttctcgggctgggcttcagttccccgtgggccgagtgcaccgcctgctccgcaaggg

SEQ ID NO: 94441 - DNA, 122 bp, Homo sapiens
acactcacttcttgctcagtttcggctcgctgccatccactttcacctcggccgcctgcacggccgccatcttcccggagggcccgacccaaaagtaaggaggatagtacgttaatttccag

SEQ ID NO: 94442 - DNA, 122 bp, Homo sapiens
caaatacaaaggcttttggctctctgctctgctgtgtaagagtgatgaggctttgggtggcggctacaagaacgacggtatgcttttcaccttctcaagtctgcatccggcagcaggactaa

SEQ ID NO: 94443 - DNA, 122 bp, Homo sapiens
gggctctgcttggtcatatgcctgtccctagaccacaggtgtgttaaggaaaatggggtgcgtagatggaccagcttgggtcacacacagtgcagagaatgtgagggaaaccctcaccggat

SEQ ID NO: 94444 - DNA, 122 bp, Homo sapiens
gggccggacaatgagagtgtccgcctcctgagccaataaagctgtactggttttgaatcgcggcgcgtttcccgccgctggggtcaggggtcgaggttcgggtcgtggggcggagggaagag

SEQ ID NO: 94445 - DNA, 122 bp, Homo sapiens
ttttcttcatcagcctttctaaactaattcaatgagtcctttagcggcacaggctcagatcgcggaacacaccagcggactcgccgtagccagatgaagccggccatggcggcctcgatccc

SEQ ID NO: 94446 - DNA, 122 bp, Homo sapiens
aagggggagtaacagagccctgcagctactgttacgcagggagcgccaggtgggcgtggccggaagtggttcctcttgacttccacctaataaaggggtctgagccggtcgcctgagcctga

SEQ ID NO: 94447 - DNA, 122 bp, Homo sapiens
gtgacaagagatcctgctaaagacatcagcagagcccagaccaaggattattacaggccacggttaagaatctgggttttattctaacttctaagggcaatgtaattcgctgaagaatttta

SEQ ID NO: 94448 - DNA, 122 bp, Homo sapiens
gcggaggaccctccgagccaggtgccggatataatctcgtggtgcgacgttttttaagcccgtcggaaaagcgcagtattcgggtgggagtggcctgattttccaggtgacaaccgtcaccc

SEQ ID NO: 94449 - DNA, 122 bp, Homo sapiens
ttaagtaagagctagtgacaaagattttctccttgaccaaatcctggtcaggctcttgtgcgtcctcttctcaaccaggccttgacttttgggcttctgtgttctgatctgcattgccaaat

SEQ ID NO: 94450 - DNA, 122 bp, Homo sapiens
ggccaatcggaggtagcacagggcgggaggtgggcggaccagagggcggctccacctatccgagagctcgggaggcgggccagaagggacccgtcactcccgggttagagtgagaccactcc

SEQ ID NO: 94451 - DNA, 122 bp, Homo sapiens
aaggccgggcgagcgtcgcctgcgccccgccgcgccgcgagctccgccaggaagatagatcgtcagcgttaatttgatcgtggacaatagagtctctcctgcgggaaagtggctcggtgcct

SEQ ID NO: 94452 - DNA, 122 bp, Homo sapiens
aaagaaaaatggagaaacagggagagagacggagatagataaagagatggagatagagatcgcgagccagcagcagctctctgcccaatcacagcgctgcatttgtgggccactttcagacg

SEQ ID NO: 94453 - DNA, 122 bp, Homo sapiens
cagtaagtctcgggcccaagggtggtgagttacctcgaaacgggggtgtccctggactctcgcctgcgcccgggcccacgcggacaaggaagacggaggtccgcgcggcgaagccaaagagg

SEQ ID NO: 94454 - DNA, 122 bp, Homo sapiens
gcagcacgcacttctgctaagggctgcagtgagtgggctctcacctcaacctgaaccagacggaggctgaggctgggccccactgaggggctgtgacttgcccaaggtcatccagggccagg

SEQ ID NO: 94455 - DNA, 122 bp, Homo sapiens
tcttcctcagatttacataataggactcattgcagaccggaaatttcagcatttcaacaccgttctggaggcttacatccaacagcatttcagtgcgaccttggcttacaagtaagtaattg

SEQ ID NO: 94456 - DNA, 122 bp, Homo sapiens
attccagccctggctgcttggtggggctcctcccatctgtccttctggctctggggctgccgaggcttttgggagcctgggcagggctgaccaagactgccagagctccggccggtccccag

SEQ ID NO: 94457 - DNA, 122 bp, Homo sapiens
agggtcagagagtgaccattggctccctcttttcttcctccttttctcttcctactcaggcggactgtttttccaatgacattcacaagctagataccagcaccatgacatggactcttatc

SEQ ID NO: 94458 - DNA, 122 bp, Homo sapiens
ggaggagcagggccccatctttatgcgagatagttctgactgggatatcctttaccatagcgatcttcccagagtgtcagtcacatggcccctcaatggcttccatgtacgtatgtatgttt

SEQ ID NO: 94459 - DNA, 122 bp, Homo sapiens
ttaaccctttctactcacccctcaccattagaaatttcttcttgtgcattttaatgaatgcgagaaaagacaacaactctgttggttgccaacaacagaacccagctgccactactatttaa

SEQ ID NO: 94460 - DNA, 122 bp, Homo sapiens
cgaaccgcgcgaagcggccctgcccggggagactcgctgaggcagggctgaggcggcgggcgggagcaagctgctctagcatttgggttctgccctgtggcgtgttctcttccagggccttt

SEQ ID NO: 94461 - DNA, 122 bp, Homo sapiens
acgattccttggcatgcgtgtcactctgggcaacaggctggtcggccacgactgcgcaggcgagaggcacagagcgactggagactgtagtcccccggtttccctggagaccaggcggaagc

SEQ ID NO: 94462 - DNA, 122 bp, Homo sapiens
caagacttgtgtatatgaacggcagacttttcctatatgcaggcccagcagagacaatgtcggggctggagtacgagcaggtgttggtgcatgtagggggtactgaaacgaattgcctgtgt

SEQ ID NO: 94463 - DNA, 122 bp, Homo sapiens
gaagggcctcactggaaatctcctggcttctgggtgtccagggtggctgtcccaggcaggcgacggtcttcttggcggccaggctgcgtatgcgtcacgaggaagcctccagatggagcgcg

SEQ ID NO: 94464 - DNA, 122 bp, Homo sapiens
tgcacgttttcgtctgctttgtggtggcgtctggaaatgaaatagttttgatcacgtcgtcgggggaataaaagaatcgattcttgcctaatggagcccaggttctgagtagtacaatagaa

SEQ ID NO: 94465 - DNA, 122 bp, Homo sapiens
ggtgcgcgacctgggctggctccgggggtggcgggcgcagctgctgtgacaggtgagtgccgccatcttcctacctgtcaggcgccgagtcgttccccggatgccccgaagaggagtcggga

SEQ ID NO: 94466 - DNA, 122 bp, Homo sapiens
gcgaggaaatcgccattattcccagcaagaagccccgcaacaagatagcaggctatgtcacgcatctgataaagcggattcagagggggccagtaagagagaggtatctccatgaagctgca

SEQ ID NO: 94467 - DNA, 122 bp, Homo sapiens
ccaaagtgctaggattacaaggtgtgagccaccgagcctggcctcattttttttcacaaacgtaactacctttttttttttttttttttgagacagagtctcgctctgtcaccaggctggag

SEQ ID NO: 94468 - DNA, 122 bp, Homo sapiens
cgccaacacttgctactttgtggctttttgtttgtcgcgtactaacgatgccggtgggtgcgacgtggtgtctcgctgcggttttgattggcatctccctaatggccagcgatgtggagcat

SEQ ID NO: 94469 - DNA, 122 bp, Homo sapiens
actgcaaggattcggcaaactgacctcagtgttctggtgcctgccaggccccgacagctgcgttttggggcagccgtgtggacatgtgcccttctctctccagattcctggtgtttctgcgg

SEQ ID NO: 94470 - DNA, 122 bp, Homo sapiens
cacggtcaggtcagaggtcagcaggcagttgcgcagggccaggtcgctgcgggaagaacgcgaggaggtgagcgcaggggcagccctccagccacgccctgaccccgccctttcacactgac

SEQ ID NO: 94471 - DNA, 122 bp, Homo sapiens
cagcccgcagagcctaagtgaggcgcagctcggctagcgccgctgtccaggacaggtgtgcgcgcgcgcgccctcctcccctccccccttcctcgcgcctgtctcgcgcgcgccctccctcc

SEQ ID NO: 94472 - DNA, 122 bp, Homo sapiens
gattacacgtccacctctgaggaggagtacggctcccgccacggctcccccaaacacacacgctcccacacctcaacagccactcagaccccgagggctggcagctccagccgggctcgttc

SEQ ID NO: 94473 - DNA, 122 bp, Homo sapiens
tgtggacctcagccatgacctaatgattctaccattaacagcaagtacagcttagttcctcgagaaaaatgagaactacccagagttcatgtcaacaatctgctcctctttaaaatgaagcc

SEQ ID NO: 94474 - DNA, 122 bp, Homo sapiens
cgttccacacgccagacaagctcagcttcatcctggacctcatgaacggtgagtgctggccgggccctagggtgggccgggcccaggcacgggaggctggggcaagacactgagtgctgcct

SEQ ID NO: 94475 - DNA, 122 bp, Homo sapiens
tttcttctcatctaatgtggcacataatagggccttatactaaaggagctccacggtttacgagacctagagctaccggcgagatactttacttcattccctgtggtgaaccgtggggactt

SEQ ID NO: 94476 - DNA, 122 bp, Homo sapiens
gggcgcccccgggggccactggctgcacggcgctctttaaggccaacagccctgagttcacgggactgaaatcggcacagagaggccgaggacctgtggtcggggctccgcgcaagcggttc

SEQ ID NO: 94477 - DNA, 122 bp, Homo sapiens
tggaaattcttacccagaccctcaaagcaaaagtaatcagacaaattaatttaattctttcgttagtgtacacaccaagaaccgtttcataactgagaagctaggcctgtcaacttagctgg

SEQ ID NO: 94478 - DNA, 122 bp, Homo sapiens
cccaggggatgggaccaggagcccgccagggagcaggcaggcgggggctggcgggccaggcggccccgggcccgctccgtggacgccctggacgacctcaccccgccgagcaccgccgagtc

SEQ ID NO: 94479 - DNA, 122 bp, Homo sapiens
gagcctcctcccacctggaggggtcccagcgtccaccttccctgccccagcccccctcctcgaggtactgggaggctggataaagtcttcggctgggccacaccccaccccaaattctccct

SEQ ID NO: 94480 - DNA, 122 bp, Homo sapiens
gtacccaacaattacagtccttcctcggagtttgtgtccccaaatctcagaggggccagtcgctatactctccatcagggcatagctacatctagcatggcttaccactctatccccagcct

SEQ ID NO: 94481 - DNA, 122 bp, Homo sapiens
gcttgtattcacccatctcatcagcttcttctcagagccagctttggggaggtgactgttcgctggctcctggactctgagcaggtgttccacagagctggactgctttgggtagggagcct

SEQ ID NO: 94482 - DNA, 122 bp, Homo sapiens
gccgtccacaggcctgtgaagacgccacctctgtggacagacccgccgccccaccgtcctcgtcagacagcagcccgggcgggtggactcaccatggcataatagttgctgttcaccatgag

SEQ ID NO: 94483 - DNA, 122 bp, Homo sapiens
tgctggtggcggctgcagctgcagcgcccgtgggctgacgtggcttcccggagctgcggccggccagcgcccaagggcccacaggctgcgctgcccttgccagctgcttctgacccgcgccc

SEQ ID NO: 94484 - DNA, 122 bp, Homo sapiens
tttagatgatccaggtctcagatttttggagattttgctcccctgccaactttcctctttcgctttttaggacttgagtcttaaacaaacaactaagtaaaaaagaaatatatttctatttg

SEQ ID NO: 94485 - DNA, 122 bp, Homo sapiens
gttacacaaaggactgttttaagagattaagagtgtgccttgcagacttctcaaccaaaccgcagaatttctaggaagcctatagactacgtccccagccttgtcagcagaagcccaagaaa

SEQ ID NO: 94486 - DNA, 122 bp, Homo sapiens
cgcatttgtcgcagtttccaccgcgggcgggaagtgtaaacacaagaaatacaaacatagcgcaacggctaaaggagtgtcacagcgccaaaccttgctggctccgcgccaggccgagcccc

SEQ ID NO: 94487 - DNA, 122 bp, Homo sapiens
agcccctgggctttcagttccttgagtttccccttcctctggcagccatcttgagaaggacggccaaatggaaaacaagaagggacacgatggcatggttgagctgccatagcagccccgca

SEQ ID NO: 94488 - DNA, 122 bp, Homo sapiens
ctgttcttcacagaatttaacttgagtctcagtcagagccaccctcacggacgtggagaacgcaggggagaagcagccgaacctcctggggacagtgaggccgggcgcccagacagcacggg

SEQ ID NO: 94489 - DNA, 122 bp, Homo sapiens
ataccgctttctcagaaaggtttttcctggctactctaggtatagtagtgcccttctcaccgcagacactctatcataccaccctgctttttatatgatctagcacttgtaactatttggaa

SEQ ID NO: 94490 - DNA, 122 bp, Homo sapiens
tctgcgcctgcgccctagcgccggctgcagcctcctcacttcgagagcctgctgtttccgcggatgctttaccttgccaagagttgggtttaagtgcataggtttccacctttacattttgc

SEQ ID NO: 94491 - DNA, 122 bp, Homo sapiens
taaaattagtcttagagtcacagtaggttgtttcagcagttgttagataaaactggtctccgtttacaagaggcagtttcagcagtcaggcttgcagagagttacctttttggagacagaag

SEQ ID NO: 94492 - DNA, 122 bp, Homo sapiens
gaccttttaaaaaaaatattccacactgtttgcgttgaatgattaaccaggctgctagcccgagtcgtgggggtggggtggggcggggtggggtgggtgctgccaggccagggagcgcctga

SEQ ID NO: 94493 - DNA, 122 bp, Homo sapiens
ggccggggtggggtctggctccagccaaccgcacacagcctacgcgccgttgctgagcaacgcttgcccgctgaatcccgaggttttagctctagtcaagtgccaaaagagcccaatgtgtg

SEQ ID NO: 94494 - DNA, 122 bp, Homo sapiens
cagttgaaggcagttttgtttttccatagatgtctgttctccctttgctgggtgcagcctcgccctgctgctgtggtcgggtttcagtggcctcgtcccgtggacgcagcctcgccctgccg

SEQ ID NO: 94495 - DNA, 122 bp, Homo sapiens
cggcttcggacgcctacgacacgctgtgcgtgggggcgcggagtgcgggggatgtagttccggttgggaggggcgtggctgaggactgtgaagcaatcggggcgaggccgggtgtctgttca

SEQ ID NO: 94496 - DNA, 122 bp, Homo sapiens
tgctccgtagtgacggggattgttgtgttgcagaaatccggcaatcgacctgaggacttgcgagccgctcagctcccgggacgtttggtgcgtcttctaagggcgtgggcgagtttacgcgg

SEQ ID NO: 94497 - DNA, 122 bp, Homo sapiens
ggatgccacacgttaccgagtgccccttttctgtcccaggatcccatttaggatgccacacgttaccgagtgtcccttttctgtcccaggatcccatttaggatgccacacgttaccgagtg

SEQ ID NO: 94498 - DNA, 122 bp, Homo sapiens
caggcgcgggggctccgctccgcaaggaccgcatccggaacggaacggaggcgatcgccacggtgcccggagccggctggggctttcgccttaaaaatttgtctgcttttaaaaagccccac

SEQ ID NO: 94499 - DNA, 122 bp, Homo sapiens
gccctgtaaactgcggggtgacgggacgctgttactaggactcaagatggccaccgcgcccgctagtcatctcgctagcccgcgcgccagtgagctggcacgagacacgcggtggcccacgg

SEQ ID NO: 94500 - DNA, 122 bp, Homo sapiens
ttatgctaaaattctaaaatttctaattctaaaattctcttaaatgttctaatactgtgtcgtaagtctgaattaattgctgagttataaactttggattggagttatattaaacattgcag

SEQ ID NO: 94501 - DNA, 122 bp, Homo sapiens
caggggcaggcatcccttcaacagtggcaggtgagggccagtggcccctgaggaggactccgcaggccagctgtgcagatgggctgtgaggaggcacctgcccaggtgagcagcaggtctgc

SEQ ID NO: 94502 - DNA, 122 bp, Homo sapiens
aggaggcagcaccagctccttcactaggacctgagggtactgtggctcatcaggggccatcgaggacatggagaccctgcacagtgtttgaggagtcctgctacatcagtttattctggttt

SEQ ID NO: 94503 - DNA, 122 bp, Homo sapiens
ctgggtgataatgacgttactgtgggttcatcaactgtagcaaattcgccctctgctgggcgttgttggaaatgcagaggctctggggggtcaggtatgtgggagctctctgtacctttctt

SEQ ID NO: 94504 - DNA, 122 bp, Homo sapiens
acctcgtgatccgtccgcctcggcctcccaaagtactgggattacaggagtgatccaccgcgcccggctgtagggtttcttattcaggtattaccaacacctagggagttgcctggcataca

SEQ ID NO: 94505 - DNA, 122 bp, Homo sapiens
tgtacaaaagtccaaaatggcaaaatgaaggtgtgtggtctctgcctacaaattaaaatacgtgggttttaacatgttcattttgtaataacctcgctggacactgcttattgagttaaatt

SEQ ID NO: 94506 - DNA, 122 bp, Homo sapiens
gacgtccagggccagcttgaagtttatcagcccctgatacgcagctgccgtgccatgtcccgcttggccggctgtggggcagcctcccagcttggacagcttggcgttggcatccttaacgg

SEQ ID NO: 94507 - DNA, 122 bp, Homo sapiens
tcattcctcggcacgcccctcagatgagaaggcagcccagagcttgcgtgggcctctcggcgtagccgttactttattttatggtgatttttcagagtcaggctaagacttgtgcagatgat

SEQ ID NO: 94508 - DNA, 122 bp, Homo sapiens
aagtgacccgcctgtcttgacctcccagagtgctgggattacaggcatgagccaccgtgccgggccactttctgtaattttaagctaccaagtttatggcagttttttttttttttttttac

SEQ ID NO: 94509 - DNA, 122 bp, Homo sapiens
ggctcccgccctgcgtgctagcgaggcaggcattggcagaacggactcggggctgtccttcgtggcccggaccccgcgaggcctgtccttccacctctgtggggaccaagagggcaaggatc

SEQ ID NO: 94510 - DNA, 122 bp, Homo sapiens
gtgggggctgcagagtgatcgaaatgtcaggtaattccacaaaaatccacatttggatttcgggcttctcttggaactgaccatctgtaactccggctcacgctgtcctgccggcacctggc

SEQ ID NO: 94511 - DNA, 122 bp, Homo sapiens
tcagtggcttcacctcgcaaagcagcagcaggacggccccgtggcgagaggctgtgcaggcggtgcttgcatctctgcacaggttggctgtgagtgacagctcagagtgcggccggatgtca

SEQ ID NO: 94512 - DNA, 122 bp, Homo sapiens
gcagagctgccaccaggtagggcttactcacctgggccttcgccctgagtccggggtgagcgccgggggccacggggatcctcaggtccccgcgccgctgcctcctccttcttgggcctacc

SEQ ID NO: 94513 - DNA, 122 bp, Homo sapiens
tctgaagaagacttccgatattaggttgcctgggcccagcttgaatcaggcacccccagccgagtcgccctccaggggatggaatacgggactcccagccccggaaaacggagtccgcctga

SEQ ID NO: 94514 - DNA, 122 bp, Homo sapiens
gtgcacaacgtgcagggctgcgaaagcggatgcggcctgatggggcaatcgctggcaacgcgccgcgggttgtcagcgggcgctggggggtgggagcccggcgccggcgggccctgcctcca

SEQ ID NO: 94515 - DNA, 122 bp, Homo sapiens
ctggcgctcccagggcaagaaaaatcgaagacccgagccggcgcttgcgcacttagtctccgccactgctgtggtctcgtgccccgccccccggtccccccaccctctaggctaggctgagc

SEQ ID NO: 94516 - DNA, 122 bp, Homo sapiens
ccggagaggacagtggctgccttcaccatggggcaggtcgacgccttggagggcgtcttccggcaccaccagtacctgggccctctggagccggcaaatgcaggactcccagctgcacagcc

SEQ ID NO: 94517 - DNA, 122 bp, Homo sapiens
cagtcaccgccaattccggcaaaacagcagaagcttcttaaactctagatgcaggttacacggaaggccttacgggttaactcaggggttcactaattctactgtctccatgcagtcgggga

SEQ ID NO: 94518 - DNA, 122 bp, Homo sapiens
agaaaaaatatatatggtgtaaatattggccatgtaggaaagaacggcccccatgggttccgtctggacgggcaggtgtcctcaccatcgggcgccacatagtagtcgaaggcggtgtcccc

SEQ ID NO: 94519 - DNA, 122 bp, Homo sapiens
gggcggggcttggacgctgccggggtggcgtgagcaagggagctggggcgctggggcgcacgggcccgggggaccagggtctggctctctcccgaggaatgctgagcaggctctggacgcct

SEQ ID NO: 94520 - DNA, 122 bp, Homo sapiens
taattagttttgaattaccatgtgcatattttaaacatttaaatgatcatcccaggttttcgaaaacagttgcacgcggcttgatgtcacctcccctcccgggcggcctccccaaggggaca

SEQ ID NO: 94521 - DNA, 122 bp, Homo sapiens
ggcacacagatgaatcagacccggccccctctttgtgccaattcataagcacttcatccacggctcagccctgtgaaagagctcctcgggcccaggaatgcaatacagtgagaacactttcc

SEQ ID NO: 94522 - DNA, 122 bp, Homo sapiens
ctacaccacagagtccctgtgtcgcaccagccctgcaggcacctgtttcttggtgccgagcgtctttcacgagtgtgaacccatctgatgttagtccccagtagggaaaatgcccatgggaa

SEQ ID NO: 94523 - DNA, 122 bp, Homo sapiens
agacgagctggccgcccctagcgggcacgtggaaagaagcccggaaggtctggaatcccccgtggcaggtccaagcaatcggagagaaggttagacctcaaacctgatcagagtgagaatag

SEQ ID NO: 94524 - DNA, 122 bp, Homo sapiens
ggcagtagctgggtcatggtcacggggagagatgctgcgcgctctctgcggtgcttgggccggggacacttgtgcttgtcaattttgagaaaaaaaatggcagggagaggagactgctaaaa

SEQ ID NO: 94525 - DNA, 122 bp, Homo sapiens
acagcagactagaactttaaaactccttgatttcagtgaaatccaagctttgcctattcccgttcctcttccatccaggggttatttggctgaactgttttcctgtttaaacaacttgaaca

SEQ ID NO: 94526 - DNA, 122 bp, Homo sapiens
attaaatactggtcaaagcctaattgcagagggttgggggatcactgaaaggcccctcttcgctacaccaccagattatcacgacttgtttttcacttatttccgtatcctgggcaaacctc

SEQ ID NO: 94527 - DNA, 122 bp, Homo sapiens
acaggcataagccactgtgcccggcagatatttcattcttaacaatactgactggctgggcgtggcggctcaagctggcattcccagcactttaggaggctgaggcgggtagattgcttgag

SEQ ID NO: 94528 - DNA, 122 bp, Homo sapiens
aaactctgtgagggacgccgcgggggcttccaagggacgcggcgaaaccaaaacagtcgccggtggttcacaaaaccacctcagaaaatgcttccaaaggcacgtctggcctccacaaggtg

SEQ ID NO: 94529 - DNA, 122 bp, Homo sapiens
gtgtccggcagggaagtccgaggtagcgagggagtccacctggccgcccgctccccctcccgggtataaatcttggggaccggaaatacaataaaacttcaccgtgttgatgaacttcaaac

SEQ ID NO: 94530 - DNA, 122 bp, Homo sapiens
cacagcagcccgggctcaattgcaacaacacactttcctgagagctccacaacctccggccgtagtgaggaatcaacagcatcccacagcagcccagatacaaatggaatcacacccttacc

SEQ ID NO: 94531 - DNA, 122 bp, Homo sapiens
aagtcttgcagacaggcccgcgattcttaccttgcaagatgggaaagagaattaaggtcccggcttccggtctataagcaatcatgggaagtgcgagtctcacttccttccggatctggggc

SEQ ID NO: 94532 - DNA, 122 bp, Homo sapiens
cacagctcgaccgcgagcacctgagcatcctgcaccgcctgcgacggccgtcagggggcgcgatgccgcctcacagaacctcaagaggcgcccgggttccggcacagacggcctgcggctcc

SEQ ID NO: 94533 - DNA, 122 bp, Homo sapiens
tggttactactgagtcgtggggacatctttttgggtggacaaagagcagctgccggacagcggccatccaggcagtgctgtccagggcaagggacagaaaacccgcccggctcctgtgctca

SEQ ID NO: 94534 - DNA, 122 bp, Homo sapiens
cgggcggagcgaccgggccccgtgtccgaattcgctcgagcctttgccgggacgggaaatcgccccacctcattggtggggctcctgacgccccaagaggcggacgtgacttgcctagggct

SEQ ID NO: 94535 - DNA, 122 bp, Homo sapiens
tgaaaggagcgcttaagaagcaagacttgccccggagggagcaggccagcgggcggcaggcggaccccagccagagagcgagtgtgaggagacgagggaggagcaccgggaaggcttggggc

SEQ ID NO: 94536 - DNA, 122 bp, Homo sapiens
tcaacaaggctattgtcttccaaagagtccttgtttttgtacacatcttgcaaatacttacgtaatatggaaccttttcaaaaggctccatccaataaaagaagaaaaccaaaaatttggtc

SEQ ID NO: 94537 - DNA, 122 bp, Homo sapiens
tgtaatagggaaatgatgagttccctgcacataggcacaggatttttagggaaccagccccgtgataaatgcggcttttgcccactaaatcaatatttaagctactgacttccagctggcta

SEQ ID NO: 94538 - DNA, 122 bp, Homo sapiens
gagagaatgggtagaagatattaatggccctgcctctaccaatatgaaggaatccacccacgagccctaatgtcagacatgcatacctcttgctttgttgttgatccgctttctctggctgc

SEQ ID NO: 94539 - DNA, 122 bp, Homo sapiens
gacccctccggacagctggtcagccctgcagtgtggactcccaggcttgcctccaccgagcgcggtttctgtgaatgttgtgtggacagggagatagggaatgagagagggggacgcaggga

SEQ ID NO: 94540 - DNA, 122 bp, Homo sapiens
ccgcgcgggtgccagggaggccggcaggggcgtccgcggtcgctgctcacctgcgctccccgctgcccggcccagcccgcctcgccaccgagtctggaagcccacactcacccctttacccg

SEQ ID NO: 94541 - DNA, 122 bp, Homo sapiens
ggagaagtggcaagaacgcaaataatgctggtagcctcccaaaaaggcctctcctatcctcgaaacacataatgctgtcccaggcgagctgtaaagccccaggcttcggcacagggtacctg

SEQ ID NO: 94542 - DNA, 122 bp, Homo sapiens
aagaagcttctggtttaaaataccacagcagcaatataaagagctggtggcaatcacattcgggagtgaaatcgaaatcaatatattttgtccacatcagcatccaattacagtagttgtta

SEQ ID NO: 94543 - DNA, 122 bp, Homo sapiens
ggaagacagcaggaaaagctgaacataaatcttagataaagggccattatcagactttcccgttagttacaaacgtctagagtctgggcactacttccccaacaaggaaaggaaaatgaatg

SEQ ID NO: 94544 - DNA, 122 bp, Homo sapiens
gtcggcagaagacagagatgggggcgctcagaaaggccaggacaggtgggggagacagagcgagcctggagccctttcctgtgtgtgtcagctcagcaggctccagaggtccttggtgactg

SEQ ID NO: 94545 - DNA, 122 bp, Homo sapiens
gcactgtccaatcttcttcatcagggcgtgggttctgtccactgtcgtaggggccgtctccgggtgggggaccagctcaaccagcgggatgtagtatggcggattcaccttaggagagagag

SEQ ID NO: 94546 - DNA, 122 bp, Homo sapiens
cacttctcctgcccgcctgcccgtgctgtgtgcgtcctcataggtcttgacagatggtggcggctttgacagttcgtcagccccgcgtggacactcgtccccagtcactgctctcggatcgc

SEQ ID NO: 94547 - DNA, 122 bp, Homo sapiens
gttctcatcccatatgcctttgtccaaaggttgcacgggggttaagcttggcccagaaggcgccgagggctggtcgagttctcccctttccaagaaccagccgaatctccctcccgcagatc

SEQ ID NO: 94548 - DNA, 122 bp, Homo sapiens
tactctttttagtttacatcattttccttgtgactattctatttttacttttttagggggcggggggacatgagtctcactcatgttggtcaggctggtctcaaactcctgacctcagttga

SEQ ID NO: 94549 - DNA, 122 bp, Homo sapiens
gggagacgctctccccgcccaaagagggaaggcgggcgggactccccaaccggcttgccccggtccccctgggccccatgaataaccaggcgcggaccccagccccctcctcggcgcggact

SEQ ID NO: 94550 - DNA, 122 bp, Homo sapiens
ctcttttcctctcgaagcagggtccagaacggggaaaagaaataacttttgaaaaatccacgcctcactatgactgctcacgaggtggcctctggagaactcatacctagaagctgaccgcg

SEQ ID NO: 94551 - DNA, 122 bp, Homo sapiens
tcacagatcaccagccaggtaactgggcagattggctggcggcgagagggtatcaagtatcgtcggaatgagctcttcctggatgtgctggagagtgtgaacctgctcatgtccccacaagg

SEQ ID NO: 94552 - DNA, 122 bp, Homo sapiens
ctctatgaaaccacacctgttttccacgtatattgctggccagtcctttcccgtctctttcgcatctctttcactggcttttcttccactgccctccctttaagatgatgtctctcgggtct

SEQ ID NO: 94553 - DNA, 122 bp, Homo sapiens
agcctgcagaactggaggcgacctgtgaaacccacccgggcaccccaacaggaacagaagcgtggtcctgcggctgcgtccccagcgagtttcactttccccttgctcgtttctcccttgtt

SEQ ID NO: 94554 - DNA, 122 bp, Homo sapiens
caccccatctggcctccatacgctcactctccacgcagatgcctcctacaataccacaggcgtgttttcatttcgatgtgtttgcacttgttggtcaccttcctagaaggcttctctctcag

SEQ ID NO: 94555 - DNA, 122 bp, Homo sapiens
cggcgcgtctgtggacaggcaacgcaggccggagggcctaggactccggcctctgagaggcgggcggttgtccaggggagtccttcgtgccggcgggaagcgcaagggtgccggaagcctga

SEQ ID NO: 94556 - DNA, 122 bp, Homo sapiens
gagccacccaggtagcgatacggtatttggttatggcaaccctaagaagttataactgaacgacaaaaaaaatgctgaggatatgtttgctgttcattgcctgtgggaatctaaagtggtaa

SEQ ID NO: 94557 - DNA, 122 bp, Homo sapiens
gcgcggcggtacctgggccgccagggagccgggggtgggctctccggggacagccggcagcgcccccagatctgcaccgccagccgccgggagctccgggctccgggcgtagaggctgcgct

SEQ ID NO: 94558 - DNA, 122 bp, Homo sapiens
gatcctgctggtggccactgtgtattcttctatcagttctgccaggtaatagagtccagccgctgcagggtgggaggcagggagactatcagccagggtcactcccaccatcctggtcaccc

SEQ ID NO: 94559 - DNA, 122 bp, Homo sapiens
gcacctggggcccaagaccaggtgcgaaggagttgggctctgcagccaggttgctggcctcgacccctgcagcctgcagagcgtgggcatcttgttctgctgatggttgacttcagggtgtg

SEQ ID NO: 94560 - DNA, 122 bp, Homo sapiens
agcctcttgcctgcccctttcattaccccggacgttaagtccccagcctctcgctgaccccgccagccacactctgcttcagtctaggagtcgtcagctctggtcctgtcccatgcgcgggt

SEQ ID NO: 94561 - DNA, 122 bp, Homo sapiens
gtctattctcgccacttctgtcatgtcagtcagtcacacagctttaaataccatctgtatcgaataatttctaactttttgtttctagcctaaaattccctcttgcattcctgactcttaaa

SEQ ID NO: 94562 - DNA, 122 bp, Homo sapiens
accgccaggcttggacaaaggcacccggcctacaccccagcggctccccgccggggcctacgtggacttcagcctccagccacagggacaagagctgctggccagggctgcccgcctgggct

SEQ ID NO: 94563 - DNA, 122 bp, Homo sapiens
gcccacagaaactaagtcagataacttgccaaaagccacactgctgatgtgcagcgcacccgcttcactgcaggtggaagtggaagtgaataataaccttcctggaaggcagtctgcaagcc

SEQ ID NO: 94564 - DNA, 122 bp, Homo sapiens
tataatgacttttaaaaattactgtcttaaacacatataacttaaggaagcccaaatcctcgttgctggcttgcaaaaagagccaaacagctccacttctgtttaatattttcatctatttt

SEQ ID NO: 94565 - DNA, 122 bp, Homo sapiens
tcgattcacatctcctaacttgtgtaaacagtgtcgcagacagtacgagacatgaatgggcgaggtgcaccactgttatgaatcactccagcagggctttggccatcagcctgatgaaacag

SEQ ID NO: 94566 - DNA, 122 bp, Homo sapiens
cggtggctgccctctgcctcccccgcacactccgcgcattgtttgggactgtcgggaagacgcctcgcacctcacaaatcatttaagcacctcagtctgacgcctgcagtcattaacaaagt

SEQ ID NO: 94567 - DNA, 122 bp, Homo sapiens
gaggcgctgggctggaaaccgtccaatcaggcacgcagctggaatgaacaggacggcttccggatttggcggggtctttgtctctccctgcagctggagctccaggtcgtctgttcactgct

SEQ ID NO: 94568 - DNA, 122 bp, Homo sapiens
ttctcccagggtgcccagagcccagggaaagacggggacggcagaaggaactgcaggtggcgcccacaggtgcgcagctgagaccccatcaccacatcccggggccgtcaggcatgagttga

SEQ ID NO: 94569 - DNA, 122 bp, Homo sapiens
actgctaataagtgattccagtcagaattcagatctttcttttaactccagagccctggtcgtaattgctcccatccctgcttcctttggggtctcacgatcttgctcactttttgtgtctg

SEQ ID NO: 94570 - DNA, 122 bp, Homo sapiens
ccgggtgccccaggcctcccccgctgggcgttccgggtgccccaggcctcccccgctgggcgttccgggtgccccaggcctcccccgctgagtgttcccggtgcccctgggcctgcagaagt

SEQ ID NO: 94571 - DNA, 122 bp, Homo sapiens
acacccgaggcctggtggtggcggcggatcgagatattcaaggctgaagcagctacggaacggcagcggcggcggtcggacaaactgactgaccgagccgggtggtggcgggagcagcggga

SEQ ID NO: 94572 - DNA, 122 bp, Homo sapiens
agtgcgtttcccaggaagggcccccctgctggcgagggaaataaaatcagctccggagagcgttattcccctagaaagcaggtttcaggtggtgtacacccgcacgcgcgcgcgtttacaca

SEQ ID NO: 94573 - DNA, 122 bp, Homo sapiens
atgtagagtgtagaggtttgctggcgtggctcttcctttgaccccgccacggagtgggggcgcggttgggggcgggtgtctgccattgcccgctagcgttggcgccccaagctcggtttcac

SEQ ID NO: 94574 - DNA, 122 bp, Homo sapiens
aggcggagtcaatctatgagtgggtgggcctatcgccaggccgagagtgggcgtggccgacgtggggtgggtagcagccgaccgagtcggaccggccagttgggcgcgcttccgggtgtcac

SEQ ID NO: 94575 - DNA, 122 bp, Homo sapiens
ttcttcataatctggatttcatggcaccatcgttctctgtttttggtacttagctctaggcgacaagacttaattgctattttgagatcaagttcctgccaaaatagaaaatcaacagaaaa

SEQ ID NO: 94576 - DNA, 122 bp, Homo sapiens
attaaaattccttaaacgattcacctacagtagctcagtttaaaatgcctaaacaatgtccgatcccagatagatgcttattaaatggtaacaagcaattactattattagaatagtgcatc

SEQ ID NO: 94577 - DNA, 122 bp, Homo sapiens
agctcaaattccgagtgcagaaaagaaaccggaccccccagtgaggcctgccaggcctcccggaccccttgttactcaggaacctcaccttggacggaatgggatgggggcttcggtgccca

SEQ ID NO: 94578 - DNA, 122 bp, Homo sapiens
ctggccgagtgggcgggacctaggggtggggctggaggctgaaacttgccaaagtcccggcgtgtgggacttaggggaggggccgcgagagccgtgggaccgagggggcggggccggacggc

SEQ ID NO: 94579 - DNA, 122 bp, Homo sapiens
gaagaagtacaacagtactctccttccaagtatctttggcttggtgagaaaattctgagccggaaggattctgattgcgattagtgttccatagattattttgtcttttgtctgaagtgatg

SEQ ID NO: 94580 - DNA, 122 bp, Homo sapiens
agatccggccctacttcaaccgtgtcatccggccccgccgctgcgaccacgtgccctccacgctgcacatcatgtgggctggccagcccctcaccagccacttcttccgccaccagtacttt

SEQ ID NO: 94581 - DNA, 122 bp, Homo sapiens
tagctggaagaaagcactggaattaaatagaagaaagttcaacacaagctcttttataagcggccctggtttaggttaggatgtatgcaaatgactgccagggacaggaagaggaatgtgtg

SEQ ID NO: 94582 - DNA, 122 bp, Homo sapiens
tccacattactaccagttatttgataacgatagaccccaactaggcgcaatttacattgacgcatcatgccttacgtgggaaggacaacagttccaggggaaagctgccattgtggagaagt

SEQ ID NO: 94583 - DNA, 122 bp, Homo sapiens
ttaagaccttgatcatcatttccagtagaatccatgcagttctgctgtttcaaaaagccccgtggcccctcttccctttgaagccgggatggggctgttttgagtgaatttgttctctcttt

SEQ ID NO: 94584 - DNA, 122 bp, Homo sapiens
caaaacctggggtcttttatgaggctctagccaaagcaagggagcccctgggtggtgctacgcaaatgcatttccaccgaaggtcggagccacgcgtaaggcccggtttacaccatggaata

SEQ ID NO: 94585 - DNA, 122 bp, Homo sapiens
tggccatcccaggcaccgcccctggagaggtggcgggtcagaattgtgacttcttcatgccggggagggcaatctgtatgtctctggggaggagtagtgatgatggggactgatgcggtgtg

SEQ ID NO: 94586 - DNA, 122 bp, Homo sapiens
ggcgggactcagccttcccagggtcgcctccggagccggcgccgcccctgcccgcaggtacgtattcatcgtgcagaaaagctaccaggagagcgagacgggccccgagagctccatcatca

SEQ ID NO: 94587 - DNA, 122 bp, Homo sapiens
cccccaggttccagattttggaatggtgtaaataacgccccccggcgcccatccacttagcggaaggaaagtcagccactaggctgcgggctccgggctgtccccagcgtgggagaggctgt

SEQ ID NO: 94588 - DNA, 122 bp, Homo sapiens
gtttctaagatatggtgttccttacaaaggcacagcatgctgggaaagaccttcaggcatcgtctgatcaaacttcatccttttttttttttaaattgatgaagaaagcgtggcattgggaa

SEQ ID NO: 94589 - DNA, 122 bp, Homo sapiens
gaggctgtgctggcccggaagaaacaccgtcggcggccatcgaagcgcaaaaggcactggcgaccctacctggagctgagctgggctgagaaacaacagcgggatgagaggcagagccagag

SEQ ID NO: 94590 - DNA, 122 bp, Homo sapiens
ctgggtccccgcctgtaatctgactctcactgtagccatccctgattgaggctgggtccccgcctgtaatcctgactctcactgcacccatccctgatcgaggctggactctttggtgtctt

SEQ ID NO: 94591 - DNA, 122 bp, Homo sapiens
gaaagttccccaactagggacacacgtgacctccttcggaaagtagttccgactgtggcccgtgtatccttccacctccttttgaaccctcctaggtctcctcgccccgcccactcgctggg

SEQ ID NO: 94592 - DNA, 122 bp, Homo sapiens
tcagacagcaaacattttaggctttgagagccatcctgttcctgtgattattcaactccccggttgcagagctaaagcagtaatggacagggaatgggcatggctgtaatccaacaacaaga

SEQ ID NO: 94593 - DNA, 122 bp, Homo sapiens
ttttcttttaaatgattcctatttccttagatatatttatatgaaaagcaaactcattagcgctactgaaaaaagaatcaatttaacttccagacatagaaggttgccatgaaattctcctt

SEQ ID NO: 94594 - DNA, 122 bp, Homo sapiens
gcagggatgaaggccacgagggccctgatggtgttccccatgcggaggctgggggcatggcgagccccagaggacagactcactgagcggggctggctcagctgactgctctggggcctatc

SEQ ID NO: 94595 - DNA, 122 bp, Homo sapiens
cataattggtaaagtatagaattctaggtgaaaaatctttttccctagaaactatgtaaacggtgtttcactgccttctgtcatttggtgtgaagttactaatcattatgtttctatagcac

SEQ ID NO: 94596 - DNA, 122 bp, Homo sapiens
gttccaggtcctcctgctcctgccgccgcagccgcgccagcctctcctgttccgccttctcgctctcccgcttggcccacgccagctgctgctcctcattgccaaactgcaaaggaaaaacg

SEQ ID NO: 94597 - DNA, 122 bp, Homo sapiens
gccccagaggaggcttctcgggggggtcagtggggccccagggggtgatggtttagagatcgctgtccaagcttgggagcaaacctggaagtaagggccatggggggtgttggtgtgggagg

SEQ ID NO: 94598 - DNA, 122 bp, Homo sapiens
cagttgccacccgactactgtcagaaggatcaggattctgaacttaaggagttctgtcctcgccactaggagggacggggtccttctggcaagggtcccatcaggaaagagttggaggctcc

SEQ ID NO: 94599 - DNA, 122 bp, Homo sapiens
gtcttcgcgcttcagttttctcatcggtaacacgaagatcaaagttccttttaaactatgcgtccagtttttgtgaggatccaactcgaatgtatgtgaaaacgccctggaagcgctagagc

SEQ ID NO: 94600 - DNA, 122 bp, Homo sapiens
cctaatttctagcggagaccgcaaagcagtgcgccctttatggcctgtaaaaagggggaccgagcagttttcaaactccacgcgattgtttcaaattctgaggagaaacagttgggcttttt

SEQ ID NO: 94601 - DNA, 122 bp, Homo sapiens
ccggctccgtcccgtccttctccacgggcagttccatgcgatgcatttttattgcaccgacgccgcggcgctccggtgccagccctcctcccctcgcacctccaccccttcctcccgcccgc

SEQ ID NO: 94602 - DNA, 122 bp, Homo sapiens
cggccagggtgctgcacagcccggcggcccgccagggccgtggggagaggcggcgcggcccgtactgtaataataaacctgcagcagagggcatctgaggaaaagaggacggcgacgggcgg

SEQ ID NO: 94603 - DNA, 122 bp, Homo sapiens
taagcatgggctgcatttagcggtccactttcaaggaataaagccaaaaacggaaaactccgcagtgaagaaacctgacaaacaccaccttccttgtgatgaaagttcacatcaccagtgag

SEQ ID NO: 94604 - DNA, 122 bp, Homo sapiens
acccaggcggtggtagcagtagcagcagcagcagcaggtcagaggcacaaagcaggaccacggccttgcgcgcccacctggaagccgccattttcgctgcgccgcgcagcgccctagacgcg

SEQ ID NO: 94605 - DNA, 122 bp, Homo sapiens
tgtgttccagctgcccggtgtccaccctgagccctgcccctccttgacgctcagtgaggacgcccgcttcctgctgattgccgccggccggaccatcaaggtgtgggactacgccacacagg

SEQ ID NO: 94606 - DNA, 122 bp, Homo sapiens
ggagcactaagggggaatccagcaaagtctgccccaggccttcattgtctggaaccaccacgttcccctccaaaaaaaacccttcctctttgagctctggccttggctggaccaactgaggg

SEQ ID NO: 94607 - DNA, 122 bp, Homo sapiens
acacagaaggtgctcaatacatgaatgcctttgagattacccggtttattcatttacctacgttatttatcaagagccacactgcgagcccaggggcagggtcaggttgacggctctacgca

SEQ ID NO: 94608 - DNA, 122 bp, Homo sapiens
tccgcagccccccttctcattctatttagacctcattcgccagaatccttgcagtaaccgcgagccctcccagtgggctgggggctccggagcggcgatctggtttgcgggtggggggcggt

SEQ ID NO: 94609 - DNA, 122 bp, Homo sapiens
gcagccggtggtaaaaccgctggagctcaggctcgggcttcgggggctccatcatagagccggcggccgccaccgtccaggaacagaaagccgaggggttactaaggcaaccaggagcccga

SEQ ID NO: 94610 - DNA, 122 bp, Homo sapiens
ctcattcagcaaatttttatagagtgactactgaagaagaactgtgagagtataaacaagcgactaaaacgtttctgtttttcattacagtctagaagggcagaaaatatattcttgcttta

SEQ ID NO: 94611 - DNA, 122 bp, Homo sapiens
tccgctctcccagctgagctgtcttccccggaggccggtctgcaaccagagaaggcgccacgccatcggccctcaccctgctccgcctaagctgctgcttttcctctgcaaatgccctgggc

SEQ ID NO: 94612 - DNA, 122 bp, Homo sapiens
aaatgctgaggacctccagacctgtgtcccacagccactctcatgggcggagcgaataatcgaaagcagcctagtccagggtggagaagttcactgggttgccctgggccagggcttcatgt

SEQ ID NO: 94613 - DNA, 122 bp, Homo sapiens
cccctcacccaagaacttgttgctaaacattgactagcacatcactgaccctaagggatgcggtggtaaaattagcctctgcattggagagccaagcggaatacctctgtggttcagttaca

SEQ ID NO: 94614 - DNA, 122 bp, Homo sapiens
tacctcaaatggattgtgaggccttgaagtgctcaggcagggcaacagcggcgcccaggccgcaggcgccgcgaaggctctcctggcccggcttgcctcctgctcacggcgccgatggctta

SEQ ID NO: 94615 - DNA, 122 bp, Homo sapiens
gtcatcttggtggaatcactttgcttttggagcctgagttttcccttatgtgagatgaggcgagaagagcagcagagtgagggactgagagaaaagttaataagcactcagtacatttgaat

SEQ ID NO: 94616 - DNA, 122 bp, Homo sapiens
actgcacagaaggtcaccgcgggaggccaaatccccggggaggggaaaggacctgggcgtcgggaagcccgtctcctttgggccagccatgggcaggaaccagcgcaaagcgccccagcgcc

SEQ ID NO: 94617 - DNA, 122 bp, Homo sapiens
tgagcggcgagaaagtgcgagccgggccggcagaatctgcctggcgggcgctggagcctgcgttactcgcggcccgcagccgtccggctactttgcgtttggcccggccagcgcccgggcgc

SEQ ID NO: 94618 - DNA, 122 bp, Homo sapiens
gcgggcagggcgctccgctcccggaccccgaatctgaaagcggagaccaagggctgcctgcggcaaagctcgacatacacttgattttcttccgatttggagaaaatgtcacgggcgagagc

SEQ ID NO: 94619 - DNA, 122 bp, Homo sapiens
gggaggagtgggagcttcacggctgccacccgttagagggccctggcctgagaaggagtgcgtcggggggcggggggtgccaaccctggcttctccccaggattccttcctgctgagcctcc

SEQ ID NO: 94620 - DNA, 122 bp, Homo sapiens
gaaaggttctaactggactgggctgcaggatgaggtgacccaaaagccaggaaccatctgcgcagagcagacaagtagaggcaggcacaggctccgtgagcacgtctgtgtgtgtgtgtgtg

SEQ ID NO: 94621 - DNA, 122 bp, Homo sapiens
cttaccctttcacagctggggagtggagtctgggcctgaggtctcccgtgcgcctctcggcgcctgcgcccgcgctgtgcaccgccccgcgcctgcgcccgcgctgtgcctttgcgagggcg

SEQ ID NO: 94622 - DNA, 122 bp, Homo sapiens
aacaccactccactccatctctgccagcggatcctggctccctacctgaagaaagcgcctcgccagcaaggtgcatgatcgtccaccagggcaccattctggataatgttaagaacctctta

SEQ ID NO: 94623 - DNA, 122 bp, Homo sapiens
gaccatccagctcccgaggcggggaggagggagaaaccacccaccggtcacggggaggggcgaactacctgaagagtcgagagtgggcggggaaaatctagccctctgtctagcaaatggga

SEQ ID NO: 94624 - DNA, 122 bp, Homo sapiens
ccgtagtgggcgtacaccagctctccctggggacacgaggacggtgaggcgcgctccccgcgtccctccttcgagacccaggaaagggctcgtgccgcgccccatcctaggagcgggcaggg

SEQ ID NO: 94625 - DNA, 122 bp, Homo sapiens
aaatttaggccgaattctccccacttcctgtgactggcttctgcttcttccattccaatgcgcatgaaagaagctgtggtctcctctccttggaatgggttcatccatccctttctggaatg

SEQ ID NO: 94626 - DNA, 122 bp, Homo sapiens
ccatctccagcctccttcaagcttgaggctgaagctgacaatcttaagagaccttagagccgccaagctcaggttagtccgttaagcgccgcccagccagtcctccccgtcacagggggcgc

SEQ ID NO: 94627 - DNA, 122 bp, Homo sapiens
tgctctctctgtccctcgatccctttggcccacacattcacaggacggtttggggtaagacgcctgcatcctggaggagcgcattttccacggggtggaggagggcaggcaagaacatcggg

SEQ ID NO: 94628 - DNA, 122 bp, Homo sapiens
gaatgatcgggtggcactttgtaatttcacttcaatttcagagtaaccactgagtctccccgctttgccttgcctttcagtgggaagttggtgtctccaaagtggaagaatttcaagggcct

SEQ ID NO: 94629 - DNA, 122 bp, Homo sapiens
gaggccgcattgtgaaggtcccaggggccgcctgcggagtgtggggcgggtacgctgaggcgcgggtggctgtttacgcgtggcgttgccgggagggagtgtgagtgtgtcacggtgaatgg

SEQ ID NO: 94630 - DNA, 122 bp, Homo sapiens
cacgtgggccgcgcgaccaatggtggaggctgcagcctgcgaactagtcggtggctcgggcgccggcggggagctgctcggcggcggacagtgtaatgttgggtgggagtgcgggacgcctc

SEQ ID NO: 94631 - DNA, 122 bp, Homo sapiens
gaagacaaagtaaaaggcttgtgaccagctactggataggtatgattttaaaaagcaaatcgaatagaaaagcaaaggaatttagttcagctatacaggatagtttggactttgacttacat

SEQ ID NO: 94632 - DNA, 122 bp, Homo sapiens
cgggcagatgggtccgccttgttccggctgcagctttcgccgccggggcttgctggctgtcgggaactagtcaactggagtttttgttgacttcccacggttcaaaagggccttccagaatg

SEQ ID NO: 94633 - DNA, 122 bp, Homo sapiens
tccctgtcctcgtcccaaggtgcgcgctgtgattggaagcacctacatgctgacccaggacgaagtcctgtgggagaaagagctgcctcccggggtggaggagctgctgaacaaggggcagg

SEQ ID NO: 94634 - DNA, 122 bp, Homo sapiens
ggtagactgagtcccagggagctgcgccgctaacagcccacctcctagccccgggctacgcgccgccagcccagtaaccccacttttgtgtgtcctcccaggccccgatcgaaaagcctggg

SEQ ID NO: 94635 - DNA, 122 bp, Homo sapiens
gagacctctccatacagagctccacctcccatccccaccccgtgggcagccagaatcctgcggtctaaacaagcagatgtcagatggcctgagcagcagtatctccagtgtttgtttttgtt

SEQ ID NO: 94636 - DNA, 122 bp, Homo sapiens
tctctctgcagatttgggggagtctctcccgcgggatgagggggggctctccgccgcacccgcctatgatggcccagaggacccgagctcgggtcactcccgtcgccctcggggctcggcga

SEQ ID NO: 94637 - DNA, 122 bp, Homo sapiens
atcgcgcccctccagtcccctctgcgggcagaggaagtgggactcgaggaccagagctctcgggcctcctgatccagggacctgccatttcctggcccaggaccccgggaatgcccgagcat

SEQ ID NO: 94638 - DNA, 122 bp, Homo sapiens
attcattcattcatccactcactcattcagtcaatcattatttattgagcgtcaaccgtgcgccagcaggcactgtgctagtacatggagagcagaaaggcacgggagcttctggcttagag

SEQ ID NO: 94639 - DNA, 122 bp, Homo sapiens
gggaactgcacaagccaaaaccagccggtcgcagagtccaggagcgcctgcgcaagaggacgcctgcgcaagaggacgccgtcagcttggcgtcagcgcgccgggctctggcccgccccctg

SEQ ID NO: 94640 - DNA, 122 bp, Homo sapiens
accaaatatgtgtgtgtataaacacacacacacacacacacacacacacgcacacacacacgcacacagaaagcagggaagagaaggggagaagagagaggaacacaactttacctggaaac

SEQ ID NO: 94641 - DNA, 122 bp, Homo sapiens
cttttgtccaataagtcagcaagacggtccccagggggaaggtttactcaaccataggcccgtgcctagtttttattggctagtgtatccgagtggcggtgcagcaggccagtcgcgtgcgg

SEQ ID NO: 94642 - DNA, 122 bp, Homo sapiens
aaatggtgtaaaacatgacatggtaaggtaaagacacagcagtaaaccatttgacatgttcgtacttaatatagttgacccacatgcagtgggtgaacccttttattagacagtaccttaaa

SEQ ID NO: 94643 - DNA, 122 bp, Homo sapiens
cggacggaccgttggccgggctccgccccggcgcttctgattggacaaggtacaaggccccgccccctcagaactgagtgacggcagaagccctgggtaacgagccctgcaaagccggactg

SEQ ID NO: 94644 - DNA, 122 bp, Homo sapiens
cccgctccgccgcagcgccgcacaggccgacagagcacgcgcgcgccgccgccgaacccgcgcccgtgtgcgcgcgcgccagcctctcaggcctgcatcccagcagcccccgccccgccctg

SEQ ID NO: 94645 - DNA, 122 bp, Homo sapiens
ggtacagcagcaccttctggtacagggccggcttggagcggatgtagcacctcagcgcctcgtctgtgtccgccgcctgcacggctgcctgcgaggcactgacctccccctcgccctcctct

SEQ ID NO: 94646 - DNA, 122 bp, Homo sapiens
cattattaagctgatccaggcagatattttgaaaaacaagctctccaagcagatggtggacgttaaggaaaattaccagagcaccctgcccaaagctgaggctccccgagagccggagcggg

SEQ ID NO: 94647 - DNA, 122 bp, Homo sapiens
gcgacagagcgagactctgtctaaaaacaaacaaaaaagctttattgctaaaaatgctaacggttatctgggctttcagtgggtcataatctttttgctggtggagggtgttttcccagtgt

SEQ ID NO: 94648 - DNA, 122 bp, Homo sapiens
gtgtgtcagaacccttccccccggctcggatgaggcgcagtcctgagagtctcagccactcggagttatctgggataaacgcatcctgggtgggaagttcctggtccatcccgtcacgtggt

SEQ ID NO: 94649 - DNA, 122 bp, Homo sapiens
ggtacaggaaaaagaaggaaaggggaaatggacggaagggtaaacaagactccgaagacccgggtgagcaagggttcccaggcagcactgttccccggcaccagctgagtccacctctctcc

SEQ ID NO: 94650 - DNA, 122 bp, Homo sapiens
attgactactgggagcggctgctgtttgagacgccccattacgtggtgaacgtagctgagcgagccgaggacctgcgcattctgcgtgaaaatctgctactcgttgctagagactacaatag

SEQ ID NO: 94651 - DNA, 122 bp, Homo sapiens
cctgcgagcggatgcgctgggcggcagcggggagttggaccgcggcggcaactcccgtaccggatccacagccacctgggcgaagagactccaagactgagaggagcgtccgccggtgcagg

SEQ ID NO: 94652 - DNA, 122 bp, Homo sapiens
agttcccgcggttacagataagaccttggggacaggtagtcctcagtccccaaatgcttacgcagcgtgtaccgtagctgttaggggagatgtctaggtgggaagatgtctaggcgggggtc

SEQ ID NO: 94653 - DNA, 122 bp, Homo sapiens
aaagtgtttaccatgtacataaattatgctttttaagttcacatgtcttatatacttttacgttactttttaaaattaaaagacagttaacttttaagaataaatcaggcgcagtggctcat

SEQ ID NO: 94654 - DNA, 122 bp, Homo sapiens
taaaatgtccgtttacctgaaataattgccacttttgggtagccagatggtgagcgcacccgtgttcaaagtagggtaccttaatttagatccagatggttgaattgaaagggaaatatagc

SEQ ID NO: 94655 - DNA, 122 bp, Homo sapiens
aaataccttgtgaacatcccttcacacaggggatgtgtggatgcatacagccagacccaccggcaaacagcctcaagcctggagcacagaaatgcccaggtctgggactcatggctccaccc

SEQ ID NO: 94656 - DNA, 122 bp, Homo sapiens
acaacccttggttttgtggctgcaacctcatgtggctgcgggactgggtgaaggcacgggcggccgtggtcaacgtgcggggcctcatgtgccagggccctgagaaggtccggggcatggcc

SEQ ID NO: 94657 - DNA, 122 bp, Homo sapiens
caggaagctgtcccggggtgcggggagctgtcccggggtacggagagctgtcccgggctgcggggagctgtcccggggtggggagagctgtcccggggtggggagagctgtcccagggtgcg

SEQ ID NO: 94658 - DNA, 122 bp, Homo sapiens
acgtccctgctgcagctgctgctgtcccaggtgcggctcaataactgcctggagatgtaccgcctggcgcaggtgtacgggctgcccgacctgcaggaggcctgcctgcgcttcatggtcgt

SEQ ID NO: 94659 - DNA, 122 bp, Homo sapiens
tctcaataaacaaattccctctaactgtataatcctatttctttctgctgtaggcctgagcgtttgtctggtttgttattcaaatgaagcatgactcatttaggatttaccagcttgctccg

SEQ ID NO: 94660 - DNA, 122 bp, Homo sapiens
actgtgaagggttaaagatagtaggaggtaagggggtagggaagactacaaaaggtaacacgagagatctattgtcatgatgaaacagttcttaatcttgattgcagtggttatacgaatca

SEQ ID NO: 94661 - DNA, 122 bp, Homo sapiens
tcagtgcggcccatgcagcttcccagcggggtccatcaccacctgcgcagtaattcagtgcggcccatgcagcttcccagcggggtccatcaccacatgggcagtaattcagtgcaggccat

SEQ ID NO: 94662 - DNA, 122 bp, Homo sapiens
gtgctgcgaccgcgaagccggcactagagggcctcggatggagaaagccccgcaccgagacgaggaaactgtgcacagcacgactagcagttgacacaaacagaaaagtgtctcgtctgctc

SEQ ID NO: 94663 - DNA, 122 bp, Homo sapiens
ggaacaggtcgtgtgcagctgggccagacacaacaaaaaattcacagatgaaaaggtattcgcggcaggaattgtctaggagggcgtagtgctggctgcggaagagggcctcaaatggatac

SEQ ID NO: 94664 - DNA, 122 bp, Homo sapiens
tgaaaccttaaaggggtgggggaggagtagtgctggtatattttactggtagtctttaagcggagctttgctcagctcttgccaaattgcttgtttctgttctctgcagttaattagcctag

SEQ ID NO: 94665 - DNA, 122 bp, Homo sapiens
taggcatgaatagctgggccttagggtgtgaactgtttgtgaaaccgcagaacggttttccgcagcggcggttcgatttcaccaccagcaatacagaagggtgctcgttccccgacatcctt

SEQ ID NO: 94666 - DNA, 122 bp, Homo sapiens
atggagttaattaaaaaggaggctttgagcggcaggttcattggccggaaacgcagctggcgggggccagggcgagcctggggtgcccggcccccctgctctaggtggacttggggagctga

SEQ ID NO: 94667 - DNA, 122 bp, Homo sapiens
ccgggccaaggactacataacttcccccaagtcatccccaaaactgtgtgggagcactgccgcctgtgtgggagcaccacccccagtgtgggagcactgccgcctgtgtgagagcactgccc

SEQ ID NO: 94668 - DNA, 122 bp, Homo sapiens
tctccacatgtaagccccactcagaatcccggggcggcaagggcaggttaggacttaccacggtgttccaagctccatggccgtaggtgggttgctcttagtcactgggggacagaagcatg

SEQ ID NO: 94669 - DNA, 122 bp, Homo sapiens
tcaggccctagaccttctacctgctgttatctggaagtttccctatgctgttgtggcaggcggaattctaaagctgttctttaagattccatctactggttcttcagtcagacactggtcta

SEQ ID NO: 94670 - DNA, 122 bp, Homo sapiens
tcttacactgaggatcgaatggctgggaatatccgtctccccacgcgggctgtgggcctccgagggcacagacgctgccgtattttccctgctagcgtctagacaaagcctggcataggagg

SEQ ID NO: 94671 - DNA, 122 bp, Homo sapiens
ggacccagttccagctgacctaggggagagggcgggagaaagtatgtcactgtgcggtggcggacagggacggggccctactgccaagagactcactgagacagtgaacactcggtggagga

SEQ ID NO: 94672 - DNA, 122 bp, Homo sapiens
gaggtctcggctctccttgccaagggagtggcaaagggccccaggggcgactgggccagtcgcaggtctgccggggccgggggagtagccgcacctcccggcccacgtgggcgggggggggg

SEQ ID NO: 94673 - DNA, 122 bp, Homo sapiens
caggcggtggccagggggtgacgaacggggcggggcctggggcgggtggccggggggtgacgaacggagcagggcctggggcgggtggccggtgggggggtgatgaacggggcggggcctgg

SEQ ID NO: 94674 - DNA, 122 bp, Homo sapiens
cctcagcaaccaccgccctttcttcctgaccgccaagctgacaataaacagatgacccaacgttgcctaagttagaacatgcaccgctgctgcccaggctccaataagggcagggttggcgc

SEQ ID NO: 94675 - DNA, 122 bp, Homo sapiens
gggggccggcgggttccacgtgggtggaccccgagctgagggcagggtagggtcgcggatcgctgacctatgagctcccctactcccgcacaaggacacctgcacatggacccgggcttcca

SEQ ID NO: 94676 - DNA, 122 bp, Homo sapiens
cgtgttacatgcgtggtgtggacgtttcccatgtcataatttcagatgcataaaccccagcgaagggtgagcgcacggcatggcacctgcagcatggggttcacgttctggaaggttctggc

SEQ ID NO: 94677 - DNA, 122 bp, Homo sapiens
cactgaggggggtttatgcttcttccgaagggacgtgcattcgagagtcgttagggaaaccgtcccagagccctggtgaggagagagcctggcgcgaccaacgccaggacgggcacagtccc

SEQ ID NO: 94678 - DNA, 122 bp, Homo sapiens
tggcctctgtgaggagccacggggacagcatcctgcagatggtcctggcccttgtcccaccgacctgtctacaaggactgtcctcgtggaccctcccctctgcacaggagctggaccctgaa

SEQ ID NO: 94679 - DNA, 122 bp, Homo sapiens
caaacatccaaaccatagctgagatagaaggcagcatatagattactaaagaaatcacagcgaactgcaagcaatttccactttaaacatgtcagacaactttagaatggtctgtaaataat

SEQ ID NO: 94680 - DNA, 122 bp, Homo sapiens
aggaaaggtggggagccgatggggatgctccgggctcgggagaccgagggggcggacgggcgggaccccgcagccccgggggcctctgggaacccgtcccccctcggccccgccccctcccc

SEQ ID NO: 94681 - DNA, 122 bp, Homo sapiens
gagaagagagagaaggcttaagggagactgaagggtcagcctatgaaaaacagtggaagacgtattctgagaaacttcaaggagtaagagtaggacaaaagagggtaatctatgggaggacc

SEQ ID NO: 94682 - DNA, 122 bp, Homo sapiens
cccgcctttgtctccagcggactggaaagaacccaccattgtgaagcacagaaaattgcccgcactcttattggctaggttccccgacttccgctctcggttggtggttggctttgcctgtt

SEQ ID NO: 94683 - DNA, 122 bp, Homo sapiens
tgagggcccgcctgggcctccccactccccggcctgtgagacccacttggccggacccagcgccgtgtttgtactttgctcttctcggtatgttttccgtcatgaccgccgtgtggagcttc

SEQ ID NO: 94684 - DNA, 122 bp, Homo sapiens
gtgtggccctgctccttgaggtgtgaaaggccagggaacagggtgcttgctggggacctgcgggaggactacaaggctttctggtggccattcctgtgtatacagagggcggggctcaccag

SEQ ID NO: 94685 - DNA, 122 bp, Homo sapiens
tcgacttcaggagtaagcaaggccaaccgtttggtttgagcctgttgcttctaagaaaagcgaggaaaaatcctgagacctcctcccctcgcccttcatccacttcaggggaccgagtgtct

SEQ ID NO: 94686 - DNA, 122 bp, Homo sapiens
agtggattcatctctgcaagaggctaagtactgttacaagaaattgatggaagaccccaacgtcttatcagttttccacatccaatgggctctgtctactctaccttgtccctttttattac

SEQ ID NO: 94687 - DNA, 122 bp, Homo sapiens
tcagacgaggacagtgaggagtacaggatccaattgggattccagtcccctccccacacccgtcagaaggcttggttgggaaagaagtgagccccaagctatccgccccacccccagccctg

SEQ ID NO: 94688 - DNA, 122 bp, Homo sapiens
gcctttgcaatgtccagaggtgacgtttccaagccagccaatcagcatctgtgagctctccgcagcatccctggacaaaccacagaggcatgggtaccccctccaccatgtgacataatcct

SEQ ID NO: 94689 - DNA, 122 bp, Homo sapiens
gcaatggcttttctggctaataaaacacctcatgggtaaactgaggcaagagagtagggacgaggggcattgcccagggttccaggataggaattgctgttcagaacatttacattcccatc

SEQ ID NO: 94690 - DNA, 122 bp, Homo sapiens
gcgcacaccgccgcgcctcccagcagccccccgccgacctccgcttcgggtcccggcggccggcagtcacgactcctcctcagcagcaccggaggaaattattgaaaaatggcgggagattc

SEQ ID NO: 94691 - DNA, 122 bp, Homo sapiens
gcactccagcctgggcaccattgaacactgagtgagtgaacgcgactccgtctgccatcccggcacctcgggaggccgaggctggcggatcactcgcggttaggagctggagaccagcctgg

SEQ ID NO: 94692 - DNA, 122 bp, Homo sapiens
agccctcagagcccgtgacgatgctggcctcgtctgcctgaggacccagggcgagcatggcgccggggaacgtctggggtgataagaggatgttctccccaccgctaatgaaactgaaggag

SEQ ID NO: 94693 - DNA, 122 bp, Homo sapiens
agtgactccggttggggggtgggggcgtgtgggaggccgagcctgtcctcggatcagttgcgtactctgcccgccccctctgactcatgctgacaatcttcttccttcccctggccacctct

SEQ ID NO: 94694 - DNA, 122 bp, Homo sapiens
ggctgggaggcggattgcttggacgtcccccgcccgcccccgcaactctgcgtgcggcgacgttgggaggtcccattagaagctccttgggcgggatctgtccaccatgccgcggcgcggag

SEQ ID NO: 94695 - DNA, 122 bp, Homo sapiens
cacagggttacagaccctgtatagacacagggttataaccatgaaacagactatacaacccggtacagacacagggttataaccatgaaacagattgaggatccaggtgcctttgaatccca

SEQ ID NO: 94696 - DNA, 122 bp, Homo sapiens
agaaagtagagtaaatgaagaacattttagaacattccatcccaaatgggggccagactccgagtcggggtgcccaacagatctgcgggggaaaggtgctgtgacaccgcggtctggggggt

SEQ ID NO: 94697 - DNA, 122 bp, Homo sapiens
cagaagtgggcggtgctgtccgggcatagcacagaggcgtgtggtgccatcagggcgcagcgcagaggcgtccggtgcggtccgggcgtagcgcagaggcgtgcggtgcagtccgggtatag

SEQ ID NO: 94698 - DNA, 122 bp, Homo sapiens
cctgcatgaagtccaggtccttgtaggtggggaagctcttctccttctccttcttgctggcgcgccgcttgtaggtggagcccttgaggtcgaacttgaggtgcatcttgaccacgcggggc

SEQ ID NO: 94699 - DNA, 122 bp, Homo sapiens
ttcaggcgtcagacgcgctgctccctgcggggccgtagagaccgaaggcttcgggaaatccgctcctccacaaagcaggtttggagacggcaagttagtgacagagccgtaggtttgaagcc

SEQ ID NO: 94700 - DNA, 122 bp, Homo sapiens
ggcagagctgggaagggagcctgggagtctgacctgcagcccttgttcctgcaccagagccgagccccggagctgcagggaaagagcctgaccgtcctgaaccacgactctgctcccctccc

SEQ ID NO: 94701 - DNA, 122 bp, Homo sapiens
ctatgtggatgtctgcggcctcttcctgctgcagatggcaaccatcttgggcatggtgcccgcttggcatagcgcccggctccggatcttcctgtgcctggggcctcgggaggcgcctgggg

SEQ ID NO: 94702 - DNA, 122 bp, Homo sapiens
ccgcaggttgcgggaaacggaacggcgggctcggagcacaccgggtggacccaggcttggcggccatgaaagttctttttttctttttttctttctttctttctttctttctttctttcttt

SEQ ID NO: 94703 - DNA, 122 bp, Homo sapiens
atttcagattttcagactacagatgctaaccagtaaaaataatgcaaggaatccaaaatccgaaaaaaatcaaaatctgaaacatttctgatcccgagcatctttagcagcatccttggtct

SEQ ID NO: 94704 - DNA, 122 bp, Homo sapiens
agccctgccccttcacagccggaagtagggtggccaggaacactgagcagaaagagaaagcgcgtggccctgatgccatgaggcgctgcagctgctgcaccagcctctcacaggcttcttgc

SEQ ID NO: 94705 - DNA, 122 bp, Homo sapiens
gcatcattctcgtcagacacaaaagtgatggctaggcctttggtgccaaagcgacccgcccgggccacctgcaggcagacaggatcagggtcaggccacagatactacctcaggacttgagg

SEQ ID NO: 94706 - DNA, 122 bp, Homo sapiens
ctcgagaaaacagatataaacacatatttacccacaaaacagagataaagcacaagcctgcgggataactggaggagttatcttacagttgagactttctgcaacctgcagattttgccgtg

SEQ ID NO: 94707 - DNA, 122 bp, Homo sapiens
ggaggagtgtggtccagagcgggacttgggcgctaatgcggcccagcagtggcaggagggcggggagcctgatggtttgggacttctaggtgtccaagtctctgtctctcttcatctctcca

SEQ ID NO: 94708 - DNA, 122 bp, Homo sapiens
tttcatgtgccatgcccaaatggcagcttatttaaaaaaacagaaaattcttggaattaacggtcaaggatacgtgagagattagaaatcaacatttcacattaattcctgtgtaagaaaat

SEQ ID NO: 94709 - DNA, 122 bp, Homo sapiens
gccgcttctcatctgaggtgctctgggcgccctgcgcctgccgctcgcgctcgtgctggtcgatgttgtgcacgcccagcagcaggctgtagtccatgatcttgaaactttccaggacctgg

SEQ ID NO: 94710 - DNA, 122 bp, Homo sapiens
tccctctaagaatttcagacagggaaatgctgatcagtgcaatctgttccccttcttccacggagtttgcaggataagaggaaccctgaggtaaggttccagatactttggaaaatggacaa

SEQ ID NO: 94711 - DNA, 122 bp, Homo sapiens
tgaagccagggcctcggcagctcccactctcccagccagggaggaaggcttgacaggggccggctggagggccacacagaggtcctctgggctgtggcacatcctgtctgggcctgtcctcc

SEQ ID NO: 94712 - DNA, 122 bp, Homo sapiens
atggttttttttccctctagtgcttttgatctaagtgcatcaaaaaatctgggcattagacgttttttccagtcacatagaagcagcataaaatcatatttactagagttcctgggatgatt

SEQ ID NO: 94713 - DNA, 122 bp, Homo sapiens
ccgggcagaatgaactggccaaaggtgtagcagtacccgagtgctgtcgacatgatggcccgcatccgggtaggcacccattccacatctgtgggaggagtccaagcaccagattagtgttc

SEQ ID NO: 94714 - DNA, 122 bp, Homo sapiens
agcttcattctgcaatcagcattgtcctttatctttccagtaaagatagccttttggagtcgaagatgaggaaaagcctgtattttatagtcttggaagtgtcttcttttgccaggacagag

SEQ ID NO: 94715 - DNA, 122 bp, Homo sapiens
gacatggcccggttgggcccgtgcttcgctggctttgggcgctagcaagcgcgggccgggcggggccacagggcgggccccgacttcagcgcctcccccaggatccagactgggcggcggga

SEQ ID NO: 94716 - DNA, 122 bp, Homo sapiens
gcgagcggcgctcccgggagccaaccagcggccgcgggccgcccgggtgggagccggggtcgggggcgcatcctgcatcctgcaccccgcatcccgcacctgcatcggagccccgcgtcccg

SEQ ID NO: 94717 - DNA, 122 bp, Homo sapiens
ggaggaaaacaaggccgggttgctggacctgcctgacgcatctgtgaatggctggagctccgatgaggaaaaggcagggggcctggatgatgaagaggaggccgaggtgggtgcagtgcctt

SEQ ID NO: 94718 - DNA, 122 bp, Homo sapiens
aacgcctgaacccgtgcgtttatcaatttcatcatccccatacccctgccgggttcctggcgctgggtaaaccgacagcatcatgttgccatcgatgcgtcttacaagatggttttgggcaa

SEQ ID NO: 94719 - DNA, 122 bp, Homo sapiens
gaaggcccaggcagccggtcagcacaggctgggagagaatgcagcgaacatggggcctgtcggaacttcccagacgtggtgggaaccacaccagcacagagtcaacagcaggcaggggaagg

SEQ ID NO: 94720 - DNA, 122 bp, Homo sapiens
gttactcctgacctcacacatcactgggtataattgccgggggctcgttattgtcattaacgtctcctgcatgcacacgggagtgcctttcaccccaactcacgcatcacaatgaaggctgc

SEQ ID NO: 94721 - DNA, 122 bp, Homo sapiens
tggacacacgtaaagattctggcgtagatttctaacaaccagtctgaatcgggcgctgcacggcagggcagtcagggaggcggtggcgttgggggcggcataggggaaggcaacggagtcgg

SEQ ID NO: 94722 - DNA, 122 bp, Homo sapiens
tggtccacatttgggatttataattcctcctttcttcagctaggctcaactcttacagaccgtgcaaaacttgttccagcgacaagcagtcgtatcccacagaggacagagcaatagctttc

SEQ ID NO: 94723 - DNA, 122 bp, Homo sapiens
aagaaagataattcagcagtcccctataatcttattccacccaagaaatttgggagaatgcgaaaaagcagcagcccagcattcccggatgggcgtggcttttctccaggggctgtccaatt

SEQ ID NO: 94724 - DNA, 122 bp, Homo sapiens
cgccgccgccctcaggagcaggatccgcctctgccgctcggcaaccaactgtcagtgagacgccatgttgggggcggggctcccggcatgcctcgcggagcggacaatacaggccccgcccg

SEQ ID NO: 94725 - DNA, 122 bp, Homo sapiens
ccgcgagggccgggccggcgtgacaccacctggcggagtctcggggaagagtcttaaaggcgcgcgctcctccgtgccccgcgcactcgaacgggagccgcggagagctcgcctcccgctgc

SEQ ID NO: 94726 - DNA, 122 bp, Homo sapiens
ctgggataaccggatgcatttgatttcccacgccactgagtgcacctctgcagaaatgggcgttctggccctcgcgaggcagtgcgacctgtcaccgcccttcagccttcccgccctccacc

SEQ ID NO: 94727 - DNA, 122 bp, Homo sapiens
gccagaccaggcatcagagtcaacatggtgggcaaggaagagctgccattgtgtgtctcccggatatgggctctgatctccaggtcagagaaaactgcaggctggcctcagtagatcccaga

SEQ ID NO: 94728 - DNA, 122 bp, Homo sapiens
caggggtcccccatccgtgtccccgcaagctggcaatttacctgaagccgcagccccagccgcgcccgcacccgagcccgccccctcgaagtccggggactgattatcaaggccttcgccct

SEQ ID NO: 94729 - DNA, 122 bp, Homo sapiens
tgacatttagtgtgggctgctgtgggaagaaggcataagtgggcaccactctggggatgacgttacaatgttctttggacaaaaggacaaggaaggacaactttgaatgaatgcaggtgttt

SEQ ID NO: 94730 - DNA, 122 bp, Homo sapiens
tccctcttcaggaaggatcctccccttgcagccgtgaccactgctgtccaggaactgctgcgtctggctcaggcccacccagccggacctcccaccctcgaccctgtcaatgacctgcagct

SEQ ID NO: 94731 - DNA, 122 bp, Homo sapiens
gcttcctccttgaggccttctctgacctcccctgaccctcagtggtgtctgcctcccctacgagactggcagctccccgaggagctggtctgactccactctgggtctccagtactgcaggg

SEQ ID NO: 94732 - DNA, 122 bp, Homo sapiens
ataaggacaggtggattgcagatctctctgggccccaggcactcttacttgtggagaccacgccccaccatagaataggcattaaattgcatgcctgtcccacatcaagcatagttattctg

SEQ ID NO: 94733 - DNA, 122 bp, Homo sapiens
tgttaccttcttacagttttaccgcaccaaggtgtcaggttggggagcaaggagtagcatcgtcccgcctccctccagtcgcaccctagggaccgccatgtgagcttccctcccagactgac

SEQ ID NO: 94734 - DNA, 122 bp, Homo sapiens
cggtgagtcagatggggacatggtgagttggatggggacacagtgagttggatgggaacacggtgagtcgaacggggacatggcggtccccgagactgttatcttcccattttagtctccag

SEQ ID NO: 94735 - DNA, 122 bp, Homo sapiens
ccctgggtaagaacttactgagatttattttcacaaagtcatagcatttagccggtaattcgttctagctttttgagcatctgctaatatgtggtgggagatcttaaattcaacagactcat

SEQ ID NO: 94736 - DNA, 122 bp, Homo sapiens
taaaaaacacacacacaatcaggccttttggaggctctgggtcagggcagccagggctgtcggcagtcctgcctttccatactcaccgcgccggcaggaaatgtgtggcggatgcaactgtg

SEQ ID NO: 94737 - DNA, 122 bp, Homo sapiens
gttccagtgtccacagcatcctttctagggtctgtctgtgttgtggggacagcaggtgtgcgtgtgtgcctgtgtttgtgggtgcgtgctcagacgtgggtcctcaaggggtcccgggcctg

SEQ ID NO: 94738 - DNA, 122 bp, Homo sapiens
ccagtcagccccatgctcagcagagcatgtcccagtttctgcatcactttggggagaccccgttcagggtagagcctcccaggccacctccactgatggctgaggggccagttccactctgc

SEQ ID NO: 94739 - DNA, 122 bp, Homo sapiens
ccgccacccaccactccagggccggccggttgtggtacacgtaggggctattgatgaacacgaagatgaggcaggccacgaaggtctccagcaccttcagcagccccagctcggaggccatg

SEQ ID NO: 94740 - DNA, 122 bp, Homo sapiens
ccaaggggcgcgtggccttgaggatccgtggcgtcagagtctctgacgacggggagtacacgtgctttttcagggaggatggaagctacgaagaagccctggtgcatctgaaggtggctggt

SEQ ID NO: 94741 - DNA, 122 bp, Homo sapiens
gggccacttcctgggtcattcctggaccgggagccgggctggggctcacacgggggctcccgcgtggccgtctcggcgcctgcgtgacctccccgccggcgggatgtggcgactacgtcggg

SEQ ID NO: 94742 - DNA, 122 bp, Homo sapiens
gaagcccgtccaggggtcagcctcctcctcagccggtcctgggctgagacaggggtgtcccgctgagggcagtgtagggtgcggtgcccccaccccacttcgggcctggaccgagaccgcga

SEQ ID NO: 94743 - DNA, 122 bp, Homo sapiens
aatgatcacccactgtagtagaacatgaaatatctttgatttttttcctggctcctgtcacggaactcctaaaacccttggattatcctgaaggatcagagagtgccttttgttattcataa

SEQ ID NO: 94744 - DNA, 122 bp, Homo sapiens
gcccacctcggcctcccaaagtgctgggattacaggcgtgagccaccacacccagccacacgaccctttctaaggaagtgaagatggcacatggagaccaagtacagaaaggactactgggg

SEQ ID NO: 94745 - DNA, 122 bp, Homo sapiens
ttcatggtgtccggtgcactccactcacccccgaagctgttcgtgtagttgttcacatagcgatggtcaccacctaggaagcagagggtcgggtcagcagaggagccaggtgggaaggagga

SEQ ID NO: 94746 - DNA, 122 bp, Homo sapiens
cacccttctctctccctgcttggtgtgacttggccaaataacatgaccccactgtcactacggccaccttcttcatactccaccctaaaatccagcctcagagatgctgctgtcagttgcgc

SEQ ID NO: 94747 - DNA, 122 bp, Homo sapiens
cctgcccggttcacctggggaagcgcagggctgcgggcacaggattctcccatcagacaccgggagagcatctccgcggcagcttgcagggcccgctgtctccactagggggcggcgtacgc

SEQ ID NO: 94748 - DNA, 122 bp, Homo sapiens
ggtggaactacctttctctagaagagacacgtacatgcacacccccaccgtgtagcttgccgggaaactgagtcttcctgatttcgtgtggctgtctccaaggaggaaacgaactacgcatc

SEQ ID NO: 94749 - DNA, 122 bp, Homo sapiens
ccaaccagcaacaaccccaggggagctttgacaaccacagaatttgagatggctggtaatcgttctcagaacataaaacacaaagtaagtcggcacattgatagaacctcctctataaattt

SEQ ID NO: 94750 - DNA, 122 bp, Homo sapiens
ggggcgacaggcctgggctggggggcagtggcgctcaccatcctggagccgctgctgctgcggctgctgcggccgccgcgggcgggagcgggactgggcagtgggggtggccggacaagggg

SEQ ID NO: 94751 - DNA, 122 bp, Homo sapiens
gggagaagagtttagccatagccttccttctgcatttcacacacatttagctatctctgtcgctctgtcacacacacacacacgcacatacacaccatacacacacacacgcacacccgtcc

SEQ ID NO: 94752 - DNA, 122 bp, Homo sapiens
tgatactgatgctgctggtgcaggagccacactttgagaaccattggtattgttaaatgtcgcaggttcttgaatgagattttctcatttcaatggctggccccatcactcataaaccaggg

SEQ ID NO: 94753 - DNA, 122 bp, Homo sapiens
gctgttatcatactctccgagcttcatccaaatgctcacacacccaacctagtgcttcctcgcgataacaccagtagcaggagcagcccagtgtcatcctgcacaaacaggtggtgtttacg

SEQ ID NO: 94754 - DNA, 122 bp, Homo sapiens
caaagccgcctttgatgctctggctaccagggctattttggggacgagatgggggaaagccgccaacccacactccttggagggagtcactttctgcaaagtgcgttggagaggactgggcc

SEQ ID NO: 94755 - DNA, 122 bp, Homo sapiens
gcggccgggctgagagtgggggcggggcggaaggaggcgagagggaaaaggccatccgcgcgactgcccgattaaaaacagtcctgatcgtcttccctgcggcatgccgatgccctcagctt

SEQ ID NO: 94756 - DNA, 122 bp, Homo sapiens
gagggaagatgcggtcatggggcaatcccatgctgtcccgggctgggctccacccacagacgtgcagctagagtgtccccgaggagctgagtctgcccaggagcactctgccgcgggggtgc

SEQ ID NO: 94757 - DNA, 122 bp, Homo sapiens
gctgacacttggttttcttctttggcttttccatcactgctggctacaagtgtttgcaaccgcctcttgctccgtgtgagttctttcctctttgttcaccccgaccatcttgccagattcct

SEQ ID NO: 94758 - DNA, 122 bp, Homo sapiens
tccttaaagtattcaactatatacataaatatgtctaacatgccaaaatgtttagtgttacgttcattgtgtgtcacatgaagtgctatcatcttgatcacttattcaacaagtttttatgg

SEQ ID NO: 94759 - DNA, 122 bp, Homo sapiens
tgggggcgggtttctgggcagatgcccacgttgaactcagtgtggacttgtggcatcttgcgggcctgtagattaatatgacagccgtgattccaccctgcttcaccaacgcacatgcgttt

SEQ ID NO: 94760 - DNA, 122 bp, Homo sapiens
ctctatttctcagttcggtttctcacaaggggtttttattgtctcagtccggattatgaacggatttatagctgcatcaagctcttcacccccagccaataggagggacaaagtggcaccta

SEQ ID NO: 94761 - DNA, 122 bp, Homo sapiens
cggtgcaggcaggggcggtgcaggcaggggcggtgcaggcaggggcggtgcaggcaggggcggccactgctgggaactgcctgacctagaaggccccttcagattttggaggcagatgctgt

SEQ ID NO: 94762 - DNA, 122 bp, Homo sapiens
gaccgagctcctatcttgccacccacgggctgcgccaagaacgaccacctctcttagcctcggttttcgcttctgtgaaatgggaacagtaacctttgctggattagggaacacgtggaaag

SEQ ID NO: 94763 - DNA, 122 bp, Homo sapiens
gcaccgggcactgcacattaggcctcagggatggtcctggcgatgtctggtatcgtaccacggtttggctaaagattaagggactaaaacctgatcctgaccttagatagtggcctaggagc

SEQ ID NO: 94764 - DNA, 122 bp, Homo sapiens
gggctggtgcgtttgggcagggttcgcgccttgggtcccagtttcctcatctgcatggtgcgcgatgacggcctgcgcccacctgcctcaaggggacgctgtggcaaactcctctctggcca

SEQ ID NO: 94765 - DNA, 122 bp, Homo sapiens
agcagatcccagtggttacgttggtgagcgacgtccgccggcgctagcccagcctggtcccgcagctctcgggctgcccccagccccagcagtagctgggctacttccaccgctccttcccg

SEQ ID NO: 94766 - DNA, 122 bp, Homo sapiens
gctggccgctccgagtgaggggcctgccgaggccacgcccacccggaactcgtgctggcccgcaagcgccgcacgcagccccggttcccacccgcgcctctacctccacacatcccggcaag

SEQ ID NO: 94767 - DNA, 122 bp, Homo sapiens
cgacggggcccacgacgctccaaaaggaagccttctggacatatttcctgcctaagtgctcgctctggggtggcagaggggtccacccaaaatcagacagagctaggctaggctgagccctt

SEQ ID NO: 94768 - DNA, 122 bp, Homo sapiens
accggggtgccaggactgcttactcctcttccggacctggacggagtgtacgagctggagcgagtcgctggatttgtccgcgacctggggtgtgaacgagtgaggacagacttagggaaggg

SEQ ID NO: 94769 - DNA, 122 bp, Homo sapiens
cctctgcttttccttttaactgtggcaaaataccagacgggggacacttttgtcagtgcacgtggtgctgggaacagttggatggagggtaaactggggcaagtggttactcgaccagatgt

SEQ ID NO: 94770 - DNA, 122 bp, Homo sapiens
aaataaaaggcaatacagcgtagccaaacccgggttagctgcgggtggagttcaagagcgcgccgcggtcccgcccccgccagccccgccccggcgagaaaagcgtatgcaaattttcgagc

SEQ ID NO: 94771 - DNA, 122 bp, Homo sapiens
aaaaaataaataagtttaaatttgcaaaaccatcccgttttttcagacaaacttgagggtcgaggtcggagtcgaccatgtttcgaaggtgtgtggccacgcccagccaggtcagccccgcc

SEQ ID NO: 94772 - DNA, 122 bp, Homo sapiens
tgctctccgtctgaaaaccttggccgaaagggttgtagacatggcggccatcagggtaagcgaaaaccaacttgcttaatttctgtgggtgccgatagcatcccggtaactgtaaaagggat

SEQ ID NO: 94773 - DNA, 122 bp, Homo sapiens
gctgccgacccccagccaccttccgtgcggggtccccccaaaaccccgccttcccgtcctcgctggtccctgggtcccccaccacagcttacaggtcttgatctccccggttcggacacctc

SEQ ID NO: 94774 - DNA, 122 bp, Homo sapiens
ggcctgcagctgtgactaaactcgcgcctcctccgccggcttcgcggcccgcagtccacccgggctaatggtgtcaactttggattcctctcaatgccgggccctgtggcacccgggaaagt

SEQ ID NO: 94775 - DNA, 122 bp, Homo sapiens
gtattcaaggcttacgcaccctgactgatgactgatcccaggtggccctgagttgtaagacggtgactgtgagtggggattgagaggagggccagatcctccaggattcagagcagactcgg

SEQ ID NO: 94776 - DNA, 122 bp, Homo sapiens
acgaccaggtgaaaggggagcagcacagccaccaaggtctcaatcttcaggttgagagaacggaaagtttaaacagagggtacaggaaagtcagaacaaaaaaagtaaagggcatacctaat

SEQ ID NO: 94777 - DNA, 122 bp, Homo sapiens
agtccagagtgggtacaggagcaaggggcactgctggggcctgatggctgaaggagacgccggcatcctcgggggcctggggaagttgtgtgttgtgcagtcagtaaaatcctcccactgcc

SEQ ID NO: 94778 - DNA, 122 bp, Homo sapiens
gcagtgttttgacgactgcctcactaaaggaagctaaaagctgtgctgatgcctcccagacgagcctcgttggaagcacagaaccttcacggctcggagccgctgacaccgtgacaaaggga

SEQ ID NO: 94779 - DNA, 122 bp, Homo sapiens
agcaggaaagttacaactgcatttcactatattggggggaaaacaattgagacctatgctcgttgcatgttgtaatccaggaaaggaatgtggaagtgtttatatacttggccccatgaatt

SEQ ID NO: 94780 - DNA, 122 bp, Homo sapiens
cagtcccagctctgcctgttgctctagcccacaggctccctgcggagggtctgggcttggcggaggacccagaatggcactgaggccagcatggctgtgggagttgagcaaaccctgggtgc

SEQ ID NO: 94781 - DNA, 122 bp, Homo sapiens
tggtgcaggcttgctgggggatgtcggctgatgcgagctggagagcgcgtgtggcggccgcggcgccagtgtttgtgtgtatgtgagaaagcaaggggcgagcgcgagtgcgagtgaggcaa

SEQ ID NO: 94782 - DNA, 122 bp, Homo sapiens
ttttttgagcctacgcagatatgtaaggcatgtgtggtccagcatggatcctgagcttctcgctaaaaccctagcaaattgtgggtccctgggactgcagctcatgggcacacaaggaccag

SEQ ID NO: 94783 - DNA, 122 bp, Homo sapiens
gctccggagagatggctttgtttttgctttcgtgcggttctgcgaggcgctccacgatcccgccccctggcatggcagcacctaccggcggcgcgaactcggctgctgtgggctgctgcgcg

SEQ ID NO: 94784 - DNA, 122 bp, Homo sapiens
ctcccagtttatgctggaaccctggaatggtctggggaccaatgagatggcagcggttaacgcttggatcacggtgagggggcgatttccagggggagaggccaagaagcaaggaagggggt

SEQ ID NO: 94785 - DNA, 122 bp, Homo sapiens
gacagttctgagaaccaggctggagctggcaggctcagcaggtggctgggagacagcccccgcacaccgcttcctccatgtatgctgttctcttggagcgaatagcttggtgatatgactgc

SEQ ID NO: 94786 - DNA, 122 bp, Homo sapiens
gaaatccaaggtgataaaagcctttcttggccacttgttagccgggtcaggctgtaaaatcgtaacacaatgcaggcctcttccatggggcaccaaaaggcagcgatgaaaaacccccctca

SEQ ID NO: 94787 - DNA, 122 bp, Homo sapiens
ctgagatctggaaacaggtctgcaaatctggtcactggtctcattgccagtaacgctgtgcgcggttgagggagtgtgttgggagaatagccacgcgttgtctgtcctggaaggaacaagcc

SEQ ID NO: 94788 - DNA, 122 bp, Homo sapiens
ggacaggggccgggtcctcaagatgtggcatgaggaagggggtctcactgagcccccaagcggctcccgcactgcgcacccctggctgcgtccctctgccagcctcaactcagccctctcct

SEQ ID NO: 94789 - DNA, 122 bp, Homo sapiens
attagtacctttgaaaagtccctcaggggtttctaacatatagttaacaatgagaaccaccgtattacatgctaattgtcttgtataccaatctctctattttgatggagttgtgaagaaga

SEQ ID NO: 94790 - DNA, 122 bp, Homo sapiens
tataggggaaatgagttcagtaaaatagtaggccaagtttatcagattaaaataaaaattcggatttagttcaaggagttggtgtgatctgaatgcatcacataaaatgtgtagcgggtact

SEQ ID NO: 94791 - DNA, 122 bp, Homo sapiens
aaaagaggggacgccccggttagcccccatgtccctcacactttgaccccacaatctctgcgaggacctctgaccttggtgcactccgggtcccacgtttattctacctccattccccgcca

SEQ ID NO: 94792 - DNA, 122 bp, Homo sapiens
tctctgacccctgacatcttctcgcctcagttgccatctaccttgggatcaaacggaaaccgccccccggctgctccgattcccctggagtgtgaagctgaccagctcgcgccctcctgagg

SEQ ID NO: 94793 - DNA, 122 bp, Homo sapiens
gcctggactgcttcacctacaccgttgtggcagttgcgttaggggcttgggaagggcctacgtgaagccgtgttcgctgacttagagcggggcctctctgggctttctctgggaggagttcc

SEQ ID NO: 94794 - DNA, 122 bp, Homo sapiens
ccgcagcccggcgtctcccgagattgtgcggtgagaacgtgagggtcttaggggaaatcccgggtcggcgtgtgattcgtgtgtgggaagatactgtgccccgtggtgtcccagtctccttt

SEQ ID NO: 94795 - DNA, 122 bp, Homo sapiens
ttcaagatacggcaggaagtgcacctgtgcgccataggtcaacccattccaccatgtgggcgtgagtgtgagacacgtgggtgctgtgtgagggtgtgcctgtgtggatgtgagtgggcaca

SEQ ID NO: 94796 - DNA, 122 bp, Homo sapiens
tggatgccatggatgctggggcctagcgcaggggctgatgggaaggtaccttcatcggtgcgtatccaggccccgcttctcaaagctgcggatttttttctccgcccctggtgcctcacctt

SEQ ID NO: 94797 - DNA, 122 bp, Homo sapiens
gtgtaatttaaaaatgaaggttttggaacatttcgttttaattttgaatatagtaagtatcgatagatgtaacccacataagcagaaactctttggtgtcctcagtcatttttaagagtatt

SEQ ID NO: 94798 - DNA, 122 bp, Homo sapiens
gcaggcggacgggtcggggtccctgggtggtggctgcttgggggctcactggggcgatctcgcgcccgcggcccttccatttttccctcccttcttcctctcccgccaggggtcggcggggg

SEQ ID NO: 94799 - DNA, 122 bp, Homo sapiens
tgaatagcggccgtgctgactgctgcgcgccctgtagagtggaggccatattcaggcttccgggtgatgtttgtggccacccgggaacctgcatccccaatacgcagtacccaataccctgc

SEQ ID NO: 94800 - DNA, 122 bp, Homo sapiens
gcgtcaaggggttctgggttccaggcgggactggacaacttgggagctgggtagctgggacgcgctggtcccctctgtgaacgcgctccatccgcagatggaaatccccttcccccctcccc

SEQ ID NO: 94801 - DNA, 122 bp, Homo sapiens
ttgggcccgaccgagctggtcccgcagtgggcggtggtttgggcccgaccgagctggtctcgcagtgggcggtggtttgggcccgaccgagctggtctcgcagtggtttgggccctgcttgc

SEQ ID NO: 94802 - DNA, 122 bp, Homo sapiens
ccacgttttccagatttccctcggcctctagctcgcttgcgtcagaggggccccgaggggcggcccacccgctagccccgcccccaaccgctcaccgccccgcgagccccgccccctcggcc

SEQ ID NO: 94803 - DNA, 122 bp, Homo sapiens
tcacacctgggacacatggtcatggtaccacccatatgttctgcccaggcacagctcttgcgtctcctgcattatttccttagactccataacctgctcagacctcaagaaaagagaacctt

SEQ ID NO: 94804 - DNA, 122 bp, Homo sapiens
tatttagagataaagtcagagagctgacattagggcttcttattttcccatgtagctccacggaagatctgtggctaagtcagagtcagaacctagttgtttagtgttctgtctgccaagtc

SEQ ID NO: 94805 - DNA, 122 bp, Homo sapiens
tcaccttgatgagcggagagacctgcaccggtggcaccatcttgtccctgacctccgcaccggaagcacaacctgcagacggagcaggatgccgcacaagccagcaaagccttggaggcaaa

SEQ ID NO: 94806 - DNA, 122 bp, Homo sapiens
tttttagtagagacagggtttcaccatgtttgtcaggctggtctcaaactcctgacctcgcgatccacccgactcagcctcccactgtgatgggattacaggcatgagctaccacgtcgaga

SEQ ID NO: 94807 - DNA, 122 bp, Homo sapiens
aggccggggtaatcgcgtccacaatggagtgcgcaaagccgggtacaaagacgacagctgcgtggcagggcctgcgaggccgtagcagaggggcagccacccgcgccttgcagcctccttaa

SEQ ID NO: 94808 - DNA, 122 bp, Homo sapiens
gatgatcacctggggacttgggtctaatgtctacctggagccttgggtctaatgtccacccggagcctacgtatctacctaaggcatgatgtctacctgcggcctgatgtcctcatgagtct

SEQ ID NO: 94809 - DNA, 122 bp, Homo sapiens
gagctgccgcgggagccgggagcccgccatgtccgctacgcggcccgctagagcagggcccgccctccgcgtccgcccgcccgcggcagccccaggccccgcctcctcaccgccccgcccgc

SEQ ID NO: 94810 - DNA, 122 bp, Homo sapiens
cctgggggggccctcgtgggccagcgtcccagctctgtgcctagcccgtgggaggtgggtcgcgttcgctgctccgggccctgattccggaaaggggcctgtggggccccgtgtcctgggtg

SEQ ID NO: 94811 - DNA, 122 bp, Homo sapiens
tccgggggagcttgaaagctcagaccctgccagagacggtgtcctcaccaaagggcagcacggcccggggctgaacgtgtggctccccactcacccctgaggacccgatctgtgaaatggga

SEQ ID NO: 94812 - DNA, 122 bp, Homo sapiens
caggatcagtaatggtgtccttccctagcaatttctcatctgcacatgtgatgatgatgacgaccttgataacagctgatgttatgaaacacgtacaatgagcaactactgtgctcaattct

SEQ ID NO: 94813 - DNA, 122 bp, Homo sapiens
aaaagacataaaatcagtagaacattcacctaaaattcatcagagaaatgatccacagcacgtcaatgatagaacatttttcattgatgcctctaatcagagcttgactgccattcctttgg

SEQ ID NO: 94814 - DNA, 122 bp, Homo sapiens
cggacagtggaaaaactttcgactgccggacttcgtcaacccagtccactacgacctgcacgtgaagcccctgttggaggaggacacctacacgggcaccgtgagcatctccatcaacctga

SEQ ID NO: 94815 - DNA, 122 bp, Homo sapiens
ccaaaggagactccgggtccgccccgtcaagttcaggaaaggcggacccctttaaggaggcggaaaagttaaccgcgatgggcaggcgctctgtccaatcgctagtgactcctggagtctct

SEQ ID NO: 94816 - DNA, 122 bp, Homo sapiens
ggttctgatgtagaaattgcagatggagagctgggctctggggatggaaatggagagaagcgaaaaagagcctggagaaacggctgtcatatttgctcagaagaaccgccaaatcagagagc

SEQ ID NO: 94817 - DNA, 122 bp, Homo sapiens
cctcgtacagaacttgtaggagtctttagtgaatgagggagaatactgggaagagggtagcggaatggatcttcatgaagtccaggacaatcttagcttccagaacattttcttgccccgag

SEQ ID NO: 94818 - DNA, 122 bp, Homo sapiens
ctggtctgggggtcagtcccggcctctgtctcccaccgcgcccctcgctcccctggacaccgcctggtgtgtggggctcagacccccccagtccactgcccctgtgtggctcctcctctcag

SEQ ID NO: 94819 - DNA, 122 bp, Homo sapiens
ggatttaagaagagtgtgcctacaaggcggttgtcacggcaacgagagggcgggattgttcgagcgctgcggccccctcacgtgatcgattcggaggcggggcgtccgcccagtgggcgggg

SEQ ID NO: 94820 - DNA, 122 bp, Homo sapiens
gtataaaaagaaatctagccccttcttcggggccaagaattttgagctctagctgtctctcggtcgctggcaataaaaggactccagaattagtctcagagtgtggcatttctctataactc

SEQ ID NO: 94821 - DNA, 122 bp, Homo sapiens
ttaccagtgcgcttgcctcgcgacacggtacaaagtttgccatttgacacaggtttctcacgactagccgagggtgagcgtacatctttacttctgtgaaaaacagcaaaggcagaatctac

SEQ ID NO: 94822 - DNA, 122 bp, Homo sapiens
aaacgacaccaggtagcctgccgcggggcagagagtggacgcgggaaagccggtggctcccgccgtgggccctactgtgcgcgggcggcggccgagcccgggccgctccctcccagtcgcgc

SEQ ID NO: 94823 - DNA, 122 bp, Homo sapiens
tcggcgatctccttgaacttctcctcggcgccgggctccttgttcttgtctgggtggtagcgcagcgcctggcggcggtaggcccgcttgatctcctcgtctgacgcgccgcgggccaggcc

SEQ ID NO: 94824 - DNA, 122 bp, Homo sapiens
ggtcccggagttctgctcacttcagccgtgtgccgggcactgcaaatcaggaagtgttggcgccggctggcgacctcccgcctggggccaggggaggagggtggttggacgctgccaccgct

SEQ ID NO: 94825 - DNA, 122 bp, Homo sapiens
ctacgtaaggggcgttccagagtcagccactgggagtcgctggattcgggttttaaaaaacgccggccgtgaagtgggcggagcgagcgatttgaacgcgagcggcgcggacttctgccaag

SEQ ID NO: 94826 - DNA, 122 bp, Homo sapiens
aaaattctaactcatacttttaaaaagctacataaaagtccatataagggatatccataacgtgttcacatatttttctattgagggaatggctattttcagtgttaccatttcaaacaatg

SEQ ID NO: 94827 - DNA, 122 bp, Homo sapiens
accgcgctgtcctctttgagaaggagtcttactcaggactggggcctgtgcacacattgtcgcctcttttcagcacttagagattccttcctttgtctagtggctgaagccagggctgaagt

SEQ ID NO: 94828 - DNA, 122 bp, Homo sapiens
tgtgtcactgctgaagtttgggagtcaggctgggctccagcagcactcctcgacctctgacggtaggtcaagtcctttctcggggtcctgctatgaagggaaccctgggaagggctgacacg

SEQ ID NO: 94829 - DNA, 122 bp, Homo sapiens
gaccgaatagtatataatcccatttctataaaatgctccaaaaagactcatacagagagacgacaactaggtagtggttggcagggactgaggatggattagggattcactgtaaatgggca

SEQ ID NO: 94830 - DNA, 122 bp, Homo sapiens
cctgcccagggactacttggctacttactacagcttcgatggcagcccctcacccgaggccgagatgctgaagtttaacttggaatgtctccacaagaccttcggccctggtgagcagaggg

SEQ ID NO: 94831 - DNA, 122 bp, Homo sapiens
caagcactcaagtactcacagcgtccattattacactgttttaggggttccagcgaaatgcgaggatgacatggtccttagccttaggaagcctaatttgtttctcaggagctaaacatcca

SEQ ID NO: 94832 - DNA, 122 bp, Homo sapiens
cccttggaccttggactgctgggtcctttcaggagacaaaggataccagattggggagtacgggctactgttagacaatgtgaactaggaggtgaccaaagttgaccttagagtcaacttaa

SEQ ID NO: 94833 - DNA, 122 bp, Homo sapiens
cacgcgggggggggtgtggaataatcctccgtggcacgagggggtggtggaataatcctccgtggcacggggggtggaataatcctccgtggcatgagggggcggtggaataatcctccgtg

SEQ ID NO: 94834 - DNA, 122 bp, Homo sapiens
tcctctttagaagagataaatacttgtgtgtgagagagaattgtgcagagttcagaactgcgatggtctgaaaagttcccagggtttggtgaacctaccaacctagcagtaaagagggaggc

SEQ ID NO: 94835 - DNA, 122 bp, Homo sapiens
tttccgtatcccggaaatatcgttcctttgtccctccagactagcctgccctaagcgtggcgctgccagctcccaggtccttgtgactcatccgtcccagtccaggaccccaggggatgggc

SEQ ID NO: 94836 - DNA, 122 bp, Homo sapiens
ctctcggtgcaaagcgttcctgcagaattgcttccacgtaaagggaccttcgggaaatttcgctggataccggctggcattgacaaacccagcgtccctgagccttgtgaggtttccaggca

SEQ ID NO: 94837 - DNA, 122 bp, Homo sapiens
caccaagggcggcctcggcccgctctctgcccccccaccccgccccttcctcctctccaccgcctctggctggctaggctcgctgttgctacctctcctcgcagatgcaacgaggtaaggct

SEQ ID NO: 94838 - DNA, 122 bp, Homo sapiens
cctgagagaaagtctgaaacccactcagtccccgaaaccttgtgtgtcgtcactgctgtgcgtcggcgggagcattttgcgagtgtccgggggccttcgtcacttccgcccccgcggcaaag

SEQ ID NO: 94839 - DNA, 122 bp, Homo sapiens
ttggaaaattggacccacaaggctaggattatctttcctgaacagaaaaatatggctgtgcgctgcagtgtgcaggagggttggtgtgggaggaggtgggaaggacacacaagcagccctgg

SEQ ID NO: 94840 - DNA, 122 bp, Homo sapiens
ttctgcctgagcaagggaggctgaattacttgaagtgttgaagggctctttaactgcactcggtattcaaggggatgttttatggcaccacgacgatctggtttactgctaaggagcagatg

SEQ ID NO: 94841 - DNA, 122 bp, Homo sapiens
ctcgcgggtgcccgcagggggcgccggcacaagcccgaagtccaaagcgaagcggcccagcgccagcactgcgtggccgcacatggagctgtagccctcgttgtgcaggaacaggacgccca

SEQ ID NO: 94842 - DNA, 122 bp, Homo sapiens
taccttacagtggaaatgagaggcttttgcccaaaagcttgtagaagaagttggggaagacgatgggcacagtccctacaccctggcctgggccttgtctacaaggacaagattgctctgct

SEQ ID NO: 94843 - DNA, 122 bp, Homo sapiens
gatgaagggaagggatcccagtgcttgctgtcagtgagaggcatgaggctgctaagatatcgttgatcctcatttatgaattccacatttctgaagttgcctactcagtaaaatttatttgt

SEQ ID NO: 94844 - DNA, 122 bp, Homo sapiens
ctacaaggggtcgtcatggtggtggtggagattattgttgaaggaccctcgccacctccacgcggcccgccgccccttccctgaatggcggcaaatgcagtcaggcgagcagcgtcctgggc

SEQ ID NO: 94845 - DNA, 122 bp, Homo sapiens
gcgcgagggctagtgcgcgccactgccgggagccggggtcgcgactcgcgttccacgccgcgcgctactcgctccaggtgacatcatccccctgccgggctccgcctcccgccccagccgcc

SEQ ID NO: 94846 - DNA, 122 bp, Homo sapiens
gccatcatccctcagatgctggctgtgctgtgggagcacggcacaaccatctcccaggctcgctgtgcagctcagttcttcctcttcaccttctttgcctccatcgactgctaccttctggc

SEQ ID NO: 94847 - DNA, 122 bp, Homo sapiens
aaaaacctcagacttcctatacaagttaagcagaggaacccggaaaatgtctgaagaaaacgattaccaattttttttgttttttttgttttttggtgaccgggtctcactctgttgcccag

SEQ ID NO: 94848 - DNA, 122 bp, Homo sapiens
ccccagagtaggtccccagtatcgggaattgctccctccgggcagccgcagaccccctgccgccctccagcgtgcccctagcccaaaaccacggcggatggcagcggattatccagccccga

SEQ ID NO: 94849 - DNA, 122 bp, Homo sapiens
aggaacgaattcccctttcctgctgaaaccgggactgccccttgccctcagtgacagccacggccttgctcttgtctcgcctcccgggtgagaatgacaagatcccagatcacagagccccc

SEQ ID NO: 94850 - DNA, 122 bp, Homo sapiens
gcggctcggcgcgaccctctctcccgtctgctccccgccgctctgctcgccccctcccctcgaccaggttctggctttctggcctgttccggcctgggggactcccttgtcctgtgcctccc

SEQ ID NO: 94851 - DNA, 122 bp, Homo sapiens
tgtttcatgagcccaaacaccctcctggcacaacgctctaccctgcagcttggagaactccgctggatggggagtctcatgcaagacttcactgcagcctttcacaggactctgcagatagt

SEQ ID NO: 94852 - DNA, 122 bp, Homo sapiens
acagatgtcaacctggaaaatggcctggaacccgctgaaacccacaggtgaccagagacacggttaggtgatgggtgcgagaaagggatcgagtgaaccctggcactgccaagggctgactt

SEQ ID NO: 94853 - DNA, 122 bp, Homo sapiens
ggagtgaatgcaggaaagtcaccaaaactgtcacctcattcagcaccaaaaggttcacatcggaccaagaacctattaatatatgtaaatctaatgttgaaagagttcagatggaaatctgc

SEQ ID NO: 94854 - DNA, 122 bp, Homo sapiens
gctgcagcagtgaggccaagctccagtgtcccacttgcatcaagctgggcatccagggctcgtacttctgctcgcaggtaggcgcccgctgccccgcggatatgccgccgctgcgggacccc

SEQ ID NO: 94855 - DNA, 122 bp, Homo sapiens
caggattgtattgatttaatcatctgcagaaatacacattctggattactgtagcgtgcccgggccgggggaaggggcgggccggccggctagggccgcggcgggcggggcgcagcggcggg

SEQ ID NO: 94856 - DNA, 122 bp, Homo sapiens
gtttggcttgccagtgtagagcttttcatagagaaaagtgtggtctcggaagctctgcagcgtgttccccatggctatgatggacaccataaccagccaacttcttaacacattcaggaaac

SEQ ID NO: 94857 - DNA, 122 bp, Homo sapiens
caataaagccaataaggaatgctgaaatcaacttacatacagaaataaaactggtctatccgcagggtaaagatagactgcattccattggacataatcatttgtactcccatgggcaagaa

SEQ ID NO: 94858 - DNA, 122 bp, Homo sapiens
cgcggctgttgtcacgtcgcgaggaagatttatgaggcgcgggccgagcatggcccggcccggcggaggccgcccgcgcacccaggctaatctttgatttccatctgattattttttttttc

SEQ ID NO: 94859 - DNA, 122 bp, Homo sapiens
tactgcgggccccacgggtgttagtggcgggggcggcagagtccgggtgggttgtcgcgacggagccgggcctcttcgccgtcttgagacggggctggcgagaagggcccctcacggagttg

SEQ ID NO: 94860 - DNA, 122 bp, Homo sapiens
tgagaatgtaagtgcattctccctgaggaagcagtgggaaagaacaggaaggggcagaggcgaagaacagaattcaaggacaaggttaaaagcagttttgtcttctgactttgtcaccatga

SEQ ID NO: 94861 - DNA, 122 bp, Homo sapiens
acgttccgtacctaactgcgttcttggggagcatcgcctgcccaatttgggcaacgtttgcgcggaggagcggtcactgcgctcgggcgcagagctccgacggcttccagcgctcaccagct

SEQ ID NO: 94862 - DNA, 122 bp, Homo sapiens
cgaggagaggcctggccacccagttgctagactttaggccgcactccaggaaggagcagtcggcttccttcctaggccgcttctattgcgcgccactccttgaatctaagcattttccactc

SEQ ID NO: 94863 - DNA, 122 bp, Homo sapiens
gtattttgatcttaataaaaaataataacccggggcgacgccactcctctgtgctgttggcgcggcgggagggccggcggaggccagttcaggggtcaggctggcgtcggctgccggggctc

SEQ ID NO: 94864 - DNA, 122 bp, Homo sapiens
tgggattttcccgaggcgctataaggcagagggggggaggggagattacacctattggcccggttagttccaattgttctggggaaaacaagcagaaagctgtcgaagggcaatcccatctt

SEQ ID NO: 94865 - DNA, 122 bp, Homo sapiens
tgggcatggacaaatgcacgaatgaatgagactgcgggaatgctgcccccacctcctctccgcctccccacctcgcctccaggtaccctgggcgcctgggaccctgcggggcctcctggagg

SEQ ID NO: 94866 - DNA, 122 bp, Homo sapiens
gctccgggctgggcttcagcagtgcgggccgcggaaatggctcctcacagagcgcgtgtgcgccccatgctggggagggacgccatgcacggcttgctgcctggacacattcttcaattata

SEQ ID NO: 94867 - DNA, 122 bp, Homo sapiens
agagacttcaagcggcaggcaccctactggcttttaactgcctaacccatgcccgcagatcgcggctttgacaaaagaagataaaaaagaagaaggaaaggaaatctaaaccccagacaaca

SEQ ID NO: 94868 - DNA, 122 bp, Homo sapiens
ggggcggggtaggggtcgacttaagataatctggtccaggggttctgctctgggctgggtcgacccggctcgcggggaggctgtttgccctgggccttcccatccccgcgccttcccatccc

SEQ ID NO: 94869 - DNA, 122 bp, Homo sapiens
cgtcatccacccgcctcggcctcccaaaatgctgtgattacaagcctgagccaccgcgcccggtcagccctcttcaaatatttaaagggttgtgatatgggggaagagattggtttgtatgg

SEQ ID NO: 94870 - DNA, 122 bp, Homo sapiens
gagccctgctgctggccgcgggtctacaaaacagcatacgttctctcaacccctgcgatccgccaaccatcctcagtcaccgacccctgcaagggatgcagacgcaccagcggctgctcaca

SEQ ID NO: 94871 - DNA, 122 bp, Homo sapiens
ttctttgactaggaaagggaactccctgaccccttgcgcttcccaagtgaggcaatgcctcgccctgctttggctggcacacggtgcatgcacccactggcctgcgcccactgtctggcact

SEQ ID NO: 94872 - DNA, 122 bp, Homo sapiens
ggcgtgggaagggctgccgggccagcactgtggggctggccgcatgtgtgggctgctgtgcgtgtttgcaggtgtgtgtggacgtcttgtgtctgtggctgtgtgatgtgtctttgcggact

SEQ ID NO: 94873 - DNA, 122 bp, Homo sapiens
ccgcacgctccatccctttccctcgctcgattccttttcccgcgctccatgcctccccctcgactcccggtgctgcggaagaactgaaggttgcgatgccttactctgacgggagcatctgt

SEQ ID NO: 94874 - DNA, 122 bp, Homo sapiens
tgcctggaaaacctttaacagttggcttctctgtgcctggccgtggtcaccacacacctccgaccctccgcccaggtgcagggcccctggtttcatctctgtccttccccaccaggtcccta

SEQ ID NO: 94875 - DNA, 122 bp, Homo sapiens
atgggcttgaaaccactttgctaagtgaaagaagctagacacaaaggatcacatattatacgattccatttatgtaaaatgtccagaataggcaaatgggatgaggggtaaaggacgcctaa

SEQ ID NO: 94876 - DNA, 122 bp, Homo sapiens
ctgaacgcagagggcagtgggccgcccggaaggggcggggaggggccccggccctcaagccgcacagccaggtgttcccgctcttcgaggacatcccctgcccgcctggaggttgagagggc

SEQ ID NO: 94877 - DNA, 122 bp, Homo sapiens
tgcagaatttggggaattggaactttggaggcgggagcgaaagacctctccttctctcgccggaaatatccctctttcgggaagcgctcccctgccttccggaaaggaagagccctgatcgc

SEQ ID NO: 94878 - DNA, 122 bp, Homo sapiens
gtctcgagtggggctctgcttggtttctccttgaaggtctggcagggtcagaccctgcatcggcagtaaccgcggagatgggagagccgagtctgccgctgtgggcttcctgggccttcccg

SEQ ID NO: 94879 - DNA, 122 bp, Homo sapiens
agcagattcgcagcatactgtgctttgcctgaatgggtgttgtagacacaggggcagaggcgtgtttggagaaagggttcagaatttggagtgcgacagacgtaggttcgaacagagctctg

SEQ ID NO: 94880 - DNA, 122 bp, Homo sapiens
gcctcgggagggggctcggggccggctgcctctcgagccccatccagccggaggcgggtgcgcctctggatgttcaggtagatgctgaggttaaagaaggtgacgctgaggaagggcgtaaa

SEQ ID NO: 94881 - DNA, 122 bp, Homo sapiens
tcccagccgcaggggccttcctgggacaggccaggtagaccccacccccccgaccccgttcgtcagggcaacaggttgggtgcaagctgtcaagagatggccttctccctgggtcctcaaaa

SEQ ID NO: 94882 - DNA, 122 bp, Homo sapiens
tacccatggcgacagaacgccgccagattgttcaaatctgaacattctaaacggggaaatcggggcgcggaagagtggggtgggaaacgaacaccgggttgcggaccagaactcagggtcag

SEQ ID NO: 94883 - DNA, 122 bp, Homo sapiens
acccgggtcttgccagctggacgttcttgtggggcagcgttgagcagcggttaggagtgccgtggactttggattcaaacagccccagctcttctgcttgctagctgggtgactttgggcaa

SEQ ID NO: 94884 - DNA, 122 bp, Homo sapiens
aagtgctggccagcaacgactgcaagcctcagagcgttattttgccgcagcctacgcaggcgcagtcagtctttgcattgtggtggccacgccccactcctcgtcttccatgctttgtctct

SEQ ID NO: 94885 - DNA, 122 bp, Homo sapiens
ttggtgtgcgggactgatttgcagaaaccgccactgacttaaaagtttccagttattgctcgtggggagggggttgtttgagaagatgtggctccctttatccagggcttctgtgacctcca

SEQ ID NO: 94886 - DNA, 122 bp, Homo sapiens
aatgcagtgatgtcatcacagtcacaataactttgaactcctgggtttcagcgatcctcccgctccagcctcctaggtagctgagagtgtaggcacaagccaccacacccagctaatttgtt

SEQ ID NO: 94887 - DNA, 122 bp, Homo sapiens
cacccaccttggcctctcaaagtgctgggggagtgagcacccaaattgagccactgtgcccggccaggatttttctttctagtgactctcctaaagccagagaacagccattcagcagccag

SEQ ID NO: 94888 - DNA, 122 bp, Homo sapiens
ctgcagagatgaatggccccggatctgtggaggctcgcctgcccctggggaccccgtcctcggcctggggggtagtgtcaggtgtgtttgaaccagagcaattccatcttgaatagggactc

SEQ ID NO: 94889 - DNA, 122 bp, Homo sapiens
cggagacaccgggcgtggatgcaccagaagggcctggggcctcggggccaggatggagcacgcccacccggcgaggggagcagcaccggagcctcccctgagtctcccccaggagctgaggc

SEQ ID NO: 94890 - DNA, 122 bp, Homo sapiens
gctcagggcaagcgcaccaggcgcatatgctggccttcatctgtcctcagctcctccctgcgggcacaagcgggggcagctgaatcttccacgcgagaagcctaagagtagggatacggggg

SEQ ID NO: 94891 - DNA, 122 bp, Homo sapiens
gtgcttggtcagcccctcataggtcctcacacaggacagagcctatgctaccctctgggacgcgtcaccgcaaacagcctcactcatccccgtacccacgctcagccagagcatccgaaggg

SEQ ID NO: 94892 - DNA, 122 bp, Homo sapiens
agaaaacaaagttgcgtccgtctctagttctcaaacccaagcacagtgatgtgggtcgcccggtgctgcaagaggtggcccgagcagccgccgggtcgctgggggcccaaaggagcctcctg

SEQ ID NO: 94893 - DNA, 122 bp, Homo sapiens
ctgatttgaacacaaaagacatgtattgctcatctaacactgtgtatttaatatttcctgcgtatgagtgaaacctgttaaacaaggtgaagaaaatctataaaaggttaagatgtttttaa

SEQ ID NO: 94894 - DNA, 122 bp, Homo sapiens
tcgcgactgttcggggcacgtcatctggcctggcagctctgagaggggacatttcatttccgctctgcatgttccctcctgccccctgaatggctctgggctgtgtggccacacagtgaccc

SEQ ID NO: 94895 - DNA, 122 bp, Homo sapiens
tccccagcagcgtcttgcccctggaactccctccctacatctgttcatctgagtggccttcgtcctcaatgcagccagtgtcaaggtggacacgcacacggctccgaagtcctgtgtgacgc

SEQ ID NO: 94896 - DNA, 122 bp, Homo sapiens
cctggggccagagaggaccagatgcccagagggctccaacgctggaggcggctgggaattcgcccatgagtgagccttgactctgctttccaaggagaactcttctgaatcctaacagcatt

SEQ ID NO: 94897 - DNA, 122 bp, Homo sapiens
ctccagggcaggcgctggctggaggctcttcctgcccgcagtcctcaccgccatagcccacgtggcacaggcacactccttgcacacaccgcccacgtccccggcagtcagccgggcacatg

SEQ ID NO: 94898 - DNA, 122 bp, Homo sapiens
gcggggggaggggacaagaggacggaacatgctggggtgagcagcccgggacagcctgcccggcacggccacggcccgggcagcggcgcggaggggggcagggacgccccgaacccggagcg

SEQ ID NO: 94899 - DNA, 122 bp, Homo sapiens
agccctgtgtggaggcgggtcacagaggggtggctgtaggagggacacccagcgtggcatcgatgagctggattaagatgctgctacgcaaacaggaaggaagaacagcaacgatggctaac

SEQ ID NO: 94900 - DNA, 122 bp, Homo sapiens
ccagggcgccgggtgggcgcaggattgctaaacgctgcggtttggctaagattgcggagccgagaagagaaagggcgcaggagggagggatttaaaacaaaactaaaaggaggggggaagca

SEQ ID NO: 94901 - DNA, 122 bp, Homo sapiens
tcccggcccctccagccagcccctaagatgctgctggaaaaacagctgtggcaggcagctcggggggccccggctcggttatggcttatgtacagccccgacagccaactggctttcaggga

SEQ ID NO: 94902 - DNA, 122 bp, Homo sapiens
agagtccgggctctacacatctgcaggtggcttgcacatcaggaaaaccagtgaagcccccgcggaaggaagcctttcctagctgcgcgtgccggttggatacagcccgaattagtgctatt

SEQ ID NO: 94903 - DNA, 122 bp, Homo sapiens
tgagatactctgctcagcgccgggttcctgggtcccagtcctgatgtggctgctctttgtcgcctccctcagggctggagcagcttcaccactggagccagccggtttgcctcggcagccaa

SEQ ID NO: 94904 - DNA, 122 bp, Homo sapiens
ccgggcggggacgcacagcgaggcgggctccgcgggaagtaccgggaaaacggcgcggagcggaacagcccggagccagcccagagaaagggcggcctccccctgcagcccccggggcccag

SEQ ID NO: 94905 - DNA, 122 bp, Homo sapiens
gcagtggcgcgggattggctggctcgtgcgtagatggacagctgaggctggctgaacgcccggcgatcccgcgaggctgcgggtgcgggccccgcggcggccggcgcgctgcgctgacattg

SEQ ID NO: 94906 - DNA, 122 bp, Homo sapiens
cgaaatccctgcgcagaggcacagttcagctctcggaaccacatgctgtgcttagacatccggtcccgagttcttcaagacccaaggggtgtttgaattcctacctagggtctggttatttc

SEQ ID NO: 94907 - DNA, 122 bp, Homo sapiens
ccagagagccccttttgggaggacggggcgaggcccagcaatccgcgttgggagtggtcccgcgcgccgttctgatctgggcagccctgggctagcggagaccacggcgccttgcctcggcc

SEQ ID NO: 94908 - DNA, 122 bp, Homo sapiens
gtaaatcaccgcccccgtgggccgtaccattctggccggggggacctgggaggggacgcgcggagggcttcccccggggactgcctgtatcgagactctctccagcccaacaggaggatggg

SEQ ID NO: 94909 - DNA, 122 bp, Homo sapiens
ttgtaataactagaatgtgaaagaactggcgccgaaaagggaaacaaacaaggtgaaacccgctcccagcccggctctgtgcaggcactttccagaccacgcggacagagccgcgccgtctg

SEQ ID NO: 94910 - DNA, 122 bp, Homo sapiens
ggaaagaaagatgatctgcactggaggcccaggaggctcttcagggtcacagctaatccacgccctgagatttcaaaacacagaatgcactgggtctctagcctgcgtcagatccacatttc

SEQ ID NO: 94911 - DNA, 122 bp, Homo sapiens
tcactgggcccagccaagctctgcctaagggaagcaaacgtgaggcagcctggaccggggcgggccctcacagctacaaggctggtgggcctgggcctccgggctgtgccgcccaccccaag

SEQ ID NO: 94912 - DNA, 122 bp, Homo sapiens
gtgggatttgtgacaacagtcggcaaaggaagaatctgaggctcagagatggttcattaccgcccgaggtcacgtaggcagtggatgataaccagtcgttgaataaatataactccccccca

SEQ ID NO: 94913 - DNA, 122 bp, Homo sapiens
gtgtcatcttcccacccagactgcttgtgaatattgacagacagttgagtggtttcccctcgtatctgacatctagttaatgcctaagagaagctaatccttccctcctctgagcaccaagt

SEQ ID NO: 94914 - DNA, 122 bp, Homo sapiens
acgctcattccactcctccccacctccacccaagcgtccagcccgcgcgcgccgctcccccgcaggctgatcagacttgcctgcccagtccgcccccgcccaaaccccgcccccttcccgcc

SEQ ID NO: 94915 - DNA, 122 bp, Homo sapiens
gccatcttccaggtgggcggcaagatggtgggacggggaccctggggcacggcaggggagcgggtgcaggactcgccccccccagcccagaccccaggggcacggggaggaggaggaggggt

SEQ ID NO: 94916 - DNA, 122 bp, Homo sapiens
ccttcctccaaaaaagttccccgcaagacaagttacttctcaaagttggggagacggaggcggtgcttttaatgtctttccattttacagagatggagataggtccgcagagaagtgattta

SEQ ID NO: 94917 - DNA, 122 bp, Homo sapiens
gaggcggagagaccttgccttttagaaccggcagagggcagggccggggcgggatctgcgcgtctctcagcctcgctcccagcgtctctgttttcaggttttggaggcgagagcgccagaaa

SEQ ID NO: 94918 - DNA, 122 bp, Homo sapiens
ataccacacagtcacatcgtagagtcactgtgagagctgccattcaccaggcacattctgcgtgccagagacggtgttgagccgcgcatccgcacccccacttcaccctcacagcgacccca

SEQ ID NO: 94919 - DNA, 122 bp, Homo sapiens
ctagactaaaggcagccctggattcaccctacaaagcatagaagcaaagctccaaagatccgatgggtatcaggaactcatggatgccagaacaaaatccgacagcaattaaaggaatacaa

SEQ ID NO: 94920 - DNA, 122 bp, Homo sapiens
ttgtacttgtggtctggctccaggcccgagatggtgaccccatcctcgtgtcccggcacccgcaccgccttgggctgcccgtccccattcttaaactggaccaagaaatggtcaaactggcc

SEQ ID NO: 94921 - DNA, 122 bp, Homo sapiens
tgctggctttactaaaaatttcctttcctttttgtgtggttttaaaatgttgcatattgacgtagatgaaactgtggtttgcaagtagtttaactttatgaaagtctcctaaagaagttttt

SEQ ID NO: 94922 - DNA, 122 bp, Homo sapiens
aatggaacctttgttaattctggttcttagaaaagtaaatccattcaatttctctcctctcgctctctccttttctaaatgccttcagcttggaattcgcacaaggaactgaattggtcctg

SEQ ID NO: 94923 - DNA, 122 bp, Homo sapiens
ttttaagatatttccagaagttttaacctgttggcataatctaactttattagacagtttcgaagagcgtggtagattatacagaaaggctgaactttaacattttaattcgtttgtaattt

SEQ ID NO: 94924 - DNA, 122 bp, Homo sapiens
tttctgctgtctctctcatagtgctttttttctttgttttgtgatttttgactataaattcgagttttttagaacttgaactgtaggaattctttgaggccttgggcgagtgctgtattctc

SEQ ID NO: 94925 - DNA, 122 bp, Homo sapiens
aacagtctccactctccggggaagttggcagtatttaaaagtacttaataaaccgcttagcgcggtgtagaccgtgattcaagcttagcctggccgggaaacgggaggcgtggaggccggga

SEQ ID NO: 94926 - DNA, 122 bp, Homo sapiens
tgatcgggacgaggaagggtcactccgtgacccgggatagggccgggatgcagccttggacggggctgggcccaaatgtgggctctggagggagccgggctggggctggtgctggtgctccc

SEQ ID NO: 94927 - DNA, 122 bp, Homo sapiens
tggggatgtctatctgagaaaatcctacttgcactcaaagacagagttcaagcctcacctcggaaaaaacttttctgacgcctaccatttagtatatatgactgtgatggcatgattgcact

SEQ ID NO: 94928 - DNA, 122 bp, Homo sapiens
ggcagcgcgtgaagttggtgaggcctgggccgcggcatacttccggcctgagtccggcaccgcgggtgagagaccgaggccgagcgtgctcagtaaaggaggcagagccagcgtttcgtttg

SEQ ID NO: 94929 - DNA, 122 bp, Homo sapiens
ggcttcagggcattggagggcttcttgtccatgtggtggatgcttcctcattcccagggccgtgaggacacaaagggtgggaaatcagacgtaggagggcatgggggctagagggcatagaa

SEQ ID NO: 94930 - DNA, 122 bp, Homo sapiens
ggctggctggggagtgtgaagagggggttcagggagcaatgcctcagggccccccatcgccggggtgggtcccatgaaacaaacacctaggaaaagcggcgctaaaaatagctggggggagg

SEQ ID NO: 94931 - DNA, 122 bp, Homo sapiens
taagttagagatgacaacaatctggcatgatctgtagagtggactatggaaggggtgacacggaagagtgtgactctaccagatagaatgtgattagaattcagaattactttggagtagtg

SEQ ID NO: 94932 - DNA, 122 bp, Homo sapiens
cgagtgggtaaagatgccctcctcgcagaggacacgaagcaacaaggaaaacagccaccacgtaataagcgacatgccagaatagaaggattctttagtacaatctttgcttttttcaaaga

SEQ ID NO: 94933 - DNA, 122 bp, Homo sapiens
agaggaagcacagaggtcacatgagccagtgggtcacgtgagaggttcctacggccagcccggaagtggcggtgttgcttccgtgggttccattggcccaccggcagtcacgtggctgccca

SEQ ID NO: 94934 - DNA, 122 bp, Homo sapiens
tctactgaaggccccacaaccacctgagggagacagcttttattaaatttcagtttttgtcggttgcctcgctcttcagacggcaagtgagagaagcgtgttctcacgcttactgtcaacgt

SEQ ID NO: 94935 - DNA, 122 bp, Homo sapiens
agcagtaccagggaaagtggttaggacagaggttcccaacaagattagcaatcacagtagcggaaaccagaaaagttggaaggggaagaccaacttataaattcttgatctgaaagtaacag

SEQ ID NO: 94936 - DNA, 122 bp, Homo sapiens
gcacactcggggacctgggcctgtgcatcttaacccagttctcccaccgtccctgccctacgacttacgttctagcatgactggcctggcccaacagcctcagtggtgggacgggggaggca

SEQ ID NO: 94937 - DNA, 122 bp, Homo sapiens
aatccccgggacaaaaagaggctctgaactgtgggcatctggccccgcctcaaatgtgtgcggggtgcccacctgctaggcctaggccagggagaaggaggaagctgctgggtgaccgcagg

SEQ ID NO: 94938 - DNA, 122 bp, Homo sapiens
cgtcagatctcgtgagaactcactcatcatcacgagaacagcatggggcaaaccgcaccacgattgagtcacctcccaccaggtccctccctaacatgtggggattataattcaagataaca

SEQ ID NO: 94939 - DNA, 122 bp, Homo sapiens
ctgttttttcccaagcaccaccctcccccacttatttgcatacgtcaataaatactgctgcgtccttcagcaaggttaaaaagacaccgcacacacgaccctttcttctcccttccccagct

SEQ ID NO: 94940 - DNA, 122 bp, Homo sapiens
ggggctgagggttcctagagcaaatggcacaatgccacgaggcccgatctatccctatgacggaatctaaggtttcagcaagtatctgctggcttggtcatggcttgctcctcagtttgtag

SEQ ID NO: 94941 - DNA, 122 bp, Homo sapiens
gcctggtcaagtggggacccccccatcctgacccctgacctctccccagccctaaccatgcgtttgcctggcctacacactccactgccacaactgggtccctactctacctaggctggcca

SEQ ID NO: 94942 - DNA, 122 bp, Homo sapiens
ctgaacttttattaagagtaatgataagaaacactccgagggagatattacaatactgcgcggtaataagttgcaggggcaaactttaaaaaaaggaggaaaattgagacagggaagaggag

SEQ ID NO: 94943 - DNA, 122 bp, Homo sapiens
agcagcaaccaggctggaataaaaacaaactctgaatcaaaggaagatcgtgacccgagccgaaagtacagaaagagcaaaggcatacagaggcggcagctgttacagcagggacaagacat

SEQ ID NO: 94944 - DNA, 122 bp, Homo sapiens
taccatggggcggcaggtggggaggaggagggggtccagggtcagtgctgctgaaataagcgccccagagcaagatgctcatgggagggagggagccaatgctcctgtcctctgaataggtc

SEQ ID NO: 94945 - DNA, 122 bp, Homo sapiens
aacacctggaacgcagacctgggagcacaccatagtccacgcacgaactgaatgaaagagcgtcactcacttttacagagcagttgtgttcacagcgactccgtaaggctggcgctatgact

SEQ ID NO: 94946 - DNA, 122 bp, Homo sapiens
acacagcagctggggcgacagtaggtggtcctgcagcaggtggtctcacagcagctggggcggcagcaggtctcctggcagaggtctcggccacagccttggtgagagcacacggagccaca

SEQ ID NO: 94947 - DNA, 122 bp, Homo sapiens
ccattctctttttgagttcgcggccggctagggcgaaactacagttcccaggaggactcgcgcgaagcggcttggaagtgggcagcctggaagtcactcgggccaccggagctggcggcgtc

SEQ ID NO: 94948 - DNA, 122 bp, Homo sapiens
ccactgaaaatcacaaaacaatacacgttaacaagaggtgggacaatatgcaagaatatccggcaccctctccattttgctgtaacaaggtcataaccagtgcctttgaaatattcccgtta

SEQ ID NO: 94949 - DNA, 122 bp, Homo sapiens
cctgcggtgtggacgggcctctccagtgtgtaccagcctccaatacccccgcgtcacctgcggtgtggatgggcctctccagtgtgttccagcctccaatacccccgtgtcacctgcggtgt

SEQ ID NO: 94950 - DNA, 122 bp, Homo sapiens
aaaggcatcatttaagcctaagatgtcctggctccaaggtgtcagcatctggaagacaggcgccctcatcctgccatccctgctgcggcttcactgtgggcccaggggacatctcagccccg

SEQ ID NO: 94951 - DNA, 122 bp, Homo sapiens
gattaaatttgagtgtttcagctagtaatgtgtgttcagagcaaaaattatgagggaccccgtcatctcttatttttgtgtctttcatggtagctcatatagaactgagaacccattatagt

SEQ ID NO: 94952 - DNA, 122 bp, Homo sapiens
gatacagaaaactgtgtaactgcacatacacataccagtagcacgatgagctcagatggacggaatgcttatgtgagcagacagacagggagagatactgcaagcatgttcccctccttccc

SEQ ID NO: 94953 - DNA, 122 bp, Homo sapiens
gagatcccgcggaaaggcgggttggtagcaggtggccagggagccaggcagcagcctcagcgttgcttgccttcttaagaaagcacagtgttagctgtaaagggcggggtccggtgacaggg

SEQ ID NO: 94954 - DNA, 122 bp, Homo sapiens
ggggacggacttaccttcccctgtgagagttacctaaagctcggcgtccgtgatggtctacggggcttccgaggcgatcgggcagcgtcagtcttcagccgctaagccgagaaggagtcagt

SEQ ID NO: 94955 - DNA, 122 bp, Homo sapiens
actccaatctctgtcttttcaacccaggagatcctaggtttccatatgatttcctttcatcgcaccacagactggaaatcgcctctgggcaaaagggcaggatgatatacggctccttttat

SEQ ID NO: 94956 - DNA, 122 bp, Homo sapiens
gagccaaagggccggcacccaaaatgcagagagaagatttattcctgtacctcggggtgtcgggcagcttaagctcatctgttcacattgtttctgtgtgatcatgagagactcgatattat

SEQ ID NO: 94957 - DNA, 122 bp, Homo sapiens
ctgaaatggaaggatcgcttgaacccaggaagttgaggctgcagtgaactgtgatcatgccgctgcaatccagtctgtgcagcagattgagattctgtctcaatccccaaaacagagaaggt

SEQ ID NO: 94958 - DNA, 122 bp, Homo sapiens
cccccaggcaggcagcacctctcggccgtcagcagtgcagccaggcgcccatccggcagccgcttggtctggcccagccccacctgcacagaatgctgctgcaccagagagtcctgggccat

SEQ ID NO: 94959 - DNA, 122 bp, Homo sapiens
taggacctaactgttaacatgcatcactgaaaaacttggaacataaaaactgaagtagtacgtggtatggtctattataaacaatacaaggcaatttatgatttgttctcatacagtacaat

SEQ ID NO: 94960 - DNA, 122 bp, Homo sapiens
tccccgctgcagctgaggctggagtttggagtttgacccgcttggaggctctctcagcagcgggcatataggaggaagggtcactgctgtctccggaagctcttggctgcaaagagagagga

SEQ ID NO: 94961 - DNA, 122 bp, Homo sapiens
agtatacctaggactgttgaaagtgtgtgctgtgtgtgtgttgtatgtgttgtgtgtgtacgtgtgtataagagtgtgtgttgtgtgttatatatgtatgttatgtgtgttgtgtgtcatgt

SEQ ID NO: 94962 - DNA, 122 bp, Homo sapiens
ccaaaaatgaccataggaatcacctgttcccaactgtctttcttaaaactcatgggtactcggggttgggagagaccaagatgcagcagggattcatggagaagaacccggtggtctgtggc

SEQ ID NO: 94963 - DNA, 122 bp, Homo sapiens
agctaaaacaaatggagtaaggcagcaatacacacaggctgacaagcccaggatggagggcggcactgcagatgctctgctctctactggaatgtgtggacatacaggaatccctatcccag

SEQ ID NO: 94964 - DNA, 122 bp, Homo sapiens
ccaggcgagggctgcagggtccgccggctggagtccgctctctactgccggattcctctccgctcggctcggattcggcccgcacctctcccgccgagctccgccttataataaacccacag

SEQ ID NO: 94965 - DNA, 122 bp, Homo sapiens
gtggacatggatccgcaggtgagtaggggcggcgcaggtgtcctgccctggggatggggacgaaggctgaccgctccgatgctgtcgcgcccccggctcccggtcggcctttgtcatgtcta

SEQ ID NO: 94966 - DNA, 122 bp, Homo sapiens
tcgagacaaataagggctccattcttccacaccgggcttccatcacaggcccctggagcccgtaagtacccccaggcctccagcgatgaccactgagatggtgggaccttgactcaccagcc

SEQ ID NO: 94967 - DNA, 122 bp, Homo sapiens
ttgtgttgtcatgcctccaaaaggcgggtcacatgaaaactgacacaggcttcagccaaccgaattgttttttaactctcttctccacagcgtgcgtggggaggcctccgtgaactctgacc

SEQ ID NO: 94968 - DNA, 122 bp, Homo sapiens
gcggggggaggggcggggggaggtgggggccagtccttgctccgagagcttccaagatggcggcgggccgcttccaaaatgggatggtggcaagcctcttgttctctgacctggggttcttg

SEQ ID NO: 94969 - DNA, 122 bp, Homo sapiens
ggagaatgggttcagttccgaggtgcctggaggacagcagggaagaggtcagttccagctcgagacaaccccaggagggcttcctgaagaatgaccttgggctctggttcccaaggcccatc

SEQ ID NO: 94970 - DNA, 122 bp, Homo sapiens
gaccacacagaatgggtttcactgaaagtaatagagtgaaattgtctgcataattattttcgttggattgagaatcagcagccctctttgggttcaggaaataaacctctgttaaaaccata

SEQ ID NO: 94971 - DNA, 122 bp, Homo sapiens
agagccagacagccctgggcagccagccagctccccccataaaagccccaggccaggccccggacactggtgtcctgggtcaccgttagctccaggaataagtaccctagaacccctcgaga

SEQ ID NO: 94972 - DNA, 122 bp, Homo sapiens
agaggggcactactgagccactgacctgagagtcacccagatcaccacaggttctgtgagcgagataccatcttttgttgtgtcaagtgactaagattcgagaggtttgttaccacagcata

SEQ ID NO: 94973 - DNA, 122 bp, Homo sapiens
gtgggagcacccatggtgaggttgggagaatcggccgatcgaagagctccgtccgtctcgcgagagtatgaggcagcatctcctgtgtctaatcctcagggcaagggagggagggagcagcg

SEQ ID NO: 94974 - DNA, 122 bp, Homo sapiens
gtactgctttcagccttgtcaaaggcaacaagtgattaagaaaagcagtgtaccacctggcggcagtaggcaactatgtgattaaagatgtgtaaccatagcagctgttggctcagagaaaa

SEQ ID NO: 94975 - DNA, 122 bp, Homo sapiens
ccatcttgttcccaaatcccaggaaactcctagaagctgggatctgagcaaagggacaaacggagctgcaaggccagtgggggtgggaactgggctgagtcagggaaggtctgtgggttccg

SEQ ID NO: 94976 - DNA, 122 bp, Homo sapiens
tcttctcgtcaccgagtagccggggggtcccagcggggggacccgcttgggcgagggggtcgggagggtgggcggtggggtgggggggtggcaggttgtggggggtggtcgcttcaaacccc

SEQ ID NO: 94977 - DNA, 122 bp, Homo sapiens
cgagactccgtgggcgtaggaccctccgagccacatgcaggatataatctcccggtgtgccgttttttaagcccgttggaaaagcgcagtattagggtgggagtgacccgattttccaggtg

SEQ ID NO: 94978 - DNA, 122 bp, Homo sapiens
cttctggctagagttgactcatgtttgtgtgaagtggaaggaaactaaagcctcatcccacgcttttgtcttccaaaagaatgccaaagagagagaccaattaaaagatgaaagcctggcaa

SEQ ID NO: 94979 - DNA, 122 bp, Homo sapiens
cttgcaacgcgcagggtaggagaagggaaattggcgtccgctgccggccgctgccccaggcgaggccagacgaggcctctgctcagatcccgccgccccacaaagcccgtggccccggagcc

SEQ ID NO: 94980 - DNA, 122 bp, Homo sapiens
gccgtgccctaccctgttccaggctctgcagcagctgctggtagtggtggctgcaggagccgtactcgcgctcagccatcagccggtcctcgggtccgaagccgcccgcgtcctggctgtcc

SEQ ID NO: 94981 - DNA, 122 bp, Homo sapiens
tgccaccatgatctcctcatttttctgcgttgactttaaaccattgtctctggtgggcatcgccaaggtcacacgcaggggtccagggacctcatcccaagctgagcggcttcccgagaccg

SEQ ID NO: 94982 - DNA, 122 bp, Homo sapiens
gctaagccccccactgcccagggccagcggcactggctggtcgctccgagtgcgggcccccgcccacccagaactcacgctggctcgcaagcacagcgcgcagccctggttcctgcccgcgc

SEQ ID NO: 94983 - DNA, 122 bp, Homo sapiens
tttcgagaactcgcagcacctggattatatcaccgagaagctctggcgcaacgcgttgctcgctggggcggtgccggtggtgctgggcccagaccgtgccaactacgagcgctttgtgcccc

SEQ ID NO: 94984 - DNA, 122 bp, Homo sapiens
gtgggattttgcaaaaaataaatcgtctctaaaaccccatttgctcctttttggggatcccggtccccgtgccctgccccaaagtttaaaagttaccgtgtggccgggggcacctggcgctg

SEQ ID NO: 94985 - DNA, 122 bp, Homo sapiens
tggcaccaccatcctggctctgagtgagggagaaagtctagggcttcaactggaaagcggcgcccttgacaacaccaaggatcggtttgtatttatttactcagagcaggagacaactgctg

SEQ ID NO: 94986 - DNA, 122 bp, Homo sapiens
gatgccagcaaagactgcggcgccaggcgacggcaccgccctcagatccggagccagcagcggtccagatggtgaccgacccaccccaggaagccagaagcttcgtggctcttcaaatgaag

SEQ ID NO: 94987 - DNA, 122 bp, Homo sapiens
cctatgcttttatgagcataaaccaaagtaacattactgggagatacacagaaagaatcacgttttcctgagaaatctcttaagaaattacatcagttctctggacacatggaggagagggg

SEQ ID NO: 94988 - DNA, 122 bp, Homo sapiens
gaccagactgggaaatatatcaagaatccatctcaaaaaaaaaaaaaaaaaaaagatattcgtgtgttccttgaataattttaagtattttgcaaaacagttacatgagtggggtgcgctca

SEQ ID NO: 94989 - DNA, 122 bp, Homo sapiens
gcgcgaaggtgatgagctcgcccggctgccctacctacggacctggttccgcacccgcagcgccatcatcctgcacctcagcaacggcagcgtgcagatcaacttcttccaggtgagctgga

SEQ ID NO: 94990 - DNA, 122 bp, Homo sapiens
gttccagtgaacaaaaatttcctgagcacctgcatatgtcctgtactgcctcttaaaatgcggcatatactgagaggaatgagacatggcctcatctttaaagtcatttacagtctattaga

SEQ ID NO: 94991 - DNA, 122 bp, Homo sapiens
gctctcctcttcttcatctctgttttcctcttcaaattccagagagaggaatccaacagccgtggcctggcactggccagcccaggagatcatcatgcaatcgtcttcagccagcagcccag

SEQ ID NO: 94992 - DNA, 122 bp, Homo sapiens
cctcgggagctggcctggaaagtcgtggctgccttgggtgtggtccctcgggtccagtctcgcaggcgggctccaggtggactgtagggtaacgccaccaagatgctgggcatcccgaactt

SEQ ID NO: 94993 - DNA, 122 bp, Homo sapiens
ctcagacatcccagtgccgtgccacagcgcccaagggaggcttcctaatggctgcagaatcgtccgtgaagaggctggggccatttaccaaaggcctctgctgtggttgcccttcgggtcgt

SEQ ID NO: 94994 - DNA, 122 bp, Homo sapiens
cgtagcccctctctgcaggccccacagtctgtgaccgtgcagggagggtgctgggagtctcggctctttcggaaggcgccagtgtttccttgtcacagaatgaagtaaatgggacgatgaag

SEQ ID NO: 94995 - DNA, 122 bp, Homo sapiens
ccagcataaatcctggcaggacaccgacctgcagacttattacaattccagcataaattccgccagaacactaacctgcggacttaccacaattccaacataaattccgccaagacgcctac

SEQ ID NO: 94996 - DNA, 122 bp, Homo sapiens
cgagtcggactgggtggctgtgcggccccatgtgttcgacgagcgcgagaaacacaaattcgtctttattgtggcctggaacgagattgagggcaagtttgccataacctgccacaaccgga

SEQ ID NO: 94997 - DNA, 122 bp, Homo sapiens
ctgctttcttttggttactggactttattgacctaaataatgaaaaaagtggctcaaaaacgtaatggatgtttgaacactgaagacttctgcctcaagtctttggaagcctccttggtatc

SEQ ID NO: 94998 - DNA, 122 bp, Homo sapiens
gcattcggacgagagtgggctgctgggggctcgggaggtgcgcgagacaaggttaccctgcgggtccgccactgcccccggcctccagcactgcactgcccacgagtttgcggggtgtgagc

SEQ ID NO: 94999 - DNA, 122 bp, Homo sapiens
catcaaaatgctgacaagggcccacctaacaatgtgttaggaccggggctgtctgagagacgatgccagttaaggctgggctggctcttagctgcagcaagagtggaagatgacaaccagtt

SEQ ID NO: 95000 - DNA, 122 bp, Homo sapiens
gcgctcgcgcggcgctgccaggcgctgcgctcggcggggcccccacccggccggccggcacgctcgcccgctcgcagaggccctgactcacattcccagcattcccgaggagccgctagggg

SEQ ID NO: 95001 - DNA, 122 bp, Homo sapiens
ggtggcggtcccaggcagtgtccacaggcccggaagccgaggggaccaggcatcaagccccgcgtccagatccctgcacccgggggcgggacctggtgtcccgcggtccccgcccaggttcc

SEQ ID NO: 95002 - DNA, 122 bp, Homo sapiens
acctaaaggtctacactcttagggtaagaatgaaacggaattagccctgctccctccacacgaaagacacttggtgctaagagaagcaaaaagaaaaagttcttcagaagttagggctacag

SEQ ID NO: 95003 - DNA, 122 bp, Homo sapiens
agctgaaatgtcttgagagatggtagccctcacgttcctgactttggagtctgactgcagcgcagagaggggcccaaagtcacacagcaagtgcgcacctgagatgggactaggacgggcgt

SEQ ID NO: 95004 - DNA, 122 bp, Homo sapiens
ctctcccagagagctgcgctccacccgcgggcctgcctgcgcgtggggagagcggggaggcggggacaggagacctgagcccctgggcgcccctaccacgtgtcccccgtcccaacactgga

SEQ ID NO: 95005 - DNA, 122 bp, Homo sapiens
ggagacggctcaagactcacctggacacaggccactgaacggcactcaggaggaagtagtcgtgggcctctgctgcctaggagtttcccagcagccagcaggccctcagctggagttcaaaa

SEQ ID NO: 95006 - DNA, 122 bp, Homo sapiens
tacagggagccaggattgttcctggaatatcaacagatccaaagaatgttaggactggggcgctgaaggatgcgctgtcgtttttcatgttcatttccgttccccctccgcctttgaccctt

SEQ ID NO: 95007 - DNA, 122 bp, Homo sapiens
cagcccgagcctgcgtttcctgagccaggatctggggcgagatggctgcaggcggccgtgcgcccaagccccacgtcctcgtctgccttggggcgctcctggccagctggtcgccgtaggtt

SEQ ID NO: 95008 - DNA, 122 bp, Homo sapiens
aataatcgcgcccggcgttgtggggcctaagactctcgcgagacaccgtctagcacttcccgcccgtcagtccttcacagtgcccgaatcgcccgctggtttaagtgcagcctgtcaatcag

SEQ ID NO: 95009 - DNA, 122 bp, Homo sapiens
aacatgctacacgcggttgaatcatgcatacgtatgtaacacacacacaagtcgtacatgcggtaactgtctttacgtttggaaaagtgatgcagatgtttggaaagcgacacagattactg

SEQ ID NO: 95010 - DNA, 122 bp, Homo sapiens
ggtgcggggctctgatgaggggtttgtgggctcttcccaggtggccaatatcctgctcaacggcgtgaagtatgagagcgagctgacgggctccagcgagcgcgcggagcagcctctgtccg

SEQ ID NO: 95011 - DNA, 122 bp, Homo sapiens
gctggaacaggagggagctagagggccctgggtctggccctgggctggggccctgctgggcgtgggtggcgtgcagcaggccgtgtgctgctgggcgtgggtggcgcgctacaggcttcgtg

SEQ ID NO: 95012 - DNA, 122 bp, Homo sapiens
ccaaacataaggcgagcacagataatttatttaacaaggctatggggttggtggggggctcggaaaaaaatcagcggcggaacctgctctcagccaccttgcaccaggacacaaacactgac

SEQ ID NO: 95013 - DNA, 122 bp, Homo sapiens
agcagaggagctcctcggagagccacgcggccatcatcccagcatgaggccagggacggacgctgaaaaaaggttggagaagcatctgaactgtaacccctacccctgatgccagtcccgag

SEQ ID NO: 95014 - DNA, 122 bp, Homo sapiens
ctaagggatggggaaacaaacaggtactcggtccgctctttaagtcccctacgtattttccgggagggctgaacggaaccacaatgtttttctagtcttggaaaacataagatctctccaaa

SEQ ID NO: 95015 - DNA, 122 bp, Homo sapiens
gggaggaagccacgcaaaatagcaaaccgggatcctagaggggcggggcccacctcagcgcgcaggcgcaaccaggcccaggtggccgccgcggaagcgaagccacctatacgcgccgcgcc

SEQ ID NO: 95016 - DNA, 122 bp, Homo sapiens
ctgccacggtgtggcccaggcctcgggagcctgtctgtgtgcagttctctgcaccttgtccgctcccttcccttcgtcttatgggcactgcccctccttccatccagggtttgctgtgtttt

SEQ ID NO: 95017 - DNA, 122 bp, Homo sapiens
tcattaaatgtctacctggggaatggggacgcctcaccccgtctcacccagacctctctgcgcggcgcattttgactcccagttcacacgtgtcaaagctgaggcccacacaagcaactgcc

SEQ ID NO: 95018 - DNA, 122 bp, Homo sapiens
ctggccccagcacctgcctcgcggattcgcatgcgccagtcgcgggacacctgtcgcgagcggtgagccttggctcgcgtgtcagtgtatgccaccgttgcctggtgacaagtttctccctc

SEQ ID NO: 95019 - DNA, 122 bp, Homo sapiens
atgctagacactgggctggagcagtgaccaagacaggggaggcctctgccctcccggggacggacattttaaaggggagactgccctgcaccaaggcagagctgggccctgcccctggctgt

SEQ ID NO: 95020 - DNA, 122 bp, Homo sapiens
atgcttttctcggtgagcaatccgggaccagccatcacacactcagtcaagccaggtgcccgggttggagagaaacatggcgtgtgagaagagatggcgtggggagatgcggcatgagggtc

SEQ ID NO: 95021 - DNA, 122 bp, Homo sapiens
ttcttcgtctcgggctcgccctgaggcttcgtgctggaaagtggccgaggctgggaggggcgcgccgctcgtccggacctcagggtgtcgccgttgctgcggggcgggagccggtgcgagtc

SEQ ID NO: 95022 - DNA, 122 bp, Homo sapiens
ggcacaaggaccgcaaggtcaaggcaggtaagaggctaagcacacaacgggtctcccatgcgcgccaggatgcacggagtgggcatctaagcggccagctccttaagccaactttgaaatcc

SEQ ID NO: 95023 - DNA, 122 bp, Homo sapiens
ctaccctcacccatagccctgaaggaatcatagctcacttgatcccggcctgttctccttcgcaaataaaaaccctggttttgtagcaaggaggcctgttgtccttacttcccttcccacag

SEQ ID NO: 95024 - DNA, 122 bp, Homo sapiens
gcctctgcaccgtgggctgtatacttttcaaggatttcaaagctgattcatgaaaaaattcgttctaaaacgccgggttaaatgttttttgtttttttttttccttggtcgatttattatgg

SEQ ID NO: 95025 - DNA, 122 bp, Homo sapiens
gagtgggcgcagagagcgcgcccggggagtgcgtgctgccccggagtccagggaaagggccgctaggtgtccggtgcctttgctgcgagttctctgacaaaattggaggcggcgaagcgcgt

SEQ ID NO: 95026 - DNA, 122 bp, Homo sapiens
cccactctgcccatagtcgccactgacggtccctgcaaggtgaagagtgagaggcagggccgcggtgagcaaggcgaccagaagaaagggattaccaacttggcttcctgctctaggagcca

SEQ ID NO: 95027 - DNA, 122 bp, Homo sapiens
ctaacttcctgtgactgggctttcagatgttgatgttgatgatgtccctgccaggataaccggtccagattggccagctgtgagaataattcaagtgggtttcaggtaaatcactttctgat

SEQ ID NO: 95028 - DNA, 122 bp, Homo sapiens
ggagggaatcacgaagatgaggttcatgacgcggcgggctggggtgaccctgcggaacggcgcaggggacgcgtgggggcctaccttggtctgttcgctcagcttctcacttctcaggtcgc

SEQ ID NO: 95029 - DNA, 122 bp, Homo sapiens
gggtgtgtgactgaatccttcttcccagagcatgtgctgcctttgttaggtctgtcacgtcgtcctctaatacccagcatcctgtctctccctaggaggctccatggagataatgcggcttt

SEQ ID NO: 95030 - DNA, 122 bp, Homo sapiens
ttcacagctggctgttcccctctttcccctcaacttggactcagctcagaacaaggttgccgatgttctgctgcaacaaagatggcattattgaggactgcctctttggggggaaatgtcct

SEQ ID NO: 95031 - DNA, 122 bp, Homo sapiens
acgcggtgaattacttggagcctcagatgccccagttggagtcaccatttgtgaagtcgccgtctggtgactgacgggcagacgcgaggtccgatccgtcacgagggcaggctcaggaaaga

SEQ ID NO: 95032 - DNA, 122 bp, Homo sapiens
ccccaacagccggcagccgcggatggctctgaaatccacacggcttggtgcctccaccttcgtcccccggggcttctcgctgctggggagtcctgactgtactaaaaaaagaaagagagaag

SEQ ID NO: 95033 - DNA, 122 bp, Homo sapiens
atccttccctctgcatccagggcccaagccagaaagaaccacaaaccacaaaacaacaaccggatccgaagagaactgctgtgatttaccaaacccccaattatttttcattgagtttcttt

SEQ ID NO: 95034 - DNA, 122 bp, Homo sapiens
tttggattggtctgtctagccacctcatttgcatgacgtaatataataactggaaggccccgcccctctggtgcatttccccgctccaaccacctcctcaaactcacggcaaagggatgcga

SEQ ID NO: 95035 - DNA, 122 bp, Homo sapiens
tacctggacacctgatccataaaaactgtgagaaaaatctgtcttgttttaaggccactacgtttgtggcaatttgcagcaataaataattaagtacaagtacatgtcacccaaggtcaact

SEQ ID NO: 95036 - DNA, 122 bp, Homo sapiens
cagccaggaggggtgttgcccccccccaaacacactccccaagaccccggtccccgagcacggcgtcctgcctcccaaagactccagtcgaaagcgctcggattcagccttctccccggcgc

SEQ ID NO: 95037 - DNA, 122 bp, Homo sapiens
cggaagacccctggctctataagctgaattatggcagcccagtcaaggtaagccgtgcaccggagaaacttttcaaacgcgttcgtggcgaggggagctgaaggttgcgggggagggcaggg

SEQ ID NO: 95038 - DNA, 122 bp, Homo sapiens
tgtctggtgtgggatgcagttgttccagaccttttctcagcagtcctgccctacccttggcgttcaatgttccctgtgactcatagaacagcctctcttcctcctgttgccctccccaatgt

SEQ ID NO: 95039 - DNA, 122 bp, Homo sapiens
gatgatgacaagaggaatgaggcgcggcgtgtagtagagcacagcgaccaggtttgtaatcgtagctctgttttcacgcacactatgaccttgggcaagtcatcttttctttctgggatttc

SEQ ID NO: 95040 - DNA, 122 bp, Homo sapiens
ggccgctctggagcggttgggagcttggctgtgtcttcagcgaggcacccgaggtcgccccgagtggttggcgggaaatcgggcctggaagacagaagagggaggtatctggttcaaagtac

SEQ ID NO: 95041 - DNA, 122 bp, Homo sapiens
tcccctaactgtagccaaatgtgagctgggtttccttctcttctgagcaagaacaggtcacgagggctgagctttctgtcttcaccttcagacagaaggaacttgaaagaaagaagaacgca

SEQ ID NO: 95042 - DNA, 122 bp, Homo sapiens
ggtggggaggggcggccggagcgcgtcggtgacacccgcgggggggcggggaaggcgcggcggccgcaccccaccctgggaagaaaccggccaggtgtggcctaggcgcccagtgccagcgg

SEQ ID NO: 95043 - DNA, 122 bp, Homo sapiens
gatcagagggcgcagtccaccctcactatctagctgggaagtttttgtcatctgcctgtccgagaggcagctgtgcaaccagtgccatcactcagagccagtgctcaggtgcaccccagact

SEQ ID NO: 95044 - DNA, 122 bp, Homo sapiens
caaacctcacataccaccacccgctctcctgcttctccagcacctgcacctccacgcccgcggggaagctgatctccgagtcctggaccttctggtaggcgctgcatgtcatgtacgaggtg

SEQ ID NO: 95045 - DNA, 122 bp, Homo sapiens
gtcctggggacacttaggtccaggggcgccgccctgggggccttccactgtgggactgggcgccctcgaaatttctcggagcgcgtcgtctgccccgacccgggtcgaggtaaccgcagccg

SEQ ID NO: 95046 - DNA, 122 bp, Homo sapiens
ccttcccgatgccagctgggctcttggactcccctcttcctcaagggtagatgagaggaacgagcacagaggttggctgtgggtcctgggtaccaccttctgagcctcagtttcctcatctg

SEQ ID NO: 95047 - DNA, 122 bp, Homo sapiens
aactaataaaccagagagcttgagcagagtgccccaaattccacagccaggaaggtgcggcgtcaggattccaggccagtcctgcctgcgtccggagctggagcttggaactgccctgatgc

SEQ ID NO: 95048 - DNA, 122 bp, Homo sapiens
actcgggaagccgcgcccccccccaggtgcccaccgcccccagggtacccgggcattccccgaggcctggctcctgggaggagactcagggaaaaaggagctcctagaacctgggcgccggc

SEQ ID NO: 95049 - DNA, 122 bp, Homo sapiens
ggcagcctctgagctgttctccattccttcagtttcgtcgtttccaaaatgctctgtaaacggaaaagtacagttcgtcattttggggctggctttcgtcactcagcctcatttgctggaga

SEQ ID NO: 95050 - DNA, 122 bp, Homo sapiens
ctccccctccccgcgctccgcagctgggaatcacgggactagccttcgtttccttggcaacgcagtacacaagtgctagccctagcagctcgcgatgtgcttcagcagagcaggtgaggagg

SEQ ID NO: 95051 - DNA, 122 bp, Homo sapiens
tggaaacactactcggcacagcaaatgacatcgcaaagtcgatgaaatgaaattgtcaagcgtaagaaaatgcaagccgtgcttcagaacgcgctgctgcccatgtgatgtgcaagtggcat

SEQ ID NO: 95052 - DNA, 122 bp, Homo sapiens
gaagtgaacgcgctgggcccgcgaaggagcgcgtcgcccgccctgaggggggcagtgcagcgcccaccgcgcgccttcgccagtcccctggcaccgttgccctggccaggggccgggagagg

SEQ ID NO: 95053 - DNA, 122 bp, Homo sapiens
ctgccctcgggcaccgtcccctctggccctgccttggtctgggaggggtcgctaagggggcggagggcgctcctagggggccctgcggatctcctggcctcggcccccccgggtggccagag

SEQ ID NO: 95054 - DNA, 122 bp, Homo sapiens
agcgccattaactcttaaggcctccacatttccttcggtataaaagcaggtcattggtcccggaggctgtgccggggctcgtcaaaggctacaaacaaaccggacgggtgggaagcacgttt

SEQ ID NO: 95055 - DNA, 122 bp, Homo sapiens
acgccctttctgcggaggcagcccccagcgaccctctgcccagcttcggcgcctcactcgcgacgctcccaaactgctcaaggcctttcagtcgttcccaactttagaaaatcgccccgtcc

SEQ ID NO: 95056 - DNA, 122 bp, Homo sapiens
caagcctctgtctgtctcccttagatcagtagcccatgatccctttacgaacctcagcctcggctctgcttttattgtttttcactgcatagcgctgcctttgctatgtcctttagttcacc

SEQ ID NO: 95057 - DNA, 122 bp, Homo sapiens
ctcctccaacctgagccacctggaggaggacacgtggatcctgtggggccggatcgccaacgagtgggaggagtggcggcgcaggaaggagaagctgctcaaggtggggggcggccaggcag

SEQ ID NO: 95058 - DNA, 122 bp, Homo sapiens
attgagagtgactggctgtgccgaagcccactgctacctcatatacatgaggcctgagaccgggaatttcagacatggaagttgctggtgacaagagtggcttcagtggagtggcagggacc

SEQ ID NO: 95059 - DNA, 122 bp, Homo sapiens
tcgctctcggggaggccggggctgatctcgcggcgcaggcggcggcggcagaggtggggtcgcgcagcggaggcagctcgagcttcgggatgcgcgctcgcttcttgggctcctcgctcgat

SEQ ID NO: 95060 - DNA, 122 bp, Homo sapiens
gaaacagactcagtcacaaccacacctgtttggaggcctgtgcctgtgatgcagcagaaacgacagtgagggaggtactggaggaggaaggggtcaccagggaaatgcacagataaagacga

SEQ ID NO: 95061 - DNA, 122 bp, Homo sapiens
caggaggtctgccttccacgccggaccctccagcgcagtcccatgccggacacagcgaggcggcacttggcacagaacgttttcctgagaacacgtcacacgctagagcattccagaggccc

SEQ ID NO: 95062 - DNA, 122 bp, Homo sapiens
gtgcgccggcgccgcccgccaggtcttggcactgctggcgcggccgcggcggcgggggcccggctccagatcaccgacccccacgagcgccggccctgcctgcccgctattttggttccatc

SEQ ID NO: 95063 - DNA, 122 bp, Homo sapiens
ccttgcttggcctgcagcacaccaaagacgtcaggcctgcccccgccgaggagcccctgccggatgacaaccaggcaattcagctccagacactcaagtgtcagctacctcaggaccccggc

SEQ ID NO: 95064 - DNA, 122 bp, Homo sapiens
gagaaagacacaggcctctgcctaagctgaggaaaggtcaaaactagcttttcaggaggacggggagcatagataggacagtgttggggcctgaacacatcatggtagaggactcatagtag

SEQ ID NO: 95065 - DNA, 122 bp, Homo sapiens
ggtttccctcagcgtcctgctatccggctgcccgccgcgctccttggtagtgtccgtgggcgcgcaggccttgaagaacctcctcgtggcgggaccccgaggtaactgctgaggcagataat

SEQ ID NO: 95066 - DNA, 122 bp, Homo sapiens
tattggaaagaacagggccagtcatggtgagtatccacttaattacaagccaacctgttccgccattttccctggtggccactacttttttccccaaatttggagagacaccgttatcgaac

SEQ ID NO: 95067 - DNA, 122 bp, Homo sapiens
gcggtcgtcgcagccccgccggcgctcagaccacaattgtgggagccgccatcttgagaccgtcccgcttccccgcccagcgccttagtgcagccgccgctcccgaaacagcctcgacacac

SEQ ID NO: 95068 - DNA, 122 bp, Homo sapiens
gggagagtgaccattgtgggggtggggaaagtggccatgttgggaggggagtgactaccacggagatgaaattaatgtgaaccactgaggcaaaggcatgaggccccctcactttggggtgg

SEQ ID NO: 95069 - DNA, 122 bp, Homo sapiens
gggagcagcacaggcaatacagggctgagaccacagcttcctccaccccttgctttgcttcgctctgctttgctttgccttgctctttttttttttttttttttttttcatataacaattat

SEQ ID NO: 95070 - DNA, 122 bp, Homo sapiens
ggccccacaagtgctgtcttgcaggagagcgccgggagaccgcagggcggaggtgaagaacggagtccagagccctccagagatggcagcgaatcccggccctgcctcttgccagctgtgtg

SEQ ID NO: 95071 - DNA, 122 bp, Homo sapiens
tgacgatcttgaggatgaccctgtggtgaacggggagaggtctggctgtgcgctcacagacgctgtggcaccagggaacaaaggaaggggtcagcgtggaaacacagagagcaagacggatg

SEQ ID NO: 95072 - DNA, 122 bp, Homo sapiens
agcccagtactagggactataaccttttggctaagacactcacagaagaagtaacttcctcggttggggaagaagaagatttagcctaggccagtggttctcaaatttagtgactgtaagct

SEQ ID NO: 95073 - DNA, 122 bp, Homo sapiens
ggagatctttggctgtgacaatctaaagctctttggctatgacagaacaaggaaagttaccgtggttgaactagatgggaagaactacttgcttctcctctgagcgtactgtgacttgctta

SEQ ID NO: 95074 - DNA, 122 bp, Homo sapiens
caggacttcaagtccagcctgggcaacatagcgagagcttacctcaaaaacaaaaccaaccgaacaaaaccccagaggctccaaaaagtcaattacttgcctgggttcctggagctctaagg

SEQ ID NO: 95075 - DNA, 122 bp, Homo sapiens
ctttcccaactgcaggggcctagttagttcaattaactcagctttttgagctgctgaggtcgaagccagcaaggcttgtgccttgattgattctcttgtgctaataatagcatatttagccc

SEQ ID NO: 95076 - DNA, 122 bp, Homo sapiens
ctacacacactgtctctgtgacacatcctttaacgtggcccttccaggcttctgccacaacgtgggctggaatgagacacagaaatattgccactatttccagacaatctttaaggcagctg

SEQ ID NO: 95077 - DNA, 122 bp, Homo sapiens
aggaggctcccctgaggctggcaggagagacctgcagaaactcgtgcgcgccgagcgaggcgggcgccctggggctggggcacgcggccggcgggggccgccagggagcggccgtggcggga

SEQ ID NO: 95078 - DNA, 122 bp, Homo sapiens
gtggtcgatttaacccgttccctattgatagacgctgtgtgggctccagccttttgcagtcgactctgcgatgcataacttcgtgtatagatagcagtctgcagctgcacgtgggggtgtgt

SEQ ID NO: 95079 - DNA, 122 bp, Homo sapiens
actgaggcgggcctcaccccagacagagggcccccaataatccagcgctgcctctgctgccgggcctggaccaccctgcaggggaagacttctcaggctgagtcgccaccacctcaccccgc

SEQ ID NO: 95080 - DNA, 122 bp, Homo sapiens
ggcggcgtcactgcccctacagtaactgtacagtacagccaaagccccgtatgatgctcgcgactcccttcctggtttctccgagggcaagaggggtcctcccttgtcttaaaggtgccgca

SEQ ID NO: 95081 - DNA, 122 bp, Homo sapiens
cccgggcttcttagcaaaaatgcgtgtgcattcgtttctccttgtttatggagaggtttccggtgaatgttagacagcaactaaataattaaaaggtttagagagcgctgtgagcaggagaa

SEQ ID NO: 95082 - DNA, 122 bp, Homo sapiens
gaagggggtggcggccgcagaggccgaggaggctccggtccggccgcctctgcggacccccgcctctgtgtgtgtcacggtctctatggagatctcccgcagaggacagcacgaacagttcc

SEQ ID NO: 95083 - DNA, 122 bp, Homo sapiens
gcagtgttctcaatcctggctccacattagaaatactggaaaagatgttttcaatggccacgtccatccccaaacccaggaattttgacatcatcaatctgggagactggaaatggaatttc

SEQ ID NO: 95084 - DNA, 122 bp, Homo sapiens
cccgaggccactcacctcccccaactacccaggacagaggatgcccagccagccgagctccgggcagtacccgccccccacggtcaacatggggcagtattacaaggtgagtcccagcctcg

SEQ ID NO: 95085 - DNA, 122 bp, Homo sapiens
tcaagttctcagaaatgtcatgcccagttaccttttctgaaatctattccctgccattcccgccactcccaccaatcttctagcctaggtgtattttttatcagtggcaattatcactgata

SEQ ID NO: 95086 - DNA, 122 bp, Homo sapiens
agctgtcgatgtcattgtttggaataactgtttttctccatgttattgttgggattggatcgcagaatagctggtgccataagactgccaacctcagctcaccaggcttgtccttgtcactt

SEQ ID NO: 95087 - DNA, 122 bp, Homo sapiens
ggttttacagtctcatatatacatatccatgtttcagcaccgaggccagctccactcatgcgcggcatatgttcccgcatctggatgtaagcagtatcaggactctggaagccgaacttggg

SEQ ID NO: 95088 - DNA, 122 bp, Homo sapiens
gcacacagggaaggctgcccgatgacgtgcctcgactgtgttacatttactgaaggagagcggcctcctgggcatgccactcaggcacggtgaggctctgtggcaccaccagccgcatggca

SEQ ID NO: 95089 - DNA, 122 bp, Homo sapiens
ccttttcagaacgccgccttatgtcccaatcccgatccgagcctgcgagctgtggccgcacgccctgctgggacttgtagtccactcccgagtcccattcccgatccgcgcagactcacacg

SEQ ID NO: 95090 - DNA, 122 bp, Homo sapiens
aggtgtcggggcctaaagggggtccagttccagtgcggaaggctgggaactaggaagcgtcgcggaccagacagcccgccttcccggtctcccgggtgggggttcggggggcgtggtgcggc

SEQ ID NO: 95091 - DNA, 122 bp, Homo sapiens
gccgaggagggaggttctctgaggagcggctgtgccttcggggagcggagggtgcgcacacgtgtctctgtgtgtctgtgcgtgtccacgtgtgtctgtgcgtggtagcacgtgtacctgtg

SEQ ID NO: 95092 - DNA, 122 bp, Homo sapiens
tatggggcacaggcgcctccttgggttgtctgccctcccgggagccccagggtgcccaggcgggcctcagctgagtccaggcctcggggacagtccgtgcagcccctcctggggctgggggc

SEQ ID NO: 95093 - DNA, 122 bp, Homo sapiens
cccccgacggttggacgtacggactctgcttcgagagtaggtgagcgagcagtgccggggcgccccccatttcagcgcatctcgggggccacctggccgccctctgtctctcccgcccctta

SEQ ID NO: 95094 - DNA, 122 bp, Homo sapiens
gggccctgccccctggtggggtcctgttcctggccttcacttgggcctcacctggcactgcgcctgtagcttccgcacggcacggcccacgatgtaggtctggctcggggacagccccagcg

SEQ ID NO: 95095 - DNA, 122 bp, Homo sapiens
ctgtcctctgaggggtgcagggacgatcacagaggaagatgcttcatttatccgttttcacgttcatgctcatgcacacatttggaggaggcttgggcctgcgttcccagtagtaggtttct

SEQ ID NO: 95096 - DNA, 122 bp, Homo sapiens
agtgcccgttcaggtgacggtttcacgagaagccccatccaatacaactgcacttgtgcccgacatgttggcaaacacataaaaaatacaggaacatggtccacaccaggcagagcaaagcc

SEQ ID NO: 95097 - DNA, 122 bp, Homo sapiens
ctccctcgggatgctatgggaagtggggcatgcaggaagagtggactctccggcagtccacgggcagcccagcccagcagggaagctaacaagcaggctggcccttcaggcagctagagata

SEQ ID NO: 95098 - DNA, 122 bp, Homo sapiens
acctcgtgatccgcctgcctcggcctcccaaagtgttggggttacaggcatgagccaccgcgcctggccaacagcaatgatctttgagcacctatattgccagtctccacggtaagagcttt

SEQ ID NO: 95099 - DNA, 122 bp, Homo sapiens
aggccgaagaatctttttcttaccttgagcactgagggatgagcagcaacttgcccctcccgacgttcccgggggttgccaggcggcagcgtaactttccacgaaaaggcggctctcggatc

SEQ ID NO: 95100 - DNA, 122 bp, Homo sapiens
ttgcattctgggcaggaatagaaatgacactgtccatctatgagcaccatgttggtagcacgaagtgcctctttatcccattattggtggtgttggctttgttaaggaggtatctctggcgt

SEQ ID NO: 95101 - DNA, 122 bp, Homo sapiens
agagttgggtaaggccagacctgggaaccacctaaaaccttcctatggtttgggggatgccgtggggtttgtggctaaaacgcttgcctaagaggtggactccacaggccctggactgggtt

SEQ ID NO: 95102 - DNA, 122 bp, Homo sapiens
agttatccctcccagcctccaaggtccccgttaccgaagaccgccaccatcacgacatagcgcagcacatatgggtaaacaaatggactgagactcaagcaaagaagtaacccgagacgcgc

SEQ ID NO: 95103 - DNA, 122 bp, Homo sapiens
cgctgggggccgcagctgcgagacgcagttccccagcctcagtgcaggcgcgcgggcttacgcgtgggggtgggggagcacacagatactgacaccctaatgcagtccagggcacaggtgga

SEQ ID NO: 95104 - DNA, 122 bp, Homo sapiens
gaggaatgcacacattcgcaagtaggtgttacagactccagttaattgtctcccgtcgcgcgcattggctcagcctgtggttaaagctgctcaggaggctgaggcgggaggatcgcttgagc

SEQ ID NO: 95105 - DNA, 122 bp, Homo sapiens
ggcctctgagaagcagaaggctgaggagaaagaggccaaacctgaatctgggcagaaagccgatgccaatgacagagacaagcctgaacctaaggcaacagttgaggaggaggacgccaaga

SEQ ID NO: 95106 - DNA, 122 bp, Homo sapiens
aactttggtttgagacaagttcagttagaggagccagccggttgcagatgccggagtgggcgtgatgacacggaattgcagcgcgaaaggcctggggtgaggatttggggtgatcatccaca

SEQ ID NO: 95107 - DNA, 122 bp, Homo sapiens
ccggacgggcgctgacctgtagtgggtcggcttctcagtctgcgggggggacccgctcagcgccgctgccgccgctttcgaaaccgacggcattttcagtcaaaacaatgcagcgcgcatgc

SEQ ID NO: 95108 - DNA, 122 bp, Homo sapiens
tcaatgatcagctgcccattatcagtaaaccaaagtgaaaaccactgatactgatccatacgtatacagcaaaatatgattatgaagtgaaagtgaggccatatctagaggaagatcaatgg

SEQ ID NO: 95109 - DNA, 122 bp, Homo sapiens
tgattttggccactaggtggagtctggctctagggtttcgaggccgctggtgttggtgggcggagtccgggtttgccaccgctgcgctccatgagcaggtagcagctgcagcggagctttag

SEQ ID NO: 95110 - DNA, 122 bp, Homo sapiens
tccggcgccccagtggcgcgcgtgctcgccccgcgaccccgttggccgccccgcctcgcgcgcctctgagttaccacgacatcgtgccacacacacacgctcgcggccgcccgggccacaac

SEQ ID NO: 95111 - DNA, 122 bp, Homo sapiens
caaagaaaaattacagacacaaaattcagtggcggcctgggctgggtcgaagagcagcgccgtcagagaagctggttccgcgctaccttcttgctcgcagggatgcacttcaagggtctcag

SEQ ID NO: 95112 - DNA, 122 bp, Homo sapiens
ttgctgccatcttgtggtcaatgtttagaattacccttggggttgatgaatttactaaaccgtgagatgaattaaataacttattagcctagcactgggtaaaaccatggttttgtaggttt

SEQ ID NO: 95113 - DNA, 122 bp, Homo sapiens
cgcccccagctccggcccggggctagtgcgtgttgacgtcatgctgcgtgcgggccggtgcggaatcgctccttcaactccgcggggcagtaggagttagttagcaaagagccgaggccggg

SEQ ID NO: 95114 - DNA, 122 bp, Homo sapiens
ctccaggaacccgcccttcagtgcctggggtcccctaaacaatgtttcagtcctcgggctcggtgggtgcatcctttattggggagcgcgggggctgcccgtgcccctccagtcgctccccg

SEQ ID NO: 95115 - DNA, 122 bp, Homo sapiens
gggactgagccaggatcagaactgactcgttgcaccctgtgtggggacgctgccctcctccgtaggttgccctgggaggctccggccgagcaaaacagttctctgcctctgtccttttggct

SEQ ID NO: 95116 - DNA, 122 bp, Homo sapiens
ttactttcaccccatctctaggattgaatccactattttgtgtagcctgcatttctttctcgcttattttaggaactatttaatacatcctcaagtattttccaaggaagggtgcaaaaggg

SEQ ID NO: 95117 - DNA, 122 bp, Homo sapiens
gatttaacaaaaatagggaaaaaacttctaacagattccagaggggaataaactaggtcacgtccaaaggattagaaacccaaataacttctcaacagaagcactgaaagataaaagacagt

SEQ ID NO: 95118 - DNA, 122 bp, Homo sapiens
gtgcctagcatatagtaagcactatttaagtatttgataaaataaataaacccggccgggcgtggtggctcatgcctgtaatcccagcactttgagaggcagaggcggatgtattgcttgag

SEQ ID NO: 95119 - DNA, 122 bp, Homo sapiens
acgccccttacacgtgtgcctctttcccatagcgcagagtttatcttcttactcgtccagcgttctctgtacctattgtgaattgatctctggacgctgacccaactctagaacttcgctca

SEQ ID NO: 95120 - DNA, 122 bp, Homo sapiens
attagctggtgcatacataatcactcccccaccctcctactcccggagcgggagccacggcggcgggcgcagcgcagccttccaaccctctgaaaaatgaaaccggtttccacccttacctt

SEQ ID NO: 95121 - DNA, 122 bp, Homo sapiens
cccatcctcctgccaacttagttgacacaattttcctttctaaaggctttctcccaataccgttgccattcttaattagggctgggtgccgtcgaagcctccttggagttaaagggctgcta

SEQ ID NO: 95122 - DNA, 122 bp, Homo sapiens
aacaagagtcagagagcccagctggcttcccgcggagagagaacgtgctgttaagatgaccgctccgtccgcccaactccattcccgccctcgggagttcttcctactatttaaaccacagc

SEQ ID NO: 95123 - DNA, 122 bp, Homo sapiens
aggcaggctgggtggactgcagccgttgctctggcctactgtggacccgacaggtactaacgcgctccgtgcacgctctgcttcacccgaaaatggggttgtgggcaggggcagagtgacgt

SEQ ID NO: 95124 - DNA, 122 bp, Homo sapiens
gggacaaactaagggagaagtgccactcatggggctgtggtttttatggcttagacttttcgggagaaactgggcaccttctcgttgacttgaagcctcctattttaagacattgcccattg

SEQ ID NO: 95125 - DNA, 122 bp, Homo sapiens
caggccgccgtggctacggccgcctgcggccgcgcgcccggtcactcagcaaagcgtccacggccatcaactggctcacaaaaaagttcctcctcaagaaggccgaggagtcgggcagcgaa

SEQ ID NO: 95126 - DNA, 122 bp, Homo sapiens
ggtggcttcaggaggaccagtgttgccccctgcctatccctccagtctgaagcatcccaccgacctgcccggtagagcccaggctggccagtcctaccctggtaaaggtgcagcgtgaaccc

SEQ ID NO: 95127 - DNA, 122 bp, Homo sapiens
gaagccacccaacacgcaggaagtgacctcacacgtccccgcttcctctcacgcaggaggcggagctacgctgcgcagccaccgcccgtctgtgtgactacatctcccgaaatgcatttcag

SEQ ID NO: 95128 - DNA, 122 bp, Homo sapiens
tttcttttttttgagacggagtcttgcctcgctttgtcacccaggctaggattaaaggcacgtgccaccacacctggctaatttttatatttctttagtagaaacagggttttaccacgttg

SEQ ID NO: 95129 - DNA, 122 bp, Homo sapiens
cagcgtgatgacatctccctgtgcaaagctgagtaaggtcttgttggagcccgcagtgtgcgggaagatggtcttcactttctgcttcttcatcatgttcagtcccgttgcaaccgaaactg

SEQ ID NO: 95130 - DNA, 122 bp, Homo sapiens
agttgagcccagttccggggaggctgaaggcgggtaagaggtcctgccgcccgaggaagacgcgggagggaggcccgcccctcgcgaatcccgcggctcctggagccctgccgcccgccccc

SEQ ID NO: 95131 - DNA, 122 bp, Homo sapiens
ggaagcccgggaagttgcagggatggagctgcctgagcctaggggaacatagctactgtccgcggtgctgaaagggatctcctgtcgccttcggggcgctgcccatggtgctgacggctgcg

SEQ ID NO: 95132 - DNA, 122 bp, Homo sapiens
aaaaacgttagtatgcggtacccttgggcagaaaaacaaacaagaaaaggttagacaactcgatggtagaccttgagggattagagccagcctttcagggtttaataggttctttctcatgc

SEQ ID NO: 95133 - DNA, 122 bp, Homo sapiens
acaagttaatgcaacaaacaacggcagctgacataggtcggctggcaaccttgcactcagcgttggtgagggcgatgctcaggagtgtgggtgtggaggtgtggcaggagctcccgctgacg

SEQ ID NO: 95134 - DNA, 122 bp, Homo sapiens
ctcgcgcaattctgaacggaggaggagaaagtccagttgctgaagggcagaatttccatgcgcccgcagcttccaagtccagaccacccccgaatgtaagtaggaggcagagatgtgtgcac

SEQ ID NO: 95135 - DNA, 122 bp, Homo sapiens
accaacacaggagcacagccctcgggaaactcagcctagtcaggcagtagagagttgtcccggagagaagtgatcctgcagactcgagaaggggcatgatgatagcacacgtctgttgagca

SEQ ID NO: 95136 - DNA, 122 bp, Homo sapiens
agctttgtaattctcccagtgtagggctgcaggcacctggcgctggagacccggcctggacgaggcagggctcagggcgcggctggaggggctcgcccggcggggcgctggagcgggagaag

SEQ ID NO: 95137 - DNA, 122 bp, Homo sapiens
gacttttctcagttctcctgataggacacagcaccgcctatggagcatctaacaattcctcggccttcgctaagaactgcttctgccacagctgcctgctaaagccaggttctgaccagggc

SEQ ID NO: 95138 - DNA, 122 bp, Homo sapiens
aagtgtctaattgtgagaactggcatgcccccagtctcccgattttgctcaatttggtggcgatgatgtcagccgggggtgtcgttttgcagagatgtgctgtctacccattcttcagtggt

SEQ ID NO: 95139 - DNA, 122 bp, Homo sapiens
cggaccactgggtgagcgcccaggaacgccggacgcgcgccttcacgcccgggtgcctggcggcgttttagaaaagctgtatttgaaaagcaaccgattggggtgaaggcgggggagcggaa

SEQ ID NO: 95140 - DNA, 122 bp, Homo sapiens
cttgacacttttgaagcgctggtcactctgcagaatgtctccccgtttgggttggtctcacgttttctcacgagtagggagttgcgcatcattggagggatgtcacggaagtgctgcgcctc

SEQ ID NO: 95141 - DNA, 122 bp, Homo sapiens
ccataagcaccctataggctagggctgttttcggtaccaacccccagagcaaataaggggcgggggcgggggcggagaggcgagcaccctacggtatcccgagagggtggggagaagagggc

SEQ ID NO: 95142 - DNA, 122 bp, Homo sapiens
gtgttgttttttaataacactttccaaataaaccagagttaagaacagcagttaggaaaccgtttgctgccatttcacttgcaaatcccagaaataaagaacatataacataaaaatagctc

SEQ ID NO: 95143 - DNA, 122 bp, Homo sapiens
ccctctcttctctctcctctctcgtctcctggggcatcccgggtggagggatgtaggggtcgctcctcggtgccaggccgggaagcagctcaggcctcccaagagcttggcgctcagtctgg

SEQ ID NO: 95144 - DNA, 122 bp, Homo sapiens
accgcctctgatttgagccaatcacggctcacttggtgggcagggacttctgcagctcagcgggtgggaggggcctccaccagggtcaccttgacctctagctgacctctgcctgacttctg

SEQ ID NO: 95145 - DNA, 122 bp, Homo sapiens
agcccgcggccaggcctcacagacccgggtctcaggacgtgtccgcctgggctcttttctcgacccaacctcaaatggacccgcacagactctcagaacctgagcagacagtggtcggacaa

SEQ ID NO: 95146 - DNA, 122 bp, Homo sapiens
gccgctcgaagctggaggggccgccggagcctgcgattggctgcttcgggcacatcgtcccgccccgacctgtagctcctcccaggtttccgttgtcaaggacgcgccgtcggttgttgtca

SEQ ID NO: 95147 - DNA, 122 bp, Homo sapiens
gattaacgggcgggtgcgacagctgctgcgccagcgcgaggtcaccgaccacaggctcagcgaagtgcgcaagggtctgcttattaaccagcagagcgtcaagctgcggggctacaggccca

SEQ ID NO: 95148 - DNA, 122 bp, Homo sapiens
gtttgcatccccgttccagacaattccagggctttcgaatcgtgcttcagccttcctgaccgctctcgcctccaaagcccgaaaaatagagtcgctgggagcgaggctgagagacgcacagg

SEQ ID NO: 95149 - DNA, 122 bp, Homo sapiens
ggtatgaggaagagggtcctgtcaggcgcactcttgttgcatcatcagcgtgcacctccacgatgaaacaggtctgggctacaaaagtatggccgcttctgaggcggcggtggtgtcttcgc

SEQ ID NO: 95150 - DNA, 122 bp, Homo sapiens
aatacgtgcttcaacgcggatgaaccgtggaaacaggcatggtcaatacgtgcttcaatgcggacgaaccgtggaaacaggcgtggtcaatacgtgcttcaacgcggacgaaccgtggaaac

SEQ ID NO: 95151 - DNA, 122 bp, Homo sapiens
aagtgacgtgcggaaggggtgcccgggacgaagccatggccctggaggcggcgggagggccgccggaggaaacgctgtcactgtggaaacggtaatgctgtcaggcgacgcgcaggaggcgg

SEQ ID NO: 95152 - DNA, 122 bp, Homo sapiens
gaaccactgatacagaaaaacttacccggggactggcttttcttactctacaacaaaccacgaacacacttccacatctccaaacattctttcctgcacatttaaatggccgtgtaaggctg

SEQ ID NO: 95153 - DNA, 122 bp, Homo sapiens
cactttgttcctgccccgccggcggggcgagccggttctctccccgtctctctccaaacccgggtttctggagctttcagtgtggaaaaacggatgcttcttgcaggaaaagttgggcagcc

SEQ ID NO: 95154 - DNA, 122 bp, Homo sapiens
tccgggaaggggtcgcagactgccggcccagcttagtcctttccctaatcggaaaaggagcgtgctgcctggcccagccagcgcagcctcccaaggattaaacagaaatcgccttcctgaga

SEQ ID NO: 95155 - DNA, 122 bp, Homo sapiens
ggagacctacccctgctcccattgtcctccgcctgccagcttcacagacaggcctgaacgcgcagagagttccttggagtgccctgattttgtccccgagagggcccccaacctccgcatcc

SEQ ID NO: 95156 - DNA, 122 bp, Homo sapiens
ggtagtaggcttgattttatggagtagtaccttgttctgtaactgagaaaaacgtaatagcgcttgtgtttcagtcatcaatagctgcaatctctggagtgccaactatgtgtcagtttctg

SEQ ID NO: 95157 - DNA, 122 bp, Homo sapiens
aaccaggcatctgagattaacagtgtgatactcagcctgtggatttccactctaaaatcccgcgccaccccccaacacagcttggctcaactatttgcaaatcacttctgattcaattttgt

SEQ ID NO: 95158 - DNA, 122 bp, Homo sapiens
ttccaagtcttgaaaatattaccctataattccccgatgaagttttccatgggagaataccgagtaaggaaaccagtcctgggactcagaactgtggacaacagtaaaaccctgaagtctca

SEQ ID NO: 95159 - DNA, 122 bp, Homo sapiens
ggggcctctctaggcgcctgatggggtgaggtgcatctcgctggtttatcgtcctagccccgcccgacgcagagggtcttgacggtttcccgcatcccgaggaaatacgggcgtccgagccg

SEQ ID NO: 95160 - DNA, 122 bp, Homo sapiens
gaggcgcttggttacgggatccagataggaatctttatctgagctgcttgtcagtttgttcgtctgtccctaggtctgtctgctatcagctatgccgctgcccgttgcgctgcagacccgct

SEQ ID NO: 95161 - DNA, 122 bp, Homo sapiens
attcccgggcttctttctcctctgggtaccagctccttactgccctgcagacaagcgtgccgtgcgtgcttgtggccaagggaaggaagaggtaaattccttaaatcccagcaggttggagt

SEQ ID NO: 95162 - DNA, 122 bp, Homo sapiens
tgagccagggcgcgaggtcctgggccttggagcccaggtggcctgggcggtgcggctcctcgcgctgctgcctcaggctctcacctccctctagcggccgccaaggacatcacacacgccga

SEQ ID NO: 95163 - DNA, 122 bp, Homo sapiens
cggggctgctgccacctccggggggcggggctgtgcgtcacttgcactggtccaagttgccgtcaggagtccttgcttggtcggcatccagggacgcctcctcgctgtgccacaggccatag

SEQ ID NO: 95164 - DNA, 122 bp, Homo sapiens
tgcgggctgtgatgagggtggctgggctctttctgcctccgtagccgctgtctcttgggccgcggtgggaactgtcaaccgctgcaagtgtccacgatggcggccgggctcgggccggctcc

SEQ ID NO: 95165 - DNA, 122 bp, Homo sapiens
tcccagagcctgtctctataattaaactcttttttaaattgtcgggttgaaacgtcatttcggggactttccaagggtgagggagccgagaggagggagcgagtcccttaacccttcgctga

SEQ ID NO: 95166 - DNA, 122 bp, Homo sapiens
ggcgggagcgcaaggaaaagagcaccgggggagggtgtgggggaggggtcgcagataaagcggtcactggctcgcctgcccttctgctggggcactcaccccgcccgctgtcgcccatcccg

SEQ ID NO: 95167 - DNA, 122 bp, Homo sapiens
ggcaagaacgatcgcgaccttttcctccagggaaggttgcaagaaaggcgggatctgtaacgtgactaggtggaggcactacggagccatggtgcaggggtggggggccccaggtgagctca

SEQ ID NO: 95168 - DNA, 122 bp, Homo sapiens
ctcagaggacaactccgaccgctcctctgtcaatatcatgtccgcctttgaaagccccttcgggcctaactccaatggaagtcagagcagcaactcatggaaaattgattccctgtctttga

SEQ ID NO: 95169 - DNA, 122 bp, Homo sapiens
aggaccaagtgtagtccctgcagggctgagtctgctcaaggctccccagctttgggcttgcggggtgaccctgctctgctacccagtggcggcttcagccccagggggagccgtggcacagg

SEQ ID NO: 95170 - DNA, 122 bp, Homo sapiens
caaagacaagcacggctgccttgccgtcgctcgtgccgtgctctctaccctccacagtcacggtgccggaccctctcccgataactggacacgtgtctcccacaggacacgcactggcacta

SEQ ID NO: 95171 - DNA, 122 bp, Homo sapiens
ttgatttttgggggaggggaaattcttaaagacagaccttgtttttttagaaatagaaagcgctactttgctcccatgaaagctgttagctctgggtatggtttatagttattgtgatccac

SEQ ID NO: 95172 - DNA, 122 bp, Homo sapiens
tgcttttctagggcatgaccagctggggagcttgaatgaagaggcaggagggaaagtggtcggattggggcgataaaggacctaactctccagtctgctctctgagcctggttagcaaagca

SEQ ID NO: 95173 - DNA, 122 bp, Homo sapiens
attatcagttcaaaccaccagtggtgccactgttgagaaaccccgcactagagattacagcgtatgtacttgtccctggtttctgcgcatgctctgaagtattgccccaaacggcactgctg

SEQ ID NO: 95174 - DNA, 122 bp, Homo sapiens
ccttaggaaaaaaaaatccatgaaggtgaaacataaatattaagctgaaatgtcagccatcgaggactaattaatatataataaatctataacatgagttcccttaacattctcatgctctt

SEQ ID NO: 95175 - DNA, 122 bp, Homo sapiens
ggagaagccaaaattgggccccgcctccctcctgttttccagttttaccttctttccaggcggtatcctttgtgcatgcctactgtacattttcgacctctttccgatggaatgatctaaga

SEQ ID NO: 95176 - DNA, 122 bp, Homo sapiens
tacaagaaatacaagctgggtttgactgaatgacaaaaagaaatctgttgagccaggaagcgtagtaaataccgtgactctctgcaaatgcgcacagcccaaacagctttttccagtctgga

SEQ ID NO: 95177 - DNA, 122 bp, Homo sapiens
agagtggagactgcaccgaggcaagagtccatggatggggccaagagggggcaggagtggcgctgtatccacattcacttcagaagttgaagattccaaagaggagaataagtggggagagg

SEQ ID NO: 95178 - DNA, 122 bp, Homo sapiens
atatacatacatacatacatacacacaaatgaagacaaaaatactacatatcaaaacttacgggatgtagcaaaagcactactaaaagggaattttatagtgataaatgcctacattataaa

SEQ ID NO: 95179 - DNA, 122 bp, Homo sapiens
cagacacacaggcctcggaatgctgcctcaccttgttcacctgggacagcggggtcctcacggctcccgcaggcagccggcccctgctgctgtcttcaaacagcctcccgggggaccgctct

SEQ ID NO: 95180 - DNA, 122 bp, Homo sapiens
gctccggccactttcactgcctccagacggaagggcaaaggcagcagatagaaggggaaacgggaaagcaaagtagaatatttcaagcatgaaaagcttatttgcagcgagccccatctctc

SEQ ID NO: 95181 - DNA, 122 bp, Homo sapiens
gctggactgatggaaaacccaggtgttgctctgggtcacgggatgcgtgtggtgtgggtgcgtccccgcttccaaatagaatttcatattcttccggagcacagagaacccacggggtgctg

SEQ ID NO: 95182 - DNA, 122 bp, Homo sapiens
aagggagggagggaggacacagcggggcgtgagccagcagtccccgcccccttggtcctgcgagtgatggggtcaccgactgtcggcctgcacacgcctcttgaacggtaagcagagatcaa

SEQ ID NO: 95183 - DNA, 122 bp, Homo sapiens
cccgcgcgcttttcgggactcacccgggagatgtcggggcctctcgggaagagtgggctgcgcctgccttccgcggccgcctcgcctcttcgctgcgcgggaccgtggggtttgagagcggc

SEQ ID NO: 95184 - DNA, 122 bp, Homo sapiens
gactcagatgctcacaggcaacctctggtggtggctgcagggaggacagactgtggggtacgggggctggagtcagaagaccagctgagtgatgacggggctggaccagacagaggaggggg

SEQ ID NO: 95185 - DNA, 122 bp, Homo sapiens
ccgtccatgcccatgcccatgcccatgcccatgtactggcgattccaaagcttcattttacgtgaaaatcacaggggaaaagtgcagcttccctggcccctgttaccagggactctgattct

SEQ ID NO: 95186 - DNA, 122 bp, Homo sapiens
agacagtcaccaaagactatgtttccatgtaagaaatattcataataggcaaatccacagcgatggaaagtagattagtggttacctggggctggggagaaacgctaagtgactactactaa

SEQ ID NO: 95187 - DNA, 122 bp, Homo sapiens
agggtgagaaatcaccccaaatcatgggagaacccgacaaattcagagactcaaggccaccgaagagagacaaccagtcctcacaggtatctggggtcccttccaacttgggatatcaagca

SEQ ID NO: 95188 - DNA, 122 bp, Homo sapiens
ggccccatggtcctctgtgccccctttcctgcaggccccgctccccgggtccctcctagacgtctctgtcccaaggagtcgcgtgcacctctcgagaagctcctcacagcgtcgctcccggc

SEQ ID NO: 95189 - DNA, 122 bp, Homo sapiens
tgcctctaaaccctgaagtacagaaggcaagtgggtcaagatcccaggcccagacagtggcggcccggtggcatcgagtgggtgccgtgtatcttgcaggcacagaacctcccggggaagat

SEQ ID NO: 95190 - DNA, 122 bp, Homo sapiens
gaagtctgtggagaaatcaacgtgtgggagaaaggcaagcttgagaggggcaccccagcacgcccttggacccagcatggaggcatgggagaagccatcgcccagaggagaataagggtact

SEQ ID NO: 95191 - DNA, 122 bp, Homo sapiens
gggaaaggacggggagtgttaccggggagcagctgctccattgtgcctcgaggccccgatcgggctaggccgacggcctccctcccttcacctttcctctcctggcggggttcggcggcggg

SEQ ID NO: 95192 - DNA, 122 bp, Homo sapiens
ttctgtgtgtccccggccaccctggcgcccagagcccccacctcgcccccgcccccggcccggcccccgcctccagccgcccgcccacagccaccgaagggaaaccccaccctcagtctcca

SEQ ID NO: 95193 - DNA, 122 bp, Homo sapiens
tattgggaccggaacacacagatctgcaaggcccaggcacagactgaacgagagaacctgcggatcgcgctccgctactacaaccagagcgagggcggtgagtgaccccggcccggggcgca

SEQ ID NO: 95194 - DNA, 122 bp, Homo sapiens
cggcgccgcgcgcgctccgccctcggcctcctccgggcttcggctccccctcctggccgtcgaggctactgcgcccagccaggccacagccacgcgcccacccgccccctggccgtgggttc

SEQ ID NO: 95195 - DNA, 122 bp, Homo sapiens
cagaaagctgactctggatgcaggaaaaaggtcagggttgcatttcccttccttgcttctcgatgggtgattaattttttttgaaatacggacgtcccaaggccaatgagactggtgtcatt

SEQ ID NO: 95196 - DNA, 122 bp, Homo sapiens
gaacactttctaactctggaggagcgtaaaggaacaagacctcactgagaccgcacagttcgcgcctggtcctcctgcgtcatttgcctcctggattcgacacctctgtgttcctgatttcc

SEQ ID NO: 95197 - DNA, 122 bp, Homo sapiens
gtcgggggactgataatgtttaactaagccatagtaactgaaattcatgcagctcggaaccgtgcaaagcaaggaacacacacacacacacacactctctctctctttctctcactcattgt

SEQ ID NO: 95198 - DNA, 122 bp, Homo sapiens
ggggcacacccaccctgtggggcagaggctgtggctgagggctgctggttccctgggggccggcgtccacacccactcacctgccggatgtcctgtagccggtccagcaggggctgttcgtc

SEQ ID NO: 95199 - DNA, 122 bp, Homo sapiens
ttctcccacccggcagtcatggggacgctggatgagcccatttctgaagtgcggaggggccgggcttcttaggctgtgggcggagcctgggcctgggagaggaacagggccctggagcacct

SEQ ID NO: 95200 - DNA, 122 bp, Homo sapiens
caaggaagtcagaggggacgtgaaaagagccacctctcccatcccccgacagatgggacccgcaggggtaggggaagagcggtgtctcccaggccgcgccttcacacttgctggccactgcg

SEQ ID NO: 95201 - DNA, 122 bp, Homo sapiens
cgacctcgtgatccgccggcctcggcctcccaaagtgctgggattacaggcgtgagccaccgtgcccggccatgttgagtttctgatatgcatttaggccatgttgagtttttgatatgcat

SEQ ID NO: 95202 - DNA, 122 bp, Homo sapiens
ggacgcgggagggggcgtgggaggcggaagtcccaggagagcctctggggactccagggccgcgggagcggttgtgggtgcggggtcgggatttgcatttcccgcgctgggccggcggacgc

SEQ ID NO: 95203 - DNA, 122 bp, Homo sapiens
attttatccacaggaaacagagactcctgccctcaggttaaatgactggcctcattcacccgccctgttggtagccaaagcaggacttgaaccctagtctattccactgggaatctcacggt

SEQ ID NO: 95204 - DNA, 122 bp, Homo sapiens
ggctttgtaaggcctcctgttggcatcccaggtcagcactgccatgtgttgataggcagccgggaagggctaactgccaggacttggcctcccggagtcactagctgaggcaccctggcttg

SEQ ID NO: 95205 - DNA, 122 bp, Homo sapiens
cgccctcagtgatggctgtttgttccttcttgccgtgtgggttgcagttagtacacctttcggaaagagccataatcggcttggagcagcttgatgaaagtcagtctcacggttctcaacac

SEQ ID NO: 95206 - DNA, 122 bp, Homo sapiens
ctcacggtgactaaaatcttctgtaattccttctaaaatgttttgccgctttgctgtccacgtttccacccttagtctctgaggggcctagtgtgtgtatggtgggaagcggggtcagcccc

SEQ ID NO: 95207 - DNA, 122 bp, Homo sapiens
gttctcggaaatcctcgcgagcagtacattctccggctgctgcgggtctctcagggccagcgaaggtcaggggtacccgaaggcgcttctaacctaacggctgggtacccgcgcgcagccag

SEQ ID NO: 95208 - DNA, 122 bp, Homo sapiens
gggggtctgcagattccaactcctagatctgcagaattctgggagcccccatgtgggtcccggaactcctgcgtctgggggagccgggactacaatgctttcagcccttccttccatccgtc

SEQ ID NO: 95209 - DNA, 122 bp, Homo sapiens
cccgcggctttttacccgccgcggcttttcgcccccccgccaccgcggcttttcaccagccgcagctttttgtcccccgccgccgcggctttttgcccgctgcggctttttggcccccccac

SEQ ID NO: 95210 - DNA, 122 bp, Homo sapiens
ttgtcccgccctcaccggctgggccaccatccagctgctgccgcacctgctgccaggcttcggacacaaagcggacattctccttgtgggccagtgtgtaggtctcctgggtcccctggagg

SEQ ID NO: 95211 - DNA, 122 bp, Homo sapiens
ggagagcattgtctggcggccaccgaagcaggatttgcattcgggggtctgcctaacacacgttacatcacgtagggcacttatctctgagcctgacaataattatcgggaagaatatactc

SEQ ID NO: 95212 - DNA, 122 bp, Homo sapiens
cgacttacttattccctgatgtatccactgcctgaatatagaaatagcgggcgggaaggacgacgtctgcttttagcccgggtccccatatttcgctcttctccgggctcagctgcctttct

SEQ ID NO: 95213 - DNA, 122 bp, Homo sapiens
gggggtgacaggaagcactgaatcacgacagagaagggaaagaagcccgcccgccacttccggtgttcactgagcaggtcggtggccagcgctgccttcgcatcagaaccccattttaaaac

SEQ ID NO: 95214 - DNA, 122 bp, Homo sapiens
caggatattttgtcatcgtgtgcccatggagagcaaactgctgatggagacactgcaattcggccttttcttgtcatcattcctcagtagctggagggagcagtcttctgggaaaggctgtg

SEQ ID NO: 95215 - DNA, 122 bp, Homo sapiens
gacccaaggggtcccagagtcgccgccatctttcccaccaacgacccttcatcaaaagcccgccccgtcgcccaacccattggcccgaagagccatctgccctgcgtcctattggctttcgt

SEQ ID NO: 95216 - DNA, 122 bp, Homo sapiens
ttctgggagtggggtagggggtgcgatcaatagtgaaataattggaatcaagggcttcttcgagacttattctggaaacatctgaaagcaagattggattggaggccaaaagaagggtctaa

SEQ ID NO: 95217 - DNA, 122 bp, Homo sapiens
aaaggaaatcagaaaaaaacaggagagacaggcggcagtgcacgggggcggggcccgtgccgttgtccggccccaccggctggccgcaagagcagaactcaggaaagaaaaaggaaagtaaa

SEQ ID NO: 95218 - DNA, 122 bp, Homo sapiens
ggaaaggacagcggcggcagcagctcaatgagtgcctacagcagaaagcctgaacgagctcggtcgtaggcgggaagttcccgggggggctgcccagtgcagccgcaatgctgccgcgagct

SEQ ID NO: 95219 - DNA, 122 bp, Homo sapiens
caacccacccacaaagcgggtacagtagcttaggagaaactccaaaacagcaaccgggcacgcgctccaatgctgtggtaccgcagcactgcgtggcacacagagcccactgcacaggagga

SEQ ID NO: 95220 - DNA, 122 bp, Homo sapiens
ggccggcccggcaggcataggatcgaaaccctggagccttcccatgttctcctggccgcacgagaggagctcaccctggccccatcatgtgaagcagccgcccccaaagttcctggacgggg

SEQ ID NO: 95221 - DNA, 122 bp, Homo sapiens
tgtgcttttccaaaactggccatgttggtactgtttctttccttttacatggcaaaagtccgctgctaacctcataaaacctccactgcataaatatccactagtgaagaatgactggctgt

SEQ ID NO: 95222 - DNA, 122 bp, Homo sapiens
agccacttcagactcgctctgcttttcaactctatccagttaggcagttcctgactcaggcgtgatgggtcctgcttcactggatctgtccaaggcaaagcagaggtattttgctgtgattc

SEQ ID NO: 95223 - DNA, 122 bp, Homo sapiens
tggcttcccatagcttaggaccgacttcgggcggctcgccctctccacggccacagagctcggaggagtgcccaagaggcgcctctgtccaggatacactggaggcccctgtgcccaagctc

SEQ ID NO: 95224 - DNA, 122 bp, Homo sapiens
gacggcaaaggtctttgctttcctaggccacctctggtgtgaactttttaggatcatgtgcgtgcatcttctacactcactctagggatgcctcttgcatccatggtaaagatttattctaa

SEQ ID NO: 95225 - DNA, 122 bp, Homo sapiens
ttgtggaggctgaggtgggaagatcccttgagctcataaatacaaggctgcattgagctacgatcccaccactgggctccagcccaggccagagtgaggtcttgactcaaaaaaatacattg

SEQ ID NO: 95226 - DNA, 122 bp, Homo sapiens
tggctcagactctaaagaatagatttactttctcatctcagtgaggacggtggggaggctcgtgaccaggaacttcgggaagaggtcctacctgtgtggctggagaagactgtggggagtgg

SEQ ID NO: 95227 - DNA, 122 bp, Homo sapiens
tcaagggccagaacagggtaacagggaggagagctgcgaagggagagagaaatcaaatatcgccctctagaggagagagagcagtccacccttccagagaggtacacagtctgagtgggata

SEQ ID NO: 95228 - DNA, 122 bp, Homo sapiens
ctaatgacgcccctcgcggcatcttcccgtcctccctgtgcccgagtggagcgctctccgcgccccagctaccctggctgcagccacgccgcgcccgaggtttccccctccttcacgcgcgg

SEQ ID NO: 95229 - DNA, 122 bp, Homo sapiens
atgtgttcttgctatgttgccagaactcctgggctccagtgatcctcccgcctcaaagtgcggggattataggcccgagctactgcaccagaccagttgtttttatattgattagattatat

SEQ ID NO: 95230 - DNA, 122 bp, Homo sapiens
tattttagtaaaaccaatgagaacatttagagtccaatccatggttgtcccgttgtatgacgatgtggccatgatcatgggagagattcatgattgatggtgacaaagattctttgcttgct

SEQ ID NO: 95231 - DNA, 122 bp, Homo sapiens
ctcacacctgcgctcagggacacagatgtccaaggtcaggcccagatgtttgccccaccccgcccgcgggcattttctccccagcaggagggtgagggagggggtggcacggatgccctcat

SEQ ID NO: 95232 - DNA, 122 bp, Homo sapiens
ttcagtggccagaacttaattatatcgccatgcttagctgcaggggaagctgaaaaaaggcggtcttttacataagtgcgttggtgtcccaattaaaattaagattttgtaactaaacaaac

SEQ ID NO: 95233 - DNA, 122 bp, Homo sapiens
cttcagagaataaagcacaaagctggggaagactctttctgggtcttgtccaaggacccccgaggagacacacaaatattctcctgtttctgtccttggtcagtcccttagagtagcagttc

SEQ ID NO: 95234 - DNA, 122 bp, Homo sapiens
accctgaccacagttgatgtggcccaccaggcccagcagctggcacccatagctgcccgtcgtgtttgctgtgagcaggcaggccctcctgcaggccttccactccatccaacagccaaagt

SEQ ID NO: 95235 - DNA, 122 bp, Homo sapiens
cctttgggaggccccactccaacacctcaggctgtcctctgggaagagtgacccaagggccgatatccactaggccctccatgagattggcagcttccagcatcttagggtagccccagaaa

SEQ ID NO: 95236 - DNA, 122 bp, Homo sapiens
tttgaaaaaccaataacttatcattgccacatttttagtgcactttttagaagtaaaatacgctcgaaaatggtctaaattatgcaaacttcccttctagtattacatttaaagatacttga

SEQ ID NO: 95237 - DNA, 122 bp, Homo sapiens
atgccacactcacggactaggatgggcatttcatactaagcctttttgggatttgggggccgtcgtatgagattgactgaagcggcggtattcgtcttcctgctacctgtgggaacgttccc

SEQ ID NO: 95238 - DNA, 122 bp, Homo sapiens
aagagctaaggtctgcaacagcttttgatctcccagtcccacacacaaccccgctcacaccgtggcggttccggaatccgcatctcagctttgtttaggaactgcccaatatgttaattttc

SEQ ID NO: 95239 - DNA, 122 bp, Homo sapiens
tattgaaatgaaagcctgtgaataaaccaccaaggtcccctgagaagagatcaatttcgccgtactatatttaacacaggcatacatcatcacagcttaaaatgttaattccctaatatagt

SEQ ID NO: 95240 - DNA, 122 bp, Homo sapiens
aacagaagtattcaacaggccgggcgcggtggctcatgactgtaatctcaacactttaggcggaggtgagcggatcactaggtcaagagatcgataccatcctggccaacctggtgaaaccc

SEQ ID NO: 95241 - DNA, 122 bp, Homo sapiens
cagggaagggaatggtgatgttctttcatatttagtggggaacttggccaactaccagatcgttgccccctggaaaaggctgaaacctgaactaagataaagagacacatagctttgcagct

SEQ ID NO: 95242 - DNA, 122 bp, Homo sapiens
ttcagtggccatgcctgggggcaaaggcttcccggtggccattggagaccccctcttccacggccccggcctcctcggcagcagcatccagaccttcgagctcaagggcttcctcttcaaag

SEQ ID NO: 95243 - DNA, 122 bp, Homo sapiens
ggcttgagcaatcctcccacctcagcctcccaaagtgctgggattataggtgtgagccaccgcaccctggcccctcatgcctagagcactgactgacacatagcaatcactcaagagcatgt

SEQ ID NO: 95244 - DNA, 122 bp, Homo sapiens
ctcagtcttcagcccgacatcatgggggcgccaaagcacaggggctcaaaatggtgaggccggggaaccgggcgctcccatctctgtctacgtagatacctagtcaaaccgaagggggaagc

SEQ ID NO: 95245 - DNA, 122 bp, Homo sapiens
gcagcatggggaaaggacgcgcgggccgagttggcaccacaggtaaacaggctggcgaggcgcaggacgctgtcgccgccgcggccacccagcgatttccaggcacgcaactccgcctccag

SEQ ID NO: 95246 - DNA, 122 bp, Homo sapiens
gcaggggtggcggatgactcaggcctggggccgggagccctgtttccaaaggcaccacctcgcgcctctttggaagtggcgcgctgttggggcgctcccgctgttgcagaggcctggtttgc

SEQ ID NO: 95247 - DNA, 122 bp, Homo sapiens
cagatgagggaataaacgggaaattgacctactcttttcgcaatgaagaagaaaaaatttcggagactttccaacttgattccaacctgggggaaatctcaactctacaatcactggactat

SEQ ID NO: 95248 - DNA, 122 bp, Homo sapiens
ctggagtgtcgagtgggcacttgagccactgcacgtgaggggcttggctggtggcccctgcgcagccaaaagctaccactgtcctgtttctgaagtgcttgctgccaggcagcccaccctgt

SEQ ID NO: 95249 - DNA, 122 bp, Homo sapiens
caccacgcctcctccccctcaccattatcctggagggcatcagcagaaaggaaacactgacgtctcaatcccgaacctaaataggctgccctggaactcactaccctgtggttgctctacca

SEQ ID NO: 95250 - DNA, 122 bp, Homo sapiens
ccccgcacttctacctccaggatattccccaacccggtcggctcacggtcctcctgctgccgccccaccccatgcccaccctgggagcacccgagatcaatttacccagcagccgctgagtg

SEQ ID NO: 95251 - DNA, 122 bp, Homo sapiens
ttgcagtccggccgcgcctcccgggccccgcgttagggccgccgctgcctccctcgccgccgccgctgccgtaagtcgccccagagcccccgccctagcgctgcttcctgccctccgggttt

SEQ ID NO: 95252 - DNA, 122 bp, Homo sapiens
gagtgctgctaaccttgaaattatcagacacttaggagttattagtgctaaaaaggggaccgtgcaaggcagcagagttacatggttcttcaaatcatgtctgaacctattcttggaatctt

SEQ ID NO: 95253 - DNA, 122 bp, Homo sapiens
ggccgagccgggcgctgagaggcgctggcccccgcgctgtggttccccagcaccaaaccccgctaagttaactacctgtgtctacgaggaagggaagttctggagaagcagcagcaagcctt

SEQ ID NO: 95254 - DNA, 122 bp, Homo sapiens
gggtaagcacactaggtgcatctatcagagcatcatagaaaggacatgaaccatggaccacgtgcacatcaaaatacataagcaaatggtcccaatcccatcaatatgatgttaaagagaga

SEQ ID NO: 95255 - DNA, 122 bp, Homo sapiens
gtgagtctttgctcagcatcgtgcgcctggggcccgtcctcagcgtgtgtgtccgcagcgcgtgtgtctgcacctccttttggttggtgagttgtgtgcactgttctgtggctatacaattt

SEQ ID NO: 95256 - DNA, 122 bp, Homo sapiens
gttctcatgaggatgtcactctgtgaaatgagatgcagaatcccacgaaaactgcagactcgaagagctcaatccttcctacccagttttcagttctgctctagtttgcttacatctgtttg

SEQ ID NO: 95257 - DNA, 122 bp, Homo sapiens
aaatgtgcaactctcttagtttttggaaaccaacaaagcctgaatttgcaagtgtggagccgtaacatgctacacttcagttgagtctcactttagtcacatgtttagagagatccaagcca

SEQ ID NO: 95258 - DNA, 122 bp, Homo sapiens
ctccgcgtcttctcttttactatcccacgctctcctttcctttctccgggaactttatcccgttcccctgccggttcccgtgaccccggaaatcccgctcctgccgcgaggcgccctccgct

SEQ ID NO: 95259 - DNA, 122 bp, Homo sapiens
cggggtgctgcgcatgcgcactgggtgtgccccgcccacccggccggccctgcagtcctgcgcctagcggtccagtccagcctcaggtctatgacacagcaaagggcgattccggagccgaa

SEQ ID NO: 95260 - DNA, 122 bp, Homo sapiens
ggtgaattcggagcaaaacaaccggataaaggaaacgggcccgaagggaagcgggagctgcgggccttggctgtgagcttggccaggctatttcctgctgcctccggaggggtgaccacggc

SEQ ID NO: 95261 - DNA, 122 bp, Homo sapiens
ctgggagctgtcctccgcacaggcacttaattgtctgataccagcgcaggggaatagccgcgtcaggactgttcacccacaccccgtggagaacagtgttatcaagtagaatacggggttga

SEQ ID NO: 95262 - DNA, 122 bp, Homo sapiens
tcccaagggccagagacacagagaggacctcccgaatttctagaggggccgctacggccccgcactacttttccgcgggggcggggctatgacgcacttccgggtgcgcggtcccgaggtac

SEQ ID NO: 95263 - DNA, 122 bp, Homo sapiens
tgaaaacccctagcctgcctatactatgcataggtgtgagctcccaatttatactacccacgtgctgagggaatcctaatgtcaagaaaaaacacaaaaaacctgtttcaaagtggtgaatc

SEQ ID NO: 95264 - DNA, 122 bp, Homo sapiens
agaagccctgtggaagcagagtcatgagctgtgaatggggacgtggcggccacacggccgcgcccacgccacccgcagtacggggctggggctggggctggggctggagcccgccgtcccaa

SEQ ID NO: 95265 - DNA, 122 bp, Homo sapiens
gtcctgcggggggatgatgtacatgcaccagaggccccagttgtagccatgggcggcgttcgcatactgctgcacctcaaacgtgctgtacttgatgttgtcgatggctggcagcacgatgc

SEQ ID NO: 95266 - DNA, 122 bp, Homo sapiens
ttcaaaccttggagcctgcagtatgatggggcatctgagcccctttgtccagggctgttccgaggcaggctttcctcctctctgcaggggagaggctccctcacacaagaggaggattacac

SEQ ID NO: 95267 - DNA, 122 bp, Homo sapiens
gaagtctagagatccagctcttcactgctcagagattattcagttgtctctctggtcaaccgtattgtgagatcttgatccttctgttgttatagcatcacagtgctcatttgacaagaatg

SEQ ID NO: 95268 - DNA, 122 bp, Homo sapiens
agtctgaggcacagggcgcggtccgcgagtgggagcggctgcttgtgggcagggtggacgcggggccacgtcttggccggcgttttgcggggtcttcctgttctgaacgcgcgtaacttttg

SEQ ID NO: 95269 - DNA, 122 bp, Homo sapiens
ttcaggcctttgctgctctgagccctgaaggccacagggttgggcagggaaaaagcatctcggatagaggtcctaatctatctagttgttggatattgaaatcttgaaaattctgtagtgct

SEQ ID NO: 95270 - DNA, 122 bp, Homo sapiens
gaggacggtgccagctccacgcttggaggcggtgagtgccagagcaaccctggcagaaaacgcaaaggcagtgagacagccatcactggctgtcggcagcaggcagacgatgatggcttccg

SEQ ID NO: 95271 - DNA, 122 bp, Homo sapiens
cgggctccggaggtccctctgccgcccctaacccctgcggcgcccagtgccgcgcagagccgcattcgccctcctgcaggggtgggcatttcctaagtcctctccagccccgtgtgcgtcgg

SEQ ID NO: 95272 - DNA, 122 bp, Homo sapiens
aaagtggcttccagcagaggacacttgggagggacacagccacacccaggacccaaggcccgggtgagatccggaggctgtaggaacgctaaggggcggtgctggtggtccaaggacgtccc

SEQ ID NO: 95273 - DNA, 122 bp, Homo sapiens
ccttcccccaagcactaggcagtgaagttagacttctggattccacctccacgctcaccgcgcggcactatgcaatcttcggttagttaccaggtctaagttaggcttctggattccaactc

SEQ ID NO: 95274 - DNA, 122 bp, Homo sapiens
ctcaacacatgtttgctgaaggagtgaacataatggagaagacggcccgctgacagtacccgaaagcctttatttgaatggcacattccctaaggctccctgattcgtgcatctctgctcct

SEQ ID NO: 95275 - DNA, 122 bp, Homo sapiens
cttataatgatattctccttttccacaggcatttcctattcaaaacaggaacaggtacaacgccactgttcagtactgcaaccccaggatacacaatggcatctggctctgtttattcacca

SEQ ID NO: 95276 - DNA, 122 bp, Homo sapiens
cccctgaaagggtagttgggcgaaccagctctcacggtgtcacgaccggctttatttcctcgtctttagagtgtgcctgttgactcctcacctactggggggaagaagcggctttagctgct

SEQ ID NO: 95277 - DNA, 122 bp, Homo sapiens
taaagtcgtgaatctgttacccaatggagaatgacaataagccaacaacaagagtagaggcgagaaatggagagaggcccagtccacatgagtcctgggttaagctttatctgaagtctttt

SEQ ID NO: 95278 - DNA, 122 bp, Homo sapiens
ctctcttccttgcatctccaccgtgctcaggggaaacacctctcgtctatgagcctccaccgtgctcaggggaaacacctctcatctgtgagcctccaccatgctcaggggaaacacctctc

SEQ ID NO: 95279 - DNA, 122 bp, Homo sapiens
gatggtgttgggcatttccttgttaataaactaccagggtctgacttcttcctcttcctccgcctcctccatggtgctaagggtcagacctgcaagccctccctgtttctcatttcctgcag

SEQ ID NO: 95280 - DNA, 122 bp, Homo sapiens
cttccggccctcggcccttcccacagcggggcgcccccggcccgcgcccggcccccgagccgctcgctcccgggctctcaccgctcgaagagcagcctcacgaagaagatgcccgccgccag

SEQ ID NO: 95281 - DNA, 122 bp, Homo sapiens
gcttgctcctgcaaccagtatctccttggaattcatccaaagcccccatggacgcatggacgcagggcgacaataaactgtattttcgtttctaactctatttagggccaagagaagaaagc

SEQ ID NO: 95282 - DNA, 122 bp, Homo sapiens
agacacatacaatcagaatgttcatgatatgactcccccttttccctgttaaaagaaaaacgttagacaacgttaacagtttgtttacacataaacaacaaccaaaaaaaaaaaaaaagaaa

SEQ ID NO: 95283 - DNA, 122 bp, Homo sapiens
aggctcagctgaggcgagtgcgcggccagggctgcagctggcgctggctggcacttgcgccggccattgaggagcttctgggcgaccctgcactcgtgcctaccaggcgccagccggtaggt

SEQ ID NO: 95284 - DNA, 122 bp, Homo sapiens
ctgttaatacattcacatccaaaatatctccagccacgaaatcctagtttagaggttgcccgtccttgttgaagaaacatttctacacaaatacctgttgcctataccagatggccatacca

SEQ ID NO: 95285 - DNA, 122 bp, Homo sapiens
tattttcaaattgcctttatggacagtaccctaacagtggtcgcttctcccccctactcccgcgaatgacgtcatcgcctcgcggccccgtttcgccattgtatcctcaatgtgtaaactta

SEQ ID NO: 95286 - DNA, 122 bp, Homo sapiens
gtgtgagccactgtgcctggccacaatttgtattaatgtatacagacttgggtctcactacgtggcctggctggtctcaaacccttggcctcaagtgatcctcctgcctcagcctcctaaag

SEQ ID NO: 95287 - DNA, 122 bp, Homo sapiens
ccttcttcatggcctgcaggtggcgcaggttggcaccgtgcgcctgatgtccgggcactgcgcgcctccagagcgtgaggccgatgacgctgtaggctacaaacatcaccgcgagcggcagg

SEQ ID NO: 95288 - DNA, 122 bp, Homo sapiens
ttggcttacactgaaaatcactctgtgagactttctgtaagtttctcttgtgtgttttcccgcaggctcattttggaaaatacctcaagaagcccaaaggttgaagtctccatagtggaagt

SEQ ID NO: 95289 - DNA, 122 bp, Homo sapiens
catctgcaatctcacgctaaactaactcacagcagaaagaaacaaacgaccctagcagggcgccaccgctgctgaagggcaggtcctctatcgcacccaagaaaacccgacacacgtgtgcg

SEQ ID NO: 95290 - DNA, 122 bp, Homo sapiens
gtgcctcgcacatattatgcaaacccagctgtagttaggccacatgcccaaattcctcagcggcaatacctgccaaatagccacccacccactgtggtacgtcgcccaaacctgcatccatc

SEQ ID NO: 95291 - DNA, 122 bp, Homo sapiens
aataggtttttaaagagaagttttaggttctcagtaaaattgagagaaaggtatagataacgtagttttggggggaaataaaattgccagtgggatatattttaaaggaaacctgatattat

SEQ ID NO: 95292 - DNA, 122 bp, Homo sapiens
gcgggggagcggacgctgcgggacgagaaccagagggcccggggcagcccttctcccccgcgcgaaccccaatcttttactaaaagcgcacggttgtccggaaccgccgcgccggaagccgc

SEQ ID NO: 95293 - DNA, 122 bp, Homo sapiens
gtctccagaagacccagagtctctttccagtttcccccttcatctggtacatgtaaccagcgcagcttttatcatgctgttctgtaattgtaggtgtttatatctttatccctaccagaatg

SEQ ID NO: 95294 - DNA, 122 bp, Homo sapiens
gggtgacaaggacagaatctgtcttgtgaaacaaccagaagaaaattcccctaagaaagccgtctagcggggcagtggacacaacactattctatatcagacaattaaatgtgggggatgaa

SEQ ID NO: 95295 - DNA, 122 bp, Homo sapiens
tgccgcgcgcgccctccagtgcccggttcccgcttctgcacggtcctcgctgggcaagggcgtcccaagaaaggaggaaaggaagaactccatacattgtcattattgtgaactgatgaaca

SEQ ID NO: 95296 - DNA, 122 bp, Homo sapiens
ctggcgccggacctaaggggagacaaaacaggagacaggtcaggtcgaggcctctggagtcgggtcgttccccagtgactccagggcagcgcaccccgcgaatgcccacttcggcgatactc

SEQ ID NO: 95297 - DNA, 122 bp, Homo sapiens
tgctgtggttaggacgctgttcacgcagctgcagcgcagagcacgggggatgctggctcacgatgccccagtgatgccatggttaggatgctgctcaagcagctgcagcgcagggccagtgt

SEQ ID NO: 95298 - DNA, 122 bp, Homo sapiens
cttccttagagtgctaagatccaaagacctcatggcctttgagaggaacgtgtgagatcacgtgcatgacaggcttaacgcagcgccacaccccgcaagcaaaacctcaccaacacagtccc

SEQ ID NO: 95299 - DNA, 122 bp, Homo sapiens
ctctcccacctcggccatccttttctctccagctgcagggtgtatggctcgggtgcctcccgtgctgtggccgccgtcactgctgctgcgagcacattccacccagaggaccgaacgccgcc

SEQ ID NO: 95300 - DNA, 122 bp, Homo sapiens
ctacaggaatgcacgtccttgaatgagatggacgatggactaatgtggcacagctgtcgacgtgagggctcaggaaagggctgggttctcatagcccagggacatggtttgtggccctcaca

SEQ ID NO: 95301 - DNA, 122 bp, Homo sapiens
ttcacgcagaaccgaagattcattttggacagcccttccccagtaccactcccaccccgacgttggtcccaatcggaacctatcctacacaaggctgaaaaaaagaggggagcgaccggaag

SEQ ID NO: 95302 - DNA, 122 bp, Homo sapiens
gaattctcttaatatgcaggaatgttcaggaagagggtactgagcagctcctttccatgtcggccgagttcaaacaaggtttaagtttaagcaaggaaatgttattagatatagtcctcaag

SEQ ID NO: 95303 - DNA, 122 bp, Homo sapiens
cggaggtcgcaccagggcgtgaggaggaggaggaagggcatgagccgagcttgaggaatccgtgctccaaactctacactcaaggtgggaatgggcgcaccctgtgctccagccaggcttga

SEQ ID NO: 95304 - DNA, 122 bp, Homo sapiens
aactccccacattcctgtggttctaaggttatcacacaggtgccaagtcacacacttaaacgccagttcacaaagactaattaatacctttgattaagtggctacattgagtttatagtcag

SEQ ID NO: 95305 - DNA, 122 bp, Homo sapiens
tgtagaggctggacatccgatccagcgagacacgctgtagtggttaaagacgtccagtaacggtcacctctagtcaagcgccttaaggaccagcttattctgaattctttggaattcaggtt

SEQ ID NO: 95306 - DNA, 122 bp, Homo sapiens
atttttctgctggacaatgttccctctagggttgtttcccggcttaggaggcggtggttgcggctgctgctcctacggatattgcgcaagactggggcgttggaaaccctgtaggtctgggg

SEQ ID NO: 95307 - DNA, 122 bp, Homo sapiens
cgccagaagggttctctgcaggacacagatcaagtaccacagtcttagggggagaccagacgcgggatctctgcacacctccccaaaggacaatggcaggaggaaaaggagaaagagacaga

SEQ ID NO: 95308 - DNA, 122 bp, Homo sapiens
gatagaacagcgactacaggaagagcattgaagattttaatgcatgaattatgcatgcagcgctcattctttagtctccgaacagaatgacagggtttgtgaagtcgcctcagatagtttct

SEQ ID NO: 95309 - DNA, 122 bp, Homo sapiens
cttgagttgtgattcatgccgggggtcctgaaagcatgaagcagggccactgagcttacccggggcttccctggggagcagctgtcatgagttgagtcctcaggaaccagctggagtcagcc

SEQ ID NO: 95310 - DNA, 122 bp, Homo sapiens
gaagctagagaaattggagaccctcttgaggccacagttaaagctgcactgggaagacttcgatgtgttcacaaagggggagaacgtcagtccacggtgaggctcgctgcgcactgtgccgc

SEQ ID NO: 95311 - DNA, 122 bp, Homo sapiens
tctatcaaagtgtttgcaagtaaacagtcccagtgcacacccagctgctcagtgccacctcgtgcacccagggccacttcagccttgatcacaggcctgcacaggttccaggggaggagaca

SEQ ID NO: 95312 - DNA, 122 bp, Homo sapiens
actcagcggccgcggtggctccgggccccgcccgacacgcacttcagggcggccccgccccgcccgcgtcaggctggccaggcttcagtcacaacacggtggggctccctggctgcgcccgg

SEQ ID NO: 95313 - DNA, 122 bp, Homo sapiens
tcaagagattttttccatggggaagttctttttacaaagcattgatttctcggcaccccgcggggcgtgcaactggcagggcctctggtgggctttctgccgggtggagctgcgggggctca

SEQ ID NO: 95314 - DNA, 122 bp, Homo sapiens
gagaaaattcgcctgagttcagtgtccacgtgacccaagctctgaatgcggtaacgtgcacggagagataaggatgtcaccatgagcaagcctcccagacagcatcaaggagcaaccccaag

SEQ ID NO: 95315 - DNA, 122 bp, Homo sapiens
ggcgccgcctcaatgcctcctgggagttgtagtttagaagggagagcggaacttagaacccgggttcccctcgggtgatcccgccccctcgactccccagccaatcagcaacattagtctgg

SEQ ID NO: 95316 - DNA, 122 bp, Homo sapiens
gccaagaagattacatcagcaggaacagaattatgtagacctgtttccatttgttgccggcgttggtaaggcctggactctcgccacaggaattctcattttctgctgggctcctgtccttg

SEQ ID NO: 95317 - DNA, 122 bp, Homo sapiens
cgcgatgggaccgaagcccaggcagacatgacgcagaggccacatcctgaagcaccacgccgtgccctcacagagcagctctctcagccttgagagggcagaagaatcacctggtgagcgtc

SEQ ID NO: 95318 - DNA, 122 bp, Homo sapiens
catcattcatccagtattccttcctgcctctctctaaaatggatactcatcagtagattccgcacattccattctatatttatcctcagctcttggaacttgtaaataatatcttttctgcc

SEQ ID NO: 95319 - DNA, 122 bp, Homo sapiens
cccaaggcgtcgcgtttctccccactgcgcctgcgtaactatgccgcggctgcgggcgcgcgccttctggttcccatggggacggcgccacagccaagctactcgggcgtcctgcgttgcca

SEQ ID NO: 95320 - DNA, 122 bp, Homo sapiens
cgtccctcaggagtgcagccgcgcaggtggcaactgctgcaagaaatgcaccctgactcacgacgccatgtgcagcgacgggctctgctgtcgccgctgcaaggtaagcaggaccggccggg

SEQ ID NO: 95321 - DNA, 122 bp, Homo sapiens
acctcaggtgatctgcccgctttggcctcccaaagtgctgggattacaagcatgagccaccgcgcccggctcaagtggagatttttatatggagtccagttatactctttttaatatataag

SEQ ID NO: 95322 - DNA, 122 bp, Homo sapiens
cctccacacgctgcgcacccgggcgcaccgcagccgatgtcgtctcgcaggtagtgctcgcgcacgatcttcatcacgccgcccgcccgggtcttttttaagaacgtcttggacttgagcat

SEQ ID NO: 95323 - DNA, 122 bp, Homo sapiens
gggaactctaacggcagaagcgggcgttgtgtactctcccagggaaggcacaatggggaccgtgcagagctgtccttctgactctagagggcataaaaaaacacctggagggcttgctaaaa

SEQ ID NO: 95324 - DNA, 122 bp, Homo sapiens
ttcctcctgcgtctctgggttttctacagtgagcatgtgggacttccgtcatgaagagaacggaaaggcatgcatgtgcacgtgcagacgcagacggactggaacgcatgctcccacgcaaa

SEQ ID NO: 95325 - DNA, 122 bp, Homo sapiens
tttctcttttgccccctcccccaattctgtctccattcctagggttctaccaatcacatccgtgcactgtgatttagaggcatattctctgtagctgagaggggagccctgcgctcactgcc

SEQ ID NO: 95326 - DNA, 122 bp, Homo sapiens
tctgactctgattgcacctggttttggccatgctttgagccctcattcattctgttatctcgagatggtatataagcttctgcatcccattgtgggtaggggagggtaatcactctgtgact

SEQ ID NO: 95327 - DNA, 122 bp, Homo sapiens
cagctcccagcggcaagtacactaggctctaacttcgcttgtcctctctgcaggccctgccgaagctcccgctggtttcccgcagcgatcccgcgcaggtgagggtactggggagcccgtgg

SEQ ID NO: 95328 - DNA, 122 bp, Homo sapiens
cagggggaaaaaacttaaaacctaactcatagatacatgaacaaatgcagcaacctccaacgctagactgtatgccatgacccatagtgtgtggcctgctgtgtatactcaaagcctacacc

SEQ ID NO: 95329 - DNA, 122 bp, Homo sapiens
cacactcacacctggggtttgagatcttgttctcccactcactagctgagcaaccttaggcgagctgcttcagcctcacccagcctgtttgttgacaaaaatggcgggcttaccacccactt

SEQ ID NO: 95330 - DNA, 122 bp, Homo sapiens
caattcccccttccgtggatcgattacgaaggcttcctggcaggagctctccagggctgccgacgtgagccgaactgcacattgggaactgtagttgagtgggaaagccgagaggcgggggc

SEQ ID NO: 95331 - DNA, 122 bp, Homo sapiens
aataggtgcaaaactggtttcaggtggaaatggctgagtcctggtggctaacttctgggacgccatggcgatcgagggctcctaaaaccccagattccgacgggaaccggctcctaaacagt

SEQ ID NO: 95332 - DNA, 122 bp, Homo sapiens
tgaagccacacagtaaatggctgagccgggattcgaccccaagcactctagcctcaaacccgtactctttccatgatactttgctccctcagaaacagcttctttagtacagacccttttct

SEQ ID NO: 95333 - DNA, 122 bp, Homo sapiens
agacaatgatgaatggtaaggatgccctggaataagctctatcagtcagctctgtgacagcgctacctttcaaccagtaaaatcagattccaatgcctcctcccatcttgtcctgtctcctc

SEQ ID NO: 95334 - DNA, 122 bp, Homo sapiens
tgcacgcagcatcggccctacacctgcttccactggcacttcgtgaaccagcggcgccgccggtccatccgccgtcgggacggcaccttcaattacagccctgacgtctactgcaccaagta

SEQ ID NO: 95335 - DNA, 122 bp, Homo sapiens
tgggcacctggggtggcgcaaaggcatcctgatctctgcatcttggtcactgaaggggctcgagaggccgcggggcgctggggacaggaccgggagtcaggcccaggaaagtctcctcggaa

SEQ ID NO: 95336 - DNA, 122 bp, Homo sapiens
ccgcaccccctcgcacgtcaccacgtgcgctgccgccgccgacgcctcccagcccgcttccgtctcgaatccatctgcaaatcacaggcgagctccataaagatcccactctaagccccgcc

SEQ ID NO: 95337 - DNA, 122 bp, Homo sapiens
cccgggcccgcaatggggaccagaccacgccccctgatgccctgagtggtcccagatctccggcggtacctccagaccacgtcctcgcgctccgattggctgccgcttttgggcggattaga

SEQ ID NO: 95338 - DNA, 122 bp, Homo sapiens
actttaacatcagatgctgcttttctcccatcctctgggtctctgaaatcagcgcagcagcgtctgtgcattcccagcagcctccttgccggccgtctctggccgccaggactgcgcagggc

SEQ ID NO: 95339 - DNA, 122 bp, Homo sapiens
cttccacagcgtcctggaaaacctcaccaacgtcatgagtggcttttgtctgccagagcccgtttttagcataaaggtaaagtcacctatgagcgcaggcgtgtagaccagtgcggagggtc

SEQ ID NO: 95340 - DNA, 122 bp, Homo sapiens
ggactcctctgagtgacgttccccggctccaatcagcgggcgcgcaggcgcccccggccccgccccactgctgactctctttggctgattcctgcagggagggaggagagaagggcggcagt

SEQ ID NO: 95341 - DNA, 122 bp, Homo sapiens
aaagttaaatgagatacaccatcataaagcacttaacggaactgcttgtccaccacactacgagttatcagtgttagctgctaccaaggttacgattctgcaaggagaataatttaaacaga

SEQ ID NO: 95342 - DNA, 122 bp, Homo sapiens
gcaaaatgctactgcattgcattcaaattaaattcatctgcccgtctcagaaagacaaaacgagaagaataaaataagcaattacaaacacaaatccaaaggtttttcattcacacagaaaa

SEQ ID NO: 95343 - DNA, 122 bp, Homo sapiens
cagctcgcacacttccaaacctcgcgatagctactggccctgggcgagccgttgggattgcgcttgcgcacagcgtgtcttgtacgttcccgcgcttttctggaatctttcgcccccggaag

SEQ ID NO: 95344 - DNA, 122 bp, Homo sapiens
ttttggaggctgggaatattggcttcactctgacagctccctgactgggtggcccagaaacgacatatggctggagaattcccagcctgtaggctgaacacctccagcctttttttcctatt

SEQ ID NO: 95345 - DNA, 122 bp, Homo sapiens
gaatcgccttttccggtgtccaggcgctctgcagacaaataaacagcagaaggtgaatggcggctgcgagggaagggagttggaggccgggagtgggaagcgaggctcatgcgggcgccaag

SEQ ID NO: 95346 - DNA, 122 bp, Homo sapiens
gccgctttcaaggttcgagttccctctcttggacttcccctgtcatttgtttccaagccccgccctcaatccctctcctacggctccaccttcctcctcccagttcatcctcgatccctccc

SEQ ID NO: 95347 - DNA, 122 bp, Homo sapiens
cgaagtctcagaattgactcgggagtatgaccaataagcccaagagatttgtggaggccacgcccagaccatgcctaccctagcctttctcgagctccgcccgtttctccaagactgggccc

SEQ ID NO: 95348 - DNA, 122 bp, Homo sapiens
tggggagggtccccgcagcacctgggtctgcggtctgagccgcctgtgctgtgatgtggccggccttccctgccaccgaggggcgtgggatgcacccgtcccctgctcgcccctctgcctgc

SEQ ID NO: 95349 - DNA, 122 bp, Homo sapiens
gtccgccaagaagaagaaaggcagcaagaaggtgacacccaagccggcatccacgggccccgaccccctggtccagcaacgcaaccgcgagaaccttctccgcaagggccgggatccccccg

SEQ ID NO: 95350 - DNA, 122 bp, Homo sapiens
atcctctcccaaggatccacaacactgggcggggagggtgcacagcgcatttattgagctcggactcgtcttgtccttgcctccgtcgcccatctagaagggcaccaggctccccgcgacac

SEQ ID NO: 95351 - DNA, 122 bp, Homo sapiens
cggagcagcgcgcgccgcggtcagctgactgctgggctggcacgtgacttgttctgtgttcgcttgggtagaggaagccgtgaggccggagcttaggtcgggaagggatggatcgctgagcc

SEQ ID NO: 95352 - DNA, 122 bp, Homo sapiens
tctacaatcatcccaaaagacaaaagtttagttaaaagaaatataagtcagaccgtgtcacgccttggggttaagccactcattcaatgccctcccattgattttggaatgaagtggcctgc

SEQ ID NO: 95353 - DNA, 122 bp, Homo sapiens
gattaatctggtgccacctggaggcagccggtccaacttcccgatgggtcccagcttggacggtccgatgggcagcatgggtggcatggagccacaccacatgaacggattgttagggtcag

SEQ ID NO: 95354 - DNA, 122 bp, Homo sapiens
gctgggaggcagcgaccgggtgtgggggcggggtggtaggggaggggagcagggatgatgcggtcccgattccgtccccagggggcgctgggaccctccctgctatccaggctacacctgtg

SEQ ID NO: 95355 - DNA, 122 bp, Homo sapiens
ctgttgggaattggagctctgggcgtggcgtctggagtgggtgtgtgctgcttttgcttccgagacattcattcatatttcccctcttcgtttcactcggcgcgagccctccttcctctgcc

SEQ ID NO: 95356 - DNA, 122 bp, Homo sapiens
tcgctggcctcgtctccggagcggaggcgggcagcttgaaggagcgaccccgtgggccggcgcatccctccccaggccccgagacccggcgggagacggaccctccccatgcctcgccgcgg

SEQ ID NO: 95357 - DNA, 122 bp, Homo sapiens
cagtgaagccagcagccgtgtcccgtggcctcctgagtgtgggatctgtcactgagacatcggggcaccagggctcggcgtattgtcaccgccaccccacactcgccgcactcgatgcttct

SEQ ID NO: 95358 - DNA, 122 bp, Homo sapiens
gctcaaagggagccagcacccctctcccgcgagtgtttgggggtgtccgctgccgctcagcgccctctggtccccacccaagaggggaagggccgcagccaccctctgggcactccgggctg

SEQ ID NO: 95359 - DNA, 122 bp, Homo sapiens
tttttaccctatgcgctttagtattgtttgagtttttaacaacgggaagtatgcatttatcgcttctataattttataaatgtaatgggggaaattgaatgaaggaaatactattttattgc

SEQ ID NO: 95360 - DNA, 122 bp, Homo sapiens
cattgctgaaacagggccaattgaggctgagtgacccagtagcaaccacccccttgctcccgacaagctccagaactgggggctagggggtgagggctgggggttggggctgggtgggagaa

SEQ ID NO: 95361 - DNA, 122 bp, Homo sapiens
ggacggggtagggtaagtgacagacgtcagaccaggcagccagattaagtcaaaccctgtcgtttcttcctcaagaggagctcggttctgcctgccccatcagcctcactgtcactacctca

SEQ ID NO: 95362 - DNA, 122 bp, Homo sapiens
ggagggctgggcggagaggggatctgaggtgtgagctgcaacgagcaagctcccaggccccggccacctaccagcaagctctccacgttgatgggggagcgagggtctcggatcagcgcctc

SEQ ID NO: 95363 - DNA, 122 bp, Homo sapiens
aagagcgaaagaacaaagcttccacagtgtggaagtcgaggtgggttgctgctactggctcgggtggcctgcttctattcccttatttggccacactcacatcctgctgattggtccatttt

SEQ ID NO: 95364 - DNA, 122 bp, Homo sapiens
aagcggccgcgcggcagctgcggggcgtgggggtggtggtggcggcggcggtggtggcggcggcggcggcggcggcagctgaggccgaggaggcggtggctgtggcggacgcagcagcaccc

SEQ ID NO: 95365 - DNA, 122 bp, Homo sapiens
ctcttttgagattcctgatccctggctttgtcttaagcaaaagtactgtagaagctgcagcgtttcctccccctttccagaaaccgagcgaggacgtgggggaaaagccaccctggaacgtg

SEQ ID NO: 95366 - DNA, 122 bp, Homo sapiens
actgctcacgtcttagcctgattacctggccgcctcggctcacctgggcacatggtgagccgcggaactggcaggcaccaaacatttattgaatgaataaaccgtatcccagcagacaccat

SEQ ID NO: 95367 - DNA, 122 bp, Homo sapiens
tgggtaatcaatctcagattcttttctatttctttggagtttatggcctgcagtcattcccgtatcagttaaaatgctgttgcaagaaaaacaagccatcttgatttaaaagaacagtttat

SEQ ID NO: 95368 - DNA, 122 bp, Homo sapiens
caataaaatattcttttttctgtatatctttcaggcattaagggatcattgcaagagcagcgtgactgacattatgaaggcctgtactgaagacagcaagctgttagtacagaccagatgct

SEQ ID NO: 95369 - DNA, 122 bp, Homo sapiens
gagagaactgatctctctcccggtacccatgacaatctcagagctagatctatatcgtcccgcgcccagcaagaagcactgtgtgactgtactcccccgacccccaggacatccccacgccc

SEQ ID NO: 95370 - DNA, 122 bp, Homo sapiens
accttttgccccactcccgcttttcctagagccttcagtgagcgctcttgcctctcgctgcggccagcggaaccccgacactcactagcctttaccagtacgaaaagacaacagagggatcg

SEQ ID NO: 95371 - DNA, 122 bp, Homo sapiens
tttccatctcctgtcctccatcggagaaatttcactaggctgtctcagacgtgctgttgtcgtggatggattagactccttgggactttcttgaagggtcattttaaagtgatagcttaggc

SEQ ID NO: 95372 - DNA, 122 bp, Homo sapiens
ttgctggaaaaggcagggaggaccccggctttccgaggaccgacgtgagcgcggggagcacggggtgactcacagcgaaaacagccccggccaagaccccgccacccgcggcgcctctcccc

SEQ ID NO: 95373 - DNA, 122 bp, Homo sapiens
gctttatctcctgactcacggtgcaaaggtgcactctgcgaacgttaagtccgtccccagcgcttggaatcctacggcccccacagccggatcccctcagccttccaggtcctcaactcccg

SEQ ID NO: 95374 - DNA, 122 bp, Homo sapiens
tcactgaaatttcaggactgtttttttaaaacattcaaaagacagagttttaaaggcaagcgtataaaatgtaaattgcttcctctggttattgcagagtgaggggtggttgttcctattct

SEQ ID NO: 95375 - DNA, 122 bp, Homo sapiens
cagtgagctcagccgcgctcccgccctcccccgaggcttcgctcccacgcttcacgcgcgcggaacggggaacacactcgctgcagccccgcctgggccacggcaccctcgagcgccagccc

SEQ ID NO: 95376 - DNA, 122 bp, Homo sapiens
ttggagatgtcttttccaccctcttgcttgtctatgggtctcaggcagagtgttaatgaccgttgattcagccttgccaccacctttagccacctgcatcctgaagtccatctcctttgtcc

SEQ ID NO: 95377 - DNA, 122 bp, Homo sapiens
gttaatattttaattaatcgggaaagtcgaagtccgattcacgttgtctggggacccccacgcctcttggaaggagtgagaaaaaagatgtgttggaaagagatctattttgctggtgttgg

SEQ ID NO: 95378 - DNA, 122 bp, Homo sapiens
gcgctgcgttccgcgcaggacgccggtgaggcccgcagagacttgcgtccgggcgggaggcggggcccaggatctctgctcaatcctggagtccgagtccgcaaagtgggagggagggtgta

SEQ ID NO: 95379 - DNA, 122 bp, Homo sapiens
ctgggttgacaagttgctagccatcggccctgggatggctcccacagggagcgaaggggccgcctctcggttgatgcctccatcatcacctgctgctttatttaaagatctcctggaagaac

SEQ ID NO: 95380 - DNA, 122 bp, Homo sapiens
aaaggtctcctgctgttagcggtgactcacattcccagtgatttagaaaaactgtggtgccgagtgaaagaaaaaaaaaaaagcaaacacccttagacaaaagaaaaaagctccactctttc

SEQ ID NO: 95381 - DNA, 122 bp, Homo sapiens
cggccactcagttctgccaccgtcactgagaagctcagcggtagcttttgggaagcaggacgttctcaccaggagagcgtcctctcgagatttctgctccctccattcagggcgtttgggag

SEQ ID NO: 95382 - DNA, 122 bp, Homo sapiens
gcagccccgtcagggacctaagctgggttcagccatgcaagcagcttccaggtggaaccccggccgcgagcttcccagcccttctagagcgggagatggagagcagggtggaggcaggcggc

SEQ ID NO: 95383 - DNA, 122 bp, Homo sapiens
tgcccgcgcggcctctcagttgggaaagctgaggttgtcgccggggccgcgggtggaggtcggggatgaggcagcaggtaggacagtgacctcggtgacgcgaaggaccccggccacctcta

SEQ ID NO: 95384 - DNA, 122 bp, Homo sapiens
atccaaagcagttgctggtctctcactggggtatgaactctgcacttagtggttttaatacgggtgtggtgttgaaggtgtgaggttaagttccatcatggtgagaatggctgtgggtacct

SEQ ID NO: 95385 - DNA, 122 bp, Homo sapiens
agccatcctcccacctgggcctcccaaagtgctgggattacaggcatgagccacagtgcccggactgaagatatcctttagagaaagaagcagcgggtagttttgccaaggccagacaagat

SEQ ID NO: 95386 - DNA, 122 bp, Homo sapiens
ctgcctgctgagggagcgctggggtcgtttgacaggcggcacccacaccctgcagggccacgtgcgcatgcgggctcgaggaagctgtgggagtgccttcccactaggcttgctgtgcgggt

SEQ ID NO: 95387 - DNA, 122 bp, Homo sapiens
cctggtcaacgagagcgaaactccgtctcaaaaaataaacaacaaaaaatcccaaaaagacggtcttattttggtcctcaccatgcatgtgagaagagtgagggacttgtgccaccgtttta

SEQ ID NO: 95388 - DNA, 122 bp, Homo sapiens
tgggaaacacactggctctgatttctgcttccctctggcattaccatggaaccgagacaccgtaggggcatgacaccaccctagccgaggcctgcccactcaggatggggttcattttcaga

SEQ ID NO: 95389 - DNA, 122 bp, Homo sapiens
aagcagagggtaatattactccccatattgcaaggagtgtacaccccatgtgacctggttcgtaatatttcgggggaaaagtgtgatattactttccatattgcggggggtgtacacccccg

SEQ ID NO: 95390 - DNA, 122 bp, Homo sapiens
tccattgtggcccagggaaaccaaaagattggacatcccttgtgtagactaatgaagtgacgcttcttcccaggcatgatgacactgttttgacagggctgcaccctgttttgacaaggtgg

SEQ ID NO: 95391 - DNA, 122 bp, Homo sapiens
cagaggcttccacaagcgtttgtattgtttggggcggtcggaactcagcgctgcggaagccggtgtatctgagtctctccacgtggctctacttttctgcagccctgtagaaataaacctgg

SEQ ID NO: 95392 - DNA, 122 bp, Homo sapiens
gaagcctgtggtttgtaattggtgttctagctctgactccctcccctgggactgcaatcacgctctctacctgctgacaaagtgagggtggagctgctagaggcaaccactccccaccctgc

SEQ ID NO: 95393 - DNA, 122 bp, Homo sapiens
agaacccttaacgttaaaacctcaagcttccggagcatgtcggcgggagggacttaacagcggaacccaacattccccggtgaagttttccagccggagtcagggtcagaggcagcctttcc

SEQ ID NO: 95394 - DNA, 122 bp, Homo sapiens
tgaaaactactgaacctaatgagtaaatactaatggaagcccacacaatggagaaaatcacgttgacacttactgggagttataatcaatagtcactctgacggttacatcaccttttagca

SEQ ID NO: 95395 - DNA, 122 bp, Homo sapiens
cagttggagatctaattctttagctcgtttctgctgcctcttgttcatgatggcttatcacgtgttctgttattttgcgttgtgggcttatatctggataataatttttaaaaaccttaagg

SEQ ID NO: 95396 - DNA, 122 bp, Homo sapiens
cggcgcggcgcggcccggcccgagcgagggtggggggcggcgggcggcgcggggcggcggcgagcgggggccatgcaggcgcgctactccgtgtccagccccaactccctgggagtggtgcc

SEQ ID NO: 95397 - DNA, 122 bp, Homo sapiens
gaccccatcatttacctgtgtgaccttgggcatgttaatctttctgagcctcatattgctcgtctttggaatgggaacaagaatgctttgtgtagacaggagataatggatatcagtgccta

SEQ ID NO: 95398 - DNA, 122 bp, Homo sapiens
cagtgctgactggagagatcccagagataactgtgaaatgcctgtcactgttctcagcttcgtttatgtaggctgcagagccaagacagcaaatactgcacatccgggagcctccccaaggc

SEQ ID NO: 95399 - DNA, 122 bp, Homo sapiens
aggagccgccctgagccccgcccctggcgaccgctgccaggaggtgcgtttccgtggagacggagtttccaccgtgcaatccagagcggggtaaaaagaacgcaactttttcctttccaccc

SEQ ID NO: 95400 - DNA, 122 bp, Homo sapiens
ggaaatgctgcaggtgttcaggggagggtaggtccctggggatgggatggtcagagaccccgtggggccaattcgtttacctcttgacatcagtagctacaccagagaaggtgctgacacct

SEQ ID NO: 95401 - DNA, 122 bp, Homo sapiens
acatgctgaactgtgtcatgaatatgtaattggcaaacttcactgggaaagcagacaggtcgaatacagatcaaatgtaaagaaagagggtggggagaacacatagatgaaagggatttaaa

SEQ ID NO: 95402 - DNA, 122 bp, Homo sapiens
cccggcaggcggggtcgaggtctctggcgtccctggggtctgagggtgtctctggggtgccggggagagtctgtgacttgaggagggctgggggcgggtctcggggtctctggggagggccg

SEQ ID NO: 95403 - DNA, 122 bp, Homo sapiens
gactctggcctggattgggtcgaattaagcccgtcgctctgctcagtaccaaaatgacagcgccaatgtggcagccatctttgtacagacgggaagtctcggcgcgagttcccgccccctcg

SEQ ID NO: 95404 - DNA, 122 bp, Homo sapiens
tgacttggccgcccgcgagaaagtggtgctggtgtttctgcagcacaggctcggcatcttcggcttcctgaggtggcggggccggtaccctttgggaccgcagctgtggccagagcggcggg

SEQ ID NO: 95405 - DNA, 122 bp, Homo sapiens
aatagctctgggaccccaagatttatttcacagcttaaagcaaggtcactatcaagtcctcggcaaagctcaaaatacaatagaaaactcccaaatcaagccccagcttatttaaatgctta

SEQ ID NO: 95406 - DNA, 122 bp, Homo sapiens
gaagtgaagtgtggcccatatgaggtgtcatcaggctacacctgtgcaagctggttgctgcggcaatggctgcaataaatgatgggcccaagaggatgtgaggcagggcacaagagatgtct

SEQ ID NO: 95407 - DNA, 122 bp, Homo sapiens
gggctgtggtcctgaccctcctgagttccagtggctctgttcaggagagctgcctggggccgggacttctgaaacacacactgagccacaggccggcccggcggcttgggttcaccgccgcc

SEQ ID NO: 95408 - DNA, 122 bp, Homo sapiens
actgaaagtgaatccccacttttcttttatcttttaaaaattttatttgtgggccgggcacggtggctccatgcctgtaatcccagcactttgggaggccaaggagggtggatcacaagctc

SEQ ID NO: 95409 - DNA, 122 bp, Homo sapiens
gggttatcaggatgggctggttcaccgtcctgaaaggacggcagacagctggtgcttcatcggtgatcacgttcattggtcccattttggccgaagggagggcggagggaggagaacgggtg

SEQ ID NO: 95410 - DNA, 122 bp, Homo sapiens
cttttttccttcaggacctggcattgcccagaagataactcaaacccaaccaggaatgttcgtgcaggaaaaggaggctgtgactctggactgcacatatgacaccagtgatcaaagttatg

SEQ ID NO: 95411 - DNA, 122 bp, Homo sapiens
atgtggccgcctgccgggccaatgtcaagagcggtgccatcatggccaacctgtcagacacggagatccagcgcgagatcggcatcagcaacccgctgcaccgactcaagctacgcctcgcc

SEQ ID NO: 95412 - DNA, 122 bp, Homo sapiens
gggtcagcaaggtaccaggggatgtgtcacacacacagcccacccccgtccagtcacgcacggacaccctgggcttccgagcaaacctgctcccgggtggtgtgaccacatggagccacaga

SEQ ID NO: 95413 - DNA, 122 bp, Homo sapiens
ctggcagggctggccgcggaagacccagtcatgcggggctggagtctgctttcctgtgaacgtcactgtctgcgtgcagaattacactgctgaggagcaagcagaatggatgatggaggctg

SEQ ID NO: 95414 - DNA, 122 bp, Homo sapiens
cctccggtctccagcaatggtggccaagcagccctcacgcacgactgaagtcctctccgccgacagcagagccaaagcagccgactgcctgctcgtgtggctctgccctcctgcccctccct

SEQ ID NO: 95415 - DNA, 122 bp, Homo sapiens
tcattgcactccagcctgggcaacagggagagactccgtctaaaaaaaaaaaaaagtttccggagaccgtaggttaaactaggatcctaggagctaaagcagtaaattgcgccacctggctt

SEQ ID NO: 95416 - DNA, 122 bp, Homo sapiens
aacagatacggtttcatcaacaggaacgtcaccaaggaagatgtgtgttcatcagactgccgtgaaggagaaccccggggaggaccctggcggcgggggagctgcggaggccgcggagtccg

SEQ ID NO: 95417 - DNA, 122 bp, Homo sapiens
gccttccagatcgcagctcttgcggcggccatcgccttcgacttaagggtgttgcttggccgccgcctggtagtccggcgattcatttcttgctcggcctcctggagctgtggtctgtgtgg

SEQ ID NO: 95418 - DNA, 122 bp, Homo sapiens
tcaccagctaccgcttcaccacggagctgatgaacttcaagtccggtaacatatgcccgccgccccttccgcatgtgcccgccgccccttccgcgcgcgcccaccgccccttccgcgcgcgc

SEQ ID NO: 95419 - DNA, 122 bp, Homo sapiens
gaaagggaacagtctggggtccgggcatcgctgtgggccgggctgggtttagggggacggcggtgcgggctgggccggtttgggcgcggcgggggccggatgatggggcgagtccggacctt

SEQ ID NO: 95420 - DNA, 122 bp, Homo sapiens
ctccatacaatgactagtcacctgggggggttgggcgggcgccatcttccattgccgccgcgggtgtgcggtctcgattcgctgaattgcccgtttccatacagggtctcttccttcggtct

SEQ ID NO: 95421 - DNA, 122 bp, Homo sapiens
tgagctacagagacattcggacttactccatgaatcatttaagccttaaaacatgttgagcgtattttttttttttttgagacggaatttcactcttgttgcccaagctggagtgcagtggt

SEQ ID NO: 95422 - DNA, 122 bp, Homo sapiens
ccttgacaactatcctgcttctgaatgaggtgtgatgataaagtgacgagcagaataccccggggcctacatcctggacagggagagggagagccgacccaccccttcgaggggtccgtcat

SEQ ID NO: 95423 - DNA, 122 bp, Homo sapiens
caggccaagcccaacctgagctggttaacccctccctccaggaggtaggatggcaggggccgaggcccagaggcgccagccggctagcggcgcagacacgtggggagctgggtagcagcatc

SEQ ID NO: 95424 - DNA, 122 bp, Homo sapiens
gtggccatgctacggaaccatccctcagaagaagtccttattgccgggtgggaatagcaccgttactggctatggctagcagaaaagccacggtggggtttgcatcacgtgtttcagtgaca

SEQ ID NO: 95425 - DNA, 122 bp, Homo sapiens
ctcctcctcacccctaaatacacacacacacacacacacacacacacacacacacacacacgtttgggcaaaagggagttttaattatactcttggtaacttccagggtactctacaaatgg

SEQ ID NO: 95426 - DNA, 122 bp, Homo sapiens
gcgcgcagggccaggccgtcccaggcgggctgcacagtggaaatcacaatattgacccagcgcgcaggaagtggggaggacaggccgccggggttcccggcccggggggagacagctcgctg

SEQ ID NO: 95427 - DNA, 122 bp, Homo sapiens
gcttagctacctgtgggaacccacgtagcaagggtgactcaaagggttaacaagcagtggcgccgcagagtggcggggagtgcagccaatagggtgtctaggcaggcagtacgtctggtgtg

SEQ ID NO: 95428 - DNA, 122 bp, Homo sapiens
cggctaagatggcgacggagcatcccgagcctcccaaagcagaattgcagctgccgccgccgccacctccaggccactatggcgcctgggctgcccaggagcttcaggccaagttggcagag

SEQ ID NO: 95429 - DNA, 122 bp, Homo sapiens
aatggggctgaacgatgctgccttacttctgagaggattcatgcaaaatatttacttctgcgctctgctggaggggcggggccagctcgcccagtgggggcggggccctgtggtcgggctcc

SEQ ID NO: 95430 - DNA, 122 bp, Homo sapiens
ctgcagccggcctccccttccggagcctcgctgtcgcgttcctgcagcggcctccccttccggagcctcgctggtctctgcagaccaattctgtccctctgaagcacaggccaccatcggac

SEQ ID NO: 95431 - DNA, 122 bp, Homo sapiens
gagcttcctcttcctcttcttttcctttgaaaacctacttgtacctgctgctaaccagagcgtatactcagggccacttgaaactatgctcttgggttgcagccctcaagcttggcccaagt

SEQ ID NO: 95432 - DNA, 122 bp, Homo sapiens
ccggcaggaagccacaccccgtgccccgaaaccacacccaacaggaagtcacgcccccatcgccaaggccacgcccccgccgcggaccccagctttcctgggccctgaatcctacacttctc

SEQ ID NO: 95433 - DNA, 122 bp, Homo sapiens
ataaaagtttaaaccaatgaaatagctgcaagcctgctgtatcggttcgaaccccaagagcgcggtaacaaacaccacaaggcggtgtggagcaacacgctgttctaatgagcgcctgggta

SEQ ID NO: 95434 - DNA, 122 bp, Homo sapiens
ttctctgagcaccagaagccacaaggagcaggcccagcattccctcccgagcaggcccagcgttccctcccgagcaggagccgtcgtctgtgttgcttccctgcaagtaccattcgccactg

SEQ ID NO: 95435 - DNA, 122 bp, Homo sapiens
ttgcccaggctaatagatttttttaaatgatcatacaggacggctgggtgcagtggttcacgcctgtaatcccagcactttgggaatcccagtactttgggaggccgaggcgggcaaatcac

SEQ ID NO: 95436 - DNA, 122 bp, Homo sapiens
ggccgtctctccccttcccccaccttgcaagtctctggaatacactgtccctaggcggcccggccgtcgggtttcctcacgccttgccctgagctccgggaattaccaattccgctttcccc

SEQ ID NO: 95437 - DNA, 122 bp, Homo sapiens
caggaggaaaaaagtttgttctgctcagatgacgtgtgtgaagaggcttgatgtgatacacgcaccctgatcactaggcattttgttaaatagcatttctaagcccggtcaaatctggataa

SEQ ID NO: 95438 - DNA, 122 bp, Homo sapiens
aggggggaaaagagttgcactgtgaaaatgtcgatttgtttccatgttgctcttaagtcgcgtactcgtgctggttgacggtttgtaagaggcagcacccggcaggagggaagcaaagattt

SEQ ID NO: 95439 - DNA, 122 bp, Homo sapiens
cttcacctttaatgctttctggggctgacaggcagcggcccagctaaagttcacagtgcccggggagggcccgcctccgcctcacctcccccagcctggcctgggcccatggccccggaccg

SEQ ID NO: 95440 - DNA, 122 bp, Homo sapiens
tagaaatgccacatgtgggagggtcacaacacaacagtgacactagtgaatatatctctgcgttgtccccatatgcggcaaatgggtgcaagatgctgcctgccactcactgtgcaaagact

SEQ ID NO: 95441 - DNA, 122 bp, Homo sapiens
acgtggcgcgcacgggccagggagcctgaggaccctgcggggaccgggacccaagctgggcggggcggcctggctcccgggcctaaaacaggctgcggtcacgttgacctccgcaaggggca

SEQ ID NO: 95442 - DNA, 122 bp, Homo sapiens
gtagaaattaccctgggctttgttttgcaaagagcatttgcataagaaaaaataatcagccggttaattcccccgtccactggcaggaagagagacagccttcagagagtttgggactctct

SEQ ID NO: 95443 - DNA, 122 bp, Homo sapiens
cccatcaccttaatagaagttttcttttcttttcttttctttttttctgagacagagtctcgctctgtcgccgaggctgggcacgatctcggctcacaacaacctccacctcccaggttcaa

SEQ ID NO: 95444 - DNA, 122 bp, Homo sapiens
ccgcggtaaaagggtgttgactttcccagggtgactctaactagacgcttttcctgttttcgtgctcccagggaggaaaaaaacctatctccacgttgtggcagtccctaggcagggtaatg

SEQ ID NO: 95445 - DNA, 122 bp, Homo sapiens
cgtggacagcgtcttgagaacgcggctcatgaagctgcccaccgagcgtgcagaggagggcgaggagggcgaggaaggcgcggccggcccggacgccccggggccccccgcgccgccgccgc

SEQ ID NO: 95446 - DNA, 122 bp, Homo sapiens
tcagtttctcaaagaggtcagggacccaacaaagtttaatatccagacacggcccaagtccgtcctcctcacttctccgatgagtcagctgatacccaaggtcacacagcttgtcagaggca

SEQ ID NO: 95447 - DNA, 122 bp, Homo sapiens
cggacctggtacctcttttgtgaagtggcagctgaggagaccggcgctcgccatggccgacgaaaagcccaaccaaggagtcaagtcggagaacaacgatcatactaatttgaaggtggcgg

SEQ ID NO: 95448 - DNA, 122 bp, Homo sapiens
tcctgccccagcctctctgagagtgttaaagatgcatcctctaaggaaagggggcacctccgcaagatattgtagaaatcagcaaagccaagccaagggcaggatgacagcggccactggcc

SEQ ID NO: 95449 - DNA, 122 bp, Homo sapiens
aaactcatgtcactccggggacgtacaacctatgaatagtcggctgccgctcaaagagaacgaagaggcggggctagtgcgtggtgggaaggggcgggattctgccagccgcggctgccgct

SEQ ID NO: 95450 - DNA, 122 bp, Homo sapiens
gttctatagctatagggttcccatcagttgaaacagatttgctttttcgctattcctcttcgtagccccaaattcgttgttggaggcggtctccgctgtgtcatgccatgagcaaagagtga

SEQ ID NO: 95451 - DNA, 122 bp, Homo sapiens
gattcacttcaggataactacttgaggggttctgatactggaagagaaaaggcaatatagcgaagattttatgagtctgacagcaggcctgcctccctgctggctgtgttcctgctggacag

SEQ ID NO: 95452 - DNA, 122 bp, Homo sapiens
gccgcagctgccaaccaggctggagcgctggcccggccccccgcggctcgctgctccgcccgccgccattggcccgcggccctagcccagccttgttcccattggccagaggccgttcccgc

SEQ ID NO: 95453 - DNA, 122 bp, Homo sapiens
ggtcccaactacgcagaggctggcacgccgaccctccacacctcaccacgcccccatctccgtccgtgtacacacactcacacaaggacgccaaccccacctagatgcaaagcaggattcaa

SEQ ID NO: 95454 - DNA, 122 bp, Homo sapiens
catgaggggtctgaggctcagggaggggcagtgccaagttcaggccagtgactgccccaccggagcccgggtgtcctcttgtgcaaaatgcctccccaccagggctgtgggtacatcagtac

SEQ ID NO: 95455 - DNA, 122 bp, Homo sapiens
gagcaacagtccccatgagagagccgtggagacgccgggagccccaggagccaggtggggcgtggctggccgggagagaggcccccttcctcttgtgacaaaccaagggtccctggcgtccc

SEQ ID NO: 95456 - DNA, 122 bp, Homo sapiens
cgccaccaggcgtgcggtccgtcaaggtggtcctggtgggcgacggcggctgcgggaagacgtcgctgctgatggtcttcgccgatggggccttccccgaggtgagtgccccgcgcctccgc

SEQ ID NO: 95457 - DNA, 122 bp, Homo sapiens
ctcgctcgccttgagggtcatctcgcagaagctggaacactggaacgcaagacagggcagcgctgggaatgacagggcccggggcctgcggggctgcggagaaggcgggagacgcggtgcgg

SEQ ID NO: 95458 - DNA, 122 bp, Homo sapiens
gcggctcgggcgttgttcacggcagcagcccagtgcagcgcagttttccctaggggacgacgtgggaggttgttaccccagttgggggccagacgcctgggttccggtttcccacgggttct

SEQ ID NO: 95459 - DNA, 122 bp, Homo sapiens
tgcctgtaatcccagcattttgggaggcaacggcgggtggatctcctgaggtcaggagttcgagaccagcctggccaacatggtgacaccttgtctctactaaaaatatttttaaaagccgg

SEQ ID NO: 95460 - DNA, 122 bp, Homo sapiens
ctgagcctccgagggcctggagccatcaggtcctacctttcctgcagcaggtggagctgccgcccccggggatgtcccgggaaggagactgatctggcagctcctattcaaccctgtggctc

SEQ ID NO: 95461 - DNA, 122 bp, Homo sapiens
atctatcaacatagtttatgttaagtgcctttaccagtccctagtccatagaaaagccaccgtggaaacatagctaccataaaataatgcatctattattagtgctagttttatggtatttt

SEQ ID NO: 95462 - DNA, 122 bp, Homo sapiens
gcggcggccctggtggtgcgggaagcggcggggcggcggcgaggctgaggtgcgcccgggcgcgggcggggcggggccggcgctgggcttcgggcgcgcccactcggccgccgtggggcgga

SEQ ID NO: 95463 - DNA, 122 bp, Homo sapiens
ccaggcgctgcaggaggcgtcggggctgggagcctggggcgccaggtgcggccgagatcccggctccgcccccgccgccggggccgcccccttaaccctttgctcgccgccgccgccccagc

SEQ ID NO: 95464 - DNA, 122 bp, Homo sapiens
agatacattgccattactaaacctttaacctataatactctggttacaccctggagactacgcctgtgtattttcctgatttggctatactcgaccctggtcttcctgccttcctttttcca

SEQ ID NO: 95465 - DNA, 122 bp, Homo sapiens
ctaacaagtcattcattttcatgaacttgttctcccagagcctgggccatttgtctttagcgtggcttctcaccatttagtgacaaagaggataactcccagcacatttgctaggagacacc

SEQ ID NO: 95466 - DNA, 122 bp, Homo sapiens
ttgcaggaaaactcccgccgctagcgggtgctgtggggcgtcccaggtctcgcgcagccacgccctctgtgtgaccttgggcttcagtttaggcttctgtaaaagagaataatgggcaaggt

SEQ ID NO: 95467 - DNA, 122 bp, Homo sapiens
tggttatattattattcatgaaccaatgaataataaatgaatgatataaaggaagaaaaacgtgcttggaccaatgatgagtaccatggggtatctgaaacaggatttttgattaaacccat

SEQ ID NO: 95468 - DNA, 122 bp, Homo sapiens
ctgggtgggaggggctggaccaggagcccccagggaggtcacccgcaggatttggcgcggcgggcgctgtccacggtgctgaaccggtcgcgcgcggggcgctgtcagcgctatgggcgggg

SEQ ID NO: 95469 - DNA, 122 bp, Homo sapiens
aactgtgacccgatgagtccgcgcactcggaaaacaagagaacgctcccacgtctccgggcgcagcttgtgccagcgactactaggtcagggggcgcagctgagagaattcaagcaacctcc

SEQ ID NO: 95470 - DNA, 122 bp, Homo sapiens
ccctgagatcccgcatgagggagggaatctgatccctctggaggagccgcacatcaaagccgggctggcgtttgatgtcacgctgctgtgctctgtccctgtttgtgatttgaggtccccaa

SEQ ID NO: 95471 - DNA, 122 bp, Homo sapiens
tttgctaaccagaagcatggcctgaggcaggaggtcctggaaggacagaagcaggctgggcggtggatccccacaggctcggacgccctagctcctggcctgaggactggaggtcagtgtgt

SEQ ID NO: 95472 - DNA, 122 bp, Homo sapiens
tgccattcagtccaatccaacacatacctattaagcaactgttttgtatccaggacaatgcgaagcactgaggtgcctcctaggctgtgcatgtcgcagcctggcagagaggtcaaactcct

SEQ ID NO: 95473 - DNA, 122 bp, Homo sapiens
ggactggccaggctcttccattaaccctgtctggtccggccgatcccgccgcgacccgagcgcctctcggccccgcagcacagggcgcccaggacccgccaccctcgccgcccgttcccctc

SEQ ID NO: 95474 - DNA, 122 bp, Homo sapiens
aaaacttaaaagagccagccggggccgcgcggagcagctgctctctatttacatgtaaaccgaaccggcaggatgcagttaaccctttaccaggctgaagtgtcagcgggctggacgcgctg

SEQ ID NO: 95475 - DNA, 122 bp, Homo sapiens
acagggcaattgtatatcggagctcatttattatgagcaaagagttctcattaacttctccgggaaaatgttgccattaaatcttatcttgaatgagaagaatttgtaacttgaaaatgttt

SEQ ID NO: 95476 - DNA, 122 bp, Homo sapiens
ctcaataggatgttgagtggatggcatcagagcagacacctgaaggtgccatgcagataccgatggggaagggaatgggagtgggggtgccactgcattcgattctagacttggataacagt

SEQ ID NO: 95477 - DNA, 122 bp, Homo sapiens
aaacctacgaattttaaaaatcaaactttaaaaaactttttgtttttttttttaaaaaaacggcagcgtaatacaatatttggacacgctatactatgggctttgaagaacgcctgtccaga

SEQ ID NO: 95478 - DNA, 122 bp, Homo sapiens
gtggtttccagttcccaacagaggtgtttcttatcattgaacattcaaggtggaacatatcggaagtggtgtggggagtgtactttttagaggattccactgatgaatccttcatggagtga

SEQ ID NO: 95479 - DNA, 122 bp, Homo sapiens
ctacgatgcgggtgctgagctatggcaaagggcagcgaagtgacgagcgagacccgcgtacgactgtgaaagccacctggagccaccttgccgggattgtacctgcaggcagaaagtcttcc

SEQ ID NO: 95480 - DNA, 122 bp, Homo sapiens
ccgggccctcacgttctcgctccagcctggggtctctcacgtggcatctggccctggggacggtgcagcggaggagttaattgctgtcactcctgacttcagcgaaagaggtcgatcgtggg

SEQ ID NO: 95481 - DNA, 122 bp, Homo sapiens
tggaggggcagtgaccatccacagaggaggagcctcgggaaccgctatgtcctgaaagctcgcttcccaacttctcctttcacaggggaagcagcagggcagagggcatgaggaccagcccc

SEQ ID NO: 95482 - DNA, 122 bp, Homo sapiens
agccccctcgcaaatccctcccagtccttgttctaaagagaaactggtgcgtgtaggctgcgcactcccagggagacaggggacgggcctggcgccggagaggagcccgcactctgcccgaa

SEQ ID NO: 95483 - DNA, 122 bp, Homo sapiens
ctggcagcccgtctgaggagcccgtgtccccagggcccctgtacgtgctggtggagtacgcggccaagggtaacctgcgggagtttctgcgggcgcggcggcccccgggcctggactactcc

SEQ ID NO: 95484 - DNA, 122 bp, Homo sapiens
ggctcccacatgcaggtcggccaccccagccaaggcacctgccggagagaagcacagagacgctgctgggctggaggaatggtggctgccaccaggaacagcccagtgcccaggtgtctccg

SEQ ID NO: 95485 - DNA, 122 bp, Homo sapiens
cgtaaactgccttcctttatttatatttgcaatatgaaatagaagctcggcacaaacgcacgcacactcacaccagcctgggaggagggagctggggacaaggtcacttggcaacagggctg

SEQ ID NO: 95486 - DNA, 122 bp, Homo sapiens
ttttagacagaagcaatacactcttctctgaattcagaaacaatctcatagtaaaacaaacgtgtcaattcctttaaaacaataaatatctgtgcttagctttataatgtaggtaataaaat

SEQ ID NO: 95487 - DNA, 122 bp, Homo sapiens
gagtttggctgacttgatttccagagagtggcctgaccccgctgctcctataacagagatcgtgtctcaaccggagagactcttgttcgtcatcgacagcttcgaagagctgcagggcggct

SEQ ID NO: 95488 - DNA, 122 bp, Homo sapiens
tgactttttcccagtccaggcagggatgccagtgagtagaacacacgagacaatcagaagcgacagctacgtgatttattacctacctagtcttggctagagagagcaggagaagcaagaag

SEQ ID NO: 95489 - DNA, 122 bp, Homo sapiens
agaggggagaggaggagggtgggctgggggcccttcagtcaccagcccagaccccagcctcgctccccaagctggccctctggtctagggagagagaatatcaggagagctccctgctcttt

SEQ ID NO: 95490 - DNA, 122 bp, Homo sapiens
actcaacagctctgttgatttttctgttcttggctgaatgttgcctgagggatgggagcacgggaagggtaaaagcaatggaacaaacatgtattttaatattttaaaagtatgttatattg

SEQ ID NO: 95491 - DNA, 122 bp, Homo sapiens
gtcaagctcagtcaccttttggtgagcctttccctagttcttggagtcttaaaagaatcccgtggttttcggcagttcagaaacccaggcattgccgctgcgtggtccacgggagttgctct

SEQ ID NO: 95492 - DNA, 122 bp, Homo sapiens
ggaagaaaagaatgctgctttgcatggacaaacctgagttcgattcccagcgctgtttatcggatgtgggatctgatcttggggggaccttcttcaagcctctctgagcttcagtttctgca

SEQ ID NO: 95493 - DNA, 122 bp, Homo sapiens
ccccccgcctacattctcaccggacagcccgagccaccccagaaggccggggagcatgcacgggagtgtgtggaagtgaagcacacaccaccgccacccaggtgggcgctgctcacagacgc

SEQ ID NO: 95494 - DNA, 122 bp, Homo sapiens
gactcacctcagtgcctggaatgcaagcagagccataataaatagagataatggagcggtcgtcagaaggatatagaattaaaatgtagccatgaaaggtcaaaactgaatttctaagggat

SEQ ID NO: 95495 - DNA, 122 bp, Homo sapiens
cgcagttcgcgtgggagggacgcagggctggcgcgcagagggtggtgtgagtgcgcggaacgcggcgcgcctgagggctatagctagcgcaggccgacgcgcaggtgaatgggagccctgtg

SEQ ID NO: 95496 - DNA, 122 bp, Homo sapiens
gcatccggtcgggttctaggcgcccgctgcttgggtttaaatcacccgcgcttcgctgcacgcgatgggccctgagccctgcccagtgcaaggctcattcccgcccaacaaacacaggtgtt

SEQ ID NO: 95497 - DNA, 122 bp, Homo sapiens
gccacacagagcagcgggcaagggagcgaagcttcatctgtatttacagctgatccccatcgccgatgttaccgcctgaactccgcctcctgtcagatcagcagcggcattagattctcaca

SEQ ID NO: 95498 - DNA, 122 bp, Homo sapiens
ctccagagagaggagagaggctggagattgatttgattacagtttatctaaaagaagaaacggaggcaaaattaataaaagtggagagtttacatttgaaccaaaatgaagacagctgccca

SEQ ID NO: 95499 - DNA, 122 bp, Homo sapiens
actgcagcatcgcggaggacttctctagttcaggttaaagagacagcagccagagggagccgacctcaaacccaactcccgacagcaaccttgaggccacccgaggtggcgcatgcgcagtg

SEQ ID NO: 95500 - DNA, 122 bp, Homo sapiens
tagcaagcaaatactctcagagacctatttacgaaaattattacttcctaggtaaaataacgttcaaccagacagccattgtcgccattcgacggaaggaaaaactgaggttccaggagctt

SEQ ID NO: 95501 - DNA, 122 bp, Homo sapiens
caactgctacgaggtcctgagcgcggccaagcggcagcggctgaacgagctgcgcgacgccgcctactgcttcatgagcgaccactatctggaggtgctgcgcgagcccgccgtgttcggcc

SEQ ID NO: 95502 - DNA, 122 bp, Homo sapiens
tgacccgtttctcttatcttactaatattatcctctttgggctgcattagtccatggtaacggagtctggagcaagtgtggtttagcagcgtaggtctgttcccaaatggaatgctggaagc

SEQ ID NO: 95503 - DNA, 122 bp, Homo sapiens
ccatatacagggtttcagagaaatactgactgttccatcttgggtcgcatacttgcccctcgtcacatgctcatgaccgtcaccgcacccagaggaatgagggggactgtaattttccagac

SEQ ID NO: 95504 - DNA, 122 bp, Homo sapiens
cctccctccagttgcacacaggagcatattgcacatgggatgcatcccgtctgctccacacggagggagtttccactgagcacaacacagggtgtggagtagaatgaagccttgggtgtgtg

SEQ ID NO: 95505 - DNA, 122 bp, Homo sapiens
ccaagcccgctttcccaaaccaacagacccaaagtttccccggagccagagggcaccgggcgcacggctgagcctgcaccaatgtctgtgggccctgcctcgcccacctcctcgccctcccc

SEQ ID NO: 95506 - DNA, 122 bp, Homo sapiens
ctggagagcaggaaagcctggctccccgtggtaaccctaaggcaggccctctgcctggggcgtcctggcaccctacgcgggccggagagccgggcgggggcgcgacgagggggcgcccaggc

SEQ ID NO: 95507 - DNA, 122 bp, Homo sapiens
tgatattacacctaatattgcaggggctgtacacccaccctgggacattgttcctaatatcgagaaggggagaggatgatattaatcccaatatcgctggggctgtacacccctcctgtgat

SEQ ID NO: 95508 - DNA, 122 bp, Homo sapiens
tccgcccacctcggcctcccagagtgctgggattacaggcgtgagccaccgcgcccggcccgccattcgttttttaagttgtctttattaagcgccgctgtgcgccagaaaccgggagcgga

SEQ ID NO: 95509 - DNA, 122 bp, Homo sapiens
agtgtggctattttaaaccctgaggcaatgagaagttttcagatgcgtcctaaggcgctccggccagcgccctgcatgcacacgagggccttcctcagtgtggccccagcacatctgtagac

SEQ ID NO: 95510 - DNA, 122 bp, Homo sapiens
aaatatgattccctgattcaggatcagccccgggaactgtcttacctacggcaaaaaatacgagaagggagaggtgtttgttatcttctcacccagcatgcaaaagatacagtaaaatcttt

SEQ ID NO: 95511 - DNA, 122 bp, Homo sapiens
tggccaaatccttggatgcccctgctgtcaacaaaaccatcaagttgcctctcggcttctcgaccaagggcctgggccaactcccagctctccgctccttgaaaagacaccactggccctgg

SEQ ID NO: 95512 - DNA, 122 bp, Homo sapiens
cccgtggccttaactcatcaggggagggtttctgcagcagaatctcgggctcagggttggcggttaacgagggagcagcggggtcttggggagggggctcgacacccctgaaggtgccccct

SEQ ID NO: 95513 - DNA, 122 bp, Homo sapiens
gctgtccgctgcccgcatcccttccgccctgggcctctgcacggtctgcggttttctgtgcgcacttggtcttcagtactagcacccaattacgtctgggtttttcttctttacagagctgg

SEQ ID NO: 95514 - DNA, 122 bp, Homo sapiens
ggaatagggagggacatagaagggccccgccctgccttctggggcaaagcggagagtggtcggttctgccccacagtaacgcgaggaaagaaatctcgcgaggctggagttctccgggagcg

SEQ ID NO: 95515 - DNA, 122 bp, Homo sapiens
taacaactacttgtagaattaaactgagttgaaaatcaacaagaatagtcctgtttcctacgaagggtattataaaggaaacttatacataacaaaggctaacatttatggagcacttactg

SEQ ID NO: 95516 - DNA, 122 bp, Homo sapiens
gaagtgggagtgaggaagaggaggccggggtgggtcagagggcagggtcactgtggggcgcgtctgccctgtactcagtgtggcaccatcgggcccctcctgctgttgcctgggaagcctta

SEQ ID NO: 95517 - DNA, 122 bp, Homo sapiens
ttgagagcattttaaactacaaagaggaaactggaagatttttttccccctaaacacagacgtgagccctggaatctctgtgaaaggcttttccggtagaggcaagggcctgagtcaatgaa

SEQ ID NO: 95518 - DNA, 122 bp, Homo sapiens
tgacctttcacccccacccgcctcggtgcgatgattggctgtctctgccatccccgcttccgggaccagaagccacctctggagcaactggggcatccccatggcaaccatgccaggccagg

SEQ ID NO: 95519 - DNA, 122 bp, Homo sapiens
gtcggctgaggccattcagccgctgattttcgtcctggaacggacttcgcgtaaacacaccgagccattcagagctctctccaagtcacattctgaggctccggccccggaactctgggcta

SEQ ID NO: 95520 - DNA, 122 bp, Homo sapiens
ggggcctcgcaggcgaatctccagtttcgagtgtgcccggtccctgggttcgctcgccggcgaccccaccgcccgccttagatgagaaggcagcgctccagcctcgtcctcacgccgcctcc

SEQ ID NO: 95521 - DNA, 122 bp, Homo sapiens
ccagcctgggcgacagaatgagactctgcctcaaaaaaaaaaaaaaaaaaaaatgaataccgcatggtttcacttctacaaggtccctggagtcataagattcatagagacagaaagttgag

SEQ ID NO: 95522 - DNA, 122 bp, Homo sapiens
cagggctggtccatttagggagaccgcgcacggagggagctgccttgggtggtcgcccagcgaatctcctccggagcccgagccgcggctttggtctgcggatggcacagcccggcgacccc

SEQ ID NO: 95523 - DNA, 122 bp, Homo sapiens
acctcaggcgatccgcccgcctcggcctcccaaagtgctgggattacacgcgtgacccaccgcgccgggccaaagtctggctagtttttaaattttttgtagagacaagagtttcgctatgt

SEQ ID NO: 95524 - DNA, 122 bp, Homo sapiens
ggtatgcctgcgcaccgcgcgcctggcccgcagcgggctcctagccaagcctcatgttcccgcgccccagtcggccagtcggttctgcaaagctcccgccccgcagagaccgtgggtccagg

SEQ ID NO: 95525 - DNA, 122 bp, Homo sapiens
cccggctcccgctccctgcggggtcggaccggagcgaagctctgtagcgctgagcgatcgcggccaaaaacggggctggaggagccacataagctaggaagggacctcagtgaggagaggga

SEQ ID NO: 95526 - DNA, 122 bp, Homo sapiens
atacctgggagttttcctccaggccgggggcactcgtgtctccctaagcactgagagagacggatccttccgcgttcatgaaaacagctagatggcgccctccccgtgcgctcacgctgacg

SEQ ID NO: 95527 - DNA, 122 bp, Homo sapiens
agttttcggatccgcaggctgctatgaataaagatgccgtagtcagttggcatgcgtcttcgttgcttctgattttttttccttatctgcataaagctcttccggaaataacttcatttatg

SEQ ID NO: 95528 - DNA, 122 bp, Homo sapiens
gggcgctccgctctctccgcgcgccccctgcagccctggacgcagcacctccgtttgggacgccctacgcccaccttaacttgaggctcccatccacgcagcctctgcaagcctcaccgcaa

SEQ ID NO: 95529 - DNA, 122 bp, Homo sapiens
ccccgaggttggggctttgaagaatgcagccgggtgagctattgcttgtgggggtttcctcgcactctgaagcgcgagcgccgggaagggccttccctgggaattgggatactccaggaacg

SEQ ID NO: 95530 - DNA, 122 bp, Homo sapiens
ctgggtgttcgtcagtgaagacgactgtcttatctgactgtaggcacagagagtgcgccgcgagagggcggctcctcaccgtcaggcgccggcaggtcgcgttctctgctggccgacgcccg

SEQ ID NO: 95531 - DNA, 122 bp, Homo sapiens
acgggagccacgccgggtacgctgccggtcgctcaagagcagcacggccccgccccgccccgcccacgcccttggggccacgcccactcccggaagcagtcctcaggtagcgcctccctttg

SEQ ID NO: 95532 - DNA, 122 bp, Homo sapiens
caggttctttttatttttctcttgaactatttaagtaaatcacaactgtcttcgtgtctccgttgctatcccttattgataatacagactacaagtatctttcgattgtacagacagtcatg

SEQ ID NO: 95533 - DNA, 122 bp, Homo sapiens
actgaaaggcagagcgcaggagttggcgagggagggtcctggctgtcacagttggacgcgcgaacggcagcgtctgggcgacaggcgatgtcccagccactgaaaccgtatttgggggcact

SEQ ID NO: 95534 - DNA, 122 bp, Homo sapiens
gggccgtcaattgaggggcgtggcacccgggaaatttaagaggttggaagaacgtcccttcggccttacagaattgcgcttgggtagtcattttgccctccacgcttacttatgtcctgtgg

SEQ ID NO: 95535 - DNA, 122 bp, Homo sapiens
agaatgtgcagttggaaactaggctttggtagctttcactttttatctcctttagaaacacggatgaaagttctgccatcagtgagggataaatagtagcccagggccttgaaaaagcagtt

SEQ ID NO: 95536 - DNA, 122 bp, Homo sapiens
gccgggcgagcgccagccaggccctggaggatggagttgcggccaataggctcgataggccgatgggctccgcagaccggtggggggtgctcctcccagcccagccctggacgccgggctcc

SEQ ID NO: 95537 - DNA, 122 bp, Homo sapiens
aggggacccggaaaccccagggtctggaggagagcaaccaggaagctcttggggtgacttcgttttccttcaggtgtgtctttttagcccagagttaatagttgggtgaagggaaaggaaga

SEQ ID NO: 95538 - DNA, 122 bp, Homo sapiens
cccgggcagcccctgagacctttgcagggggtgtccccaaaccaggtgtggcctgtgcatcgttggtttgggtggagcccggcagctctgcagaaggggaacagagcagggtggagagctgc

SEQ ID NO: 95539 - DNA, 122 bp, Homo sapiens
tcggcctggccctgggagcgttgacatgcggatggagcagggcgggcgttgtctggaagccgctggtgcctggcttgtcttctattcaagccaaggtgcacgtttccagcccccaaagctgg

SEQ ID NO: 95540 - DNA, 122 bp, Homo sapiens
ttctattaaactatgatttttgcttgtgctgcattcaactgactgcaaccaggagccagacggcctgagacctgtgaggccctttccatcaagaaaccagatttcatttcacaagaaactga

SEQ ID NO: 95541 - DNA, 122 bp, Homo sapiens
tccaggcgtggcccttgaaccagcagcctcacatagaagcccattggaaatgcaggttctcgggccctgtcccaacctgctgaatcgggatctttgttttagtatttttctcagatagaatt

SEQ ID NO: 95542 - DNA, 122 bp, Homo sapiens
agagccggggtccacaggcggcccctcaggctcaggatgccctttccctggggatggacacgtgggtggggacgtgccggttggggaccagcaggaatggggcccgggtcccgagcccagct

SEQ ID NO: 95543 - DNA, 122 bp, Homo sapiens
agtccgagctctcgggaggaccgaggggcgcgaacgtgggggtctcacctgccgaatggccgccagcgtgttctcgggcgcgtcgtggctgccgccacggtgggcgatggcagaaatgcggt

SEQ ID NO: 95544 - DNA, 122 bp, Homo sapiens
ctgggggcctgtcgcgcagggtgcgaggggtggtgcgccggggtcaaccgttcggggacccgcctaagaaagtttgagggatgtgtcatttgagagaagggtcagagggtctgggcagcagg

SEQ ID NO: 95545 - DNA, 122 bp, Homo sapiens
ccacctccgaagtctcctccgtggaccacaggtggatctttgtgcgaacaacttgcatttcggaagccactgtccgtctttaaacagaaagtcaaaggagccacgaagcaagcggccgtccg

SEQ ID NO: 95546 - DNA, 122 bp, Homo sapiens
ccctctaccctgctctgtgctgggaggcagactgtgttgggctgggcttgcaaatgtccccgggatttaacattttaggtatggggagacacagacacagacacaactgccttgaaagaagc

SEQ ID NO: 95547 - DNA, 122 bp, Homo sapiens
gtttgggtgcagtgtatttcttactgtgctttaaagaggaacacgttttaagaacccccgcgcggggcggagcagggcggagtccccggcgggaagggacccgagacctcggctgcgcctgc

SEQ ID NO: 95548 - DNA, 122 bp, Homo sapiens
gaagttgagcggcggtaagtgagccgcggcgggcgagggtgtagtggggtcttgctgggccggttttggaggcctggagtcaaggggcgagctcgccagggagggcgagggtcacagcaagt

SEQ ID NO: 95549 - DNA, 122 bp, Homo sapiens
tgggttggttaagggttgaaaggacagtgggacaataactgaggcccgtattgcccagagcgtccccatcccccgtccggagctggaagaggccatagaccgctgcctccacatcttttcct

SEQ ID NO: 95550 - DNA, 122 bp, Homo sapiens
gcagaagtacgcctacctcaacgtggtgggcatggtgggctccatcgacaatgatttctgcggcaccgacatgaccatcggcacggactccgccctgcacaggatcatcgaggtcgtcgacg

SEQ ID NO: 95551 - DNA, 122 bp, Homo sapiens
gccccaacaatctctgtttcattcctgaggatgctgagggcctgagccaggacttggctccgggtcttctcttttccagtaagaaacaggccacgtgtggtggctcggctgggtgtggtggc

SEQ ID NO: 95552 - DNA, 122 bp, Homo sapiens
taaggccaccacctcctggcactgaggaatcagcacacgacattttattctgaaaccccccgggtccaaaacgtcaaacctaaatacacacaatgtgcactggggcgctgctcggtcacctc

SEQ ID NO: 95553 - DNA, 122 bp, Homo sapiens
caacttctgggggctgcagcttcacatcctggaccctagaggggacaacccaggtgttgtcgccatggccaacagctgggtcccaccccactccctcctgccccccctccaggagaggctgg

SEQ ID NO: 95554 - DNA, 122 bp, Homo sapiens
caacctcttcaggtattagcctgaagataaattttaacaaaacatatacacttgggtatccgtcattgctcaaactctatagtgtattgctggagccaataggcagggtatattttattagc

SEQ ID NO: 95555 - DNA, 122 bp, Homo sapiens
caggattttcaccatcaccaaggtgttaaccaagcactttgtggctctagaagtccttttcggaagacaggcttcttctatcatagtggaatccaagttctttgataaaaaaaaaaattggt

SEQ ID NO: 95556 - DNA, 122 bp, Homo sapiens
ctgtcttggcctcccagagtgctgggattacaggcgtgagccacctctccggcctggactcggctacttttggatcaagaaatccagaattttctagactgtgaacttgccctttatcatgg

SEQ ID NO: 95557 - DNA, 122 bp, Homo sapiens
ctctgctgaggatccaggggcccctcacggagactccacctgagggagaagcacctgggccgggacccaggctcggcctccatcccaggatcccctgcagggtgcactgtgtgcgtgcgggt

SEQ ID NO: 95558 - DNA, 122 bp, Homo sapiens
cactcagaatatcacctggaacacagtgggaactgtataaatatttgatgagggactgagcgaactaatgaatggagctcgagggagtgagtgattaagcccaggactgcaggaaaccaagt

SEQ ID NO: 95559 - DNA, 122 bp, Homo sapiens
cagcactgcttgctcacgcctgtttctccttttccttgccggtggggaggtcatgggatgcgcaagcactttgtctcttgctttgttttcagtcgccatatttaatctacgtcgaaacttca

SEQ ID NO: 95560 - DNA, 122 bp, Homo sapiens
gtctcaggcccccgcctctcgcgctgtgacagtgagaagccgagaaagtcatgtcacgtccgtctgaggaggcagctcctcagtgtggcagaaagaaatgcccactctccgagcaccagcca

SEQ ID NO: 95561 - DNA, 122 bp, Homo sapiens
gggctggcagagcggtatcgcaagaaatcaaccaatcagaacaatactaccgcgacgcagcgccgtgtgatcccaccctcgtcaagtgcgcgacttctgccgtcacttcctttgttcggcgt

SEQ ID NO: 95562 - DNA, 122 bp, Homo sapiens
caggaatcttcatctcccgcctggtacgtgggggtctggctgagagtacagggctgctggcggtcagtgatgagatcctcgaggtcaatggcattgaagtagccgggaagaccttggaccaa

SEQ ID NO: 95563 - DNA, 122 bp, Homo sapiens
tcccatggtgtttgctgggagcccctgagcctttccttaccccatccctcccctcctctgcgtgggtccagaccaatcccctgagcgctgagatgccacgtaaacagagctgtgcatgcacg

SEQ ID NO: 95564 - DNA, 122 bp, Homo sapiens
ccatgcctgagcatcccccaccctctgtgggctcctgcgccgccagagcctcctgacgagcgccgccccctgctccacagcgcccagaaccgcccaagggctgcggagtgcaggcgcacggc

SEQ ID NO: 95565 - DNA, 122 bp, Homo sapiens
gattaatctagagcccaagcctctcagcatggtatataaatccctcatgatttgtcttaacggatctgcctccgtttctaactttatcacctactgtaccccgccgtgctccttttctcaga

SEQ ID NO: 95566 - DNA, 122 bp, Homo sapiens
cccctgagcaccgtgttcatgaatctgcgcctgcggggaggcggcacagagcctggcgggcggagctaagggcctccaccagcatccgagcaggatcaagggccggaaataaaggctgttgt

SEQ ID NO: 95567 - DNA, 122 bp, Homo sapiens
gtcaagaaggcctcatgtttcttggacccatcctcctcattttctcatcccaggcttctccgagatactgtttatgctgaggaataagcatattctggcttactgttcacagtggagggagt

SEQ ID NO: 95568 - DNA, 122 bp, Homo sapiens
atcctgcacgtccagccctcagtcggcgagagggcaggctctgtttaaaagccactcggtcggcggagctttgtcatggcagctccagccgcccagtccccaaagcaaatgtgtcaatattc

SEQ ID NO: 95569 - DNA, 122 bp, Homo sapiens
agttaattaatttcaggcaagagggtcctcttttgcgtcagtggtggtgggcacgagccccgaagaacatgccaggcaggcgaaggactgagcaggggtgtccacacgctgctgaatggagc

SEQ ID NO: 95570 - DNA, 122 bp, Homo sapiens
taaggggatcccgttgctagggctgttgccaaggcggggcaacgaggaggggctcgcttccgggaggacggcaattggcaacccggaagcggtcggtagtgcggcgctgtttaaagatggcg

SEQ ID NO: 95571 - DNA, 122 bp, Homo sapiens
ctgcttcccctcccataaggggtttgagcaaccgcgaggacctaacagacgatccacacccgtgtcatacgtcctgagacggggatcagggaactctctcgtttcagtagcagaactggaat

SEQ ID NO: 95572 - DNA, 122 bp, Homo sapiens
agagaagtgaggaagctgcagaagaaaaggctgtagttagaggatggttcataaggtttacggaaagaagctatttccagaacataaaaatgcaaggtgatgcaatgagtacttatgcagaa

SEQ ID NO: 95573 - DNA, 122 bp, Homo sapiens
cctcacttcttgactggcctcctgagtcacagccccatgtccactcaggagctctggggccggcctcacaggtatgtgacttggagacccccacagagcccttgcttggaccccgcatgtgg

SEQ ID NO: 95574 - DNA, 122 bp, Homo sapiens
aaaggctgcgcaccactggcagtgccctacgctggggaagcacagctggacgtcctgagccggggggagtgcatagaggaagcagcagcgctcgtcgcgctttgaggcgctgggaagggatg

SEQ ID NO: 95575 - DNA, 122 bp, Homo sapiens
ctgggccacgagtggaggctgcgcccctccaggtacgagaggggcttccaggtagctccgcgcggcctggggccgaggggaaggagatgagggatgggctcgtgcccgcgcagggtgggagc

SEQ ID NO: 95576 - DNA, 122 bp, Homo sapiens
tccaatgaactagagtggggaactaatgaaagaaataggaacctaattagaaggggtggacgacagtccttggtgagaggcaatggcagtagacagatatgagaagttttgtaatggtgggt

SEQ ID NO: 95577 - DNA, 122 bp, Homo sapiens
ctctttgattccctcagaaggcatagtgactggactgccatatgctaagcacatgataaacgctgactggattctattattatcattgctggtaatgttgagtattctacaaatggcctgtt

SEQ ID NO: 95578 - DNA, 122 bp, Homo sapiens
tttcagtgccgtgtgctggactcagccatagaaaggagacatgagggagaacagtggccccggcacctctgctgccgtgactgactgtccaaacccatggatggagtgacctcaaaaagggc

SEQ ID NO: 95579 - DNA, 122 bp, Homo sapiens
gccgggacacagcctccctggtcctccccagcgctccctggttccccaccgctcttcgcccgcccctcgccccagcccagtccaacccggcccagcctagcccagcgggtggagggcgcacc

SEQ ID NO: 95580 - DNA, 122 bp, Homo sapiens
gctccctgacttggttaagcagcagccgaaccgcagcctcagcaccaacgtgagaggtgccgagccctctccttccttagctactgagctggttcttaagaagcttgttcctgctagtacct

SEQ ID NO: 95581 - DNA, 122 bp, Homo sapiens
ctcgatctcctgaccttgtgatccgcctgcctcggcctcccatagtgctgggattacaggcgtaagccaccgcacccgacccacgcccagctaatttttgtatgtttagtagagacagggtt

SEQ ID NO: 95582 - DNA, 122 bp, Homo sapiens
cttgtgcttcctcttctgtgggttttctcctgcttgtgggagggcctttttctctcctcccgacagaaaggctatctttggtgttcgttcccttgaactgtaacatcctgtaagggtatgat

SEQ ID NO: 95583 - DNA, 122 bp, Homo sapiens
aaccacgcactttatcattgcgaaaggggacagagaggatcaggatgttgggttgtgacacgcgagagagccccatctgtccctggctgctccgctgaggtcatggtacagcacagaggacc

SEQ ID NO: 95584 - DNA, 122 bp, Homo sapiens
ggccacacactcacagaagtactaaacatgtccaattaaaggctccaaggcaaatggccccgcgttaagggacaagtggtcggcgtcctgctccagctgccttcccattcccccgcagatct

SEQ ID NO: 95585 - DNA, 122 bp, Homo sapiens
ctcttcagcatttattggtggcagaagaggaagatttctgaagagtgcagctgcctgaaccgagccctgccgaacagctgagaattgcactgcaaccatgaggtaaatattttcccttcgta

SEQ ID NO: 95586 - DNA, 122 bp, Homo sapiens
ttattgctcacaagcggaggacctgagttcgcagcaaatttctccagccacccgggagcccgcagcccggccctcgcgtctgcgatgggagctcgataaggtcaccgtcaacagcatccaca

SEQ ID NO: 95587 - DNA, 122 bp, Homo sapiens
gaggtttgggaacttgcccaaggtcactcacagtgagtcagctttttagggggaggagagcggctcacactctgggaaacacagtcacctccccactggggagcagggccaggcaggagggg

SEQ ID NO: 95588 - DNA, 122 bp, Homo sapiens
ccctcgccggagtcatagccacgagcaccctcgccggagtcatagccacgagcaccctcgcgggggtcatagccatgagcaccctcgcgggggtcatagccatgagcaccctcacgggggtc

SEQ ID NO: 95589 - DNA, 122 bp, Homo sapiens
aggcaatacagacacagacaaataaatgatagatgagaaaagaaagtaagggcatgggcacggaactggcagagaggtcgtcatgaaggtgcaggagcttaggtgaactacccaggttgggg

SEQ ID NO: 95590 - DNA, 122 bp, Homo sapiens
taaatatactgtcctgacttgagctttattcacatttgctttctaggttattcaaggacacggaaaagccaacaccatggtagcattaatgaacgtttaccaagaggaagatgaagcatacc

SEQ ID NO: 95591 - DNA, 122 bp, Homo sapiens
gccccaccccaggccccgcctcacctcctcgaagccccgcccctatgaggccccgccccgcgcagaggaaccgcccccaaatccccgccccctcggaggccccgccctgcggacacctggag

SEQ ID NO: 95592 - DNA, 122 bp, Homo sapiens
gagtgtcactcaggctactcaagcgtgaatcttcaaaaaccttggcagaaatactcactccggctttcgtttcttgccagtttgctgggataacttttggtcgtttgtacatatggctctgg

SEQ ID NO: 95593 - DNA, 122 bp, Homo sapiens
accaatgatccgaagccttctttcctgatgggattctttagcgaggacactaccgaggcgcgacttcctgacgcgcatccgatccgggaaggcgcacttccgctccccagttgccgcgggat

SEQ ID NO: 95594 - DNA, 122 bp, Homo sapiens
tgccagccctgatcacagcagtgtctgtgctgtcccctgggggtgccacacagcttcccccgctcctacctcctctgtgctaattgagccctggcttggttgcatctgctttgctggcaact

SEQ ID NO: 95595 - DNA, 122 bp, Homo sapiens
gtggtggccgttggaattcaaaagtggcgggtgtggcgcggggctggtagcggccggagccgtgcgagttctctaccctgcttcgcgagcgggcgagagaacgcgagtcccaggatccccgg

SEQ ID NO: 95596 - DNA, 122 bp, Homo sapiens
ttggttccgcccgagccgttctactccaggcagacgggaggagaaacacggcgcgctcagcgtcccctgccccgttggttctgctcgggcccttccactgcaggccgacgggggtggaaaca

SEQ ID NO: 95597 - DNA, 122 bp, Homo sapiens
ttaaaaggatgggacactccaccctcagcagaaaatgatacagtttatagaaaacctccccgcccctcccacaccccaattaaaaactacaaaaaaatctcccctccttccctacgatgtca

SEQ ID NO: 95598 - DNA, 122 bp, Homo sapiens
gagagtatcacccacagaatgcaagctgactggtgtgtgcctgcctacctacatacaccccgaggaaggcacagcacccacagtacgtgcgttcactgcaaggaaagaatcttccagtcacc

SEQ ID NO: 95599 - DNA, 122 bp, Homo sapiens
ccatttggcagaagaagagaaggcagcaaaggagcctaaggagaaacagctgaggctttgcgtactgtcatagaagccaacagaagacagcaatttgacaagtgtcaagtacttttgaacat

SEQ ID NO: 95600 - DNA, 122 bp, Homo sapiens
gaggagggcgggcgagcgcgagtgtgtgtgtctctctcgagtcatttacggcggagcagccggcgcgagcgccgaggaggcggcgacggcggcggcggctgcttcgtgcaactgtggcttcc

SEQ ID NO: 95601 - DNA, 122 bp, Homo sapiens
acttctgctaacttgtgtgccagtggatgcaactcactaccttgcagaaggatggctgttcggaagaattggttgtaaggtgctctctttcatccggctcacttctgttggtgtgtcagtgt

SEQ ID NO: 95602 - DNA, 122 bp, Homo sapiens
attaaatgaattaatacatataaaatgcttagaggagtgcccggcatatggtaagcccttcgtgtttgttagtcatcatttttttagttcctattatgtgccaaactttgtgctagactctt

SEQ ID NO: 95603 - DNA, 122 bp, Homo sapiens
agtcctcggcggtgctcctggctgggcgtgggggctttgctaccagtctgccctgggtcacgtctagaaacctcagctggaggcgcgggtcgtaaagtcctgacacttcctgttcctctcag

SEQ ID NO: 95604 - DNA, 122 bp, Homo sapiens
gaggaaagctgcccctctgaaagaggaagaaaatgggcttaatcctcatcgagctgggggcgcggggggggtctcaaaattggtatttgtttcttagcagctgctgctgtgtccaaggcttg

SEQ ID NO: 95605 - DNA, 122 bp, Homo sapiens
acttttatttctgttagacagtgctgatctctaccaagtttaaaatagcaagaccagcaacgtggcaaaaccccgtctctacaaaaaatacaaaaattagctgggtgtggtggtgggcccct

SEQ ID NO: 95606 - DNA, 122 bp, Homo sapiens
ctgccacagcgtgtttttcagttactctggtaacacctgtgacctgagggttattctattcgcgttagcaactcgcgcgggttgggaggcgccaatgagagcagggcttgaaactagcgctt

SEQ ID NO: 95607 - DNA, 122 bp, Homo sapiens
caagtgactacccttgaagcacatccccttctggatctgaaaagagcccttggctcagggcgtctttttccagcccctgaggaaatggaatgaaccactccctgcccattccctataagaat

SEQ ID NO: 95608 - DNA, 122 bp, Homo sapiens
ccgaccctgatgaatgcaggctcactggctttgccaccgcatgcccccggaggcatcagacgctgcttgtctctgctgcctttgaaaggtgtgcgtggagtcgcaggcctgaactacatgag

SEQ ID NO: 95609 - DNA, 122 bp, Homo sapiens
gacttggccagtctcatgcttagttttacatccttcaataaagtatgtaaaaacagtatgcgaggggagttgacgaacgagagtaggtgaatttgggagagtcaggtaggttggaaaagaag

SEQ ID NO: 95610 - DNA, 122 bp, Homo sapiens
ctgacccatcccgctgcacctcttgtttcccaagtttttgaaagctggcaactctgacctcggtgtccaaaaatcgacagccactgagaccggctttgagaagccgaagatttggcagtttc

SEQ ID NO: 95611 - DNA, 122 bp, Homo sapiens
aaataagagcagttaccatgtctagtgcctaatgtggtcctgcacgttactatattatctcggtatccacttggcagataaggaaactgaggctcagtatgtccaaggctaggcagccaata

SEQ ID NO: 95612 - DNA, 122 bp, Homo sapiens
tttctaactcttccttctccaccaacctcttccgtccaaagaccttgaatctgacctgcacggtgtttggaaaccctgaccccgaagtgatttggttcaagaacgaccaggacatccagctc

SEQ ID NO: 95613 - DNA, 122 bp, Homo sapiens
acaaggaaggctctcaaagacatgttaaacagaagcaacatgtcttagagtagcatatggcgcaggatccaaataagtaaagtaatacttacatttctctgtacacacatagaaaaaggtct

SEQ ID NO: 95614 - DNA, 122 bp, Homo sapiens
gagtgacattccagaagagtgactaatgacataaaacgattaagaaaatccatgtggcagcggccaaccggaaacagttttgtcccaggctgcacagggtcggaggccccaaggtcaccggg

SEQ ID NO: 95615 - DNA, 122 bp, Homo sapiens
gcactgggcccgtgtggaactaaacacagaacaggggcatgagtgctctcaacaagaccccgccccgcagctcgtgccaggtctcctgctcctggaggcaaagggagcgggctggccccaca

SEQ ID NO: 95616 - DNA, 122 bp, Homo sapiens
gtgcacttaataaggggcaggctgcagctgtgtgatctttggcaaaggatttaactacttcgagcgtcagtttcctcatcaataaaatgacagcatacgatatttagtgcccagcgttgcat

SEQ ID NO: 95617 - DNA, 122 bp, Homo sapiens
ccagtcaatgtgcagcaaacccacttcagtaggcagaagagtctacccctagggagaaggcgccaggagcaggcaggtgggagggaaagtgttcggcagggcagaaaccctgcctggctgta

SEQ ID NO: 95618 - DNA, 122 bp, Homo sapiens
ctcctttgacacgcctcccctctccctttgcatagccttggttaagaactagcatttcttcgtcccctctccctgtcccctctcactgtccgcgaggcagcagcccccagcctactccgcga

SEQ ID NO: 95619 - DNA, 122 bp, Homo sapiens
tgggaagtttcctccttgggggtcggcacctagactgtataccccccagggcggaaacagcggttcacccaccaggtgcttaagaagggtttgtggaccagtggacctcctgctctccctgg

SEQ ID NO: 95620 - DNA, 122 bp, Homo sapiens
gagaggtcttgcgggagacaaaggctacgcccaggggccgtgtgggtctttgtgcggacacgtgcatctcacgtttgtgggtctttgtggatttgcggtcggggacgcgccgctgtcggtgc

SEQ ID NO: 95621 - DNA, 122 bp, Homo sapiens
atgggtgtctcatggactccccctcacctgctcaaggacagctggcaggggctgtggccacgctaacccaggagttcagagaaaaaggttccccacccaaggggacactgggagcaaggatt

SEQ ID NO: 95622 - DNA, 122 bp, Homo sapiens
cttatcaagaaggcttcaaaaagctggtagggtttttagtatccatgtcacacagaacaacgccatttggtctggaagaatggcctcaagttggctgtctacattagtcagcatcatcaaac

SEQ ID NO: 95623 - DNA, 122 bp, Homo sapiens
gtagagagagagacacagagcttgttaatggtctgagaaagccagtgacttgctccttcccgagtccaagagcgacagcgacagattggtgagtgccaagctgaggatgaccccgtcatcaa

SEQ ID NO: 95624 - DNA, 122 bp, Homo sapiens
ggggatgtgggccgtctttgagaagccgccagcccccgtgttaggagtgggacaggagctcgagggttctttttgggacatacaggaagctggggtgtcaggagacagaggggttctgtagg

SEQ ID NO: 95625 - DNA, 122 bp, Homo sapiens
atccggggcaagagccgcgccgcaggagaggcaggctggaccgggggctccccgggcccgcgacccccgccgtgaccccgcagcccccagctcgcccccaagatgatgaagaggcagctgca

SEQ ID NO: 95626 - DNA, 122 bp, Homo sapiens
agttaatggcagcccggaggcggaggagcgtcctgactcaggcagtgttccagtaggggccggaggccaccttggggaggaacgtgcacagaggtgactaatcaactcggcagaggttggag

SEQ ID NO: 95627 - DNA, 122 bp, Homo sapiens
agcaaggacggctgtggctctctgcccagtgtataacaagtccctttttttcagggaaggcgctggtgcttcagagtcaacggacagactttccatatgtttctgctgctatgccatgtttt

SEQ ID NO: 95628 - DNA, 122 bp, Homo sapiens
ctggtcgtgcggcccaaggacttggccctgctacggcctagcaaacggcagccacccctgcgaagacactctccacctggccgtgcccctcgacggcccctgcttgaaggtgggggcttctt

SEQ ID NO: 95629 - DNA, 122 bp, Homo sapiens
tgcataagaaggggccgttttcctctccacaggattgcagggggacgggtaagctgcacacgcggatggtaaagccatttacgcttggagaagcagccagtgtggctcaaaggagttggcag

SEQ ID NO: 95630 - DNA, 122 bp, Homo sapiens
gggatggggaggggggtggggtctgctctctggccactgtccccaagagcatcccgaatacgagttcctttaattctctccctctctagtttcaacctgccaatttccccctttccctgcct

SEQ ID NO: 95631 - DNA, 122 bp, Homo sapiens
tggccttgtggattatgatgtggtagagatgagcaacctggcctaccaagtgctgcatggcgaggcactggctgcacaggccaaggccgcttcggccgccgcctcgctgcgcggcctcaatt

SEQ ID NO: 95632 - DNA, 122 bp, Homo sapiens
tcttgaaaggaaaggtttgaaaatcttacaggaaacgtcacgtggacgaggtggacacagcgctcgttcgccctcctgcacgtccgctgagccgcagggacaggcaacacgctgtggcgagt

SEQ ID NO: 95633 - DNA, 122 bp, Homo sapiens
gcagggggaggttggtgggtggtggttcctaggaagaggctgtggtgtttgtgagctgatcgaggctgggcttcaaaccctggtgacttctctgggcctgggttcctccagctgggatgtgg

SEQ ID NO: 95634 - DNA, 122 bp, Homo sapiens
caaaggcttgggatggggaggctgagcgctcagagcgcggagtctgaggacccctcgccgcgccctgtatcccacccccctggctggagagagcgcctcagtgacccagactccgagatccc

SEQ ID NO: 95635 - DNA, 122 bp, Homo sapiens
cacaggtgagctaataaatcttccagaagaagggaccctcagaggatgttgcagccacagcgtgagttaaattttaagtgtctggtttgtcccagagaatccattgctctgctttgtgtctc

SEQ ID NO: 95636 - DNA, 122 bp, Homo sapiens
attattattattgagacagtcttgctgtgtcgcccaggttggactgcagtggcacaatctcggctcattgcaagctgtgcctcccaggttcacgccattctcctgcctcagcctcccaagta

SEQ ID NO: 95637 - DNA, 122 bp, Homo sapiens
tcctggagtgagaggtcagggcgtagggttcctcgccgtcttccacgtcggccatggtagcgccgcggagccgatggccgacgttgggttggggaaagccggaggctgtggcggctctgtgg

SEQ ID NO: 95638 - DNA, 122 bp, Homo sapiens
ctcgggagcccgctccccagcgtccacctggtgaaacttcagagcccccagaggagagaacgaaagaagcaaccaacctacacgaaggataacaaaactggaggggaacagagggcgggacc

SEQ ID NO: 95639 - DNA, 122 bp, Homo sapiens
cagtccatcctccgcgagtaacctcagtccatcctccgcgagtatcctcagtgcatcctccgcgagtatcctcagtgcatcctccgcgagtcccctcagtccattttccctcgagtcccctc

SEQ ID NO: 95640 - DNA, 122 bp, Homo sapiens
aagctgcctgcattccttggctcatgacccctttccatcttcaaagccagcaatgccagtcggattcttctcatgaggccatctctctggtttttactcttctgtctccctctttcccatgt

SEQ ID NO: 95641 - DNA, 122 bp, Homo sapiens
taagcctcaatggacagggcagtgattggcatcatcttccagatcaagctgcccaacttccgtgggaaagggaaaggtacttaatcagtccatctcccccatgcctcccttatcccccagta

SEQ ID NO: 95642 - DNA, 122 bp, Homo sapiens
agttctcgggctaggcggtggcattgcaccccctgtggcaatgagggtggctgaagggctcggcttgtcggtggggcagcgagagccgggtgcacgcgccggggaggtagccaacagccgtt

SEQ ID NO: 95643 - DNA, 122 bp, Homo sapiens
cgcctagttaagtctgttgaacgagaattctaaaaccttgacatgtgagctaacgagccccgcagctccgaggcccgagtgcttggtttaatgactgcacttatcccaccctatcactcacg

SEQ ID NO: 95644 - DNA, 122 bp, Homo sapiens
cgcaggaaacaatagaggccgcgcgcacagagcgagctcttgcagcctccccgcccctcccgcaacgctcgaccccaggattcccccggctcgcctgcccgccatggccgacaaggaaggtg

SEQ ID NO: 95645 - DNA, 122 bp, Homo sapiens
tggatagattctggagactttaggggactgggccgggggaaatgcggcctctaagctctccgctgaggcggcttggaaggaatagtgactgacgtggaggtgggggaggtggctggcccggg

SEQ ID NO: 95646 - DNA, 122 bp, Homo sapiens
cttactcgcgcatgtgcaagccttccctcgctttcctcttccaagtagccttgcctagagcggagcctcccgcgccatttctgtgcgcctgcgtagcgtgaccctgcgcagcctgggaggcg

SEQ ID NO: 95647 - DNA, 122 bp, Homo sapiens
tgccgcgtgatggagctggtgcaattgttctaaagtttggtcagctcctccagcttcaggcggtagagccgatgggtctcctgggggccggaggggagaggctcaggccagttggggagcta

SEQ ID NO: 95648 - DNA, 122 bp, Homo sapiens
cttccacaagccctattctgtgcttaaaaattgtcctctccaccgccccagcagtcctgccgctgcctctcccatctcctactggcttcaccgcccaagtgggtgacatcagacttggagag

SEQ ID NO: 95649 - DNA, 122 bp, Homo sapiens
ccgtggcggacgcaggggtttctggaggagggctctggtccagctcaggaccgggaccggcgggggttaaccctcggcaggcgggaccgccactgcctgcccatcccccaccgccgactgcg

SEQ ID NO: 95650 - DNA, 122 bp, Homo sapiens
gtgggtgcagcccaccgagggtgattagaagcagggtggggcgttacctcaccagggaagcgcaaggggctggggaactccctcccctagccaagggaagccacgagggactgtgccatgag

SEQ ID NO: 95651 - DNA, 122 bp, Homo sapiens
acaaaattaagaataaaacaaaacatgctttcctgtttatgtctgccgagtggagattcccggctgaatgggtggagatcttggggcattgccctggtcctccttttccgtagtcccaaggg

SEQ ID NO: 95652 - DNA, 122 bp, Homo sapiens
cgcgcactcgccctccccgcgcacgcgcactcagggcctcttcgcgccttcctggccggtcggcttatgagcatctggcggcccctctgcctgcttcgagcctgggcgacctgggcggcgta

SEQ ID NO: 95653 - DNA, 122 bp, Homo sapiens
ttatgagtctggactccggagaactcaaaccctcgggaggcctagagactgcgcagtgtccggatatagaaatattgaccccgttactgaaacagtaacagcagactgcagcttttcatgca

SEQ ID NO: 95654 - DNA, 122 bp, Homo sapiens
tggacgtgcctgtctccaatactgcacaatccgccctcactcatttgctccgttgcctgtcgaaagcacagagcgtaattactaaagttaagaaaacatccctgtaattagccaggcaactc

SEQ ID NO: 95655 - DNA, 122 bp, Homo sapiens
cccggaactcttgaaggcctgtgagcgccaccagaagccccggctcccgcaggcgcctctcgctccacacctccacgcaagcagagggagtcggctccagcctcggccagccccagagaggg

SEQ ID NO: 95656 - DNA, 122 bp, Homo sapiens
gggctctgtcggggacctcactgaaggcccgggggcccccggcccggtcactctggtccacgtacttcttcttggggaaggacgatgggtaataggccgaggccttctgcttctgccgggtg

SEQ ID NO: 95657 - DNA, 122 bp, Homo sapiens
caaatataatgatttcacatccctttatctgcagttctgaaatccacaaaactctgaaaacgaaatgttttttcatagatttgcagcaagctcacttggcagagaaacctgaccttagctag

SEQ ID NO: 95658 - DNA, 122 bp, Homo sapiens
acaaacagatgtgcttgataaagaaaatgtcagcaaaaatactaaagcaatgtgtcacagcggctttctgacagatagagggaaaaggtaaaaaatgttctatcatgtccgacaaggtgttc

SEQ ID NO: 95659 - DNA, 122 bp, Homo sapiens
tctacacttgcggacctcctgggtgtgccgtatgtgaaacctagggcagggggcacccaccgcagccttcctggagaactcataaccaagcaagcagccattcccacagcctctggggacag

SEQ ID NO: 95660 - DNA, 122 bp, Homo sapiens
accagcatggtaaaacccccgtctctgctaaaaattcaaaaaatcagcccggcatagtggcggtgcctgtaatcccagctactcgggaggctgaagcaggagaatcacttgaacccagaggc

SEQ ID NO: 95661 - DNA, 122 bp, Homo sapiens
aggacgagcccaggagccgagacgagactcctctgtgtaccatcgcgcactggcaggactcgctggctaagcgatgcatctgtgtgtccaatattgtccgtagcttgtcattcgtgcctggc

SEQ ID NO: 95662 - DNA, 122 bp, Homo sapiens
ggttgccggggcgagggctgctcgctctctcttaacaggggcagccggcggagcactatacggccactgttctccgagacacaaagagggccttgttttgggtgtggcctcctggaagagag

SEQ ID NO: 95663 - DNA, 122 bp, Homo sapiens
gtccggtgacgctgccagcgcccggagcaccaggggccgaaggggtccacagagcagccgcgggacccccggaaacccattgcgaccggccccaggagacccaccaccaggctcccactgtg

SEQ ID NO: 95664 - DNA, 122 bp, Homo sapiens
caggtccaggaggacgcatcgtctttttagtaacagtgcatgctgtgaggcttgtagagtcgcctctctcttcaggcgcagcagagggcggccgcaatagtacgctcgcgcggcggtggcgg

SEQ ID NO: 95665 - DNA, 122 bp, Homo sapiens
tcctcgtgccctgcctgtcggggctgagtggcgttctgagtgccctcactacttgcgtcccgctgtggctgccccaccaaggccgagcccacctgcaggcctccaaagcccagactgtcatg

SEQ ID NO: 95666 - DNA, 122 bp, Homo sapiens
cactcgcgcgccagcttgcgccccttctgccggtcgtcgtcgaggaagcagcagagctcgcgcagctcctggttgtcgtcctgcagccgctggttcacgtccttgaggccgcggatctccag

SEQ ID NO: 95667 - DNA, 122 bp, Homo sapiens
ggatgcagtgcccgtgaacttggggcctgaataattgataacaacccgctgggtgcccgtcgcgcggccaggcctgcggggagcggagccggaggcagcaagcaaaggaaacgcacgagccg

SEQ ID NO: 95668 - DNA, 122 bp, Homo sapiens
actctgagaagttaaaaaaagttatacaccttccccacgccgcccccagcctgccaaaaacgaacagagcagatactgatactcttgaaggtttaaatctcagttccgtcatttactggttg

SEQ ID NO: 95669 - DNA, 122 bp, Homo sapiens
ggccctagagtagagctgggagggctccagggtgggtgatggggcacgtgacaccagtaccgctatgcgtccggcccacccgagcctccgtgctgtgcaaggagcgggctgcaccccagagc

SEQ ID NO: 95670 - DNA, 122 bp, Homo sapiens
ccgtagcccttaccagttctttgggcggcttctcctgggtctttccaaacagccccatgacgaactgaacccgtcttgccccttccggctttcagttccccgcgcccaggcaggtcacgggc

SEQ ID NO: 95671 - DNA, 122 bp, Homo sapiens
tgcagcctctgagatttgtattaatttttgtgagccggggaaaggccttgctgctttctccgccaggactgatgtgtcttcccaagatgaaagtgcctggtaagggcgaggggcctccctgg

SEQ ID NO: 95672 - DNA, 122 bp, Homo sapiens
acagacaagccaggtgagaggcgcagcctaagccctgaaaaaccacacaggaagaggcagcggcagaggccccaccccagccggtgctgctcccctctcctcttcatcaggactgtccccgc

SEQ ID NO: 95673 - DNA, 122 bp, Homo sapiens
aactctttgagaaaagttggagaaaaaaggaccggggagagtttggtttaatattccagacgccagccatggatgcctctgccctgtgtcactacatgttcttttctgagaaacattcaaat

SEQ ID NO: 95674 - DNA, 122 bp, Homo sapiens
gacatgcggtcacctggcaggcgtaggtgatggcctctagctgcagggcagacagggccccgctgtccgagggcagggccagggtgtaggtgatgtctgggggtgggacgctggacagtgtg

SEQ ID NO: 95675 - DNA, 122 bp, Homo sapiens
aagattgactatcaatgttgtccttgtttgcaagggtacacttccctacttttttgcaaacgacccatccaaatgtatataatttttttgggcagagatggagtttcatcatgttgcccagg

SEQ ID NO: 95676 - DNA, 122 bp, Homo sapiens
ccgtgcgggaggggccctgctggcgcaaaaggggtagggaacagcctggtagggggagtccgtgggccctctctgagttgcctctccagaagcatgaggcctgggtgtcccatgttcggaaa

SEQ ID NO: 95677 - DNA, 122 bp, Homo sapiens
agcatccctgccccgtccacggcgggcagcacaggggagaacagcagggcgggaagctgccgtccagcctttgactcggtgcagattggttattttcccagggcatgagcctgtctgttgga

SEQ ID NO: 95678 - DNA, 122 bp, Homo sapiens
cttatactaaccttcatttttccagatgtttttgaaagttagctaattctgtcttcagagcgtgggtcactggatctgtgaaaaccgttgaaaaggaccaagtctgtctttgtagttggaag

SEQ ID NO: 95679 - DNA, 122 bp, Homo sapiens
ctccggctctagctctctccatataaaccctcaagattatgtcaattggttagagccagccgggaatttcgtgcgggtgctgaaggagctgcgggagccggagaagaatgaaactgcgtgga

SEQ ID NO: 95680 - DNA, 122 bp, Homo sapiens
ccaagcgagaccctgtctctaaaaaaaaaaaaaaagttatagaagcataatcattaatcccgtcagagattatgtacaggaagaggcaggggctaggatcattgaacttgtcttttctaaaa

SEQ ID NO: 95681 - DNA, 122 bp, Homo sapiens
ccctttcatcacatcatataagtctgtgcaggtatgcttggcctctgtggtatggctggacgactgcaaacttgggctgttaactagtgcatgatttgaaattatttagccattggatgagt

SEQ ID NO: 95682 - DNA, 122 bp, Homo sapiens
ggcccctcttctcttccagagtgggaggcctctcccctctcttagagtgggtggggagagcggttgccatgggcagctttccttgtgagccacagggccctctggacacactgctttctggc

SEQ ID NO: 95683 - DNA, 122 bp, Homo sapiens
acctcaagtgatcctcccacctcagcctcccaaaatgctgagattacaagtgtgagccaccgtgcccagctgcaatttgcattttagaaaactcatactggccatgtgttggccaacgactt

SEQ ID NO: 95684 - DNA, 122 bp, Homo sapiens
gttagatgctttcttcctgatcacgcccctgagagcattgccctcatccctgggcctctacgtcagagttaagaatactgaggctcaaggctgaactgctccacatcacccagttggtcatg

SEQ ID NO: 95685 - DNA, 122 bp, Homo sapiens
tgagagctcttgaaccaagtcagcgctggagtcggctaggcggctggaaacggcggctgccgccggtgactcagggaggcgggaggcggggtaagagcgccgcggcctcggctgcggggaga

SEQ ID NO: 95686 - DNA, 122 bp, Homo sapiens
cgcctcccctagagagcttttacttacagcgaaggtcaggaacccctgtaactctcacaccgcaccactgtgggtaagcgatgtctgcagggacccctgacggccactgggaggccaggaga

SEQ ID NO: 95687 - DNA, 122 bp, Homo sapiens
tcagtgaggtacagagaaaaggaaaggggggaaagaggttagaagaaagcttcactaggccgaattgaagaagccaagagtcgcgaaggtgtagaagcatgtctaattctgagagaagaaca

SEQ ID NO: 95688 - DNA, 122 bp, Homo sapiens
gcgcctcaaaatagaggtctctaatccatcctctccttcctgtctaagggaaaaacttcccgcaggtttattctgaggcaaaggctgcgtcatacctggggattccccagtctcacaggcct

SEQ ID NO: 95689 - DNA, 122 bp, Homo sapiens
gctccatggagcggccgatccatagggtgcggggccgccgccgcccgcaggagccgccgccgcctattgttcatgcgcctccgcagagctgggaggacccccccccaacgacggcggccgca

SEQ ID NO: 95690 - DNA, 122 bp, Homo sapiens
agtcccaactctcagcatcatgcccaatgcacaggtgaatggaatgaattcactccgcagcgacttctgctgtgaagtcaaggagggctggagctgcgtcttaattatctctatttccacgg

SEQ ID NO: 95691 - DNA, 122 bp, Homo sapiens
ctctgtgggtaacagaaaagcgtcgcgccctgagtgtccccgcccggaaacacggcagcgcgaacagtggttccgcccggctcgggctacgcgactcttaccagggttatctccgggccacg

SEQ ID NO: 95692 - DNA, 122 bp, Homo sapiens
ctcactcaggaagtgatggactgaccccctgcgagtggatgaagaaactgctctcataagcgtggttatgcagatcaaagagtgggtcctctacacatgttcccaattaactgtggccatcc

SEQ ID NO: 95693 - DNA, 122 bp, Homo sapiens
gggatgctccctctatgagagaattgggtaaacatggcgaccgcggcgcccatttgcacacgctacacaaatgcatcgcattcccggttgtttgcagaaaatttacagctgagtaataaaag

SEQ ID NO: 95694 - DNA, 122 bp, Homo sapiens
tggagttctgccttggaaaaaatttttagcgacatggaagagtgtgaccctacgcttgatcgaagcctcaaatttaaatggctggcctccactgcgtttgccccttataccgagatgcttaa

SEQ ID NO: 95695 - DNA, 122 bp, Homo sapiens
gagatactcaactttggagaggaaggaagcgcagaagccagcgacctggagccctacgcgcggcactctagtaagcccaggttccaggtccccattactggatgttaggagaagttcagtcc

SEQ ID NO: 95696 - DNA, 122 bp, Homo sapiens
cgtaggatttcgttgctccaaacccaccaggcctaagccatgtaatccgacgcgatccgtcggcttgatgactcaccactggaaagcgctccctgcaatccctcacagttcagacaactaag

SEQ ID NO: 95697 - DNA, 122 bp, Homo sapiens
gcctggacacctccttcggggccccagttcactcctggctgagttgcatccttgagcccacgtcacccccttggaggcttcccctccctcctgcactcgctgacgcggcagccagaggaccc

SEQ ID NO: 95698 - DNA, 122 bp, Homo sapiens
ctaatagtcacttaacaaatagagttatcttctttgccaaaaatgcaggtgtgttttggccgggagcagtggctcatgcctgtaatcccagcactttgggaggccaaggcgggcagatcaca

SEQ ID NO: 95699 - DNA, 122 bp, Homo sapiens
ggtccgataaacgagatggctgtggtggggaggagcctcaggcggcccgggaccctttggcgtccgtcgctgggaggcggagggactcagagccgaggctgtgcccaggactgtcccgggcg

SEQ ID NO: 95700 - DNA, 122 bp, Homo sapiens
cgtggtccggccgagggcggcattccgggaccctcacgccacccttctccagagcgtcgccgaccctctaattggtctccccagaagaggctgaggccgaaacagtagttcacacttctgag

SEQ ID NO: 95701 - DNA, 122 bp, Homo sapiens
cgtctgcctactcagcccgctacgaccgcctggccagcgtggtctacgctgtcatcacgccgaccttgaaccctttcatcaacagccttcgcaacaaagaggtcaagggcgccctgaaaagg

SEQ ID NO: 95702 - DNA, 122 bp, Homo sapiens
accagcctggggcaacatggtgaaactccgtgtctacaaaaaattagctaggcgtgatggcgtgcacctatacctcctactcgggaatcatctgagccggggaagtcaaagtcatgcctggg

SEQ ID NO: 95703 - DNA, 122 bp, Homo sapiens
acaaccccccgctcccatgactgccaaaagcatggagcaggagtcggggtgcgggcacaccgtttgtgggccggcccggtctatcccggggggctaggacgcgacgaggttggagcgaggat

SEQ ID NO: 95704 - DNA, 122 bp, Homo sapiens
aatatttggctttgtgcctggcccatgcactgtaaaagttggctgtgtactgattttattcgtagtattggcttaagagcatggaagacagcacattgttaggctcattctttaggtccatt

SEQ ID NO: 95705 - DNA, 122 bp, Homo sapiens
acatcttattttttcttgcaaaagagaacaacttctgaacattcaaaaaagccaccatagcgatagcaatacacacacatgcacacacacatacatacaattattttatgtatctaaatgtt

SEQ ID NO: 95706 - DNA, 122 bp, Homo sapiens
tttataatgctttttgccagcttaaaagactcatgcctcagacacactgatgcaatgagacgctaatatcatattgcatcatctgatcctaggtgtggtgctcctgaaactggtttttcttg

SEQ ID NO: 95707 - DNA, 122 bp, Homo sapiens
tcttcctcctttcactttcactttcctccaaagggcggcatgaggggcggtggaaatccccgctctggttaggtgaaggtgcctgggggaccggtgtttccccactggccaggcagggaccc

SEQ ID NO: 95708 - DNA, 122 bp, Homo sapiens
cgcgagggccggggcggaggcggaggccggcggggcagctagcgcagtgaagtttggcggcggaggggccgggcgtcccggggtcgcgaggaggcggcggcggcgcggggaccggggccatg

SEQ ID NO: 95709 - DNA, 122 bp, Homo sapiens
ttggtactttggatataacatacaactgtagctccctgagatgaagtcttctgttctcatcgtatgtggactaggaatgaatgaaatattcattgtatatgaaattagaaatgcagcgagaa

SEQ ID NO: 95710 - DNA, 122 bp, Homo sapiens
agggagtcggccgcgcttgcgcggggagtgtcttttcgtctccgggcggcggcagcagcgcgtgtgtccggaacttttctgggactaagtcctgcacccacgagtagaaaacggctcctggg

SEQ ID NO: 95711 - DNA, 122 bp, Homo sapiens
gacagcaaacgctctgctaagttagcgctgccgtctcctggggtcaatgcactcgagtggcgtttcctgggctaactctactgtaagaagctgtcaacccggatacggctggacgccggacg

SEQ ID NO: 95712 - DNA, 122 bp, Homo sapiens
actatgagaaataaatttctattgtttataagctacccaatgtaaaatattttgttatagcggcctaaatggactacgacacagttctttatcttagctttgcaaatcagtagtgctggtgg

SEQ ID NO: 95713 - DNA, 122 bp, Homo sapiens
gtgcagccactctgtaaaaccttttgctagtttcttcaaaaaaagtcaaatgtggctggacgcggtggctcacgcctgtaatcccagcactttgggaggccgaggcgggcggatcacgaggt

SEQ ID NO: 95714 - DNA, 122 bp, Homo sapiens
cttgcgcggagggctggtcttgcgcaagcgcagtcaccacgtcctcctatccccacccgccgcgaatttccaatagagtctgcactaggaaactggtgggagccgaggtccggaagtccgac

SEQ ID NO: 95715 - DNA, 122 bp, Homo sapiens
aagcggagtggccgccgcacactaagataaccccttcttcctgctgcctggggccctcagcggcctggttcaggcacggttgccactcatgcttttctcataaggctcatctacataatgat

SEQ ID NO: 95716 - DNA, 122 bp, Homo sapiens
tctggaggctgggttgggggaagcaggccagggatccaaagccactggcacaagcctggccggcggcccatgaactccgcgccaagaccccagacctcgttggcccagcgtcccgccagctg

SEQ ID NO: 95717 - DNA, 122 bp, Homo sapiens
tttgtaagaggactcactaggaagtgggtgtctggaacttggagccagtggaacttgcttcgtgatcttagcttagttagaatacagctcagctgtgggcgtgttttctgttgagctgcttt

SEQ ID NO: 95718 - DNA, 122 bp, Homo sapiens
aaaccacggcccgatgttctcaaagccctgctcgccgcaggtggttctggagcagccgggcggaggaagggctggtcggatgtttgcctgtcaagctcaaagcgacagattccactttccac

SEQ ID NO: 95719 - DNA, 122 bp, Homo sapiens
aacttttgtcgacaacacgtccctggtccccactggccccctcattgcccaattcgaggccggcctcccgtcgtgagtcctgcagccccctgttgctgaccccgggttgtgactgcccggca

SEQ ID NO: 95720 - DNA, 122 bp, Homo sapiens
tttttaatagctaatttttaaagctaattttgtatttttagtagaaacgaggtttcaccacgatggtcaggctggtatcaaactcctgatgtcaggtgagccacctgcctcagtctcccaaa

SEQ ID NO: 95721 - DNA, 122 bp, Homo sapiens
aaaggcagctgtagaacatctgggaaggtcaatgatagcatctgcctagagtcaaacctccgtgcttctcagacagtgccttttcaccatgagtgggtgcccatttttaggaaacaactttg

SEQ ID NO: 95722 - DNA, 122 bp, Homo sapiens
agctccttggggtgggaagcgatgggtcgagttcctgctggacacgggcctcaggccccccgggtgtccccaaggtgcagggaccagcgtggtgacgctcattgttcagagctgctgatctg

SEQ ID NO: 95723 - DNA, 122 bp, Homo sapiens
aattttgaacattttgcaaaacgaggggttcgaggcaggtgagagcatcctgcacgtcgccggggagcccgcgggcacttggcgcgctctcctgggaccgtctgcactggaaacccgaaagt

SEQ ID NO: 95724 - DNA, 122 bp, Homo sapiens
acaaaaattagctgggcgtcggctgccccgtctgggaagtgaggagcacctctgcccggccgccccgtctgggagcctttctgcaggtgtacccaacagctccgaagagacagcgaccgtcg

SEQ ID NO: 95725 - DNA, 122 bp, Homo sapiens
gagctccagcacgcggcccgccacgccgtccagcaggcgtcgcagcagccgccgcttctgcggctgcaccatctggtcatagacggtgtcgaagcggcgcagcagccccaggtagtgcaggt

SEQ ID NO: 95726 - DNA, 122 bp, Homo sapiens
cttgagcgcccctggtgctcgcgctggagctggttatcaggttcccggcccaggggtagccgggttcccagcgccacggctcttaggcaggcctggcgcccttggcgtggggccgcgcgggg

SEQ ID NO: 95727 - DNA, 122 bp, Homo sapiens
gagttgtttaaaacatgcgtatctccaccttctgcttcttagaacagaactgactgaagccgtgttcttcccgccgagaccatgccgccccatcgaccctgctgcggccagagccacccagg

SEQ ID NO: 95728 - DNA, 122 bp, Homo sapiens
gggaaatctgcggtggaaaaggggaagaggagtcctgatggggttgccagccaccagaggcggctgctagtgaagtggcctcattgtctggggtgacacccaatgttcattgtctcacagcc

SEQ ID NO: 95729 - DNA, 122 bp, Homo sapiens
tgttatatcgaaagtcccgtgctgggcctgggatctcccgctgcaggtcaccctctcggacggccgctcgacaaccacctatcggggtttataagggagccgtcctgcctggccgcccccca

SEQ ID NO: 95730 - DNA, 122 bp, Homo sapiens
ctcgagactcgcccgggcacctgctcctcgtgcgcacgcccggagcccgggtcaccttgtcgtctacaagaaccaaggtgtgcccggccaccccggcactccaggccacctcagcacccccg

SEQ ID NO: 95731 - DNA, 122 bp, Homo sapiens
ccaggtaggcctcgcaagcctcctgcagcgccatcaccgccgagctctggaagcgcagatcggtcttaaagtcctgtgcgatctcccgtaccaagcgctgaaaaggtagcttccggattagc

SEQ ID NO: 95732 - DNA, 122 bp, Homo sapiens
tgcagaagagacccggaaagggccttttttttggttgagctggtgtcccagtgctgcctccgatcctgagcctccgagcctttgcagtgcaatgtcccgcctgctgcatgcagaagagtggg

SEQ ID NO: 95733 - DNA, 122 bp, Homo sapiens
tggactgccttcgggatgacacagaaacaggcctaacctgaggccactaactgggcatgacggggccatcttggcggcactctgggaggcctcacgtggccacgctcatggaagccaagaga

SEQ ID NO: 95734 - DNA, 122 bp, Homo sapiens
tctctctcaacttagttccacatcttccctggaaggaagagatggctgtgttgaagatgacggtgccagctgcacatcatgtcagaggctttttttaggtcgcttcccttgcagactcatcc

SEQ ID NO: 95735 - DNA, 122 bp, Homo sapiens
aggtgcagccaggttcttacctaggtgcacgtgacaaggtgctgccagatgccaccagcgcggacagtcagtgagcccacctcatcagagggcacatgagatccccaaatgagaaagaactc

SEQ ID NO: 95736 - DNA, 122 bp, Homo sapiens
tgtccacaggctgaggaccaccttgctgcggttgaccgctgctggccgggacctgcgggtcgcggaggaggcggcgccgctctcggagaccgcaaggcgcgggcagaaggcgggatggcggc

SEQ ID NO: 95737 - DNA, 122 bp, Homo sapiens
agggcctggggccgtgcctcgggtgtacgcgtaggggtctgtgtgctgggggtggctcaccgggcagcgtgggtgagcggcgcagcggcggcagcggagagcgagagaggggagcaggtaag

SEQ ID NO: 95738 - DNA, 122 bp, Homo sapiens
ctcgattcttcgttccagagaccactttcaccgcggcagtgttaggagcttctcaatccacgtctccttcaaggaattaatgaaggagcgaggcctgggacccgcaaagaacttcacagaat

SEQ ID NO: 95739 - DNA, 122 bp, Homo sapiens
tcctggctatattcttaagaaaggagggtgcttcatgcgctgagctcatggcacaggtcccgcaagtgacctgcgagccccaccgctaggggccgcttaggtgcagcccccaggtgggcggg

SEQ ID NO: 95740 - DNA, 122 bp, Homo sapiens
tgtaataataatttaaagtattttgttttgttcactgcagctagaaccaaatggctagaacggcatctggcacataaagaccataaatacagtaataaaatctgtggcctgaatggagtatt

SEQ ID NO: 95741 - DNA, 122 bp, Homo sapiens
ccagctccacttggctgtagttggccggcaccacgatggcggccactgcgcgggtgtgcgcgccgtccaggggcccgtcctgggagtgcacgcccagcagtaccgaccactcggccgcgggc

SEQ ID NO: 95742 - DNA, 122 bp, Homo sapiens
cagacgttgaatggctcgctgaccctggagctggtgaatgagaaattctggaaggtgtcccggccactggagctgtgctatgctcccaccaaggatccaaagtgaccccaccaggggacagc

SEQ ID NO: 95743 - DNA, 122 bp, Homo sapiens
gagagagagaaagagtaaaaagagaggaattttacagctgggctgctgggggtgacatcacgtatcggtaggaccatgatgcccacctgagcctcaaagtcagcaagttttattaaggattt

SEQ ID NO: 95744 - DNA, 122 bp, Homo sapiens
gttgagtatgcgtgggcagtgccactgcagcaaagcccctcgatggagtagagttcctgccgcaaaggggaggaggtgggtcgcagaatgggctgactcggagggagtttttaattttggct

SEQ ID NO: 95745 - DNA, 122 bp, Homo sapiens
atcgcaaggggggaagacaccgcccacgagtcggggactgagagccagcccctcttcccccgctggcttaggacccccaccgcggattctaagatccttagcacccacctggaggactgggg

SEQ ID NO: 95746 - DNA, 122 bp, Homo sapiens
ttttttttttttttttgagacagagtctcgctgtgtcacccaggccggagtgcagtggtgcgatgcaccatctcggctctcggcacgctgcaaccttcgcaacctctgcctcccgggttcag

SEQ ID NO: 95747 - DNA, 122 bp, Homo sapiens
ttactgtttaatccaccttgagcctttaggtttcataaatgaagttcgtgaataattgctcggataagaatggaagatacgagggctagtaagcctcctaatttgtaagattgtgtatgcaa

SEQ ID NO: 95748 - DNA, 122 bp, Homo sapiens
tcccttgcttccaagggaccgcggagagcacgctcgcagggtcctgggtccttgggaatgcgtaaggaaagtggttctccagggactcaggcctggcggagcgcagagcgcgggaagagctt

SEQ ID NO: 95749 - DNA, 122 bp, Homo sapiens
tatacccacttcaaggttgatccctgaggctcatgaagcatttgaggtgatgagaatgaacgccagcttccctagatgggtgtttgctactaagcccttggggccagagatgccatgtttgg

SEQ ID NO: 95750 - DNA, 122 bp, Homo sapiens
agagaagtgtgggggaggtcaccatgcaccggagccaggtgtctcaagctgctttgcctccggtctgtgcctctaaatggcacctggaggtaggctagaagctgtgaaaggcgtttatttaa

SEQ ID NO: 95751 - DNA, 122 bp, Homo sapiens
agaggctgtcaaaccggtgacgtgagccaggagtcacccagcagaagacaaagtcactcgcgctctgggcggccaccgcgccgggaccagggacctgccgatctggccaccggccgtggggc

SEQ ID NO: 95752 - DNA, 122 bp, Homo sapiens
actgatgggggtgcggggggacgtcggggatgggggtggccagcgcggtcctgggagtggcgggttcggatgggctggctgcggtgggccactttgggcatctcggcgtggcctgcgccggg

SEQ ID NO: 95753 - DNA, 122 bp, Homo sapiens
cctgagcccatggccctctcacccctgccgtggagcccacttttcgtctgatgaggggagcgcccagggtcaagccaaggcctccttgtggagagaattccagacaccaggtccaggcagaa

SEQ ID NO: 95754 - DNA, 122 bp, Homo sapiens
ctgggagaacaatcaacgtacgctggcagtcggggtgatgacatggtcacattgatgtgtcgtcagcggcgacagtttgacagtttggatagtgccataaaatgtgaccagagggatggtgc

SEQ ID NO: 95755 - DNA, 122 bp, Homo sapiens
gccggaacttttgaagcccaggccccgcccggcgctaataggcacctacgcggccgccggcggaaccgccagaccctaaatcacggcgccccgcccgcccccgcccgcccccgcccgggccg

SEQ ID NO: 95756 - DNA, 122 bp, Homo sapiens
cttgagtcagggcctgggaagatgatggtatcgtctttccttccatgtccctccatggcacgtggggctgtgggaaccacccatctgaagagcacatcggctgcatttctccatcttcttgc

SEQ ID NO: 95757 - DNA, 122 bp, Homo sapiens
attcttgtaaatcccagctctgcgctggatctgccccctgggtcacagtttgctgccctccggcctggcctagggtcaggaagtcgccagagtctctctaacaggaaagaaggcgacggtgg

SEQ ID NO: 95758 - DNA, 122 bp, Homo sapiens
acctggcttgtggcggccgggctggaaggtcgagttcacttggcagacaccagttcgggccggaaaacctggcccgggtgcggccatcagtggaaatggaaagccctcttgatcctagtgag

SEQ ID NO: 95759 - DNA, 122 bp, Homo sapiens
tggcagaggtccttcccctaaatgcagctgggcaggatgccaccctttctacaataagttcggtcccagggattcccccaacacacacacacatacattctctcttactcacatcctcacac

SEQ ID NO: 95760 - DNA, 122 bp, Homo sapiens
aattggtggatttttttaaaccgttttggaggggggagcgcggcgttgggggcgggagagcgctcctggctgtgagctgctcctgccgcttcgctccgcgctctcctgccgctccgctccgg

SEQ ID NO: 95761 - DNA, 122 bp, Homo sapiens
ggagaggtcagcctggcaccaatcccggcagcgcccgccccgactctgccccagggagatcggggagacactcgttccaacgctgggtcccttgattcctcgcaccttttccttggctcgca

SEQ ID NO: 95762 - DNA, 122 bp, Homo sapiens
gattacccttttccttgattttcacaccatgcagatcttgtgtggggttaactacaggatcgggagccaaatgctgctttggggagagagacttgctgggacaggggttttcctggcaattg

SEQ ID NO: 95763 - DNA, 122 bp, Homo sapiens
ggcgaaaacatggagcatcctgagggccccgcggctgacccctgaccccgatccgcgcaccggagaggctgacccctgacctcccacctcacggggtaaaccctcagctcctcgggctgcac

SEQ ID NO: 95764 - DNA, 122 bp, Homo sapiens
cctttccccaaggagtttccgcttccgggctatcctttgccggaagcagtatgtgaatgacgtagaagtattgcgccgttggtgattacggaagaaccaggagtttggcgtgaccatggtga

SEQ ID NO: 95765 - DNA, 122 bp, Homo sapiens
aaagatagcgttaattccacactgtatttcatagatgggatgacgtggccagaggtgctgcgggtgtactgtgagagtgataaggagtaccatcacgttcttccttaccaagaggcagagga

SEQ ID NO: 95766 - DNA, 122 bp, Homo sapiens
atagcttactccagaccctccagtgaaggagcaggtggttggccacgtgcttccaggcagcgctgcccacccaggaaaagggctttcagccctgggacctggagccttggtatgcagcctgt

SEQ ID NO: 95767 - DNA, 122 bp, Homo sapiens
gtgagccaccgcacccggccacttgtttcttaatgagtgtctgcaactgctggggaggtgcgggtctgccggccagagctgcaggtaagtgagggtcaagctggttcacagagtgcagcaac

SEQ ID NO: 95768 - DNA, 122 bp, Homo sapiens
agtgagcctgccttctatcttaaaagccaaaaaggctaaataccgtctcaacctccctcgcgctaggggtgcaggcagtgacctaagtttagccaatccaagacactcactgaggactttga

SEQ ID NO: 95769 - DNA, 122 bp, Homo sapiens
gtgggaaatgggaagccagttctgcaaattggcctttctgttctgtgaagtgccatctgtcggtgaggagagattagggtctgcagcgtgaaaatctggaccatactctgggtaatcaaggg

SEQ ID NO: 95770 - DNA, 122 bp, Homo sapiens
ggaggaggcgcgcggccgctgcgttccagggcgctctgccctcgttccccactccgggcccgcagcctcagagccagggtcccagtggcccggggcctgcatgcgtctccagccgtggatcc

SEQ ID NO: 95771 - DNA, 122 bp, Homo sapiens
tgcgtcgcttcacgtggcatcaggagggcagtggttctgtactcatgcagcccgcacacccgtgcccagagacgtgcgctggcggaagccatttctcaaatcggcaattatgaaaacgccct

SEQ ID NO: 95772 - DNA, 122 bp, Homo sapiens
tccgctaacgacccgtcagcgcggcgcgcggaggcgggacccggtttggcgaagagcaagcgtccccaggattggccagcttggcgccactagataggcttccgggcgtgattgggcgagcg

SEQ ID NO: 95773 - DNA, 122 bp, Homo sapiens
cacgcccctccccacagcgtcccccagtttcctcacttggtatcgaggagacgactctcgcgagaacttcgtggctggctaaccgaagcggtagctctgcaatgacttaagagcagttttgt

SEQ ID NO: 95774 - DNA, 122 bp, Homo sapiens
gtggcaagctcgcgcggcggagtgggaggcgcagagaccgaaagcactgcagcgccagagcgcgggctgaccaggctggcgtgaccgctttcccgacgcctgccacgccccgcggcggcctc

SEQ ID NO: 95775 - DNA, 122 bp, Homo sapiens
ttgcggcagcgcagcagccaccggacaagcgctagcaacgtcacaaccgcccgccaaaatcgcacttcccacccagaaaactgcccaagggcgaacgttcccggggcgggacttccggggtc

SEQ ID NO: 95776 - DNA, 122 bp, Homo sapiens
caggatgccgtgggtggccataacatagatcttataggcgcctctctctttcaggatctccgcggcagcaacaaaactctccacatcgtcaataatgtcatcctgggaggagaacagagtga

SEQ ID NO: 95777 - DNA, 122 bp, Homo sapiens
acgcgagcttttattgtcccgttcaactgctccgcagtgtggagatcgcatagttacgcacgtcgtggttgtgtcgccccacagtactgactgcttcacctttgcagacagaggctccggcc

SEQ ID NO: 95778 - DNA, 122 bp, Homo sapiens
tttatgaaatacccctgaccccacagtgccatgtatagaatgaatgtatgagtgtgtgtgcgtgtgtatgcatgtgtgaatcattctttctgatataccttagagttcatttcaaaagtatg

SEQ ID NO: 95779 - DNA, 122 bp, Homo sapiens
agctggcagcccaccgcctcacgcacagcggcgcccgcccgcacccgtgcccacactgcccgaagtcctttggccaccgctccaagctggcggctcacctctggacccacgcacccacccgc

SEQ ID NO: 95780 - DNA, 122 bp, Homo sapiens
ccaaggcgcccccagtgctgtgggaggtgctggtccagaccacgcttcgaaggagccaggcgagaggaagcctctcggtgcggggagctgcgcgggtttctaaatgctcggcctgtttgcgt

SEQ ID NO: 95781 - DNA, 122 bp, Homo sapiens
cagggcagcggacgatttgctccgcgtctctcaaaactactgccagcccaattagtaaaccgagagggcagccctgagatgcaggatggccagagagttgaaatgagtctgggagttaagag

SEQ ID NO: 95782 - DNA, 122 bp, Homo sapiens
cgtctcggctcactgcaacctccctgcctgattctcctgcctcagtctgccgagtgcctgcgattgcaggcgcgcgccaccacgactgactggtttttgtatttttttggtggagacagggt

SEQ ID NO: 95783 - DNA, 122 bp, Homo sapiens
tgatcaagaggcagaagcagagtttggagtatttggagcaaggtgcttgtcacgcatccgcgggaaccgtgctagcatcctgctgagaggatgcgtccttgttgaggacttgagatgtctgt

SEQ ID NO: 95784 - DNA, 122 bp, Homo sapiens
agttgcaagaatccttcaagatgccaaaaagatgaccccaaagtgagctttgtgtgtctccgagaccacataaagaagctctgagaccacatggagaagatcagcccggctaagcccacttt

SEQ ID NO: 95785 - DNA, 122 bp, Homo sapiens
ctcaggctactttttcctccttgtcacattcaccacccaggtgggcattgccagtggcagcgggggcagcacactgactcttctcatggcctagtctgactggtctaactcatctcagtctc

SEQ ID NO: 95786 - DNA, 122 bp, Homo sapiens
aactggtgtttggggtctgtctttctaaccgaccaacagaggcaggctgggtgcctgggccggcttccacctgcccgaggtgcttcccggcccgctgggcaaggacgggggcgctcgggcag

SEQ ID NO: 95787 - DNA, 122 bp, Homo sapiens
ccgacgcccgcccgagctgagtgcgcgatgcggcagaagatgctacgtggctgcaggaagcgctgcgcacacgctgcctctggcagccgcacagcccggctgtttccagccagtgcggcctc

SEQ ID NO: 95788 - DNA, 122 bp, Homo sapiens
ggacgccatcttaactccgggagccccacagggaccccccagctccgcgcgccccgaatgcgggcaaaacgctatcgcttcacccccaattccggctcggggcccgcccacggcgtgcgcat

SEQ ID NO: 95789 - DNA, 122 bp, Homo sapiens
taaactgacactgtgaagttaaggctgtgttccagtgggaatgacagcatgtctctaggacgctgatggagaaagccctcctcatgcagctgtcttgcggagtctccctgctggtggtgaat

SEQ ID NO: 95790 - DNA, 122 bp, Homo sapiens
tgtgtccataagtctctttatgacacagccttctgttaccagtgacaccgtgatcagagccgagggaaacatggcaccagttttaattatatgagtcaactttgctggtagccaaaataaca

SEQ ID NO: 95791 - DNA, 122 bp, Homo sapiens
ctcctgtgtatgtttttaccctacaaacgctctctaaccggtccagaggtcagaaacagccgcagtctcctacctctattgcttctcaagggaaaagcacagcctggaatgatgaggagccc

SEQ ID NO: 95792 - DNA, 122 bp, Homo sapiens
cgggtaccacacctgggacgcggaactgcggaagatccacagggcggcagtgaggggcgacgccgcagaggtggagcgccgccgcagaggtcgagcgccgccagatgcgcagaagccgggac

SEQ ID NO: 95793 - DNA, 122 bp, Homo sapiens
gagaagaccttcaagcagcggcgcaccttcgaacaaagagtagaagatgtccgacttattcgagagcagcatccaaccaaaatcccggtgataatagaacgatacaagggtgagaagcagct

SEQ ID NO: 95794 - DNA, 122 bp, Homo sapiens
gtggcgaggggagaagcaacaaccacaggacccgtgacagtggccaagccttagaggccccgcatgcctgccaggcgcccgagcccacgcagtccaggtttccccatccgggcgggaaccag

SEQ ID NO: 95795 - DNA, 122 bp, Homo sapiens
agtgccagacagtgggcgcaggtcagtgagtgcgcgcaacgtgtgtgagccgaagcagggcgaggcattgcctcacttgggaagcgcaaggggtcagggagttccctttctgagtcaaagaa

SEQ ID NO: 95796 - DNA, 122 bp, Homo sapiens
catccagacggccgaggcgctgcggctgccctacgagcagtggaaggcgctcaatgagatcgacgcggtgagtcctgggaggcgggcaggcagcctcaccctcgggcatggggcggcttccc

SEQ ID NO: 95797 - DNA, 122 bp, Homo sapiens
ttctacagtgcaactgtccagagcagatgcacccacgtcaggaagcccccggtcactgcccgccagccgcacccacactcaggaacacactggccactttctggtttgccttgctaacagtt

SEQ ID NO: 95798 - DNA, 122 bp, Homo sapiens
agctcagactgagagcagcataaatggttcatggaaataagaatgagtaatgcatcctcacgggactgtccacaggggatgaacaagaccattccagagagccagggtgcaggcacaaatgg

SEQ ID NO: 95799 - DNA, 122 bp, Homo sapiens
cagggaccgcggggcctttcccggcagggtggggcagccttccccgcacccgggggccaacgtctgtgtgctcactgacttgctgttctgcagggactgtccccctaataccacacctagcg

SEQ ID NO: 95800 - DNA, 122 bp, Homo sapiens
tccttttagcagctgaggatgggcacaactggcatttacaaagctctgaaagttgttttccgccacccactgtgggagccattttagctggcaatcgcacaaaaggcttgatgtatttaaat

SEQ ID NO: 95801 - DNA, 122 bp, Homo sapiens
tttagaaatttcctttgtatttctcttaaagtatcttgcttcttccccaaattggtttgccgaggctaagacaatatttaaaagtgtgtacaaattaagcaactaaaacttgggatcttctg

SEQ ID NO: 95802 - DNA, 122 bp, Homo sapiens
tgtctgctgggtggggtccaacaccacagcgcagtctagtggccggaggagccaaggaggcgcggggtggagactgggccgagcaggggatagagatgaactccagaaaggaacagcgactt

SEQ ID NO: 95803 - DNA, 122 bp, Homo sapiens
gcggatgcggaagcgcgcagctcggaatatgcgcccatagagaaccagcatgagcagcagcgggatgtagaaagctccaaaggtggaatagatagtgtagccatgatccttgctaatggtgc

SEQ ID NO: 95804 - DNA, 122 bp, Homo sapiens
acgtggcccccgggacagtatttgctgggtgggagtgtcctgtgccttatggggacctggcgtccttggtgcctgtctgctcaatgtcacttgtgtcccctcatcattgtgatgacttgaat

SEQ ID NO: 95805 - DNA, 122 bp, Homo sapiens
tgaccaggtgcactagggaaaaaatgccaggagagggccaggaagaggacttgttagtagcgactcacttctgggcaggcaggccagccagctagccagcctgctgaggcttcccaagaggg

SEQ ID NO: 95806 - DNA, 122 bp, Homo sapiens
gcctggactcccgcctcagacctcttcaccatgtcatgctgctcccacttccttgcctgccgtggctcatgaccaatgtaagatgatcattgaagatgattgactaaagatgacagcaggcc

SEQ ID NO: 95807 - DNA, 122 bp, Homo sapiens
taaaagaaacacacgacagccgattttgcttctcaaaatcgctgcattcagggtttccgccgtcaccctgctggcagtgaactagaggacccgtcccaccggagctggtccatggagaggtg

SEQ ID NO: 95808 - DNA, 122 bp, Homo sapiens
tgcagcctcaatctttccccaggttctgagttctttcagcagtaggtccaggaaaacagccgccccgccccctccacctcccgagactaggagcccgccagggttaagtaggagggataccc

SEQ ID NO: 95809 - DNA, 122 bp, Homo sapiens
aagcgctaatttttagggatcccctcccatccaaaacagggatgaatagttgaggaacaccggagcggggccctggcccttctcggaacgttgagcagacctaacatgacgctggtccgttc

SEQ ID NO: 95810 - DNA, 122 bp, Homo sapiens
gcagctcggcacaacaggagctggcaaggatcttagctcgtggtcctgtgggatgcagcacgccatagtataagagcatcattgcgatcccagccacaaagctaataaagacacaacacagt

SEQ ID NO: 95811 - DNA, 122 bp, Homo sapiens
ttatctctgttggcttttaagagtaaatcaggttttatgttgtgggtttcttggtcgcagcgctctgggcacaaaagtataggcctcccttgacagatttctaggtttagcagtttgttcaa

SEQ ID NO: 95812 - DNA, 122 bp, Homo sapiens
acccggagaacggctgcccgggttatcccagttaaattcctgggcctgaacggagtgaaacgatgtttttgttcgtgtgcagttgtccatgaggcagtgcttccttcatccgtttcctccca

SEQ ID NO: 95813 - DNA, 122 bp, Homo sapiens
tcaggacaaggcaccacgtcccctcctcggaaaccctcacggcctggctggtgaccctggcgccacagagacggcacacctggctccaggcagcacagagcactgccaaggtcctagaggag

SEQ ID NO: 95814 - DNA, 122 bp, Homo sapiens
ccacgttcaaataaacaagcgcctgatcgcgagccgagcactttcttgctgccgataaagcgaacgtttacactgtgagaaaggcgagattgatttacgaatctgaacgcgccagttttatg

SEQ ID NO: 95815 - DNA, 122 bp, Homo sapiens
gcccttccagacttctctttcccaccataagtggccaaagaggctcttctaaacctgagacgcccccactcttccaccaggtccctaaagaatcaacaccctagaccaggcatggccaggct

SEQ ID NO: 95816 - DNA, 122 bp, Homo sapiens
gaagtgcttacataagcacttatttagagctagtgtacttggtaactgccttagtgccctcggacacagcatgcttagccagctccccaggcagcagcaggcgcacagccgtctgaatctcc

SEQ ID NO: 95817 - DNA, 122 bp, Homo sapiens
agcgcggcggggtcctccgggcgcactcagcagctcccaagtctttccagcggtcagagtcgaaggactttgggagtaagaagtctctgcttccaaaggccaggggaccttcgacctgtttc

SEQ ID NO: 95818 - DNA, 122 bp, Homo sapiens
gaagaattcgggccggggatgtggaactgtgtgtggctctgcgggctcagaggccctccccgcgccccgccaccgtgtgcgttccggggcggggcggggcgggggcgggggcgggggcgggg

SEQ ID NO: 95819 - DNA, 122 bp, Homo sapiens
caacactatgcggggtgtgccaggaactgatttaagactgtattcagatcttccaagcaacgccaaagactccagcttataaagagcatatttgattgcttatactgtgtgctaggtccttt

SEQ ID NO: 95820 - DNA, 122 bp, Homo sapiens
cgtaatgaaataatccaaaaaataggaccaaagcgcccactggcaggagcgagggcggggcgccgcgctctataattattttctaagatgatgggggaggtttgttgcacgcgacagcccgc

SEQ ID NO: 95821 - DNA, 122 bp, Homo sapiens
cctcccgcgaagacctgtaatgtgccggacttaccctttaaattattcagaaggatgtcccgtggaaaatgtggccctgaggatgccgtctcctgcagtggacagcggcggggagaggctgc

SEQ ID NO: 95822 - DNA, 122 bp, Homo sapiens
gccctgtggcctgtggcggtgctatgctgctgagggtgggagagaggctgcttttctgtgcgctttgctctcagagtccgtccgaggccggtgcacagaaaaccgcacggatgttctgacat

SEQ ID NO: 95823 - DNA, 122 bp, Homo sapiens
ctccagggcttgtttcgcgcagccttgccagcattacccatcctcatcagaaactggcagcggcagccacagctcgggcaggcggctccagccccaggctggatttgcagaatctgtccttt

SEQ ID NO: 95824 - DNA, 122 bp, Homo sapiens
tggacaggctgtccttgctccatcctcacagcatctgccctgggaaggggactcatcagccgcacagcagcccctgtgaggagcagggatggccgcagacgccttcctccaccctccagccc

SEQ ID NO: 95825 - DNA, 122 bp, Homo sapiens
ggtgctcatctgcgccgggcaagggggacgcagggaggatgggggtccagcctgctacggcggatttgacctgtacttcattttggacaagtaagtgccgcgagttgtcccccccaccccag

SEQ ID NO: 95826 - DNA, 122 bp, Homo sapiens
ttgggaatcggaggatgctttgggccaagctctcctctgggggcgcgctgatgttccgtgcgcgaatgtggcccccgctgacctggagatggcagccagtgcgctcggccacgcttagggag

SEQ ID NO: 95827 - DNA, 122 bp, Homo sapiens
gtgggtccattgaaaggggatgtaggccagcggggccccgtccaccagccctgccctgctcgagcctccctgtctcacagagagaagtcagtgaagaagccggccccgcctccagccccacc

SEQ ID NO: 95828 - DNA, 122 bp, Homo sapiens
aatcatactgacaaacaggacagaccagaaccttccaataagttaagaatcttaagctaccgagctactaatattttggattacactgcatttataaaacaaggaaacaatgctcgtatgag

SEQ ID NO: 95829 - DNA, 122 bp, Homo sapiens
aagtgaggagcgtctctgcccggccgccatcccacctgggaagtgaggagcgcctcttcccggccgccatcccatctaggaagtgaagagcatctccgcccggccgcccatcgtctgagatg

SEQ ID NO: 95830 - DNA, 122 bp, Homo sapiens
cctgggtttggagggtggagggggaggggactcccgggggcagggacccatctggtagggcgaaggcgtgggatggccaattgcttggtcacacacaaaaccttccggcaacgtgccttttc

SEQ ID NO: 95831 - DNA, 122 bp, Homo sapiens
tgactcccgggcacctgaacaggctggagttctcggggcgggggaggggggggtgtcacacgtacccctggctggagcacatgctagttctccctggaagagcgcagcctcgggcgcttcct

SEQ ID NO: 95832 - DNA, 122 bp, Homo sapiens
caaacattttgacgggtttggctttgcccggctggattactgagtgtccccttgctcgctcgctttttctctctcccccttctccgagctcgctcccttctctccctctctctcctcttttc

SEQ ID NO: 95833 - DNA, 122 bp, Homo sapiens
cccacgtggtctttcttttttcctaagtgcttgagggaacccgattccctttggtaggcgcggtgcaacgtcaattggcttggtccacagataacgcgtgttcgactccctgatgagtggtg

SEQ ID NO: 95834 - DNA, 122 bp, Homo sapiens
cctcccacccccaatatctgcctcttccactcttgtcctgattctccttggatgtatcagcgacaagagggccggaggtgctctatctgcagagggcgtgcggctgaaactgctggagaaaa

SEQ ID NO: 95835 - DNA, 122 bp, Homo sapiens
cccgggcggcggctcacctttcggatccgccgtttgatgatggattcggccgcgaagacccgctcgcccactgcagacagctccatcttgctcagcggcacccacagcccataatactccct

SEQ ID NO: 95836 - DNA, 122 bp, Homo sapiens
ttggaaatgactgggctcctgggaggagaacagactttagaggaagtaagatcaggatcccggggaccataaagcagctgctggagtgctgcatgcaggaaaaatagttatgcgaatcccag

SEQ ID NO: 95837 - DNA, 122 bp, Homo sapiens
atatgctgttgaaataacttgagacgttaaaggcacgggtgaggtacatgaaaataccatcgttgactaataagtgactcagacacacagctggctgctccttccctttctctcctctccca

SEQ ID NO: 95838 - DNA, 122 bp, Homo sapiens
cagctccgcgccgttcactaccaggatctggcagcactgtgggggcacgcagtgaggacccggccgcggccacgagctgggacccccgcgcccgggcagggccgtgcggagagcgcggtgcc

SEQ ID NO: 95839 - DNA, 122 bp, Homo sapiens
gctgtctgtgttgtaaacaatggtcctttgtctctggtccaggagtctcatttcttctgccggcactcatgaacctgcaatagctaacttgcctggttgcaaagaaaagaaaatctcagata

SEQ ID NO: 95840 - DNA, 122 bp, Homo sapiens
attttttttccttctcctctggcgactgtgtgatgaatcctttcttgcgtgatcaggttgcggatagacttgtaagggtgtttgctgcatacagtgtaagcattgtgaccgccaataaactt

SEQ ID NO: 95841 - DNA, 122 bp, Homo sapiens
tattcaggatgaaccccggacacgcgcccagaaccgtctggtgacccagtgatgaaagctcgaatcttataggatccgtattcatttcccgtgggctcaagcccagcctccgcgggcggcgc

SEQ ID NO: 95842 - DNA, 122 bp, Homo sapiens
caagtgccggcgggccagtgagaaggaggacgggcggctgggcagccaaggcttcgtgtacgtgatggccaacaagcagccgctgtggaacgaggccacccaggtctaccagctggacttcg

SEQ ID NO: 95843 - DNA, 122 bp, Homo sapiens
gcttgtttgctgatgaggacgatgacacaactttcacagggttccttctgttcagcagcccgtgacagaggagagtttaaaaatccgccacaccatccatcagaatcagcttgggatgaact

SEQ ID NO: 95844 - DNA, 122 bp, Homo sapiens
ttctccctccaaaaatgaccttggccttgagaacagccctctccccaatgcagctgggcacgcctgccacttgctcacagggcctgggcaactccagctgactccagcgtgcagctgaattc

SEQ ID NO: 95845 - DNA, 122 bp, Homo sapiens
ccggaaaaaagaaaaaaggaagtcgattcaaaggacactgggatatgaactttaacgccccgcccaccctcctcacgtggccggagcaaaaaccggcctcttccgcctctgggcgctgcctt

SEQ ID NO: 95846 - DNA, 122 bp, Homo sapiens
tcggggaaggtgggaagcagcaagagaacacaggctggcggcaggaggctgtgcctggagcgggacactgcacagccctggctggtgccttggccgcggcctcagcttccccacctgagaaa

SEQ ID NO: 95847 - DNA, 122 bp, Homo sapiens
ccctaccccgcattcgctgctgctaagcgacacccgcacccaaaccgaccaatcccggcgcgcctccacagcccccgtcccggcgaaggcgcgaacgtagtggttcttaaagggctgcgacc

SEQ ID NO: 95848 - DNA, 122 bp, Homo sapiens
cacatccgcggggccgggcgcatttctgccaataggtggcgccgcaggacagctttctcacgcggcgagactccaaggcctcagctgcgcccacccgggctaggtgggggtgggggtccgga

SEQ ID NO: 95849 - DNA, 122 bp, Homo sapiens
aggggttccaggggcatatgtatttggggggagggcttagtgaaagttgatgggggtgaacgtttagggtcttcaggcagacatggaatgtgtaaagggcatggaggatgtgcagtggacat

SEQ ID NO: 95850 - DNA, 122 bp, Homo sapiens
aagacgcgcgcaccccttacctgtttttcactcctgtaagcaagtgccaatcttaatcaccgcttttcaagcaagggagattatcctcaaatttctccaccagtcagaaaccattcattctt

SEQ ID NO: 95851 - DNA, 122 bp, Homo sapiens
ccccgtcccagccgattctcttgacttctgtcagcggcactcacgctctggccattgctgcgccgccgaagtctcgcgaggggtagcgcgcgccggaagttggtaccatagagactggagag

SEQ ID NO: 95852 - DNA, 122 bp, Homo sapiens
agcaaataggagcaaatcttttccccgtggatcaggaaggtgcacgctctttgtggaatacgactgctcaccccgcacagcaagcagcttataagtggccctcctgcctgatttcagccctg

SEQ ID NO: 95853 - DNA, 122 bp, Homo sapiens
agggttccgccaagagccggagcggtgtgccaagtgaaaactacatttcccacggggcagcgggtcacgtcacagaggaacgactacgcatgcgtgcaaggtcctccgcgcgcgactacgct

SEQ ID NO: 95854 - DNA, 122 bp, Homo sapiens
cgtctccgcaatctgcaattactttggatatttctcaggagctaaacgcagcctgaatttcgtggcgcgtgcaaaaaaaaaaaaaaaggcgaaattaacaaaaccccaccaccgcgctgttg

SEQ ID NO: 95855 - DNA, 122 bp, Homo sapiens
gcacagcatctcatctctggccattccagcctccatcacccgcctcacctccatcatcctcgcttcggggctcattctggcctccagggctttgtacatggtaggctttcattcattcgttt

SEQ ID NO: 95856 - DNA, 122 bp, Homo sapiens
acctacccagacaaggcaaacggaaatctgcagcaggactcagcttggtgcacacaactccgccctcgccacacccactctgcagcgtctggcccggcaatacccatctgggcgcccctcct

SEQ ID NO: 95857 - DNA, 122 bp, Homo sapiens
gacaccagtcagataatggatgtgaaagcttttagaaaggttgaacggcggctgaaatcgcgtgtgttccatttacagatgggaaactgaggcacgagataccagaggatggagtcaggcca

SEQ ID NO: 95858 - DNA, 122 bp, Homo sapiens
tctccacagcagaagaaagctcatacatgctgacctgaggaacttaatctgacagtttaccgacacactcataacgcatctcttccttcctgtgatgagagtactgctttcatgtgtactgt

SEQ ID NO: 95859 - DNA, 122 bp, Homo sapiens
cacgaaggtgcgcgccggccgcggcttcagcctggaggagctcagggtgagtactggcagcgctgcggtgtcaggaaggccccgaagtcccctctgttggcctcagtcgcgtgatgacattc

SEQ ID NO: 95860 - DNA, 122 bp, Homo sapiens
gcggttgccttggcaacggggctagggtgggggcatttcaccaatgaggtgctctcggtccgggtgacggttgcctaggcaaccccacgaacagcccagctttcccctctggtctctccccc

SEQ ID NO: 95861 - DNA, 122 bp, Homo sapiens
ccggctgggtggacacctcttgtcccacaagtaccagcctgggatagaacgaaggggaaacgatccatgggacacagctacatgcccagccctataggggtaccctgtctgggaatccatga

SEQ ID NO: 95862 - DNA, 122 bp, Homo sapiens
gaggagcctgagagccggccgggtgctgggctcctggctatccctgtgatggtagctcagcgagatctggggacctggcgctgagcgcgttgccagccgggatcttcctcttcatctaggcc

SEQ ID NO: 95863 - DNA, 122 bp, Homo sapiens
tgacgcacattcggaacagatcgtgtggatgtgcagatgtcagggagtctgcagtacctgcgcatacactagctggggctggacttgatctgcttttagcttttgccagctttttagggagt

SEQ ID NO: 95864 - DNA, 122 bp, Homo sapiens
caagggctgggaagagtaagataccttctggccctcaagaaggttacagcctaagaggagcgataactgtaatacagcatgggaaatgcaatgacaaagatgcaccaaagacacatctaatt

SEQ ID NO: 95865 - DNA, 122 bp, Homo sapiens
aatatagagtacattatgtttctgtggatgtactgaacctgttttaaaagataagctgaacgcaatgaatggaaggacaaactagggcaaaagggtatatgctgttttgctaatgcgtaaat

SEQ ID NO: 95866 - DNA, 122 bp, Homo sapiens
cgaaaccacgcttcagtcggcctgaatgtgactcctgtgtggacgggactatccacctcgcgctccgttgcaggctcaacgtggggctatctcatctgtgaaccatgtggatgaaaaatgga

SEQ ID NO: 95867 - DNA, 122 bp, Homo sapiens
ggactccctcttcctgtctttccccctcctcttcccctttgacactacttccggtggtgacgtgtattcgcttcaccgggactaagttcctcctgcgcggtctatggcgggtaggtataagg

SEQ ID NO: 95868 - DNA, 122 bp, Homo sapiens
agaggaacgctcacgtgaggacggcgcctgctcacagcgagaccgagagaaagtggatcccggcgatgggcttggagcccctggttcaagatgtccctgaagccacgtcctggctcttcatc

SEQ ID NO: 95869 - DNA, 122 bp, Homo sapiens
ggaggaacagcacccactgcctgaatgctgaagtcctgggcagacatgcaacagccaacacgtagccacaactgggccttaagggtcccctcgtcccaagggccaagtcagcccatcgagag

SEQ ID NO: 95870 - DNA, 122 bp, Homo sapiens
gctgagggcggctttgctggggttgtccagggccagactggggctgggctaggacccgcccgggctgcatgaggacctctcccaggtattcctgcagagctctgtgattggctgctggagat

SEQ ID NO: 95871 - DNA, 122 bp, Homo sapiens
agcgagcgcagggagggggctgtgcgcgcgggggccctggtggcggagcaggcatcaccccgagagcgccgaggtttgtggtcgcaaccccgggagcaccgctgcgggaggagcggcgtggc

SEQ ID NO: 95872 - DNA, 122 bp, Homo sapiens
acaaacccacccagccttaatctgttgaccagcagcaaggcctggaggcgacacctctcccgtgtggccctcacgatgccgacgtcagagccctgagccagccgaggcctctgcacggtcac

SEQ ID NO: 95873 - DNA, 122 bp, Homo sapiens
tccctccctgtgcatcatgccgcggctgggaacgctgtcagcccgtcccccactgcgactcgggcactgattgttctgagcctgttgggcccaggcagatcagccccatcatgtatacctga

SEQ ID NO: 95874 - DNA, 122 bp, Homo sapiens
gtgggggtgcgggagctgtgggtgctgaggggtcaccggccacccagaaactggaggccccgacaagcaacgggaacatcccggggctgcgccgcgcggcaggacggaggtctcgggagtga

SEQ ID NO: 95875 - DNA, 122 bp, Homo sapiens
ccggaaaggaagagttcgctacaggacagacaggtggtttcaaactggaagggatgtctccgagtcccctgcgagaaagatcttatccttaggtctgcggttactagttacgttacgttacg

SEQ ID NO: 95876 - DNA, 122 bp, Homo sapiens
gagattgacatcctggctgcagagtacatctccacggtgaagacgctgtctccagaccagcgcgtggagcgcctgcagaagatccagaacgcctacagcaagtgcaaggaatacagtgacga

SEQ ID NO: 95877 - DNA, 122 bp, Homo sapiens
agggcgcgggggctttatccctcaggggccggctgggcaccccgggatggggaggcagtgcggcctggacactggggggatggatctgcagccctcccccccgacaggggaaggccccttcc

SEQ ID NO: 95878 - DNA, 122 bp, Homo sapiens
gactgactgatcttgtgtgcctgagatgtaggacttcctctgagagtgatcatggagaaacggtttgggtggctggtggggaaggtactggcttcctgtgggatgtagattctgatgtgacc

SEQ ID NO: 95879 - DNA, 122 bp, Homo sapiens
cgtccctcagccatctggagtgtgaccctgctgatccctggccgatccctggctccttggcgggcctctggttgcctccctctcatccggtgggtgccccggcctggattccggtctgcacc

SEQ ID NO: 95880 - DNA, 122 bp, Homo sapiens
tccccatgtcctgcacacaataaatgctcaatcaatggatgagtcagcaagctggacattcgctccgcccagagcaagccggacactcactcctgagagcaagccggacactcactccacgg

SEQ ID NO: 95881 - DNA, 122 bp, Homo sapiens
tctttcactacagccacaaacaagataactgataatgccagacagaacctccacccttgacgaaagctgaggaatttaaacacatgtccagtatttggagaatcagcaattgtggcacttag

SEQ ID NO: 95882 - DNA, 122 bp, Homo sapiens
agcgaatggaaaggatctgtccgagtcccggcggggctccaatcccttaataggcggttccgggccgctctggtcacgcccctgacccgcccctcaagacctggccttagcctaatctcagg

SEQ ID NO: 95883 - DNA, 122 bp, Homo sapiens
agagaagtggcctgacttcagagggacagcttgaggtataatttcggagaagaatctggccggaaatggccgtacttcaggggaaaattaactatcagcctcatcctcttttcagctcccct

SEQ ID NO: 95884 - DNA, 122 bp, Homo sapiens
agcgcctgaccaaagtggttttgccctgcttcccgcaagaggtggcacccacggctggaacgcaggagtcagacccacagtccccagctctggacgcccgcagcggggcctcgaagaggttc

SEQ ID NO: 95885 - DNA, 122 bp, Homo sapiens
acagaccctagaatccccctgcccctcggcggagcctttgggttccacaaccagagggaacgtgctctgccatcaacaactccaagaagcaattgctgggcaccgtgaagccgctcggaaac

SEQ ID NO: 95886 - DNA, 122 bp, Homo sapiens
tgatgtttcaggaaacgagaagtatgtgacgcgtgtccgctggatgggtgagagtttacacggcagacccgggttcctcagcttcaccggaactgagtccctgcccttgttaataatgatcc

SEQ ID NO: 95887 - DNA, 122 bp, Homo sapiens
gctccagcccgggacccgcgcggtgcccgcggcccgggtctccgagctggagggtcgccccgagagcagctctccgacctccgattggactcttgagggaaccgagacccagtcggggcgac

SEQ ID NO: 95888 - DNA, 122 bp, Homo sapiens
cgggtggagccccctactaaaacaatgtcatggattttagccttatccatcttggcatcccgaagcgctttttctacaggctccagggtacccctaaacaggtctgcacacaactcttcaaa

SEQ ID NO: 95889 - DNA, 122 bp, Homo sapiens
gtcccctgggaatggagtccctgtccacccatgtgagtatggttagagtgacgggcactgcggctgggtggctctcgggctggcactgcggctgggtggctctcgggctggcactgcggctg

SEQ ID NO: 95890 - DNA, 122 bp, Homo sapiens
ctggcaggctcagccaatcactgaaggagggaacgatttgagcgatggagccactctggccgagttagagctgagattatcctgagttccttttactggtgttctcagagcatccttgactt

SEQ ID NO: 95891 - DNA, 122 bp, Homo sapiens
acgctcggtccccctccgcgaccgaggctctcggcctcacacatggcaggattcctagctcgaagcagcgcggtgatgtcactttcctgctggaagcccagcgttctcctcgccccgagtaa

SEQ ID NO: 95892 - DNA, 122 bp, Homo sapiens
atttccgcagagctgcctgtttttgcagacagacaaggggagccagggcacagcacggctcggctcatgcccagagaaagaggaagaagctgagtgtgagacagaaaggaaatgggatggca

SEQ ID NO: 95893 - DNA, 122 bp, Homo sapiens
tctgcgacgagattatccagggccagcggcagatcatcgacggtagggcccacgcccccgcgcatctgagccacccgcgggggggccgctggcactcactgagccctgccccttccccagca

SEQ ID NO: 95894 - DNA, 122 bp, Homo sapiens
gtggactctcccacttctcgccttctgtcctcgctgggagcagcggctcctgcgggtgcccggcctggcctctccagctgcctcagataatcgccctcgtaatcaccttccctcacgctgct

SEQ ID NO: 95895 - DNA, 122 bp, Homo sapiens
atagcactgggctctgggtacccctctcaaagagcaaactggccattaagcactcagatccgagactgggccaggcagcccttagtgctcccatcacagcatgctctgaaattgggcatcct

SEQ ID NO: 95896 - DNA, 122 bp, Homo sapiens
agcatgcaagcctgtgcctagccccgaggaggcactggggaagccacagtgcaactgtgacgtgtgggcggcctgctgtgcgtgtgctccagcaagtccagtcgcgggtgcgaggtccattc

SEQ ID NO: 95897 - DNA, 122 bp, Homo sapiens
ggccgtcggttcggctcagtgaggctctggccaccttcctggtgtctgctgtgctggggacgagcctgggatctgcaagaggttctctctctgcttccaagggcctgaggggccaaggagga

SEQ ID NO: 95898 - DNA, 122 bp, Homo sapiens
tttcttttcttttttcttttttttgagacagggtctcgttctgtcacccagtctggagtgcgttggtacgatctccgttcattgcagcctttggctattttttaattgtttgcttgttgttt

SEQ ID NO: 95899 - DNA, 122 bp, Homo sapiens
ggaactcagagcatctgaccaaacgtgacctttgggaaagtcctcttgctgttcggggggcgacctctgcgggtttggctccagctgcagaaagagcgccaaagaaatctcaactccagccc

SEQ ID NO: 95900 - DNA, 122 bp, Homo sapiens
ccttcctccacgttaccttgggcgtgtaggcttcccgtggacctgcccgcgccgcccgctcggctctcagctgtcaagcagccgcctgctccgcccgactctttccgctccgagccgcgcgg

SEQ ID NO: 95901 - DNA, 122 bp, Homo sapiens
agtcagattcacccgtggagccagaaccttctttctcacgggaagactgtggtaccagtgcgtgttggtcgggtggttcatcattagtaagctcccgtgggccagcggcagcctgaccaccg

SEQ ID NO: 95902 - DNA, 122 bp, Homo sapiens
gcaggagaatcgcttgaacccaggaggcagaggttgtggtgagccaagatcacaccatcgcgctccagccttggcaaccaggtgaaactccgttccagaaaaaaataaaatgcaaaaattag

SEQ ID NO: 95903 - DNA, 122 bp, Homo sapiens
ctgagcccgggaccaggcaggaggaacctgccgtgcactcactcagactcctgcagcacccggggcaggtgctccaccagcgggcacagccgctcagccgcctcctcatcccgccgcagcca

SEQ ID NO: 95904 - DNA, 122 bp, Homo sapiens
acgcgggtcggcctttcccggacccccaccacctcctgggaccattccgccgcccggccgcggccaggcggtgccccgcccccttgccacagctcacagctccacctgtccccgccgccagc

SEQ ID NO: 95905 - DNA, 122 bp, Homo sapiens
gggccagggccgccgtggcgacgggccgctcccgccttatcggccgcccctgcgagcccgcggccgaccccgcctggccctccccgggctgcccctcccaggtgccccctcccccggcagcc

SEQ ID NO: 95906 - DNA, 122 bp, Homo sapiens
tctcccgacgcgcggcctagtccgacagcgcctcattcatccacacatccccaagccacccgctgccctggccccatcttggccactgggcccgggccccgcgccagcctcagggcaatgag

SEQ ID NO: 95907 - DNA, 122 bp, Homo sapiens
cgcctgtaatcccagctactcaggaggcttgaggcaggagaagtgcttgaagccgggaggcggagggtgcagtgagctaagaacacgccacagcactccagctgggtgacaaagcgagactc

SEQ ID NO: 95908 - DNA, 122 bp, Homo sapiens
gaatccagccccttggcatgggacctggagcctcgactacacagcatcttctgggtctggcgtctgccagcacctgatctctttcctcattcccagctttgtgacacttctcaacttgcggc

SEQ ID NO: 95909 - DNA, 122 bp, Homo sapiens
gccgcggcggcgaggggagccgcgagtcccgctgaagtttgcaggcgggcaggaaagcgccggctgctccttccctccctccggattggagagggaggaggaagcgagggaagtgccgccga

SEQ ID NO: 95910 - DNA, 122 bp, Homo sapiens
cagcaaacacttgctgggccggtgcctccagctccacccgagctgagtctgcttcccagccgcgctgcccgctctgctccccgcaccaactagcccgggcttgctgcccgctaggcggactc

SEQ ID NO: 95911 - DNA, 122 bp, Homo sapiens
aattagattgtggtgatggttgcaaaacattgtgaatgtactaaaagcccctgaatggtacgcttcaaaatggttaaaatggcaagtttcatgttttgtaacttttacctcaatccaagaaa

SEQ ID NO: 95912 - DNA, 122 bp, Homo sapiens
tgtcccgcctcccgctcctcctcattgtccccgccccttgctctgttttcttccagctgccggaccagcgggcctgccgcctctacggaccagtccctgctcaggtgtcacttttgctggca

SEQ ID NO: 95913 - DNA, 122 bp, Homo sapiens
tgagttcgcggctgccaaatggcagtgcagaggagcacgcagcagcgcctgggaggcgctcggctccctccaagtccctattacgttaatttacttcctggtcataatcacccatgggatga

SEQ ID NO: 95914 - DNA, 122 bp, Homo sapiens
cttggcacacacgtaaacgcctgtggtggaaggagaggcaaatgtggagtcatcagctcccgcctttccggggtcaagctcccaaatccaccaacccaggcaaagacagcgctgcccccgtt

SEQ ID NO: 95915 - DNA, 122 bp, Homo sapiens
cgttccctgtgctggcgtcgaagcacctgcacaacgttgcttctttgggaacacgcattccggttccagacaaaatgcgaagttaccaggaagcctgtttgagagtggggttgggagggggg

SEQ ID NO: 95916 - DNA, 122 bp, Homo sapiens
ccaggaccagccccagcatgcagagcgctctggcagccatgaccaccgtgggctccgggacgcagctcaggactcgcttcatggtccaggaggcctcatttatgcaccgttgtttgcacagc

SEQ ID NO: 95917 - DNA, 122 bp, Homo sapiens
cccgagtcaactcgaaatccactggtaacagagcctacctctggtttccccttgggggaacggcagcgtggtgtaccaggctgactgctctaccatgtgaaacggattctcattgtcccagt

SEQ ID NO: 95918 - DNA, 122 bp, Homo sapiens
agcttggtggtctgcgggttgggtgtagaagggcctagagcttcggatccgtccggaatgcgccctggagattgctttttgcctttagaggctagacaaaggtatcgttccctgggacttca

SEQ ID NO: 95919 - DNA, 122 bp, Homo sapiens
gccgcctcttcggcccagtggacagcgagcagctgagccgcgactgtgatgcgctaatggcgggctgcatccaggaggcccgtgagcgatggaacttcgactttgtcaccgagacaccactg

SEQ ID NO: 95920 - DNA, 122 bp, Homo sapiens
tcgtgcccacgacgggccagcaaccacaggctggatgctcaccctgtgccagcctgcagacggagagcacccaccccaatctccagcccccagaggagctgcctctccagggccttcctgca

SEQ ID NO: 95921 - DNA, 122 bp, Homo sapiens
gttcatgcagattcaagtcagaggcaaagacccatccgtggggtcatttccactgaactgcgacctatagggggctgcctgagtgtaggttctttatgtccgcgaggggaggctccgtaata

SEQ ID NO: 95922 - DNA, 122 bp, Homo sapiens
ctgagtcaggggcagttccaagcaaggagattttattcagctggggcaggtggtcagggacgagaagggcattggagctgaggcttgacagatgagttggaatgtggcaagtgaagagagat

SEQ ID NO: 95923 - DNA, 122 bp, Homo sapiens
ccagggggagctgggatgcagtgggagaggggacacgcagggcctggctgagaagcctcgcgaggtaaccacaggcggaaatctgaaaaatgaagacgttcccaccagttccagaaaacagg

SEQ ID NO: 95924 - DNA, 122 bp, Homo sapiens
tcatcctcttctccctctctctcctccttcctgctctccttccaggcgctcacctttggccggcattggtaatcacagattcctttaacaagggatttcttggctgtggctgcacatttgaa

SEQ ID NO: 95925 - DNA, 122 bp, Homo sapiens
ctggttttctcaccgggccttagctgccctcccgcggggcagggcttgggacctgcagcccgccatgcctgagcctcccacaccctccatgggcttctgtgcagccggagcctccccgacga

SEQ ID NO: 95926 - DNA, 122 bp, Homo sapiens
aggacgtgctcagccccagccggtccctcctcatccagccgatccccctcctggggagcgcggtctctgctctgtgctgctgaaaggatcctcgggctttcccgctctactttaaaacccct

SEQ ID NO: 95927 - DNA, 122 bp, Homo sapiens
ttaaatatttggataaaaccaacaactttctagaaaattactgaaactgacataagaaatcgaatctgtaacttaaaatccccccaccacggcccagcgcggtggcacatgactgtaattcc

SEQ ID NO: 95928 - DNA, 122 bp, Homo sapiens
cgacagggaggagacttgcctcccagggaaagacagcacaacagctacttggaatagtcccggtgcagtgccgttaagtctgggttgcaaggcagcgccctccggtctccagcaatggtggc

SEQ ID NO: 95929 - DNA, 122 bp, Homo sapiens
ccagcaggcgctctgtgaaggtgtgcagagtgggcgaaggtgcatgcgcgggccgtggggcggggacaggtggaggagccagtcagacccaagtgcagcgggacgagggcgaggttaatctg

SEQ ID NO: 95930 - DNA, 122 bp, Homo sapiens
tagacatcagaatgaatcgtcagcatgggcatcatcactggtgtcatctctgaaagtcaccgatagcaaactctcatttaatacagatttacaaaagagatcagcatactgcaatagagtag

SEQ ID NO: 95931 - DNA, 122 bp, Homo sapiens
aagaagttgatggccaagtctgggaatgtgtacataaccaggacacaaagttacagatgacgagagctttaactgaagtgttagacaatgctagagagtttggagaaacagatgtctgctgt

SEQ ID NO: 95932 - DNA, 122 bp, Homo sapiens
ctggtgcccgcctgcaggctgctcgcttgctgagaggcggcgtgccagctccgcgcaccgcgcctcagtgccagatcagggagctgtcagctcagcgcccacgcccctccgcttcagctccg

SEQ ID NO: 95933 - DNA, 122 bp, Homo sapiens
accacagccccgccggggctggaagtgggagcggcgctgccaccctggggtcagggtgaccgctgagcctgacactcctgacggcccggccgcccctgagcacccggggaacatcggggagc

SEQ ID NO: 95934 - DNA, 122 bp, Homo sapiens
aggcatgagccaccgtgcccagccttgcctgcgcttttcctcccacactccaaccagatccgcagacgaggctgaggggccctccatctaatcagaaagggcagccctctgcatggacaggc

SEQ ID NO: 95935 - DNA, 122 bp, Homo sapiens
acctcaggtgatcagcccgccttggcctcccaaagtgctgagattacaggcgtgagccaccgcgcccagccaggactaatttctaagagtgtgcagagataccgaaacctaaaagtttaaga

SEQ ID NO: 95936 - DNA, 122 bp, Homo sapiens
acggggaaacacggacaggaaagtgccatccctcaagttacacccccaatcctggagccgcgagttggggcccagggactgctaggcccctgatacctggaactccagggtgcacttggtgc

SEQ ID NO: 95937 - DNA, 122 bp, Homo sapiens
ccgggtcgatgtagccgtctgcattccttcaggtccgagggacagggcagggctcagggccggggcgagctgccctggccaccacactcgacgccccgcttccgcactcccaacacggggaa

SEQ ID NO: 95938 - DNA, 122 bp, Homo sapiens
ggtggctgtggccatgggcaaggccctgctggaattcgtgtgggcccttcgcttccacatcgatgcgtgagtggcctgtggggctgggccaggccaggggtgcaggcagacacaggggtctt

SEQ ID NO: 95939 - DNA, 122 bp, Homo sapiens
ccggcagagctcccgcagcaggaacttgggcaggcagcagctgcacctccacctggggcccgtaccccaagaggctctccccacactggcggcggaagggcaggagccggcggccgggctgc

SEQ ID NO: 95940 - DNA, 122 bp, Homo sapiens
cgttctagcgattcgtccccctcaggctcccaaagtgctgggattataggcatgagccaccgtgcctggcctgtgctgagggttttacacgcattatcctgttcaaccttatgggaaaggta

SEQ ID NO: 95941 - DNA, 122 bp, Homo sapiens
atgattccagcgcctgacagccaggaccccaggcagcagcgagtgacaggacgtctggaccggcgcgccgctagcagctctgccgggccgcggcggtgatcgatggggagcggctggagcgg

SEQ ID NO: 95942 - DNA, 122 bp, Homo sapiens
tgcgcctggcaggggatggaggacagtggccaggcctttggaacgtccggagaggttatgcggcctagagttggaaggctgtaatctgaaccttatctgaactccttggtctgaaggcctgg

SEQ ID NO: 95943 - DNA, 122 bp, Homo sapiens
ctcgcccagccgagctcccacccccgcttttttccgaaggcgctgggcggcgccaccctccggccggagcccggcactgcacaaccccctccgactttcaatgttccacactccccggccag

SEQ ID NO: 95944 - DNA, 122 bp, Homo sapiens
cagggttacagaagcctcaggctgtcaggggatgctgccaccccagtgccagggtggctccgcccagccccttcctgctgccgccctcgctgactcacctgtccagcctcctactgggctgg

SEQ ID NO: 95945 - DNA, 122 bp, Homo sapiens
cgggctagggctttccgtgtgggccgcgcctgccggccctctctgttgtcccacttggcacggactgggctaccgccacggtttgacttccgccaccagcaaccaagggaaccagatcccaa

SEQ ID NO: 95946 - DNA, 122 bp, Homo sapiens
ccaaggttgagcttgctttatggatgacaagtgggctaggctgggctgtcgggggcaggacgaagattctggctgaactttccaagggacgggacgcttgggatcctggctggtacgaggcc

SEQ ID NO: 95947 - DNA, 122 bp, Homo sapiens
gacacatgcacaggtatgtttattgcggcactattcacaatagcaaaaagttggaaccaacgcaaatatccatcagccatagactggattaagaaaatgtgacacatgaggccagcgccggc

SEQ ID NO: 95948 - DNA, 122 bp, Homo sapiens
tcgggcccagcccgcacctgggtcagtaggtcctgcaccagctggcccgcggctgtgtgtcggtcctgcatcagtgctgccgcagcccggcccacctgccgctccggtgccagtagggagca

SEQ ID NO: 95949 - DNA, 122 bp, Homo sapiens
ccgccgccgcccactgctgcgcggcccagcagctcccgccccactccgtcccaggatcagcgccgaccctcgcccccaccttagaggcccaccccgcccggagaccccctccccccgaatcc

SEQ ID NO: 95950 - DNA, 122 bp, Homo sapiens
gggcggggcgggggcgggggcggggcgctcctctgggcaccgcccccggcccgccccccgcgctcgcagtcccgctcgcacactggctcccacccgccgcccgcccaggcactgcccgcggg

SEQ ID NO: 95951 - DNA, 122 bp, Homo sapiens
tcgttgtgagtcttagatctttagtggggaataaagcattccgataaaggtgggagcagtcgctcaggatttctgtggggaagtgaaagaactagatacgtagtttcactgtacacgcagga

SEQ ID NO: 95952 - DNA, 122 bp, Homo sapiens
ctccgtggaaactgaaagcgccctttgtttttattcctccgggtgatgatgttgctcactcggccagtcgtttctcccctctgagtcccacagtgaccattgatttccgggtctgggaaaat

SEQ ID NO: 95953 - DNA, 122 bp, Homo sapiens
ctttttctttattcagtggattgttagttcttctgctgttaggaagccactatgtctggacgtggaaagcaaggcggcaaagctcgggcaaaagctaaaacgcgttcttccagggccggtct

SEQ ID NO: 95954 - DNA, 122 bp, Homo sapiens
gtcagcagggctcctggagagaatccttgtccccgcctcttgcagcttctaagcgggtgccgcacccctgggacccggcctcagtcactctgacctccgaccctcccgcctcccacccgtgt

SEQ ID NO: 95955 - DNA, 122 bp, Homo sapiens
tccaggagctgctcagtgaaacggctcaggccctagacttggtgactgttccacactcttcggctctgtacctctccactgttgcctgagctctgttagtagaaaactgggcctccaaacac

SEQ ID NO: 95956 - DNA, 122 bp, Homo sapiens
aaggccacgccggcagcttccagccctgccgcagaagtgccaggatgtccatcagccactcgccagggcacggagccgtcagtccactgttacgggagaatgttgatttcgcgggtgcgagg

SEQ ID NO: 95957 - DNA, 122 bp, Homo sapiens
gagaagccatgctccagagtggtgcaggtgtaggtgcccgcatcgaaacggctaagcctgcggaacagcagcccccgctccgtgtgcaagactcgctcgtccgtcttcacctgccatgcggg

SEQ ID NO: 95958 - DNA, 122 bp, Homo sapiens
ccacttaagggagaacttttgtccaagcagggccaactgcattttattagacgcccactgcgtgcagggcgctccgagaggctggggcgaggaaggttagaaccgagtccgctgcctgccgg

SEQ ID NO: 95959 - DNA, 122 bp, Homo sapiens
ccgcctccagagcaatgagcgcggcggcctcgggtgtgtgaaagctccagccccagcctccgtccaccgcagggtggcctgccacgtggcccctcagtggttctcagtggatggaagggccc

SEQ ID NO: 95960 - DNA, 122 bp, Homo sapiens
tcgagcggcgcgcgggtcttcccggcggctcccgcatccctggccccggggctgccatcccgcccggttttcatctgggccaaatatgtgcacgcaaaggttaattctctgcttgctaccca

SEQ ID NO: 95961 - DNA, 122 bp, Homo sapiens
agcccctagattcttccaagacaagatgtcagatttctgtctccagccccctcaggaagtcgtaagtccttgttaaagtcacaaaatcataaagtctcaggcatgaaagagcctcagtatca

SEQ ID NO: 95962 - DNA, 122 bp, Homo sapiens
tggctgaggtcgcagccgactccctctgcttgcagggaggtgtatggggagacgcccaggcgggaactggggctgcgcccgtgcttgcggaccagtgcgagttcagggtgggtgtgggctct

SEQ ID NO: 95963 - DNA, 122 bp, Homo sapiens
tgtgggaacgttcccaaccatggtatcaaacacctgaacgttctttctgctggggggatgcgtcagaggaggcctttgtaccggggcgatgcgataagccctgctgcgggtattgacatttg

SEQ ID NO: 95964 - DNA, 122 bp, Homo sapiens
atagctaacaaatcatgcaaagcaggaactaatactgtatctgtctaatttcaaagtccacgttcttgctactatgaagtagtaaatgaagtatgctgatttctaaatttgtagttaatttg

SEQ ID NO: 95965 - DNA, 122 bp, Homo sapiens
gcttttgaaaaaatggtttaaataacaaagcattttttgcaggtctctcctctttaatgtcgcctataaactaattacaataaattttcaccttctcttgataaaatcacaactgaaactag

SEQ ID NO: 95966 - DNA, 122 bp, Homo sapiens
ggcctctagctgtgcgcaaggcggaatatgtggggttctggcggcttgtgtcacggctgacgctgtaactatacccagaatctccgtccctggaggggccctcaggttgagcgtcagctgat

SEQ ID NO: 95967 - DNA, 122 bp, Homo sapiens
tctgctccccgccgcaccctcctcgccctcgcactcacccttggtggcccctgcctcctgcgggctcaggagggtcatcagggtgtggaaccccaggaccagccctgctctgagggccatta

SEQ ID NO: 95968 - DNA, 122 bp, Homo sapiens
tcctcctcagggaaggggcaagtttcgtggcttgaccggagggccctaggtgagcagtgccgcgttgtctttggaggaggtttctcctttggcctcggtttgtcctctgtgtcatgggggtg

SEQ ID NO: 95969 - DNA, 122 bp, Homo sapiens
ccgtccaggcctggagggtgggacggggagtcctgtccggtgggttgcatggcggtgccccgacattccccctgccctggggccctcccagttgcacagggtgccctgcctacagcccccca

SEQ ID NO: 95970 - DNA, 122 bp, Homo sapiens
tcccagcaggagctcgatgctacgcagccctggcgggcagcccccctcccagtcccgcagcggctcggcccttcacggctctgcctgtgcaccctacgtgcaggtagaaccagggaaaatgc

SEQ ID NO: 95971 - DNA, 122 bp, Homo sapiens
gggccagaacagggggtaggaggcgcgtcctgtgcggtcggtggcggccccaggtgggtgcggtgcgctggcaggaagcggcagcacgacccccgactttgcatctggacttttctagtaac

SEQ ID NO: 95972 - DNA, 122 bp, Homo sapiens
ctccacttctgaggacccacttctcaccccctcctcctccgcacacgttcccgaggctctcggccggtgtgatctcaccgactagagaataaaaacagcccaggggcgccggcgccggccaa

SEQ ID NO: 95973 - DNA, 122 bp, Homo sapiens
gacgcgcgccgctggcaacccggagcgcgccccgcttcctggttccgcccggcgcgcgctcgctagcccgctgtccctcgcgccccctccgcgaccgcccttgaaggacccggaccccctcg

SEQ ID NO: 95974 - DNA, 122 bp, Homo sapiens
aacaaaaaaaagattttggaaaaatggcctcggtgtgctgcagcaaggtaagctgggactcgcctcgatgcttcccagctggccagggaagcggaacatccgggtgagcagagcccaaactg

SEQ ID NO: 95975 - DNA, 122 bp, Homo sapiens
ggcgggcttggcagttgctcgaggcaggatcaagtcccgggggcggggcgggtgggctggcggctgtcctccagcaacaggtgcacattcccgggctcctcgtcacttcccctgtgctggcg

SEQ ID NO: 95976 - DNA, 122 bp, Homo sapiens
gctgtcttcctagcttgcagacaagtgccttctcaatgtgtcctcacatggcctttcttccgtgcatgagtgaagagaaagctctctggcatcacccttttctcataagggcactaatccta

SEQ ID NO: 95977 - DNA, 122 bp, Homo sapiens
gtttacgttatcgtgagtattgtcttttccgcctctggaaattaccagctgtgtcacctacgggtgtacaccctctccagtatttgcagtaacaccatcctcttcccattggatgttaagaa

SEQ ID NO: 95978 - DNA, 122 bp, Homo sapiens
aggccagagggaggcactctccgtccacagctccgggtgcgcgcccgcgccgcgagaccccgccacgccacgccactccacgccacgccactccacgccccgcacccgcgccacgtgccgcc

SEQ ID NO: 95979 - DNA, 122 bp, Homo sapiens
atagaaagacacagagtttgactctgtttggaaaatcagacgctaaatagcccctgaagccgagcagcctgttatgaaaacggaggggtggtaggcccttctaattggccagggtatttacc

SEQ ID NO: 95980 - DNA, 122 bp, Homo sapiens
gcccggcgggggcgagtccggcttcaccgcgcccggcgcgcgcgcacgcaccccagaacccgaatctgcacaactactgggcaggcgtctctgcgggaggccaggagacccgcgtcccggtc

SEQ ID NO: 95981 - DNA, 122 bp, Homo sapiens
caaaccttcccaagttctggctgcagctgtccctttccggggaaacaaaggcacctccagcgcccccacccccagccagcctcaccgatcaaggaggccaaaggcagctcccggccccgctt

SEQ ID NO: 95982 - DNA, 122 bp, Homo sapiens
cgggcgcggcggctgcgtctgggccggggcaggcggttcggccaccggggtgcggggctgcggagaatcctagcggccgctacggaccgaagtttccaaagatgcggttccccgagtgtaca

SEQ ID NO: 95983 - DNA, 122 bp, Homo sapiens
gcagtgcgctagagaaggagagcatgcaggcgccggcagggtgccaagctggcgtccacgcggcccgtgctcgctctgtgccgcctggcagccaggcaggagcacctctcgagaggggcgac

SEQ ID NO: 95984 - DNA, 122 bp, Homo sapiens
agcttctgaaaggggcaccacgttttttgctctatggggcagatgacccctccctaatttcggttttccatccatccccaaggtaggctttggagtggcaccggagactgagctcaaatttg

SEQ ID NO: 95985 - DNA, 122 bp, Homo sapiens
acctcagcggtcgcgcctctcccctgcccctgccccggattccccgccgctctcagctctcgaggagtatgcagcactcttccgtgcagcgtgcctcagtttcctccgctgtaagcaggcgg

SEQ ID NO: 95986 - DNA, 122 bp, Homo sapiens
cgtcagttttctgtctctgcctctgccttcactgccacttttctgaagcagggcaacattcgagaacaaagttttgtcatgttactcttattccagtttcctgccatctgattcacatgcag

SEQ ID NO: 95987 - DNA, 122 bp, Homo sapiens
ttgagtaggacctgatcatggaagtaaggggaggaggcagccaggacagcccgatgagcccggaactcccggccctgcactctgatagatacatcgcagagctggccctgcagacgctgctg

SEQ ID NO: 95988 - DNA, 122 bp, Homo sapiens
attcctgtccttggaaagggtgaattcctggtctgctacctaaacttgcatgtggatcttcggtatgttgaccacgagttaatgactcattccctattaaccatagttattctctctcccta

SEQ ID NO: 95989 - DNA, 122 bp, Homo sapiens
ggattccggcaatagttgtcgtccagaccttggtcgaggaacctgggggcggtaatggggcgtgaagaagaccctggtactctggcttatctggccccgcccagttgccctacacggagccc

SEQ ID NO: 95990 - DNA, 122 bp, Homo sapiens
acttgtacacactttttcagtgtaaacccctctttttacaaatgaggagaaagactaaggcgatgctgctaattggccaagctgagaccagactcctggtcttcagcctcctcctgtgctta

SEQ ID NO: 95991 - DNA, 122 bp, Homo sapiens
tttactccttttacgcctggtagcaatagcaggcaatggcttcatcactgctgctctgggcgtggagtgggtgctacggagaatgttgttgccttgtgataagttattggttagcctagggg

SEQ ID NO: 95992 - DNA, 122 bp, Homo sapiens
ttgagaagtctagacttgagactcaggcactcagaccaggaagccaccagtcgtctccagcgtctgtctttatgtttctttttttttttttttcattttattttatttttgagacagggtct

SEQ ID NO: 95993 - DNA, 122 bp, Homo sapiens
atggccaagacccaaactgcaatgttccctgaagtccaacctgcttggagtccttgggaacgtgtacaatggttaacaggcttgagaggagtcagctgggagagtgagagcgagactgccct

SEQ ID NO: 95994 - DNA, 122 bp, Homo sapiens
ggattgaatgcttgccctctttcctctcccctggagccttggagagagagataagacaagcgcaaataactgtgacctgttgtaggaagtgagaaatacacccaggcagggccagatactgc

SEQ ID NO: 95995 - DNA, 122 bp, Homo sapiens
ctttggtaggtcagaggacagctccatttcctggccaactccactcagggactctagaatcggcagccctattccacagacacttgaaagcacaagtactgcaaatgcttatactagatgat

SEQ ID NO: 95996 - DNA, 122 bp, Homo sapiens
acacagtgaggctgtggttgccatgttggtgactggcagagcggccatgttgcttatagacgcgcatgcggccatgttgaatattcggagaggagtcctgagagttgacttgtgttaaagta

SEQ ID NO: 95997 - DNA, 122 bp, Homo sapiens
ggaagggggctgaaaggggctcagagcagtggaaggtcccaggcccagctggggttgggacgtgtgtgtgtgtgtgtgtgtgtgtgtgtgtgtgtgtgtgtgtgtagaggggtgggttccgg

SEQ ID NO: 95998 - DNA, 122 bp, Homo sapiens
gcggcgctttgggaagacgcctgttggttttgaccccgaataagaagaggaagctgagagcgggctgactgtggtccagtcctacttcgattcagtgtgaactgacactctgatctgaagac

SEQ ID NO: 95999 - DNA, 122 bp, Homo sapiens
agtccagccccttacccaccccacaatcccaagtgttagtgggacccatgggggagagcccgtcgttggagagggagtgggaaccagcctgttccatgtcattctgctggcatttacagttg

SEQ ID NO: 96000 - DNA, 122 bp, Homo sapiens
gacccgcggaatcacggctaagccgctcccggggggccacatgccggctgggcagcccctcgtgccacacctgacctccctgtgggttctgggagccaggccacagggcaaggcctgggctg

SEQ ID NO: 96001 - DNA, 122 bp, Homo sapiens
atcgaagaacttcttaaatttcattgcaagctttttgcaaaggtttctgggatttgcctgcgaagctgtttcgccgcgtccgagagcgagcgaacgtgcaagccagcgagggagacagggag

SEQ ID NO: 96002 - DNA, 122 bp, Homo sapiens
gggcacttgaacattcttcatgagggctgaggcaggcaagctgagtggagcagtgagtcacggcgtgctgcggcagtggtgtcctgaaataacagcaagcagcagcagcagcagcagcagta

SEQ ID NO: 96003 - DNA, 122 bp, Homo sapiens
tccttggcctccgagtgcctggcgggcctccaggccccagacacacccctctcgaccccccgaggtttcctcccagatctgttcccgccgggacctgaccttgcgcccctccaggcgcctta

SEQ ID NO: 96004 - DNA, 122 bp, Homo sapiens
gacaggctcatccctcttatcagacaggctggacttgctgggaagttgacactctgggggcggccttcatggataaatactctagttttcttgcccctcaagtgagacaaccccaaggcgtg

SEQ ID NO: 96005 - DNA, 122 bp, Homo sapiens
ttcgtgagcgtcgccccacgtcgctcccgcctgcccctgcccatacgactcgcccgcgcccgtgggttaaggctgtctcccgcccagcctacttggttgattcaatccttttccccattgat

SEQ ID NO: 96006 - DNA, 122 bp, Homo sapiens
acaaaggcttgctggggatttttaccgggtggtgtctgtgctgtgtgcccaggagggcttcgtgcagggtgataacgccgcggttgcagcgaactcacttgcgtttttctatcagccaaggc

SEQ ID NO: 96007 - DNA, 122 bp, Homo sapiens
ggtgggcagtccgccagccagcggcattctgcagggctctgtgcaagcgtcagcccaggacgggcacctgccccaccctgcctggcccacgcccaccagcctggctgtcgctgggcgctgcc

SEQ ID NO: 96008 - DNA, 122 bp, Homo sapiens
aagcaggcagcccaccctcatgctttccaggaagcaaatgtggctcaggtgtaaagtgcccggttgatgaagggagttagcggagggagtataaggatgtactgtctgcccccttaggacac

SEQ ID NO: 96009 - DNA, 122 bp, Homo sapiens
ccctttcgagtgtcctttgcagtccagctgggtcttctctgtgccttattgtgttttatccgcctttttgtgcggctctgcgtaggtagatgcctctcggcgtgttggtactggaaggccat

SEQ ID NO: 96010 - DNA, 122 bp, Homo sapiens
ccctcccttgtgagtgcgagagaccccaccacccggaacccggattggggtgtgctgctccgggttctaacacatctgctactgagcacgtgccactgtccatcggaccttgactcatgttg

SEQ ID NO: 96011 - DNA, 122 bp, Homo sapiens
cctttcttcattggcgtcttcggagcagatgcatcttctttcttcttggcctcactctcccgttcccccgtcagtccccccacccgcggctccccacttgccccagctctcctcgccgctcc

SEQ ID NO: 96012 - DNA, 122 bp, Homo sapiens
ggtgggcagggggaacaaagctcacccaatcagactgcaagaaataactcctcctacatacgggctgtgagcaaggaagcaaagggccccactgcagatggacaccattctacaaccatctg

SEQ ID NO: 96013 - DNA, 122 bp, Homo sapiens
gatgtcccccactgcccacatggcctccaacctctgtgttctccccaggatctgagggcccgattcatgtctggtcccctagcaactggtgcgcggccctggacaagtcattccctcttaaa

SEQ ID NO: 96014 - DNA, 122 bp, Homo sapiens
tggctgcaggctcagaatccagagtgaacaacccattcaggtagaagcaaagggttatttcgctaggctccttcatcagacatccttcaactggtgaccctccaaagtcagacatccttcaa

SEQ ID NO: 96015 - DNA, 122 bp, Homo sapiens
tgccacacacagcacaggcatcacccagtgtgacatctatagcacccttctgggcctgcccgctgacatccaggctgcccaggccatgatggtgacatccagtgcaatctcctccctggcct

SEQ ID NO: 96016 - DNA, 122 bp, Homo sapiens
ccaagactcacctagagctaaagaaattaattggagaggtgtccagtggctccggggagacgttcagctaccctgactttctcaggatgatgctgggcaagagatctgccatcctaaaaatg

SEQ ID NO: 96017 - DNA, 122 bp, Homo sapiens
gggttcgtgctggcaaagcttaaactgtgagtaaccatccacacagcaggaaggagagcacgaggctactcacggtcaggatgttcatatggcaaccagtggtgtttggtattctggtattc

SEQ ID NO: 96018 - DNA, 122 bp, Homo sapiens
attacaggcgtgagccacctctcccaagccagatgaaaatatttcaaaagtggattggggcgatggctgcataactttataaatttactaaaaaaccattgaatcgtccacctattattggt

SEQ ID NO: 96019 - DNA, 122 bp, Homo sapiens
ctgggctgacacgggaggggaggagcaggagctggaggggtgttgggggtggggggagcgcgaaccatctcgagccaagacaagcagcacattcacaaataacgcccccacccccagcgcac

SEQ ID NO: 96020 - DNA, 122 bp, Homo sapiens
gcagctctcggttaccatgggaaccgcactccgcagcctccctgggccccatctaatctgcgtgtgtgcgtggcggagaattctaagcctctgcacctgcccttgccttccctttcccagcc

SEQ ID NO: 96021 - DNA, 122 bp, Homo sapiens
gccactcggcgcatgggccgcgctacacggccgctcagggagctgagggtatagcgttttcgccttagactttcttgggtgcaggcccacaccacctcagcagcctgcccggcagtcctctt

SEQ ID NO: 96022 - DNA, 122 bp, Homo sapiens
gctcgccggcgacggtctgactagcaggcgctctggaggcatccggaccggggcgggaaccgtcagcagctccgggtccgaggccgggccgaaggactcagggccccagcggtcgtggcgcc

SEQ ID NO: 96023 - DNA, 122 bp, Homo sapiens
gtcgggaggcgggcgcggagcggttcccagcgcctggacgtcagccagtcgcaacacccgcgggaacacttgctacatttgccataatgcatttctgatctgtttccgcgcaggcctgcgga

SEQ ID NO: 96024 - DNA, 122 bp, Homo sapiens
aagtctcactcttctcaaaacacaaatggctatgaggcaaggcactttgttggaccagatcgtgcctcctaaaggtggcaagtttgcatcacgactttacataaatgctcttggcactgaca

SEQ ID NO: 96025 - DNA, 122 bp, Homo sapiens
atacatagcttgcctgtgtgacaagcacctactttttcccaatccaaagaaagcaatagtcgttaaagaaaaacctacccaaggggccttaagagggccctaactcttgtgacacagacaca

SEQ ID NO: 96026 - DNA, 122 bp, Homo sapiens
cgcgagcccctttgaagaataaatctcagctgtgttatctgtcttgtcacagcactgaaacgtggggatggggagaacgtagttccacgttggcacagatgagctgtttacatcgaggcgga

SEQ ID NO: 96027 - DNA, 122 bp, Homo sapiens
ttgattgtttaaatttgcatttctcactcctgcaaatatctgatcatgccatacccttttcgcagtgggctatagaaacctaaaggctgttcttaaaactttgttttttaatttatttttga

SEQ ID NO: 96028 - DNA, 122 bp, Homo sapiens
catgaattattcaatgatgtccaccataactcatggaaaggaagaaaatcctgccttcctcgagcagctatgggaggccttaaggaaatacactccactgtcaactgactcactagagggtc

SEQ ID NO: 96029 - DNA, 122 bp, Homo sapiens
tattgtatgcttcaaaacatgttttttggacaaggactttgttttaggcattgaagtcctcgttctcctgaggataaaaagtctctgccctgcagcctagcagtgcatttggtggcagagtg

SEQ ID NO: 96030 - DNA, 122 bp, Homo sapiens
ctgtctgagcccccgagttgtttatctttgtacctctggagcaacagccagccaaaggctcgtagattttctttccctaggcccagcaagtgagccaatagcttttggtttttactttctta

SEQ ID NO: 96031 - DNA, 122 bp, Homo sapiens
gagaggatgctttgtgatggtgttgttgctccgtcaccagcactatttccgccaaatctgcggtctgtgtatgaggcccatgcgcaatggacctcccgtaccccaaacaacacagaagcgtg

SEQ ID NO: 96032 - DNA, 122 bp, Homo sapiens
catttctctagagagctgcttctcaaacttcagcccagagggcttgttaaaacagaatggcggccaggtgcggtggctcacgcctgtaatcccagcacttggggaggctgaggcaggtgggt

SEQ ID NO: 96033 - DNA, 122 bp, Homo sapiens
ggggtggggatgcgctaaacagcctcaatgcatggcgcagctcccaaaacaagaattaaccggcccaaaatgcagacggtgcagagccgtggccgagacaccgtcctccagccccaggctgt

SEQ ID NO: 96034 - DNA, 122 bp, Homo sapiens
ctgcgctggcgcaatgataccttaatgatagattttccgttcttatttttagctctcattcgcctacacagttacacggcatttatccgagaacgtcacagcgcccgcatgctgcaccggga

SEQ ID NO: 96035 - DNA, 122 bp, Homo sapiens
agcaggactctgtctcaaaaaaaaaaaaaaaaaaaattcttctaaatctggaaggtaaatcgtatagatttcaagtttgatggatgtatataataatgacctgtagaacataactgaattag

SEQ ID NO: 96036 - DNA, 122 bp, Homo sapiens
tgggagagagacagagaagacagttcacaggcagctcagacagatattccagccagccaccgcacaagttatttaaaccaggtcaaagcttctttggcattcagttttccccagagaacaat

SEQ ID NO: 96037 - DNA, 122 bp, Homo sapiens
aactatcagaatgatgcctgcaaaaggtatcttgtgcttccgggcattgcatacttaagacgttggggactacctatgtgggtacaaataattgcttgtgtgatttcactggattaaatcta

SEQ ID NO: 96038 - DNA, 122 bp, Homo sapiens
cctgcccagaaagcagcacaacaggccacacacggtatactaacacaccacaggatacgacgttcagttttactttgtattgatggtcaatacagagtttctttgctttagcaataatccct

SEQ ID NO: 96039 - DNA, 122 bp, Homo sapiens
agctgcggctcatctgtatctacttctccaacacccactttttcaaggtcagtgtgatggcgggccaaggagggtgggtgccggccccttcttgggatccactgcaggtgcccatgtcactg

SEQ ID NO: 96040 - DNA, 122 bp, Homo sapiens
ggcgcctcgctctgtactccaggaagcccaaccttctccctgcgcctcagtttctcccgacgtcctcgatggcgccatggcgccacactaggtaccttcgggttcgacctcccgagcagctc

SEQ ID NO: 96041 - DNA, 122 bp, Homo sapiens
gaagacaacgaataactgatcttgcccagctcagttgggccctagccccatgcctggggccgggatgtgggtcgtgtttggagcctgttgcagatgcggatttgtctgcttcacgcaagatg

SEQ ID NO: 96042 - DNA, 122 bp, Homo sapiens
agactcatgtttatcatcctttccgggagagggattcaagaaacttggcaggggtgagcccggatccatgcccgtggcgggagctcagtgacctctgctcaaccccctatccttgctagacc

SEQ ID NO: 96043 - DNA, 122 bp, Homo sapiens
gaggatacctggcagggagaaagccagagggataaagaaccgacttccctcttcagccaccgtgacttcctagcgatgcctccctggcccacgctgaacaggaaatcagagctgaagtgagc

SEQ ID NO: 96044 - DNA, 122 bp, Homo sapiens
tcctctaggcctacccctacagtacagagaaaactgagtgggcaaacttctgctcctcctcgcttgccttcaaacagaacttctcttcctttattggtttgatttatcaaagttctgtggaa

SEQ ID NO: 96045 - DNA, 122 bp, Homo sapiens
agtgagtgaccagggggtctgggaattggtggccaggtagacgcatttgaaggctgtggccgatggcattcgccccacgcactctctcatcggactccccaaaccggtctgggtggcacttg

SEQ ID NO: 96046 - DNA, 122 bp, Homo sapiens
ccagtcagggtccagctgcaccaaccgatcagaactaagcaagtttgaatccttctgctgcgtaaatgaatttgattgggaagctgagtgggaaaatttctctctatggaggccaagttcct

SEQ ID NO: 96047 - DNA, 122 bp, Homo sapiens
cggccttatatagcacagctggtggctcagcctgtggcagccagccagaggaagcagcagcgaaaccagatctgagcatgagcctccctctcccctccccatgtccccttgcagttcacaga

SEQ ID NO: 96048 - DNA, 122 bp, Homo sapiens
ttgtgccagcatccattctcagtccgcattatattaatagttagagcactttacaatccccgctccccacttcccaccacagcccctaagggctgagagcatttagtagccgaactactaga

SEQ ID NO: 96049 - DNA, 122 bp, Homo sapiens
tgaatacagtgaggaatcctaaattcattaaaactattggagggagggggccaagatggccgattagaagcagctatggtccctggctctcatggagatgaatgaaaatggcaagtgaaatc

SEQ ID NO: 96050 - DNA, 122 bp, Homo sapiens
gtcgatgtctcaagatttcttggttcatctttatgatgccaaagcacacaccctctacctcgtttgtttcagtcaccctgggttcttgttggaatggcccagggagctccatgtaaatcatg

SEQ ID NO: 96051 - DNA, 122 bp, Homo sapiens
cgccgccgccgccaccgccgccgccgccgccactgccaccgccgccgccgccggtggggacgtgaagcaccatctcttgcaggttcaccacagactggccgaagaagcagagggacttcagg

SEQ ID NO: 96052 - DNA, 122 bp, Homo sapiens
actccaaaagtttcagtggctaaccagccattattgtaaaaattacaagaattggccaggcgaggtggctcacgcctgtaatcccagcactttgggaggctgaggtgggtggatcacgaggt

SEQ ID NO: 96053 - DNA, 122 bp, Homo sapiens
ttacaggcatgagccactgcacccggccatagttgctattttatttgtgtgattgattaccgtatgacgcttttattgaagtgcagtgaaggcaggaaacatgaccggtttttacaatattt

SEQ ID NO: 96054 - DNA, 122 bp, Homo sapiens
ggccgcagggcggtggctggggtcgggcgccagcccggcgcacagccccctcccccgactcggcgccgcccctaccccaaagcaaacgctggagaacccggaaattgcccagaacgggaacc

SEQ ID NO: 96055 - DNA, 122 bp, Homo sapiens
actcttgtctgatctctccgcccctctgccgggaggcgacattaactgtcctctcggagccggtagcgttgctgtccgagtccccaggacggatctcctgcagacctgccttaatgctcaga

SEQ ID NO: 96056 - DNA, 122 bp, Homo sapiens
tcagacactcagccacacctgagccagaacatgcccgctgaatgcggctctagcagctgtcgtgggccttcagagaggaagaatcttaaggcgcgtccaagacaagcggagtcgaggactcc

SEQ ID NO: 96057 - DNA, 122 bp, Homo sapiens
aagttctgggattacagacatgagccaacatgcctggtctagtcttaccttttactaatgcggaaactgaagcccagagatgcagagatgtgcctaaattacagttaattaggaacaaatgt

SEQ ID NO: 96058 - DNA, 122 bp, Homo sapiens
tgagagccgcgttttggtcaccgagagacacctgtcgccagcggcgaggggtgggggcgtcgcggcccgggttattatgcttttctttttaattgaggtgtaacttacaaatagtacagcga

SEQ ID NO: 96059 - DNA, 122 bp, Homo sapiens
tcgcctgtccctgtctggtcctcactctttcctggtctggctgcttaactccagacccaccgaaagctcagcaggccccaccaggccatcctgggaagtgtcccagccctcgctgagacctt

SEQ ID NO: 96060 - DNA, 122 bp, Homo sapiens
tgcctgttctgaatggtttcactgtaatcctcagatccttcaaatcaccggttgccctaacgatgtcattaccaatgtgttttggagacagacacaggggtttgatcttaggggccagcaca

SEQ ID NO: 96061 - DNA, 122 bp, Homo sapiens
tcggtgcgcgctcaggctgattccacagctgtgctgttgggaatggcgctgtggtgaacgcgggcgtgcagatgtctcgtcggcagatgagttcatttcctgtcagttatacccggtaatgg

SEQ ID NO: 96062 - DNA, 122 bp, Homo sapiens
gaaatattgttgatttggtaaaaggtggaggtcacctggtattttatttccctgattgctcgctatttattaagagaaaaaagcaaccaagctttaggtagtgcaaagtatcctacactctg

SEQ ID NO: 96063 - DNA, 122 bp, Homo sapiens
ctccaccacgcacaggtggttggtcgctcgaggatggccccttcccttgatccctgaggtcggcacttacccgaaggattccggtgggagtttggggccgcctgccgagagggttaggcagg

SEQ ID NO: 96064 - DNA, 122 bp, Homo sapiens
ggtgtagacccgcggtgtgggcagcccttcctttcgctgcagccgagtctccgctattaccgttcaagttgtccctgggtggattctgaaaggacaagggggaaacggcccgctctactcca

SEQ ID NO: 96065 - DNA, 122 bp, Homo sapiens
gcggtgacgtccatggcggctgaggacaaggagcggcccttccgctgcacccagtgcgggcgctcctaccgccatgctggcagcctgctgaaccaccagaaggcccacaccacagggttgta

SEQ ID NO: 96066 - DNA, 122 bp, Homo sapiens
cgtcgcggccccaagttttgggcaggaaatgtgccgctggggtctggccttgctcgcgggcgcccgcggcgctgtgcctgcgccctcctttcttgtctcctctgcgccggccgccgggaccc

SEQ ID NO: 96067 - DNA, 122 bp, Homo sapiens
gatgcaacaccttcctcttcttgccaaccctgggccaatgtcctcagacacaggcagcaacggaagtggccacctgcccaccatggcctggggagaagggggaagggtctgactgggggagc

SEQ ID NO: 96068 - DNA, 122 bp, Homo sapiens
tttggggtctctgggaatgagcttgggaaggtgagtgaagaacaactgaaaacaatgaagcgcatttgtggctggaggtcatgttctgatgaatcccgatcgggggaagccatggctgctct

SEQ ID NO: 96069 - DNA, 122 bp, Homo sapiens
caccaccactctctcccacgtcccctttctatctccgccgcgctgggttcggcggcggcgcggggcctggaatccccaccgcgccctgtccccgcagtcctcacctccggcggggaggtggc

SEQ ID NO: 96070 - DNA, 122 bp, Homo sapiens
agctgaagcaggagaatcgcttgaacctgggaggtggaggttgcagggagggagatcttgcgactgcactccaacctggacgacagagtaagactgtctcataaataaataaacttgtgtag

SEQ ID NO: 96071 - DNA, 122 bp, Homo sapiens
acagagtcgccctccacacgcatggtaccttatctgggaaggcatcgaagttcgtgcgcacgggatcacggcagccgaacttggaagacttgaagcgacggatgatgtcctggagggtggca

SEQ ID NO: 96072 - DNA, 122 bp, Homo sapiens
tactcgggaggctgaggcaggagaatcacttgaacctgggaagcagaggtttcagtgagccgagactgcaccactgcactgtagcagcccggggggcaagagcgaaactccatccaaaaaca

SEQ ID NO: 96073 - DNA, 122 bp, Homo sapiens
gttcccagaactccagctaccccaggccaagtttggtagtagagtgcagtctccaacattcgggtcaagggcagctgagtagtttattccattcccatttttcattgagctctcagctccca

SEQ ID NO: 96074 - DNA, 122 bp, Homo sapiens
acgcaccgccttcagagctgtaacactcactgggaaggtctgtggtttcagtcctgagcccgtgagaccacagaccgaccagtgggaagaaattccgcacacatctgaacatcaaaagtaac

SEQ ID NO: 96075 - DNA, 122 bp, Homo sapiens
tctgccctgttcttcccctgacatcactgagtatccttgtctgtgtctgccccttccagacgagcatggtatctgtggagggcctcacaaagctggtggacccctcccagctgacggaggag

SEQ ID NO: 96076 - DNA, 122 bp, Homo sapiens
aaggccgagggctttgcctgcaggccattgttaataaaactcattactctgggaatgttccgaggcagcccgacccttgcctgcctaagaaaatcagcctctgctcctcattctaagccctt

SEQ ID NO: 96077 - DNA, 122 bp, Homo sapiens
tgcatctgtgcctcagttttcctgccgaatctatcaatgagatgtctctcttgcagggatcggcttcgtcactgagacctcaggcctctgccagccactccccctccccatacccctagtca

SEQ ID NO: 96078 - DNA, 122 bp, Homo sapiens
tcatctcagaggccccttccttctcaccccgaggtcacctgggcccggagacacagcacccgccgtgcaggagcctggaagatgtttgagcaacgagaaaaaaaccagaacatgttaccgcc

SEQ ID NO: 96079 - DNA, 122 bp, Homo sapiens
cacgatgtgcacacacgccgatgggagacaaacgcgcggggactcgcgcacatacgagcacgccatgtgcacacgcgtgagtgcacacggcccaaagatgtacacacactctgctcacactc

SEQ ID NO: 96080 - DNA, 122 bp, Homo sapiens
agcgcccacgggcctgccttcaagggtacagctgtgggggccggtgcgcccggaggtctacgctgggattggtgaggtcctctggccccgccccgccagggaggatttccaggccggcccga

SEQ ID NO: 96081 - DNA, 122 bp, Homo sapiens
ggggccgtgcccgccttgtgcaggtggtcacgggctcgggccgccaggaggcccagaagacggacgcggagtaccgcaagctcttcgacctggcgctgcagggcctgcagctgttgtcgcag

SEQ ID NO: 96082 - DNA, 122 bp, Homo sapiens
catttctctccgtttggtcatcctcccttggccagaccagagggtgcccacttgttcacacgctgcccgcttccgaatcccagaaggcggagcctggcctgtttgtgagaatgggatggact

SEQ ID NO: 96083 - DNA, 122 bp, Homo sapiens
tgcagtccccttccatgttgtaaagttggggactaccagtctgccagcccctgccttccccgtccccacttcccgaagctctgtaaggccacgagccttctggccagcggaaggggctgtgt

SEQ ID NO: 96084 - DNA, 122 bp, Homo sapiens
gttaaaacaacgttctccctaaacggtgacgatctgtggggcggaaatattctccctaaacggcgacgatctatggggcggaaatatgcttggaactgacagtactgcctgcaggtgtgtgc

SEQ ID NO: 96085 - DNA, 122 bp, Homo sapiens
gtgccttctggaaagggggacactggactcaatggtcctggacacagtcttcttagcacacgaattttcccaaatgtgaagtaatttgagcaaagacaaatagtcaggatcactgcactcac

SEQ ID NO: 96086 - DNA, 122 bp, Homo sapiens
aaagcaccacggaaacgcatccttctgtggccactgttaggtgagggggttctggggaggcgcgccgtggcaggaagagaaagccggcgccagtggtccaagcgcgatctctcagggcgccc

SEQ ID NO: 96087 - DNA, 122 bp, Homo sapiens
gcacaaggatctgccagaaactcaagcagtccagctcgccctctccgcccgaggagcccccggccccaagttcaacctctgtggaaaaaatgtttggaggcaagatagtgactcggatctgc

SEQ ID NO: 96088 - DNA, 122 bp, Homo sapiens
aattttaagtggaaaagatctgtttcttgggaagggagtgctttcgcttgcagcggtgggcgcttactagaagttcggtaaatgtgttggatgcagatcgggagtcgttactactaaagtat

SEQ ID NO: 96089 - DNA, 122 bp, Homo sapiens
atcacagatcaggaccactcttagaaacactggcttggaaggacaagtgtaggatgagatcgattattgcaaataccagggactcagagtccttcactcacatgatacagaggtgatgtgca

SEQ ID NO: 96090 - DNA, 122 bp, Homo sapiens
ggtcggaggcatggcacagccaatgggaagggccggggcaccaaagccaatgggaagggccgggagcgcgcggcgcgggagatttaaaggctgctggagtgaggggtcgcccgtgcaccctg

SEQ ID NO: 96091 - DNA, 122 bp, Homo sapiens
ggacccagagttcacgggtccaatcacccagcaggccctctgggatgtggaagggctggccgcgccttcggcaaaccctctgttcccatggccccaccggaaagggctgagtgcttgcctgc

SEQ ID NO: 96092 - DNA, 122 bp, Homo sapiens
gatgagcctcaggaatgaggaaagcggcttcgcttgcaggggtctcctctcccctagcagcgcccccaggacgggcagaacagggggtgccggagcgggctagccagggatgtgcgagggtc

SEQ ID NO: 96093 - DNA, 122 bp, Homo sapiens
ttcctacaggacagagtgggagaggtaaaagcaaaagacagcttagttggaggctgacttcgtcctatggaagcagagatagttcaaggaatggggttactgggtttccagggcccagtttg

SEQ ID NO: 96094 - DNA, 122 bp, Homo sapiens
gatcgcttcgggtgctcgactcctgttgcgcatgctcagcgcgctgcccggctggggacccgcgcacctgcagcgcccgctgctcggccctgcatcctgcctgggcatcctgcgcccggcca

SEQ ID NO: 96095 - DNA, 122 bp, Homo sapiens
tctcagggagcgagcccataggctggggagccgtccctggagatgcccctgggctccttgcggggcatggctgagttcctgcctgtccttggcaggcccgcagtggtggggtggctcaggca

SEQ ID NO: 96096 - DNA, 122 bp, Homo sapiens
attctgttccataattgtcatagaatcacagacttttccaggccgtggtccccaccagcacgttccatagcagacatcgccgaggggctggagcagtggatgatctgcctgggtcacctggg

SEQ ID NO: 96097 - DNA, 122 bp, Homo sapiens
aacagcctcgggagaatagctggagaaagctcagagaaagacaaattaaaaggagctcagcgcagcagcaaatgctggagaacagcgctcagctgacccgttaaatgagtaattcggtaaag

SEQ ID NO: 96098 - DNA, 122 bp, Homo sapiens
ccttcaacccgaacctcactcagcacagagaattgggggccagaccacggcggacggaggcgtcctgctgacacagcccctgtcgggatgtgggaaggggcggaggcacagctccagcccca

SEQ ID NO: 96099 - DNA, 122 bp, Homo sapiens
aagtgggtgggtcccaaacatgctgggagagacacccctacaccccaagccctggaatcccggccagcatccagctcagcctgggaccccaagctggctaaccttatccccaccctgaatgg

SEQ ID NO: 96100 - DNA, 122 bp, Homo sapiens
cgccagcggctggaccttggcagccgtctgaggcttcggggagcccaaggccaccggcagcgcttgttagaatgcagattcccggggttcgactggaatgagaccccggggagcagcgtttg

SEQ ID NO: 96101 - DNA, 122 bp, Homo sapiens
gtgccactagggtccccgcgaggagggctgatcgggtgcggggaggccgagtgcaccgggcgtgtgctgaccaactcgggcccagtgacagtcctgcgacgaacttccaccctcccgcgcgg

SEQ ID NO: 96102 - DNA, 122 bp, Homo sapiens
gtgccggccgcaatgcctcctggggcttgaagtccacaccgcccaggccggtgaacccggcgggttttgcagtcaacttcgctccgaatttacagaaaacagctactatgctagggacgcgg

SEQ ID NO: 96103 - DNA, 122 bp, Homo sapiens
ctcggagccccgcccccggcgccccgcgccccgcgccccgcccgcccgcgcctgcgcctgcgcccgccccctgcccccggcccgaggccccgcccctcgcccgaggccccgccttcctcccg

SEQ ID NO: 96104 - DNA, 122 bp, Homo sapiens
ggagaggcgggcgccgaggaggggcaggtagggctgggacgcaggggtaactggatcccccgacttcagcccaggccctggtctgaccaccctgggagcagggactttccacagtcagctgg

SEQ ID NO: 96105 - DNA, 122 bp, Homo sapiens
gaaggcgttcatgaacgtggagagggaccggttcaacattttgaagaaagggtctctgcacggatatttctgagacccacaaaggacggtatgctcaagaatgtgaggaacaccagtactgt

SEQ ID NO: 96106 - DNA, 122 bp, Homo sapiens
tctccatgtagagctatgtaattgctggacggatgtgtcaaaatttatttaacccctctccgatcaatagaaatttaggctgcccctaggcagttgttgttgccacagccctgggacctaag

SEQ ID NO: 96107 - DNA, 122 bp, Homo sapiens
tttgtgccttggcagatgttccaggaaagctggcccacgcccttcccgcaagccttaagacggctgccttttgcctgcatttaaatgcagtgtaccaaatgtcagttggccactgactcata

SEQ ID NO: 96108 - DNA, 122 bp, Homo sapiens
gaaaagccggccccccgctcccccacaacccacacttcgatggcagagcattaggcctgccgccccctaccactacctttgtcacagagcaggccgccccagttggtctcacagttgcactg

SEQ ID NO: 96109 - DNA, 122 bp, Homo sapiens
ttccgacttgggctcagaccccgccgctccagacaagtccccgcgactgcgacagtgtctcgggcagttcagctccccagacgggagacagaccctcgcgacctggttcaggccttgccctg

SEQ ID NO: 96110 - DNA, 122 bp, Homo sapiens
cagcgggagatcaagtgagcctcaaaacattagaaaaacccaagccagtctgcagagcaccgcagccgcctcagggccggttaccatagctacccttggcttcccagcccagcacatgtctg

SEQ ID NO: 96111 - DNA, 122 bp, Homo sapiens
accacccgaaaggccggacctactccccggtgcatcttgggatcagggcggggccctgagcgccgccatgcttttgtacggcaggatcgcaaagcacgccgggaccggttggtttggttttg

SEQ ID NO: 96112 - DNA, 122 bp, Homo sapiens
ggagtcagtggcacggtctctgaagaagatggattgggagtgtgtgggaatcaataaatgcgagttctgtgaaatgtcttgattttcagggtgcatggggtcagtaatagtggtcttcatgg

SEQ ID NO: 96113 - DNA, 122 bp, Homo sapiens
ggcgcacagacctggggcccagaagcggagtcgcgaggacctgctggggggtggtgggggcggggacgggggcggggccgcggtgagaaggggcgggaccgcggtgagagggggcggggggc

SEQ ID NO: 96114 - DNA, 122 bp, Homo sapiens
ggaagggaggacaagtggataaacgatcactgccctccaggagttcagtttatagcagagcgaagacttgaacaagagcaggaccggacaagaatcctgtcaattcagagaaaaataatcac

SEQ ID NO: 96115 - DNA, 122 bp, Homo sapiens
ccaagatttggaggaaagcagggaaaaggaggtaaagtcaacctatcccgttttttttttcgccccgcatgaggggttacttcctataaaccgtcttgctattttaatgcatgttgggtaag

SEQ ID NO: 96116 - DNA, 122 bp, Homo sapiens
agttgacactaactctgccatttttcactccaattgataatattaatcaatagctgaatccgtcagaaggagaaaagaaagttctgtcatgtatattcttgtgcatgtatgttttaaaggat

SEQ ID NO: 96117 - DNA, 122 bp, Homo sapiens
agacgctgcgcgggtgcagaagagtatttaatgttaaggaaagagaagaaccgcgccgcccggaggcagagaggctccatggccgtgctgctgggccatccccaactccctatcccatcccc

SEQ ID NO: 96118 - DNA, 122 bp, Homo sapiens
atacccgctcgaccatgcaaaatggcgagccccatgatacatttctgctcaagatggcggcgccatgtaatgcaaaaggcagagggaaattgcaaggcatcacagtcccgtcttccgtacaa

SEQ ID NO: 96119 - DNA, 122 bp, Homo sapiens
gaatgtgggtggggccaaataagggaataaagtcaggtcacggagccagcagcggcaacccgctggggtctccgtttcaggctgtggaagctttgttgtttcagtctttgcaataaatcttg

SEQ ID NO: 96120 - DNA, 122 bp, Homo sapiens
gaaacatgcaaaacatgtgtccccagcgcaggaaacgattcaattcaattcaaccgtgtgcgctggttttgtacactgcttttggactgaaatgagttcttttgtgctgaagaaggcaggtg

SEQ ID NO: 96121 - DNA, 122 bp, Homo sapiens
gaaagatgttcacggggaacaggagacagaaggacgctcttctccaggcccagacaccctcgtggtgctggaatttaacccagcttccaaaagtgagctctgtcttgtatatcatttctttg

SEQ ID NO: 96122 - DNA, 122 bp, Homo sapiens
ctcctggagctgacgaggaggttgcaggcgactgtgaaacactcagtaccatgtcgggcacgcagaatatctgggaactaaaatagaaaccccaaacggggagatcttaactttccaaatag

SEQ ID NO: 96123 - DNA, 122 bp, Homo sapiens
aagagaaagaaaaagaaacatttgccaaagtccttcccatatctcctggtcaactgaactcgtgttctcccagacccatgaactcggcaatagggttcagcaacttctgcctacccacccta

SEQ ID NO: 96124 - DNA, 122 bp, Homo sapiens
caggtaagtgtccatctctcccctctcacagccctttgcctgcagcagcagtgcctgggccgcccaggcagcgcttaggaaccacgtgtcacacatgagtggggaggaacaccagtgtcagg

SEQ ID NO: 96125 - DNA, 122 bp, Homo sapiens
aggatgacatacaacaggtgaaatagttaagagagaactgaatgagttagctagggtattcgggctcagagttcaagtaaaaggcttggatatgcttcagtttatgcttatcttgaagaata

SEQ ID NO: 96126 - DNA, 122 bp, Homo sapiens
cttgggggcccaggaagacccctctgcctcccacaggctcggaagtgcctgctcccactgcgtggcttctctccgctgtcagcgcccgttcccatttcggaggcatcccgggggctgcaagc

SEQ ID NO: 96127 - DNA, 122 bp, Homo sapiens
ggttggtgaccacgtcgtcaaacttgagtacctcgtaaccctcgtgggggttcttgaggccggcgtagaaggccacgcgcggcaccgtggtgtaggtggcagtgctgatggcgccgctgccc

SEQ ID NO: 96128 - DNA, 122 bp, Homo sapiens
tcacctgagaaggcggcagtgctgtgttcctacctcagggttcactgcaaacaatgcatacgctgtagcagttgccagcttggtttgtcagtgctggtctccgtgattggttctcaggtgtg

SEQ ID NO: 96129 - DNA, 122 bp, Homo sapiens
cacgacacccagccttgtgttactctttgtgattttatggagaatactgtcacttaaaagcgccttggctttggacatggtcttctgtcaagatgcacatatgggggtactctgtagggaga

SEQ ID NO: 96130 - DNA, 122 bp, Homo sapiens
ctgggctttgcaagccgtgagctgaacagctcagcctacgatcacgcaccacttcctgtgcgcctcaggactgcctttaaggcatgacaggagccactgagccaagcccagcccaaccctca

SEQ ID NO: 96131 - DNA, 122 bp, Homo sapiens
agagatttgaggcactcgattttctggtaggaaccagcacagaccatgagtctcggacttcgtgccgaggtctgctgggtcccaggctgaaggatgcatcgtttaactttttttgtctacac

SEQ ID NO: 96132 - DNA, 122 bp, Homo sapiens
agtaacgaagatagaccacacacagtgactgatgcctgtaatcctaggaccttgggaggccgaagcaggaggattgcttgaactcaggagttggagtacagcctgagcaacctagtgagacc

SEQ ID NO: 96133 - DNA, 122 bp, Homo sapiens
ttatctcttactgttgacctctgtgcactgtaataaggtgtgttgctggatcttcttggtcgaggtccttggtgaccttagtagtaataacagcattgctgacaccctaattgccctctgct

SEQ ID NO: 96134 - DNA, 122 bp, Homo sapiens
tcctaattattgggccatttccttaacgcgcggtctgtccccgtgggcagaaacatactgcgagatgcagtttgggtaattaacaaagagacgagacctaactgggcttccgaaatgctgga

SEQ ID NO: 96135 - DNA, 122 bp, Homo sapiens
ccatatggaggccgagtccctgcgaatcacagcagcagcgggaggtatttgaataagccccgcaaccccgcgcagaccccaactcctccgagagcagcatgccctgcaccaagagccaccac

SEQ ID NO: 96136 - DNA, 122 bp, Homo sapiens
gattagaatgatgaacaaatatggtgagtgctatggcagacagaggtttgattatagtctcggtcagctttgtgcctatgtgaagggcaatgtaatcattgcatggtaacagcaatctccca

SEQ ID NO: 96137 - DNA, 122 bp, Homo sapiens
ggatttgggtgggtagtggaaaactacagtcaaagggggttgttctctggcaggcaggggcgggggggtcacaaggtgcttggtgggggagcttctgagccaggagaaggaatttcacaggg

SEQ ID NO: 96138 - DNA, 122 bp, Homo sapiens
ggacccacgcgccatgggcaggactgggtgggcccctgagggccagctggtggccctccacgtcccgggactgaccacctcctgagccaccaggtgtgtcagcccccctaggccaccacgtc

SEQ ID NO: 96139 - DNA, 122 bp, Homo sapiens
taaccagagggcaaagttacagtcacgaagaaccaaagttccatcacaagcctcctcttccgcacctggctctgcacctgccgcactccgctgtgggcgcccggtccagctgtcctggcgac

SEQ ID NO: 96140 - DNA, 122 bp, Homo sapiens
tcgattttaaaaattgagaagggagagaagttatgtgtatagtaaattatgtgatgagcacgaactatttgaattctggcagcagaagaccttttgtgggggtggtggaaaccactgcgttt

SEQ ID NO: 96141 - DNA, 122 bp, Homo sapiens
tggccggtgattaagtcctgctcttggcccgcgtgagggagctgccaggtgctgacagggcgaggctcagggtctccccgactccgccccgccccagctgtcgtcgttttggacacctcggg

SEQ ID NO: 96142 - DNA, 122 bp, Homo sapiens
gccccaggtcacattggggcagctgaccaggatggacccagactcctcacagtaatgaggcgagaggggtggtcatgcggccagccaggacctagatggggacagaacacacacaaccacaa

SEQ ID NO: 96143 - DNA, 122 bp, Homo sapiens
ctcaaaaaaacaaacaaacaaaaaaatcaaaatgttagacacagtccaagtggccacgaacgggagggcggttaaatgcgtgatggtaaatccatgcagtgggttaccaggctaccgtgaaa

SEQ ID NO: 96144 - DNA, 122 bp, Homo sapiens
ctgccaccatctccgctgctttgtgtcaccagcgtctgatttgaagtctgattgcattgccgcggtctcaggcccacaacctagctaagagggaggctgggaagacaagtgttgcatttcag

SEQ ID NO: 96145 - DNA, 122 bp, Homo sapiens
cccggtaaccccgggcgtgccccgcacacagttcacccccaccgagcgcctcccccgggacgcccaccacccagcgcggccgcaccacgcgaggcttccactcccacccgcccagctcgcgc

SEQ ID NO: 96146 - DNA, 122 bp, Homo sapiens
acactcttgggtctggttagtccagacctgcagcttgtctttgacttcccaagtgggaaacgtttgcagttccaaggcaagccaagagctaaggtttagaacaaagtctgccttggaccctt

SEQ ID NO: 96147 - DNA, 122 bp, Homo sapiens
tcctctcccctttccgcggactggaagcttctccagggcttgagatgtccaccttcccagcgattcctgcccgggagactccgattccgaccccattctgtccacatgtcccctttccagcc

SEQ ID NO: 96148 - DNA, 122 bp, Homo sapiens
ttaagctttttttttttttcgcatggacaaaatcttacttgtgtaatttaaaattaataacggtacttagaatgactttggaaaaatatacaaataatgaaatggggatccaaagaatgttc

SEQ ID NO: 96149 - DNA, 122 bp, Homo sapiens
cactttccccctgttcattttcctctccgcctattcagcagtttcgacagccccttagcccggagcccggcctcgtccggtaccgactggtgaaggcactcaccctgcttcggtcaagccgc

SEQ ID NO: 96150 - DNA, 122 bp, Homo sapiens
gcctgcctcgcctccagcctgcagctcacggagacccaggtaaagacttggttccagaaccgccgcaacaagtggaagcggcagctctcggctgagctggaggcggccaacatggcgcacgc

SEQ ID NO: 96151 - DNA, 122 bp, Homo sapiens
cattggccccacggagtctcaggggaccgtcacgggctgctccagagcaggggtaggagacgtcctggtgggctgagacgctgagcagccgcaggaaggtgagctggaccacacccactggg

SEQ ID NO: 96152 - DNA, 122 bp, Homo sapiens
ttggaatcattcctgaaaaggtcagcgttttcatcagccaaacaggaggcagggcacttccggctggtcattaaccaaggcaaacagcgtggcggggaaagtcaaagccatagccaaccaca

SEQ ID NO: 96153 - DNA, 122 bp, Homo sapiens
ctggctggcagaggctgggcatgagacagtccagacctctgttccagccaagccgccaaccgccctctccgggcctcaccacccacccacccccacagggcagtcttggcttgaggagaccc

SEQ ID NO: 96154 - DNA, 122 bp, Homo sapiens
aatcaatcaaccacaatgtgaccctacaggcggaaaaaacgcagcactcccaccagcaggcggtgggggaagggaagcacgtgtagccagggcagggttgcatcatgagctcgttcgggttt

SEQ ID NO: 96155 - DNA, 122 bp, Homo sapiens
actgggccgccgccgccgctggccgagcagcacacatggcgcaattgtccaagaagccagcggagcgccccgaacaagcactgtctccagtgcattcttttcacagggtcggagccatggga

SEQ ID NO: 96156 - DNA, 122 bp, Homo sapiens
ttacaggcgtgaaccaccgcgcccggccttaacatccttatacatgggttaccagcatcgcgacgaccttctgcaaatatttttatagggtaaataactgaatgaagtcgctgggcgcatct

SEQ ID NO: 96157 - DNA, 122 bp, Homo sapiens
ggatctggttgggtgcagattcccgccctcctgcagctgagaagccaatctcataacaggcgctgcagtgacctctggctctgcggtccgcgctgctgctggagctggcagagaacagagct

SEQ ID NO: 96158 - DNA, 122 bp, Homo sapiens
ctgaggttgaaaaaccttgctctagaaaaagtacttgccttgtgggtatgtgtatgtgtgcgtccctacacacatgaatgtcaggtggaaggtgaacatccttccacttagacactggaatg

SEQ ID NO: 96159 - DNA, 122 bp, Homo sapiens
cgaagcaacgctttggttacttccgttggtttcaatgcttccgggttggcgctgcagtggcgtttccgactgtgggagcctcagcttcccagtcgtccgatgagcccgagcaggtgaggggg

SEQ ID NO: 96160 - DNA, 122 bp, Homo sapiens
gagcggccccgcggaggagccaccggaggctgtagttgccggggagtcccgcattcagtccgctcagcctctgggccgggcctcggcggcccccagagccccacacccgcaggcccagggcc

SEQ ID NO: 96161 - DNA, 122 bp, Homo sapiens
caggtggggaaacaggatttgaggggaactaagcccaatgctcagtttctaccagggaagcgggtaggatgagagaaaaagacaggagacccccagtggaggagggaggtataatcccactg

SEQ ID NO: 96162 - DNA, 122 bp, Homo sapiens
aactaaatttaaaagcttgcaccccaagacccttgagcaaaggttactcgaggtctattccgggttcaggcggaaaaaagaagcttgacttggcaaggaaatgccttgtgacgaggcgcttg

SEQ ID NO: 96163 - DNA, 122 bp, Homo sapiens
gggtgctggagtgaggagtcaggcagagttcctgccggggctggtcctgcatcagccccgcggtgtttgtgatgcccgctgcggccgccaggcggcgcacccactttcccaccttgaggcgg

SEQ ID NO: 96164 - DNA, 122 bp, Homo sapiens
cagtcggcgctcaaccaatccctgcacacagtcggcgctcaatcaatccctgcacacagtcggcgctcaaccaatccctgcacacagtcggcgctcaaccaatcactgcacacagtcggcgc

SEQ ID NO: 96165 - DNA, 122 bp, Homo sapiens
aggctttggaagtaacaacgacagcatgtggacctcatcacatccttactagaccccaagcggtaaccactgctctaaagttagtaacagctgattcataatcaaataagctgaggttgaaa

SEQ ID NO: 96166 - DNA, 122 bp, Homo sapiens
agtctctatgacgcgcaggtgtctccttcaccttcaccggcgttgaggtagcaggaggttcgcttcatgaattcccccacgttctctggctgtgcgttccgccgtggcgggaacccttttag

SEQ ID NO: 96167 - DNA, 122 bp, Homo sapiens
gcagggtctgaccccggccgcggccgccgcagcagctgatctgtcaaccccggccagagccgagccgcctgaggcctgcagtgttctccatcaccactgtgatggcatccgcttccgtgact

SEQ ID NO: 96168 - DNA, 122 bp, Homo sapiens
gccggtgcctggaggcgcgcgcagtgtcggctgagactgcgtgctgcgtcatgaagcctgcgccttgcgtcagggcggctgggcggtgcgcctgcgcggctgcggcgggtaccaaaaggaac

SEQ ID NO: 96169 - DNA, 122 bp, Homo sapiens
tggtccaaagaacaaaagaactactgtaatgtgagcagtcaaagtggacagagctttggacgacttatctaaagggcaatgctggatggtcattaggatgatagtgtatgagatgattagaa

SEQ ID NO: 96170 - DNA, 122 bp, Homo sapiens
ctagcccagaggccacaccggcctggtccttttttgtattcctagcctcagcacagggttcggaacataccaggccttcaatattatgttttttaaaaatgacaaaagccttgtgtcccaat

SEQ ID NO: 96171 - DNA, 122 bp, Homo sapiens
gttcacaagggacaagcagagcaagttttgaaatcaaagacaggcaacaggcgtcaaccccgtccacacgcacaataagaacccagcattgggtagacacagcaacactttgtacgagaccc

SEQ ID NO: 96172 - DNA, 122 bp, Homo sapiens
attacctgatcatgtgtgctgggttgagtgggagggagcatgggcgtcgttggaggaagtcgctctttaatgagccacacaatgaaggctaggtaattagagcagttcggaaccttgaaact

SEQ ID NO: 96173 - DNA, 122 bp, Homo sapiens
cttgcggtgagccacggccagcctgtctgcagcagcaaagagcatgcgtgaaaggctgggcgcacctgccaccgtcacagcagagaagcggccaacggcagacgaaggcagttgggtgggca

SEQ ID NO: 96174 - DNA, 122 bp, Homo sapiens
tgcagggtgagaaatttccctcttaagaagggggagagctctgggacctgtctagaacaacgctgtccaataaaaatatggtgtgagaaacataggtagttttagcttttctagtagccaca

SEQ ID NO: 96175 - DNA, 122 bp, Homo sapiens
ttctagttatttctagagcaagaagatgtttgcctgcaaaggaaattatgtcataccaaacgatattggtattaccttcctgtctacctgggagggaagaggtcttttatgatgtttctgga

SEQ ID NO: 96176 - DNA, 122 bp, Homo sapiens
tgctaggattacaggtgtgagccaccatgcctggcctcaagttatgattttttagtttatcggtatttttcttattgttatgtggaggacactgcgtttgccaggttttttgtttttgtttt

SEQ ID NO: 96177 - DNA, 122 bp, Homo sapiens
aagccgaggctcccacgccgcaggacacagtacacgttctgccaggacctgcgagggacgcggtgctgactggccggcctcagtggcgcccgcaacctggagccctcttgggtgtcctagga

SEQ ID NO: 96178 - DNA, 122 bp, Homo sapiens
gtacaggatagaaagtagggggagtatctttacagtggagaaatctgataaacactgcctcggccaggtgatcaaggttaacatcatcagtgataagtcatgttgacagcatgtatccttga

SEQ ID NO: 96179 - DNA, 122 bp, Homo sapiens
cactctgctgcactcacattcacactcattcacactcgtgcacacccggttcacactcaccggctcggggccacccacacacattccagctcaggcccaggcccactggccggctccgtggg

SEQ ID NO: 96180 - DNA, 122 bp, Homo sapiens
cacctggccccgccgagtgtgtgctttgcctggggttaagtttcagaagccaagatggaacgattcgggtttctattcacaaggttattgaaggcatggcggtggggaccgcgcaaaagaga

SEQ ID NO: 96181 - DNA, 122 bp, Homo sapiens
tgcagaagccacctgcccagggcctcccaccaaccccgtatacctccttcccatttccagcgtctgcatcccatttctccgcgaccctgggaaccagacccccgcgaaggtcccgtcccagc

SEQ ID NO: 96182 - DNA, 122 bp, Homo sapiens
cttgccaccaattctggctgtgggggcccttccccaactccagagcaagtgctccaatctcgggcctacaaagcaaagtacaatgcctgctttggccaccactgccaaattgccaaacaatg

SEQ ID NO: 96183 - DNA, 122 bp, Homo sapiens
ttgtttgcaatattgagcgatacttcctttggcctcttaacccacatactgggtgagtgccgagggcggtgaggggtgcacgtgacttctcagagatctgagtgccagagaaacctgcacat

SEQ ID NO: 96184 - DNA, 122 bp, Homo sapiens
ccggaaccctctgggtccgcgctagtcccacttggtcacgatccggcaggcgaaggggtgcggaggcggtttcaccagcccgctcccagccctgcctcgagagagaagcccgctgagagggc

SEQ ID NO: 96185 - DNA, 122 bp, Homo sapiens
gtctcctggagctgcattgctctctggatgtgccagaacatgccgtgggctttcatcctgcgtcactcgactgggaatgccctgggatcctgcaggtgcccacccagctggctccctccggg

SEQ ID NO: 96186 - DNA, 122 bp, Homo sapiens
ggcacattcctcagtgccatggctgctctcccgggaagaagctcacaagctgagcatgggcgcttcacccatgggcagagaagctcaaatccagagctcggaggcgttcttggctcttccaa

SEQ ID NO: 96187 - DNA, 122 bp, Homo sapiens
caacatgagtcctggaacagtgctgggcccccggagctcccccagcacacgcctaggaaacgccattcctaccccaggtgacagcccacccagggggtaaagcccttcttgcaagaccaagg

SEQ ID NO: 96188 - DNA, 122 bp, Homo sapiens
cttgggctgctttagaggcgctgacatccgaggagacttctcctgggtatgctgcatcttcgtggggggcccatcaggctgcttacagagctccaggggtgtggggagaatggaggtggaaa

SEQ ID NO: 96189 - DNA, 122 bp, Homo sapiens
cacgcagggcccgcctcccggtgctctccgcaggcggcgcccgcccagccctgtctctgccgccgctgctccctgactgcccctgccctgcgccgcccgcagttgcgtcaacgcctttagcg

SEQ ID NO: 96190 - DNA, 122 bp, Homo sapiens
catggtacccgggaccggcagcccccccggaccgtggcggcgaagcaggagcgcgctaggcggcggcgccagccggagtgaagccctccagcctttggaaaaagtaattagcgctgcggaca

SEQ ID NO: 96191 - DNA, 122 bp, Homo sapiens
cagcccatccgtagagtcagcatcagccgggcgtgaagattggtgtcggctcctgcgttccgccaagttcaggaacctggcatgggccggccgcctcccgcgaagggacacacctgttggtc

SEQ ID NO: 96192 - DNA, 122 bp, Homo sapiens
atagattggggaaatctagaaaagtgtataggacaagaagaaagtggtgtaagtaagtggcgggagataaggagcagtaaaaggtgagagaatccactggagttagccagaactgagtacct

SEQ ID NO: 96193 - DNA, 122 bp, Homo sapiens
gcggggggcgcgcgcgggcggggccggcagggaggggcggggaggagcggggtgcgggctcgcgttgccccgccccgccgcggccccaccctcccgcatcagcaccggctgggtgggtgcgg

SEQ ID NO: 96194 - DNA, 122 bp, Homo sapiens
cagcgtcatcgcctactactggtctgagttcagcatcccgcagcacctggtggaggaggccgagcgcgtcatggccgaggagcgcgtagtcatgctgcccccgcgggcgcgctccctgaagt

SEQ ID NO: 96195 - DNA, 122 bp, Homo sapiens
agaagaatgctcagcaaattgatgagatgcactgaaaactgcaacacctgcagcaggcatcggtcaacagaaaaggcccagttttccatgacaatgtccaaccactcattgcacaaccaaca

SEQ ID NO: 96196 - DNA, 122 bp, Homo sapiens
ggaagtcgaaggccgtgatgttggttatgaagttgccgccgaggctgtaggtgagcacgtcgtgggggctcggccagcgagctggtcttgggcactacgcggagccccctgttggtgcacag

SEQ ID NO: 96197 - DNA, 122 bp, Homo sapiens
cttctccactttcccagggctattttccccagtcctttcctaggcgtttgccaatctccccgacactcaccaggcggcgaagtgaggaagaagccgtttcctgatctccctccacctccgca

SEQ ID NO: 96198 - DNA, 122 bp, Homo sapiens
atcttttatttattttatttattttcactttttttagggacagggtctcacactgtcactcgagctggagctcggtggcacaatcacagctcatgcagcctcaaactcctgggcccagcata

SEQ ID NO: 96199 - DNA, 122 bp, Homo sapiens
acggagctggatcctgcttctcgccaaggcaggaagtgagtttcgcactgcaattccgggcggtgtcacgagtgaaaagttttgtttttttttttttcggcggagatcctcgttggggctgg

SEQ ID NO: 96200 - DNA, 122 bp, Homo sapiens
ggcccccccgcggctgagccaggactggcttgcggtgaaggaggccatcaagaagggcaacggccttcccccgctgggtacggcagctgcgcccggaggacccactgctgagccccagctcc

SEQ ID NO: 96201 - DNA, 122 bp, Homo sapiens
ataccaggggctactgggccctcggaccgatgggaggggcaagtaacgacagatggtgcacggcctggggaagttgagaactccactaggacacatactttgctggatattttttcccctgt

SEQ ID NO: 96202 - DNA, 122 bp, Homo sapiens
gatcatgaattgggggtgtactctcctgcctgtgcatcttctcgcgctgagattttgaggcggttgcagccctcggttagtctcccagtggagagaaatcagttgtgcctccctgcttccca

SEQ ID NO: 96203 - DNA, 122 bp, Homo sapiens
ggcccgggaaaggaggccagactcgcttgcaggaatgaggcactgtcggctgcggagccacgcggggcccgggctggggactcaggaggaagccgagggtcagcacctgtttgtggagcagg

SEQ ID NO: 96204 - DNA, 122 bp, Homo sapiens
cagggaaggaggcggcggggtcaccagggcgcagctgacagccccaggccccggccagggcgcaccctaaagaagagggaggctgctgcctgaactggcctgggggcagagggaagtgggcc

SEQ ID NO: 96205 - DNA, 122 bp, Homo sapiens
ccctcgctccggccaggcccggcgccggccctgcgacccccgcggcgggcgggacaccaacgctaaggtggagggttgggtccggagctcacagacttttaaacaaaaataaagtggaaaaa

SEQ ID NO: 96206 - DNA, 122 bp, Homo sapiens
ctttaacaggagacaggaaaagaaggatagttatgggtaacatttctaaatattgaggagcgataagggtgcctagcaggagcaaagggagttccctccagattgcccctactttcttggtg

SEQ ID NO: 96207 - DNA, 122 bp, Homo sapiens
tttccacatcaaaaatattaggctgaagatacataaacatagtcaaaacttcctgggttccgttcttccaaagccatattatgatagtataaagatgtgcagtggtggataggcaaggattt

SEQ ID NO: 96208 - DNA, 122 bp, Homo sapiens
cttcaagggtctcagcaccggcactcttccatttgttccagatccaagcacggactgcagcgtggggctggagtaagacgacagtctgaccactcccgaaagctttagtttgggcagttcca

SEQ ID NO: 96209 - DNA, 122 bp, Homo sapiens
gacaaggtgaaagcaggttggaggcgggtccaggacatctgagggctgaccctgggggctcgtgaggctgccaccgctgctgccgctacaggtgagatggcgttgggctgacgttggggtca

SEQ ID NO: 96210 - DNA, 122 bp, Homo sapiens
tttcgcaggcggttggggatcctctgtacatcctttcaggaaccagcccctcgtggggagcgtgcacacggaaggggcggggaatgtgaaaaagtcacgttttcattggtggcctcttggtg

SEQ ID NO: 96211 - DNA, 122 bp, Homo sapiens
tgctggagtcagcaaattcaacttgcatacacctttctatattaccaaacaatttcctcccgagggaaaagtgacacagtaacatttctgtgaggtgcaggcaaaaccaatgattcagtaat

SEQ ID NO: 96212 - DNA, 122 bp, Homo sapiens
aggattaccagctcctttctaccctggggcattctactcaccttccttttccaagaatctcgcccctcaccctcggacccttcaccgcgacccccgcgcccacccggagcagcacaacaggc

SEQ ID NO: 96213 - DNA, 122 bp, Homo sapiens
agcaggccgctgggcccagcaggcccagcagaagcggcagcatggcgcctgggagggagacggaggggcgagagtggagtgttggcaggggcggcttccaaacgcccggctctccaccggga

SEQ ID NO: 96214 - DNA, 122 bp, Homo sapiens
attctctgtttcccctctgccttatttcatgctcatatattccatttcatgtgtttaagacggcagccgagtctttgaagtataaccacgttttgtgcaggaaaaaggtagcaatgaaaaca

SEQ ID NO: 96215 - DNA, 122 bp, Homo sapiens
tcaaccacggtgcttcttccctggtgggtgtctggccccgttcttgctggggatggcgctcggggatgccaccgtgtttccccagggcccactgtgcaccctgcatgtcgcgcccttgtcac

SEQ ID NO: 96216 - DNA, 122 bp, Homo sapiens
ctcgagggggtgaggtgggcaagaggggctggggcgccctgacggaggcctgggttgcagcgctcctgcagatggtagaggcggcaggggcagctgaagatgatccccttcggcggacgggg

SEQ ID NO: 96217 - DNA, 122 bp, Homo sapiens
cactccgccttccagcgcgctcccgcgcgcgcccgcccagccacctccaccacgcgcccgcgctgtccctgaggctccggcttaggcgcgaggacgcgcccattccccctcctcctccagca

SEQ ID NO: 96218 - DNA, 122 bp, Homo sapiens
ttcccagatgaatccactgcccattccctgtagccacatctccaaatccacagccgttctcggcagctgcctgcacactcacatcccagaggtcaagttgccacagctggtgtgtgtttcca

SEQ ID NO: 96219 - DNA, 122 bp, Homo sapiens
aggtgagcgcaggctgccagagtgggcgcagcctttccaccccgtgggagggcttggggtcgccctctggggcctgaacggctcctgctgtcggcgccctggagggcccgcccacttcccga

SEQ ID NO: 96220 - DNA, 122 bp, Homo sapiens
ccgattccccttccactcagtgcccaccctctcaagggtgatgtcctgacttgtaactgtcgattactcttgcctgaatggagttgtacacgtgttcttttgtgtctgccttctttaattaa

SEQ ID NO: 96221 - DNA, 122 bp, Homo sapiens
cgcccagagaccgcgcccgataccctccgcaaggtctgggacggggatccaccgagggtccggggactggggaaggcgttttccagacccagtcaaagccccaccccgtcagggctttccct

SEQ ID NO: 96222 - DNA, 122 bp, Homo sapiens
atgtagagcaaggagtgagtctcaggtctcagtcctttggcttgctcttagggtagcaggcgaggagtggcaccagtttggggactctctccccgcgttctgtaagaatcggcggcagccag

SEQ ID NO: 96223 - DNA, 122 bp, Homo sapiens
gccgcctagatccccaggcagaaaagccagcgtcctgacatcttattcaaatctttcctgcggctgttctctcagcttctctctactatccccttagcttccatgcctgctgcccgcctcct

SEQ ID NO: 96224 - DNA, 122 bp, Homo sapiens
agacagggtggggccactaccgggttaaagacttgtagtgggtggggctacacgtagggccgagacgaccggatttccggaaatcagagccggcacacgtgacttttgtttgcagaagtggg

SEQ ID NO: 96225 - DNA, 122 bp, Homo sapiens
cacaggagcttgctacacgtgccggaaatctggccactgggccaaggaatgcccgcagcccgggattcctcctaagccgcgtcccatctctctgggaccccactgaaaatcggactgttcaa

SEQ ID NO: 96226 - DNA, 122 bp, Homo sapiens
gggcggcaggggagctctctggaaaccccccccccagggatgttgtcaaaactatggtgacgggcgggagtggggccaggtgagcagtgccccaaggggagcggggtctccagagccacgcg

SEQ ID NO: 96227 - DNA, 122 bp, Homo sapiens
caggcatccagagcgctctgtggcggccgaagaaccaggcgccccctagtgtgggataagcgggccatcgggttttttttggggctgcgtcagccagtggcatttagggcgatggggcgctc

SEQ ID NO: 96228 - DNA, 122 bp, Homo sapiens
tttcaacccgcagcaccaccactgaggaaacgcaagtgtgctgaagacgcaaacctaacacgcaggaggcaggaaccgtctgaggcagcccccggcaaacgtcaggctgtgtggctcagacc

SEQ ID NO: 96229 - DNA, 122 bp, Homo sapiens
gtctgcgtgtcggatcttgcaggagcggcaggtctgcgggctcacaaagtcccgtgcacacgcgcgcacacacactgaccccacacagtccggggctcgcggccacacactgacctcagtcg

SEQ ID NO: 96230 - DNA, 122 bp, Homo sapiens
gttacacagtgcttgggtggcccagagagctgggaatgttactgcagtgcatggcttggtcgtggtgggtgccatttgcacagagcattgagagaaagttaatgtagttgtttgatttgcac

SEQ ID NO: 96231 - DNA, 122 bp, Homo sapiens
tctgaggcccctgggttcccgggctgctcctgtgaatggcattggaaggccgttccagcgcggccgctgaggcagccacttcccccggtgctgggggcggatctcaggtccctgaagtcctg

SEQ ID NO: 96232 - DNA, 122 bp, Homo sapiens
gaatcgcctagaagaaccagatggaccgtaaacgcctgttttctccatcaaagtatggcacgtagaagacacctgacatatatggttgatggatgcttagatagttggagagtaaatttaag

SEQ ID NO: 96233 - DNA, 122 bp, Homo sapiens
gccgcagccgggcgtccccgcgcgggcgccggagaggaaggaaggctggcagcctcgtcacgtgtccgctgcagtcgcgaaacaggtctgatcaatttctgtttacgtctgcctggattgcg

SEQ ID NO: 96234 - DNA, 122 bp, Homo sapiens
gcgttccttgctgcttcccaggacagctgcacatggtgcacacttgcgtgtcacaagcaacgtctccaaatgaaggtcggcagggaaacagcctcgctggggccctagcaccgctgtccgga

SEQ ID NO: 96235 - DNA, 122 bp, Homo sapiens
agcccccatctcggatgacccttcgggcgtgaacgctccttgtgctaggtctcagggtggcgggctaaggcgtcgggtctctggggcattgctttcctctccccacttaccttaaaaagatc

SEQ ID NO: 96236 - DNA, 122 bp, Homo sapiens
gaatgcagaaagcagccaacagccgaccggcaactgggaagcaagcgcccaggccagagccggttcctatacttggcagaattcccctttggccatggtcaaagttgaccaagtttgcctca

SEQ ID NO: 96237 - DNA, 122 bp, Homo sapiens
cttaatctccacagtgccaatgatctcagccacatttcatcaaactgtaataaccataatcgggactagtccactacctggacccctctactcttaaaatatgaatctctctaatatcctac

SEQ ID NO: 96238 - DNA, 122 bp, Homo sapiens
catcctcagagcgcatttgatcgcgaggtagatgactgggtgggaagctcgaatatttcccgcagccgttcctggggttcacacctgggccgggaaatggccagagtgtatagatgcggttt

SEQ ID NO: 96239 - DNA, 122 bp, Homo sapiens
tctgaccccagcctactccctggagccaggtggggatgcccaaaggcctcacactccccccgctgtctggtgctggggcctgaagcaagcagcaaacccccccacccgtgggctcccacgcc

SEQ ID NO: 96240 - DNA, 122 bp, Homo sapiens
gatgctctggtcggctcaggagacctcgcagctgttacacagctgtggaaataccctgggcgctgcttcactccgaaggcagcagctgggtttgcctcccgactcgacccgccaccgaggct

SEQ ID NO: 96241 - DNA, 122 bp, Homo sapiens
ttggggagaggggtccagcctccattcccgccccgggggagaaagcttcggcgccggacccgggggaaggctgctaccccagccgcggcaggatggcccatccccaaccccgccccactccc

SEQ ID NO: 96242 - DNA, 122 bp, Homo sapiens
tggagccccaagtatggcttttcagatgcggcttctacactgcttcaacttgaagatctgcgtccccactgccttttctcactcagatggggacactgaagtccagaggaaaagccacctgt

SEQ ID NO: 96243 - DNA, 122 bp, Homo sapiens
atatcgctgtgagccgcagtgacacacattcatttccgctggaggcagccctagggagtccggcggccctgcagctgtatttcatctctttgaactgtatggcctcccctataattcaggaa

SEQ ID NO: 96244 - DNA, 122 bp, Homo sapiens
agggtctgtgcccgggagcaactgtgtgtggaggatcacacttcctttcatatgttccagcgacacagaacagcttgctttcaggccgttgcaaaacacaaaccagaaaaagaaaaagagtc

SEQ ID NO: 96245 - DNA, 122 bp, Homo sapiens
catcctcttcctcagcatcagcgctgacagcatcccgcaaattggcgccgtccccagaaccgcctaacgtgaagctaatcatctttgggggactggggaagggccttaggtgtgacgaggaa

SEQ ID NO: 96246 - DNA, 122 bp, Homo sapiens
cctgtcctaatcaaagaaaggggtgatggacggcacctggtcactcccacccgaatactgcgcttttccgacgggcttaaaaaactgcgcacaacaagattatatcccgcacctggctcaga

SEQ ID NO: 96247 - DNA, 122 bp, Homo sapiens
agcaaagatagctaaatggcattattcagcccagcgcatgaacggctcagattgcccgcgcgctggggtgccccctgccggccctcggcagcgcctcgtcctgggcctggccctgggcggcc

SEQ ID NO: 96248 - DNA, 122 bp, Homo sapiens
tgtaacacctcctcggtacccgttttcgtgttggctatgttggctaagcaaaaaggagttcgtgaaaagaaaactggaccacagtgagttggaaattgtttctttccaactccgtttaggtt

SEQ ID NO: 96249 - DNA, 122 bp, Homo sapiens
cggcgtcggcgggcgaacaccgagcgagtcgattttctcgcttcaaaaattccagctgggcggagaaagcggggatggctccgagttagaatggaagagaaaacggtttacattcccggcgt

SEQ ID NO: 96250 - DNA, 122 bp, Homo sapiens
aggaaggtcttccagtcggggaaggcgggaggtgttaagatgcaagcacttggcagttagcgggctatgaggatcttttctatctcgaagccgtgcgtctttcacctgttgttcgactggta

SEQ ID NO: 96251 - DNA, 122 bp, Homo sapiens
acctgggccgccaagcggccagacttcgggggaaagccatctctcttctggcgcctttatcggcagagagctacttgtactcaaaaccttgcactcattctccaagcccacgtgggtaagat

SEQ ID NO: 96252 - DNA, 122 bp, Homo sapiens
cacactcggaccggcttcacctgcccgtagcggggcagcggtgctgagtgcgaggagcagcgcgagcagaagatctggaatggggttggggcagtgagggtctgcggcagaccagccccacc

SEQ ID NO: 96253 - DNA, 122 bp, Homo sapiens
atagtatgttgcaaatacatatgttgaaaatgcattaaggaatttataggttgtgaaatccgtattgagcgattagcacaattatggagagtcccttgcaggtaactgcatcacaatatgaa

SEQ ID NO: 96254 - DNA, 122 bp, Homo sapiens
tttccttgggagaatgggtccttccagccgtgtgtctgtgtctgtcctgctgggagtgcccgtggggcaaggccgggctgagggccccgctcggctgtcggcgtctcccacggtggtgctca

SEQ ID NO: 96255 - DNA, 122 bp, Homo sapiens
gttagcatacactgaatacccaaccgagtcccgggcactatggaggcactttacacgcaacgtctgcatcccaagcaggctggacagcacagaggataagatcatgggccatgcagctcaag

SEQ ID NO: 96256 - DNA, 122 bp, Homo sapiens
gtcaagatggcgccccctggtcccaggggcacagcccaggcacgctagcgaggctacgcacgcacgtattcgggcgcgaagggtggggcactgacgccagacgtcgccccgccctctgtggt

SEQ ID NO: 96257 - DNA, 122 bp, Homo sapiens
cccacggccgcgcccctcggcctcccaatgggctgtgcggctgccagcgcttgcgccggacgccacttccggtccccgtggtcacgtgaccgtcacttcacgtgaccgcgcggcggccgctg

SEQ ID NO: 96258 - DNA, 122 bp, Homo sapiens
tgaacccagtcagcccgagggttttggccaaagctcgggtgggcttgaacctctcccatccgctcagcttggacccgaccccggctctgggcccgaccccttggccgacgtgcagtgtcctt

SEQ ID NO: 96259 - DNA, 122 bp, Homo sapiens
tcctgggatcccgaagtagagggagtctgggatcggtttgctttatccgtgatgactgtccgcctctgctcagtgtcagcccagcccttcgaagcatgtcccccacctcccctggggtgagc

SEQ ID NO: 96260 - DNA, 122 bp, Homo sapiens
tgtgtgatttgcggagttcacgcagcccgcaggggagatgctaatgaaatgacagcaaaacgttaaaataagcaggtgctagaaaccactgcattcgttcataaaaagccagtagttccttg

SEQ ID NO: 96261 - DNA, 122 bp, Homo sapiens
cgacagaacgagaccgtcttaaaaaaaaaaaaaaaaaaaaaaaaaaaaaaaaaaaagacacgtgaggacacacaagtttagttacttgcctaaagtcatctggaaataagtgaaagtcctta

SEQ ID NO: 96262 - DNA, 122 bp, Homo sapiens
tcatgcagacaaatgctctttcaggggtcctaattaagtgtggaggcctgactttccttccgaatccgccccaggtgttccaccccgagcttcccctcgggcttcccctcgccacgcagcct

SEQ ID NO: 96263 - DNA, 122 bp, Homo sapiens
aatcagagggccctccccatgcagttcttggccgtgctggctgccgcagaagccaaagctcgcaggaggtacatacggcaggtgtaaacgtctctgtacgccatgtgctcataatcagggag

SEQ ID NO: 96264 - DNA, 122 bp, Homo sapiens
attgtctacgcacagaaaaattccctacacgcgggaaaacgggacggtgatgtacacgctcgggacattgtctacgcacagaaaaattccctacacatgggaaaatgggacggtgatgtaca

SEQ ID NO: 96265 - DNA, 122 bp, Homo sapiens
accgttcactggggccgggctggaaggctgttcctttaagatcaccagcaggagcacggccgccgcgtgcaggctgcgccggggcatcttcgcgggctcctgcggggcgggcgcgggctgtg

SEQ ID NO: 96266 - DNA, 122 bp, Homo sapiens
ttctttgtaaaatactcaagacttggcagaagtcacaattaagattttgaagttgtttggcgattaatgttgctgtgttattttgacatagtgatcttaagacagctctttgaagcttttag

SEQ ID NO: 96267 - DNA, 122 bp, Homo sapiens
aattctcttagcacagaacagattttgggtactcaaactacaaggggctagaccttttcccgaccatggcgcctggcctcctcctcatgttgcctaaatggctatgttcagacaggctctga

SEQ ID NO: 96268 - DNA, 122 bp, Homo sapiens
aatgattaattttaaagcagacaaaaaagatatgccctgattacaaaggaatgattaaggcggaatgtcagacattgcacatttatagcagtctttgccatcgtcaaagtataagactttgt

SEQ ID NO: 96269 - DNA, 122 bp, Homo sapiens
ttctgcctaagtggtactgaatggcattgtgactactgctttcttctccagtgccaggagcggtagactctgcagcagtaaaatactgtctttgttcttttctgagatggtgaagtggctgt

SEQ ID NO: 96270 - DNA, 122 bp, Homo sapiens
cttgaagccccagggtgtcatagcatgtgctagaaccgttcagtggagtccacgggcatgcgcccattctaacaactcctttgctgaaaagtgggctccttgccctgatgtgatattatacg

SEQ ID NO: 96271 - DNA, 122 bp, Homo sapiens
cgcgtgcgagggggctcccttcacctcagtgcctcagttcccctagctgtaaaacagggacggggcggcccagtggctgagaggagccggctgtggagccccgcccgccccccgccctctag

SEQ ID NO: 96272 - DNA, 122 bp, Homo sapiens
aatggacttcacgctgctgacacagggtgcgagcaggaaccccttttggaaggccacacccgcttgctctgcacccttgctctggcgcgacgccgtcttcccgcggacgttgcaccagatgt

SEQ ID NO: 96273 - DNA, 122 bp, Homo sapiens
gtccgcgggcgccccatgctggcagtggtaatgccgccggctggcatccggttggctgcgcgctgggaacgccagcgaggcagcgccaccggcttgaggagggtgaaagttcaattcttggc

SEQ ID NO: 96274 - DNA, 122 bp, Homo sapiens
taagttaaatctaagcatttattgagcacttacatgtgcaagaccatatggagtccagagcgaacataacccggcccctgcccacatggctttctcagcaacagacagaaacgtgttcttgc

SEQ ID NO: 96275 - DNA, 122 bp, Homo sapiens
caccaaaaaaataggaaaaccagtcaggcgtggtggcgcgtgcctgcaatggcaggcactcggcaagctgaggcaggagaatcaggcagggaggttgcagtgagccgagatggcagcaggac

SEQ ID NO: 96276 - DNA, 122 bp, Homo sapiens
agggctaaatgcctggagaggcagaaccctaaaggatgcttagttatagctccatgctgccgccgagtggcttgatgctccattacaccctccttggatccaaccttccattaaggctgaag

SEQ ID NO: 96277 - DNA, 122 bp, Homo sapiens
taggaagtgagatagtatagcagaatcttaaaggaatataggcaattaaaggggagttgacgattaatactgaaacatgtatggggattgtacaggagtgactttaagccaatttaaagtat

SEQ ID NO: 96278 - DNA, 122 bp, Homo sapiens
ggaggttaatagcgactgacgacaaagggccaaggtgcaattcctaaagcggggattcgccgggtgaggcagaaatcagcctccggggagatgggtccccccttcccgacgcgcccctgcac

SEQ ID NO: 96279 - DNA, 122 bp, Homo sapiens
caaacttctggcctcaagagatcctcctgcctcagcctcccaaagtgccgggattacaggcgtgagccaccaaggcctcttgtgaagttcctgatggggtcagagagaagcaacttgcggag

SEQ ID NO: 96280 - DNA, 122 bp, Homo sapiens
actaggactctttcagagtcgcagtactgaggtctcggggaagaaccctgattgtcccagcgtgggtgagatgtcaagctctggaccatccccacgaaacggaaggggagcgggagaggtgt

SEQ ID NO: 96281 - DNA, 122 bp, Homo sapiens
ctagtgtcggagttgggtgcaggcaggtgccatgggcccgcttgaggcacactgaggggacgcggggctgggccatggccggcgctcgggccgccgccgccgctgcctcggcggggtcctcg

SEQ ID NO: 96282 - DNA, 122 bp, Homo sapiens
aggtctggttggcgagccgctgctgggagttttctgcaaataccccccaaagcctgaaggcgggcttcaaacgcaggcgccggggaccatgggagccttcaaatagctgcgctggcgcaatg

SEQ ID NO: 96283 - DNA, 122 bp, Homo sapiens
ttccagagtaggggatgccgcagtgggccaggagagcagtgtcgtgtgactgagtgggggcggcaggcagctgcggtcccaggcagacagtgggaagaggagctttggtgacagaggaccca

SEQ ID NO: 96284 - DNA, 122 bp, Homo sapiens
cagcacttgccaggcgttccgtggggcagcatctcctctgaagggccgccgacagtaccacgccaatggaacggcgtaccctcctccactgcagcctgcctaaccccggactgcgcgcccga

SEQ ID NO: 96285 - DNA, 122 bp, Homo sapiens
attctttacacgcagatggatctatcttgctcccaaacaatcgccggcacagactcccatcggattagtttgcttaatccctgtgtgtaaatacagaccaactgtattcacttccattggaa

SEQ ID NO: 96286 - DNA, 122 bp, Homo sapiens
tttagaaattcttaaataaacaaacttacttactctatttcagttttagaaactcttattcgatatcctttatgcagtagttactactttaaaataacacttcgaccattaaaacactgtga

SEQ ID NO: 96287 - DNA, 122 bp, Homo sapiens
cggcggggaggcccggtgaaacttaatcccttttctgccagggagcgatcctcgagtctccgtctggatggttccttatttctggcctagctgtgaaatcagctctgtgggggagagggaaa

SEQ ID NO: 96288 - DNA, 122 bp, Homo sapiens
ttggaaaattgggtcactcccacccgaatactgcacttttccgacgggcttaaaacacggcggcgcaccacgagattatatgccgcacctggctcggagggtcctacgcccacggagtcttg

SEQ ID NO: 96289 - DNA, 122 bp, Homo sapiens
cactgtccccctcgcggtccgggaaagccggcggggcagcttcacgggcgtagccccagccgccccgcccccaactcggggtccccagctcctggggactcagcctccccgccgggaaatga

SEQ ID NO: 96290 - DNA, 122 bp, Homo sapiens
gggaatcccgggagaaggtcctcaccgccttgcccagtccgtgttcccgctgtaggttcccgaacacatcctgggagctgtagggccggttctgctcctgcaggtacctcaggaggatcccg

SEQ ID NO: 96291 - DNA, 122 bp, Homo sapiens
gggagaggtgacatttgtcaggtgcggctcaggcatgaagctaagcaggacagctcagagcgtccagatcatgtacctgagagcatgtcctcggctgtaacaggagtgcatctgtgaggccc

SEQ ID NO: 96292 - DNA, 122 bp, Homo sapiens
cacctgccagggcgcatgctccacggttctgctgaatcaagcttcagccaagcatttctccgggtttgtccttgtctaaaactatgagaaacctggagatcatgggcccgcaaataaataca

SEQ ID NO: 96293 - DNA, 122 bp, Homo sapiens
ccagccagcccagagagccatggagctaatgacctcagagcaaaacaggcgcttgggagccgctgggtatgaggcgccaggtgtgacaccacctctggatggggctgctggagcgagagcgg

SEQ ID NO: 96294 - DNA, 122 bp, Homo sapiens
tcagcaccattagaaacttctgcagtttccaaggctgagctcatttgaaagcaggcgatgcgtgtgttaaataaccaggctttgttttgggttatcaaaattctcccacggtctgctccagc

SEQ ID NO: 96295 - DNA, 122 bp, Homo sapiens
gccccggcccggccccctctggctccttaaagggcccgcgccttctctccaggccctgcgcgtccccactcgcgcgcgcacgccgccacacacacagacacgcacgcacacacttgggcgcg

SEQ ID NO: 96296 - DNA, 122 bp, Homo sapiens
gtgcgggggaagagcgaggccggcccatcccgtgcggggggagagcgaagctggccatcccgtgcggggccccagtggctgccctccgactgcagctcccttcagagactgccaggctctgg

SEQ ID NO: 96297 - DNA, 122 bp, Homo sapiens
tcaacactttgggaggccaaggcaggaagattacttgagccaaggaattcaagaccagcccgggcaacatgatgagatccagtctctaccaaaaaggaaaaaatttagccgggtgtggtggt

SEQ ID NO: 96298 - DNA, 122 bp, Homo sapiens
aaaagcggctcaacaaaggcaggtttattttggagaataaacctgaaagggacttctggccgattttggtcaggagccatctctcctacagactaaggatctttaagggtttaggaagtggg

SEQ ID NO: 96299 - DNA, 122 bp, Homo sapiens
ttttatagaatagctgtatggactggatgacttcatctctaaatattcccatctgcctctcgtggccctttgcctagtgaatctctaaactggctcttgggctatcagaagagctctagttt

SEQ ID NO: 96300 - DNA, 122 bp, Homo sapiens
cctccagcaccctgggtcgctgtcatctgtgtttagctcggggagtgccccctaagggggcgaactgacctcaggcatgttttgtaactgtagaggcgcctgccattaaacgtgtccgctgc

SEQ ID NO: 96301 - DNA, 122 bp, Homo sapiens
aaggggtgacagacggcacctggaaaatcgggtcactaccacccgaataccgcacttttccgacaagcttaaaagacggcgcaccaggaggttatatcccgcacatggctcggagggtccta

SEQ ID NO: 96302 - DNA, 122 bp, Homo sapiens
tgtaagactgcgaggggcggggtgaggaggcttgtcctcttttccgattggcccgctgagcgtctgtggcgcgcgcgcgcgcgccgccagcggtagcggaccttgagtggcagggggtgggg

SEQ ID NO: 96303 - DNA, 122 bp, Homo sapiens
tcaatcatgagtgatagatgaggcatttgctgtttctccgagctttgtgtcattcccagacgtactggacattctttaatgctctgcctcagtcatggattaactgttgaccaagacagagt

SEQ ID NO: 96304 - DNA, 122 bp, Homo sapiens
caggagcaggtctggtgagaaagccctggccgggggtggaggctcagtcctgggagtgggcggggcagctgggctcggggtgttaacagggtcctgcggggggactctgtgctgagtcaaag

SEQ ID NO: 96305 - DNA, 122 bp, Homo sapiens
ccataggcatcagttgcctttgccccaggcgcccagagccggccagctgcggtccagaggcgcaggtccgccagccgcctcgcaggttgccctcagcccctcccaggactcccggggccccc

SEQ ID NO: 96306 - DNA, 122 bp, Homo sapiens
tttttttttttttttttcaaagaaagtcacttttaattcccagggctccccgctcgcgatcgcccacattttgcgcgcacacgagcgggcgctgcactcgcgtcgcggcgccccgggcccgg

SEQ ID NO: 96307 - DNA, 122 bp, Homo sapiens
agaaaagaaaggtcgagaaagaaaaaaacaagtcattcagggatggtccctgtggccagtcggaaaggtgagagactcgggctttgaaaacgattcacattctgccctttaacttcaatgcc

SEQ ID NO: 96308 - DNA, 122 bp, Homo sapiens
agctccactccacacccccttcctgcctataaataaccccaagtgtcacttcaaagaggacggggagcgcggcagaggggctcccgggccggcgggctggggccgccggacctgctcaccac

SEQ ID NO: 96309 - DNA, 122 bp, Homo sapiens
gacggactgacagggggagacgccgaatgagacccgggcacaggggtgcggggcgctcgtcggacggaaagcagagacagacccagatgcagggacggtggggggggggccatggaggaaga

SEQ ID NO: 96310 - DNA, 122 bp, Homo sapiens
gacccgcgtccagccccgcctccgggctcggtgacccccgttcaggagaccccatctagccgcctcctctgggctccgggaccatggccccagccaggcttcccgccccctgccaggccctg

SEQ ID NO: 96311 - DNA, 122 bp, Homo sapiens
agaggtgcaggtacttgacattctccaggtcgtacttggatggcttcttgtaggtgctcccgttctggggccgcagattctcgccggtcttcagtttttggatgaagaagtcgtacttggag

SEQ ID NO: 96312 - DNA, 122 bp, Homo sapiens
gcgccccgaggcgccccctctcgggaaagcgcagcctcgcgcccctgcgcgcggccgctccgccctcacctgagcctgaggttggccatgaactcgggcatggagacggtgtccatcagcac

SEQ ID NO: 96313 - DNA, 122 bp, Homo sapiens
attctttgttcaagacaccaagaacatgaacaccctccaccgttaacaaaagcatattggcgggggcacggtggctcacgcctgtaatcccaacattttgagacgccgaggcgtgcggatca

SEQ ID NO: 96314 - DNA, 122 bp, Homo sapiens
tttgcagggccaaggcaggtggatcgcttgagtccaggagattgaaactactctgggcaacgtggcaaaaccccacctctacaaaactacaaaaatggccaggcgcagtggctcacacctgt

SEQ ID NO: 96315 - DNA, 122 bp, Homo sapiens
tggtgaagtcattgacctgagcaactatgaggagctcacagattatggggaccaactccccgaggtgagggacacagcagaccaactacattccctgcatgacactgggagtcagaggccag

SEQ ID NO: 96316 - DNA, 122 bp, Homo sapiens
acggtgactcgcagggttaaaactgagagcctggctctgatccaaagctgtgtttaaagacgtgcaaacataccacaccggttcaccgatcatcagccgaagctccaatatcaattctgtgt

SEQ ID NO: 96317 - DNA, 122 bp, Homo sapiens
tgagcgtcgctgttgaccacctaaggagtaaaaggcagcgagacatccaatccagcaatacggctcccacagcacaagggggtggaggtttggccctaaagcttcaggacaccaaagaaatt

SEQ ID NO: 96318 - DNA, 122 bp, Homo sapiens
agctgccccccgcgctcttgttggcctctcgttccttctccacattgtccttagccttgtcgtaagagaagatacccaggtgagagaagaacgtctccagcaccgcctgttccaccgggacc

SEQ ID NO: 96319 - DNA, 122 bp, Homo sapiens
tttcacatttggtaaagaagtgtaaaaaatgttcaaattataatgtaagatattgcctcccgggaacaagttgttcatctgttaatcaagtgagttttgtatcatcatggcattggaatgct

SEQ ID NO: 96320 - DNA, 122 bp, Homo sapiens
ggggtgtgcgggctcctggccaatgggtgctgtgaagggcgtggcccgcgggggcaggagcgaggtggcgggggcttctcgcgtcttttcccccagccccgctccaccagatccgcgggagc

SEQ ID NO: 96321 - DNA, 122 bp, Homo sapiens
aggagaggagcagaggggaagggaggggggaaaagagagatggcacaaattattaatatccgtcaccacagatcttacagatattaaaaagattgggcatggtggctcatgccagtaacccc

SEQ ID NO: 96322 - DNA, 122 bp, Homo sapiens
gggaggcatctgttttgctgctgcaagcagaggatggaatagtaaccttggtttcccatgcgctgtggaacatgatgaggagttcttaggagaccacggttaccgtctttagcacaatctgc

SEQ ID NO: 96323 - DNA, 122 bp, Homo sapiens
atgtacacgaatcattcaaccctcagaaactattccaaaggagtccttactggtttggagcgtttttcttaattatggaaaaggcccaaactctttctgcatgctaatttatttatatcata

SEQ ID NO: 96324 - DNA, 122 bp, Homo sapiens
tagtaaactacagaagaaacaaattcgtcaagtcatactgaacaaaagtggacataagaccgtgggtaaaagtagggagaagagtactgatgtctttgcacactgggcaaacacaagagaaa

SEQ ID NO: 96325 - DNA, 122 bp, Homo sapiens
ccagactgtcctcccagctggccaagccctggccaccccacaagggctggctccctctcccgtgtttcctcaaagctgcctgaggatggtttaggatgatttatcctcgtggggtggattat

SEQ ID NO: 96326 - DNA, 122 bp, Homo sapiens
aattccccagaaaaggggctagtcttcagtcttccttaatccaagaggggttcagggaaccggtgtgggggaccatcgcatgatactggggcggggtagggctgtgctggacccctggctgg

SEQ ID NO: 96327 - DNA, 122 bp, Homo sapiens
atggcggccccggctgacgtcaccggaggatgtggcagagtcggcgcgggagagctgggccgggaggcgccggaagcggcggccggggatccgctgccactgcagcctacacccttcccggc

SEQ ID NO: 96328 - DNA, 122 bp, Homo sapiens
cgttaaagtctgggcaatttctggaactcttcccacgggaagttttccggggctgccttccggtcagcggccccaggttgattatttggtggcccttttttgtttgaaaacaaaaaaaaaaa

SEQ ID NO: 96329 - DNA, 122 bp, Homo sapiens
gaaggcaagaactaggaggctttttctgtgttaccaagttgtgcttgtcttctgacacatcgtgcagtggttgttgctaatggggcttctgttactaaacacacccttgtattccatcagaa

SEQ ID NO: 96330 - DNA, 122 bp, Homo sapiens
tggaactcgccgttgtgctaaggggacagccaggcccactgaggcagggggagcaggggccgcctgacagccccaggaagcctcctcgccaggcccactgagctgggggtgcaggggccgcc

SEQ ID NO: 96331 - DNA, 122 bp, Homo sapiens
aagacatctctggcgttcagaagacctgatttgcattaccttaacttcctgcatttcttacgattctgcagcgaagtctaatgtgacagaagattattagaagggacacaaatatttgtaat

SEQ ID NO: 96332 - DNA, 122 bp, Homo sapiens
tccacgccctgcagggacctcctgcatttgtgtgcttgtcactgactaccttccctaccacggtacgaggttcccaaggggcagggacctggaactgaccaccacatcccccgtccctagcg

SEQ ID NO: 96333 - DNA, 122 bp, Homo sapiens
aggctcacacacgcgcacacgcacacgcagagcggcactgacacggggactgaggccagacgtgaaggctgactgcagctcgcagcccacctaaaatattgcaattatgtttattaaaaaag

SEQ ID NO: 96334 - DNA, 122 bp, Homo sapiens
attcctgcaaaaacaaggtgatggctcagtttttcacaaaggaatgagtgactggcaaaccgtgtgctgatagacctccctttatctggcccggccggagccagatgtgtctgagcctagac

SEQ ID NO: 96335 - DNA, 122 bp, Homo sapiens
aacctcagcctatgaaaatttaaagcaatgagaggcagggtgaggggggagttggtccagcggccacaggctcctcagagatgtaggcagcagggaggtgctgagttattcatgaggttgca

SEQ ID NO: 96336 - DNA, 122 bp, Homo sapiens
tcccgggcctccatagtcagtaaaggcccctcctgactaaggctgggtctgctgctctcccgagctcctccaggccgccagaaggcttcctccgagtcactttctccctgagttcgaggctt

SEQ ID NO: 96337 - DNA, 122 bp, Homo sapiens
ctggggcctctttcttcccgagtctcggccaggtctgaggtgaagcaggaaggccccatacggggtggctaggaatgccctgtgtggactcccaggggtccagtgacttccctaagaccacc

SEQ ID NO: 96338 - DNA, 122 bp, Homo sapiens
catactctaaaaacagggatcaagggtcagtgcatttttctgagaatgtaactttccatccgattctcaaagaggttcatgcctatctcaaaggacagaactactattctgagatatttgag

SEQ ID NO: 96339 - DNA, 122 bp, Homo sapiens
gaagctcttggtcccgaaattcatggcggtcgacatgttggcgactccggagtctgcgagcgccttgcgagcgtacgcagggcggccggcggagcgccgagcaggcaccccgggagcgccga

SEQ ID NO: 96340 - DNA, 122 bp, Homo sapiens
tgtgaagagaaagacaagcagttgccggagctccaagaagcagagagtctccgggtgtcccggacccagtccctggctctggagccctccttccaggcaaatcctcaaacactttcaaatct

SEQ ID NO: 96341 - DNA, 122 bp, Homo sapiens
tcctataaaaatggaaaatccatagcattcttgatgattaatgaagccgactatagtatccgacattccaataacagaatataatcacaatgatttctcttttttggaaaaatgtttgtctt

SEQ ID NO: 96342 - DNA, 122 bp, Homo sapiens
aaaaccaggacaaatcttgctggcttccagtatggtattcgtttcatctcaccaaactggcgtggcctgcgctagcttcagagtctcgacaaactccaatacaagtaaggtacacattattt

SEQ ID NO: 96343 - DNA, 122 bp, Homo sapiens
gagcgacaattatctccatagtcatgagacttgatcctgcagttctggagccccagatgccgcaaaagcgcttccacgatgctgacctgctcaaatatggaatagtgatgcggtctcggttt

SEQ ID NO: 96344 - DNA, 122 bp, Homo sapiens
ggtgtgggatatagtctcgtggtgcgccgttttttaagccggactgaaaagcgcaatattcgggtgggagtgacccgattttccaggtgtgtccgtcacccctttctttgactcggaaaggg

SEQ ID NO: 96345 - DNA, 122 bp, Homo sapiens
cacgaatgcgcatgcactagtctcagggaaccagtcttgattatcagcactgcctagactcgtaaagattgtctcttttgcctagcgacaatttcctgcggcttggcagagaaagagacctc

SEQ ID NO: 96346 - DNA, 122 bp, Homo sapiens
taaattttgatcacctggttaagatgctgtctgcctgcctctttgtatagttactatttccgcttttgctactaacaggtctaaaccatctatggggagacacatcaacccagacaaatatc

SEQ ID NO: 96347 - DNA, 122 bp, Homo sapiens
ctgggcaccatatcatgcccttctttacaaaaactaaaaaactagctggacttgatggcacgcttgtagtcccagctacttgggaggctgaggcacgaggattgcttgagcccaggagttca

SEQ ID NO: 96348 - DNA, 122 bp, Homo sapiens
acagctacatctaaatgttctagttggaaaccttaggaacaagtaagttcctcaaggggccgggcgcagtggaatcaaggataggatcaagtgtcttacccttgtgggcctcaaaagggggc

SEQ ID NO: 96349 - DNA, 122 bp, Homo sapiens
gcacggccctccggggacgtggacactgcacagccgcacggctgcccggccctccggggacgtggacactgcaccgccgcacggctgcccggcctgcggaagccctcccccacccccgcctc

SEQ ID NO: 96350 - DNA, 122 bp, Homo sapiens
cagtgcagggcagacagcaagcacgtcccacccgtgtcgtgggggtccactcacgctcaacgtccagcagagagaaacccagtgaccagaaagcagacgggtgggtgccaggcgagggggag

SEQ ID NO: 96351 - DNA, 122 bp, Homo sapiens
actgcagaggacagtgaagacatgttcatttaactttaaacacatttgtcagtcattctacgcagaagctcccttttctccttttttcttgtctctctccctctgacactgtctaaaataca

SEQ ID NO: 96352 - DNA, 122 bp, Homo sapiens
catctgccctttctgaggactcacgccgatgtcctctgtagccccgggtcctcactgccccgctccctgcacgtgtctacctggtgaggcttctcctcagcacgcccgccggagtgaggccc

SEQ ID NO: 96353 - DNA, 122 bp, Homo sapiens
tgcatgtgtgtgtttctctctcacatacaaacccacacacactaatctcttatacaaatgcgctctctcttaaatatatgcactggctctctcacacaagtaatttctctttcacacttgat

SEQ ID NO: 96354 - DNA, 122 bp, Homo sapiens
gaagaattaaggaactcagtctgacaacgtgtgaggcactgagtcctgccaacaactacacgagtgagcttggaaacagaccctcagtccagccttcaggtgagactgcagtcttgacttat

SEQ ID NO: 96355 - DNA, 122 bp, Homo sapiens
ctgcatgccactctgtggccactaggatagggctgaggagctgccaggggatgagcacgtcgtggccatcgggatggggctgagagtctatctttatccttatgcacccgcccagccgactt

SEQ ID NO: 96356 - DNA, 122 bp, Homo sapiens
caggagaaaagaagcgaggagtcacagggaggggcctcctggacaccgctcccaaagccacgcgaaagtggaagcgcggggcctcgggatgcccatccagccggctgcccgcgcgctggccg

SEQ ID NO: 96357 - DNA, 122 bp, Homo sapiens
gtgacttagatgctaggatcagtttgttttcaatgtaaatggaccagcccggactccgtacggcactagcaggggactgaaagcgtcttcaggtactgctggtgggcggtgatgcgctacag

SEQ ID NO: 96358 - DNA, 122 bp, Homo sapiens
aagaaaaagggcccctgcgggcaggaatgtgtaggggaatctccaaactgagagtacaggcggaaattccctaattctgagtctgaaccctcaggagtaccaggttacccctgagctgcaca

SEQ ID NO: 96359 - DNA, 122 bp, Homo sapiens
cgggcctcggcccctacagcccggcctggccaccctacggcgaccactactacgggtacccgcccgaggatccctacgactactaccaccccgactattacggtggcccctttgatccgggg

SEQ ID NO: 96360 - DNA, 122 bp, Homo sapiens
ccccggaacgcctcctccggagtggagcagcctcacatgtggcctgtgggccttgtcccacgggccggctccggattggctccgccgaagagaaaaccctgccgacagcccttccgatctcg

SEQ ID NO: 96361 - DNA, 122 bp, Homo sapiens
tctgcagcagctcggagtctcagtttgtttccctgctggtacgacgatggcagtaatacccgtgctggataaagtgagagactctcgagacacacagtacatgcctgcctcttccccagctc

SEQ ID NO: 96362 - DNA, 122 bp, Homo sapiens
ggcacccttacccggccaggaggcacgtgcggcagcagaactgaatgaagagcttccgttcgcacagccggttggacttcaccatctcgcagaatgtctcgtcagctggggccccgcatcag

SEQ ID NO: 96363 - DNA, 122 bp, Homo sapiens
gaaattactaaacttttctgtggctcagtttcctgatctgtaaaatggggagtataataacgcatcataggtgggtgtggacaaaaatgatatttaatattagtagagcacttggagcagtg

SEQ ID NO: 96364 - DNA, 122 bp, Homo sapiens
cgggccagagacactgtggctcgaggagctcatgcgtccgtcgggtgacagtgcagggcccgaccgtggcttccttctctaggtccagggcagctgccccgggagttaccttttcatagcca

SEQ ID NO: 96365 - DNA, 122 bp, Homo sapiens
cgccggaggagccgtcggtgccggaatgcagcgtgtttcacttgggagaaacgttgccctcggtcccttgcctccctcctgttgtctcggtttttctggcttcgtccttcgtcccacccacc

SEQ ID NO: 96366 - DNA, 122 bp, Homo sapiens
tgtgtctgaagtgagcttccacccgaggagatgccaatactgcagcccagaaatccaatgcgtctatttcaatatggcgccctgaacaccgcaaataacctgcctccaagttccagagggtt

SEQ ID NO: 96367 - DNA, 122 bp, Homo sapiens
ctactcctccagatgctccaaatatcatgcacaaataagcagggccgcggcgggagtgggcgcagtgcgctgctgccaccgaggtgttgtgcatgatgtttggacgctagactagttacata

SEQ ID NO: 96368 - DNA, 122 bp, Homo sapiens
tgccctaggacgctggccttactcttaacagatccagtccacgaaagtaaatctaaaaagcgtgttccagcctgccacgctgtcatccctcgtgcacggatttcctcatagcatcttactgt

SEQ ID NO: 96369 - DNA, 122 bp, Homo sapiens
gcctgaggggaacaggacggcaagcccctggcctcctgcctgctcccagctgccctctggcggccactttctgaaagccggatatgtctctttgctgacccacccctgttctcaccccaggg

SEQ ID NO: 96370 - DNA, 122 bp, Homo sapiens
ctgggaaaaggagggggagaggagcgcaaacgccgctgacctgggaactcggaggaaactcgcgggcagcgagcttcaggtcttctgatacattgaaggaaagaaagaaagacagaaaaaga

SEQ ID NO: 96371 - DNA, 122 bp, Homo sapiens
cagcgctttcctcgctcccatatacgcacacacaccccatcttccagccagttcctaactcgcgccactccccaaatcggactcaaatccggagccccgcccactgccccgccccctcccgg

SEQ ID NO: 96372 - DNA, 122 bp, Homo sapiens
caagccgctcccttcccaccccgcccgcgcccgccgcccgccgcccgcctcccgggcacgcgctgcacgaacggcgcccggagctggtctaggcaaacacctgtcctgccttggctccgcga

SEQ ID NO: 96373 - DNA, 122 bp, Homo sapiens
tctgcattttaacaagaaccttggatgcatgttaagagttcgagaaacaccgttctattgcgcttaacccgacacacctaagccctcctcaatcttctccactgagctgggcgtccagcagc

SEQ ID NO: 96374 - DNA, 122 bp, Homo sapiens
tggtggcggtgcccgtaatcccagctactcaggaggctgaagcacgagaaccacttgaaccgggaggcagagagatcgcaccactaccctccagcctggacgacagaccaagactgtttcaa

SEQ ID NO: 96375 - DNA, 122 bp, Homo sapiens
ctggctcaggcacagccccaacccaaaaaatgctgtcaacagttgccggcacccccagagcgcgcccccagttctcttaggtgaaagggctgggaaatcgtctatgagcagccacttaatag

SEQ ID NO: 96376 - DNA, 122 bp, Homo sapiens
atattatgactctattatactggtgcagaaaaaggctcgggaagattcatgtttcttgtgcgacttgcccaaggtgacacacagttctaacaactggcctatcgcagggtgtgagatctgga

SEQ ID NO: 96377 - DNA, 122 bp, Homo sapiens
gaccatcccagcctgccatatgtgcctactatttgggggcatcattacagcgcatcaccacggaatcccagccttgctgggcgccggtgaagacgcggcttctgtacctgataatggcacgt

SEQ ID NO: 96378 - DNA, 122 bp, Homo sapiens
gcaaggtccagagcatcgagcgacaggtgacaatgacatgacacatattgatgttccgggcgaagaaagagtcaggagtccacggagttaatcaaaacaagaaagtcggtggggaaggaggc

SEQ ID NO: 96379 - DNA, 122 bp, Homo sapiens
atccggctgaagaagacctgttggactggatcttctcggggtaaagtgtcttcctattcccgttttcccagctccgtgccccggggtatctatagtgctaggcttctgagacacgtggaggc

SEQ ID NO: 96380 - DNA, 122 bp, Homo sapiens
gaagacataccagttcccactcaggaaggctgagaggtgaacgactaacgactttctaaccgcccagagtagaagggggcaggtccacactctgagagactcagccatgaccttattagact

SEQ ID NO: 96381 - DNA, 122 bp, Homo sapiens
gcctgggctcaggattccttgcactggttagaaaaggcactgtgtctcagtctttgccgccgcgccggcgagcgccgcccgggaggcagcggctggaggagcggacgggccccgcggggccg

SEQ ID NO: 96382 - DNA, 122 bp, Homo sapiens
cccagttcttcagggaaaagcacgtgggaagaaacagatctgttcctgatactgcaggagcgcccgttcccatctccaggacctcctggttggtcactgtgagtgtctgctgggcccatcct

SEQ ID NO: 96383 - DNA, 122 bp, Homo sapiens
aaaacagggacctatcttcattgccagcctgaagccggatgattccctctcattgtgtctcgagaacacaggctccagcgcggctgggcttgagagaccatcttctcgtgtctcctttaatt

SEQ ID NO: 96384 - DNA, 122 bp, Homo sapiens
ccaagccccaggtccccccaggcgcgtctctggtctccaaagtctcgttggtctttcagacgtctcccagacgttcgccccgccagccctcccgcccgcccgccgctccgccaccccgccgc

SEQ ID NO: 96385 - DNA, 122 bp, Homo sapiens
ggcctggggcactatggggggctgaggctggagttagccctccaggcccctggccttctgcgcctgcgtttcccctagagagaagtcagagcaaattccattccctttggagcagagccgct

SEQ ID NO: 96386 - DNA, 122 bp, Homo sapiens
tctccaccttggccttaacccactaaagtacagttgttttacttttacctccacacccaccgccatcatcacaaacacacacatacacgactgtgcacttcctgaaggcagaagcagcatca

SEQ ID NO: 96387 - DNA, 122 bp, Homo sapiens
actcacgtccatgtagttcttgagcacctcgggaatgggcccctcggtcacggctggcaccgcctgggagtactttgagacggggcctttggcaatcaggtcctccacagagcccccaacct

SEQ ID NO: 96388 - DNA, 122 bp, Homo sapiens
ctgcgccgccgccgccgctgaggcagccgccagggggcggagccaacgtgctcccggccacgccccgaacgcaactgatttgttttcttacaaactcgctactgtgtagcggcaccgcgttg

SEQ ID NO: 96389 - DNA, 122 bp, Homo sapiens
ttagtgcttttttgtgcagtactctaggaggactgcaagagaaataccactgaccatgttcgcaggaaatttacaatgaggttaggtaaactggatattaatgagacttgaaaggctgggca

SEQ ID NO: 96390 - DNA, 122 bp, Homo sapiens
gagccaccgcgcccggcctaaaaaaaggtctcttaaatactagggaacctggcctcttcacggtggaagtaaccactagattcaagatgggctttttttgttttgtcttgttttgttttgtt

SEQ ID NO: 96391 - DNA, 122 bp, Homo sapiens
ggagagcatggcatagctgcccagggcagggagggcatagtacagcaaaaggctcatgaccgtactcccacagaagctcctgcagccacacgctcagccgtccgcgggactgtgctgcctgc

SEQ ID NO: 96392 - DNA, 122 bp, Homo sapiens
ctgttgctatgcacagcgtgccaggacgggcaccacactgatgcctgacgggcaggagcccggcgtctccagacgctcccatctggggcacgcagcccaaccccaaccggccacggaaggca

SEQ ID NO: 96393 - DNA, 122 bp, Homo sapiens
gtatggtcagaggacaagctgagtggatgcatgcagagacctacaaggtacagcgacacacggagaaacccaagaagcacatgcctgaagcaagatgattctggtatattctggccacacag

SEQ ID NO: 96394 - DNA, 122 bp, Homo sapiens
agctccggggattttcctccctgcctctcacctggggccgtctgtggagcgatagctttgcggagggagaggcataagaaccacgttagattaataatagcttcaccctgtgtcccttcagc

SEQ ID NO: 96395 - DNA, 122 bp, Homo sapiens
ggccccgctccaggatgggactgccgagtgtggcccggagctggcccgggacagccagggcggcagggagggcccctggccgggagccgcagcgctcactcatttctcctgcgtctgtgtgc

SEQ ID NO: 96396 - DNA, 122 bp, Homo sapiens
ggaatggcccgcccaccatgctcctctgaaaccctccctcacttccagagacctgggccccgggcctcacccaagcccctgctgtggtcacccgggctgcaggcgtcctctcaggtgtctca

SEQ ID NO: 96397 - DNA, 122 bp, Homo sapiens
gaggcaagtcccccaacccaaaaattgtcgcactcctaggaacagagaggccattctgggcgggtctgtcgtgcattaggagagcctttctctgcctccctgaaaacacgccaagcacacac

SEQ ID NO: 96398 - DNA, 122 bp, Homo sapiens
ctacctgccacctcctccttgacgttggcccagctgcatccctgctccagatctgaaggacgcccggcatcctgggtgcagaaatggggattctggcgcccgtagacggcatcctggacctg

SEQ ID NO: 96399 - DNA, 122 bp, Homo sapiens
ctcgtggtgcgccgttttttaagccggtctgaaaagtgcaatattcgggtggcagtgacccgattttccaggtgcgttcgtcacccctttctttgactcggaaagggaactccctgacccct

SEQ ID NO: 96400 - DNA, 122 bp, Homo sapiens
tgagacagggcctgcagcatacacataactataattcagaatgtaatatatacacacacacgaaaatataatcagaaagtgatataatcttatatgcaaggttaaatacaaatgtctctcag

SEQ ID NO: 96401 - DNA, 122 bp, Homo sapiens
agatacatgagagaaatcgatacagaaaattgtgtccttgttgccgtggcaacagccacacgatgtacacatggagttacacaagaaaggtcacagatgaggtaagaaccagaattcatagc

SEQ ID NO: 96402 - DNA, 122 bp, Homo sapiens
ccaggtcccaggaactcaggcttcaggtgagaaggagcggtgtgtccaggcaccgctggccggcagccctgggctgaggcacagactcatttgtcaccttctggcggcggcagccctggccc

SEQ ID NO: 96403 - DNA, 122 bp, Homo sapiens
aggtagctccacacagggtaaacgctccctatgtcctgtgtcctctggtctcctggaatccgaatgagcgcctccctgctcgatccactcgagtagcaggcaggagcgtccatccgttctgc

SEQ ID NO: 96404 - DNA, 122 bp, Homo sapiens
agctgaagacgaggaggtagtggccacagctggggacaggctgacggagttccgaaagggcgcgcagtcactgcctgggccgtgcgctgcagctcgagagggccgattggagcgcagggagt

SEQ ID NO: 96405 - DNA, 122 bp, Homo sapiens
cgggatctggtggatgtagatatatgggtttatagttggggaaacttaattgccaggaggcgagactgagagtgtcacagggattggacttgacctcagacatcttgacgctcaaaccagga

SEQ ID NO: 96406 - DNA, 122 bp, Homo sapiens
ctttcggttgacactgtaaccaaacttctgcctccgggttttgcccttggccttgggcatcgcgctgaccaccgcaccagcagctcaaacacgctgcctctgtctctcagacctcgtgtaac

SEQ ID NO: 96407 - DNA, 122 bp, Homo sapiens
gcgaccaagaactgcctctccacgtccccacccccatgccccttggccagctaccactcacgcatctcctatgaaaaggttgggccaaacttcgtccacacggctgcaagaagacttccctg

SEQ ID NO: 96408 - DNA, 122 bp, Homo sapiens
ctgggaagcaggagtggggcagcttccagcctggggtcacctcctcctgcccggccttcccgcaggcctgaccaggtgtctgcggtggacagctactactacgatgatggctgcgagccctg

SEQ ID NO: 96409 - DNA, 122 bp, Homo sapiens
accagttcatcctgggagctgctgcgggttcttccgggaatccgcgccactgcgcctgcgcgctgagaaatcagcctctcacttccggactacaagcccctgaatgcaatgggcagcgaaac

SEQ ID NO: 96410 - DNA, 122 bp, Homo sapiens
aggtgcgttctcggcctggggaccgagtattttgtgcgctccggtaacgcaggaagacagcgccactgacactctagagaccagcgggcaccgcctggaggcgccttcaccacttggcggtt

SEQ ID NO: 96411 - DNA, 122 bp, Homo sapiens
tgcctcctgggatcctgtggctccacgagccaatgacggagtaagatgctctttgaatttcgtaatttcttcaaaccaaagactggagaatcagaatggtgtctgtgggccgtgaaggcagt

SEQ ID NO: 96412 - DNA, 122 bp, Homo sapiens
gtgcgggccgccttggggccgagttgcaacttcgcgacactccactggagtgcgatgagacgatgagatgttacctcctaacacttcgggaggtgggcagcatggcaattcctagtaacctc

SEQ ID NO: 96413 - DNA, 122 bp, Homo sapiens
aagaataaagagtgcttcttaagacagcgtatgtgggtatgtgggtggtggctgcagtggcggcagagctgcatgtcagcatgttgattcagtagaagtacacaagttttgccaaggcaaag

SEQ ID NO: 96414 - DNA, 122 bp, Homo sapiens
gctccgggaaaggaaaaccaaattgcttctgatgcttttgtaaccattgggctgaatccacgggggagccacggagttgcagctgacgcggtgccagatgcgtttgtgcatccacaggacct

SEQ ID NO: 96415 - DNA, 122 bp, Homo sapiens
ttcctaatatctaaagaaagagatgatgatattactcccaatactgtagaaggtatacaccgtcctgtgatattgttcctaataactagtgggtgagggcatgatattatttcaaatatcgc

SEQ ID NO: 96416 - DNA, 122 bp, Homo sapiens
aaatctgctcccctccaccaggatgcattcccaagcagtattcatttctcacattccactcgggatcagatcctccttgccagccagacatgagtgagcagtccccaactctaattttactg

SEQ ID NO: 96417 - DNA, 122 bp, Homo sapiens
gctaaacaccccccgcacctccctcccagggtcaccatcttgttaaatttgacctaaaaacggtaacagcctaggggtttcagggacagacagaaaatcttactcgggactgtgaggtccta

SEQ ID NO: 96418 - DNA, 122 bp, Homo sapiens
atgattctggtgcacagtgaaggttgagactcgctgggttagagggtgctaatggtttaacggtgattttcaacctgctgggctgcctctatactgttcacatgtgtaacatatgcccatca

SEQ ID NO: 96419 - DNA, 122 bp, Homo sapiens
tggtcctggatttttaagttacattttactcaataactgtagcttggggattgctttttgcggttttgctttttgcttaaagccagtccaaattgggtttctttcatttgcggtggaaagag

SEQ ID NO: 96420 - DNA, 122 bp, Homo sapiens
cccacctactagctctccgttccaagtcctaaatcactgggaatgtaatagacagacgaacgggagtgggcggagcgggcgccggatgtgacgtttccggaacctccgggtgtcatccgcgg

SEQ ID NO: 96421 - DNA, 122 bp, Homo sapiens
aaggcgctccgggggcgtggttacgtgggcgacgcacggagggggcgggtcagaaacaaccgggcggaggcgcaccccagggcgcatgcgtgctgtgcggcgcggtctcagggaaggtgggg

SEQ ID NO: 96422 - DNA, 122 bp, Homo sapiens
gagcccgagacactgacagacccacggagaacgtttccaaacaggattatagcttttaaccgggcctccctcacctaccctgtgattgcgcagcgggtcagatctggaccagtaagttctgg

SEQ ID NO: 96423 - DNA, 122 bp, Homo sapiens
caccaacttggggctgtcagtggagggcgagtgctggttctcaggggaggcgacgcccttcggggccaacgggcctcgagccgaggcagcagtgggaacgactcatcctttttccagccctg

SEQ ID NO: 96424 - DNA, 122 bp, Homo sapiens
gaatagttcccttgctggtcttgggtgatgttatcctttattaaccatctctatactccccgctggtcaagaccccttggtcgctattttcttattattttttgagatggagtcttgctctg

SEQ ID NO: 96425 - DNA, 122 bp, Homo sapiens
cagctgctcaaactcccaaacaatcttctccctctccatctgggttaggctctatgcagacgacagggaaaggcagtaaagagaaaaacggctcatttctagggccttcatagttctcctgt

SEQ ID NO: 96426 - DNA, 122 bp, Homo sapiens
gcttcctggcactggcgctatgctcgggctgtgcatcctccctgtgcggactgcccccgccggcgctgctgaggccccggagcacgctataattgatcttgctggagatcttcttctgctcc

SEQ ID NO: 96427 - DNA, 122 bp, Homo sapiens
cctgaagactcagagttcaaaggatttggaaatgacaatctttgggggcagccatctatccgtaacctgtctatcaggcttctaggttttccaaatcaggatcctgaccttggcgtaacaaa

SEQ ID NO: 96428 - DNA, 122 bp, Homo sapiens
tacatgttgggcgaacttacataaaacggagataatgcctgcctttcctaatttggaaagcgtccaaattaggagtgtcaaatggggagtgtcaaaatggatcatggtgtaataacaagatg

SEQ ID NO: 96429 - DNA, 122 bp, Homo sapiens
atcttacttgttacaaatacagcatttcacaatgaaagcctgtgcttcagttcagtaatacgataagacatggcttgtaaaaatgagaattgagtttaactatgcttgtgttttatttttca

SEQ ID NO: 96430 - DNA, 122 bp, Homo sapiens
gggccatgattcacaaggccctgggaggtcactttaaagagggctgctcaactgcaaggacgctgtaagcaggaagagaagccacagcgcttcagaaaagagtgggacagggacaagcatat

SEQ ID NO: 96431 - DNA, 122 bp, Homo sapiens
ccagccctgggccagggcctctgcgcgtgcgcgaccccgccccaccccaggccgcgcctgcgcacaaggggagggctccgctactctggccctcagggttgtgtagtttccggggccacggc

SEQ ID NO: 96432 - DNA, 122 bp, Homo sapiens
acctcgtgatccacccgcctcggcctcccaaagtgctgggattacaggcgtgagccaccgcgcccggcccagccaagaattcttaagaaaatatcctagtgagagcctttctttttaatcct

SEQ ID NO: 96433 - DNA, 122 bp, Homo sapiens
atatataacctaacactctgaagctccttcctggtgatctcttctgccatctgtgaagcccgcaatttctcttcatactgatccttttcagattgcctccagacatcatgttccactttcat

SEQ ID NO: 96434 - DNA, 122 bp, Homo sapiens
cgagaccagcctggacgcctgtgacccttacctgattgccatgtcttccatttacttggccggcaaagtggaagagcagcacctgcagactcgtgacatcatcaatgtgtccaacaggtact

SEQ ID NO: 96435 - DNA, 122 bp, Homo sapiens
cagtgaccagcagggaggacccatgcctggggcacccccacagccatggatgggggtctccggggacctgctgcagcacagtggatatggcacccctgtcacagatggagggaagggaggaa

SEQ ID NO: 96436 - DNA, 122 bp, Homo sapiens
cgccaaaaccaagtacccaccccggcaactggaagacctagctgtcctccatcccgcctccgcagtcgataatctccaggatccaagcaaagtgcctgtccacgttgtcaccagatccacaa

SEQ ID NO: 96437 - DNA, 122 bp, Homo sapiens
cgccggggcaggcgcagagctggcaagcacgtggtggggcccctgaggcgtgcatagggtcgcgcgcctgggagcttgtcgctggcgcggtccgggagggaggttcggcggcgggaggcagc

SEQ ID NO: 96438 - DNA, 122 bp, Homo sapiens
gacaggggatctttagagaggcagcctctgctgcttggcagagccctggtggaggcctcccggggccgggcctgcctgggatggctgcacttgggtccccagctggagcagggcaacggggt

SEQ ID NO: 96439 - DNA, 122 bp, Homo sapiens
ggagaactagtaactacaacctacacaactgtagaacaataaacagaaaccagcagacagcggagcataataaatcctcagcaatcctcatattccttgcccatgcatcccctctatttggt

SEQ ID NO: 96440 - DNA, 122 bp, Homo sapiens
aagaagccctccgtgaggtgtggaagcctgattaaagcggggctccctgcccgtgaggcccggtgcaggaccgatgtacaaaacagcagcaagtgcctctcttctcagagggctgctgtctt

SEQ ID NO: 96441 - DNA, 122 bp, Homo sapiens
cacagaatggcaaaggccctctgtgatcctctagcggcagtgtctccccagcttgcccgtcggccctccatggtgctgcagcagtggctttagccagttgggaaacccagagatccaaatta

SEQ ID NO: 96442 - DNA, 122 bp, Homo sapiens
acctaacacaatatgttagtagttaattgtgcgtttgtatcacccatacaagctctgtgacgacaaaatccattctgtgttttgtttaccattgtacccacagttcctgacagtcctgagct

SEQ ID NO: 96443 - DNA, 122 bp, Homo sapiens
gaggaatcctctgagtctctgctccccaaagaaattaaagacaattcatttctgtgcccacggcccttatggcctccacctgcacttctgctccccaccccccagaattcctcttaaaccca

SEQ ID NO: 96444 - DNA, 122 bp, Homo sapiens
ctctgcggggacagaggtctcaggaaagtagcctttatttatgtggcaccgatcggaacccgcggccggccaggcggacctggacggagcgtccctgctcggaacctggcgcggggcgccgc

SEQ ID NO: 96445 - DNA, 122 bp, Homo sapiens
gctcttgattgcagcacaagctggagcaagaaggccgccctgcgcaacctcagccaagaacgcactccggtgactcagaattgtcgccgctccgtgcaagtaagtgtttggggattacagct

SEQ ID NO: 96446 - DNA, 122 bp, Homo sapiens
atgctgggcgcaggggctggcgtgggctacgcgctcctcgttatcgtgaccccgggagagcggcggaagcaggaaatgctaaaggtagaagcaactggtagtcccgaggaagggtgggcggg

SEQ ID NO: 96447 - DNA, 122 bp, Homo sapiens
ctttatccaaacagccgccgccgcctcagcccattctgtggtcccgctggtctggctctgcgtagttccagtggagccaccgaacactgatactactttgttgctcagccccgcaaggaacc

SEQ ID NO: 96448 - DNA, 122 bp, Homo sapiens
gaacctcttttatagccttgcacacactgttttgtcatttgctcccagcacccagcacttcgggcacatgaagacaggccccatctttcccaggcaaccccaaatcccagcctgacgtagag

SEQ ID NO: 96449 - DNA, 122 bp, Homo sapiens
agagaccctgaaacacgcgccacctatctttgtggggagggataattgaagcgccctgagcgtgagcatcatgtgaaaacgtgatcgccaagtttctctctgggaaaggatctgggatagat

SEQ ID NO: 96450 - DNA, 122 bp, Homo sapiens
tgtgtgagtgtgtgtgtgtgtgctgtgcgtgcgcgcccgcggagagaggggcgggggaggcggatgaggaggatgagatcatagtttcaggatcctcaggaaaccctggtactggcagcagc

SEQ ID NO: 96451 - DNA, 122 bp, Homo sapiens
gtgggggttcatcagtggttacccaggctcgtctctgagccaggttgctaggctggccagcgtgtgacctccaaaatccacctcagacaacagggtcctggtttctggggatgggaacagtg

SEQ ID NO: 96452 - DNA, 122 bp, Homo sapiens
cgatctggcagggctctgggtgaggaggccgcgtctttatttggggtcctcgggcagccacgttgcagctctgggggaagactgcttaaggaacccgctctgaactgcgcgctggtgtcctc

SEQ ID NO: 96453 - DNA, 122 bp, Homo sapiens
gggtgaagtcagaggatgatgtgttcgtcattgatatggcccacgagcgtcccagggcaacgggaagacacaaggaccaggaaggaggcaagagaacacggtcaagatgggaaaggtctgca

SEQ ID NO: 96454 - DNA, 122 bp, Homo sapiens
catcagtgtcttaattaagatctatatttagttcttaattaaaggggagagaaaaacccacgatgttgcagagctgagatttggaatggagataaatcatctttctgccagtatactgggca

SEQ ID NO: 96455 - DNA, 122 bp, Homo sapiens
tgctgtcatatccgacatggccttccagaatctcacgagcttggagcgtcttattgtggacgggaacctcctgaccaacaagggtatcgccgagggcaccttcagccatctcaccaagctca

SEQ ID NO: 96456 - DNA, 122 bp, Homo sapiens
tcatgaaaatccgatggggcagggaggccttggcacttaatcccttctcgactacctttgcgaatggttctcatttgtttttctgtttgtttgtttttttgtttttaaataccccatgcaaa

SEQ ID NO: 96457 - DNA, 122 bp, Homo sapiens
ccctgaagccggggacaaattccgagcgccggatcaggagcgcacgactgaaaggtaagtcgccgcgagtccagtcagacgtcgacgccgtctccttctgcaacaatctgggagaccagcgt

SEQ ID NO: 96458 - DNA, 122 bp, Homo sapiens
cgagatgagtcccggagggagccggcaggaagccagctgagcagggtggtgtgttcccgccgggctaacaaaggccgccgggaggtgggggcttctccagccgctccagcggcgggcgggcg

SEQ ID NO: 96459 - DNA, 122 bp, Homo sapiens
gccgctggcccgggtgctaagtccctcactgcccggggccggcacggccggccagccgctcggagtgcaggccagcccaatccatgcccacccggaactcgcgttggcccgcaagcactctg

SEQ ID NO: 96460 - DNA, 122 bp, Homo sapiens
agattaaccctgacagcgctggatggtggctctccaccgcgatctggaactgctcaggtccgtattgaagtggtggacatcaatgataacgctcctgagtttgagcagcccatctacaaagt

SEQ ID NO: 96461 - DNA, 122 bp, Homo sapiens
caaagatacatgggggattcaacctttctacttaaccttatctcacctcactccctgcagcgaactctcttcgccgctgcactgagcttctcactgtctccgctctccaaaatgcctaacac

SEQ ID NO: 96462 - DNA, 122 bp, Homo sapiens
gatcgcgaggtcacgtgatgagcatcctgctgcccaacatggcggagttcgacaccatctcggaactggaggaggaggaggaagaagaagcggcaacgtcgtcgtcgtcgccgtcgtcgtcg

SEQ ID NO: 96463 - DNA, 122 bp, Homo sapiens
cagccagacagatctgccccaagcttgtctctgccatttgctagctataaggtccttaagcgacattcaccacttaccaccacccacccctacctcctcatcagtgaagggaggataataat

SEQ ID NO: 96464 - DNA, 122 bp, Homo sapiens
agaggcagtaggatctgtgtaaaacttactgtggccacataagatgatgtcttctctttccgccttctcacttacgcaaacatattgcctcttataaaagacttgttatatgtggccaccca

SEQ ID NO: 96465 - DNA, 122 bp, Homo sapiens
gagcagagcgcgggacccgcaccgtggtcctctgattagggttgggtcgtggagagccggcgacgtggaaacgctccggattcaggaacggcgcccaccccattgccgctcggccgcgtccg

SEQ ID NO: 96466 - DNA, 122 bp, Homo sapiens
gcccttctcgtgccccctcgcgttccggggccgcctgttcctgcgcatcccaaacgccagcgctgcccacccccgctcagtcccaagcaccccgcagaagcaggcaggtgcccacggttact

SEQ ID NO: 96467 - DNA, 122 bp, Homo sapiens
acctcgtgatccgcccgcctcggcctcccaaagtgctgggattacaggcgtgagccactgcgcccggccgcccagctaatttttttgacttttagtatacatgaggccttgctatgttgtcc

SEQ ID NO: 96468 - DNA, 122 bp, Homo sapiens
tacttaaaattttggctactacatttttttcaggctttctgaaacctacatgtgaatcatcggaggatatttgctgaatgaattcagaataggcaacctaatccacttggaaagcactaggc

SEQ ID NO: 96469 - DNA, 122 bp, Homo sapiens
gggagcaggatgagaaagctgagacggcgcagccacggcccggtgccttcacgcgcacagcgacacagccccagccagcggggcccacgctaaggcggaatcccacagaagcctacagagcg

SEQ ID NO: 96470 - DNA, 122 bp, Homo sapiens
aggcccacgtccgagcggagcccgaggcctgggcagcgccatcggggtgaggggcacagccgggctccacgggaacccatcttgctcagcagccccattaaaaggcaagaagcagcgatgtg

SEQ ID NO: 96471 - DNA, 122 bp, Homo sapiens
tgctcatttagtcacaggccacttctggatgcagagtgggccaaacctacccaaaccacccggatgctgcaccacaggggcgagctggaatggatattgggggagccctctacagtgtccac

SEQ ID NO: 96472 - DNA, 122 bp, Homo sapiens
ctgtgccaaggaaagtcagggatcctaggttcgaatcctgtctctgttcgcaattcgctccgcaacctcaaacaaacgacctcagtttcatctatgaaaagctggtaaccatcgtcagttgc

SEQ ID NO: 96473 - DNA, 122 bp, Homo sapiens
aatagtatttaaagtatggctaactttcatgtttccaaccaatattacctggagaatcttcggtatctttgggcattccacagatggtgaagctgggagtagggatattccctagcagcctc

SEQ ID NO: 96474 - DNA, 122 bp, Homo sapiens
tgaccatcgtgttcgctttgaagggatcttagaatgctggtgcatgttcaggcgacgctccgtgagcgtttcattttcatcagatgaacgcacggccggcaaacaacccgtttctttcccca

SEQ ID NO: 96475 - DNA, 122 bp, Homo sapiens
gcagcccggcgctggagtcgaccgctgggaccgacaccagccccataggtgtggctgggacgatgaatgaggtgaaagaggctgcccggactggaatttgtatacaatttaagtatctgagt

SEQ ID NO: 96476 - DNA, 122 bp, Homo sapiens
gatcacacttctctgcctgtcatctttgttgaattgaaccaaactgacgctcttttctcccgtacttcacaggaacaaagggtcaactccactaaccagaagaaatcaaaagtccatagtac

SEQ ID NO: 96477 - DNA, 122 bp, Homo sapiens
gaaaacaaaatattgcgaactagaaaaaagacttagcttccggtcctgtgggatccgccccgcggtggcgccctccagccgtaagctccacgcgttcaacaagggcccctcctacaggctct

SEQ ID NO: 96478 - DNA, 122 bp, Homo sapiens
ctggtctcagtgtcaggaatagatggtctgcaagggtgagcccgacagagaaaagatagccgggtaagagtagcctcagacaagggagccatgtatagcatttgcatacttttcctgcaaag

SEQ ID NO: 96479 - DNA, 122 bp, Homo sapiens
ttggagggggaggatgccgacgatgccgaccgcgcatcagatctcgccgggaggagggcgcgggcgctccacttgttgcaaagaacgccgggttcctctgggccattgggctgccgctccgg

SEQ ID NO: 96480 - DNA, 122 bp, Homo sapiens
atagttatgtcacagttctatttgcacggtgtaaaaaattccatgtttcattgtcttcaacgagtttatgctttggagtgaggatgcaataagggacacgaatctgttccctcacagcctca

SEQ ID NO: 96481 - DNA, 122 bp, Homo sapiens
gcgagcctccaaggaggtaaacgtcacttggccaagccagtttttgtagccaaccttcagcggtgagggctcagtggagctgagctttaagcctccgaggccgcgcctcctgcgcttcgtta

SEQ ID NO: 96482 - DNA, 122 bp, Homo sapiens
tgcctttcctcctctttctttcctcacctctccaaggttacacctctccaataaagcagccgcactgtaatccttgcctcagcctctgtgtggaggacggggctaggaaaactagctacatg

SEQ ID NO: 96483 - DNA, 122 bp, Homo sapiens
ctactctccttcctacacctgtgacacctcaggcaagttgcttcatctccctgagcctcccgtgaaatgcagaagatcccagccacccactgttattgaaggatgggatcgacccattaggg

SEQ ID NO: 96484 - DNA, 122 bp, Homo sapiens
agtctgcagatgtgtaagaggttgctggtttcttttagcttcacaggccttcacaggggccgagcggggtgtattagcaatggtgttaagcggggtgtactagcaatgatgtaccactctac

SEQ ID NO: 96485 - DNA, 122 bp, Homo sapiens
agcgcagctgcaaagttacaaggttaatacagaaacatggtttcccagggatgtggaacacgtagcatagataaatgtaaaagactgatcaactgcctttgttctcgctcttgtaagtacgc

SEQ ID NO: 96486 - DNA, 122 bp, Homo sapiens
cagtttagcagacttatagtaacttgattatcacttgctcgctcaagtgcacggggcgggcggccgaaccaggcgggcaggcgcacgactctgctcagccaaggcgctggtagaggacggac

SEQ ID NO: 96487 - DNA, 122 bp, Homo sapiens
tctccctactgcctgcgggccgccgctaccctaagtactccggggcgcacgtggcccgcgcggcatcccagctccccgggcggacccaggggctgcctctccacaacagttccgctcccttc

SEQ ID NO: 96488 - DNA, 122 bp, Homo sapiens
ttgcaagagggaggcctggtgggactctgaaacctggcctgaacccctcatctcagtggccgaagccccccaggcctgaagctgtggtgacgctctggaccaccatgtgggtcctggcattg

SEQ ID NO: 96489 - DNA, 122 bp, Homo sapiens
tccaccgtgctcggccccagcgcccacggctgaagagagaagctgccgactggcccccaccgagccggggtcggcgttatgatgcggcccttcagggcacgcttgtccccactttctatgca

SEQ ID NO: 96490 - DNA, 122 bp, Homo sapiens
ccccgcacacacacacacctcacagccctgtttacgacatcccctgggctggcaggtgggcggggctgcagcagagcgggggtgagagagggagacgcagcctcccccccagctgttaacct

SEQ ID NO: 96491 - DNA, 122 bp, Homo sapiens
ttttgtcacggtgctgctagcactcaagctgagacgctggcacaagtcacgcctgcttcacgctgaaggcagcaggttggcaggtgtgcctgcctcgcactttgtgggcgtggacggggttc

SEQ ID NO: 96492 - DNA, 122 bp, Homo sapiens
ttctaccactgacccccagtggcaatgaggaaggtgacatccactccctgagctccagcacgggtccgaagaggacctcacatttctggtgggtgatgatgatgatagtgaccaccagccaa

SEQ ID NO: 96493 - DNA, 122 bp, Homo sapiens
gcgcacagtcagaatgcagtgtggccagagttacctacagagtatttgaggcgcacagaacggcatcccaatccggaaagtcaggtggtcaagattttaggagcaaatattttaggagctgg

SEQ ID NO: 96494 - DNA, 122 bp, Homo sapiens
tcagaggaaagggttgagagtttgcatttttaacaagccctccaggtcattcttataatgcggaaagtctgggaaaccctggtctagaccatggctacaccatatgggccaggaataggagg

SEQ ID NO: 96495 - DNA, 122 bp, Homo sapiens
gtggtggctctgacgccccgcttgtgagtctgcagtcggacatctggaaagtaagcggcacgtccgcgtgatttccagtgcttcatcttcttccaccctaccttccctccgaggctgggttc

SEQ ID NO: 96496 - DNA, 122 bp, Homo sapiens
ataggcagacagggctcaaacattcaaaagagctgcagagtaaactcaactccgggaaagcgctgcactgactggcagattccacacgagacactggcctcccacgtgtctttcaggaaaca

SEQ ID NO: 96497 - DNA, 122 bp, Homo sapiens
cgcccggggcgcgagctctcgaggtcgcagtgacctcagcacctgcttggaggaaaacggcgcgggaaccccgcttccttcccctcagctggagccagacctcaaacaaaaccccaatcgat

SEQ ID NO: 96498 - DNA, 122 bp, Homo sapiens
gctggcaaatcactcatacagcagcagcaaaggtgacaccagctgtgatgaagtggagtccgtatcacaggtcccactcacaggcatcatcctaagtgcaaggtcacatggtattttgagcc

SEQ ID NO: 96499 - DNA, 122 bp, Homo sapiens
aattactgtgtttcttttcttccttaaaagttaaggagaggccctttcatagttactttacgtagtggttgactgtcttcaatgctgaaaggtcctttatgtcactttgtctctcttgtatt

SEQ ID NO: 96500 - DNA, 122 bp, Homo sapiens
gggggcgcgaacccagcacccaagagtcctggggacctcacgcatgcgcggcaggggcggcgtgtggggggtcatgggccaagactcctgctctacagcggcgaattttttccttcccccag

SEQ ID NO: 96501 - DNA, 122 bp, Homo sapiens
ggagccgctgatccacgcagagtatttgcgctcgggaggagcaatgacgttgatcttcatcgtgccaggcgccagggcggtgatctctttctgcaccctgtgggtgatgctggggtgcatgc

SEQ ID NO: 96502 - DNA, 122 bp, Homo sapiens
aaggcactgttgtcttaccgaagtgtgttatattttggcttctacgttaagtccaaaggccggcagatatatacgtatcgcgcgtctgtcctggggctcagtaccctacagccttgcaaccg

SEQ ID NO: 96503 - DNA, 122 bp, Homo sapiens
gtacagcagttctccgtggcctcggctggttcagaaacgagggtgctgggaactctgggccggggcaggacctgcagtcctccggcttcgcgctgtttccactgccggactaggagcccctc

SEQ ID NO: 96504 - DNA, 122 bp, Homo sapiens
aggaggggctgggaggcccgtggggcagctggactttgggtttttcccaggactgttagacgaattccaggaagttagctaagcccccaacttccttttttctaagaagcacagtaagtgtt

SEQ ID NO: 96505 - DNA, 122 bp, Homo sapiens
cacatgggacacattggcacacggtaacaacaacttctatttaggttttgatacggaaggcggtgcggcggagcgaatgcagggcaaccacgcaacagcccctgagcaaggccccgatgtta

SEQ ID NO: 96506 - DNA, 122 bp, Homo sapiens
actccagaaattgcctatgtccccacagctgatgcctgttactgctggggctgagctcagcgatccagcccacccggctaatccaggactttttttttcactgcgagaggctaagtggatcc

SEQ ID NO: 96507 - DNA, 122 bp, Homo sapiens
tcgcctgccccccggccgctgcttcctcttagctgaatggggagcgacccgccccgggcgcggccttcggggctgaagactgaggtgcagcctcacccccggcctggcagcggcttggaaga

SEQ ID NO: 96508 - DNA, 122 bp, Homo sapiens
acgcccggtcctccctcgcccgcccgtcgcccgggatacctgacagggggttgcaagtgtcgctgctcttctcgcagtcctccatcaggggctccccacccggcggctctccggggggcctg

SEQ ID NO: 96509 - DNA, 122 bp, Homo sapiens
tgcaaagggccaagtgaagacacagagcccccatgaaagcggcctcactgcctgagctatcgaggggcccaggaagcctcacagagcagagaagctcccatctccctgcaggcccaagggag

SEQ ID NO: 96510 - DNA, 122 bp, Homo sapiens
caactcgggataccttaagcataaacagtatttttgtaaggagacaggcttctgacgacgcgaggctcatagccaggcctgcgctgggtggagcctccccttctcactcctgtccctgttgg

SEQ ID NO: 96511 - DNA, 122 bp, Homo sapiens
cgtggactagccataaaactctgcgctggatttcctccgagtttgggacttttaaattctcgaatagttacgtcagcagggccgagcgcacttcggggatccggcgcaacacgtgacccgcc

SEQ ID NO: 96512 - DNA, 122 bp, Homo sapiens
cgaggagaggacgggaggaggctgcatcctgccctggtgcgtcaggaagggccgagcgagcgggaaggaaagcaccaccccccacccccgccgcggccacacctgggttctccaggcgggca

SEQ ID NO: 96513 - DNA, 122 bp, Homo sapiens
cgagccctcgatgagggcgggcggcgctgcggccgggggcccgctggcctccgagccgggcggtccggtgctgcccacctcgctgctcacctcgctgcgcagggagcctcgcttgctgccca

SEQ ID NO: 96514 - DNA, 122 bp, Homo sapiens
atgcgcttctccaactggcaaggcatccacagctcggccgggtgccagctgggaggggcgcggggcagctccacatcctcgcagatgcccggcctgacaggcccccaggctgctggctggtc

SEQ ID NO: 96515 - DNA, 122 bp, Homo sapiens
tgcagacactgctgactcactgggcctgaaagatccgtgaagggacatcaccaaaaacggcgccttagaaggcattcccacagcgaagcagccaaggacgtgaggctctgcttctatttctg

SEQ ID NO: 96516 - DNA, 122 bp, Homo sapiens
gatagggccgggatgcagccttggacggggctgggcccaaatgtgggctctggagggagccgggctggggctggtgctggtgctccctgcgccgcccccgggctgcgtcacctgcgccccag

SEQ ID NO: 96517 - DNA, 122 bp, Homo sapiens
gtaacttctgaggcacttcttccaggcgagccagcccttcacacaaatcacaggtgctgacgggacagacccaagtgtattattagataaaaagagctctgtccaccgggcgtggtggctca

SEQ ID NO: 96518 - DNA, 122 bp, Homo sapiens
cactgcaccctgttccctggagctttagtgcgcacccacgggcacacatgtatcagaacgcgcgctgtgcagagtgaagtcagcttgattaggtggcacggccaacacctctctacccgcct

SEQ ID NO: 96519 - DNA, 122 bp, Homo sapiens
gacttgtaggccgggagcccgggcgcctccgggctgaagcccgtggccacgccaccgacgcggctccagcctgcccaggcaacgcgacggctggggacagccttggaaaaactgaaggggaa

SEQ ID NO: 96520 - DNA, 122 bp, Homo sapiens
tagaatgagctgctaaattggaggcacatatttacagagttctaagcaacttgatattttcgagagtggtaatattccttggcaatgaactgccttgatagaattggaaggtatgaagaagg

SEQ ID NO: 96521 - DNA, 122 bp, Homo sapiens
ctacactcctcgggtgggctgatgtctgaactggcctctttctgtctctccccaggcctgcgagggaccttgaagcctcagaagtcaggtgagtgggggacccctggctctgccccacacct

SEQ ID NO: 96522 - DNA, 122 bp, Homo sapiens
actcactccctctatcacctcctatgggaaaagtgctcttttgcccccattcatcttgggcgtggggcatgattctgtactggtagaagaaacagtgtctaagttctgagcctaggatttga

SEQ ID NO: 96523 - DNA, 122 bp, Homo sapiens
ctggacaagtcagagtccagtctcctgcggactccttgcagggctaagtttaaagctggccgggaggaggctggctttgtttctgtgcctccctggcccagaggtgggccgggcagagaaca

SEQ ID NO: 96524 - DNA, 122 bp, Homo sapiens
ctggctgcatgcttttcgattagtatgagttcacagatgcaccacacagtagacagctgccgggaattaccaacttatctaacaaatgttgttaggaaagcatacgagccccataaaacacc

SEQ ID NO: 96525 - DNA, 122 bp, Homo sapiens
gccgcaaacctgtgtcgttgcaacaacctgcaaccttgcctgcctctcccttttatttcacgtgaaactccactacaaggagtccccaaatccttgcctcaggccacccctcgttccaaaaa

SEQ ID NO: 96526 - DNA, 122 bp, Homo sapiens
taggcttagctcttctcttctctctaaagggtataaaactactaaagccctaccaagaggcgacaagcctctctggaattaacagatatgctaatgccttgaaaatgcaactctcgggtatc

SEQ ID NO: 96527 - DNA, 122 bp, Homo sapiens
agcggggctgcggagccaccggggcgccatgccggcggtcaagaaggagttcccgggccgcgaggacctggccctggctctggccacgttccacccgaccctggccgcgctgccgctgccgc

SEQ ID NO: 96528 - DNA, 122 bp, Homo sapiens
cctccaccctgcccactccaaggctggaggtcctgggctgcttgggctgtatttccgtatcgtcttctcaggcataaacccaggaaaatatctgaattcagctgggggtgagggaaggagaa

SEQ ID NO: 96529 - DNA, 122 bp, Homo sapiens
aggtttgctgactcgtgaaaggcccctgccttgtgtttctctgtttgcaagactacctgccgcccattgtgggctgaccaggaagccttcgctttgtcttggccaattgacacagctgcaca

SEQ ID NO: 96530 - DNA, 122 bp, Homo sapiens
aggaaggggttttttgtgttccaacattgaggtcctggagttagctcttgcctcaaaacccggtttcttttttgccagcccaccagcccaggatgggctcacgccgaggctgacgaaaccca

SEQ ID NO: 96531 - DNA, 122 bp, Homo sapiens
cttcagtggacctggcttgagcagctgcccaagcaggacacaatctccctccaagggagccgatgtgggccctgctcatgggaggggcagagggaccccatgaatgccccagcagggcgagg

SEQ ID NO: 96532 - DNA, 122 bp, Homo sapiens
taactgggaggcttgggattttttccatgtcaagctgacctgagctgttttttacctgcacggatctgagtttccatggaaaccccgccgtgaaatgccttcttgttgctagagaaaccgtg

SEQ ID NO: 96533 - DNA, 122 bp, Homo sapiens
aaaaaaaacaacaacaagttaagaccttacaatttggctaatgacaaagttggacatctccgtaagaatcacttctgctttcaggaggaagagaaaggctggcttcttgtgattcatcctta

SEQ ID NO: 96534 - DNA, 122 bp, Homo sapiens
cgctcccggctctgtgcccttccgagagtctacagccacccgtttcagcaggtggcaattcgggcatctaggctcacgagagcacataaattccagaaaattttattttcccctaattaaag

SEQ ID NO: 96535 - DNA, 122 bp, Homo sapiens
cgttcttctttctcaagagcgccctctgctggtcagttctcagaaggcgccacatcatcgcgtctttcgtctgcagatgctctttgcagccagaagccgaaggtcattttgatctagagaag

SEQ ID NO: 96536 - DNA, 122 bp, Homo sapiens
ctcttcaggactgtttctaactgcccgtatttgcatattcccactgctctttctgcataacgaggagcaatcagaagtgctctctccctccccaaggatccagtaccagtggagggggtatg

SEQ ID NO: 96537 - DNA, 122 bp, Homo sapiens
gcccgcaaagctggcggaggacctagttccagggacgggatctagggctcctggtttgcccggtctggacaccctggcaccctgctcctctaggtaccaaacgccttgatgctgagacagag

SEQ ID NO: 96538 - DNA, 122 bp, Homo sapiens
ccttcagcagtgatctcagtcatggtggtcgtcaaaagtaaaagtcagttgaaaagttcccgtcaagttgcactttgcagagtatttggggatttgagaactctggtggagggttctgtgtc

SEQ ID NO: 96539 - DNA, 122 bp, Homo sapiens
ctcaggcccgggcctaattgagcccgggtcacctgggaataggttcaaaggcatcaaagccgtaaaaaccacctccaggcccagagccagagcggcctggcgaacaaagagccccccaacca

SEQ ID NO: 96540 - DNA, 122 bp, Homo sapiens
gcggggcctgccacggccgtctccggggacagtcggtggaaatgtggggcgcggggagggcgcggggagggcgcgggcccgcccgctccaaccatcccggccgttgcgcaactcagggcgtt

SEQ ID NO: 96541 - DNA, 122 bp, Homo sapiens
acctacttcgttttttctaactctgcaggaaggagtgaaaccagcattacagggctaagacgtactaattctacactgatgcagtaactggtaggagacataatgttttaagacatcatagg

SEQ ID NO: 96542 - DNA, 122 bp, Homo sapiens
ttgggccgccactgtaggaaaagtaacttcagctgcagccccaaagcgagtgagccgagccggagccatggagggccagagcgtggaggagctgctcgcaaaggcagagcaggacgaggcag

SEQ ID NO: 96543 - DNA, 122 bp, Homo sapiens
gctcaacccgcccgcgcgggcacacccgggctttgacccctttgtgatcgaggacacggacgggtttctctccaacaaaagggggccataaattacaaacggaagcagagtgtgtagggaag

SEQ ID NO: 96544 - DNA, 122 bp, Homo sapiens
agtagccccagaaatgctctagacgaagtaagttctgtagtgcatctctcaacaatatgccgccacccatagccctggctgaggagagccaccaaacctggtactatgcgaccatggtcctt

SEQ ID NO: 96545 - DNA, 122 bp, Homo sapiens
agccgcaaagcctggaatccaggagcagcagcctcagccttcccagtgcgcctgtggttgcgggcaatggggcacagccctggctccccttggactctcagtaggcacacgaagaacggcct

SEQ ID NO: 96546 - DNA, 122 bp, Homo sapiens
caaatctttcatactagagagatcagcaatgttgctttcttgccctcgtcctcatttcagcgaaatgtaataattctcccattaaaaaaaatcagatattcaaaatattgatgtaaattgta

SEQ ID NO: 96547 - DNA, 122 bp, Homo sapiens
cggcagggcagggccaagatctcaaatcgaatgacatggaaggagctagaatacaaatcccgaagagcctgcgtccccggcttgctaaggtctggcaggcccctctgtggggcggacgtggc

SEQ ID NO: 96548 - DNA, 122 bp, Homo sapiens
cagatgctgaggaaaatcttgccgatcacgctgagttaatttcggaaatgcagaggtacacgctttctcaagcctagccgattagaaggggctgccgggcttccaccacacctcatcgaggc

SEQ ID NO: 96549 - DNA, 122 bp, Homo sapiens
tcctcttactcctgagagtaacccaggccaacccatggggaggcagatggatgcctgtcccggcacaggcatcctcagagtctctctgtccccaggttctccactgcagcctgctccacagc

SEQ ID NO: 96550 - DNA, 122 bp, Homo sapiens
aaccaggcctggatgcaccagggttgcatctgagaggaagcaccctggtctcctctgcctcgaaaagcatagtgaggggggagcccaaccaagttggaggatgctgagctgtgcagtcgggc

SEQ ID NO: 96551 - DNA, 122 bp, Homo sapiens
ctcctgcccagggggtgctggttcctgagctgtaatgcactttaaatggagtttgtccttcgttttaatctatatctgccctgccagttttacagaagagctgtaaaagtgaacatctggct

SEQ ID NO: 96552 - DNA, 122 bp, Homo sapiens
gtcctaagcactttgcaggtaaatacgtgtaatcctcacagcaacactgggagaaatacccgtctcacagctgaagaaacgaagacgcagaaagggtagacagaagtaattttctaattacg

SEQ ID NO: 96553 - DNA, 122 bp, Homo sapiens
cactgccttaccttcacttaaaccacacacacaaggtgctcagacatgaaatgtacatggcgtaccgtacacagagggacttgagccagttacctttgctgtcactttctctcttataaatt

SEQ ID NO: 96554 - DNA, 122 bp, Homo sapiens
acaggcacctccaggcctacaagggaaagaggggccttccctggctccccaagagtgcagcgatgcctgggtcagcagccccagttggggcagctgaaactgcaccaggagtgggggctggc

SEQ ID NO: 96555 - DNA, 122 bp, Homo sapiens
tctgctcaccttttgaggtctctgcaggcagaccagatgatgttcggctggggcatgccccggccacgacagcggactgtctgttccccactgtcagggtggctctcacttagctccagcac

SEQ ID NO: 96556 - DNA, 122 bp, Homo sapiens
ccgttagactgggtagcatttgtcaagcgccgagcaaacagtggatgaagtgtcctcagccggcgtcagctgttctgatccgcagaacacataactcctggcactcctttccaagcatccgg

SEQ ID NO: 96557 - DNA, 122 bp, Homo sapiens
cagggcctacaccgcggataaagaccaggaggtagttctcataggccacaaaagcctggtcgtccaaggcaagagaataggctttaaagtccctggctcggttaaaaagctggttgcgtaga

SEQ ID NO: 96558 - DNA, 122 bp, Homo sapiens
cggccgaggcttaatggacgaacgccaggctccatccatgagacggctcgagtgtggggtcggatggccatggcactcccctggcaggacttcagcacaccacagagctccgaggaagctca

SEQ ID NO: 96559 - DNA, 122 bp, Homo sapiens
agcgcgctttgccctcagcatcggattccttcctaggaccgggagacctttgtgacttcccgggcactcccgacctctctgaagtgcgcttttatcttttggtgtaggagagactaccggcg

SEQ ID NO: 96560 - DNA, 122 bp, Homo sapiens
gacggcagctgagaccgtagggccttgaatatgcacctgcaaatgaataagtgcacgtcccggccctacctgggcatacagcccccacctgacaagcacagggaagcagcccgagcacagct

SEQ ID NO: 96561 - DNA, 122 bp, Homo sapiens
ttatgaatcccatttgcctattgaccctgcagttagcatgctgtcaccctgaatcataatcgctcctttgcacctctaaaaagatgtcccttaccctcattctggagggctcctgagcctct

SEQ ID NO: 96562 - DNA, 122 bp, Homo sapiens
ccaccacaccccttcctcagggagctgagtcataggcatagtgacaccaggtttttccatcgtctttccatagccaagccctcccttttcttccacccctcggctccgagtcagggaggagg

SEQ ID NO: 96563 - DNA, 122 bp, Homo sapiens
cactgtactgcgtgcagggcgggtgagaccgccagggacacaactgcagaggtgaaaggccggcactccaaggtcgcggtctgcgcttccgtgaaacacttgtggtcgagcgaggccaggcc

SEQ ID NO: 96564 - DNA, 122 bp, Homo sapiens
acatgaccctagggcacacgcactaatcaagaacagcccagggcatcctgtcaccccccacggtgcacctgcaaactggcttttacagcaaccttgtcttccaaatgggtccgtatctttct

SEQ ID NO: 96565 - DNA, 122 bp, Homo sapiens
ccgattatccagggtagtggattatccaggagagtggattatccagagtagcaggtctggcgcgatgcccgcccggctcagcccatctccctagcaacgaaacccttccgcgccgcgaggtt

SEQ ID NO: 96566 - DNA, 122 bp, Homo sapiens
accattgagatctcagcatggttgaactggttagatgttaagcccagagctttttcactccgaagtcctaattactatactttccacttgctcagaaaagaaaggagggttcacagcaaaga

SEQ ID NO: 96567 - DNA, 122 bp, Homo sapiens
tgtcttctgagcctgggtatgaagggtctctaaactattttatgggaaatttaaatccctcgatcgaaacaaattatcataggagggaagaaaaagtaaatctcattaatggttaggtgtag

SEQ ID NO: 96568 - DNA, 122 bp, Homo sapiens
cttttaaatggaggatcattgattgtgttggtggttgctgttactggggcattaaaccctcgccgctggagcgcgcgtctgcgcgtgtccgcgtgtgaaaaggagccgggaatcgtggggcc

SEQ ID NO: 96569 - DNA, 122 bp, Homo sapiens
ccgctgcaaatggcgtgaacttctggaggccccaccccgttctcccagtgcaaaggtgggcgttattcagaaagaaacagtccggaaggggcgggcttcatccgggaccagaagtccggttt

SEQ ID NO: 96570 - DNA, 122 bp, Homo sapiens
gagctagggtttctcataaaactccctgataggagacgacttttgataaaaatttttttccgccaacaaaatcccctgtcttctccactagttattgtctgtccactaaataagaggtggtc

SEQ ID NO: 96571 - DNA, 122 bp, Homo sapiens
gcccaggacaccctggaggacagacacctcctggtaaactcaacaggaaaatccacctcccgggacgcatccccttctcctcgctgccctccctgctgggaagaccctgtcctcaggcggtc

SEQ ID NO: 96572 - DNA, 122 bp, Homo sapiens
gatctcaggtccctgaagtcctgtcctctcccggagccgatgtgttctcagctcctgggccgcagctcctggagttggggccctcctttcttgggacccggaggtggtgcttcttgctgctg

SEQ ID NO: 96573 - DNA, 122 bp, Homo sapiens
aagttctccgagggccacttgcacagcaggaggggcgagggccgtgtacgtggcgctggccgtcgggcgggctagaggggaccctcagagcacccgggagatgggggtagaagcggcagaga

SEQ ID NO: 96574 - DNA, 122 bp, Homo sapiens
tgtgctgcggcaccctggctcgctggcttctttcagcacctgtggaggtggcctggtaagcgccttctttccctagctctccattttcccctgctgctcctctccttgcccataggtcagga

SEQ ID NO: 96575 - DNA, 122 bp, Homo sapiens
aagaaaaaaatcaaaggttgcctgtaatgcatatggcagctcaaaatttgctttcaacaacgaaattctgtaagtccttttctgttcatataaccaaaagaataatcaacattttataaaaa

SEQ ID NO: 96576 - DNA, 122 bp, Homo sapiens
ctgagggccgggagacagacgggagggctggtgagaagcgcaaggggcgagccctggagccgccgaggggactaggccgagcgggcccgtcggggcctctgggcgcggcggcggggttggga

SEQ ID NO: 96577 - DNA, 122 bp, Homo sapiens
ctatgcacttacctcagtggatcagagttatttatgttccagaaggctgtgagctccacccggcaggggctgtatcttattcctcctgcactagcaccagcaccaagctcagcaccttgcac

SEQ ID NO: 96578 - DNA, 122 bp, Homo sapiens
gcggcagccgtgtgatttgcccatcccctagtacacgcagccagcgacacaagcacacagcgaccagtccccacgctgtgccacacaccctccagcggtccggcgcgcagcccctgctccac

SEQ ID NO: 96579 - DNA, 122 bp, Homo sapiens
tgttgaaatatgtaattgagagggcggcggcggcggcggcggcgctggaggcgcagagggcggcgcaggcggagccgggcgggcgcgcgagcgagcggagagcgggcggccgtgcgggcggc

SEQ ID NO: 96580 - DNA, 122 bp, Homo sapiens
ttcgattcgcattttaaaaccagcgattcagaagcagggcctagggcgagggtcttccagcgctggagccccggggggcggggtgctcagtgcaaacctcgttccctccgcgagtgtcgcct

SEQ ID NO: 96581 - DNA, 122 bp, Homo sapiens
ccccacacaattggggaagccaaaggagagccactctcccagcggcctccacggccccagcgcaagacctgctgggaattgtagtttcctgcccgccccgcctcaagctcgaaggccccgcc

SEQ ID NO: 96582 - DNA, 122 bp, Homo sapiens
gcgtaagagattaaagacccgcctgaagatacagatgcaaactgaccgtaagacaatcagcgagtctcacacagctcggctttgtattttcagacaaccctttaattacaaacgcctctggg

SEQ ID NO: 96583 - DNA, 122 bp, Homo sapiens
ccgcggcccgcctcatccacttccagaaatgggcacaacttcctctgctcctccaggaagcgccactctgcccgccccttcccggcccctggggccgacccaggctccccatctggcccagc

SEQ ID NO: 96584 - DNA, 122 bp, Homo sapiens
aagggtgtttgttctgggctgggctaggctgggcctagctgtagagacacacctaagttccgttctctgtttggaggctgcacccagcctgagtccccaccagtcccctccaagagccctga

SEQ ID NO: 96585 - DNA, 122 bp, Homo sapiens
gggctggattcttcagccctggaagaactaaacacagccttccctgctggaacttccatccgcgatctcccttgcccggcttctcctgtctgtgcaccctgctgggagctgtgtggctcgga

SEQ ID NO: 96586 - DNA, 122 bp, Homo sapiens
gggcccgtggctgttctctccaagggaccatctcgcccctcagccaagtcgcccggaaaacgagcgctcgaccgcctctgccccgctctcgctctgcacacagcaacggtctggtcgctcag

SEQ ID NO: 96587 - DNA, 122 bp, Homo sapiens
tccccgaaattcccgaaggagctgtggggacgagtgggcccagaaatggccctcacatagcgagcggcacagctgagctccccgggggcgaggggggcgggcggagctggagacgctggcac

SEQ ID NO: 96588 - DNA, 122 bp, Homo sapiens
atatgtcatgcacaattaaggacctgaaattaattgaggagaatagagaacctgcattaacgagacattcccttgctaccactgttgtaagtatccagataatttgggggttcattatagac

SEQ ID NO: 96589 - DNA, 122 bp, Homo sapiens
ccccctgttcgtcgaggtgaccttgggcgcgtccctccgtctcgccttgctcagttcctgcgttgaggaactgaagaataggcatttgagggagtgtcattcttgaggttttacttgtatca

SEQ ID NO: 96590 - DNA, 122 bp, Homo sapiens
gccgagaccagctggtcgctgccgggcccgctagtagcccacggagaagccgcccacagccggacaccagagccttgagggccgccatcttcaaaaacctaccctgacctctcgtccatttc

SEQ ID NO: 96591 - DNA, 122 bp, Homo sapiens
ggtaacctgttccccttcaaaactaggcttctggtttactctctttccctgcagcaagcacgcgcaggccttggaaggcccacaccgtatctgagggccatgctgaattgttgatttttctc

SEQ ID NO: 96592 - DNA, 122 bp, Homo sapiens
aactatgtgggagctgggagaagggtcagagctggatgggagagcaactgagttggagagcgactgtccgagtgggcttcaagcctgcctcggcgcctctctgataaggaccaccagtggga

SEQ ID NO: 96593 - DNA, 122 bp, Homo sapiens
tcactcttcttttcgaatcaccatctttgaagagagacagaaaaatccatttaaaccacccgaactaatcattcgaactgcttccaagtcctttaaaggagaatcctagcgagggtccgtaa

SEQ ID NO: 96594 - DNA, 122 bp, Homo sapiens
gtgcctacttggtgtcggggggcgggggttgcattcagctgggggtgagtggaagggccacggaaggttggcaaaatcagtggcagacaaaagctgggattacctgaggggaatggggtgct

SEQ ID NO: 96595 - DNA, 122 bp, Homo sapiens
ttttgctggctatcatctgggggctgctctcagctcccagaggtcacccacattccttgccgtgtggccccctccatctttaaaaccagcaaaggagaagccccctctgtctaattcctcta

SEQ ID NO: 96596 - DNA, 122 bp, Homo sapiens
taagagcatcattgcgatcccagccacaaagctaataaagacacaacacagtgctggcaccgcataggagtcagtggtctccgggtctctgtaaaaataccaaaggaacgtcaaggcagcat

SEQ ID NO: 96597 - DNA, 122 bp, Homo sapiens
ggaggactcttgccttcggggatcccacagtgtgagagggaagcaaaggtagctggaaggcgcagcctgggttggaaaaagagtgaggagacacgggcctttgttgtctcctttctctcttc

SEQ ID NO: 96598 - DNA, 122 bp, Homo sapiens
cactgttttagactatcccacccccagtataatgtgaaaatactagagcatagaagttaacggcctaggctctaaagctagctgtccacgttgaatccaggctctctccttgccagctgtga

SEQ ID NO: 96599 - DNA, 122 bp, Homo sapiens
accccctcccaccccccacccacatgcaaccacagacaagctcaccagtgtccccgaggacggaacacacacactggacccagcagtgggcaggcaaaggcatggccacctgcaggctcaag

SEQ ID NO: 96600 - DNA, 122 bp, Homo sapiens
gcgtacttccacgcaccccagctagttccagagactcagcttgttctgagatcctcttgtcgagcccccttggtcccggcgcccggcctgtgtggtgctcagatcagacttatccacccgag

SEQ ID NO: 96601 - DNA, 122 bp, Homo sapiens
ttagaagatgactacactgacaagaagggtcactggttttagctatctgggtcacttacacgtgtgtaccccacttttgtatcctgacttgagtgcactgaccagacatgggtaatatatgc

SEQ ID NO: 96602 - DNA, 122 bp, Homo sapiens
tttgaaagcataacctgaacatgaaaagctgtggatgccagagcctggcatgatccgtttcgtactgttggttgatctctgagtggtttgccatgctggggaaagggccacgctcctatctt

SEQ ID NO: 96603 - DNA, 122 bp, Homo sapiens
cgaggctaaaatagcgtgtggagcagtcccatgaacagttcccagcattgccatggtgaccgtggttctggtgctgcctcctcagacgcaccagcctcgcgccgcgtctgaaataaccccag

SEQ ID NO: 96604 - DNA, 122 bp, Homo sapiens
agaggggatgatttctgggtaacttgcatcgagcaaagcgtaaccgctcctttctgctgacgctgcttttttgaaggtcataatctctctcctcattgtcaagtccagtgattttgaatctc

SEQ ID NO: 96605 - DNA, 122 bp, Homo sapiens
aacagaaaccctcggatgcacaggtcactccacttgaggctttgacaagaacacattccccgtgggtggtctggcttttacaagtgtttgggcacaaatacattaatgtgaccttttttaaa

SEQ ID NO: 96606 - DNA, 122 bp, Homo sapiens
tgagaccctcccgcacagggtctggatggctcgtgggagagccgtgaacacagaagctgccgtggaagcaaatcctgggcgggaggatggctgcacctccccccggagagcaccggggtcct

SEQ ID NO: 96607 - DNA, 122 bp, Homo sapiens
gcaaagatggcgtgcagctgggccccagtgacaagtatgacttcctgcacacggcgggcacgcgggggctcgtggtgcatgacgtgagccctgaagacgccggcctgtacacctgccacgtg

SEQ ID NO: 96608 - DNA, 122 bp, Homo sapiens
atatatgtaaagcactttgaaccctacttggatcttattaagcactatctatgtaagtttcgctgctaatattatcatcatcatttttattgaagtattattataatcttcattattattgg

SEQ ID NO: 96609 - DNA, 122 bp, Homo sapiens
ttcctattgttccaagagcactgaggagttggagtcagagtgctagtctgtagctagtctcggcttcccatatagtagtctcattaccttgaattaagtcaccccacatctcttgcccttcc

SEQ ID NO: 96610 - DNA, 122 bp, Homo sapiens
ttccttcgacaggtcagtcctgagccccaggctgtgtcccaggacactgggagtctgctccgcactgggggactcaaagtccacacggggcccacaggtggtcaagtgaaccaaacgcccca

SEQ ID NO: 96611 - DNA, 122 bp, Homo sapiens
aagatctgtttcggactgcagctggggccttcggatccagaggaaaccagggctattcttcgagggtgggagggggagggccgcggggtcggaggggaaggtggccccgcgcgaagtcgccg

SEQ ID NO: 96612 - DNA, 122 bp, Homo sapiens
tggctggaggctcctcgagagctccccagacacgcccccgtgcgtacgcccccgtgcgtacgcccccgctgccgccaccttcggttgaccacccccatctagactgtactctcgcggtattt

SEQ ID NO: 96613 - DNA, 122 bp, Homo sapiens
atcaaggatgagtaaatgatcttaaatagggaagaagaagtatgtttcagagggaaggcacgtacaaagggacacaggtaccttctggagccatgagtgatcagctgggctgaaggcatggc

SEQ ID NO: 96614 - DNA, 122 bp, Homo sapiens
gttggtgcaaaagcaattgcagtttttgccataaattgcttttgtaccaacctaatatatcgctttcctgctggtcagtctttttctacctcaggagctgctgcttttcccatgcctgaaaa

SEQ ID NO: 96615 - DNA, 122 bp, Homo sapiens
aattccgagagcgtttacaggttctctttccggcgcaaagtaaacgtaagcctaggccgccggaagcagcgggttgaagagagtgcgcatgggtgaggagggacgtagagcggaagaggggg

SEQ ID NO: 96616 - DNA, 122 bp, Homo sapiens
gccctggctgccagagacccggaagcatcgatcggctctgtgctcggcttctagacttgtcggcgctcgattgaggagcgtggctacgttgcttccggtgcctggctccgtttcctgctttt

SEQ ID NO: 96617 - DNA, 122 bp, Homo sapiens
taagtagaatgctaatgctaaaattgcagtttgcattcctgcttactcagggaacactgacgcagcctgacaaagcttccagcttaaatatcctgatgggaagaaaagtcccagaagatggt

SEQ ID NO: 96618 - DNA, 122 bp, Homo sapiens
ctgtcaaacctaagaaccattaaaaaatcaggagctgcctaccgggctgaaaagggctgccggtctcctagaagttgttattacaacgacagcactttttctaaattaacagttgttcaaat

SEQ ID NO: 96619 - DNA, 122 bp, Homo sapiens
tccaagagggctcaagagcatttggagggaaggcctctttagcaggaagatctggcaagacgtgggtaataatcagctctgaaaggttatggcgttattaccaatttaaattgggagagggt

SEQ ID NO: 96620 - DNA, 122 bp, Homo sapiens
aaacttactcgtctgggtgtgtttcttcggtcattttcttgttcacctagacgcctgtcccgcggcgggcagctttgctcccttcatcttcctgtccgctcgccccccttcttcacatctcc

SEQ ID NO: 96621 - DNA, 122 bp, Homo sapiens
taaagtcacactgccctcttatgtatagcctggctcctaattctctgtagttaatctgaccggcatagcccccactttagagatgaaaaaatccacattcagcggacactcaacttgcctcg

SEQ ID NO: 96622 - DNA, 122 bp, Homo sapiens
agttcaccgacttgattcacagtgattctggtttgcctgtttctccatgtggccacgagtcggggacgtgtccagcagtgggcatgcctacaccttgtagttaagctcagcgttcatctggg

SEQ ID NO: 96623 - DNA, 122 bp, Homo sapiens
tggcctcttcctaactctccagagtgctctctccccactgtggccctgagctttgcctcacggtaacactgtgctgcatgacactccagcatgatctgcatgtttctcacctccggaccttc

SEQ ID NO: 96624 - DNA, 122 bp, Homo sapiens
tgagatggggcccaaaggactacccctaaaatcctgtcaaagcagcaggttgaaggatgacgggtgcccagattcccaccttcaaactgcctggcagcagcacgttcagtgtgatacagtgc

SEQ ID NO: 96625 - DNA, 122 bp, Homo sapiens
catcaggaagaaaggaatcatgaggccatttgctctgtgggtataagaaggtggtagaatcggtcagagcaggatgttcacattttagtgcccattgagatccttagtgtgcttagtaaaaa

SEQ ID NO: 96626 - DNA, 122 bp, Homo sapiens
cacaggggaaaaagcaagatgccacccagacagtgagcaatttgctcagcttggctggagcgtggagtctgtagactgaagtcatagaagacaaaggctgagaaggtacactggaacctgat

SEQ ID NO: 96627 - DNA, 122 bp, Homo sapiens
tccagcaagctcagcaaaggggaaggcccttgcagcacagacctgggttcctcctggccacgcagcagctgctttcccactcagcagccccagtgcccagcttaggccaagcccgctgcact

SEQ ID NO: 96628 - DNA, 122 bp, Homo sapiens
agaccaactgcgagacgccgagtcccgggctctcaggacgctctcccgtacctgcgccctcgtcagcccatcaccgaaagaacggcctgacccagggtcacactgcactgaatgcttcctgt

SEQ ID NO: 96629 - DNA, 122 bp, Homo sapiens
ccaccaccgccacccgccgaggagccgcccaagcccatttgccgccacagccaaactttgcggctccaaagcgaccgccccgccgagaccccgcccccgaggccccgccccgggttaggttg

SEQ ID NO: 96630 - DNA, 122 bp, Homo sapiens
aatgctaagcggcatctgagaaaagcatcgcatctgcagctcaccctttatgtctcagcgcgtaggcaagctctggcttcacctctggcttgctgtgtgacctggggcaagatcctgtacct

SEQ ID NO: 96631 - DNA, 122 bp, Homo sapiens
cattaagctcttctgaaatctaacagccttgttccatgctcctcgctatggagaagagagcgctgagggaaagaggccctgtagtcttttgccaatggtgtcggatgggctgctcagtccca

SEQ ID NO: 96632 - DNA, 122 bp, Homo sapiens
ttccaatgtagctatttctccttatctcattggtttctatgagttatattctgagataaccgcattgcctaatatatattttatatatatgtgtgcgtttgatatatctcctgtgctttatc

SEQ ID NO: 96633 - DNA, 122 bp, Homo sapiens
tggccctttggatggttctgcctcatgcagcttgaggctaggagagctgagaccaggctacggtttggcttctgcctctttatttcggggaatggcatgaagatcaaagtgctcagctgctg

SEQ ID NO: 96634 - DNA, 122 bp, Homo sapiens
gtctagccggccggcgaggcctgcgcagttgcagcggccggggaagatggtggaggacggcgcggaggagctggaggatctggtgcacttctccgtgtctgagttgcctagtcgcggctacg

SEQ ID NO: 96635 - DNA, 122 bp, Homo sapiens
cctccatcggagaaaacaagtgcccctgtttcaggggggattccactctggctggccacccgcaaacctggaaaactattctatgacttcttccctgacccccctggaagtagggagcacca

SEQ ID NO: 96636 - DNA, 122 bp, Homo sapiens
gattcactttttgtgctgttggaacagggaccagtgttggagatgattccattaatcttgcgaagtgatcagtcactgggaggattgaattgcatttcctgcctaaagatagagacagatga

SEQ ID NO: 96637 - DNA, 122 bp, Homo sapiens
cttgtataaatctcacgttgacattttaaatactatcatcacaccaaacaaagcgtgacacggcttcgagtctcttctcccttaccaccccaccaaaaggatcgacagtgtgtattttctag

SEQ ID NO: 96638 - DNA, 122 bp, Homo sapiens
tcaggccttacacagctggcacgagaggtaaagtctcatcgaatgtcagggttggaagggcgcctagagacagtcaaactagtggatggggaaactgaggtacagagaagctgagtgactta

SEQ ID NO: 96639 - DNA, 122 bp, Homo sapiens
tgatgattctgttccctcagattcccagaacagacaaaactcatctacgatcagggaagccgggacctgggttgggaggaggcgcttgggggcgcctctgatcgcgtgatatgggtgccctg

SEQ ID NO: 96640 - DNA, 122 bp, Homo sapiens
aaatgcagaatcatctttttaccccaatcatgttctttctctagcctctcctgttgctgccggtaaatattcttctttgtttaactatgggactgtctttttccctccagagatactcaccc

SEQ ID NO: 96641 - DNA, 122 bp, Homo sapiens
ctcatccagtggggggccgagtacgtgctcctttctcgccttcatctcttggaggacgggcggggagagagggtcctgtaaaaccgcggaggttgtcatggctgcagccagggggtcgggac

SEQ ID NO: 96642 - DNA, 122 bp, Homo sapiens
gcctgacatggcctgactcgggacagctcagagcagggcagaactggggacactctgggccggccttctgcctgcatggacgctctgaagccaccctgtctctggaggaaccacgagcgagg

SEQ ID NO: 96643 - DNA, 122 bp, Homo sapiens
ggcacccacctagggatgcccacccaggcctgcttcttcctttaggaccaaaggcgcaggcgacgacaccccctccccagcttaacccccatccttgagatcagctgtaggccagcactagc

SEQ ID NO: 96644 - DNA, 122 bp, Homo sapiens
ttaatgggactctacatgtggcaagcgactaacctgcttttcagttacactctggctctacgcccacccaattcatgagttgttctttgcccagttaaactctgtttaattcagtttgtcta

SEQ ID NO: 96645 - DNA, 122 bp, Homo sapiens
cggcggaggcacgcccctcgcctccccgcggagtgcggactcgccccggtgcccaaactccgcccaccctctagggagctccgctctcccgcctaaccccggcactccggacagagctgggc

SEQ ID NO: 96646 - DNA, 122 bp, Homo sapiens
agctgtcagaagaactttgaggatggaggccttgcttaggtcattcgtgggagtgttccacgaataggggtgtgctttggattgggtgttgtcaggaagtgggggagattatctgattgaga

SEQ ID NO: 96647 - DNA, 122 bp, Homo sapiens
caagggaatctggcttctggccgccgacctccgaccccagcccgcctatccgcaggcacccggaagtgaggaccaccagtgctgctgggggaaggaatcctccctagtgcaggccttaaccc

SEQ ID NO: 96648 - DNA, 122 bp, Homo sapiens
accagagccaggggacagctccccgcgcgcgtcctcgctcccgggcggggccgggcggtacgtcccagagcgcagcgcgccccccgcctgctgtctcagtgccccctcacctccgccctgtt

SEQ ID NO: 96649 - DNA, 122 bp, Homo sapiens
ggaggtggtagtgccatctggggcacgcctctgctcgtgtgggtgttcaactttgggcatcgcagtttaaggacactgactatcaggaatgatttcctgagaggccactaatgtggagacag

SEQ ID NO: 96650 - DNA, 122 bp, Homo sapiens
aagccctcagatgctcctttacagtcagtcagccctccatatcctcagaatatgtggatgcggaacccaagaatacagggggccaactgtatgatgttttgcattttggtttcccttcagtt

SEQ ID NO: 96651 - DNA, 122 bp, Homo sapiens
gagcaggcccccgaggttccctcccattctcctggtaccagggctgggagggcagggttccggcctgtggcactcaggctggtgatgtcagaatacgctgcgggtgccctggactcctgctc

SEQ ID NO: 96652 - DNA, 122 bp, Homo sapiens
ctcatacaatgcttttcggcaggtgtgtccccactcacatgttctcaggctcccacttcacggaatgaaatgtgaagtccacttggggccagttaattctttccaagatagtcaaggtgttc

SEQ ID NO: 96653 - DNA, 122 bp, Homo sapiens
acgccgcttgggctcgggcaggcagggacccctcctcgtgcctcgggagcctggagctgtcggccctgcagctgaggaccacaggaggtcagggacatgcaagctcagtgcccgaagtcact

SEQ ID NO: 96654 - DNA, 122 bp, Homo sapiens
ctgtagagacagattcttgcagaaatcttgccttgctcccacccagcccatgacttttctcgccacaaggaaagcactggttaaggaggtgattcagaggtaggttccccaggtgcgtccat

SEQ ID NO: 96655 - DNA, 122 bp, Homo sapiens
ctggaccctcgacccctggagtcagagggttcaggtccccagtcgtcatctgccgcatttcggcatgaacagcagccacagcagcgagcccagaaggaacggcctcctcctctgcgagagcg

SEQ ID NO: 96656 - DNA, 122 bp, Homo sapiens
gacgccgcgcggctgcggggctgggcgagcgcaaagatgtccgcgcccgctgccgggaggcgaggtgagtctttgatcgtaaccaggagcccggagctgaggcagttcctgcacgtgtcgcg

SEQ ID NO: 96657 - DNA, 122 bp, Homo sapiens
ctggggcggccggggcgggagagaaaggtggtgctgcagtggtggccctggggggccattcgattcgcctcagttgctgctgtaataaaagtctactttttgctaaaagcgtcgtgtgttcg

SEQ ID NO: 96658 - DNA, 122 bp, Homo sapiens
gatgaaccttttatctcctatggaagggaaaacgtcttgctgagatggcccttccatagacgggcagtaaaaatgtttagggtttctgtgcatcccactgagggtccccatcatctcagggg

SEQ ID NO: 96659 - DNA, 122 bp, Homo sapiens
ctctgcagctcctggcccagatgctaagcgcatcactgccaggcaccggcaccggccagccgctcctagtgcgtggccctccgagcttacgcccacccggaactcgtgctggcctgggagca

SEQ ID NO: 96660 - DNA, 122 bp, Homo sapiens
cgtcttttctctcctttctaccccgtgggtccaaggctgataggaagtccagactcagtgcggtgctcccagcagatgccagctgcagacatgttcagtgaattcacgaatgatgcccatca

SEQ ID NO: 96661 - DNA, 122 bp, Homo sapiens
ggcagtacttgggtcggaggcatcggtgctgctgctcactctggccgcagtgcagtgcagcgtctccgtctcctgtgtccgggcctatgggaagtccccctccctgggcagcgttcgagcag

SEQ ID NO: 96662 - DNA, 122 bp, Homo sapiens
gggcgggcggcgttcttggtagagcgggaccagtttcctcgtaagcgaccagagccgtttcgccaaggaagtgctgccccagtatttcaagcatagcaacatggcgagcttcgtgcgccaac

SEQ ID NO: 96663 - DNA, 122 bp, Homo sapiens
accagttgaatttaaggagctggtgggatctcatggggccgatgtaggtggcaatgtcaccgtttattccttatcagttactttactccccgggagtgatctaaataataacatggggcagg

SEQ ID NO: 96664 - DNA, 122 bp, Homo sapiens
agactgctgtttggagctgcctttaggagccatggcggagctgcaggcgagaacagggaacgtagagccggccgccaaggcgggcaaaggcccttgactccgcccctgcggccgccgtatcc

SEQ ID NO: 96665 - DNA, 122 bp, Homo sapiens
taaatgtagtaaattaacttgggagaaaaggtgtgccatggtaacgtgctggggaaagggcggatttttagagaaatgtgctggaactgaggttcaaagcaaaaccagggggaatggagctg

SEQ ID NO: 96666 - DNA, 122 bp, Homo sapiens
gcagaaatgtcctggccccgtacgcggtgccctcggagctggtgctggtggaggagatcccgcggaaccagatgggcaagattgacaagaaggcgctcatcaggcacttccacccctcatga

SEQ ID NO: 96667 - DNA, 122 bp, Homo sapiens
gtccataagagtgttttcggaagagatcagcatttgaattggtgaacttagtaaagcagacggctctcaccaataagggcaggcatcatccaatctgtcgaaagcttgaataaaacaaaaag

SEQ ID NO: 96668 - DNA, 122 bp, Homo sapiens
tgtgaactggaagggagccaacatggagacacagagagcgcaaggtaaacaactttccaacgccaaaaggatgacatttaatctctaaatgctagcttcccttcttagctcatccttaaccc

SEQ ID NO: 96669 - DNA, 122 bp, Homo sapiens
cggccagccccctctctcggccaccgtcacgctcaccgtggctgtggccgacagcatccccgaagtcctggcggacctcggcagcctcgagtctctggctaactctgaaacctcagacctct

SEQ ID NO: 96670 - DNA, 122 bp, Homo sapiens
cccttccccgaggagtctcacacaggtttccagtcttgaggccccaatggttaactcaatcgccctgaccccggcgctatttgatatttgcctccttgacactcatttaggagctcgcagcg

SEQ ID NO: 96671 - DNA, 122 bp, Homo sapiens
ctcatccacaatagccaagctcttctcaaaggcagcctgtgcctgcagcaaagcatccctcgactggcagtggtcatagatgtccaggtgggtgcggccgatggtggcccaggccctctgca

SEQ ID NO: 96672 - DNA, 122 bp, Homo sapiens
gtaggtggcagactgttctgggccaaggcaaccaagttgagcagggccagcaatcagtgtcgggaacttctgcagggcacttcagaatcagtgttgggaacttctgctttctatttttcacg

SEQ ID NO: 96673 - DNA, 122 bp, Homo sapiens
gccacatctacagcatgaaaagagatcaacttccccagctctaatcacccaggaaagcttcggaacctccttcccccatcctcgtgggaagtgccctgcccttctttttcctcccttaccag

SEQ ID NO: 96674 - DNA, 122 bp, Homo sapiens
ctctcggaggggtttcggaccgaagggaagaagctgcgccgtgtcgtccgtctccctgcgcgccgcgggcacttctcctgggctctccccgaactctcccgcgacctctgcgcgccctcagg

SEQ ID NO: 96675 - DNA, 122 bp, Homo sapiens
ggggtggggcgggaaggaggaggcggactccaggcccacgggcatcgacgggtttgttcccggcttgagggtctgagatccactccggcctcccgggtgcctgatccattccgaaggccagc

SEQ ID NO: 96676 - DNA, 122 bp, Homo sapiens
tcctttcttagaacactgactacttcaaacaaacagtatttaacagagtatgtgtaactacgcaggctaaatgaattaacctcttccttcctagtcccaaattactccaagtcaaaaatcaa

SEQ ID NO: 96677 - DNA, 122 bp, Homo sapiens
gtcgggtgggtggagccatcgttgacgttggtcaccttcacggggaccccttttttaactcgatctcgaggatgtcaggggtgttgggggctttgaccggttcctaggtcttcgtgtagaga

SEQ ID NO: 96678 - DNA, 122 bp, Homo sapiens
ctactcctgcaccagcatctccctagacagaacaaaacaggggcctgggggaggcagaggcggagagctattcagtacattcaccactatgtaatgcataagactgacctaactgaataagg

SEQ ID NO: 96679 - DNA, 122 bp, Homo sapiens
agcttcaactgctgagatcatgttgttcagcacccattctaatccacatggaaaggggcacgggggtgttgtgggtggggaggggtggtgcagctctgggccccaggggtcttgggagtgat

SEQ ID NO: 96680 - DNA, 122 bp, Homo sapiens
gcgagaaagctcctaagaggccacctgcaggtccgtgtgggggaagacgccatgctgtctcgggaccatggcgcaaggtaggtggctgcaatggtctgtaaggaaaatcactgacagcagct

SEQ ID NO: 96681 - DNA, 122 bp, Homo sapiens
cggggcacgccgggagctgcagcccgagggaggtggcggggctcggcgggccgcaggcagcgggcggggcggtcacgtgggcacgcctggtccccagccggcgccacccgctcccaggccgg

SEQ ID NO: 96682 - DNA, 122 bp, Homo sapiens
gaggcccgccaagcagccactccagcaggcggcgccctcggactcggacggctcctcccacggcatcagctcccatgggtcctgccaggggacacaccccgagcccagggtttgggtgatgg

SEQ ID NO: 96683 - DNA, 122 bp, Homo sapiens
gggacacttcctgtttagagaggactataaaactccggtccggtaatcacttggggctgacgccattttaggcctcatcccgcctgcacccaggcactcattaaaacagcgtgttgccccac

SEQ ID NO: 96684 - DNA, 122 bp, Homo sapiens
ccggctccatttaatggcgcggacgccggcggcggcgggctcctggccgggccagcgcagcggaagagccaagccagcatgtcggggacccgagcctccaacgaccggccccccggcgcagg

SEQ ID NO: 96685 - DNA, 122 bp, Homo sapiens
cagttagaaaacttcgttaatttctggaaagagggatgtgagggttttctttgttgttttcgtttaactagggtagtttcctgtctgagtttgagttccagatttatagtgtaagtaataag

SEQ ID NO: 96686 - DNA, 122 bp, Homo sapiens
gaggcgcgcgcccggccagagagcgagcgcgcaacggcggcgacggcggcgaccccaccgcgcatcctgccaggcctccggcgcccagcgccccacgcgcccccgcgcccccgcgcccccgc

SEQ ID NO: 96687 - DNA, 122 bp, Homo sapiens
tgaatgggttctgaaccttctggcattggaagtgagcttttccagctgagggcctgcattcgtgattagtgtaaataaattcagctttccatatgaagcacatcctttctctttgtttacca

SEQ ID NO: 96688 - DNA, 122 bp, Homo sapiens
tcagggcaggacagggaagtctccctcacttgtcccctgcaacaggggctgagccacaaccgactgtggatctcggcagcgacagtgaggagggagtctgcagcgagcaggggaggagaagg

SEQ ID NO: 96689 - DNA, 122 bp, Homo sapiens
taccatcatacacagctaattaacacggtttgtagagatgagggcttactctggtgcccacgctggtctcaaattcctggactcaagcaatcctctcacctaggcctcccaagatgctggga

SEQ ID NO: 96690 - DNA, 122 bp, Homo sapiens
tggctgtcatacctccccagtcctttcctgagaagtttccatagggaggaaaagtgagagcgtagcaacctgagaggagaaaacccacggacaggaggacagagccgagaggaggcacgctg

SEQ ID NO: 96691 - DNA, 122 bp, Homo sapiens
aactgaacctcttacaggatttgtaactcacttctgtggtatctagtaaactggaacacgcgctttccctgggctgctctgtcatcccaggtttcagcactcggaaatcgcttgggcccccg

SEQ ID NO: 96692 - DNA, 122 bp, Homo sapiens
cttccgcctcccagaggctgccgatccacgcggtcgtctctgccgcccgtcgggagggtgcggttagtcaccccgtaacagataagaaaacagggtttcggaatcagcccttgtggaatgcc

SEQ ID NO: 96693 - DNA, 122 bp, Homo sapiens
ttttctgtctaccttgttttttcagttttcactggggaattctgagatagcgtgttctttcgtggagtatttatatcctgtcttgaaatgctgaatgcatagcatctacttgtttctacatg

SEQ ID NO: 96694 - DNA, 122 bp, Homo sapiens
aggagctggacgggccagaagctagaggggcaggggatgcagaggccaacggggccagaacggcgtgggatgtgtcccagatgctgtcctccccaatggccgcgatgtagccacgctgaagc

SEQ ID NO: 96695 - DNA, 122 bp, Homo sapiens
caagggcgctgaccttggacaaggccagagccagcacccaggagtactatgacccacctccgggctgggaagggaccccccaaggcccaggctaggtccaatcacggcaatcacctgaagcc

SEQ ID NO: 96696 - DNA, 122 bp, Homo sapiens
aagtctcaagggcattatgttgagtgaaaaaaagccaatctcaaaagggcacatactgtccgacttcatttatgtaacaccctcaaaatgatggacatttcaatgtggaaaacagattgggc

SEQ ID NO: 96697 - DNA, 122 bp, Homo sapiens
tattatgtatatgtcttagagacgtgagtctatctctgccttcaagctttcctgggctctcgtcgctcctcctcccgacccgcccatcccatctggggatgagaagattgagggtgcagagc

SEQ ID NO: 96698 - DNA, 122 bp, Homo sapiens
cgggcaggtggacttaggagggagagccggaggctgcagagtgtgctccgaggtaccctccgcctgggactgtaagaacaaagaaggctctggggtaaggtgacagggacaactccagcaga

SEQ ID NO: 96699 - DNA, 122 bp, Homo sapiens
agacccagccactgagcaggtgctctccactccgccctccctggagctccagcagccacccgcttgctttctgtctctgtgggtctgcccagagacagaaacatttcatcgaaagggaatca

SEQ ID NO: 96700 - DNA, 122 bp, Homo sapiens
gttactgaggctcttacggaaatgttattcctgttaatgcgaggcagaaaacgcgagacccgaacggaataccccctgataaatggactaacaacatttccagttaccagccccggccgtgg

SEQ ID NO: 96701 - DNA, 122 bp, Homo sapiens
acagacacacgcaggacgcagcaatgcagtgagcacgggcagcattgtgtggcgtgaaggcgccagcctcggagaggacggctgtacagctctgctggcgcggactaaggatcaggcagagc

SEQ ID NO: 96702 - DNA, 122 bp, Homo sapiens
cttgagtgaatgcgtgtaggtggaaaaaggttccggggaatgcttgcatcgttctgcatccgagcgtccaacagagaaaagatcctgtttccagacaatacctgcatttggtttttctccag

SEQ ID NO: 96703 - DNA, 122 bp, Homo sapiens
gagagaaagatctatcactctctctctctcttcttctctctcatcctcttcttataaggccgtagtcctattggattaggcccccacccttaagacatcatctaaccttaattacctcctaa

SEQ ID NO: 96704 - DNA, 122 bp, Homo sapiens
gattcaaaacagcatggttggatttgagtttaaaaaatagaactcactggctgcagtgtgcggaggtgggctggaatccatttttgctcagttggggagagtgtatttttaattttccaaag

SEQ ID NO: 96705 - DNA, 122 bp, Homo sapiens
ccaggagatgacaacactgcaattcttaggcaggagagactaggcctccctaagctcaatcggcaacttgatgttctgatcacccaatctgccaaagttggggggcctctaacctgggcaag

SEQ ID NO: 96706 - DNA, 122 bp, Homo sapiens
agggaattacccttgaccgagcgcctactgtgtgcagtgcccccgtcaggcgctggggggcgccgtgaagtcaggatgactgggaagtgggggcttggagagggcgcagtgaggtgcttttg

SEQ ID NO: 96707 - DNA, 122 bp, Homo sapiens
gtcagtggaggggcgggaggaggggcgggggtgcgcggggcggggggagaagtcctggagcgggtttgggttgcagtttccttgtgccggggatcctgtcccctactcgccagcgccaggct

SEQ ID NO: 96708 - DNA, 122 bp, Homo sapiens
ctgtggacaacctctcagaaccagaagacccttgctgccctgtatgccaaggtctccctccggcctgggtctcagggatgccagctgcaaactgggagggccattgtacagacactaggtgg

SEQ ID NO: 96709 - DNA, 122 bp, Homo sapiens
aaaaattcccgctccacttcatggaaaagtttcattacaatattgaataaactgtatgatcgagaagtgaagtgcttaattctgggatagtgaatgttaattatgcaatgctctgttgctct

SEQ ID NO: 96710 - DNA, 122 bp, Homo sapiens
gaaccttccagtccttgttgctggagccagtagagcctgggcagtgggtgggaagaagggcggggttctccccagtgtggtcacgaagcatgggcatggccaggacacaggtggctggtgtt

SEQ ID NO: 96711 - DNA, 122 bp, Homo sapiens
atctgagcctcccgcagaggaatgcagaatgacgccacggcacgcaggatgtgatgtcaccgagatgcagaggatactcagtcaaccaacatttactgagcatctacttcgtgccgtatgta

SEQ ID NO: 96712 - DNA, 122 bp, Homo sapiens
aaagcgccgtgggcctcaaagccgcagcccggaggtcgctggcttgctctgtgtcagacacggttctaggcagtggggatgcatctagaagcagacacagtccctgttctcaagaagctcac

SEQ ID NO: 96713 - DNA, 122 bp, Homo sapiens
gagtatctattttctaaagccactgagcttgtggtaattgtttacagctggaataggaaacggatccagcacctgatcctcccagcatggggaagcgtttatagagaaagagagagctgcag

SEQ ID NO: 96714 - DNA, 122 bp, Homo sapiens
caggggatgctgatacctctgctcacgcagtgtggggcacagctggtggcagtgctgctgcgtcaacgggcgggggccgtagcctggtgctcgggctggtctgtggccctgggatggaggac

SEQ ID NO: 96715 - DNA, 122 bp, Homo sapiens
tgctggagaaaggcctggagccttctttgtctccgagatgaagtacaataggccacagggcggagatctcttgtgatgctctcgggtcctgcctttctcttgccctctcctccctgcaaata

SEQ ID NO: 96716 - DNA, 122 bp, Homo sapiens
aactaagttgtccatagctagtgagtggcagaggcagggtttcaatgggacagtccgtggcggagcacactggctccgccgccagcccccctgcggtacccatccgcgctcgccgcctggga

SEQ ID NO: 96717 - DNA, 122 bp, Homo sapiens
ccctctttggggcctgacataataatacagggctctcaaattagaataacttgggtttcacgatggagcacttagattgttatgtgacttgttgtgttacaggtgatttttgtggttctgag

SEQ ID NO: 96718 - DNA, 122 bp, Homo sapiens
catgcttaggcctggagagaaggaggaaccaccaatgaggtggcaggaatatcaggagcacggggtgttacagaagcccagagaaggaaagctgttcgagaaagataatctggccgggcgag

SEQ ID NO: 96719 - DNA, 122 bp, Homo sapiens
tcagacactttaaaatggacctttacttccctgcagcaaggaatcaagacagcttttttgcgaacatgttttctcgtgcagctgtgcagggtagatgccacatgtcacttccagatcctggt

SEQ ID NO: 96720 - DNA, 122 bp, Homo sapiens
gcttcaagtcccgcagccctggctgcgtcttagagaggcgtgaaaccggatgatgggagccgcttgttggcttagatattccttcaactagaatgacgtatcttgcagcactcggctgaatt

SEQ ID NO: 96721 - DNA, 122 bp, Homo sapiens
ggggtcgaattccccaggaccaaagaaccgaggaaagctgaggaggttgccagggctgtccggaggtgtgccataggagcagagtaggttgccacccaccccatcattctcacactcctcgt

SEQ ID NO: 96722 - DNA, 122 bp, Homo sapiens
aggatgaagcggaggccgggagcagggggtggccgtggtcccaggcgcgggggcccagggcgtgggggtgcgggtgcggagtgggcaggcgcttctgcggcagcggcgtctgctcgggcgtg

SEQ ID NO: 96723 - DNA, 122 bp, Homo sapiens
ttccgtgtgtgcatcatgagatcattacacaactgaacctgctggtggcaggaacaggaccgactgagagtcaggcatttcagctactttcaaacaaacatattcttcatttgcccatgatt

SEQ ID NO: 96724 - DNA, 122 bp, Homo sapiens
gcagcctacgggagaggcccccacatttatcaagccactgagtccaaatgcacacagaggcggcaatttaattcctccctggcaagttctaactattcgggaaaggctctgccctttgatct

SEQ ID NO: 96725 - DNA, 122 bp, Homo sapiens
ctgagcgggggccaatgagttgaaagccggagcaaggggacttgttttgttcctgcaccccgattttacttacattacccggggcctcgagggtgactcatagagattagccctgagcgtcg

SEQ ID NO: 96726 - DNA, 122 bp, Homo sapiens
actcccgcaacgccgcacgcgctgtgcgctgggcacgcactgacctccttgacttcagagcggtgacacgagggcccggactcctgctcaaaagccgcccaacacaggcccacgcgggggtg

SEQ ID NO: 96727 - DNA, 122 bp, Homo sapiens
gaatttgtgtgtgtgtggtggtggtggaggtaggggtggattgaataaatggaatgtttacgttttttattttgtttaaaacgtgctctctgccctggtgtttctgacatgttcacaaacac

SEQ ID NO: 96728 - DNA, 122 bp, Homo sapiens
ggagatagacatcagtggctatgcctgtccctacctgaggtcgcccagctgtaagggtctcgctctcacatcagtgctgagaaccaggggcctcttcagcagcgtcatgcatcgtgtttgct

SEQ ID NO: 96729 - DNA, 122 bp, Homo sapiens
atgacagtgggtagtagtagctgtgggtagcagtgctcatgtatttaaatcagatctagtcgtctctgacaaatgccaagcatgctcttaactctcttaagtaataaacttccccggctcaa

SEQ ID NO: 96730 - DNA, 122 bp, Homo sapiens
gggtccgctgttggccatgggggaatccggaatgttttgggggtgcacttggtccatgcccgggtgggcgctaggcggcgggggcgccacctgtaaattcaggtccccgttacgtgatgcca

SEQ ID NO: 96731 - DNA, 122 bp, Homo sapiens
aaccagggcctggagaaggccttgccacagatcttgcaggtgcagggcagcgtgtgagtgcggatgtgcatcttgagggcacccaggctggtgtactccttgtcgcagtacttgcaggtgaa

SEQ ID NO: 96732 - DNA, 122 bp, Homo sapiens
ttttaataacgtcatgcaaatgggatcatgcagcacacgaccttcagggactgggctcttcgctccgctaaactccctggagatctattcaagtatgtttatccacagtgaattccttctta

SEQ ID NO: 96733 - DNA, 122 bp, Homo sapiens
gtcttaacttatattgcagaaggaaagatggaagtctgttaatacacctgcacagactttcgtcaccagccattggctgcgctgtgggcccaagagactttgtctgaggccgttgtgtgttc

SEQ ID NO: 96734 - DNA, 122 bp, Homo sapiens
cagggccagacgttgttgcaggcagggccattattcatgggtgtttgtggcagaggatatcgtgttcaggcttcatttcaaggcccagggcgcaggttttatttttccctggggctgcctgg

SEQ ID NO: 96735 - DNA, 122 bp, Homo sapiens
ggacaaaaacagacccccagacacctttcagcttcgggtgaatcactttaatgctgttaacggcaagtctgtaaaaggttcaggacaaagttcttttttctttcttttttaattataaaact

SEQ ID NO: 96736 - DNA, 122 bp, Homo sapiens
aatgtgattttgctattagctccatcaagagatgggtctccttgaatctgagcttgaccacgtgaattgctttgaccactggagcattcacaaacatggcacaacggaggcttgaaaaatgc

SEQ ID NO: 96737 - DNA, 122 bp, Homo sapiens
cgtgtgggtttaaggagacgtgtctagccaggttttcaggggacaggcaccaggaggctgcggtctggagccagcaccgggctttggggcgctcttacccgcaattcctactcccccgtctc

SEQ ID NO: 96738 - DNA, 122 bp, Homo sapiens
tcaaccaccccagcaagaactttttaaaccatagtaactgctgtaggctccaagactgggcggattacttccaggatgttatgaagcctccaaggaaggaaagggcctttcaactatcaatc

SEQ ID NO: 96739 - DNA, 122 bp, Homo sapiens
gaagtcaaggctggatgatcgcttaagcccaggagttaaagaccggcccggacaacaaagcgagaccccgtctctccagaaaaagaaaaaaagagagagagagagagaaattagccgggcgt

SEQ ID NO: 96740 - DNA, 122 bp, Homo sapiens
cagggcgggggcggggttcgagtcagagatgggtctcactcctgggtcagggttcacagccgcctaggcttcggggtagagaaattggaagccgtatcggggggaggttctggcccggggcg

SEQ ID NO: 96741 - DNA, 122 bp, Homo sapiens
ccacaatcactgagggaagaacagactatctaggatggggttgggaaaactcacttgctacgtggcaaaaaataaaagcagatgtctaaagccatgtataacagtggaatccagatgggatc

SEQ ID NO: 96742 - DNA, 122 bp, Homo sapiens
cataattttttttttttaattgcaaaccttcccagttcactccgcagctggagagcaggccggaggcggcgttccccacccgtctccctctttgtcgtcccctccccgcgcccggagcggga

SEQ ID NO: 96743 - DNA, 122 bp, Homo sapiens
tgccttgatcttggacttccagcctccaggagtgtgagaaataagtttatgttacagcagcggaaactgactaacacaagattgaattactttagatttagatgactgagattgtattctcc

SEQ ID NO: 96744 - DNA, 122 bp, Homo sapiens
ggaaattttttaaggtttcaactttgttgccagatatggggtcagtacacaaaattcaatcgtgtttcctctaacggacaccaacaaaccatatgtaacttctgatttacaataatttcact

SEQ ID NO: 96745 - DNA, 122 bp, Homo sapiens
gtgcactggccatcagagatgtatttggtggaacgcagttcccggcaacccacttgaacccgagctgcaggaaacaaaaaagaatgtgcatcagagaaaaaatgcaaatgaagaccttttaa

SEQ ID NO: 96746 - DNA, 122 bp, Homo sapiens
cctgcaccccacccacaacgaggacgccaggcttcatgatgtttctacggaaggagaaagcggacggggagccccgtgcctttaagaattaaaaacactctcgacacctcaatagttcagta

SEQ ID NO: 96747 - DNA, 122 bp, Homo sapiens
cctctttaagtgtcacctcctcctagcttaggtgcaccccttcaccaccacagcccctcccggcgccagcgtgctgcagcttctcatgcacattaatgtacataaataggaaaagtcctgcc

SEQ ID NO: 96748 - DNA, 122 bp, Homo sapiens
ctttcatggtaactaactcactgttgcattaacaacattaatccattcatttgggcagagcgctcataacctagtgaccacttattaggccccacctcccaaaactgctgcatgaactttgg

SEQ ID NO: 96749 - DNA, 122 bp, Homo sapiens
tctctgaaggtcggcctgcagatctccctggactactggtggtgcaccaatgttgtccttcgaggggtggaagaggtttgtcctggtgccctgggcacacagtggtgggcatgaggtggtgg

SEQ ID NO: 96750 - DNA, 122 bp, Homo sapiens
tcgtcacagaaggtgcacatggcggggccggcgtgcacccaccactcacgccaggcgctgcgcgactgctgctggacacacacgatcccaccgaatccagacacggtatggcggttcccact

SEQ ID NO: 96751 - DNA, 122 bp, Homo sapiens
tccaccttccagccgggacgcgcgagcttttccgtttggctgagtcaaaaagggatcgcgcgcatcccgccgcccctcaccacgaagcgcagacacaggaggttgcagggtcagtgctgcgg

SEQ ID NO: 96752 - DNA, 122 bp, Homo sapiens
ttggagtccacaagttctagtggatggctcagtggagagaaagtgtccacttgaggtgcacggaaaaaactgaacaacactagtaaacagaactgtacagttgtagcacttttaggacctga

SEQ ID NO: 96753 - DNA, 122 bp, Homo sapiens
cttcccccggccacagccgcgaccgccaccgctaccgccgcggcgccagccctctcagcgcgcctgcgcaccagcccagccgccccggcgccctctgatggccggagtctgcgttgcactga

SEQ ID NO: 96754 - DNA, 122 bp, Homo sapiens
ggcccgggaacgcagcagggcgagttgttttgctccactcgtccaggaagccctagatgccgggggttcagggtcgaggctgcgttaaagtaacgttcttttctccccgggcgcgccctgtc

SEQ ID NO: 96755 - DNA, 122 bp, Homo sapiens
gcacacgccacaccggaagtgcctctgtacccgagggctgctccacggcatctgcgtctccgccctcttgttgaatttctcccaggccctacgtgtccggtcctttgagtggcctctctggt

SEQ ID NO: 96756 - DNA, 122 bp, Homo sapiens
ctcccagagaggtagtaagtgtaaggctcagagccccgcgcagcccagcccgcgccggggcggtgggtgggtgggtgtctgctatgggattattcttagcgctccactctcttcgcaaaagt

SEQ ID NO: 96757 - DNA, 122 bp, Homo sapiens
gtctttttatgttggacttctgtctggtccccctgagacgttgtctcttccgcaggccctcgggggctggagcacagctgtagccaacagaacacaggctctgtctgctgccctgaagcaca

SEQ ID NO: 96758 - DNA, 122 bp, Homo sapiens
gagccccggggattgcgctccacgtcccaagcctcgccgccccgacgcgaaccccggggccggtcccggttcccccggggcccactcccgctgtagagccaagaggaaaaggcacgagagag

SEQ ID NO: 96759 - DNA, 122 bp, Homo sapiens
ccttgtcagttgtgaccacccagccctggaaatgtcagtaatgctgtaaggagtggggatcggatcagatgccatccagatgctgaagtttgaccttgtgtcatttttcactttcttttttg

SEQ ID NO: 96760 - DNA, 122 bp, Homo sapiens
acaggaggctcaagggggcggaggcggcgttgccgggctctccggaaggagacgtggcggcggttgggccggtgatacccgggcgctttatagtcccgccgcctcctcctccacctcctcct

SEQ ID NO: 96761 - DNA, 122 bp, Homo sapiens
gtacagaaggtacccactgcccagcctgccaacaacctatcttcctttaaacaacaaaaacggagcagaaagaggaaaaaagcctgaacctttcctaataaggtaataccacatgccatttg

SEQ ID NO: 96762 - DNA, 122 bp, Homo sapiens
gataacctgttatgtgctgggaactgttgggctcctgggtgaacaggcttttccaccccacgagaacttcaaatctgacctttgtccctacggccattcaccttcagccgttttcctccccc

SEQ ID NO: 96763 - DNA, 122 bp, Homo sapiens
ggtggggctgcaggccaagccccgggcctccacccccaccccacttcacagcctgtcctgcggctcaccaggcttgcactccggaattacggcctggtaattggttccaacgcggatcatgc

SEQ ID NO: 96764 - DNA, 122 bp, Homo sapiens
cccactgcgcatatgagcgcttccttcgcggatcaggggttggcagccttacaccaggaacgcacctgggcgcagcctcgatcccacagggtccaggtgcagaggcaccgggatgcacgcaa

SEQ ID NO: 96765 - DNA, 122 bp, Homo sapiens
tgtggatggacacctctttgcattattataggaagaagaaaaagagtgaatggacgatgacgaagtagagaagtgtctgaggctgctacttctaggaatagcagaattcaaagttatctgtt

SEQ ID NO: 96766 - DNA, 122 bp, Homo sapiens
atttcaacccttagatctggagggttaacttcatggcaaacataggggttacgaaaataacgcaccataatatttcccccctagtttttcattaacaacatgagccctcctaggtctgggta

SEQ ID NO: 96767 - DNA, 122 bp, Homo sapiens
ggggcccacagctaaatccagtgagtggaagttacagggagtctgcttccagtgctgctccgggaaggatcccatccaccagagctgccccacatggaccatggtcaggcagaggaagatgc

SEQ ID NO: 96768 - DNA, 122 bp, Homo sapiens
ggggcctgcaggcagtggaggcacgggagcagggcacggctaccatggaggtgcagctgtcgcatgcggacgtggatggcagctggactcgtgacggtctgcggttccagcaggggcccacg

SEQ ID NO: 96769 - DNA, 122 bp, Homo sapiens
gtctactcatacgctaagctcaagattgctggagctctgaaggggctctgtgccacactgcgggctccttccactgtttcgggcatagcactgaaccccgaagaaagttccaggcctagttc

SEQ ID NO: 96770 - DNA, 122 bp, Homo sapiens
gtacctggatatgagcaaaaccctcggaagtctcatgaacatcaagaatatgtcaggccacgtgtccatgaaatacctctcccgccaggagagggagaaggtcaaccagcttcgacaaaggg

SEQ ID NO: 96771 - DNA, 122 bp, Homo sapiens
tttaactggggcagccagcccagccgagccctcctctggggcctccgggctccacagcagcgtgttctcaccagcacaggatgccccacccatggccaccatccagggtgcacatcaggccc

SEQ ID NO: 96772 - DNA, 122 bp, Homo sapiens
atccgacgatttcgcgcgcgctctgcttgcaaagtctttaagtaaacacgctcaaatgaccgccccgggcggcccgaggcacgctctctccccctccgcgggattagtaactttaggacttc

SEQ ID NO: 96773 - DNA, 122 bp, Homo sapiens
aaaaaaaaaaaaaaaaaaaaaaaaaaaaaaggagggataagcttctgggagaaaaagttccgggtaaagaaatctcactataaaaaagaaatagtagcagaaacagctgggaactcctagac

SEQ ID NO: 96774 - DNA, 122 bp, Homo sapiens
cgcagccccgccgctggaaggccggccccagggagcgggcgggccaggcgcgctgagagccgaaggacaggactcgcagccccaggcccgacccgccagactcacagcctccaaccccggcc

SEQ ID NO: 96775 - DNA, 122 bp, Homo sapiens
ctgacaatgctgtcatttcatctgttaccacctgaatctccactgtgagtcccagcttctcggatgcccactcctgtctccacctggacatcccacagacacctcaaatttgccaaacctcg

SEQ ID NO: 96776 - DNA, 122 bp, Homo sapiens
tgacagctccgggagcctcaagcgcgacagcggcgccctcacctcgggacatccacacaccgaccgctcctgctccagaggcaacaacccagcgcgcctagcctggcgccgtgcagcgaagc

SEQ ID NO: 96777 - DNA, 122 bp, Homo sapiens
ctttccccttctcttcctttttcttcgcctgttcttcgggggccggcccagcctccaggccgtttccgaagaacctgtgcctgaggtcctcgaagccgtcgctccagccgcgccggccggcc

SEQ ID NO: 96778 - DNA, 122 bp, Homo sapiens
aagccgtccatcaaggcggcgcgcgccaaaaagatcttcggctggggggacttctactttcgggtgcataccctcaagttttcgctgctggtgaccggcaagatcgtggaccatgtgaacgg

SEQ ID NO: 96779 - DNA, 122 bp, Homo sapiens
cctcggctccccgtgcaagcgctgggctgacaactgacagcggcgacgcttggaatgagacgtccaagggttcaagggtcaactctttcctccaggcctagcagatcatagatactccttct

SEQ ID NO: 96780 - DNA, 122 bp, Homo sapiens
tgtccctaataatgcctggctctaaagtctgtttcctctgagagtcagacaccggccctccgggttactcttaaatatttactcattttcccttctcttggtttatcacgtgggggtcattt

SEQ ID NO: 96781 - DNA, 122 bp, Homo sapiens
aggtgggcggatcacttgaggccccggttcaatatcagcctggcctacatggtgaaaccccgtttctactacaaatacaaaaaaaactggctgggcatggtggcatgcacctgtaatcccag

SEQ ID NO: 96782 - DNA, 122 bp, Homo sapiens
aagaatacatcctcgcacgtcaccaccgaggtccgtgggcacagtgattcacagaggcgtcgtcaccgcacggacagctgtctttggagcacgtctaggacattgtgtagtggatgccgaga

SEQ ID NO: 96783 - DNA, 122 bp, Homo sapiens
ggcagaatcataaaccgcccacttgctctccttcccgtctgtgaagcgctcgttcagagccgcaggactccgcaaacaataaaaccggctgcgtggctattgcctggattacagagcaagca

SEQ ID NO: 96784 - DNA, 122 bp, Homo sapiens
acctcgggtgatccgcccgcctgagcctcccaaagtgctgagattacaggcatgagccaccgtgcccagccagagagtttcatttttaacaagatgagagagactcttggtgttcaaagaga

SEQ ID NO: 96785 - DNA, 122 bp, Homo sapiens
ggggttcattcagcccctctccctgagcacactgggggcatgcaggagcagggtatggggcgtctgcgcagctccctgcttatcgctaagtgagatctgtggccaggacggcggggcctgga

SEQ ID NO: 96786 - DNA, 122 bp, Homo sapiens
atgctgcacgtgcacgtggaccgtgacccccaggagctggtcacgccggtcaagtttgcccgtctctggactgagatccccacagccatcaccatcaaggagtgagaggggtggaggcaggg

SEQ ID NO: 96787 - DNA, 122 bp, Homo sapiens
atccagcagtgatcaggcagctgcagctgtcagggaccaccaccacctacgcgattgatccgtgggagaagccgtcctactcttttctttctcctttgtccttctcattcctgaccccttca

SEQ ID NO: 96788 - DNA, 122 bp, Homo sapiens
aaaaggaaaacaaaacagcggcatcgacagggacatctccaggcggacgcgcaggagcgccgctaaggacagcacctggtcccgaggcttgggggtagctgcttcaccttgggcctgaccac

SEQ ID NO: 96789 - DNA, 122 bp, Homo sapiens
ggaccactgggggtgatatcaagtgtcagggaccaccggaggcactcaataaatagaagacgcgttgctgttgagaagtagaagctgtgccggtgggaacaggtcaaaggccacccctacac

SEQ ID NO: 96790 - DNA, 122 bp, Homo sapiens
taaatttcaacgccatggttcccgttgcttctctgttacctgttctttctcgccatgatccggagagcacgccacatcctcctccaaccccttcaccctcactggcagagaacaatctctcc

SEQ ID NO: 96791 - DNA, 122 bp, Homo sapiens
ttaggttgatctggtgtgatagatggaaatggaaaatttaaagcagttttccagtgtttgcgtagtatatgttaaagaggatttagaaacactaagatcagaggtttaaaccagctaagccc

SEQ ID NO: 96792 - DNA, 122 bp, Homo sapiens
ccacaccgtgttcccagccactcctctgttgcctccattagacggccttgaactcggccgcgctcgcagcgccgtcctggactgtgaccacccggactcctaccctaacccagagctgtgcg

SEQ ID NO: 96793 - DNA, 122 bp, Homo sapiens
gcaagtgacctaatctcttaaaatttcctcatttgtgaaataggcataataggccaggagcggtggctcacgcctgtaatctcagcactttgggaggccaaggcaggtggatcacctgagct

SEQ ID NO: 96794 - DNA, 122 bp, Homo sapiens
cataacacatcatcttcattggtctgtgcaagatcctcccctgttctgtgtgtgtatatgcgtgtgcattttgtcataaaacaaaattgtatcaaattgattttagtgttctaattgactct

SEQ ID NO: 96795 - DNA, 122 bp, Homo sapiens
gttaaaatgtggggaaaaacatggcttagcatctgtgaaatacataatgtcatggtgcttcgatcaatgtatagtggattttctataattccaaagttgggatgtggaaaaaacttgcctta

SEQ ID NO: 96796 - DNA, 122 bp, Homo sapiens
cggagtgctgttagtcacggtgtggagaggtgcaatccatccgaaaaggccagcgggacgcggagaggtcatctccattacaaactggctgtgattaagccattacttaccgtaatgggatc

SEQ ID NO: 96797 - DNA, 122 bp, Homo sapiens
taatcttaaacctatttccaaaagactaaccaccgcatcaaacaaaatccttgtaaattccgttttgaatttatgcatacttcttcgccagtctcaacctttccaatagttatgcattcctt

SEQ ID NO: 96798 - DNA, 122 bp, Homo sapiens
ccgtgtagagaggccgtctgcgtattctgagctgggctgtggttgttcccactcgcccctcgccctcactctccagaccccacaattgccgacaagcactgagcaccgttggctccaggatc

SEQ ID NO: 96799 - DNA, 122 bp, Homo sapiens
cagcatggagggaactgcccccatgatccagtcacctcccaccaggtccctccctcagcacgtggggctaacagtttgagatgggacacagagccaaaccatatcacattataagaaagaaa

SEQ ID NO: 96800 - DNA, 122 bp, Homo sapiens
agcacgttcgaggagggctaagcccagcgtgaggctcgttggctcgacagaggcacgtgacgggtcctgagccaatccgtggaaggtaaaagctgcttcctgttggggcatgagtccggcgc

SEQ ID NO: 96801 - DNA, 122 bp, Homo sapiens
caggctggttcagtgataagcaggagccaggcgacccacaggcttcttggatgggctgggcgtgcatggcataaccgtttgagaacaacaaaccaagccggccgggctgccgctctgtttcc

SEQ ID NO: 96802 - DNA, 122 bp, Homo sapiens
agtggagcttccctaggaaaggagaccgtcccgagaggctgtggcgcgcctgggactccccgacccttgccacgacatccctgccaccccttttggcgtgaacccaccggggatcccgcccg

SEQ ID NO: 96803 - DNA, 122 bp, Homo sapiens
gcacgcttgtgccgaggggcctgagctatgggacttcctccaggtccctctgtttcctgccggcgtaggggactcgtagtgtcggatcgcatagtgccaaaaaatagtgcatgggaaacaaa

SEQ ID NO: 96804 - DNA, 122 bp, Homo sapiens
ggccttgtggccccgaccctctcctcccctggtgatgctggaggaggtaccggggaggagcgtgtgtggccccggcctctcactagcagcggcggctcccgacgctagcctgctcgagcgca

SEQ ID NO: 96805 - DNA, 122 bp, Homo sapiens
ttgctgaaccaattaagagtaaactgcaaacacatgacattttattcttaaatacttccacggtccctcctaagaacaaggctagctacgtggccacaattcatttacttatcctcaagaaa

SEQ ID NO: 96806 - DNA, 122 bp, Homo sapiens
gactcctcaccagtggtatattccacaacagtgtcacagtcgtctggcccctttggtttccgtgtcatcctttttggtgtgtaggacaaggagccagggaattggcacgtttggcttttact

SEQ ID NO: 96807 - DNA, 122 bp, Homo sapiens
cacctccccggagtcgtcccctgagctcagctctccaccgctgtcgccggtgatggcccccgcgggcaggaatgatgaagccatgtctccttgctcgctccgtccctctgtgtccggtctgt

SEQ ID NO: 96808 - DNA, 122 bp, Homo sapiens
tgcagtgggggactcagcccgcgatcgccctcgtgggctgttttctcccaccccctccaccgcaaggaaagcccggctgattggacaaacaaaagccttgagttaaacgtcgttggcgggaa

SEQ ID NO: 96809 - DNA, 122 bp, Homo sapiens
ccatcattgagttccccgtggctttgctgaggggttagagctttgtcagcatcatggttccgaggagctcaggagtctgcctcagatctgatctggggtccgaatccagctttttcgctcct

SEQ ID NO: 96810 - DNA, 122 bp, Homo sapiens
agtattttcgatgtctcacctcaaatcccccaagctagtgtggctacatttatttattggcggagatgtgaattatcccatttccctcctacagttccttcacatgcacctcgaagaccatt

SEQ ID NO: 96811 - DNA, 122 bp, Homo sapiens
acgccaatggccacgcaggtgaaggtcactgtctggccccgggaagcctggatggactcccggggaggtgtcaccacctgggggggcactgaggagaccagggcaggagtgaggggtcgggg

SEQ ID NO: 96812 - DNA, 122 bp, Homo sapiens
gcaagacggccccgaaacccccaggcgcacgcaccaccccgcgcctccccagcgagggcccgcggggccatgcccttcagtgggcacacttctgggagcccgtcctgagctcggtcactgac

SEQ ID NO: 96813 - DNA, 122 bp, Homo sapiens
ctgggcagctgagtcctggcccaggggtcaccggcttcagcccttggtcagctgcctcaccgtaccctttcggcaccctctgcctccgcctgctggacccgggggtctccaagcagttgctg

SEQ ID NO: 96814 - DNA, 122 bp, Homo sapiens
gtaatcagatctgtgtgttggagaaaagctttggcagcggtggtgtggaggagagactggcgtggggacagatgggctgcagagctctctgttaggaggcttttgaagtaggtcaggtgaga

SEQ ID NO: 96815 - DNA, 122 bp, Homo sapiens
tctcccacagctcgtgtggggctgctgctgtgtgtggggagcggacgcttcctcctgagccgattcaagcctcagttgtgaccaggtgtgaaatttccgaagttctcattcagagaaccaag

SEQ ID NO: 96816 - DNA, 122 bp, Homo sapiens
ctcaggtctagtttgtttatttttttaagaatcaaataaggaataatctctttcacccaccgtaatgctgacattcagaaacacagggccatatgaaactcagcccagactgaggcaactga

SEQ ID NO: 96817 - DNA, 122 bp, Homo sapiens
ttcagtttgttccgctgtttgaaattggcgccggcggagcgttaaggtcacgtgacggaacgtcgccaatcggcgccggccttgtctcggcattccgggctcgaaggctgtgcggtctgcca

SEQ ID NO: 96818 - DNA, 122 bp, Homo sapiens
acaatttatcaggttttgaatcaaacccgtgtaacgagtcttggaagctgcagctcccgtcgccggcgcgggaggaccaggagcagctccggcgacttccccgtgcgggaaggaaacttcgc

SEQ ID NO: 96819 - DNA, 122 bp, Homo sapiens
actcttatgaaaaagagaaaaagaaatattataattggggaacagatagaagaatagtaacgttaatagagctttagtgaaggctttaagtaaaggtatcaagaataaggaaatctaagcag

SEQ ID NO: 96820 - DNA, 122 bp, Homo sapiens
aaactacacaggagcgcagcgcagaagacggaaaaacttaataggaaatacgcactcccgcgcgtgtcaactcatagaggaattccaagtggagcagcaccacgcagaaaatgcacgtgaat

SEQ ID NO: 96821 - DNA, 122 bp, Homo sapiens
cccattataagtctaaaatattgaaagtaaaaaatgtatttattgcccccataaatccatcgtaaagtcaaaaaatggtaagttggtgatagtctgtatttgatttattacaaaaggtgaag

SEQ ID NO: 96822 - DNA, 122 bp, Homo sapiens
caaattgagtcctaccttgcttcaggaagtaagactttgtctccttccctactttctaaacgggccttcttttccctaatctagaaaaacagggtttcccattggtaaggaagtcaagaaag

SEQ ID NO: 96823 - DNA, 122 bp, Homo sapiens
atcactgctgcacaaaaatccaaacgatgtcatttcaaatgacatacagacctttcaggccgggtgtggtggctcacgcctgtaatcccagtactttgggaggctgaggctggcagatcatt

SEQ ID NO: 96824 - DNA, 122 bp, Homo sapiens
cccggggtagggggaggttgtaggggcaggcctgggatttcccgcctccagacccagaggcgctgagtcagcggaaaccccaaccacgccacagaggcgccccactgtggtcccagtgagga

SEQ ID NO: 96825 - DNA, 122 bp, Homo sapiens
gagagggtggcgggagatggcaggcacagccaggagaagcctcagagcagctggtgtggccggggcaggcgtgggaggtggcgagccggcgacagagggccggggtccgtctgcaagcgtct

SEQ ID NO: 96826 - DNA, 122 bp, Homo sapiens
agggaggagggagagcacttactacacatcaagaaggtaaatataaaccccaaaggcttacgttactcatcagaccacaatatggcctggtactaagcagcgcgcgtgtggaaggctgggtg

SEQ ID NO: 96827 - DNA, 122 bp, Homo sapiens
gactcggggggcgctggccagcagcgggggaggcggtggctggaccaggctcggctccggcgcctcggccgctcgggctcaggctcggcggactcgctccccgcgggggcggatctggcggc

SEQ ID NO: 96828 - DNA, 122 bp, Homo sapiens
gggaaagttggtctcggaaaactacagccgccctcagcgcgccttccgcccgcatttcttcgcagtgcattctggggaatgtggttcgctgtggcccagaggcgcgagggccggcggagttt

SEQ ID NO: 96829 - DNA, 122 bp, Homo sapiens
cctttttttggtgaatagtggaagtagtaaagaggctaacagttgtcagggcttgtcagccgatcatgggattgaatactactgaggtgagcaagtcttggcagcagtgttttgcctcctaa

SEQ ID NO: 96830 - DNA, 122 bp, Homo sapiens
atggcagggcctctccgatgcacctgtgcgcctcgctgcggggtgcccggtgggtgcttgcgggatggacacgcacctccagagggtgtggacatgccccactatgtccttcagctcctagg

SEQ ID NO: 96831 - DNA, 122 bp, Homo sapiens
gaaggccgtggtaggagcccaagaccgtttcaggggaactttggcgaagtgttcagcggacgcctgcgagccgacaacaccctggtggcggtgaagtcttgtcgagagacgctcccacctga

SEQ ID NO: 96832 - DNA, 122 bp, Homo sapiens
tgtgatccgcccgcctcggcctcccaaagtgctgggattacaggcatgagccactgtgcccggcccgcatgtgcttttcaggagtggattttagccttagcaagaaggatatggtgtgggat

SEQ ID NO: 96833 - DNA, 122 bp, Homo sapiens
gacaatcgcgtgagtgctgcgggcgtagctgtgcccgggtcctagcgccggacccggcgacgccaagaaaccacccaataggaggccggaagcatcggaagtcacatgctgcccaggctgcg

SEQ ID NO: 96834 - DNA, 122 bp, Homo sapiens
gccccataaaggctggcctggaaggtctcagcaaggaccagctatacttaaaactgtccccgcagccaacagatataagtccttaactacagggattccagatatccagtgcttcactgtcc

SEQ ID NO: 96835 - DNA, 122 bp, Homo sapiens
aaagcggtgtgaaggctccgctgtcgccctgggcccagcccgcgcgcctcgcacgttgtgcgtctaccccacagccaatcagtggctgcacaggcctctttagtagccaatcagcagcttca

SEQ ID NO: 96836 - DNA, 122 bp, Homo sapiens
tctagagtccccgctgcacccctttctgcagagacaatactttgcaccacattacagggacgcggcgggcttctccatcggacccagatttggggagtgttgggaaagaattccagggtacg

SEQ ID NO: 96837 - DNA, 122 bp, Homo sapiens
aggttgtgtgtgtgtgcgcgcgcgcgtgagctccaggcgaaaaggggtaggattcagcgccgagcagagagggtcagggtttttgacgttcctcgccagctgcacaaacctcccggagcaag

SEQ ID NO: 96838 - DNA, 122 bp, Homo sapiens
ggctcatcgtgagcaggttctttctgcccccagttcagcaacccgtctgaacagatctggcgtcctggagaattctagaatgaaggggaagagaggcagggaagagctgggaaatacgcaaa

SEQ ID NO: 96839 - DNA, 122 bp, Homo sapiens
gggtaggttttattaacagtctcgttttgcaaaggaagacagctgccagttgtctcagatcgcacgggcatgccgcgcagatgggcttctgagcagctcagggccagccagaggtctggcga

SEQ ID NO: 96840 - DNA, 122 bp, Homo sapiens
ctcacgcctcctgcggcagtggcggcgaccctagcttcgctcgctttggggctgcgccgccgtggcctccaacaacgccggctcccattggccgaggctcctagctcctctctccgcgagca

SEQ ID NO: 96841 - DNA, 122 bp, Homo sapiens
gccaggcactccagagccctccctgtcaactgtcccagaggagcaggctatgggttgcaccgcagagaacccctggatcttaagggcccctctccagctcttacccttgcctcacctccttt

SEQ ID NO: 96842 - DNA, 122 bp, Homo sapiens
caggaatggaaaaatacagcacctttaaggggagcacatatgaggctcctaaccaaggctcgggttactcagccatgttcttacgctacctttgttggcctggccccagaggaatgctgata

SEQ ID NO: 96843 - DNA, 122 bp, Homo sapiens
cggcgtcggtcaaggtcaattggcaggtgagttgacagcgccgccactaatcgatgaaaacgccccccgcgagcacccagctgctcatggcctccggaagcggacgtagggcgggtggggta

SEQ ID NO: 96844 - DNA, 122 bp, Homo sapiens
accacccctcttgcaggcgtcattgcacaaacgtttattgtgcgcccgccgcctgcctggcgctgggagtttagagatgactgccgagggatctctgtcttttcgtgtacagcgggaaggag

SEQ ID NO: 96845 - DNA, 122 bp, Homo sapiens
agcatttttctgaaagtggctggaaagcaatctctagcttggcttgtaaaaaccttatggcgggtgggggtggggaaatgagggatgcatctctcccctaaacaagtctcacaggaaaaaat

SEQ ID NO: 96846 - DNA, 122 bp, Homo sapiens
acggcagaagagagtagcctccagatttcccctctgagcacactgtctttctagcctcttcgttcaagcaacccggatattccaagcagagtaacggggagtaacgcgccacaacaatgcaa

SEQ ID NO: 96847 - DNA, 122 bp, Homo sapiens
aattcacagaaaccgccactgctgtacatcttattgaaggactcacgagttcttcttcaccgattaatccttttcctcatcccttcctacccctcccatctgccctaagaacaaagagcttg

SEQ ID NO: 96848 - DNA, 122 bp, Homo sapiens
agtggctgcctacctgggccaggtggagttgatacggctgctgctacaagccagggcgggcgtggacctgccggacgacgagggcaacacggcactgcactacgcggccctggggtgaggcc

SEQ ID NO: 96849 - DNA, 122 bp, Homo sapiens
atttaaatgattgcagaggctgactggtgagggattctccccttcctccagctctccctccggattttaacatatggagtacagtcacgatttaccgccaccctggaaagccagccgccacc

SEQ ID NO: 96850 - DNA, 122 bp, Homo sapiens
ggtcatgaatgctgtaatttgcctttcactgctgtcagtaagcatagaaacaccaacagacgccccggggacttctccaggttccaggctacttatccccagcaggtagtcacacgacccta

SEQ ID NO: 96851 - DNA, 122 bp, Homo sapiens
cctcccacccgcagaaagtgcgtcaggagccagcccacttcttcccttcactagtctgtccgtctgagcgccctcagcacccccaaccccggcttagctctctctctcgccccacagcacgg

SEQ ID NO: 96852 - DNA, 122 bp, Homo sapiens
aaccgcggtcggggagcacaggcttccgaagagaaactgagctctaagtgccactcaggccggacgagttccagagggggacagcgccctcctcgaaaagccttggtttctccccgccccct

SEQ ID NO: 96853 - DNA, 122 bp, Homo sapiens
cctccctgccctggccccagcccggctccgccacaggcgcccgacccctgccctctcccccgcagctagcagttctgcagggctcgcagtctcctgcagggttttgtccgcaccgccgaatc

SEQ ID NO: 96854 - DNA, 122 bp, Homo sapiens
agggtggttgcagaaggaatgataaggaccgatccccagaagtgagtgctttctctttgccgggaaactaaaggaaatccactaagtcaggatcagaggtgaaggtagggctctgagactgg

SEQ ID NO: 96855 - DNA, 122 bp, Homo sapiens
ggagatcttttcagaccaataaccttccctgcctccaaaacaaaatggggaggtagagggcgctagcgatggaacagatgttcctgcacgtcttacggatggtccagggtgggttttgtgct

SEQ ID NO: 96856 - DNA, 122 bp, Homo sapiens
ccttcggacttggctattatctggcacatttcttattttaaacaactttattggacaggacggagctattataagcggagcgcaccatcgcgaggcaggggctggatgcgttagggcaagcc

SEQ ID NO: 96857 - DNA, 122 bp, Homo sapiens
ctttcagcaggagttttggtctgctccagactcctaatgatactgccttttcagccgtgccgtccttcttagctaccacccaagagaggcaacgcagctgcgctgcttgccgccctggcctg

SEQ ID NO: 96858 - DNA, 122 bp, Homo sapiens
gcgtaccccatagctaagtacctacctttcttctcactcttcttttctttagacttcgcacgttccttgcggcggcggtcacgggaccttgatcgggaacggggcccttctcgaactttgtc

SEQ ID NO: 96859 - DNA, 122 bp, Homo sapiens
cccaacacgggcgaaaaagacgcggtctcagttaacggggacgctttagagaaacgcactcgcctctcctgttccggttgggtcggcgcgggcttctcaggcgccacgtgggattcggcccg

SEQ ID NO: 96860 - DNA, 122 bp, Homo sapiens
atggagtccaacactgagtcccggccggagtccctggtggctcccccggccccggcagggcgcagcccacggggccccacacccatgtctgcagccagagccctgggccaccacttcatggc

SEQ ID NO: 96861 - DNA, 122 bp, Homo sapiens
caaccaacattaatgatgacagtcaagtgaatttggcgaaatgatttcatttcctgggaacgtacactcctccacgatactttaaactccatgaagggaacaactatctaccataaaatata

SEQ ID NO: 96862 - DNA, 122 bp, Homo sapiens
cacggctgcctccccgtgtgaccagaatcactcaatgctgctgtcctggggcccgaagatcgcgtttgccattctggaacttttattcatctcgcttttcagaaacacaaatgacggatgaa

SEQ ID NO: 96863 - DNA, 122 bp, Homo sapiens
ggtgcttatttttgtttcacaaacttggtatttattaggtgttccaggctttgttcgacccgggtgggagggaggatctttgttggaggactctcactttctaattgcgggtttttgttctg

SEQ ID NO: 96864 - DNA, 122 bp, Homo sapiens
gcgggaaggtggtacccgttgggcgcaggccaggctgccaggccgcagggctctgtcccgcgaaagtcagtaggtcttccactaaggcagaattgtacttttactcgacagcgtggagaggc

SEQ ID NO: 96865 - DNA, 122 bp, Homo sapiens
atcagaaaagcagaacaatcatccaatggagacattcatcatacctcgggttgcagcaagcgtgttataagtatgccccatttgattacacccagtattgaaaacgacatgtacttaaggat

SEQ ID NO: 96866 - DNA, 122 bp, Homo sapiens
tggtggaggtagaggtgaatgtgatggctgtggcagaagtagtggtgatggtgatgatagcgatggtgggcattcccctcacttgatggtagagctccctgtgtggaatgttcactacatca

SEQ ID NO: 96867 - DNA, 122 bp, Homo sapiens
gcccttagagtcactgactgctaatatggtgggaccagtgagccctggagcacagggacacgtgctggttgaggagtgggctcaccctccaactctccaccgtattctgacccctccctctt

SEQ ID NO: 96868 - DNA, 122 bp, Homo sapiens
aaggatgaggagtcaggtgagggggccaggcctgggtctgagggaggccggacccccacccgccgagctttccttctggttctctgtcctgacccggaggctgaggcccagtgaggggcagg

SEQ ID NO: 96869 - DNA, 122 bp, Homo sapiens
gcccttggtgttgcaaagggaatcgggctggcatgtcttcaggggaagttgcgtgaggtccgggaggcccagggcagggaccgcatctgcaggattaggcaccggggcaaggtcttttggga

SEQ ID NO: 96870 - DNA, 122 bp, Homo sapiens
gcatgtgcaccatccactttctctatgcaactctgcttccccaagcatggctctgtgctccgtgtgccccggacaaatgcttacacattaatggttttccaacggattgtaagttctaaaat

SEQ ID NO: 96871 - DNA, 122 bp, Homo sapiens
tacctccattcccctgctccccccaatccccacccggttatctacatacacccacaccaccgacatcagtggaagcaggcagaatctaggaggggaaggttcgaagccactttccctcaagg

SEQ ID NO: 96872 - DNA, 122 bp, Homo sapiens
cccggaggcctctgtcctgccggagcacactcctggagtcaggaggcccagactcgagtgcgggcgctgccctgagcagctcctcgacatctgcccggtcacctcaactctgcagcccctgt

SEQ ID NO: 96873 - DNA, 122 bp, Homo sapiens
aggtcttccagctgcagaccccagccaggccctccctcctgcaggtgcctcctggctgctcgatttgaggctcaagctgtttctgtgcccagccagtgtggctccttaccgagctcgcccag

SEQ ID NO: 96874 - DNA, 122 bp, Homo sapiens
caaagggaccggcggacaatggccattgaattgggccggggcgctcgcgcagggacaggccgccagctgcccgcgctgataagaccctccccgcggcgcccggcgcgggggctaatgcccgg

SEQ ID NO: 96875 - DNA, 122 bp, Homo sapiens
cctggcccccggacgtgggcggttgccggggcgccagggccctggggccttcttggcattcgctggaggttgtgagttacgaggcccggatgttgatcttttattactagcaacactggacc

SEQ ID NO: 96876 - DNA, 122 bp, Homo sapiens
acttgtccgctgagctgttggggaacatcttctcggtgggcgtcacggccgggctgcccacgcccgagctgctgctgctgctggaccggtgctggaccaccggccgcacgggccgcatgggg

SEQ ID NO: 96877 - DNA, 122 bp, Homo sapiens
agagtggggaggatttggccagcgggccctcctgggacagggaagctgcgaggatgagttcggggacgccccaggcccaggggagcgaggtctggcaggattcaaggatcctggtggaagag

SEQ ID NO: 96878 - DNA, 122 bp, Homo sapiens
acacacattggcgggtggggtgcagggagggagaggcaggggagagagaatggcatctcgcgtggagggctgtcgtttgaactctcccagcgcgagagaccctgccccgcccccttcctgga

SEQ ID NO: 96879 - DNA, 122 bp, Homo sapiens
gatgccaccctcctccctggtgtttgttccgtgaggggcacaggactcagctcagggcggcggaagtccgtcttcctgctggggcaggtgcgctcgtgcgcctggagctctgctgggtcctg

SEQ ID NO: 96880 - DNA, 122 bp, Homo sapiens
atgacccgaatagttactcgactagcctagtcagaaagcttgcaaactctaccccaggaccgccatcttcccccgccgccttcttgctggtttttcttccgcgcgctgtcaagccctgttac

SEQ ID NO: 96881 - DNA, 122 bp, Homo sapiens
ttcaccctaagaaggacttccagaaaacgggtagtggcctaggctgactgctggaaaccacgattctcatgggaacaaattaaaaattcagcaactgctgtgttctctttagagaatggagt

SEQ ID NO: 96882 - DNA, 122 bp, Homo sapiens
gaatgagggtgagaaagtgaaaacagagctttctgcaacagaccaccacttctcagagtacgatatatatatacatatatacatacacacacgtattttatatatatatatataaaactaaa

SEQ ID NO: 96883 - DNA, 122 bp, Homo sapiens
cgcctccaggcgccgcggaaggggaggcagcccaccctgcagccgagcccaggagacccccgcccccacccctcgttacctgaaccacggagacccaactcggccggcagctgacggcagga

SEQ ID NO: 96884 - DNA, 122 bp, Homo sapiens
gagaggctgtggtccccatcatggcaaaggcccctcaaggggtgcatctcatctgctactcgcagggtaggcgactcccctgcccctaactcctaagccctatctgaggcttgatccttatc

SEQ ID NO: 96885 - DNA, 122 bp, Homo sapiens
tgctggaaaaatagggctgggtgtggggagaacgtgatgcagatgtgcctgagaatgggtcggaatcagcagctcgtccacaagggaagaaaggaggaatttttcttgcttgactttgcatc

SEQ ID NO: 96886 - DNA, 122 bp, Homo sapiens
atttaccaagctggggctctgtccaggcttcgtggggtcttcttcaagctgcacagtgaacgccacgcagcagcccagtccccttgagcttgctgcctccagctagctcgcctatctggttc

SEQ ID NO: 96887 - DNA, 122 bp, Homo sapiens
taataaacaacagctcatcttctgcttcatcacaaagggtggtatccagtccgcacctcacggaccaccaacaaaatcctctcactctcaagtcgatccctcgaacccaggtgccccgcgat

SEQ ID NO: 96888 - DNA, 122 bp, Homo sapiens
ctgctctgtctacccgagggcaccagagggcacgagaaggctggctccctggcgctgacacgtcaggcaactgaggcacaaggctggcatttctgaaccttgcccctctgcaaacacaaggg

SEQ ID NO: 96889 - DNA, 122 bp, Homo sapiens
caacacaacacagtgctggaagctctggccggtgcacacagcaagacaaggaaaccctcgcgttcaacacagtgctggaagctctggctggtgcacagcaagacaaggaaaccctcgcgttc

SEQ ID NO: 96890 - DNA, 122 bp, Homo sapiens
agggaagcagccgctgacccgtggcatgagctggatgcggtgtccgttgcaggactagggcgccgacatgaacctgcaccaggtgctgaccggggctgtgaaccctggcgaccactgcttct

SEQ ID NO: 96891 - DNA, 122 bp, Homo sapiens
ccttcatgggctccggcgcccaccgagcctccccgatgggcgccgccccctgctccagggcgcccggtcccctcgaccgcctggtcccatggaccgcccaaggctgaggagtgcggacgcgc

SEQ ID NO: 96892 - DNA, 122 bp, Homo sapiens
tatcaagaaccaaacatcacagatccagaaagagccttccctctgctacttccctgtctgcggtctctgcgtgacacaagttatggtttctaagggacagggaagcttggctgagatcactg

SEQ ID NO: 96893 - DNA, 122 bp, Homo sapiens
gcctgcggccgcctgggcggcagcccctgcggtcctcaaagttggccccctgggagggggcggcagggagcaggatgaaggatttgttgtaggaggaggattcacacatctgggcgaaggga

SEQ ID NO: 96894 - DNA, 122 bp, Homo sapiens
gcccagcctgagaacaggagaacacacagcggggcccccagggaccctcccaacgtcccccgcccccccgcccagcctcagaacaggagaacgcacagcggggcccccagggaccctcccaa

SEQ ID NO: 96895 - DNA, 122 bp, Homo sapiens
tttaacttccattatgccaaacttgggatgggattttcgaagcagacaacactatttcatcgtgtttcaaattggaaccttgaggctagttagtatcacactcaggccacactcagcacttg

SEQ ID NO: 96896 - DNA, 122 bp, Homo sapiens
agaaacttcccaaatcttaactgccaatatctttctttctaaaattgtgtttttgtatttcgtggtaaactcagttcaaagccgcggatgggggcaggaataggaaaactgctgctgctgct

SEQ ID NO: 96897 - DNA, 122 bp, Homo sapiens
gctgtgcggtgaccggagttgcaggttgccaatcttgctgaggggggctccaccggacgccggcctacgggtcgtaggcgtgtgtggggtgaagggggaagaggacgggagaggattggctg

SEQ ID NO: 96898 - DNA, 122 bp, Homo sapiens
caggcttgtgctcagagagctgacggtccagtgggaggaaaagggtgccgagcaaacctgcgcagcactgcagtgcagcgcaactgatcagtcccacgtgacgcacaagcagagggctgtga

SEQ ID NO: 96899 - DNA, 122 bp, Homo sapiens
cggagaaaggactaagacaccggtggaccgagcagttactcccggcatgctcctcctccccgggcagatttcaaaccctctgcagccccacctccgcgccttcgcccccggccagccccagc

SEQ ID NO: 96900 - DNA, 122 bp, Homo sapiens
acgcggaccgggccaccagcgggtggggcctgtgggctctgtgatgtaacttgggaggggcgcggggcggggcctaggtcgcgggccatctgggctctggaaggaacccttagaggagcggg

SEQ ID NO: 96901 - DNA, 122 bp, Homo sapiens
gctggcgcccccggcccctggcggacgcgggacggggctgggctgtgggtgtgatgggggcgggggcgctgggagagccgtgcttaggtcggggaaggctgggctccggggcagcctaactc

SEQ ID NO: 96902 - DNA, 122 bp, Homo sapiens
cgcacgacgaaggcactgggagggcacaggcgcttgcgcagtagggtggccgctcccggccgcgtgcagcgcgaacgtcggcgcaggcgccaaggctctggcagttggccagcacaccacta

SEQ ID NO: 96903 - DNA, 122 bp, Homo sapiens
ggggctaaggaaccccgtggagcaggcagcggcgctcaggaggcagcagcttgagatccacggctcgatttttaaaaattgtaagggagaaggatgcctcgaaagcctctgtggtattttgt

SEQ ID NO: 96904 - DNA, 122 bp, Homo sapiens
gctgcatgaagccaggccagggtcggagccggggctgtaggggtgaaagggaccctcggccggctggaggtgttatgtaatgagtgcttatgatgattgggtgctaattgcctactgggtgg

SEQ ID NO: 96905 - DNA, 122 bp, Homo sapiens
agccgcctggccaaacatgagcctctctcctgttgtatcagatgctgttctggggacctgcgccaggagcctctgccagggctttaaatagctgcccccattgatctggctgcaggcagcag

SEQ ID NO: 96906 - DNA, 122 bp, Homo sapiens
aacgcccaaactgggggtcgttcgtctctgggcttggctgggaagactgagtggagttgccgagagggggttgaggcacccgccgcggcccgacgagctcggggatccgcattcctctcccc

SEQ ID NO: 96907 - DNA, 122 bp, Homo sapiens
ggacttgtaggaagtgtgggaagtgcctgttcccgccacagtgcagacacagaagccacacgcagagggcagtgaacatcagaatttggtgctgtgtagagagagacttgcttcctcaccca

SEQ ID NO: 96908 - DNA, 122 bp, Homo sapiens
aagtgcaagaggctttctactctaatatgaagactccaggagcctgggaggggctgtggccgggagagctgagcacccgtggccgggtgagctgctgtgttatccatgctccatccccgacc

SEQ ID NO: 96909 - DNA, 122 bp, Homo sapiens
gccaacccctccggctacgggccccttaccgagctcccagactggtcatatgcgggtaagcgctgatctggcagttaactccactggggagattttcacctagagggaacgcccctggacgg

SEQ ID NO: 96910 - DNA, 122 bp, Homo sapiens
gagatccggaaacccggcccccggccgcggcccctgctggccgcacccgctcctcctgcccgctctgctccgccctgctctcgccagctcccactggaggaagaaagccgagaaccgggagc

SEQ ID NO: 96911 - DNA, 122 bp, Homo sapiens
gtgcgtgtcatctccccaaatagaaggtcagctcctgagggcagagacacaactcattcccgcctgcacagtgcagctggccaggacctcacagggctgacaaggggctgagagatgggcct

SEQ ID NO: 96912 - DNA, 122 bp, Homo sapiens
ataaactggatataaaccattatggtggatacagcacttatttgctaggtaagagaacttcgcttacctaggatgacagtctcaagttgctaaaagccacggatatctcaaacttctcaata

SEQ ID NO: 96913 - DNA, 122 bp, Homo sapiens
aaagatataaacataaacgtatatttgaagcacaaaaataattacggctttttttggaagcggagttagacatttccgtagaaaagtagatgcaatcaatctctcctgatttttgtcctccc

SEQ ID NO: 96914 - DNA, 122 bp, Homo sapiens
gcttctcgtgcgcaatctccagctgcttctggtagtggttgtgcttctcgattttggcttcgaagtgcttgagctcctcctggaacaaggtttccataggtgagtgttcccttcccgtgctc

SEQ ID NO: 96915 - DNA, 122 bp, Homo sapiens
gccgggacctgggtgaggatttcctcgccagccctccttggcacagagctgtgcatctcacgactcctgcgcgaccccgggccaggccctattagtgtctgggcttcgggcatctagtctgc

SEQ ID NO: 96916 - DNA, 122 bp, Homo sapiens
gcagttggagtgtgtcccagacctttgtcctctcgctgggcgaaagctgtgagtttccgccgtacccggctgcctgaccccttcacttcgggttctgaaacctcaaattacagggcccctct

SEQ ID NO: 96917 - DNA, 122 bp, Homo sapiens
attttgttgttattgttgtttttgaagacagagtctcactctgttgcccaggctggagtgcggtggcatgatcttggattgtgttcttccagggttgcagagagaagtgcaacagcgtctca

SEQ ID NO: 96918 - DNA, 122 bp, Homo sapiens
agtggcagatccccgagggggcggggccagcactcagcctgggtagagataagtgcctggcgggaggaggcaggggcccttcccgagcccagaggccgcttgggggcaggggagggagttgg

SEQ ID NO: 96919 - DNA, 122 bp, Homo sapiens
cccccagccttctttaagttgccgttagtgttagtgttaacacctgatttcatctatatgcgaatgagctccataagccaacaaggtaaactccagctgtggctcttaggaagttaattgct

SEQ ID NO: 96920 - DNA, 122 bp, Homo sapiens
tctttctccacagccctccttgtccccttgatgtgcacggtcatttttcctttgaacccacgctgtaattgcactttaaactccttgaggccaggcgcagtggctcacgcctgtaatcccag

SEQ ID NO: 96921 - DNA, 122 bp, Homo sapiens
gatggtaagtggttggactgagatcaaagcctagagtcagttcttaaccaccagtgtcttcggtctcaaaatataattgggtcatttgcctataacaacttttgaacttttaaagattaagt

SEQ ID NO: 96922 - DNA, 122 bp, Homo sapiens
cggccttggccgtgaccccagcttggcctctttgtctctcagccaggccagccagttcagcgttaaagctgctggagcatccaaggagacataaagaaagtttagagacttttaatttgcca

SEQ ID NO: 96923 - DNA, 122 bp, Homo sapiens
acaacttgattcctccagtcgccgctgccacctggggccggagtctgcgctgggagccgccgtcctgctgaggcacggcccggctgtcctggttgttttatgcattgtaggatatttagcag

SEQ ID NO: 96924 - DNA, 122 bp, Homo sapiens
ctgttcactagcagccttggtactcttctccttggcaattcccagatacagtggagaggtcggtaggacacaggagctgaaacagaaacaagccccatgaaactaggagcgcaaacgacgat

SEQ ID NO: 96925 - DNA, 122 bp, Homo sapiens
ttgtttttagtagttttactccacctcgatgacataacactcaaacaccttttggttttccgtccacctccccagctgctcctggactggcttgttctacctggccagtgcacatcctcact

SEQ ID NO: 96926 - DNA, 122 bp, Homo sapiens
tatatggggattttgcagcccttccttctgtgaatttcagcttaattctaggcagcaattcggaatttgcctggggtactaaccagaaaagagaaggaaatacacacacacacacacacaca

SEQ ID NO: 96927 - DNA, 122 bp, Homo sapiens
gacattcgaagccagggggaccacgggcctgcggatgcaagcgagtcctacggactcctgcgcgcgagctcgcgggcgccgctgcgggccttcccgctggcaccttttcctaggtttccaac

SEQ ID NO: 96928 - DNA, 122 bp, Homo sapiens
catggtggccacagattgcgaggcacacagagcctaacattagcgctaagcggcccttcacgggtctgcagcccccggcctggcgcgctcggcttccgcggacggtcttccaccaggtcctc

SEQ ID NO: 96929 - DNA, 122 bp, Homo sapiens
agatatcctcaggaaattggaaaagagaggaaagagcttgggaaagagacctcgtgaagtcgtatacagacaccttgggctcatgaatctgatcttaattagcatattttaaaaagacttta

SEQ ID NO: 96930 - DNA, 122 bp, Homo sapiens
tgagaatcgctgagctgtaaaaatgttagaaagccggtgtcccaggcgccctgagaaagccgggagagggcggtggctgcccacaggccgcctccagccccgcgcgaggccgaggcctcagc

SEQ ID NO: 96931 - DNA, 122 bp, Homo sapiens
ttctgtaatatttgcgtgttttcctctaatgctggcctttttgcttcccacagtgttttacgacgacgacttgactgatgctgtgtttaaaacgctctcccgactcgcccacagattgaaaa

SEQ ID NO: 96932 - DNA, 122 bp, Homo sapiens
aacttcagtctctgtgctagtattactctggcaatgggctgactgctgaaggaacttgaccgcagtttcagcagtgtccttagaacgtaacaggatgaggcaaacaaggctgtaagtattct

SEQ ID NO: 96933 - DNA, 122 bp, Homo sapiens
agtgacttctgtgttctccccggtgtggagagacccagacaggaggaaaggaaagcaacccggtttcctccagctctgggacttataggtgctccatccgtgtatgtcagatgagcacagat

SEQ ID NO: 96934 - DNA, 122 bp, Homo sapiens
aaaaggcacacttctgccttcaggctgcaagcctactatgtgaatttccatgaggtcatgcgttattcaatgtttgcctaacataaagtgattgacacacagtgggctctcaggaagtagtt

SEQ ID NO: 96935 - DNA, 122 bp, Homo sapiens
aagctcttgcatattcacttcctcccatcacacgtgctgtgtacaagcaccctcagagctcgctttgggagacccctgcctcagggctgcgggtgccgccgtccacaccacaggcccttctg

SEQ ID NO: 96936 - DNA, 122 bp, Homo sapiens
gagaaaatgacggtagagtgacagtttctctaatcatcagttttcaaagagtatgtttttcgttggaaccacaaatatagtacacttaataaggggaaacgaaaccttgaatttttccttcc

SEQ ID NO: 96937 - DNA, 122 bp, Homo sapiens
ctgcgccccgcgcgcgtagccatcgaagccgccctggagctggtggctgttgctgatgagcgcctcgaccgcgtcctcggggctgaagcccagcgcctcggggttcagctgctgcgggtagc

SEQ ID NO: 96938 - DNA, 122 bp, Homo sapiens
tgggcagcgccccaggcaggccgcccccgccagccctcgctgcgcggcgtgcgccccctgcgcccccagtactgatccagcttcgcgggggagacgcgcacccgcctcctgcctttagccgg

SEQ ID NO: 96939 - DNA, 122 bp, Homo sapiens
gggtgggtgtcagggatcacttgggatctttgacacttgaaaaattacacctggcagctgcgtttaagccttcccccatcgtgtactgcagagttgagctggcaggggaggggctgagaggg

SEQ ID NO: 96940 - DNA, 122 bp, Homo sapiens
agcctcaggttcctcatggacaaagtgaggggtcatatgaggacaaaatgagatgacatacgtgacacattggcactcaataggcactcagtgagtgagcgtccccctgagttttcccagca

SEQ ID NO: 96941 - DNA, 122 bp, Homo sapiens
aaaagaaaaaggtatgaatcacgccgtggttccactggggctcgaacccaggaccttctgcgtgtaaagcagacgtgataaccgctacactatggaaccgcgtgcggaatggctgtctctgg

SEQ ID NO: 96942 - DNA, 122 bp, Homo sapiens
caattaactgttccatttttttaaattgccaatttatttttctacccaatccagtatcaacgatatacaaaaggatataaacagactatcatgaatatttacaggatgacacaccaaacaat

SEQ ID NO: 96943 - DNA, 122 bp, Homo sapiens
acctggggacagctctcacctgggggaagaccttgttcatgtcttcggtttcctgctgcccgactggggctgtgtgcagagagctcagcacgggttccctgcattgtcaccaaggccaacct

SEQ ID NO: 96944 - DNA, 122 bp, Homo sapiens
aaagtgtgcccatcttttagtttagatgctcccatttcactgatgaagtgactgaaatctcgggagataaagatcctctcccaaggagctatacctgattaatatcagggcaaagattgaaa

SEQ ID NO: 96945 - DNA, 122 bp, Homo sapiens
tagtctcctgaagttgatgaaacttagtggtttcataagagaaagggtgccctcatgtggcgatttagaaacataacagcaaattctttggcattcccggcttcaaggaggaggtgtatatt

SEQ ID NO: 96946 - DNA, 122 bp, Homo sapiens
gtgagaggaagctgctgtgattcagagaagagacttcaagctgtgtgtgaccctggcgtccggttcctctcacaggctggagcttttcggaagtggcatgcaaagagtccaggtttggcctt

SEQ ID NO: 96947 - DNA, 122 bp, Homo sapiens
ccggccaatggggagaccctcgggggccctacgtgtgcctctctgtgctcccagggcccccgccacgcacgccgcctgctctgaatgctgcctgcataaaccggtttttctaaatgtctttg

SEQ ID NO: 96948 - DNA, 122 bp, Homo sapiens
atgactgttcatagcagatttattcatcataaccccaaactggaaacaactgtccatcatcgagtgagttaatcagttgtggtcatatattaacataacagtatgctactcagcaataagag

SEQ ID NO: 96949 - DNA, 122 bp, Homo sapiens
gaccaccgctgggatccgcacttccggaggaaaatggcgaagtgggcggggtggcacatgcgtagagagaacctggttcccaaggtccttgatggtaaacatcattggaaggtgacactaca

SEQ ID NO: 96950 - DNA, 122 bp, Homo sapiens
tggagggggcgctgaaacaccggcgggcgtcaggggccagcgctgagctgcagatctggccgcagcgctgagtgaagcgaattatctggagcgtgtttgatctgggactgcgtagtcagctt

SEQ ID NO: 96951 - DNA, 122 bp, Homo sapiens
tcggggagagccacggggagattcctggactgcggaggagccgggcgagcggggggagcacgacccgggtggactcagactctgcccagccttcaatcccctaggggaggaccggcgtcggg

SEQ ID NO: 96952 - DNA, 122 bp, Homo sapiens
cccgggagtgctacggccggagctccgtgggccacaggccccgtgcagagcccactcccacgcatcctcgcctgtggggtcctggctctgccactgcttctccgtgtccaccgcctggaccc

SEQ ID NO: 96953 - DNA, 122 bp, Homo sapiens
cgacctgagactatcaacgtaacatccgcatgcggagctgggaagagtgttttccacagtcgcagcgatgagctggtggttgctggttctagcacaccagtgaaacgagctgtggtgttatt

SEQ ID NO: 96954 - DNA, 122 bp, Homo sapiens
gggaggggagggatcgagagagagcggggagagagaggctgcaatctcctccctgaatcgcgcacagcgctgcagatcccactgctccgacatgcgggccgaatgcaggtgagaaaaggcac

SEQ ID NO: 96955 - DNA, 122 bp, Homo sapiens
tgacaaaggtgccccagggagagcaggcctgtatggcgagattggcgcgactggtgatttcggtgagtgttgcccgtccagtgaaaacagggagtccacaattcagagctctctgagcatgt

SEQ ID NO: 96956 - DNA, 122 bp, Homo sapiens
ttattgtttctagaaagaataaggctcaaatgcaggcctctgcagcctccctgtcattcgcgcccgcaggtggcacccagagctccgctcctcactcagtgaagcaattacgccccgcgcgg

SEQ ID NO: 96957 - DNA, 122 bp, Homo sapiens
gagaaattctgtgtcccggggccgagaagccagtctcagattctgttgggaggtgattaacgggtaggacactgctccgggacaattcagtctcgcacgggtcaggggcaggttgtgggtcg

SEQ ID NO: 96958 - DNA, 122 bp, Homo sapiens
cagggccttcctgggccggccctggccgcgcctcactgagctccttgcagtttctgtcagcgctgaaactgctgtggaaagttcagctcgagaagagggaactagggtgttttgcttttttt

SEQ ID NO: 96959 - DNA, 122 bp, Homo sapiens
ggcacggtgtaggagcgcaggtgcagatagatctgggcgcaggaggggtcgcatgagagccgggcccgcctggtacccctggaccagcccaggtgagccgggaaggaggtgggggtgggtgc

SEQ ID NO: 96960 - DNA, 122 bp, Homo sapiens
tcgaggacacctttaaagccactggaaccttggagagtggggttcccctcacacgttgggcgcactgccaacatccttccttcagacatacacataataattccgcaaaccctgttgagctc

SEQ ID NO: 96961 - DNA, 122 bp, Homo sapiens
agtgttagacccactgcaatgagcaagtttctgatcttgggaccttaacattctatgggacgacacagatatataaacaaaaataataattttagatagtgatacatgctgaaaccatgggt

SEQ ID NO: 96962 - DNA, 122 bp, Homo sapiens
ccgcagcagcctggggaaccgcggggctgcgcgtcgggagggggcggaggcaggggacgccgcccacctgctccttgttttgcagtgaggggtccagcccctgagtgcccgcaggggtcagc

SEQ ID NO: 96963 - DNA, 122 bp, Homo sapiens
cccttttgcatcagtggaactccttgaagctttccacaagtcataaggcagggcttggtacgagccaattaaccagagtgcaattacattaaaaacctcccccaaactttccgtggcacatt

SEQ ID NO: 96964 - DNA, 122 bp, Homo sapiens
ccggctaatttttgtatttttagtagagacagggtttcaccatgttgaccaggatggtctcgatctcgtgacctcgtgatctgcctgcctagacatcccaaagtgctgggattataggtgtg

SEQ ID NO: 96965 - DNA, 122 bp, Homo sapiens
agtgggagaaggcgaggttgcggcagatgagcagggcgtattctagctgctgtttggcctcgcagctccggatgatctgggtccgaaacagcgtctgcagaaacagggtgaagttgtaggga

SEQ ID NO: 96966 - DNA, 122 bp, Homo sapiens
ccggcgtcgattagctggggacccgtcgctgctgcacacttccggtccgttcaaccctttcgataccaggatttgggtggccaagacaaggaagaggacggtcccttcttccaatgccggga

SEQ ID NO: 96967 - DNA, 122 bp, Homo sapiens
cacccttttgctgattgataattgtattattttctccgaaaacttcactcaccgaaaggtcgatagattgaggctactctcaggcaagtgagctttaattaccatgttaaaggaggaaagag

SEQ ID NO: 96968 - DNA, 122 bp, Homo sapiens
agctgggggcacgtggacgaggctgagacccaggcagagtgtggccttcgcccaagggtccggtaactttgctggctgtttcgaagaaccgcacatgccccacttccacctaaaagtggact

SEQ ID NO: 96969 - DNA, 122 bp, Homo sapiens
acattacaatgtaaacatggtgtaactctcggacaccacagtatgtttccggaggggtaacggcggtgaggaaatcagactttgcctaacaaagaactaggagacacacttgacattccact

SEQ ID NO: 96970 - DNA, 122 bp, Homo sapiens
aagcggtgcccaccagcttccaggtctccctgacctgcctgctctatgccccacaccctacgtgccgtggctctgtgcagtgtacgtagatagctctcgcctgggtctgtgctgtttgtcgt

SEQ ID NO: 96971 - DNA, 122 bp, Homo sapiens
aggtggcaccggcgcggcgaggacgagctggagtcggcgggcttggagacgggacggaaacgggaggcgggggccggctcccacggccgcagcaccgcagacaaaaggctctccgcacaata

SEQ ID NO: 96972 - DNA, 122 bp, Homo sapiens
agggtcccaaaggtctgaatatgattctctcctccccagcccagttaactcccttagctacgttctcttctccctggtccccactgtcctcacccttctaccccatcctctgtcagggcaga

SEQ ID NO: 96973 - DNA, 122 bp, Homo sapiens
aagctgaagatggtgggtaagtggtggatagcagctatagaagtcagaagggagagaaagcgagacaaacagctgctcttgtcagcatggggataagtgtaaagagattaatagttatttga

SEQ ID NO: 96974 - DNA, 122 bp, Homo sapiens
agtgccagacagtgggtgcaggccagtgggtgcgcgcactgtgcgcgagccgaagcagggcgaggcactgcctcactcgggaagcgccaggggtcagggagttccctttccgagtcaaagaa

SEQ ID NO: 96975 - DNA, 122 bp, Homo sapiens
tcgttcacggccttcttcggcccctctagcacgacattgaggcctggcttcagaagccctcgggaaaacgcatcctgcaactgcaggacacaatcacggtcactcccaggggtgtaaggccc

SEQ ID NO: 96976 - DNA, 122 bp, Homo sapiens
ctcagcctgcaacccaagcagaacgcattcctcaggtggccattgtacattccacaggcccgctagaccaggactgtccataggctgtgatgatggaaagattctagatctgggaggtccag

SEQ ID NO: 96977 - DNA, 122 bp, Homo sapiens
gtaaaatccagtataagggacacattattctgagagcatagctttccctaccgataccagcgtcatttccactgctctgtaataagtagctgcagctgttgccatggcgattttcattttta

SEQ ID NO: 96978 - DNA, 122 bp, Homo sapiens
ggggtagggggcgggattgaagggtgggggtgggggtaggggtgggagtaggggtgggggcgctggacgcagaccacgttagaacctcggctcctggagtagcagaacctcggcttcaatgg

SEQ ID NO: 96979 - DNA, 122 bp, Homo sapiens
ttcttctatgtgtccctgcttggagctgaatgtttcttgttggctgtcatggcttatgaccgctatgtggctatatgtcaccctcttcagtacaccatcctcatgaatccgaaactctgtgt

SEQ ID NO: 96980 - DNA, 122 bp, Homo sapiens
tttaagcacattccttgctatttgagcagtgaaaaaaaatgaaggagaaaacacttttgccgcaaggagattccagcctgctggggaaaatggcaacttcacagggaagctcagctgtggat

SEQ ID NO: 96981 - DNA, 122 bp, Homo sapiens
gcgcgccctcagcgaagcaagtgaggcatctcactgggaaagtcgaatgtgtgtggcggccgccgccgaggcgggttccgaagagacctcagcagggcaggccagggcctacgcgaacgccc

SEQ ID NO: 96982 - DNA, 122 bp, Homo sapiens
gtcgaacagtgcacaaccagctcagggggattggtggccaccagctgctgcagacgtggccggaagcgcccctctgtgggaggccaggtcagggtgcctggggtgctggacccaccagggag

SEQ ID NO: 96983 - DNA, 122 bp, Homo sapiens
cctctgacaggacaccctgtggttcacgtccactcttgtggcctgggtatattgggaatgcggggatgaagaaagaattcacagccccacaaggttcgtgtggaaaaggggaggagtttccc

SEQ ID NO: 96984 - DNA, 122 bp, Homo sapiens
ataatatgtattgggcaccatgatgggcattggacacagagaaatgaacaaggcagacttcgcccctgccttcctggatattatagcctgagaggagaatggactttgtcaccactcattgc

SEQ ID NO: 96985 - DNA, 122 bp, Homo sapiens
ctgcgctgccagcgcccatccccaccttgctctcgaactcgccgccctcgctcagccccacgtcctcgcaaacagccaccagccaaagcagccccgccacccccagcgaaacgctcaccagc

SEQ ID NO: 96986 - DNA, 122 bp, Homo sapiens
ggcatattgccaggccgtggagatgcgaatataaataggaaccggcccctcatctgcaggcgctcacaacctagttaggaaacagtaaaacaattaagcgcgccgtggagataggcccactt

SEQ ID NO: 96987 - DNA, 122 bp, Homo sapiens
ccccctgcgctcccactcgcgcacacttgcacgccggccctggccgggcggggctggaggcgagaacgaccccacgggctttcccagggccgtccgcccgcggaccctcccagctccccaga

SEQ ID NO: 96988 - DNA, 122 bp, Homo sapiens
ggtctccgccaatgggccagctcctcccgacggttttggcggactggctgaagaggaccgcgcctgaggccacaattaacccggctgttggtggtggtggttggggggtgggcagtgaggaa

SEQ ID NO: 96989 - DNA, 122 bp, Homo sapiens
aaagtcagaaatgtgcctgtatgctctgggaacctgtttatcccagaaagccctctttttcgcacctcatcaaacagaacaaataagttatatttaatgtctttagttgcattctaatgtca

SEQ ID NO: 96990 - DNA, 122 bp, Homo sapiens
taattttcgaaatactttgacaattatttttgccattgtgtttgatgaatttctaaattgcgaaaaatggcgaagtatgtgtgttttatttatgtgagcaaagtgaaaatgttggctgtttg

SEQ ID NO: 96991 - DNA, 122 bp, Homo sapiens
ctcaggtgatccacccgcttcggcctcccgaagtgctgggattacaggcatgagccaccgcgcccagccttgtgctgtctcttatgggccaagacactgagcttggaggtgccggggagcct

SEQ ID NO: 96992 - DNA, 122 bp, Homo sapiens
ttaatgtcttcaagcaaaaagagactctttctgcctgttggccatctgctgccaggtgaacgtgaaaatccatcgagacgctttctgtgaaaaccgcctttatctctttgtccctcttaggt

SEQ ID NO: 96993 - DNA, 122 bp, Homo sapiens
aacttactgtcccaagcaggaccttgtgagatgaaagagtgggtctgttaataatcaggccgagaccaccagcataaacggtggcggtccagactctcaggacgcatggttatcccactgtc

SEQ ID NO: 96994 - DNA, 122 bp, Homo sapiens
cgcccaggaaggggaccctgcaggctcggtgatcccaacaggatgattcagcaatttccccgtggtccgggccactgtgataactcggtttctgggaccccgaacaccgaagagggagacga

SEQ ID NO: 96995 - DNA, 122 bp, Homo sapiens
aaaggcttctgatggccgggtggcctgacggccaggtgcgagtggggaggacagctcacgcggcctgagcagccacccctggccatagctccagcccccgcccctgcccccggcccctgccc

SEQ ID NO: 96996 - DNA, 122 bp, Homo sapiens
agactcccagagacccaaacgcctccctctctattttctcaagaagagggaactgaggcccggagggacattgcgtctcaccccaggtcacagggcaaggcagttgcagaaccggactgcga

SEQ ID NO: 96997 - DNA, 122 bp, Homo sapiens
cgcgcagagctggagaaactttctccgccttagggtggggggcaccggtgcagatactcacgccggggtcagcgctcggagccatcctcccgctctcggccccgccgcctaggggcgtggga

SEQ ID NO: 96998 - DNA, 122 bp, Homo sapiens
catttttggcccacgcagaagaagccagaagtgctacagagttagtgcctctagaagccacgttttctgagaggtggtggataatacccagcttctgagaggtggtggataatacccagctt

SEQ ID NO: 96999 - DNA, 122 bp, Homo sapiens
acccagtttgggattacggggctcccctccccccaacttcctgccgcctgcaccttgatccgaaagtggcagggaaaggataggttgtgcaacttgaaacatttattcttttgtgcctcgtt

SEQ ID NO: 97000 - DNA, 122 bp, Homo sapiens
ccttcccggaatccaaacttccctctgcagcggccgcgcttcacggagggcaagaaaagccgcccactggcgctgattcacactgaagtgtgagtgactgatagccgggcgtctgagactct

SEQ ID NO: 97001 - DNA, 122 bp, Homo sapiens
agacattccacccccaagtaaaccgctaggacgaaatggcgggcagtgtcacaaacttaacgccctagtggcagattgtgccctgtgctgccagacaagatattggcttatgaggggtggtc

SEQ ID NO: 97002 - DNA, 122 bp, Homo sapiens
aagccagcctctctgccaagtcactcaggtcatgggcattgttcaagcctgagtggcagccgctcttgctcacctgttgaggaagggctggctcactgtccaccgtggcggcatctttaact

SEQ ID NO: 97003 - DNA, 122 bp, Homo sapiens
cgtctgacccagtccgttatgcttggggaggctcctgatgactaagccccgtctcctcaccgggctgcctgccttgcacgcgggggccgtgtgtccaggctgggcacagccaaaccaaccag

SEQ ID NO: 97004 - DNA, 122 bp, Homo sapiens
gtgcctcccacaccagctgaggcagccttgcagtgactccctttgtgtcttgaagactgtcgctgggcccctggcatagaaataaagactcttcctgctcctgtcttcatgtgtggacatct

SEQ ID NO: 97005 - DNA, 122 bp, Homo sapiens
ctgggcaccgctccgactgaagggtgcctaagccccaacctcgagccctagagccgcgcccggatccctgtctcgtcccgagcccggccgcgccccagatcccctaaatcccacttttttca

SEQ ID NO: 97006 - DNA, 122 bp, Homo sapiens
agccatactctactggcacaaggcattggggaattttctaccatttttaccagagataaacgtctgtgacaccaactcctgccttcaaaatgaattttacttgagggttattcaattaaata

SEQ ID NO: 97007 - DNA, 122 bp, Homo sapiens
cacccagggggtccgtgggcatccccgtgaagatgacccggtacgtggtgaggaagacggcgccctcagctgggagcaatgctggtcccccagcactgccccccgcgccctcctcacgccca

SEQ ID NO: 97008 - DNA, 122 bp, Homo sapiens
gcgtttattaagaaccgatgtaaaagtcccaataggctagccatggttttgcaagagatgcgcggctctggaaatgagaggtttatgaaatgaatggccagatgggttgtgcatttgcgaag

SEQ ID NO: 97009 - DNA, 122 bp, Homo sapiens
gagaggcggaatttttctcggtggcctgatgcgcagtggtcctaaggtagtgagtggccgcgtgtgcgcattgaggcggcggcagcggagagaagacggtcacgtttcccgaacggcagcct

SEQ ID NO: 97010 - DNA, 122 bp, Homo sapiens
ccaggcccaggctgcggactggggtgggggtcaccagagaccgtgggacttgggggaatccgagccaatgagccccaggatcaagaacttctggattggaggcggggtataaacagggctgg

SEQ ID NO: 97011 - DNA, 122 bp, Homo sapiens
cccaggcagggcatggacgcgccaatgggagtgtctacaaagcccgggaacactttgccacgctgtctagaaggcctggcgggaggctcgcgcctatgaaatcccagcactttgggaggcct

SEQ ID NO: 97012 - DNA, 122 bp, Homo sapiens
ctgtccccttccttccacagtcgagggcatccagagcctgatctgcaggcagctgggcagcgccaacggccaggcggaagacggaggcagctccacaggcccgcccaggagggctgagacct

SEQ ID NO: 97013 - DNA, 122 bp, Homo sapiens
tatttttctgcggagtacaactgttagtgcctgccggttgcttagcaaggtggtcccttacgattcacagcctttgagatgattttctaggggacccctcaaagacattaggagaataccag

SEQ ID NO: 97014 - DNA, 122 bp, Homo sapiens
gaaaggaaaaaagaggagaaaagtggaggagggcgagtaggggggtggggcagagaggggcgggcccgagtgcgccccccgcccccagccccgctctgccagctccctcccagcccagccgg

SEQ ID NO: 97015 - DNA, 122 bp, Homo sapiens
acggcctcccggccttcaacgagttctatgcccacagtgagtgccacctgggtgagggggcggtgaccaattatgtcggccaacgaagagccacagtcccggggaggccgggagggggcgga

SEQ ID NO: 97016 - DNA, 122 bp, Homo sapiens
cagccgccgggtgggcgagctggcggggggtgcctgttgacttgggaagggccaggatcgcgatcaatggtgagttgggggttggaggaatgggaaggcctagttcagggagagtaattgga

SEQ ID NO: 97017 - DNA, 122 bp, Homo sapiens
cacggtccttctcgaggttgcagtccagctggggctgcaggaccttcttccatccccactcgcagggctgctggtggcctcagttcttcactggcggtcagcaggagacctcagagcctcac

SEQ ID NO: 97018 - DNA, 122 bp, Homo sapiens
taggcttctggggacccgccctcggcgcggcctcctgctacagacctggcgcgtctgggccgctctcccggcagaaagtctaaagagtttcattgcaaagtgtggctcgcgactgtcgcgct

SEQ ID NO: 97019 - DNA, 122 bp, Homo sapiens
accgcggggccaggctctccagttagcgtcagcgcctgggcgggtcccggacgccttgggcgggccgggtaaggtccagccgtatccgcctccttcatgtcccgctgtgggaggggctctgg

SEQ ID NO: 97020 - DNA, 122 bp, Homo sapiens
gtcctccccgtccactgtgcactcggtgccgccgggctctgcaggctcttccaggccacccgcgccacctccagcctgcggagactccggaggaagcctgcttccaaacactgtggctacca

SEQ ID NO: 97021 - DNA, 122 bp, Homo sapiens
gcacggagctgcgggtacagccgctccgccgcggccaatggctgcgccggggggcggggccgggcggctcctctcggaggggctcagtctccagcccccgggccctccaccctgcccaaagt

SEQ ID NO: 97022 - DNA, 122 bp, Homo sapiens
gagattacagccgtgggtagggtcctctgaccaccgagcagtttgttctaggggatgctgcgtattgtgagaccctctgctgagttctggaggtggttgtcggttgctgattaccagggcaa

SEQ ID NO: 97023 - DNA, 122 bp, Homo sapiens
cttttcaggccataggcctggcagtttccttctcaagcaggagagggaaaccagaggcaacgctgacaagccacttcccagcacccagagccaacatgggctacactgttttgttttttttt

SEQ ID NO: 97024 - DNA, 122 bp, Homo sapiens
gtcatgtctgtcactttacggtggacatcagccatctacctctgcaccttggtttccttgcgcagtgtttgcacaggatgagctaatttcaacacagatttgctgctggtcggggaacagca

SEQ ID NO: 97025 - DNA, 122 bp, Homo sapiens
gccgctcatcgtcgtccgcggccaccggcgcagctgccgccattgcctcagcgcaaacggcggattcccgcactccctggtgacggagcgcaccgcttccgggtcctctcggctgtttccgg

SEQ ID NO: 97026 - DNA, 122 bp, Homo sapiens
cctgccgggggcggggccgcgtggatgggcggggccagtgggccggaccttggtggtgggcggggcctaggggaatccggggagtttggcttgccgggttgtggttgggggacctacattaa

SEQ ID NO: 97027 - DNA, 122 bp, Homo sapiens
atgtgtaaccagaataaatttctgaacctcatgtgacccaaccttcaaacaaacagactccggtaacaataagaaagtaatttcagtttctagttgtgtctctcaaagaacatcaaagggta

SEQ ID NO: 97028 - DNA, 122 bp, Homo sapiens
caacacctctgcaaatatttctttgtattaaattccctttattggagtgtctagtttacacgtcgttttcctccatggaacctaattcagtaactactgtgcactttcattttgactgtgca

SEQ ID NO: 97029 - DNA, 122 bp, Homo sapiens
aaaggaaaaggcccttgaaggcaggtgtggagatgtccctcacctctggctgtaaagcgccggattcccaccagggagggaacgtggggcagatgcgcggctccaactccgccggacagggg

SEQ ID NO: 97030 - DNA, 122 bp, Homo sapiens
agctggagctgaggttcaaatccagatcagtctgactcagaagtcagcacgctgtcctttcgctgagtcccgagtgtaaaaccttactgaggaaaaaaaccgaagctcatagaagtcccagc

SEQ ID NO: 97031 - DNA, 122 bp, Homo sapiens
agcaccgcggtgaggcggacggcccggcaggggttggaaagtccagaaaggccccgttcccgcgtagaacttgaatgcagctaagggacgtccagagaggcctttccttttctggtggcggt

SEQ ID NO: 97032 - DNA, 122 bp, Homo sapiens
gcgcatgctctagtcctccaagcgcgacttcggctggtgttttgcgcatgtttctgccagcgcctggatcctgccgatagttctgcgcatgtccactgcccactgtttggcttcacggaacc

SEQ ID NO: 97033 - DNA, 122 bp, Homo sapiens
gcgaggactgtgtagaccttaaccgggcaatgctcctgagccactgggcttggggtggagcgcggcctagcggctgcctttaacacaaagaaacaaacaaaactcggaaaagcaggcgccgt

SEQ ID NO: 97034 - DNA, 122 bp, Homo sapiens
atgactgggacatgtacttggttccctcctacgtaggcacccaaatatggggtacgacttcgaatcacgtgcttttgttgtccagtcgtaaatcctgcctgatgacctctagaggtaaactc

SEQ ID NO: 97035 - DNA, 122 bp, Homo sapiens
cgccccggaaagtcgcccctgtggaccgagcctgcgcgatcgggggcgcggaaacactttcgcctcagccttttgctgaacttgcttccaggctgcagatgaggaggggaaggcagcgggga

SEQ ID NO: 97036 - DNA, 122 bp, Homo sapiens
gtgaagagcgcaatcagaaaacagatatgctggtcaaggaggtggccagcccgggagatgcgctggagcaggggagagatgcccctgcgcctagtggcctacagcattctgggctaggtgtg

SEQ ID NO: 97037 - DNA, 122 bp, Homo sapiens
acatgttctgaagtgtgttgtgtttcatgttcaagcttaatcaaggcagccattaatatacgaactgagcatgctggggaggtgaatgccacatccttggcggggttatggacctcttgcat

SEQ ID NO: 97038 - DNA, 122 bp, Homo sapiens
cctgggggagcgtgccagggcctgctataatgggggtgctgagtgcagggctgggacaggcggggctgcggcccagacagtgggctgagctcagcgtctgggctgggtggaaatggccggcc

SEQ ID NO: 97039 - DNA, 122 bp, Homo sapiens
ctttccccagagttaaagcgggagctaaaagtccgcttatgcaacaacagtccaattactcggacaccccgagcaaaactctccagcggaaggggcagcggggtctggggcgccaactccct

SEQ ID NO: 97040 - DNA, 122 bp, Homo sapiens
cggaaacaaccaggagcactattcccggccgggtgggtccagcagccgcgggcttcgccccgccgggactcgcggccgcgcctcctctgtaccacagctcccaaggtccccccacggacaca

SEQ ID NO: 97041 - DNA, 122 bp, Homo sapiens
agggctccatacatttcacccagagactccggagcctggcaggcagacctgttctgacaccgaacttccaaagtcatgggccttgattggggtggtctgaattagacctagcccttttctgg

SEQ ID NO: 97042 - DNA, 122 bp, Homo sapiens
gcttaggaaagctggaatggccgccatctagacgagaagggcaacactgggtcagctgctcgtcgtggcgtcccggtagctcgccgtgatcgtatagtggttagtactctgcgttgtggccg

SEQ ID NO: 97043 - DNA, 122 bp, Homo sapiens
tctctggacccacccacgccctcctcccccaccccaccagcccccggccgcaggccgcgacgccctgagacccttctggggtgtgtcaggctgttactgggctcaccgccattcataaaggg

SEQ ID NO: 97044 - DNA, 122 bp, Homo sapiens
tgcatagaacacatacaaatcctaagtgacaaaaactctgggcatgcaggctgactcgaacgcacccatctttctttgttctactaccagtcagcctctcttatgttaaatttttcaggaat

SEQ ID NO: 97045 - DNA, 122 bp, Homo sapiens
ttctttgagccagccaagctgtgctgagatgaatagggcagagatcttgtgacaagagctcgcagtgttctggtggtgacagggaggtaagcagatgaataagagctcagagtgaagagaaa

SEQ ID NO: 97046 - DNA, 122 bp, Homo sapiens
tgtgtgaatataaacattcagctctgtaacataattaacagcgccccaaggaaaatcccgcgtatgtcagtaggaagcgttcttgatgcggagcgaaggctacttggcggtgttccggctct

SEQ ID NO: 97047 - DNA, 122 bp, Homo sapiens
agctaggatggctccccagggtgccctcacccctttggccacctaagccaagaagccagtcgagtagaccatgatgttactcagtggacaactaggcaagtcacataattggcctgtgtccc

SEQ ID NO: 97048 - DNA, 122 bp, Homo sapiens
atcagggccaggatgacagaggaggaacaggggaagtcagggtcaggacgagggtgtggccgtgactcagcaactgaaagaacacaggagctacccagctccaggggtgtggtgaaggcagc

SEQ ID NO: 97049 - DNA, 122 bp, Homo sapiens
ctttttttaaacaacagtttccatttttattaaattttctgttaatcaaaaaactcgggccgggcacggtggctcatgcctgtaatcccagcactttgggaggccaagacgggcggatcacg

SEQ ID NO: 97050 - DNA, 122 bp, Homo sapiens
ctcaagaacctgcaaacagtcccccttcctgtttcatcgggtccctactcttcagcccagcgtttaaggtccctcatgacctggccttctccaacttggcccatctcgtgcccttggcttcc

SEQ ID NO: 97051 - DNA, 122 bp, Homo sapiens
tcccaaaacttttgtttcacttattatctctaccaaacattttggcaatgaattccattccgtcctactttgttccccagtttctctcctttgtcaatctgctccccgaccaggctctcggg

SEQ ID NO: 97052 - DNA, 122 bp, Homo sapiens
acgacccgccgcacggcaccatgggcctcgggggtctgtccaagactacaaggcccgaagcgccgcgcgccgcgcacgcacagtaggcgagggtggtagggacttatagtttttaaactgta

SEQ ID NO: 97053 - DNA, 122 bp, Homo sapiens
agacttatctttaactcttaccaaaaagcgttatactcatagaaagagcactaatacttccgtaaaattctaagctgaattcaaagacgataccctttaagtgaaacttcacgagagcctga

SEQ ID NO: 97054 - DNA, 122 bp, Homo sapiens
ctctatcacccgtgtgcactgcccggatggtgccaagcgcattggagcaccggaaggagacgcggagccgaggccaggccttccggcggtcgttacgggacgccgctgccatctacagcact

SEQ ID NO: 97055 - DNA, 122 bp, Homo sapiens
cttccaaacttcccctatagacactgcttgtaactgcagcatgacggcatagaaagggaacgatttaggaggcaggcaatctgagttccaattttagatctaccccttactgtttacctttt

SEQ ID NO: 97056 - DNA, 122 bp, Homo sapiens
tcgatttgcagaagagaacagaagtgcgtctgtttacatcgcttgctggctccgccaccgcggaggccgccgccgccggcacatcgccactactggcgcgggtgggctctggagggcgtccg

SEQ ID NO: 97057 - DNA, 122 bp, Homo sapiens
gggagggctcgtgagagccaatgagagcgcggaaggcggcgagcgagccaatggacgcggcggtggggcagggggcggggcctgggcgaggccgggggcggaatgggctgagtgccctgtct

SEQ ID NO: 97058 - DNA, 122 bp, Homo sapiens
ttccgtgcacactctcaacttcgagtacgccgtggagcgcgtcctcgcaggtacagggggcgcgccctgggtgaaggccctccttagcagggcttgaaccccagaaatacccaggcaggtat

SEQ ID NO: 97059 - DNA, 122 bp, Homo sapiens
agcagtggtccaggcagcaggggctccagggctcccactgcagccatcgcagcaaggaagcggagtagaagcccagggtcccagggacagcgggatgccgggtggtcagggccacagcggga

SEQ ID NO: 97060 - DNA, 122 bp, Homo sapiens
aagtggacaggagagtcctatgcttagatgggcagagcaggcattgcaattccctatgcccggagcctgtccatagatgcctggtgatgtgtgaacatggagatgggatttagcaagaccat

SEQ ID NO: 97061 - DNA, 122 bp, Homo sapiens
cctcccttattggctgcagtatgccggcagccccgccctgtgtgcggtgtctaaggattccgtccccaagcaaggacaacatattatcttccccgcccttctcttttctacagtatctgtta

SEQ ID NO: 97062 - DNA, 122 bp, Homo sapiens
tcctcccgcagccccacgtagacagaagacattcctcgggcctgggtgcccagcctcccgcgtccttctagggagaagccggatttcctgtagaacctgtgtcttctccaccctcagcctcc

SEQ ID NO: 97063 - DNA, 122 bp, Homo sapiens
ggggcagggctggggtcccggcgctgagcgcccccagccgcgccgggcagcctggcgcctcgctgagtcggagcaacccccggcaggagctttcaggctctggtcaagcctcgggacccggg

SEQ ID NO: 97064 - DNA, 122 bp, Homo sapiens
ccctagtgtgagtcccaactgaaacatccttgctggcagtaactgctgagcacagctggacggatgtagcatttgccctataaaacatttgatactttgccaataaactgtaaagagggaaa

SEQ ID NO: 97065 - DNA, 122 bp, Homo sapiens
ccggccccgcccccggcccacccactcggagcggcctgcaagccagggagcgccccaacgcggactcccagcctacgcgcgttcaccctggaccttcctcgcgaccgcgcctgagtcgcacc

SEQ ID NO: 97066 - DNA, 122 bp, Homo sapiens
taggctgccctggagaggcgctttcggacatctggaggggcgcatagtgctgggacttggcggcgcctggggcggaggggcgcgccggatccagccgggcgcgctcgggggccgggcgcagt

SEQ ID NO: 97067 - DNA, 122 bp, Homo sapiens
ttttaggtttttacttaatttttattatccaatttcattttctgtcccacttgggactctcgttctgggtattcctctcagactgcactgagaaagggtaaactctgagaatgaggccaaga

SEQ ID NO: 97068 - DNA, 122 bp, Homo sapiens
aaggcaccaggaaacttgggactgagcatgcgccctgcaacataacggtgtcaacaagctcgctacctgtccgaccggttccggcggccggggctgcctgttccagcccttccttaggcatg

SEQ ID NO: 97069 - DNA, 122 bp, Homo sapiens
tgcccgaatcctctagcagcgcgggcatagcctcctcagtggaggcgctgtccagctcctcgtccacctcgttggtgacggcccaagacacggagctcacgatcacgtagcccgcggccggg

SEQ ID NO: 97070 - DNA, 122 bp, Homo sapiens
atgttttctacgtttgacatttttagagataaaaaccaggatggggtggggagaggtgatcgtagggaaggttgtgccaacacaagcctgttcacacagagcacacagggaggccggtttac

SEQ ID NO: 97071 - DNA, 122 bp, Homo sapiens
ttttcctggccaatgaatctgatgataatagatttggaagacttctgaaagatcagctggcgcatgctccctcattttgcaggtggggaatctgaggttctgtcccatgtctgtggtcattc

SEQ ID NO: 97072 - DNA, 122 bp, Homo sapiens
cttaaagttgaaaaactaccccagaaaggataaataaaatatccaaagtcataaacagaacgtggcagagcaggagccacactatttgaacgtttctctactgggctgactccatgttttta

SEQ ID NO: 97073 - DNA, 122 bp, Homo sapiens
caagcacagccagcgaaagcgaaaaactctgaaacggacaagatggctgccacctcttcgcgcctcttagtcccacccactcagggcggaggtctgcgtcatgtgaccctccccttcttggc

SEQ ID NO: 97074 - DNA, 122 bp, Homo sapiens
tggagcccggggaatttagaattgtttattttctgtccataaacctttgagttaatggagcggcttctgagcaaagagtttgttggtttgtttgtagtgtctcaggaaggtcgttagagttg

SEQ ID NO: 97075 - DNA, 122 bp, Homo sapiens
cctttgcctctttctcttttcaccgccccctccctcatctcttcggtagccacgtttggccggggcacaactccctggaggccctgcccccctagacggccccgagcccttttggacctcat

SEQ ID NO: 97076 - DNA, 122 bp, Homo sapiens
cggactcgggctccagcccggcgtccgagcgcggcgttccgggccaggtggacttctacgcgcgcttctcgccgtccccgctctccatgaagcagttcctggacttcggtgagtgcggcccg

SEQ ID NO: 97077 - DNA, 122 bp, Homo sapiens
ggtatccacttgcgcgccctatgtggtggggatccacccagagcccagcgtcaagttatacgggcgcttcactcagcgtcagccaagaccagggaagcgcttcttgccgtttaggagacgtc

SEQ ID NO: 97078 - DNA, 122 bp, Homo sapiens
gcgcgccatctggatttaataattacccccttacttttgtttttgagcagaggtgggtaacgtttaggggttctctcttcctcttccctccgtgaccctcctaactggggacgagcgaaccc

SEQ ID NO: 97079 - DNA, 122 bp, Homo sapiens
cgctccgtccaagccgcagcgccgcaagagccccctggtgaagcagctgcaggtggaggacgcgcaggagcgcgcggccctggccgtgggcagccccggtcccggcggcggcagcttcgccc

SEQ ID NO: 97080 - DNA, 122 bp, Homo sapiens
acaccagctgaaaactgcagtttctttcctttggatacataaggcttctctatcggggtacgggacagggaggaggcctcatgtctgaagggggatttaggggcgagagccccagccctgac

SEQ ID NO: 97081 - DNA, 122 bp, Homo sapiens
ctcaatcctgggattcgcattgagtacatcacttcatttctagagtcccttctgagaaatcgcttccacgagcgcaatttgcaaacagccacgggcagggcgggaggaaaaaaaatgggctg

SEQ ID NO: 97082 - DNA, 122 bp, Homo sapiens
ccactcagcatccaagacagcttcgtggaggtatccccagtgtgcccccggccccgggtccgccttggctcggagatccgtgactctgtggtgtgagagctgacttccagaggacgctgccc

SEQ ID NO: 97083 - DNA, 122 bp, Homo sapiens
cggcctgcgagttaccgcccactcgctgcggcgcttctggctccagaccgccctccggatcggaccctgcgaatggttttggctatatcttcatgtaggacctactccctatcccgtcggcc

SEQ ID NO: 97084 - DNA, 122 bp, Homo sapiens
tgggttttagactgaacttcggtgttttcttgagactttttgtacagtatttatcacctacggaggaagcggaaagcgttttctttgctcgaggggacaaaaaagtcaaaacgaggcgagag

SEQ ID NO: 97085 - DNA, 122 bp, Homo sapiens
gcgttggcggcgcccgcggggtcgggcgcctcgaaggagtcgagcgcctcctcagcgtcgcgatgctgccggtaggtcatccagcagcaggcctccacgtcggtctcgtcgatgccccagaa

SEQ ID NO: 97086 - DNA, 122 bp, Homo sapiens
aggatgcgagtgtcgtgaagcgaagagcgagtgaacgccggggacacgtgaccttggtagcgcgtcctcctagcttctgttagcgggccttctgggggatgctacatcgccacctgctgtct

SEQ ID NO: 97087 - DNA, 122 bp, Homo sapiens
ggagagcaggttgttggagaggttgagcaggcggatctggcgcaggcccaggaaggcctgcggctccaccacagccagcagggccccggccaggtgcagctcgcgcaggcggaccaggtccc

SEQ ID NO: 97088 - DNA, 122 bp, Homo sapiens
tttcctggtcagacaggagccgggccagtggccaagctgccaggatggcttccccggggccgcggccgccttccttcccctcctgcccgggctggctctggtcgccactaggggttgaagat

SEQ ID NO: 97089 - DNA, 122 bp, Homo sapiens
cccctcactgccctgggcaggcagggccggccggccggccagccgctcagagtgtgggcccgccaagcccacgcccacccagaactcgagctggcccgcaagcgccacatgcagccctggtt

SEQ ID NO: 97090 - DNA, 122 bp, Homo sapiens
gcacgggacatgctaatacggaaaaattactcgctagtctgaaattcaaatttaattgagcgacctgtgtgtctgcgtgtgtgtacacatgcatatatatatatttatatttatatgtaaat

SEQ ID NO: 97091 - DNA, 122 bp, Homo sapiens
caaatgctttaagtagagtaagactttgggtaataaaggaaggctcagtaaagagatgggcgacctctggaatgatctcatctgagcatcagaatgccgatggacaggcttttattattttg

SEQ ID NO: 97092 - DNA, 122 bp, Homo sapiens
caaaccaagtcccctccttgattctcagaaatcattaaaactcccactgccactgctgctcgaggactgctgaccttgtcaatgtctgagctgccttctccaagacctcttaactttttgtc

SEQ ID NO: 97093 - DNA, 122 bp, Homo sapiens
ccacccagcccgcggtcctggtcagtctggtctccgctgtgacatggaggagcccctgcccgccctgaggttctcaccctgaggttcttgaccgtcaccctggggcgggcagcatggggctg

SEQ ID NO: 97094 - DNA, 122 bp, Homo sapiens
gacgcccatgagcgacggggcaggttgagaaccgtgctgggcaagcggcgagggggcagccgcccggcctgccagcgacactgtgctctcagggtgggttcagagtcactcccaccgctcag

SEQ ID NO: 97095 - DNA, 122 bp, Homo sapiens
tcccaaaactctgaatcgaagaactttccggaagtttctgagagcccagaccggcgggcacgcccccatccccaaccccctctgttaatccctaccagcctgcagtcctggctgcttccaag

SEQ ID NO: 97096 - DNA, 122 bp, Homo sapiens
caaaatggtattccgtttgccaagtcagaatttccacaaatatcatgtgtttcagaaacacggaccaattaagtggaatctcatcattttgacagttaaataaaaatgcgatgggtacgcaa

SEQ ID NO: 97097 - DNA, 122 bp, Homo sapiens
ctcctccagtgagcagacccaaaacatagaaccttcctctccaaaagacagcatgtctcccgcctctcccaccttgcttaaacatccactcttgagtgcctacgtattcctaatattggtac

SEQ ID NO: 97098 - DNA, 122 bp, Homo sapiens
gcccttcattgttttaattttttttaattgaaatcctgctgtgtcaagcttcagaaactgcggttagaagattcttgctttctacaagggtagaccagtaggagagccaaaatggaacaatt

SEQ ID NO: 97099 - DNA, 122 bp, Homo sapiens
ctcggccggatctccgcggtctgaactctcgggcggcggcgaggacggcgtgtccactgtcgaggcatgaaggctgctgtgctggaccttgggtctctcttggccaaactcttcgagacctc

SEQ ID NO: 97100 - DNA, 122 bp, Homo sapiens
ccccgagtgttcagaagggaactgagtcctatgaggtggccaggccctgccagtagctgccgcaaaggcccgggtgccccaggtctcagaagtctttggcctcctgcctactacttgctatg

SEQ ID NO: 97101 - DNA, 122 bp, Homo sapiens
tcagaagcctcgaggggacaggtgggaagcgatgggagcagcctaggccacctcctcctccgcctcctcctcgaactcgccctcctcggccgtggcgtcctggtactgctggtactcagata

SEQ ID NO: 97102 - DNA, 122 bp, Homo sapiens
gtctctggggctgggaggggtgcgggcgtgggcggggcgcgagcagcaggggcgcgggcccgggcttcaggctgtggggccgggagtgcggggcgggactgctgcggccccgcgtcctgtgg

SEQ ID NO: 97103 - DNA, 122 bp, Homo sapiens
cccctcggcgaggacagagacgcggcggcccctcgtgaggacagaggcgcggcggcccctcgtgaggacagaggcacactacccgtgctgctgctccctgacagaagggtatcagataagta

SEQ ID NO: 97104 - DNA, 122 bp, Homo sapiens
atataaatggagtctaaaaataccccgaaatcctttacaaaattgcaaattagaaaggcccgttgggattttgtgtatatggcagtgtgtatctactcccttcaaagagggagcacactggg

SEQ ID NO: 97105 - DNA, 122 bp, Homo sapiens
tagcacttctattagccaaagacaggagtcagagcataaagatgcaggttcggccaggtgcggtggctcacgcctgtaacctcagcactttgggaggccaaagcaggcagattgcttgtgtc

SEQ ID NO: 97106 - DNA, 122 bp, Homo sapiens
catgctgttaatactttagcactcatgagccccagcatatgcagctcctagagtttgccccgctccttcccaccttcctgcttgtgttcaggctgtttctcctgcccgggagccctccccga

SEQ ID NO: 97107 - DNA, 122 bp, Homo sapiens
ttatgtagttggggaaagaaattttaagaagggaagaaaattaaaatgagtgaaggtatacgttagttttgtaaaagttatcaatatctggctgggcacagtgctcacacctgtaatcccag

SEQ ID NO: 97108 - DNA, 122 bp, Homo sapiens
ctctagggtctgatctcctgcatcccatgccagggttccctcaggaccgtggtccacctccgggggagagggggctttatagagcagcccccccagccccagcaactcagtggctccatcca

SEQ ID NO: 97109 - DNA, 122 bp, Homo sapiens
agggagagcagagactcagaccatctggcttcctccgacccccggccacaccccctcgctcgctcccgcctggaatgacagctcgaggagccctcccggcctcagagcaggtgcccttgccg

SEQ ID NO: 97110 - DNA, 122 bp, Homo sapiens
cacaagcccttggagcacaacttggtcagcgcagaatttggttcctatcagcttccgtagcgtccctaacgacttccgcctctggcgggccgcagtggtggaggaacttccggcagcggcag

SEQ ID NO: 97111 - DNA, 122 bp, Homo sapiens
ggggctcgcgggggcggggccgaggtcacgcgcggaggggctgggcgggaggctgagcggcgccggggggccgggagcggggccgccggggacggggccagagagagcccctttcctaggac

SEQ ID NO: 97112 - DNA, 122 bp, Homo sapiens
ttcatccagtgtgggtcacctcaggtcacctggggcacatcctatgtgcccagatacttacggaaggggtcattctgggcctttggctccacactgaggggctgcattttgagaatcacgag

SEQ ID NO: 97113 - DNA, 122 bp, Homo sapiens
atcaacatttaagaaaaaaaatactatttaaataaatgctgaatacacaaccaggcacaccgtaattagggttgtaaagtcgattccagctcagcactgtacatgtcaatctggaatgtagt

SEQ ID NO: 97114 - DNA, 122 bp, Homo sapiens
ggccctgccgcttctccggggctccttctcaggcttccgactgcgcttttctgcctcgtccgtcttggggggagccagcagagcttggatttgctgcacacacatacaaacggcgtgtgtgc

SEQ ID NO: 97115 - DNA, 122 bp, Homo sapiens
ggcagtcagacggcaacaggtttggccccactttctcagaaagcctcggcttggttttgccgcttaatttttaacttcattttcaagttctcactgttagagtatctcaaaagatgtcatcg

SEQ ID NO: 97116 - DNA, 122 bp, Homo sapiens
tcagaaatcccttttgaaagaggaagagtgggtgtaggaaggtgggaggaagcagttacccgggaggagcttcctctcagggtcaggttgatgaggccctagttttgtttttattactgaaa

SEQ ID NO: 97117 - DNA, 122 bp, Homo sapiens
aaaagctgcgccccctcaggaacctgtgccccgcgcgcctgccgccgcccattcccggcgcgcacctggcagtcccgggctcgagccccgccctgccgccagccaggtgagaggggccaggc

SEQ ID NO: 97118 - DNA, 122 bp, Homo sapiens
ttcagccccggctcaggtcgccgcagcccgggagcctccccgcttgcgccccaaggcacgcgcggcacagccatgaacaccaacgatgccaaggagtatctggcccggagggaaatccctca

SEQ ID NO: 97119 - DNA, 122 bp, Homo sapiens
ccgcccgcctcggcgcagcgcagcgccgctccgagcgcttgcccgtcagagccgcctcggcgccgccgcctcccgggccaccccggcctcgcctggcccctccgcctcctccgggcggctca

SEQ ID NO: 97120 - DNA, 122 bp, Homo sapiens
aaattattgttaggaaatgggtctaataaaatatcttaatatttaaggatattgtatacgcggggggtatgctttattgacaatttcattttccaattagtaattttgttgtaatatatctg

SEQ ID NO: 97121 - DNA, 122 bp, Homo sapiens
aggctgccatgacgtccagcgtgtccctcacaggaaaggcctccacccagccagcaaatgcggcagggatgcctggctttgccaaagagtgaaagcctccccagtgggatctgccgtagcgc

SEQ ID NO: 97122 - DNA, 122 bp, Homo sapiens
tttcacggggacaaaccacatccaaaccacggcaattatatccaggccggtctgtgctcacgggacgtttctatcggacagaattacgcatctgtctgcaaaacagctcaatccattcttta

SEQ ID NO: 97123 - DNA, 122 bp, Homo sapiens
tggctttggcggccgcctcctccagctgtgccctcctgacattgctgcctcggcggctgccgcccgctgctacgctgtggctgctgctggattcgcagtcccagccgccctgcgtccggtgg

SEQ ID NO: 97124 - DNA, 122 bp, Homo sapiens
cttggcaatcatgaataaagctgccgtaaacatctgtgtgcaggttttagtgtggacatacgctttcaactcattcgggtaaacacttgagagcacggttgctggatcgaatgggaagagtg

SEQ ID NO: 97125 - DNA, 122 bp, Homo sapiens
accttttgcggcaggagaatgggggtgttgataaagctgacggcacgtcgcttccggccccgccctcagcagacagcggagctctcactccacccggcactgcgaccactttaacagacctg

SEQ ID NO: 97126 - DNA, 122 bp, Homo sapiens
ccgccacagctccgggaaggcggccaggaccggctagagccggttagaaccagtggcgcccgcccacgagccagcgcctcacaaagggagggcggctcacggccctcgcgtatccctgcgcg

SEQ ID NO: 97127 - DNA, 122 bp, Homo sapiens
ctggggcgcgcggctgtcacccagggcggggcggcgcgggcgttgccacgacgcgggccgcgcgcgtccctggcagccaacccgtccacgtcaaggtttgtttaataatcgccagggtatct

SEQ ID NO: 97128 - DNA, 122 bp, Homo sapiens
tgttcctcagagcaggcagtgcaggctatgggattccccaggacggagaggcctctgccccggctgcttgatgcaaggctcagagaggccactaggtttctaccatgtgctgtctcaggcaa

SEQ ID NO: 97129 - DNA, 122 bp, Homo sapiens
tcaaacttcttgcttgaaatgatgcccccacgttggccttccaaagtgttggattacaggcgtaagccactggaccctgtgagggtgcttttaacttgggcctgtttcctctcaagtgacct

SEQ ID NO: 97130 - DNA, 122 bp, Homo sapiens
ctccgcccctcgtgcgcggggatcccgggtcagcccgggtgagggccagggcccccctggcgccgcccattgtggtccaacaggttgagctggtgtcccgagaagccacctgctggaaaggg

SEQ ID NO: 97131 - DNA, 122 bp, Homo sapiens
gcgaggcgcggggcggggcataaattgcgccaggggcgagggcggggcacgaggtcgtgccgagagactgggagaggcgtgagtcgcgcggaggcgcgacatggggcgtgacgaggagcgga

SEQ ID NO: 97132 - DNA, 122 bp, Homo sapiens
gttatctgcagaaagaggggagacaggccgtgcgcccagtcaagaccattggaatcacagcggctctctgctcggcagatttgagggcactctcttatcataaaggttaaccgccagaatcg

SEQ ID NO: 97133 - DNA, 122 bp, Homo sapiens
cctcacccaagcctcttctaaaaaccatgttgaatgaatccacgttctggaaccccgaggcgggagaagtagggagctgttcgtttaagcagcatacacctaaattgggggtttaaacatta

SEQ ID NO: 97134 - DNA, 122 bp, Homo sapiens
gttgtcccatagatgatgtttccccaggactgcacaatgcatgctaatttttcccaaatccgaacgacccatccttgctggctctcagcacttccgctcagccgacacggggtcagggaggt

SEQ ID NO: 97135 - DNA, 122 bp, Homo sapiens
gagctgcatctccatctacacccataagtgcttcccaagccagggctggggcaaggccttcgaatatccagctgtggcctcctcctgctgcaagtgaggagtgggcagcagggagggctgtg

SEQ ID NO: 97136 - DNA, 122 bp, Homo sapiens
tctgtggaaaaattatcctccacgaaaccggttcctggtgccaaaaacactggggaccgccgctatatgtttcgtccctgcaaaattcgtatgttgaaacgtaccccacaatgtgacggtat

SEQ ID NO: 97137 - DNA, 122 bp, Homo sapiens
cagcaacggagctaccttcctggagtcccccaccgtgcgccggggctgggactgcgtgcgcgcctgctgcaccacccagaactgcaacttggcgctagtggagctgcagcccgaccgcgggg

SEQ ID NO: 97138 - DNA, 122 bp, Homo sapiens
agtgcttacctttgtttttaaggttacagtccacgttcacgtctgcatttgagcactgtacgagatgttacatttaaaagtaaataattccatcatctcaacctggtgctcccgtgaaatgt

SEQ ID NO: 97139 - DNA, 122 bp, Homo sapiens
cctggtttgagcattttaccattacagttttcacacagggtctagtggcagagggcttgacgcacaccaggtggttttgagagtgccataaatttaaaaaagaaagaggcttggactaaagc

SEQ ID NO: 97140 - DNA, 122 bp, Homo sapiens
aatgggttttagaaggcggcagtaacttaaataaatcatgggccgaaacacactgccgcccggaatgcacagggcgcgtgtagcagccacagacacgcggtggaaaagtgctcacactctta

SEQ ID NO: 97141 - DNA, 122 bp, Homo sapiens
agatctctcgatatagagatcttgcaatttctaacataggccattccagcaccaaaattacggccatattacttgggtttaagccttaatactaattttctggaaagcaggcattcctatca

SEQ ID NO: 97142 - DNA, 122 bp, Homo sapiens
gcgttacctcgggtcagatccagcgggacgttctcctcgccgctgtcattccgccctgcgcgaaacagacacacagccccaattaggattggctcgcaggccagctgcggctgccctggctc

SEQ ID NO: 97143 - DNA, 122 bp, Homo sapiens
ctggagacaggcgtggccaccaccctgggtggtttaggctgggtcttagactcggccaagcggtggtgttctcaacgcagcactgagtgcaggccgtctggctggagggacggggagtctgc

SEQ ID NO: 97144 - DNA, 122 bp, Homo sapiens
tttataaaagttattcattcaaaagcatttactgagcccctatgacattccagatgttgccgaggacactgatgattcggcagacaacaagccccaatccctgcctcctagagctgacatgc

SEQ ID NO: 97145 - DNA, 122 bp, Homo sapiens
gtgagagggggcccatgggcggctggactcccccagcccggcctgcccagggagtgagggcggcacgggcacccacaccaggccacacaggagcagggcccccatgccagatgggcaggcaa

SEQ ID NO: 97146 - DNA, 122 bp, Homo sapiens
gcagccaagaaggaaatacagatgaggtgggcggacagtatgcagatgacgggggcgggccgcgcctggcgggcggtgtgcagttgaggtggtccggcaggatgcagatgaagggggcgggc

SEQ ID NO: 97147 - DNA, 122 bp, Homo sapiens
tggcctgtaggtgaggggaggcggcagcaaggagggggagatcaactcctgaagagactccgtttctaacacgccgggagccctgcgctttgtcatggaaactggcaagagtccctctccat

SEQ ID NO: 97148 - DNA, 122 bp, Homo sapiens
cttccctattgccatcactggacaggctcctggcagggcagggatggggttaggatccatcgaaggcttaactgcttgagttcatgactgaagcatacctttgcctgtcccctgcaggagag

SEQ ID NO: 97149 - DNA, 122 bp, Homo sapiens
cttcccagccttcttcctccagggcttgaggctgggacgcaggtctgagcgcatccacaccgggagcccacgcgggctacgggtccccaggggactggttttccaggaaataacgaagcagc

SEQ ID NO: 97150 - DNA, 122 bp, Homo sapiens
ctggatgaggttcatcccagtatatgtcctaggaaaggaaatagaaacacttagctttgacgtgtaaacctccatgccaaccattttggttgagtttaagggaaatcacaaagcagcttcta

SEQ ID NO: 97151 - DNA, 122 bp, Homo sapiens
gggcctcggggtgagaggtctcctacactaaaaaggctgccgcccttcaatcctagaccccgagattcctttcactcgggaaatctcgtaatggcatccattgtcattttggtaagtaaatg

SEQ ID NO: 97152 - DNA, 122 bp, Homo sapiens
agttgctggcccagcagggtggtgtggctgtgccagcaaccctggctttcacctacaagccgccggggctgctgcggggaggggatgccagcctagggctacggctggtggagctgagtggc

SEQ ID NO: 97153 - DNA, 122 bp, Homo sapiens
tccttactcccagtggtttctgattcaggtcttgtttagaaggtgcccaagtctctaagccggcaaaacatctcagtccttcatcttcatatcaaattatttattaaaaagaaaaaaaatca

SEQ ID NO: 97154 - DNA, 122 bp, Homo sapiens
aagcaaccaatcaactggtttctccaattagcccccaagtggatcagcctgctgaactgtcggctagggttataggtggttctgagtccttccggaagctgccgaatcttagaagtcgcgcc

SEQ ID NO: 97155 - DNA, 122 bp, Homo sapiens
cctaaagtgttgggattacaggctgagccaccccacccggcatcccaaaactggccaaaacgtaatattaactactactcccaaaactactttttttttttttttttgaggtggagatcggc

SEQ ID NO: 97156 - DNA, 122 bp, Homo sapiens
aatctattcattcaacaaaggtctgggagcatctatgtactccaagtgccatgtagaggccggggattcagtgagccacacaaagacggttcttgcccccacagagcttacaggcacgcgga

SEQ ID NO: 97157 - DNA, 122 bp, Homo sapiens
ctggtcctcagccctccgcacatctttgcagagtttgatggggcgccgggcggatgacagcgggaacggttgtgatcactggcggaatcctagctacggtgatcctcctctgcatcattgcc

SEQ ID NO: 97158 - DNA, 122 bp, Homo sapiens
aataaataaataaataaataaataaataaataaaagtgacatgacctgtgaaattctccgcgttgcttcccgtaagccgcaaggcgctccgtctctcggtctgtggccctctggctccacct

SEQ ID NO: 97159 - DNA, 122 bp, Homo sapiens
agatgggtttcattgccctctgtcggccatgaggtggcagcacaggacgtttggccttagcggtggacctgagtctgaatcactgaaattcaggtgtagattattcagtacttttcttttgg

SEQ ID NO: 97160 - DNA, 122 bp, Homo sapiens
ccgagatcgcgccattgcactccagcctggcgactcagcgatactccgtccccctctccccgccccaagaaaaatctgttcagtggggagcgacaaggaaggagctttcagcccgactgggg

SEQ ID NO: 97161 - DNA, 122 bp, Homo sapiens
cgtccaggcttctgtgttctatagcgtgggagtagagagcaaacgccggcgaggacgtgacgttgcacaggcctatcatagtgcccgagaattcgtgggtgctcaagaggatgggtgtggcc

SEQ ID NO: 97162 - DNA, 122 bp, Homo sapiens
atgagttaggattatgctggaaatcagttgctgaaatttaattatttctattacttctcccgccttctcccaagttaaatcatattgaataagggcgttttggagaaaaatccaattaccat

SEQ ID NO: 97163 - DNA, 122 bp, Homo sapiens
atgaggacaggagggacaggagggcagctgtcccggctcacttcccaggggccttcgctgcgatgcccgccccagggagagagctcagggtcaggaaacctcttgggaaacaagaggaccca

SEQ ID NO: 97164 - DNA, 122 bp, Homo sapiens
ttcccctttaaggcagtctcagctccagctccctcccctttcctgattgacaaacctacccgaagtcacatgatctgcctctatttgaaggtcacaaaaagctgcttcctttagagacagag

SEQ ID NO: 97165 - DNA, 122 bp, Homo sapiens
tctctgcctaaacgctctctcctcctccccaggttcatattaataaggagaaggtctccccgcagctcctctggaccgagccacacctctgcctgggaatcctgggctggggctgcagaagc

SEQ ID NO: 97166 - DNA, 122 bp, Homo sapiens
aggactcaagagcgctactgtggggaaaggcagtggaaatgagatgggccccgctgcccgcgcccgcttgctctcggtcttggtcttggccgacctgagggcgcttctctcccaggctgtca

SEQ ID NO: 97167 - DNA, 122 bp, Homo sapiens
tcacatggggcttcccaggccactttgtggtcagccgggagggacgtttttgccgtcccacgactccaacgggcagccgggctacgcaaacatggaaatcttccaagagcctccctggcccc

SEQ ID NO: 97168 - DNA, 122 bp, Homo sapiens
tttaaaatgcaaggtttggcacttttccctctattctcatctttttacccttccctctgtcggggatggattggttcttaacacccttcaggggccctggagacactcaccacagacagaca

SEQ ID NO: 97169 - DNA, 122 bp, Homo sapiens
gttagaggaaaatccatatattaattgatttgaatatttgctgagtctgtatatgccaggcgtgacaccaggccctgggtgtacttgagtaaaccagggtgacatggctctgctctttgaga

SEQ ID NO: 97170 - DNA, 122 bp, Homo sapiens
tttgcctccgataagggacggtttccagcagtttgtgctggcacacatgacctcctgccccgacacactcccgtaaatcctgcctattgtgagatctctcattcctcacatgagccacccca

SEQ ID NO: 97171 - DNA, 122 bp, Homo sapiens
cccggtccttgcgtctcagagagattcagtagcttgatcatggtgacagccaaaaaggtgcggaagggagggctgtagtaggaacccctaagatctaactgttctcaccaggctactactct

SEQ ID NO: 97172 - DNA, 122 bp, Homo sapiens
acgtccctcacggccagggaggccgcaatgaaggctgaacctggggaaggggcccaggtgcggtgtagacctcctctgtcatccagcccctcctgagggggcttgatgggcgtccacaagtg

SEQ ID NO: 97173 - DNA, 122 bp, Homo sapiens
atcccgcccgctgcggagagtgcgctagttcactcacccttacggtctccgaagcagacgcgaagccctccaacgtgagcctcaccagcccccgtccccaaaacgctcttcctcggcttcgc

SEQ ID NO: 97174 - DNA, 122 bp, Homo sapiens
cgtgatccgccctcctcggcctcccaaagtgctgggattacaggtgtgagccaccgcacccggcctggaagagctcttagagattatataaagtcattattaatgaagaaattgtggtcttg

SEQ ID NO: 97175 - DNA, 122 bp, Homo sapiens
gatcctggtagtgaacggcgcggagctggacgtccgcgaccgcgacgggtacacggccgccgacctgtcggacttcaacggccacagccactgcacccgctacctgcgcacggtggagaacc

SEQ ID NO: 97176 - DNA, 122 bp, Homo sapiens
gtgagtcccgggggctgtggcttcagagggaagcttctgacctcacttcctactgcatcccggagactgttgggccctgagcaggtggctacgctgctctcgggccgcgcatcccatggctg

SEQ ID NO: 97177 - DNA, 122 bp, Homo sapiens
ggaagagagcctcagagaagccctcctatcttgtatccagaagccagtgacgaccatggccgtgatggcaccattgcatttaccacttcctgtttccattgggaagaagaggattcaaagtg

SEQ ID NO: 97178 - DNA, 122 bp, Homo sapiens
gtcatgcaagcctcccgggggagcgccaaggtgaactggaggtggagggacaccagcaggcggctttatgcagcatggtctctctctagtagcagtccatgcagagagcggccaagctgaac

SEQ ID NO: 97179 - DNA, 122 bp, Homo sapiens
cacactttctcacttgccactcggtaccttcactaaataggatcttaggttactgaagtccgaagttaaactctgtgtcattttccctcgtgcttccttcatccccattctctaaacatgaa

SEQ ID NO: 97180 - DNA, 122 bp, Homo sapiens
ccccgtcctagttcaatcaatcaagaaaatcaagagtacgaaggccttgtgcggtctggacggtctttccacgtctcaggtgcagttaagccagtcacactccatccacctacccgccatga

SEQ ID NO: 97181 - DNA, 122 bp, Homo sapiens
gacccctggcctctcccttgcccctccccctcctaccccacccccaccccctgctgtgggcgaggagcaggtgcctggcttccacttcttagaatccctgtgaggccctggggtgggggtga

SEQ ID NO: 97182 - DNA, 122 bp, Homo sapiens
ttgcacaaccaggtgtgccagaaaaacaggcacattgtcaaatacggggtgcgcaaacctcggtgcaaggcaaaaggcgtgtttttacgctgctaagcagaggaggaaactgaggctcaaga

SEQ ID NO: 97183 - DNA, 122 bp, Homo sapiens
gctgacatctaccttccctttctacttgcctaggcaattgtggcttgtgtttgaactgaacgatgaagaaagatctcaggcagttttgagtcagccttcaggttcctcagaaactttaaaca

SEQ ID NO: 97184 - DNA, 122 bp, Homo sapiens
cgcgccgccatctcccccgcccggccgccgcggccccaggacggcgccctcccaccccgccgtccccagtatcccgggaccgtgcgccccacacagccagagaatcagccccgacacgcccc

SEQ ID NO: 97185 - DNA, 122 bp, Homo sapiens
cggtgtaagtgcaaccaaactcgctccgcgctcccgcgccctgacgtgcggccgagctggcggctacgcagtaacgtcgccgcacctcattggctccagtcccaatgcctgcgccaaggacc

SEQ ID NO: 97186 - DNA, 122 bp, Homo sapiens
cgtcctgagcgcaggaccttggcagttggtaggcctcctgcccctctggtcttgagccttcggctttccaactgtgaggtctcggttttgttcggatttgtttttttaatagagacggggtc

SEQ ID NO: 97187 - DNA, 122 bp, Homo sapiens
ctcaccgtccgcgcagcctcctgaagcagccgtaaactccgccccttgcgcgcaggacggcgcgaaaacccaattgacaagaattccctccgaagctctgtggtccgatctgcggtccgctt

SEQ ID NO: 97188 - DNA, 122 bp, Homo sapiens
attgaggggtggccgagggtacaccaactggcaggctgggtctctgtgttccgaacacagcgctggggccctttctagaagcttcctggaagcgagagtcagtttttgtgtaggcgcgggga

SEQ ID NO: 97189 - DNA, 122 bp, Homo sapiens
acgccgagagtactgcaagttcgcgctgctgttggtgctgtacacgctggtgctgttgctcgtcccctccgtattggacggcggccgcgacggggacaagggcgccgagcactgccccggcc

SEQ ID NO: 97190 - DNA, 122 bp, Homo sapiens
ggctgggccctacagagggttgtgtcctgggaaggagagagacccggaatgagaacgggacgcttccccaagcctgagacgcgcgcataccccgggcctgcgcagagcaggtgccctgactc

SEQ ID NO: 97191 - DNA, 122 bp, Homo sapiens
gggggggagctggggcagggggcggggcggggggcgcggcgtcgttgggggctctcccggcgcctgccctcagccctaacggagcgctcccctagagctctgcagccgctcccaaggcaagg

SEQ ID NO: 97192 - DNA, 122 bp, Homo sapiens
ggatggaaggggcccagcagtgcgggggagtctggctgcccctcagccctggagtggggccgggaagctggagtcagctgtcttgctgggggaccccagctggttttgggctgaagggaagt

SEQ ID NO: 97193 - DNA, 122 bp, Homo sapiens
ttccccagagccctgcccgagccttacctcagaacagcagctgccgacagatcctggaggcgtctgctcagtctcagcggggactgggtgaggcagaggatggagagggctttaagcaggca

SEQ ID NO: 97194 - DNA, 122 bp, Homo sapiens
ggacgccacacaggtttttccttacaggcagctggtatatgccatcctataacgtttacacgtgggtccagctctgtcctccagggtaggggacagtaatgctgagaggagttaagagcact

SEQ ID NO: 97195 - DNA, 122 bp, Homo sapiens
tcttacgtatcaatcccattctcctcttcgacttctgtttaccacggagccagagataaccgtccccagaacaatgttcccccattatttagaggacagtgtactccaggcgcctcagatac

SEQ ID NO: 97196 - DNA, 122 bp, Homo sapiens
ttaagcctagttgtacgtttgctcatatttaagctaagttatacaaagatcttaagtgaacgccctgtataccttccaggagttactaataaacgtgcaatggggctttaacaggtgacatt

SEQ ID NO: 97197 - DNA, 122 bp, Homo sapiens
ggagccgggggcctgtgctgcgggtctgagctcatttccactaaaagctcctaaaagggccgacatggattggggtggggaccaaggctgggaggaaagctgaagagcgctgtccccctccc

SEQ ID NO: 97198 - DNA, 122 bp, Homo sapiens
tctctccgggtaaaggtgaaggctgaccacgggggccgctctccctccaggccccagccacgccctctaacccaggttcccgtcctgcaccgcgccgcaagtccccccaccgttcagcgcaa

SEQ ID NO: 97199 - DNA, 122 bp, Homo sapiens
tcaggaagtcccattgctgggctgggctgggggccgcctgggcagagagataagctgcgccgatgggtcgggagcagcagccttggtggttttctgccgccgaagtcctggcctgcaggaaa

SEQ ID NO: 97200 - DNA, 122 bp, Homo sapiens
tctgggatttagttccctcagccacgacaatcagaagctggccagtgaggcttcaaggaccgttctaggcctgggcaggggtatcaaatggggtgggtagttaaactgaaccagacgcaaca

SEQ ID NO: 97201 - DNA, 122 bp, Homo sapiens
gtccaggcatctgggttgggacttcaacctgtcattcttggagtcatagaatgggggccacgaaaactgatttggaagttgtttgaacccaaaaatgcatctttaacccagaataggaacgt

SEQ ID NO: 97202 - DNA, 122 bp, Homo sapiens
gctcttagaacaccagcccgcctctctggtcccccttacccccaagcccagcacactccgcggcctagctctggggtccttaaatatcggtctcccgtaggttgctgtagtcggccaattcg

SEQ ID NO: 97203 - DNA, 122 bp, Homo sapiens
ctgttagccgtgtcccaccgtgggctgcgactgctcaaggtgacccaaggccccggcctccgccccgaccagctgaagattctctgctcatacaggtgcgctagcccacgaccctgggctag

SEQ ID NO: 97204 - DNA, 122 bp, Homo sapiens
aggaacttgccatcaaagaccaagaggagttttgtgggtggggagacagaaggcagaggccgactgcagggccagggctgcctcctactcccgatcccggccaagggtgcagtgaggggggc

SEQ ID NO: 97205 - DNA, 122 bp, Homo sapiens
acccagtgaggggaagaggatgtgatcatgcgaccgccagcagaagggaaattgtgaaagcgacctgctgtagaaaaggcggcccacagccacctcagcatgcagaggaggcccagctgctg

SEQ ID NO: 97206 - DNA, 122 bp, Homo sapiens
gtcaggccttctctaggaaaaggggacactcgcttatgaggggaagggatggcacggccacgtgccccaagccccagtggcctaatggataaggcactggcctcctaagccagggattgtgg

SEQ ID NO: 97207 - DNA, 122 bp, Homo sapiens
ggggaaaccggcagacaggttctgatcgagcccttcatcccagtcacaggtggcaggtgccgggcgccacgacctcactgtgcagggcgcacgctctctccccgccctcccacaccccagcg

SEQ ID NO: 97208 - DNA, 122 bp, Homo sapiens
tgccttagcccaacccagtggcttggctcaccccagtagctcgggccctgaggacctcagcgtgatcaaggtgagcaggcgccgttgggccgtggtcctggtgtttagctgctactccatgt

SEQ ID NO: 97209 - DNA, 122 bp, Homo sapiens
ggctgggcacaggatcgtgttaggctaggactgtgggcggcaaaggtggagaacgttccccgggagggagagaaatctgcaagtgaaagtgagccgagtgtgaacagcccttggagggaagg

SEQ ID NO: 97210 - DNA, 122 bp, Homo sapiens
ctccgagcggaagaagcgccttcacctttcagtgcccggcgctgggcccacgcaggaagccgacccgccttggcctctggagttgtctctgggatgtctttcagtctggaaatgaaccctgt

SEQ ID NO: 97211 - DNA, 122 bp, Homo sapiens
ctgcattcaaaactactaaagttactggcatattacagttaagaattcaaatgcaagtcacgtataggtcaactccttagctattaaaattgcctaaatacaaatagagacaccttggataa

SEQ ID NO: 97212 - DNA, 122 bp, Homo sapiens
ccgcccagcaggtcgggcaagtgagtgactcacacacctgggctctgtgtgggcccagcccggggagccagcgtactcaccctctgggctcctgcctgctacttcaactgacagacgggacc

SEQ ID NO: 97213 - DNA, 122 bp, Homo sapiens
tcccgcccatggtcgcggttgcagctgtactctgagcactcagaccccggttgacacgtccgggacacaacttccggcttctggcggcggaagaggacaccctgtaataacttcccccgggc

SEQ ID NO: 97214 - DNA, 122 bp, Homo sapiens
aaaaaggatggaaagccgagagactggccgccaggggcagcactcttcatcccagatggccgggataatgttctggaaggcaaccagccgtcattccctgaccccggtgccctggcagggcg

SEQ ID NO: 97215 - DNA, 122 bp, Homo sapiens
cacccatctgtcgtcactgcacccccacctcccaggacgggactgggcaagtgggttggtcggtccgtcccagagttcttgtagtgagctccacaatgcccacctgcctgtgggggctgcaa

SEQ ID NO: 97216 - DNA, 122 bp, Homo sapiens
cgggagtgcagaggcttagaggagggtcaaaaataaatcgagctaataaagtcattccgccggaagaggggccggtgatgggtccataaatctctcccggttattattattacgtacaaaat

SEQ ID NO: 97217 - DNA, 122 bp, Homo sapiens
agcataaatattatggggaaaaattaagcagcccagatttctcccaggaatgagcattaacgcctcagggaaggatgagaatactcaggattctgtgctgtaagacttacactgttcagcag

SEQ ID NO: 97218 - DNA, 122 bp, Homo sapiens
aaaaaaaaagaccgggggtgttgttttcttcgtgtgcacgtaaatttcctcccggagccgcgttgaaagctggcagttggcttttacacttgcccagcagccgaattagagcaaccgcctgt

SEQ ID NO: 97219 - DNA, 122 bp, Homo sapiens
agtcctaacccccggacctcggcaagtgactgtgttcggagacggggccttcaaaggtgtcgttatggtaaagcaaggtgatctggagggtgggtcctcatccagtctgactggtgtcagaa

SEQ ID NO: 97220 - DNA, 122 bp, Homo sapiens
ctggccaggtcgggcagcgatgtggggagcagtaccccacggcacatccgccctttggcacgtggtgtgtgtgaattacgcgtgtcctgatgcagcacacagtgactcgcacctcagtgtga

SEQ ID NO: 97221 - DNA, 122 bp, Homo sapiens
acaaactgctgaatgtaagttttctgttgtgattataaccctataaaattacattgtggccgtcatgattcagtaatgtacacatggacttaagccattgcaggaagctgtttctgtttggg

SEQ ID NO: 97222 - DNA, 122 bp, Homo sapiens
ggaagcgggatgggcggtgcccgcgccgggccgctaggggtgcggggttggggaggaggccgctagtctacgcctgtggagccgatactcagccctctgcgaccatggctgtgctggcggca

SEQ ID NO: 97223 - DNA, 122 bp, Homo sapiens
ccgtatgcagcatgaggatccagaacccactgtgacatcaaattgccagagcaccacctccgatttattcttggggaaaaccaaaagagctacggaatgctcccttgttccagactgttcta

SEQ ID NO: 97224 - DNA, 122 bp, Homo sapiens
ggaccccccccaccccgcgcgctcggcgccccaccccccccgaacttcagccgatgggaccgctgctgccgaaccccgagctgctggcttctcaaactccgctgctctttggttcagggctc

SEQ ID NO: 97225 - DNA, 122 bp, Homo sapiens
tggcctgcctctgttgccatgacaaccggagcttgactacttggcctttgcaaggttggccgaggcgggttcttcgttaactcgagattaaggaaggatatttaggggggagggtgtgtgtg

SEQ ID NO: 97226 - DNA, 122 bp, Homo sapiens
tctttcagaaatacattcaataagtaaactccatcattaagaagtaactgctgtgattaacgggttaagtgccagagtgacttttccaagtaaagatcatcaaggagtatgatgtggcattt

SEQ ID NO: 97227 - DNA, 122 bp, Homo sapiens
cacactactagtggggagatggaactgaaagggatcaagaccttgtaattagaagtggggcggggctggggtgctaacagaactctcagagttacacagtgtttgcatatttctgggatttt

SEQ ID NO: 97228 - DNA, 122 bp, Homo sapiens
tccagtgtctaatcctgggtcatcgtttgcaaatacacaggctcattaattggccttgtccgggcagtcctgagcagcgcccctcctgaagacagcactgaggaaagaagggtattatttca

SEQ ID NO: 97229 - DNA, 122 bp, Homo sapiens
cagtttctagttcctcagccgacgtcactgaacacagggtgcggaagcgatgcgggtagacgcaggcggcgcccgtgcgcaggcggagccgagtcccgcgcatttcacacgggaagccgcca

SEQ ID NO: 97230 - DNA, 122 bp, Homo sapiens
ggaaactgaggcacgggagcattagagatgattctgaggtcccacggcagggccaggggtcgagccccttgtcttctcatccaaggctctctccagctcacatatcaccaccaacaccgccc

SEQ ID NO: 97231 - DNA, 122 bp, Homo sapiens
cattcaagctcacgcagccagtgaggggggaaaatggggatgcagagcaggtggacctgccgcctattgtcccttaactgcacaggcagtctgggcacacagaggcttctggccaggtgtct

SEQ ID NO: 97232 - DNA, 122 bp, Homo sapiens
tgctgagcgcggtggccaagggtaaatgagccgctgcccctccccctggagctggaaggtcgcggaggcctttttggccgctgatatactttcctcccactttcccatttctccttgttttt

SEQ ID NO: 97233 - DNA, 122 bp, Homo sapiens
tacaaacggggccaaactgttcgctgtaacgacaatcgttattggtcagagccgcccacgcgcggcaagtggccgcccacctgagctcgcgttgtcttatgggagttttagttctctccttc

SEQ ID NO: 97234 - DNA, 122 bp, Homo sapiens
gccccccacaccccatccccaaatcgtttcttctggaaccctttgggcagagaaggccaccggccgtttccctccctccctctctgctttccctctcttccctcctccgtccaacgtcgcat

SEQ ID NO: 97235 - DNA, 122 bp, Homo sapiens
aggaagggcggtctggagttttattgaatagagcagtgtgtattcggctgcctgcctgcccgcctgcttgctctctggctgtgctcctgcttaaagaaatcagtccttcctttccgacttag

SEQ ID NO: 97236 - DNA, 122 bp, Homo sapiens
aggctggggtgcagtggcataatcactgcagccttgacctcccactttgttacctgtttccgacggtgtgacccgagtgcgcttcgttacccgtttctgatggcatgacccgactgcacttt

SEQ ID NO: 97237 - DNA, 122 bp, Homo sapiens
gggtcattttcagtggaggactgcctagctgtattatgcactcatttttgaaagttatgccgtgtggtgggagaaagatttaaagttggggggcggctgtgtcctacttatttagagacaca

SEQ ID NO: 97238 - DNA, 122 bp, Homo sapiens
gagtgactttttgcctggccacaccccccagccacccctcccggggcttggccttggtcacggcccattctggagccttgggctcagctcatgagtgcacactgctttctgctgggaccagc

SEQ ID NO: 97239 - DNA, 122 bp, Homo sapiens
ccaaggcccaggccacgcccccggagctcgccacgcccaccgggtccgcccccacgcggccgcctgcacagggggttccagccacccgcgctctcccaggtttgccgaccttacgggccctt

SEQ ID NO: 97240 - DNA, 122 bp, Homo sapiens
agtcggcttcgcagtggacctggccaacgtgtggcgcttcccctacctctgctacaagaacggcggcggtgagcgtggggtcgggctgggaatttgaatctgggaggtccactgtctgcagc

SEQ ID NO: 97241 - DNA, 122 bp, Homo sapiens
gtttgaaactatgcttgtgggtgaagtaaacacatcgccagctcgccgccccctcccccccgcccccaaccacactctgggaaactttaaggtggagacttgcagtttcttccagtccctcg

SEQ ID NO: 97242 - DNA, 122 bp, Homo sapiens
aaagccataattcacccccttcctgacaaggtcagctgctgctcattattgaatctccagcgcatagcaggtgtgtggctccactgtaggtgttcaggaaatacctgcccagtggatgagga

SEQ ID NO: 97243 - DNA, 122 bp, Homo sapiens
gtcacctttcccagtgagtggacatcatcactcatgcggaaatgctgtatttcagggggccgcttctcagggaccgggggctgtgggccgagagggagcacactgagggtcagagagcacct

SEQ ID NO: 97244 - DNA, 122 bp, Homo sapiens
atgttccgcgacccacagaggcagcgcagtagctgttccaaccctggtcagaagacaccccggaaatgcctcagcaaccgcgcagcctttgatgacccccgctgccttcccgccaatcctac

SEQ ID NO: 97245 - DNA, 122 bp, Homo sapiens
agtcactggaacagcatgggagtctcttaatgtgtttgaccttttccccaaagaagttagcgagcagctgtttaaactcctgctgttccatggcacaaatgaatcgctggattgccaaagtc

SEQ ID NO: 97246 - DNA, 122 bp, Homo sapiens
gctgtgggtaactgggctctgagcctccggggaccccccctagaggagtggaacatggaacgtaccaaggagtgggcatctgtcccgcagtccccacccgctgctgaagcggctgctcccat

SEQ ID NO: 97247 - DNA, 122 bp, Homo sapiens
tggccgatgcggccaggcccgagagagcgcaggccgggtgcgagccaggcttcctcaccacgcggcttccccactcatcccatagaaaccgtaactgagcaaatgacggtaagtccccagga

SEQ ID NO: 97248 - DNA, 122 bp, Homo sapiens
aaatagcagggaaggagggcgcacggagttatctccatcataagggccataacacacacacgccaccacgagaggaggtgtcggcggggcgctgagctgcatcccatccgcacatccatccg

SEQ ID NO: 97249 - DNA, 122 bp, Homo sapiens
caccctggggaggtgcccacgttcttggttacaggaaaggctaaattttggttagagacacgacacaatgccagatgaaactcatccaagtccacggatcccctgaattccaaggaaagaac

SEQ ID NO: 97250 - DNA, 122 bp, Homo sapiens
caacgattaaaaactaatactgagtgcttactctggtactgtgctgaaaactttaaatcccgtcaaactccctcaacaaccctatgattcaggtattattactatgttcattttgcagtggg

SEQ ID NO: 97251 - DNA, 122 bp, Homo sapiens
agcagaaagtagaaatcacagtgggaagtgtagaaaaggacactcccagatcattgagagcgagcatagagaggaagtagtacatgggctgatgcagagcaggctcccaaaacaccagagtg

SEQ ID NO: 97252 - DNA, 122 bp, Homo sapiens
agggcaggaggggggagttatttacattagcatttgccaagttttcactgtttatcttaccggaaagtcaacagtgtgactattaacctcctgcataattaaaatttgggccttgttatggt

SEQ ID NO: 97253 - DNA, 122 bp, Homo sapiens
aagagaaatttttttttttttgagaatgaaatgtttcccatcatagtggattcttaagcacgttctccacgtatgctgtgtgctagctggatgtcttttggcataattgttacacgtttggc

SEQ ID NO: 97254 - DNA, 122 bp, Homo sapiens
tgccaaggctggaggctgcgcagctgacctggtgctggagcgagcggctggcgcacaccacgccccagaggccgggccggccggcaggggagagtgagaagaggggctcagccctccccaag

SEQ ID NO: 97255 - DNA, 122 bp, Homo sapiens
gcatagtgctggaggggcaggcaggaggctgtgaagctcagggttgatgtacacagtaggcgctcagcggacgtcagcttggtgtcgcgacatcgatgtaactggtaaaaaaaaccccgcac

SEQ ID NO: 97256 - DNA, 122 bp, Homo sapiens
taggcggaaaggggaggaacagagtcctcagtgtgtagcctaggatacaggccttcagcacgaaccacgtcctcagcttcacagagtagtattttatagccctaaagaaattgtgttttatg

SEQ ID NO: 97257 - DNA, 122 bp, Homo sapiens
agggaaagccatcgtctccggcccagggaaagccatcgtctccggcccagggaaagccatcgtctccggcccagggaaagccatcgtctccggcccagggaaagccatcatctctagcctag

SEQ ID NO: 97258 - DNA, 122 bp, Homo sapiens
aactagaactagctgcattatctgtggggcatggggtttccaattatttttacctaaagacgtctctttttggtaataacaaagtgtttttttaaaaagcctggtttttctcaatacgcctt

SEQ ID NO: 97259 - DNA, 122 bp, Homo sapiens
ctccccaattctgtaagcccatgaggagagaggaaggcctttctctccatgctccttttgcgggaactccctggcaccaaggccaggggggaaaggacagtctctgatgaggatgggtctct

SEQ ID NO: 97260 - DNA, 122 bp, Homo sapiens
ttttgtcggaaaagaagaacgagacctactgggaagcagcttttatagcacgccaagcgccgcgagatctccgcagccccgccccaagcgggagcgggccgagctcctataagacaacctgt

SEQ ID NO: 97261 - DNA, 122 bp, Homo sapiens
cctctgacatcaaggttcaggctgtgggtacctgctgcccagaaccctgggccacagtctcgggaatggagtagatctcgctggtgatctgcacgcctgtggtcacacgtaccaggaggaca

SEQ ID NO: 97262 - DNA, 122 bp, Homo sapiens
tcacatgtgtcaagaatcctcatgactgaggtttccagggcagatctgatctgtgtaacacgcaccctaacccccttgccaaaggagaatgaaataggcccctagatggccacccagttcct

SEQ ID NO: 97263 - DNA, 122 bp, Homo sapiens
gcacgagagtgaagcctgagggggctcctctggatcccagaaaggcagcactgaaggggccgtgacatcacccaggctgggggttctgcaccccctgacactgtaggcaagtgtgtgtgtca

SEQ ID NO: 97264 - DNA, 122 bp, Homo sapiens
cccagcttgacttgaatggaaggagcccgagcccgcggagcgcagctgagactgggggagcgcgttcggcctgtggggcgccgctcggcgccggggcgcagcaggtacagggcgctggcagc

SEQ ID NO: 97265 - DNA, 122 bp, Homo sapiens
taaatatctgtgatagaattctaagatggctcgtaagattcccatcccctgctatacaagcgctgtataatcaatcccctccctttgatgggtatgacctgaaatcggatggaatgtcactc

SEQ ID NO: 97266 - DNA, 122 bp, Homo sapiens
atgtcttcagcaacatcggcaagtatagacagaagcgctcccttagaaataggtcttcagcgatctactcaaggtatgtcttgttgcatatttatattgaactttcagaagcccattccaaa

SEQ ID NO: 97267 - DNA, 122 bp, Homo sapiens
cagagcgtcgccggaagtgccgagggggcgggccaggggtggagactggcgtttccggcgcgcgacggggcggggaccgtagcgggtgcagtccagctgctctggacgctgaggccccggct

SEQ ID NO: 97268 - DNA, 122 bp, Homo sapiens
cggcgcgcgccgggctgtagctctgcgacgacagcgagcggttctgctgcgggtacgtggcgcacggccgcagcgcccccacggccggcgcgcacgcctcgtcccgcgcgcccgacgcctgc

SEQ ID NO: 97269 - DNA, 122 bp, Homo sapiens
ctgactccgccccgcatctggccagacccgcctcgcgtcagagctgacccactcactgcgcgtttgccagtcagtctctccggacctgcctcgagcctcaggctgctgaaatcaccgcgcct

SEQ ID NO: 97270 - DNA, 122 bp, Homo sapiens
agagtaggaagaaagtgatcacacttttaactcctctgtgggctttggtgctggcgtctccggatattttgacagtgtgctgcatcttcttgcgatgtttccacatggagaagatgaggaga

SEQ ID NO: 97271 - DNA, 122 bp, Homo sapiens
taagttattatatgaattttcacaaggttttcttaggcctttaagttctgttactacctacgttttgagcagtgacaacagtgaaggttaacagaaaaacatgaaaatcatcagccatgatt

SEQ ID NO: 97272 - DNA, 122 bp, Homo sapiens
cgggcagagagcccggtctccccgacacccgcaccgggccgccgcgccggaggctcccgacgccccaggcgggggggtgcttctctgaattcaaaggacacaagcagcagcagctgcggcgg

SEQ ID NO: 97273 - DNA, 122 bp, Homo sapiens
tgggggccgggaagtgaccggcgccctcggatccccacgccgtgaacacgccactacgcgcggacgccgtgcccgccaggtgtctacccccacccccgcccgcctccaccattatataaccg

SEQ ID NO: 97274 - DNA, 122 bp, Homo sapiens
acccttggagctgggcatctggatggtggttggggtgttagggggatgtggcgatccctgcgacagacagcagagtgaggtctgaatctgagaagctctgcctccagatcagataacctatc

SEQ ID NO: 97275 - DNA, 122 bp, Homo sapiens
gaacgcaggggcactggccgcgatgacaacaccacgtggacccacatgcgcctttgcgatcgtcacgctgggtgtccaccatggaagccgtcctggaacttctaacatggccccatctcgtt

SEQ ID NO: 97276 - DNA, 122 bp, Homo sapiens
agagaatttaaaagcagatttgaatatacaattctcaaagcagaaaaccaaacagcaggccgagtgccatggctcacacctgtaatcccagcccttcaggaggctgaggcaagcagattgct

SEQ ID NO: 97277 - DNA, 122 bp, Homo sapiens
agggctggctccaggcaccccctctcatggctcggagctggctctggatctttgtggctgcggagcccacagtgccaggtgccatataagcctcatgaagtttgtggcacgaattcatgtgg

SEQ ID NO: 97278 - DNA, 122 bp, Homo sapiens
cacatcccaaggtcagcaattgcctcttcttttacagtcaaacactcctccctccctacccgcaacacttgcttcctagaaactctcctggatgggatttaaaaacggctcctggacagggc

SEQ ID NO: 97279 - DNA, 122 bp, Homo sapiens
cacggctctgcgactccgacgccggcaaggtttggagagcggctgggttcgcgggacccgcgggcttgcacccgcccagactcggacgggctttgccaccctctccgcttgcctggtcccct

SEQ ID NO: 97280 - DNA, 122 bp, Homo sapiens
ccccagcacgggctcaaggagttgagcctgcacacattacttagaaaaaacctctgcaaacgggtaagtacatcgcccgcgtgggccgtggctggaggcttgtcacctgcttcagggacttc

SEQ ID NO: 97281 - DNA, 122 bp, Homo sapiens
acttaatcctgggtaagcaaaactgaatggtagcccaggtatgtcagctgccctcattctcggcaacacttccaactccttttctgcctctttcacaggacaaatctccagctgcgaagtcc

SEQ ID NO: 97282 - DNA, 122 bp, Homo sapiens
agagatgctacatatgtgcttattgtatacagtaggtggtaaatgcatgcttgctctacacggcaagcactgtgtgcgcacccgcggtgcagagtaggtgctcggtgcccgctgtacgcagc

SEQ ID NO: 97283 - DNA, 122 bp, Homo sapiens
cgacgcggctgtcgcgagggcgggggtcggggctgcaggcggggcagggctgggtgggggcgcgcgacgcacctgcctgcttcctgcacgggtggtccccaagcactgcggggccccagccc

SEQ ID NO: 97284 - DNA, 122 bp, Homo sapiens
taagttcactctggggtactatagcatgaatgtagttcatactgttgagctagccgttcacgttagtgtagttcacatatttatctggaacttaaaaatgaggggttgggagaggaagctta

SEQ ID NO: 97285 - DNA, 122 bp, Homo sapiens
gattcagatccgccctccctttctagaaaccttcccccaaaggcagtggttggcctgactcgcggaaatcacgtaacccggagatgtcccagcgagtggccctggcgtgcgagccgctgccc

SEQ ID NO: 97286 - DNA, 122 bp, Homo sapiens
agagcctcggcgctgctgcgttttgactggagatctgaacgctgcgttaggcccctttcccgtgagcagcagaagccagttctcctgccttaaccacgggaatcaccgccaggcagcgggcg

SEQ ID NO: 97287 - DNA, 122 bp, Homo sapiens
gggttctgtgtcaattcccgtggggacgccatcccggggccgggatgagtcggactgcgccgcttccaacccagcagccgggccacctcgggccacccgaggtcccgccccttgggccccgc

SEQ ID NO: 97288 - DNA, 122 bp, Homo sapiens
cgtgtgcacaggacggtggctttgctgtcattaggagggatggggaggtgggggtcatgtcgccgtagggtcacaggtacagggccatccgccactctcctaactcccgagagtggaggaga

SEQ ID NO: 97289 - DNA, 122 bp, Homo sapiens
acacagctaggcaaggaatgtgccgggactcaaaatgactggattcagattagcagggggcggggagagcagcccaggatggggagaaggcaggagcaaggcaggctgctcctggtgtcctt

SEQ ID NO: 97290 - DNA, 122 bp, Homo sapiens
tgggtggatcttttgaacccaggagtttgagaatagccaggcaacatggtgaaaacccatcgctacaaaaaattagccaggcatggtggcgtgcacctgtagtcccagctacttaggaggct

SEQ ID NO: 97291 - DNA, 122 bp, Homo sapiens
gaggcgacgcacccagtactctgcgaggcccaccaaggccacgagtcccgagtcctggagcgagttgcagcgtccaggctgcacctgaccactgacctagaaatgtgcctttgcgaagcggc

SEQ ID NO: 97292 - DNA, 122 bp, Homo sapiens
gtcacaaaactggtacatggtggaactggggctgaccccaggtcttctgagtcatcctctcgttttccttccacttaggcatgctggttcaccttgtgttgagaacacagggtctccttctg

SEQ ID NO: 97293 - DNA, 122 bp, Homo sapiens
aaaatactaacttatggtcctctgaaatagaaggcggtgcctgatggacataggtatctccggttacttggtttggctgggcggtagcaattaaagctaatggttttcccaactacacccaa

SEQ ID NO: 97294 - DNA, 122 bp, Homo sapiens
accaccgtcaacccgggcgaaagcccaacgtcttccacggcagccccagcgcagcatgggcgccgccattgtaactccagggtcttggtcaggtgactcagcctcactatgccgcgaggctc

SEQ ID NO: 97295 - DNA, 122 bp, Homo sapiens
agcggccaccgagcaatgttaactcggggttcctaaagcctctgagcggaaaatcgggagcgctcagacccacctaggcggagcggtccgcagggtgggcgaaggcctgaggccacgactgg

SEQ ID NO: 97296 - DNA, 122 bp, Homo sapiens
ccggccgagagggcagaggggcgggaccgagccttcaaccagaggctgaaactagggggccgggagtgcggggaagagggtccagactccggcgacccgcccgacctgcccggccctcgccg

SEQ ID NO: 97297 - DNA, 122 bp, Homo sapiens
tccccaggcagccttcctctcctggactgggacgcccccacagagccacaccgtgaccctcggaggcaccctgaagcataactgggccaaccgtgcctgcaggaagcccctttgttcctcct

SEQ ID NO: 97298 - DNA, 122 bp, Homo sapiens
gtggcaatggaaatagtgacaacagtagttggcgttgtcatcctgtttacggctagcctgcgagtggctcaggcgaatccagcacagccttgtcctcgggttagctgccctctcagagcttc

SEQ ID NO: 97299 - DNA, 122 bp, Homo sapiens
ctccctcaagctgtttgccaaagaggtggctccagtgcccaaaatccactagtcctaaaccggaagaggatgacaccggccatgggttaacgtggctcctcaggaccctctgggtcacacat

SEQ ID NO: 97300 - DNA, 122 bp, Homo sapiens
acaaaagagatcaggcactgagttccgggaagttactgagcacacataacaactgcagaacgatcccaagtaaagaatattctcagggactctgatggaaaacataccatgaattaacatgc

SEQ ID NO: 97301 - DNA, 122 bp, Homo sapiens
gcggcgcggcgcctttgtggtagcagtggccccgcgcggaggaagttccggtgtccgcggcgctgggtcggtggcggaggctgaggagaaggaggagcgggccgtggaggcttcgccgccta

SEQ ID NO: 97302 - DNA, 122 bp, Homo sapiens
cgagtcttgtgagcatgagaagaggcataacccctgtggcctcacacaaattctggtgtgcgtgagtctggcccagggtacaaaagccccaagcagccattaatctccactgcagcccagta

SEQ ID NO: 97303 - DNA, 122 bp, Homo sapiens
agcgaggccgcgcgcgccgaagatggctgagaagcagaagcacgacgggcgggtgaagatcggacactacgtgctgggcgacacgctgggcgtcggcaccttcggcaaagtgaagagttgag

SEQ ID NO: 97304 - DNA, 122 bp, Homo sapiens
acaattcccctgttcacatttagtttaatcacaggacccctaaaagaagttaatcaaggccgggcatggtagctgagacctgtaatcccagcactttaggaggctgaggcgggcagatcact

SEQ ID NO: 97305 - DNA, 122 bp, Homo sapiens
gagtgctctgggaacggagccacgggagctacaggcggagggacccgagggcgggctttccgggtgtgtgtttccggcgtcggcggccgcggccggggacggtgtgagagcggtaagatggc

SEQ ID NO: 97306 - DNA, 122 bp, Homo sapiens
ctgtaggagtatagcaagtgtagagatcgagaacccatccctaacagcaaggtaagcttccgaggcagtagtgagagtgctggcatccaccattaacatgtcagagatgcaagatgcctgtg

SEQ ID NO: 97307 - DNA, 122 bp, Homo sapiens
aggggagaggagagagagcctgtggagtgggtaccctgagtcctggggtgtggtagccctcggtatgggcaggggcctagggagagaagggagggtgccctggtacccacattgtagccctc

SEQ ID NO: 97308 - DNA, 122 bp, Homo sapiens
tgggggagagttgggggacgggatccctggttctagcagggtacaatagacctgtggacgcgggccagggggtggcgtgtgggagcttcttagcctatccccggtggctgcattgccccctt

SEQ ID NO: 97309 - DNA, 122 bp, Homo sapiens
ttggaacacggggtgaaccctgaagcatggagacaacctggcgtgtaactggaaagggcacgtagttggaaatttgatggacttgccttggaaccccacccctgctagtcttcaacagtggg

SEQ ID NO: 97310 - DNA, 122 bp, Homo sapiens
gtggcagcctggggcagggctgcgagggcggcgcagggcgggacgggtggggcctgaccccgccccttggcgcagctgtaaataggtaaatagaaggtgattgtggcgtggcgatgtaccga

SEQ ID NO: 97311 - DNA, 122 bp, Homo sapiens
tgtcccctgcccagcgggcgccgttggaagggccttcaggtgcttgagcacaggtggggacggagcagctggtgtctcggcagtagatgcggcggatcataaggacttgggttttgagcgcc

SEQ ID NO: 97312 - DNA, 122 bp, Homo sapiens
ttccagtcaaatctttaaggagatctcagtaactgcccaaattttataaactcaatttcacgtttaaccacagctttatcacttcaattttcttttaaaatgtagattctgaatggctggta

SEQ ID NO: 97313 - DNA, 122 bp, Homo sapiens
cgcgctctagcggagtgggatctgcgaacacgtgaggcgggggcgcggtccccaggctgccgagatggccctgagcgacgaaccggccgcgggcggccccgaggaggaggcggaggacgaga

SEQ ID NO: 97314 - DNA, 122 bp, Homo sapiens
aaaagaaaaaaagaaaaaagaaaaaaaggcgcaaaggctccgttcaggccctagatcccgcgatacaaactttctcggcccgccccagcccgctgtggcgggaacattctggaagtgacggc

SEQ ID NO: 97315 - DNA, 122 bp, Homo sapiens
ggcacggtggcttacgcttgtaatcccagcactttgggaggctgaagcaggtagatttctcgaacccaggagttgtataacagcctgggcaacatggcaaagtcaaaaccccatcttgacaa

SEQ ID NO: 97316 - DNA, 122 bp, Homo sapiens
gacaagaaggtagtttgttctctgtaatggcttctgctggagtgcggcggggcccaggcgcgagcgggggcacgggcggggagttggcagcgaaggatgcgcccggcgccccccggcggccg

SEQ ID NO: 97317 - DNA, 122 bp, Homo sapiens
tgggaggacagtgaagaatgcccgcctacctggggaaacctgagttaggtgtggctggagcgactcgagatgcgaggtgggcgggggcaggctgaaagttggagcaagcaggaagtgaactg

SEQ ID NO: 97318 - DNA, 122 bp, Homo sapiens
ggcacgatactgtgtcctccttagtacatggtattgggaggcccacccagctgtttgtctcgttactggtgggagtaacttttgccccttggttaagacagcgtctgccaggtttcccttaa

SEQ ID NO: 97319 - DNA, 122 bp, Homo sapiens
accaggtaacctgttttgagcctgttcttcagccactgaccctgcaggtgggtgcaggtgcgctctttaagacctaagcgtggcagtcggctccaacctccgccgagggtcagctggggcga

SEQ ID NO: 97320 - DNA, 122 bp, Homo sapiens
agtgcggcagggagcgcggtgtccgggggccgcctgtcggtgtgtctgtgcgtgcttgtgcgctagcctttgcctctgcgagtgcgtatttttaggaccgagtctgtctatatgagcctgtg

SEQ ID NO: 97321 - DNA, 122 bp, Homo sapiens
ggattgccgaaagaccaagcgggtgccaggcctcacccgaccttgatgttggcgttagtccgggttgaccgcccactctgacgctctatacagagagctcctttgcttccatttttactcca

SEQ ID NO: 97322 - DNA, 122 bp, Homo sapiens
ctcttaccctgtgtcttgcatgatttggaggtggtgggaaaaccgaggctgctcaaaactcgtggagaattccgcctgcaggatgacatgaatgcaccttcacattgcctaccaacagatct

SEQ ID NO: 97323 - DNA, 122 bp, Homo sapiens
ttaagagatacacacagagagacggaacatgtaagaaaacacacatggtatcgatgtctgcgtctgttctcctaagcttccacggccccggccgcagcctcacctcaatgccctgcagctgt

SEQ ID NO: 97324 - DNA, 122 bp, Homo sapiens
aagtttgcaaattccttttacttcatccttgtcctcagaggccttggggcttcttcccaccgtcattattgatgtccctgccaccaagaatcatggccatgctggggccacgcgtcttggga

SEQ ID NO: 97325 - DNA, 122 bp, Homo sapiens
gcgcccggggcgcgggtgagtccgcgcggaccgccaggcatgcttgggggacttcaagggcggggtgctaagtttcatgtcacggtgtcctaactgctggctctatactgggaagctctcgg

SEQ ID NO: 97326 - DNA, 122 bp, Homo sapiens
atcattcagagcagtctcaggatggttaggcctatggctgtcctcctctggaagggccctcgtttgttcagaagcctccctggttaaagcaggcagaggaaaatcactcttgaaagctcaac

SEQ ID NO: 97327 - DNA, 122 bp, Homo sapiens
tatataacagtactttcactgccctgcccacaaggttataatgcaaactcggaaatgctgcgggcagaattcttgcaagggtgtaatcctacagagaagttactcaggtctcaaagtgacag

SEQ ID NO: 97328 - DNA, 122 bp, Homo sapiens
tgggcgcggtctctgctgtggagttcttgagagcaggtggcagagcgggtgaggtcagcgcggctgctggaggcggtgtgctgtgctcccgcagggaggagggcggcgtggaggaggcgggc

SEQ ID NO: 97329 - DNA, 122 bp, Homo sapiens
cgggcgcccctgctatagccaggaggtcaaggatccactgggaatgccatgctcatctttcgtccccagcatggtttcttaatggggtagaagcagtgtggggggtgcctgccgtggtgggt

SEQ ID NO: 97330 - DNA, 122 bp, Homo sapiens
tttgaaacactcaagccatccacacttagagagcttgagcgctatgtcctttcctgcctacgtaagaaaccccggaagccctacagtacgtatgaaatgaggttcatctcatggttctgagg

SEQ ID NO: 97331 - DNA, 122 bp, Homo sapiens
cttaaagaagctcaggggctaacattagcatccaggcaggaggaaagagcccactggccacgtggcagggacagagtagagagagggaactcaacaaattttgtccactttacagttttgcc

SEQ ID NO: 97332 - DNA, 122 bp, Homo sapiens
cgggcactttttgggggtggtgggggtggaggggtagggcttaactcctggggcttggaccgagcttgtacgtgaagaatactccaggattggacgtttaggtcttgtctgtatccttagac

SEQ ID NO: 97333 - DNA, 122 bp, Homo sapiens
cagccgcccccctggctgccagccgcgggctcagcgcacgtacggtccctgtcacccgagcgtacctgtcccgttctggccttggagaacgcagtggctcacaagggcaccgctagcacgcg

SEQ ID NO: 97334 - DNA, 122 bp, Homo sapiens
ctcgtaggtaaccaccattattaattttccgatttttccagggcttctttgtgccacacacgcacacataatttagattctttttactctcttctattcgcaaatatagcaaattatgaaaa

SEQ ID NO: 97335 - DNA, 122 bp, Homo sapiens
atctgctttctttcacataaaaaggaaattacgcgattaccaaaaaagggtggacggaggcgataggaggggcaagcatgccctctgctggccactgggccgcacggcaaggctgaagtgcg

SEQ ID NO: 97336 - DNA, 122 bp, Homo sapiens
attgccattgtgatttaaatgacccactgaagccatcagggaccccaccacggagggaaccgccctaggctctcctcagaatcttctcacgctccctgcaccctgcggcattgagcatgctc

SEQ ID NO: 97337 - DNA, 122 bp, Homo sapiens
ccacatgtctgggacagtgccaccagcaccacggtcaccagccactaacagctaccactgcgcccaggctctcctgaataatggttcactggctctgagggcttgtttcatttcctccagat

SEQ ID NO: 97338 - DNA, 122 bp, Homo sapiens
aaacatggaagggaaagagccgagagactcgatctcattcactagaatttggtcctcctgcgcctgccaagattgtctgagtattgatcgaacccaggagttcgagatcagcttgagcaaga

SEQ ID NO: 97339 - DNA, 122 bp, Homo sapiens
gagccccgcccccggcgccccgcgccccgcgccccgcccgcccgcgcctgcgcctgcgcccgccccctgcccccggcccgaggccccgcccctcgcccgaggccccgccttcctcccgcgcg

SEQ ID NO: 97340 - DNA, 122 bp, Homo sapiens
gcgtcccctgcgtcctctcccctgtgtcccggcatcccccgcatcctctgccctgtgtcccggcatcccccgcatcctctgccctgtgtcccggcatcccccgcatgtgtcccctgcatcac

SEQ ID NO: 97341 - DNA, 122 bp, Homo sapiens
gccttgtggtcagggaggaacgcctggttgtcaaagccttggggctggggctcctgcaggcgggagtcgaggcgtcagcggggtccctgggtctctgcagccttggccctgcacaccctcat

SEQ ID NO: 97342 - DNA, 122 bp, Homo sapiens
ggacggctcacgccctcggggccagcgccccacccggcgcatcggtcctccggggcggctcggagctgccctcgttctccgcagcacccgagcggatgccctactctggccggtcgctccgg

SEQ ID NO: 97343 - DNA, 122 bp, Homo sapiens
ttagcagggttgggaaccctcagtcaaactgaggacttcagatactctcatccacgaagacggttggggtggtttttccccaggaagtaagagggctatctttagcgagatgcgggctgagg

SEQ ID NO: 97344 - DNA, 122 bp, Homo sapiens
ctgcaaaagagccctggagaccaccctgggtctggggtccttgccgtggctgcagccccccgctgcccacagcctgtgtggttccacccatgggcctggtggagctggtccctgctctgctc

SEQ ID NO: 97345 - DNA, 122 bp, Homo sapiens
ccagcgcatcccccacttcattgcagagctaaaatgccctttacctttgcaagaaacacgcgagggatagcaggtctgcgcaatggccagtatcccaattccattgcagggaaatgaaccca

SEQ ID NO: 97346 - DNA, 122 bp, Homo sapiens
gggatctctctccccaactgtggcacacacctaggcctggtcagcatgttgatgtatctacggagatcagctgcatactgggccatctgctctggtgtggcattgtcccctgggtacactgg

SEQ ID NO: 97347 - DNA, 122 bp, Homo sapiens
caatctgaatagccttggtgggctatttctagaagtgaccctgaccctgtgtgctgttggcgccttctcatgttaaaccactctcctaagggctcctgggacaatatttaataacactttta

SEQ ID NO: 97348 - DNA, 122 bp, Homo sapiens
ccggggtcaatcataaattttctgcttctgtgctcgccgctagcgtacgtttttctctcccgtcagtgcattaaaagacatcggcgcgcttttttggagtcatgcacttctggcctgagaaa

SEQ ID NO: 97349 - DNA, 122 bp, Homo sapiens
aggagtaaaatcagttttggaatccagttctctttaccctgtgtcacccgctggctctcccgtgatgagggaggtggagcctgggaggttttgagctaaatgtgggcaggtttgccttttta

SEQ ID NO: 97350 - DNA, 122 bp, Homo sapiens
aggctgaggctggagaattgcttgaggctagtgagctgtgactcccactgcactccagctcggggaacagagcgagaccttgtctctaaaaataatagtaataaaataaaaataacgtttta

SEQ ID NO: 97351 - DNA, 122 bp, Homo sapiens
cgagtccatgagccccgagtctatgagccccgaggccatgagcccggagtctatgagccccgagtctatgagccccaagtctatgttgtttgttatgatggtcttagcaaatgaatacgagg

SEQ ID NO: 97352 - DNA, 122 bp, Homo sapiens
cgctggggcgctcccggccctctggagggcggcccttctcttcctgtaactctacagacgcgtccggacagaccaagacactctctgtgccttcgggcatgttacccatcctctctgagctc

SEQ ID NO: 97353 - DNA, 122 bp, Homo sapiens
tttcttccttcatgaacgtggagactttacaggatgaaatgagggcacagttaaggcgcccggtacactccaggcaggtagggggctccgttcacgttattttcccctggtgacggatactg

SEQ ID NO: 97354 - DNA, 122 bp, Homo sapiens
ctctctcccgggcagggaggctgccggcgtggaccgcgggaaggcggggctggggctcggcgggaggccacccccacagccgccccgggaggagcgcgcccagcagctgctggacgcggtgg

SEQ ID NO: 97355 - DNA, 122 bp, Homo sapiens
ggctcctcacgcccagccccgcgctcaccgtccgtggttgcagattcgccacaaaccgcccgacgaccccagatcccgagtacggtgacttcagtctccagaaactccactctaagatggga

SEQ ID NO: 97356 - DNA, 122 bp, Homo sapiens
tagcctctcggagccccaggtctacggtggacattggacatgttggttttcctgttctcacggacctctttttcttgttctcccagggaccccaactgtgtgtgtgacagtgtgggctacgc

SEQ ID NO: 97357 - DNA, 122 bp, Homo sapiens
aagcctcctagccggccgcccgcagcctatttctgaagcggaggtttgtctagagctcagcggggcccggcggaagcgggggccgcgcgtcccccggcgggcggcgcccaggtccgggtccc

SEQ ID NO: 97358 - DNA, 122 bp, Homo sapiens
cctgtgtgtcctgggacacacttccccaaatctgccatctggaaactcgaagtgtcttgacggtcgtatgcggagaaggagacactctgtggagaccccgcttctctcacttggcccccaga

SEQ ID NO: 97359 - DNA, 122 bp, Homo sapiens
tcagaccccgcccaccccgccgcgcaggcgccgtgtagcgccccgcggatcacgcaggcgcggctttcaggccaacatggccgtgctgctgctgctgctccgtgccctccgccggggtccag

SEQ ID NO: 97360 - DNA, 122 bp, Homo sapiens
gaactgaaaaccagggacccttgactctcctttgaaagtaaattcacatactctgtgatacggggtgagtcactatgactcttctctctgtagctctcatccttgacacatggaaaaggaga

SEQ ID NO: 97361 - DNA, 122 bp, Homo sapiens
atgagcgccgcgctcctcgggaagcacacagaagtgtttttattggatcatctgtgatgtcgcagagtggggagtcaagtcgccggcactccctgacaggctgtgctattccaggcaccctc

SEQ ID NO: 97362 - DNA, 122 bp, Homo sapiens
cacagcacggctgcccccatgtcgaaatacaggtaaggcactgggatgtcgggcttcctgcgagccgggagtggggaagcaacgaggacagaatgaagcggtgggggaagaagcttgagacc

SEQ ID NO: 97363 - DNA, 122 bp, Homo sapiens
cctcacttgggaagcgcaaggggtcagggagttccctttccgagtcaaagaaacgggcgacggatgcacctgaaaaatcaggtcactccacccgaatattgcgcttttcggaccggcttaaa

SEQ ID NO: 97364 - DNA, 122 bp, Homo sapiens
cacatggcccactcgatctgccccatggcgacacgaacccggctgggacactgctaggcgcgcactgccgcccctgcgctcccggccgaaccccgccccgcccaggccccgcccccagcccc

SEQ ID NO: 97365 - DNA, 122 bp, Homo sapiens
aaatgaagaggattacataattgttttgaaatgattatttttggctacaaggatcaacaacgagggtgatgtcagtccgacactggataggcagttactgggtagatgtcctcgcagtagct

SEQ ID NO: 97366 - DNA, 122 bp, Homo sapiens
cgcccttcctccctctgggaccagcagcctctgcgcgccaagtccgttctctaaagccagcggatctccatgtcctcgcggtgcttgcccctggcactcgctgtagtgccaggcactcgatg

SEQ ID NO: 97367 - DNA, 122 bp, Homo sapiens
gggaggagcccttggggcggcgtggccgggcttgagccacgacgaataacgggcgaggggcggggaggggccgaaagtttgccggggggcgagaggagagggcgagtgcagcggcgcgggcc

SEQ ID NO: 97368 - DNA, 122 bp, Homo sapiens
gaaggggaaagcacaggtgaacagatataaacaagggcccaaacccgggaggaggcaggccgtggcaagctccccagaagcagcacaatatgcctggggagtcagatcaggaatgtgggact

SEQ ID NO: 97369 - DNA, 122 bp, Homo sapiens
gcatgaacctctcccaagctttggggaggatctgctggagaggggtcccacgacatcccgcgcaaaacccagggccagttccctcagagaagctctgggacctagaatgaagcaccccaaca

SEQ ID NO: 97370 - DNA, 122 bp, Homo sapiens
gccatgtcctgcggcctccggagccgccgcctccagccctcggcgccgccacctgggagccggctgcgcagggcgccagcgaaaatcgcatttctgcttagaagccacccagttcacggtgt

SEQ ID NO: 97371 - DNA, 122 bp, Homo sapiens
agattttcccttcgtaatgccagaagcgttcctagaacttccccagctaaaacagggagacgctaacgtctctacctctaaggataggcccgccaaatagagttagcgtgaagaccccagct

SEQ ID NO: 97372 - DNA, 122 bp, Homo sapiens
acgcagccagtggagccgctttccagcgtcattagcaaagagggaatcccgggcagggggcggggagagagaggaactaatgataattttaaatttttcgtcattcccaatggtcttgaagt

SEQ ID NO: 97373 - DNA, 122 bp, Homo sapiens
gttccgagtagctgcctgtaccaggcctgccccagtcaattcattagcctttcagtaagacgttttatgccactgagtattttggagcccacttatcatggtaatcagggttttctgtgctg

SEQ ID NO: 97374 - DNA, 122 bp, Homo sapiens
ctcagtggccgggcagcccagctggccggaagccgagccctgggagtgacgctgtcccatcgtcatttcggccgcctcatgggactctctaggcactgggtttgttgaaactcgatggctct

SEQ ID NO: 97375 - DNA, 122 bp, Homo sapiens
aaaaggagcctcctacagccatacctgcggtccagtctccaggcatggtcaggcagcacccggcagtgcactctgtctgtccgtatccttcataaaactggggcaccaagagatgcaacatt

SEQ ID NO: 97376 - DNA, 122 bp, Homo sapiens
cgagaaacactgcttctccaggcccggggttgttggggagagaggcagaggcagctggagcgccgttctctcctgctgggacaccgcttgggctttggtattgactgagtggctgacagtta

SEQ ID NO: 97377 - DNA, 122 bp, Homo sapiens
tcgagagccactgttgctggtggcccgggcaagactgccggcaccctcccctgaggctggcgtgacatcacacactcttctggaacagagaggggaatgtctccctgcaggacagtggccgt

SEQ ID NO: 97378 - DNA, 122 bp, Homo sapiens
ggaagaggcaacaagaatgcagagcccggcccgggcgctctcccgagctcgcgggtcctccgccggccaacgttcaggaaacaagccagaaaaatgcgtgcgcttcccgcctttctgagccg

SEQ ID NO: 97379 - DNA, 122 bp, Homo sapiens
acatgcggagcctgccacccactgggcgagagcggtactgcagacgcgggtgtcaagagtcgccccacccggtggctttgctgtaaatgttcactgagcgccttttctgttccaggcagaag

SEQ ID NO: 97380 - DNA, 122 bp, Homo sapiens
gtgctagaggcccggctgctaagcaacggcagagggcgggaagtttgaacgttctggacccgccccgaaggcaaataggccaatcagcgtccagactcttcagctacggcagtccgcttctc

SEQ ID NO: 97381 - DNA, 122 bp, Homo sapiens
cttctagggatctgtataggtaacaaacgtcccccttcctaatggtcactttagtgtctgcgtgtcatgtcatacttgagtagaaccaactccacctacccttcaaacagctaggcacagac

SEQ ID NO: 97382 - DNA, 122 bp, Homo sapiens
gtttgcggggctgcggcttagcatggcgggacctgcatttcctgcgggccgcgggttctgcgcttcctgggggcagcctgggctggaggccgcggccccgctccctggctcggcggggaacg

SEQ ID NO: 97383 - DNA, 122 bp, Homo sapiens
aaccaaaaaaacgaaacaaaacaaaaactgaagttcaaagagatttatccacacagctgacggggaaaaggagaaaacaatcagaatttgaatccaggcctatggctcaaacactgatacac

SEQ ID NO: 97384 - DNA, 122 bp, Homo sapiens
tggcggggtggggagggggtgtgtggcggggcctcgggtcggctcgggggtcggagagcccggacaggagcgactacactgcagaaaccctttttctaagagtccccagcggtgccataacc

SEQ ID NO: 97385 - DNA, 122 bp, Homo sapiens
gtgctgggcccagggtgcaagtgcaggcacctgttgctgcagacgcacctggctgtctcacgttgctcacggtcagagtgcgtttgcgcctgtgacttctgcccaaggtcaggccaggagtg

SEQ ID NO: 97386 - DNA, 122 bp, Homo sapiens
gcatctgggctgaaaaaaaaaaggggaagtatggtcagttacacaattcaaaatgttgatcgggagaatattaagaccttgcagagaattttccctggtagagcctgttaaaaacaatccat

SEQ ID NO: 97387 - DNA, 122 bp, Homo sapiens
gcgctccagtctggcggagggacggggcggggtggagatgaggtctgtcccttcggagggcgcttcagcagtttgttaggcatttgtggtgcctcccaaccaatcgctaggcagttactgaa

SEQ ID NO: 97388 - DNA, 122 bp, Homo sapiens
agtctggtggggctcacaggtgcaacagcagcgctgggaggaccagcaggatggtgtgggcgggcaggctgggtgcagagctctgctcaaggggctcctggccccgggggtctcacttctgg

SEQ ID NO: 97389 - DNA, 122 bp, Homo sapiens
cggtctgaagcacgtgtcaccggtccctcagttccatttccaaatccaccaaggtccagtcgacagacatttccaaaaagaatcctgttctaggaccacttgcgctgagagcacacccgggg

SEQ ID NO: 97390 - DNA, 122 bp, Homo sapiens
ttcaagccatctgcctgcctcagcttcccatagtgctgggattgtgtgagccaccatgcccggtcccttggtcatttttttgattgctaaattgaagctacaagcaggtattgctgacttgc

SEQ ID NO: 97391 - DNA, 122 bp, Homo sapiens
tggaactttgaaaagttcctggtggggcctgatggaatccctgtcatgcgctggtcccaccgggctacggtcagctcagtcaagacagacatcctggcgtacttgaagcaattcaaaaccaa

SEQ ID NO: 97392 - DNA, 122 bp, Homo sapiens
catttggaccagttcttctggagctcctggctgtcctcccttgtgtcctggacataggaacggggtctgctttggggatctaaccctcctttgtcaggcaagagggacagaggagttgagtc

SEQ ID NO: 97393 - DNA, 122 bp, Homo sapiens
aattagggtttccttatatggccttgtctaccccaaagatcccaaaaatataagaactttcgtctgcagagaacagaggctgagcagagaatagaaatcaatagcagtatatccagattcat

SEQ ID NO: 97394 - DNA, 122 bp, Homo sapiens
tgacctcatgatccgcccgccttggcctcccaaagtgctgggattacaggtgtgagccaccgcaccaattaccaaaatattaaaaatggttagctctaagaggtgcttgctttctcttttca

SEQ ID NO: 97395 - DNA, 122 bp, Homo sapiens
aggagtttgcatacctagtcaggggacaagaaattcagaatgctcagatgaaggtaagaccgcatctatgaaggggtcatgcccagagcctgtggtccttggcccttcagcatcactcgtgg

SEQ ID NO: 97396 - DNA, 122 bp, Homo sapiens
ctgaagacgatccttcgagagctaaagtacagaattggcatccagtcggccaagttacttcggcatctgaagcagaaagataggcttctgcataaagtgcagaggaactgtgatattgtgac

SEQ ID NO: 97397 - DNA, 122 bp, Homo sapiens
tcatccccactcccccctcagtatccaagccggtaccagcactcagagatgccccagaagcgtctgatgaatgtgggcacaaagcactgagctgagaatcacccaccagggttctgtgactt

SEQ ID NO: 97398 - DNA, 122 bp, Homo sapiens
tgccagcgggagctggaaagcttcggctggggcctgagtggacgggaaggcggcggcctccgcgggatccttcccggggccgatccacagtcaggatccccagctccaccgccatcaagtgg

SEQ ID NO: 97399 - DNA, 122 bp, Homo sapiens
aagctggaatatccacggagttctttcgaactctagcggtccaagctctttcccaagtcacgtagcttctctattcggagagaagtcggagtactgggatagacccaggaggtcagagcgga

SEQ ID NO: 97400 - DNA, 122 bp, Homo sapiens
gctggacgctcaccttgacactcccagccagctggggtactgatcccacccttccccggccgctgccccgggagtggggaggtagagagagccacacccgaaacacctttccacgataaact

SEQ ID NO: 97401 - DNA, 122 bp, Homo sapiens
gggaaattagaaacccagaggcggggccgggtgggcggggtaaacgaagtacggaggtgccgagggagcagcacggggagggggagcggtgattgacaagactcccagcaaaccgggggccg

SEQ ID NO: 97402 - DNA, 122 bp, Homo sapiens
gaaatgtctgtgttgagggagggcagatgctgtgaggagggaggtgtttacaccaagcatcgagccaggccttggagtcacagggacaggcccagagcaggaagtgtcctccaagctagaag

SEQ ID NO: 97403 - DNA, 122 bp, Homo sapiens
gcttctccctgcgtcacttccggggactgcttccagccaatcggcctccgccacagccagcgcagccttgccccttaaagtcacaggccccctagcgcgaaatcccacgcccccctggacgg

SEQ ID NO: 97404 - DNA, 122 bp, Homo sapiens
cagccccgtcccagcctgcttccttctcgctacccaccacccacacatcaaggcttctcccgtttgcatggttctcagacctagcccaaacccaggcccggccacccagcactgccacaacc

SEQ ID NO: 97405 - DNA, 122 bp, Homo sapiens
cctctctgatggggatcgaagggctttctggctgcagtgacaaggatatgctcccaaattcggctgctacggctgctcaggtttcagtcccggagcgcgagtgtgctccgtgcgccgggagc

SEQ ID NO: 97406 - DNA, 122 bp, Homo sapiens
gctgaaaaactaatacaattaaatcagagaatcatagcagggaacagtcatcgtgttctacgaatagccagacatttttaccaaggggtcactttcctgaaacctgtttgcggttctctgta

SEQ ID NO: 97407 - DNA, 122 bp, Homo sapiens
ctagggggcgggcctacgccttctctggccacatgtggcaacatcttctgctcttactgccgtcccttccctatttccgggttctcgagcattcctattggccaaattactggttacacgtg

SEQ ID NO: 97408 - DNA, 122 bp, Homo sapiens
ctgacgtggctcatgggaaactgaggcacagggtgacttgtcagggtcacacggtgcttacgtgccagagcagggattggaattcaactgggctggcccggggtccattctgagccctgact

SEQ ID NO: 97409 - DNA, 122 bp, Homo sapiens
gggctgctatggagtgggtgtgttcatgcacccgcagaccacacaccatgacaaagtcgccgaccgtctcaaggcagcatccctgtggctggcatgggcagcatgccccaaacatgaagcac

SEQ ID NO: 97410 - DNA, 122 bp, Homo sapiens
gcagtgccaacctcagccccgattgcacccaaagccagggaggtcccaaggagacttccacgtgccagattcccagccccactgctggcagcggccatgacctcgaaggtcacagagactga

SEQ ID NO: 97411 - DNA, 122 bp, Homo sapiens
ccggcagctgcgggcttcccttacctacctctctctcatcctccatttctaccgcgacgacgtgaccctggagggcatgggccacttctgagagctggcccaggagaagcgacagggcgccc

SEQ ID NO: 97412 - DNA, 122 bp, Homo sapiens
gattgaatcaataaataacctaatgttagcacagactgcagctctgtctatgcttcacaccgttaaaaaaggcctgggtgtggagtccccgtctgttattctatacgttatcaccaagcctc

SEQ ID NO: 97413 - DNA, 122 bp, Homo sapiens
gccgtgggttaatgttagcgcagccctgtcctcctactgccgtggactaatgttagtcatcgtcaagttctcatcttacctggggacccagtgtgtagacagaccttgtgcagacccagtgg

SEQ ID NO: 97414 - DNA, 122 bp, Homo sapiens
ccctccgctgcgaaatattggagatttttttgcataattcattccctgccctctccatttcgtccctctcatgccccccaccctttacccctttccgtgccagtgccagaacactacttacc

SEQ ID NO: 97415 - DNA, 122 bp, Homo sapiens
ttctaatctgatttcacctccagtctggctgagggccttcaggagcagtgtggtggcctccgtcaggaggtctggcacagctgggacaagccctgacccaagagttcctccatgtgcagcat

SEQ ID NO: 97416 - DNA, 122 bp, Homo sapiens
ccgcggagagctgggagcagcgggaggccgggacagtgactagggggcggggcgcggccgcggccctactcgatcaggccgccacgccttccagcacccggggcgcacggggccgcacgccg

SEQ ID NO: 97417 - DNA, 122 bp, Homo sapiens
ttgctttaggtaatattggcattttaacaatattaaggctcgcgcccagcgctctccagccggggtggcggcggcggtggcggtggcggcggcagcggcggcagcggcgggggaggggtgcg

SEQ ID NO: 97418 - DNA, 122 bp, Homo sapiens
accaaagatggggcattaagcaccaagtcctcccaagtgctggctgagggtccaggtgggcgcggtgccggtgcctcctgcggcggtggcgaaggctgggctcccgcgctcgcccagggctg

SEQ ID NO: 97419 - DNA, 122 bp, Homo sapiens
tctttttcctcttatgagtactcagggctgcctcctagctttgcctaattgctctatccacggaccaatgagagcgggtgacgttttaaagtgacaatcctacattgatagtattttctaga

SEQ ID NO: 97420 - DNA, 122 bp, Homo sapiens
caatctggtatagtttcggctgcacacacacactatcttggcacccatcctctcttaggacggaccccaaaggcctatcccagacagaaaaactgggcactctctcattgcttagttcagtg

SEQ ID NO: 97421 - DNA, 122 bp, Homo sapiens
tgaaagtgaaattggagtgaaggaaaattgggcttgaggcgcatagaaggacggtctttccgtccccttctggggctcagatttgcagagtgtgtccttagtcgtccgttgggaagctgacg

SEQ ID NO: 97422 - DNA, 122 bp, Homo sapiens
acaaggcagccagccgagggtcgccgcgccagccaaggtgggatgggggcccacagccaccgcccggcgcccgagaggccacctgcgtgctagaggcaaacttttgtctctctcggtaaagt

SEQ ID NO: 97423 - DNA, 122 bp, Homo sapiens
ccggcgtgcgagcccgcctgcctgccaaatgtaactgtgaagtgatgtggaaaagtgagccgggtgcctcccctgacggatctcattgggcagagcgcagaggcaggtctaccacttggaaa

SEQ ID NO: 97424 - DNA, 122 bp, Homo sapiens
cgcttccgagcgccgccaaccgcttccgggttcaaaagcctccaagccgaatttcagcgccgcccgggctcgccaatttaggggaaaggctccgcccattccccgccccctgagacctggca

SEQ ID NO: 97425 - DNA, 122 bp, Homo sapiens
tttctttgctggtcagtgtggggaaggaggttaccgtctgggcccatccacacccatattcggctccttgtcccaggccagtggcaggcagtatgaacagaagagtgtggacattgtccgtg

SEQ ID NO: 97426 - DNA, 122 bp, Homo sapiens
gcctaggtaggtgggaatggtacctgggaaatgtcttctgccagggcattgtagaggcggcgcacagagtaggcatgtagctcctgggcccccccaatcagctgggtcaggttggccactgc

SEQ ID NO: 97427 - DNA, 122 bp, Homo sapiens
ctgacttctgaaagcaaagccatcacgtgggccggatccctcctgcctcttggctccgcccgggcctctgagcggccctggcctccagacacaaccgctcctgggaagccgtctgagggcag

SEQ ID NO: 97428 - DNA, 122 bp, Homo sapiens
ccgccagcccatccgcgaccgcatccagatcttcgtgtgagccgcgccgtccgccgcgcccgagctgccttcgcgtgcccccgccctgtgttttataaaaagaaagattctcggacgttgcc

SEQ ID NO: 97429 - DNA, 122 bp, Homo sapiens
ttcagagccggggtgccactctcttcctggggtcaggcggccacttccaaaccctcatggcgctcagctctctgccgggtccccgccgagccaggtgcatcgggcaagtcggatggggggcg

SEQ ID NO: 97430 - DNA, 122 bp, Homo sapiens
ctacagctaagtggccacagcttggtccctcgactcctgtctgagtggctgtccggctgtcgccgcccccagcacggccaccctggttgtcctttctggaaggacaggctgctcccctgcat

SEQ ID NO: 97431 - DNA, 122 bp, Homo sapiens
atctgagaaacctggagtggcgggacagagcccacacatggctcaccgcagggccggggtcggggtcagcgtctatccccagtctgtgtcagcgtggggctgccccagcactgtgctccttg

SEQ ID NO: 97432 - DNA, 122 bp, Homo sapiens
cctcctgcccagcccctcccagccctgggggcgtgtgcgcgcgtccaggccggcccgggacgcaccacctgcgcccgagcgcgcgctgcccggagcatccccagccctaagtccacccccat

SEQ ID NO: 97433 - DNA, 122 bp, Homo sapiens
ttttacatttccaccagcaatacgtgagtgatccagtttttctacctttttttaacattacgttaatctatgtagatggtaaaattagtaaataaataaattacccacataagaacagcctg

SEQ ID NO: 97434 - DNA, 122 bp, Homo sapiens
tacattcagagggagcaactttggaaatgaacaaataagggatttcaagtttggaagctgcgtagtatcggttataatcgctgagaagatgaacctgatgttgtgtgttaggtacaggggtc

SEQ ID NO: 97435 - DNA, 122 bp, Homo sapiens
agaaggtgccgctggaggcgtgctagggagtaggggtcgtctgataaggggaagctgtgacgcagacacgcacagtaatacacagatggaggctcaaaagacacgagtttcgcgtcctgaaa

SEQ ID NO: 97436 - DNA, 122 bp, Homo sapiens
gcgctctcccagcatcctttgccttccggtatgtggccccgtctggctagtcctgtctagcgcgcccatttcgagcccaagtttccagctcgggtttccgggctcagaattttccaggagtg

SEQ ID NO: 97437 - DNA, 122 bp, Homo sapiens
agctcctccagatgcagcaaactgcccggcatgagaagagctgtctaaggacagcctcttcggctctgagccccgccttcctctctcccccgcccgcctgccggcccgccccaacctcctcc

SEQ ID NO: 97438 - DNA, 122 bp, Homo sapiens
gcagtccagcagcagcgtgcgttccgcctcccgcggatcccgcagcagcgtgcccagcgccgcgcactccagctcgcgcgccgcctccagccccatggccaccggtgcctcttcctcttcct

SEQ ID NO: 97439 - DNA, 122 bp, Homo sapiens
cctcttcccgaggtggccttggccaagtcttcagccatctccgtcaaatgaggaggtgggcgggatgcagacggtggagcgggaggcttgggcgcgccagtttgggagccagtgcgcggggc

SEQ ID NO: 97440 - DNA, 122 bp, Homo sapiens
cactcttgttgccatgacaactcctcccccggaagacagggaggccgttggacgagtttccgctcagagcggagagcccaggccctgggctgcagggaagagtaggagccaaggcaggcaga

SEQ ID NO: 97441 - DNA, 122 bp, Homo sapiens
gcacggcgcttgattgacatgagggcccgcccaatcccagtgcggcagagaccgttgtcgcgtcagggaccggggaagggggcgactgaacctatcagattgggtccagagtgggtttcctg

SEQ ID NO: 97442 - DNA, 122 bp, Homo sapiens
aattattcttgcatacactgtcccccctgcctggacatgagcacagtcaggcaaggtctacgagtatgccctccaaattaagttttcactttctctctttatgctctaagaagtttaagtga

SEQ ID NO: 97443 - DNA, 122 bp, Homo sapiens
tcccggcacgcggcccttcttccttctgagttgtttttcaggggctgcgctggggtcccacggacacctcgccagaatcagctgggttcccatgggaaggggaagtgccgctcctgcgtccc

SEQ ID NO: 97444 - DNA, 122 bp, Homo sapiens
gctgggcagagaggttttctttctgctagagtgacagaaagtaaacccagagcagccgatcgccgcctcgcccctcctcagagccacagaaggaagctggccgctagatcagaggagcgcag

SEQ ID NO: 97445 - DNA, 122 bp, Homo sapiens
tcacattcattttagcattgggaaatgtgtttcttcagtatctttacaggtgctacagagcgatggtctccataaggtaaataaaatgtggtaccctggtatctgtttctttaattgagctt

SEQ ID NO: 97446 - DNA, 122 bp, Homo sapiens
tctcccgcgggagctaagcctcttcgacaagaattctatagcgcgagcaaatcagtatctcgcgagaaattgaagaggaaacgtgagaatgaaagtggatgcccgcgaatcccggaagtcag

SEQ ID NO: 97447 - DNA, 122 bp, Homo sapiens
ggagcccttgtcccaaccagggctggataagaaggtgttggtgtggtgctctcggtgttgcgaaggctgtttaagttatatgatgaggttaagcctatggatgttttagtagcctaggttct

SEQ ID NO: 97448 - DNA, 122 bp, Homo sapiens
atctccatgaccaccttttccaataggttttattatcgccatttgaacatttcaggaaaccgagacccagggaattttattaactttatttacaaagtcacaaagactaagtggtagaggtg

SEQ ID NO: 97449 - DNA, 122 bp, Homo sapiens
tcgaagaacccaacaacatagatgggccccaccccaggtggagggtgcagacagtatactcgaaaggaaaggaggtgatgggaaggcctggcttctcacagaacctcagccaggttccttca

SEQ ID NO: 97450 - DNA, 122 bp, Homo sapiens
gggaggagggcgagagaagagtgctcgcactcagggatgtgccccagagggcgtggggtccggttccggccacgaagaacagcctctgtgtgagttgcaggactgaggtcctctgcaatttc

SEQ ID NO: 97451 - DNA, 122 bp, Homo sapiens
ttcaccctaaaatttggggagaaatactattgtttttcaaatatatatattgtttattaacgtgtaatgatgtagtatttcttaacaaatagtttaaaatattctctagggctgggcacagt

SEQ ID NO: 97452 - DNA, 122 bp, Homo sapiens
ctgccgcccagcgccctcgccgcggccatgcccgggccctagagcgcctgccgcagcttgcgccccgcagccccgcagccccgcgcccgccgccgcctcttcaatgggcaacctgctcggcg

SEQ ID NO: 97453 - DNA, 122 bp, Homo sapiens
ctgctgctcccggggtggccgcgctgtatttctccgacttcgggcgcctcccggaagccgcgagctctggacccagcctgccgagccggccgcgctctccagctcctggagccggccccact

SEQ ID NO: 97454 - DNA, 122 bp, Homo sapiens
cggagaaggggcgcgggacgcctggatcaggaactcacctgacgccgagccgggcagcgccgaggctgcctcttcgcgctgcgcacccgcccgcccgcctcgtactcctcctcttcctcccg

SEQ ID NO: 97455 - DNA, 122 bp, Homo sapiens
cggcggggctatatagcaggagggctgctgtgttggcaagaaccgcacaaaaggggcccccggaggggagcaagggcatttttttttctctctctctctgttccatataatgactgtagggg

SEQ ID NO: 97456 - DNA, 122 bp, Homo sapiens
gactggggaagaggaaggagtaagcaacaacactggtttgggaaactggagggattgtagcgctcttactcaaagaaaaaacaaaagaagaacagatatgaaagaaaatatgagttcagttg

SEQ ID NO: 97457 - DNA, 122 bp, Homo sapiens
cctccccacccccgaagtagcgctcccgcctcgctccacccgcacacccccggcgcgcctcggaggcttatcaggctccccgcacgccccgcaagcttccttgggcgcccggcgcgagggac

SEQ ID NO: 97458 - DNA, 122 bp, Homo sapiens
tcaggacatgactaattggaagttgactaaactaaatgagatgaatgatagccaagtaaacgaagaaaaggaaaagtttctacagattagtcagcctgaggacactaatggtgatagtggag

SEQ ID NO: 97459 - DNA, 122 bp, Homo sapiens
tctcgccgcttgtgtggctcgctggctgcgtggctcggttcttgtgagcgaagctttgtccggttcggcaatggacgggtatgtaatcgggccggcgagaaggtgtgtgtgagagaggagtt

SEQ ID NO: 97460 - DNA, 122 bp, Homo sapiens
gctatggtctgtagttcccatagaccacaataccctaccctctcagtcctcagttccgggcgattctagaaagatggacacataggccccagtccctcaggtcaccccaggccaaccttggc

SEQ ID NO: 97461 - DNA, 122 bp, Homo sapiens
tagagagaggggtgctagatggactctcacctctcagcgcgtggtgcatgccgcccacgccgctgtatagctccagcacccgcaggggctccatccccgcgcctcagccgccgcagccccgg

SEQ ID NO: 97462 - DNA, 122 bp, Homo sapiens
cgcagccgcacacgggctgactggggagatctcgtggtgccgcggggcggtcccggggctcgaaggcagaggctcccctaggtgtgccctgcctgaccccggctacaggaacgagcgctgtg

SEQ ID NO: 97463 - DNA, 122 bp, Homo sapiens
agcagaaagcattcactgcttgtgcatctggggcattcagtcaggcagctctgctgatttcgatttccagaactgtctgcagatcggctggccataagctgctgctccgcatgcctctcatg

SEQ ID NO: 97464 - DNA, 122 bp, Homo sapiens
cccaagtccgaaaaacccgcgctggttcaccggtagcggtctctccaacacgctggcaagcgccatgtctagtgtgggcagaaagaactaattctgagaacgcctagcaaagataggccggg

SEQ ID NO: 97465 - DNA, 122 bp, Homo sapiens
taataaattttggtatttctttgtttgtttgtttgtttgtttgtttttgagatggagtctcgctctgtcacccaggctagagtgcaattgctcgatcgcggctcaccgcaacctccgcctct

SEQ ID NO: 97466 - DNA, 122 bp, Homo sapiens
tttttccgttttcgtttctgccttttcatcttgtcatagctgaggtaatcatgattcctgcgcttacatttgtgtttatgtttttctttaagactgcttagcactgtagaggtttcaggggg

SEQ ID NO: 97467 - DNA, 122 bp, Homo sapiens
ggcgaacaggggggagagtgctgatcactctcggggaccaggacatagacctgtcgccatcgtttgtcatcttcctgtccacccgggatccaactgtaaggaatgggacccttccccaggga

SEQ ID NO: 97468 - DNA, 122 bp, Homo sapiens
gcccacgaacggtggggcgcggggtcgctggcatctaggaccgggggtcctgggaggctccgccagggggctggtgaggaccctcactctgtgggggccggccctccttctacctctttcac

SEQ ID NO: 97469 - DNA, 122 bp, Homo sapiens
cgggaggccaaagcaggcagatcacttgggctgagttcaagaccagcaccggcaacatggcgaaacacaatacaaaaaatgcaataatcagccgggcgtggtggggcacacctgtagttcca

SEQ ID NO: 97470 - DNA, 122 bp, Homo sapiens
ctgctgggcattctcagctttgcacaatctctgctaccttctttttccagtctcacctcccgctatgcccacatcatcagatctcctgagctgcagccacagtgcccaggtcaggcctccac

SEQ ID NO: 97471 - DNA, 122 bp, Homo sapiens
cggcgcaccacgagattataccccgcacctggctcggagggtcctacgcccatggagtctcgctgattgcgagcacagcagtctgagatcaaacagcaaggcggcagcgaggctgggcgagg

SEQ ID NO: 97472 - DNA, 122 bp, Homo sapiens
cccccaggcacgctggccctttaagactccagtgcggaggtgggcccgggattggacttgcggacggggcgggaaggtgtggtccacctttctcggtgccggtgcctcgtttcgggctcgaa

SEQ ID NO: 97473 - DNA, 122 bp, Homo sapiens
gcggcgggcggggagcgccgcaaagccaccttcccggtgcaagtgtgcggggactcggggcgggttcccctgcaaacaccgtacctggcccgctcgcgctcgcttttcccctctgctaaata

SEQ ID NO: 97474 - DNA, 122 bp, Homo sapiens
tctcctgaaagtgggcagaagcagcaccgatagcctagtctggcaggttgtgggaaggggcgcagggagtgaccatgagcgaccttggccccgtccttgctccttgcaccctgattgggcat

SEQ ID NO: 97475 - DNA, 122 bp, Homo sapiens
agggatgcagggaggaagggagggaggacacacaagcagcactgctgggaaaagcacaggcggcctggatgtcagtgtgaggggaccttgtgctgtcgttgctgcaaaaccgcatttggcct

SEQ ID NO: 97476 - DNA, 122 bp, Homo sapiens
ttacggtcacgccttcggcaagaccaggtagcgggcgcgtgcacgtaaaggggcctcgggcgcgcgcacgtccatcaccagctgcttcccggcgcccctcctcgccctctaatttagatcgg

SEQ ID NO: 97477 - DNA, 122 bp, Homo sapiens
aagcagggaatgaaatagacgttgaaaactattcccgttacgccatctctgcgcgcctcacgtcagggccaagagcctagcgcgtagctttatggctgactcggctctggcgctctagccaa

SEQ ID NO: 97478 - DNA, 122 bp, Homo sapiens
tgtccggttgttcccgttgcactgccgtgtcccgtttcgcagagctctgggccgcgtgaacgaatgggtcgtcctggcccatacttgtgtttcagatgacctgagaattcctctcaagagta

SEQ ID NO: 97479 - DNA, 122 bp, Homo sapiens
taggggtgtgggagaaaggaggggcagggagtgaaggagaagaaaggaagcaggaaggctcgcttagaagcttccaatgggcattcaaccctggagattagaaagatcaagtcacagatatg

SEQ ID NO: 97480 - DNA, 122 bp, Homo sapiens
gccgtcttccctcccggccccacgtcgcccaatgccgcaccttgaggtggctgcgcaggccgccagcgcccccagactggtcggagatctcgtacgcgccagtcactagcaggtccttgtga

SEQ ID NO: 97481 - DNA, 122 bp, Homo sapiens
tctctccgatgagcgggaagcccatggatcccttggggatgggcagcttgcagctcttgtcgcgagtggcggcccagcgcagctgccacagctgctgcgacacggccagcagcagcgtcacg

SEQ ID NO: 97482 - DNA, 122 bp, Homo sapiens
gttcccggggcagcagcagctcccgcctaagtactatgttgaagtggccagctagtgccgcgtccctccccgcccggggctctgtgccttggtgaggttttattgtgaacacagagcccaca

SEQ ID NO: 97483 - DNA, 122 bp, Homo sapiens
cctcaggattcctgccctcgggaggccagatgtctgcatgcaccggagacgctgcccccacggagcctgctcccatcccgaggtggccgagcctcactccgggtagcccgggctcggagcca

SEQ ID NO: 97484 - DNA, 122 bp, Homo sapiens
ttgaccccagttctgtaaaggttccgagtcctggaggaggtgcagcgactgtgtgcacagcgccccctggtgatgagacactggcttttccgcatactgagagaagagcgtctccaacagag

SEQ ID NO: 97485 - DNA, 122 bp, Homo sapiens
cgatccagaccccaagggagggttcttggctctcccgcaagaaagaattcagggcgagtccgcagtgcaaagtaaaagcaggtttattaagaaagttaagtagtgaaagtacagctactcca

SEQ ID NO: 97486 - DNA, 122 bp, Homo sapiens
cgaacatagatgggaaagttctggaaaccgaaggtagtcaggaaagtacagtgatccgtgcgccctcccttggtgcacagagtaaaaaggaggaggaggtgaaaacagccaccgctacgctg

SEQ ID NO: 97487 - DNA, 122 bp, Homo sapiens
gctttcgtttgccctgggtagaacccaggggcggaatcactgggcaggtggaagctgtctcgctgtctccctgttccccaaagcagcttcagccgtgccgcggacactcaccggcaagggac

SEQ ID NO: 97488 - DNA, 122 bp, Homo sapiens
gttgatgtggacttcaagcctgcagaacggagagcccatttccattgcttaaagccacctcgtgtgtggtatttgttatggcccctgtacactcccttccctccctctcccaagtccagtcc

SEQ ID NO: 97489 - DNA, 122 bp, Homo sapiens
tggagcaaacacaatctgtgggtaattagcattatttttcccccttttggggagcagtcacgcagtgtgggctaatgggccctgttcccaaagattaacagggatgggcatggttagaggtt

SEQ ID NO: 97490 - DNA, 122 bp, Homo sapiens
ggatttcagcatctggacataacttggtgtcgagagcaaccatcactgcacgtctgtcatcgcggcttttgagcgcttccttggtgcaggtgtccactgaacgccacgcacgccttggtcca

SEQ ID NO: 97491 - DNA, 122 bp, Homo sapiens
atgaaaaatcctctggtcccaaatgtcagtagtactgcagttgagaaaccctggcatggacgcaatccacctgctgccaggagttatatacaagccatgttagggtaatgctgcaatatgtc

SEQ ID NO: 97492 - DNA, 122 bp, Homo sapiens
ccaaagcgcaaacacgcaagtccgctcactgacagcatcgcacccaccaggcctggcaagcgggaagtggcaggcgttctgagcgtcctgctaggacacaggcactccagggcaggagagag

SEQ ID NO: 97493 - DNA, 122 bp, Homo sapiens
agagtttggaggaatgtgaataattcagaggcgacttagatgcagcctttggagggcttacgggttaatgggagacacacacattcagtaatctcaactttcggtggcccagctcagaacaa

SEQ ID NO: 97494 - DNA, 122 bp, Homo sapiens
aagcaagttcggtggacgccggcggcgccctgatctaaagaaacgactcagggactgcggcgcttgcacgtcaacgggaggtgtgagcccaaaggtctggacccaggtgatgcccacgacca

SEQ ID NO: 97495 - DNA, 122 bp, Homo sapiens
cctcctcctcctgctcctgccggaaatacacaacaggaggctcttcgaggaccttgtccacgttcgtcagcgacaggggcgcataccagagggtggccttattggtcagctttttggcacct

SEQ ID NO: 97496 - DNA, 122 bp, Homo sapiens
catttaacccagtttagcggcatgttctttagcctttgcctttttgagcttggcaacgtgcgccacagacttgggacccgggacattgccgcccccgtgatggtgaatctcgtcgtatctgt

SEQ ID NO: 97497 - DNA, 122 bp, Homo sapiens
gtgggacctggtgtgcagctcccagggcttgaagcccctaagccagtccatcttcatgtccgggatcctggtgggctcctttatctggggcctcctctcctaccggtgagtgcctccgctcc

SEQ ID NO: 97498 - DNA, 122 bp, Homo sapiens
taaattatatgcctgagacacaggcatcaatagtttttgaaagtttctaggtaattccaacgtgcttgcaagtttgagagcactgtctcaaccaacttgttctcaggcaaacttctgtttat

SEQ ID NO: 97499 - DNA, 122 bp, Homo sapiens
catggtgtctatgcctcgtccaaagaagaaaaggattggaagaaggagaaatcgcgggatcgagactatgaccgcaagagggacagaggtaaactgtccagcacagttcctattgtccatta

SEQ ID NO: 97500 - DNA, 122 bp, Homo sapiens
tgtgacacctctgaccctgccccctctgcccggctctcattccttttcatcctttaatctcggctaaagatcaccttttgggaaacaggttcagatctgctggtcttggccaggctcctctc

SEQ ID NO: 97501 - DNA, 122 bp, Homo sapiens
tcccaatgtcccagtgttttggggaagtaaatttcccaaagacaaagccactaattgggtcggcacgaaactccaaagtgttgcaggataggtcctttcacgggtcatgttgtgatctgcgg

SEQ ID NO: 97502 - DNA, 122 bp, Homo sapiens
cgggcagggggcgggcgtggaaacgcctaagaggatgctgagtgacagaggcgcaggccgcgctccgaccctgccatgtctctccccagctgtctctcccgccagccgccgcgtcctcaacg

SEQ ID NO: 97503 - DNA, 122 bp, Homo sapiens
gtttttaatatatcctattctgaataagagacgaattcattcagatcagtggtttcaaaccgtgctctgggcaactcaattgctaagggttccacaaacaggataaagtttcttatatacaa

SEQ ID NO: 97504 - DNA, 122 bp, Homo sapiens
tatatatatgtggatacatataggaagtgtgtatacatttatacataatatagtgtatatcgtttcaactggagataaactgaactgggttcagacactagcacatgcttaactttcccctg

SEQ ID NO: 97505 - DNA, 122 bp, Homo sapiens
tctgagggaggggcttcgtggatagtatcctactctgagttccaaacacacagatcccaacgtctggattccacctctgctagacaccagcttgtagcagagaccttagctgggagcctggt

SEQ ID NO: 97506 - DNA, 122 bp, Homo sapiens
gcgggctgagggcaggtgcccagtggatggggagcctgggctgtaacctaagatggaggccgggactgacgcgggcccgagcagggctggcgggacgatcggacaggcctcagccgcgccag

SEQ ID NO: 97507 - DNA, 122 bp, Homo sapiens
gaggagagaaaggtgggccaatggctactgttcaaggaaatggtttaaatggggctgccacgtggttatgtgtctgtcacgagaggcttgttaagcagttagcacttgagtcatttttctac

SEQ ID NO: 97508 - DNA, 122 bp, Homo sapiens
cctgtcaaaggtcacacaactggctttaacaaacatgctgctggggtagggactgacctccgttttcagggatctttagatcactgagcttagaagaacataggatgatggaagggaagtgg

SEQ ID NO: 97509 - DNA, 122 bp, Homo sapiens
agccaccagccatccaggccctgcgtgtcctgctccagcaccgtcatgatgtcgcccttgcggaaggagagctcatccggggactcggccacattgtcatagagggctttggccagcacatt

SEQ ID NO: 97510 - DNA, 122 bp, Homo sapiens
ggctgcggccgccgcgtagccctcccggtggcgctcggagctccgcctcccgaggggccccgagctcattggcaggccgccccctgcacgcgctaattggccggctcaacgcccgcgctgat

SEQ ID NO: 97511 - DNA, 122 bp, Homo sapiens
cttggggccccgatgtccttaaaaacaaaaaatgcggagggccagtgtttgaggccttggcgacattctagaaagccaagctgcgcccggtcccctgggatcaggaagacatctgaaagggg

SEQ ID NO: 97512 - DNA, 122 bp, Homo sapiens
gggaagaggcctctcccaccctttacttcagtgcagatacaagactgccctgtttcacagcgggatcctgactgcacagtctcccttccatcagccagacttccccacctctctactccatc

SEQ ID NO: 97513 - DNA, 122 bp, Homo sapiens
aaggacggaagttccacgtgtttgtgttgagcaactgcaggtggtgggcggagacaccagcgccccgccttctgcatcctgccttccgtattggctgaagggccggcggctctggctgcccg

SEQ ID NO: 97514 - DNA, 122 bp, Homo sapiens
aagtccttgatttttgttctaatatgaaaacctaaggtcatcaagatacctttccttgaccgctcctcccctgacttcatgaaagaatatggtcttttcgtcattctcagagaccagatgtt

SEQ ID NO: 97515 - DNA, 122 bp, Homo sapiens
ggctcaggacacagccctgaccaagtcatgggccccttgccacgtctacatgcccctcagcgctgggcaaatgctttctttccggagtcactgtggtacctgagcatgggctgctgcgctag

SEQ ID NO: 97516 - DNA, 122 bp, Homo sapiens
aacttgagacagcgtctcactctgtcaccgaggctggagtgcggtggtgttatcagagctcgctgcagccttgacctgctgggctcaagcgcgcctcccacctcagcctcctgaggagctgt

SEQ ID NO: 97517 - DNA, 122 bp, Homo sapiens
aggcaagcattaataaatactggttgaattaacgaataattgggtgagtgaatgaacgaacgcacgcatgcaaacccgaaagtccctggaggaaatggtcaccttcggaggtttagtctggc

SEQ ID NO: 97518 - DNA, 122 bp, Homo sapiens
aacacagcaccagaagctcaggagtctggtcccccttcagggctgaggcagaaactgagccgcatggagccagtggagctggacacccctggacacctttgccctgactcgcctgagtccag

SEQ ID NO: 97519 - DNA, 122 bp, Homo sapiens
cccagaaccgggtttcccaacctgtagaggccgcatccgcgtctcctgggcgggcagtgccggtaatccccaacaagccccagcctgcttggaattaacgggtctgactgtgccgagaaacg

SEQ ID NO: 97520 - DNA, 122 bp, Homo sapiens
gtggttgctcccgcaagtttccttctctggagcttcccgcaggtgggcagctagctgcagcgactaccgcatcatcacagcctgttgaactcttctgagcaagagaaggggaggcggggtaa

SEQ ID NO: 97521 - DNA, 122 bp, Homo sapiens
ccggggtcccttaccgtgagccaggagcgccagcagcgagggcaggagcagcagggctaccgggcgcatggtgctggttgcggccgcgccctgggctgggaccgcggcgggagggcgggggg

SEQ ID NO: 97522 - DNA, 122 bp, Homo sapiens
gccaaactcccgcagctgtaaatcaccctgtcctcctgggtataaagcgcctgtccatctcggcgtgggagagaggagacgctcgccgtcccctgacccccagctcagcgccggctccaagc

SEQ ID NO: 97523 - DNA, 122 bp, Homo sapiens
agccttggtgaccaactccctcactcatttaccagccggagacactgaggcctgggagtgcggttgacttgtcataggtcatgccgctggtttagcctcagagaggtgcccttgtcaccacc

SEQ ID NO: 97524 - DNA, 122 bp, Homo sapiens
tagagcaggaattggttttccagcattgtgtccgtaaacctgagttagaataagatgtaacggaagccacgataaagactcggtcaaatcctgcagcctggggcttactgtgtgcagactgc

SEQ ID NO: 97525 - DNA, 122 bp, Homo sapiens
gcgggatcggctctcggggaaggaccgaggcatcggtgccccagaggctgagcgaggacccgcgtgccgggtcaggcccagtgcaagccactcaccgcaggttgaaggtggagcccaggaat

SEQ ID NO: 97526 - DNA, 122 bp, Homo sapiens
ggttaatgtttgtctggttcctcttgggctgtgggccatttctggctctggccctgggttcgttgtccctcccctgggctgggctgacagtacctggtggcatagggcagacacgcctgcag

SEQ ID NO: 97527 - DNA, 122 bp, Homo sapiens
gcccagcacgggagtgggaatgggagtgcatgtgcacagcacagcctgaggccacagccccgagttccggaaggtgtgggcacggcccccacgcaggagctgggcgggcctcgccactcagt

SEQ ID NO: 97528 - DNA, 122 bp, Homo sapiens
acacagccagggatattagtgtgagctatccttaagttaatgctcctggactgagggcgccgctgccacagcgcctgctgccggcgggtcgcgggaagcgtaggccctggccgccgcgctcc

SEQ ID NO: 97529 - DNA, 122 bp, Homo sapiens
tgtctgatgctggacagcatgctttcctccatgaggaaataactagaaaagaagaggaagcggaaagaaaatgtgcaaaggccctggggcagagaaatgctgagaggaaccactgtggccag

SEQ ID NO: 97530 - DNA, 122 bp, Homo sapiens
ctgggcaagagatacagctccgtgattaggcattttatctggggctgtgagctagagccccggtagggaataactggaattctgccaattccatccaaggcaggaaaacaaggtgactgttt

SEQ ID NO: 97531 - DNA, 122 bp, Homo sapiens
gcgctaccccatctccaaggcccggcccaactgcggtggcaacctcctgggcgtgaggaccgtctacgtgcatgccaaccagacgggctaccccgacccctcatcccgctacgacgccatct

SEQ ID NO: 97532 - DNA, 122 bp, Homo sapiens
agtccaaaacattttgggggaggggaagaatggtgttgctaaaccattatgactgcaattcgtgcatgttagaacctgtgcaaagcaaggtctgcctgtattacatactatttttctgtaat

SEQ ID NO: 97533 - DNA, 122 bp, Homo sapiens
tccacagggtcccactcagagcctgtgaaaggcagggggctcccctccaagccagggcctcggccccaaagccctgtgaatcccagttctgaggggtggccaaggccaaggggcctggactg

SEQ ID NO: 97534 - DNA, 122 bp, Homo sapiens
aattaattgagccctacttctgagatcctattacactttactcatgctggtagcaggacccgattgcagtcatagctttcaggcagtgtctgcatcacctgaggaaatgtcaactcctttag

SEQ ID NO: 97535 - DNA, 122 bp, Homo sapiens
tttaacaggcagtcaagatggaggaccacaggtggagatccggaagctcaggtgaaggaccgccccccaacaccccccgcccccaaaagacctctcagtaattccggtggatacaggaagtg

SEQ ID NO: 97536 - DNA, 122 bp, Homo sapiens
gcggagggaaggaagggctcctgcaccagcagcacagaaaagcagcaccgatggtccagccggaggggcctcagcgaacacacggtccagctgcggggccgtctccgcagacactggctccc

SEQ ID NO: 97537 - DNA, 122 bp, Homo sapiens
tatcctgttggggtcatgggccatgaatgaggcagcatggggccatttatggtcagccttcgggccactagggttttctcagggtgcgaccggggagggaatgtttctccagtagggtcact

SEQ ID NO: 97538 - DNA, 122 bp, Homo sapiens
gggaacacttgacaaagagagtgacatttgagctggcgcttaaaagaatgagtaggacttcgtcagaccacaaagcaggtagaaagggcacccagggaaggaagaagagcctgtcccaagcc

SEQ ID NO: 97539 - DNA, 122 bp, Homo sapiens
aggccagctcacgccctgacccccactgggatggtcgttggccctgcatggtgctgctttcgggtgcccctgggctgccaagactcctatcctaagcctggcctgacaactccatgatcaag

SEQ ID NO: 97540 - DNA, 122 bp, Homo sapiens
ttagtcatttggctgagccacagcagagcatgtgaatgtcacagaacagagcaggaacgccggggcacgtgtgatgcccatcatcagtggggcaggcgccgtccgggcctctgatactgcgc

SEQ ID NO: 97541 - DNA, 122 bp, Homo sapiens
tccttccacggtagacacccccgtccttccacagtagacgcccccatcctaacaaagcggcggctctccatgcgcctcagagcccgtctctctccgcgccggtgagaacctgctctcacgcg

SEQ ID NO: 97542 - DNA, 122 bp, Homo sapiens
aaagtgcagattcccctatctagtgcggggtgcgggaggcgggaacccggagcccgggtacgcagaatatgggtttttacggagtgttttagaggatgttgtgcatactagattttggagtc

SEQ ID NO: 97543 - DNA, 122 bp, Homo sapiens
tgccagcaggcgtgcacaacacacaggcctgcgctctcaggctctcgctgccagccctgccgggcctggctgtaattgctcccagccccggagtctggcaaaacgctcttgtggggcgtcgg

SEQ ID NO: 97544 - DNA, 122 bp, Homo sapiens
tcccatgccggcgcccccaccttcccggcctgcacaacttaccttgcgctcggcggccctcggtcccgcccccgactgccattggcccagaggttcctttgttagcgagagcgcgccaaccc

SEQ ID NO: 97545 - DNA, 122 bp, Homo sapiens
gcatccgacgcgagtggcttcctgcctctattctacccatctccttactcaggacgccatcgcgggtttcccagggccaaccattcccgccgcgccaccctaagacgcgcccggcgcccaaa

SEQ ID NO: 97546 - DNA, 122 bp, Homo sapiens
gtatgtgcgggcgagaagatggcggcggcgggggaagcagcgtgagcagccggaggatcgcggagtcccaatgaaacgggcagccatggccctccacagcccgcaggtagccgccggtctgc

SEQ ID NO: 97547 - DNA, 122 bp, Homo sapiens
ggagaaagctgctgggggctgggcctgagaggacacggcctggtaggtaatagaaggctccgctcggagcagtcgagggggagatcggcaccgtcagaacagaccccaccggagcctccttc

SEQ ID NO: 97548 - DNA, 122 bp, Homo sapiens
gagattggagcctaggcccaagctgtgtgtggcggctggcgggcagggcagtgaggtcaccgcaggacgtttgtcttgtgcctggggtctggcggcctggggcagtccgtgggttttggagg

SEQ ID NO: 97549 - DNA, 122 bp, Homo sapiens
tgggtctgacctctgcctcggcccggggcgcaggcggcgctgatggaggcgcctgggcctcgaacttaggctgcaagacagagtggggtcctggggtaagcgcccaccttccccccggcccg

SEQ ID NO: 97550 - DNA, 122 bp, Homo sapiens
gatcgctcagaactgtgcccggcgcgtgttctcattccagcctcagtcctgtgaggctgtcgtctccattttacaaaggacaccccaaggctcacagacatgcaggaagtaaatcaaggtga

SEQ ID NO: 97551 - DNA, 122 bp, Homo sapiens
cgcgagcgcggggcggggccgggccgtggccacgagggctgcgtcatgcgggcggggcgccgtggggccacctgcaggcttctggacagcgggttccccctgtagggtatccagaagggctg

SEQ ID NO: 97552 - DNA, 122 bp, Homo sapiens
taatggtcaggagatgacagtattgctggacaagcatcaccacactgaggggaaagttcacgtttctaatcctgagaaataatctgttaagaagcatcacacagaaccagctagaggggagt

SEQ ID NO: 97553 - DNA, 122 bp, Homo sapiens
cagcctgcttcctgcatgaagcctgttttgtttgttacttgttttcttatcctgagattgcgctaaaattgcatgactctgttacaattcttggataacttttcaagaaccactttggaaaa

SEQ ID NO: 97554 - DNA, 122 bp, Homo sapiens
acttcctgtggggccagcgcaggctgcggtccatccagggtggcagagaggaagccagcacgcccaccgggcagggtcgggacaggaatcctctcagacacgaaagccccaggttaagagga

SEQ ID NO: 97555 - DNA, 122 bp, Homo sapiens
tccgggggcttcagaataacacagcaggatgggagatgtgctgcgcagcgatgggtgtgtcgtggtttctgtttgttgtttattcagtgaatgttgtattcactattaaatgtattcactat

SEQ ID NO: 97556 - DNA, 122 bp, Homo sapiens
ggtgctgagcccagcgaggcgcggactggggagcgaggaagaggagcacccgccagatcgcgccccctttcgggcagaatccgctcccggtccggtcccgattggcagaaaacgatacgagg

SEQ ID NO: 97557 - DNA, 122 bp, Homo sapiens
cctcctccagcacctcccacgtctcgtcctccgggcttaacgcagcggcccgctctgagtcgccaccacctgatttcttcatgccgacaacctgctgcaaaccctcgctgccagctttccca

SEQ ID NO: 97558 - DNA, 122 bp, Homo sapiens
cgtctctcgccgcccggccccgccactaggctgccgcctccgccgctgcacagagaagggcgaagacccgcccctgcaggtgattgacgggcactctcctccaatggtcaacgcgctcggcc

SEQ ID NO: 97559 - DNA, 122 bp, Homo sapiens
agcctacagcaactgctgaggtcctaggaggaaaaagctagaatgtctttttcttgccgccgggtgggttatactcactgggttggcttcttgctgctgggcttcaggttagattccagtgg

SEQ ID NO: 97560 - DNA, 122 bp, Homo sapiens
caggacaggcgctcgggggacgcgtgtcctcaccccacggggacggtggaggagagtcagcgagggcccgaggggcaggtactttaacgaatggctctcttggtgtcccctgcgccccgtcg

SEQ ID NO: 97561 - DNA, 122 bp, Homo sapiens
gcgatagtttctacggcttggggttttttcttggttttcactttccattagacttgcatacggaagaaatcttaacgccagctagacaagttaactctcttgcctcgtttttgcatttttat

SEQ ID NO: 97562 - DNA, 122 bp, Homo sapiens
atataaacaactctcttacaactcagtaacataagggcaaggccaggtgcaagtagctcacgcctatcatctcagcattttcggaggctgaggtgggaggactgcttcaggccaggagttca

SEQ ID NO: 97563 - DNA, 122 bp, Homo sapiens
agcgcctccaggtctctacgcgaagacccaggacccggcccccaacacccctgacattctcgagattgagttaaaaaaggggtccccgtgaaggtgactgacatcaaggatggctccaccta

SEQ ID NO: 97564 - DNA, 122 bp, Homo sapiens
taatggaaattttattctaaatgcttattttagactcagaaagatccactctcttatgcccgtgtggttgatatgtctgctctgacctgtggtttttgcacagttgaagggtcatactgtcc

SEQ ID NO: 97565 - DNA, 122 bp, Homo sapiens
gcgcgggcgagaggggcagcggcggggttgccaatgcctcgggggcttcctgggggccgccgcgcggccagtactcggcgggcgcggtggcagggctggctgccgtggtgggcttcctcatc

SEQ ID NO: 97566 - DNA, 122 bp, Homo sapiens
ataaagcaatttttatgtgggccactgaatttcccttccctaaatgagcatcagccggctcggagaggcagctctgagtcacctgcaagcaattagctgaaaggcggtggcatgtgtgggtg

SEQ ID NO: 97567 - DNA, 122 bp, Homo sapiens
tttttcatttttaccactacaaaagtgagaagaacatgatcagtgcttctcgaacattaacgtacagaggaatcgcctggagatttttattaaaatgaatattcttaccttgtatgtctctg

SEQ ID NO: 97568 - DNA, 122 bp, Homo sapiens
gcattaagatgttgctgaggattgcgaactcctgcagcatatttatactgtggaacggtgcggacagcaggagtagctgcagcggctgcagctgcaggacgtggacccattgtctgtgttga

SEQ ID NO: 97569 - DNA, 122 bp, Homo sapiens
aatattatgttgtatattgttgcatcacataacagttgtaccaccttccccttatgtctgcgtggtagtcatgggccgcggaacgccgttgcagtcaacgatggaacgtctgtgccacggtg

SEQ ID NO: 97570 - DNA, 122 bp, Homo sapiens
gaatacataacctgggggccggagagccagctgggacccagaggcccgggttcctcagaacggtttctctccaaaacgtgggcatcccacctggctgacggtaacggaggagggtctaagat

SEQ ID NO: 97571 - DNA, 122 bp, Homo sapiens
agcagcgatacgaacaaacggctttcttctgcttttccagattgggatcaccctgcagcccgtggcactccacaggaacgtgtatgcgtccgtggtggaggacatgatcctgaaggtgggtg

SEQ ID NO: 97572 - DNA, 122 bp, Homo sapiens
cctgcggtgactgtgccctttccttgcagacccccgcgcacaccagaacctctggcaagccgcccgactgcaactgctgaccctgcagagctggctgctggacgcaccgtgctcgctgcccg

SEQ ID NO: 97573 - DNA, 122 bp, Homo sapiens
caaacgggcatctttctgtccagagctcatcaataggaactgggcaaccaggtggggagccgccaggggagcttggagagggcagagtaggagcctccatgaaccaagtcaggctggaaggg

SEQ ID NO: 97574 - DNA, 122 bp, Homo sapiens
tgtgggttggttgcttggcagcaggggtgggaatagttgggaatggacaagaaaacaagccggcagcgtagaaccacctcagagttcaaaattggtaatctacttcctgtgttcttagcaaa

SEQ ID NO: 97575 - DNA, 122 bp, Homo sapiens
ttaagtgaaataagtcaggcacagaaatttaaattttttaatttcaatatcacccagatacggacatttttaaaaacttgatctcatggaaatagagtagaatagaggctgggaagaatagg

SEQ ID NO: 97576 - DNA, 122 bp, Homo sapiens
aggcgttactgctgctcccggctgcctagggcggcgcgggtaggccccgttgttctcgtgcgttaatagggaaagctgccttgattatcttgtaattctctaccaaaccaagaataaaaaag

SEQ ID NO: 97577 - DNA, 122 bp, Homo sapiens
gtccctgcacacacgaggagccgcgcgtcccctcccgggataaacgctggtccctgcacacgtgaggagctgtgcgtcccttcccagaataaaggaaggtccctgcacacatgagggttggt

SEQ ID NO: 97578 - DNA, 122 bp, Homo sapiens
gcgctggggccgaggaggtggctctgcctttcttgattccccagtctctggaagacaagccgccctcgccgcctcctggctacccgtgggctcgccctcgggctcgcccgctggtgcttttg

SEQ ID NO: 97579 - DNA, 122 bp, Homo sapiens
cgaaagctgcggcgacctcccagagcctctcaggcacgcggcatctctccccaccggcagcgccttgaaataccaaaggcctagccaaagatggaaccgttttgttgggagctcgggtttcc

SEQ ID NO: 97580 - DNA, 122 bp, Homo sapiens
cgtcgcgcaggcgctgccacaggcggcccaggtccgccaggctgcggtgcaggtagagcacgctgcggtccgaccactccgtgcggatctcgaagaactcctcttcgtcgccgcgccggctg

SEQ ID NO: 97581 - DNA, 122 bp, Homo sapiens
gtaccacctggaacaccttatccaggcaaggagatcattaagcctggtgtttgaggcaatcgattcacttggaagaaggtgctttggtggttttgagaggaacaatccctacatgaaatccc

SEQ ID NO: 97582 - DNA, 122 bp, Homo sapiens
cactaccttccatggtcccggtagtcacctgggcgtggacgcaaagcagtggccagcagccggtggaaggctcctctgcagacctgccaggcccctcctcagcctgggcttcccgctcctgc

SEQ ID NO: 97583 - DNA, 122 bp, Homo sapiens
caatgcctagcagcgcgtacaggtccatctgtaagagctccttggtcactgccatggttccggcctgacggattcgtactacaactcccaagagtctaagcgcgcgtgaggactgcaggctc

SEQ ID NO: 97584 - DNA, 122 bp, Homo sapiens
ggaggagcgtttccagggggcccggcgccttcctcgatggcattggcctggggaccctggcgcccaattttgaaaagaaccaatagtttgaaaatgctggagcatcagctttcaggaggagt

SEQ ID NO: 97585 - DNA, 122 bp, Homo sapiens
gccaggagctggaggaagtcacgtgggcgctgggtgggtgcccagctggaagggcagctccggccttttggggggaccctgggcagtgtgtaccctagaggtccctgggccgtgacgggcag

SEQ ID NO: 97586 - DNA, 122 bp, Homo sapiens
cccaggttggagtattgacaggcactgtcatggccaactacagcctgaactgacctcaagcgattcttctgcctaagcctactggctagctagtactacagataccctgcctcactgtcgct

SEQ ID NO: 97587 - DNA, 122 bp, Homo sapiens
ggcagagttgggggctggggggttctgccggagcacctgggcctcatctccacgaagaaacgtgaggcaacccgtgcagaagcggagcagcgggaaaccctgacctcgagagagcagtcggc

SEQ ID NO: 97588 - DNA, 122 bp, Homo sapiens
tcaggccggcggggcgggccctggcctcggcctcggtgcgtgggtgcagagggcctaggccgcagctgcttctccctctgccgaattgagctgggcggtggtaaccatagtggaccgcactt

SEQ ID NO: 97589 - DNA, 122 bp, Homo sapiens
acccatgtggctggtgtgggcttttgctctgaggtctgctggacaggtttaggaggcggtcggttgcatgtttaggctggcgctgccaggcacgttctccacccacgtctatctccagagca

SEQ ID NO: 97590 - DNA, 122 bp, Homo sapiens
gctggttgcaccgatctgggggcttcccgggctcgggtaaccggagtgctggtatctaatcgtcgctcaaaagctcctaggtgcgcgggtggatataattcccggcttctcgagaagacact

SEQ ID NO: 97591 - DNA, 122 bp, Homo sapiens
gcaggggcggggagaagccatgcctccagctgcagaggttgcacacagctggcatgatcgcggtcacctgcgcggcgccggtgcccttgcgctcgcgttgcccggcccgcggccgcggactt

SEQ ID NO: 97592 - DNA, 122 bp, Homo sapiens
caaactaaaattaccaatgcctaaaacagtcatttgatttagcaaaattcttaatgttttcgttattataattgatgtcaaataaaatcattaactggaatagatttttaaacaactagaaa

SEQ ID NO: 97593 - DNA, 122 bp, Homo sapiens
aggagagtggaagaaacaaattaaacatacaagatactttcagaagaccccctcatttcacggtgatccaacagatttagtttgttaactgagacacttccaaatcgtcaaacaaatgtaat

SEQ ID NO: 97594 - DNA, 122 bp, Homo sapiens
ggaaagaaaattctgttaagtggacatacacatcagtattcaggagacacccagggaatgcgaaaggaagcaaaacttcacaaatctttcaaaatgagaaagtgaacatcgtgttaagcagc

SEQ ID NO: 97595 - DNA, 122 bp, Homo sapiens
agctcgttcccgggcccacggacgtggacaggagccaggagcccaggtcccaggagaccccggagctccctgtcggcctggcccatccttctgctgtgctgcaagagcccccagccaggctt

SEQ ID NO: 97596 - DNA, 122 bp, Homo sapiens
ggtggccttgtaaatgatcttttctgccctgcagagggtaagggagtctgtccatgctcccgggacagtaatgactgctccttagtccctgcagttgtgaacccaataagaaactcccaaat

SEQ ID NO: 97597 - DNA, 122 bp, Homo sapiens
ctgggcaggaacgtgagggccaggtggctgggccctggggtcagagcacagggctcccgccggtcccctcccaggatggtggtggcagcggccgcatcgcaggacagatctgtggagataga

SEQ ID NO: 97598 - DNA, 122 bp, Homo sapiens
gtggaagtcagagtgcattatgtttctcaccagccgcgctgcgtactgaggtctggcgggcggggagttgcagccacagcgtgtccgcaggttcgagcccagggctaaagtaccagcgtgga

SEQ ID NO: 97599 - DNA, 122 bp, Homo sapiens
ccaacactgcgagtggaacagccggggcgagcccgtaagccggaaggcggcttccgggagcgcgtgcgaacgtggaggccacgccggcgatggggggttggaacggccggaccaggcaaaag

SEQ ID NO: 97600 - DNA, 122 bp, Homo sapiens
tgggccccgccctgccgcaggactctcaagctctgggactgggtggagggaggtaaggggcggggggggaaaatccgtgcagtcgcacatgcgcaaaggctcttcactgtcccaagaccctg

SEQ ID NO: 97601 - DNA, 122 bp, Homo sapiens
cgtgccagggcctctgtcccctgcaaaagctcacattccaaacaagtcaggtgtaggctccgctcctagagagggacggtgtgaacagagctaactgggtcggcctctctccttccgacctc

SEQ ID NO: 97602 - DNA, 122 bp, Homo sapiens
ggacggcggaatgggagccaagagaaacacgcgacaccgctgcgggccatacaagggcagcgtggacccgagagcgccctgctaccaggcggatccggagaaacgctccgaggtgcccgggc

SEQ ID NO: 97603 - DNA, 122 bp, Homo sapiens
tgcaatctcagtaaacatctggccgcagggcctggcaggaagctgacctcgtgggcaccacgcggctggcagctgtggccggtctataaatacattctaaacgcggaccagcccgtgtgcat

SEQ ID NO: 97604 - DNA, 122 bp, Homo sapiens
cgcaaaaatgctgaacaatccaagagggcataaaaaataaaagtacccccttcccacccacgtgcctttagctgagcctgttcccagttgtttgttcactgttatttagcacagggaatctc

SEQ ID NO: 97605 - DNA, 122 bp, Homo sapiens
gagaaaccatataaatgtacagaatgtggcaaagccttcagtcagagcatatgccttactcgtcatcagagaagtcattctggagataaaccttttaagtgtaatgaatgtgggaaagcctt

SEQ ID NO: 97606 - DNA, 122 bp, Homo sapiens
cttctttaagcagtaggtggttttacagagcccacagagaaggaaaactaaatatcatcccggatgcagtccactacgatcgtggaggagtcagattactctccgggctttgctgtgtctgc

SEQ ID NO: 97607 - DNA, 122 bp, Homo sapiens
cttacagggaaacaggactgccgaggccaccttctccatagccaggttcctgatgctgggcgtcagggcgcccctgcacgtcgggcagcagctcaacttctggcggcattggttacacacca

SEQ ID NO: 97608 - DNA, 122 bp, Homo sapiens
cgcccccgtgatgcaattatctcccactggccccctcccacaacatgaaggaattaagagcgctacaattcaagatgagatttgggtggggacacagccaaaccatatcagggagttagggc

SEQ ID NO: 97609 - DNA, 122 bp, Homo sapiens
ttccagactagcagttcccagggatgggtgtgtgctaatcgcaggccaacaagcccagcgcggtacagaggtcccattgtgaccggaggcgagaaaccccgcctcggcaccctgacgcagcg

SEQ ID NO: 97610 - DNA, 122 bp, Homo sapiens
caccctggagctcgggatccctttgcaagggttggggagagataatgaaacccgcatttgcgcgctccccaacccgggccatctgattagtcatctgagttagcccttcacgtgcacacgtg

SEQ ID NO: 97611 - DNA, 122 bp, Homo sapiens
cccctctcacctggggtcacaacccccctccctcggaggagggaggtcaccggccacaggcgggggcctcagtttcccacgctacagggctcacacgtgtctggcctgcgacgcgctctccc

SEQ ID NO: 97612 - DNA, 122 bp, Homo sapiens
tgctccactttgtaaattatcccacctgttactttcttctcctcttgtctttgggccctacgggtgagttactctccacaggcataatttacttcaaaacttagtactccaagtcccttccc

SEQ ID NO: 97613 - DNA, 122 bp, Homo sapiens
agcagagctgggtcacttgactccacccaatatccctaaatgcaaacatcccctacagaccgaggctggcaccttagagctggagtccatgcccgctctgaccaggagaagccaacctggtc

SEQ ID NO: 97614 - DNA, 122 bp, Homo sapiens
ggcccaactggccagacgggatccctgcccttggcctcccccaccctggccaggcccccacgggcctctttggagcccagccctttgtgtaccccgcccgctcccagacaggccctccattc

SEQ ID NO: 97615 - DNA, 122 bp, Homo sapiens
cgtaagaaaacttcaagtcccatcgtaggttaaagagggacaggctcttagtaccgccgccgcccagtaaaactacatggaacaaacccagggatcctcatctgcacagctctgcccaaagt

SEQ ID NO: 97616 - DNA, 122 bp, Homo sapiens
ccagattccctagtctcagtggagctttaaccctcccaggcacaggaccgctggagaggtcgccacgggccggtttcccagccggccgcgagggggcgacagagtgcaatggacccaggtga

SEQ ID NO: 97617 - DNA, 122 bp, Homo sapiens
ccactgtaatagagaagatagaggagaacagcgtagacgctgagcaagaatgtacacaaacgtccactgtgatacagaggatggagaacagcgcagacgctgagcaagaatgtaaacagacg

SEQ ID NO: 97618 - DNA, 122 bp, Homo sapiens
tccccaggccacatggacgcgggcgaaggccactggggcggcaagaaggaggaggccccacgaagctcccacgcctgccctgagtgagacagaagtcggcatgggctgagcagagggtcata

SEQ ID NO: 97619 - DNA, 122 bp, Homo sapiens
atgcaaactcatctgtgacttgacccaaggggcagccccgtgaacattcccttaagagggcgaatgcatctcactctcaaccatgtccggccacgccctcccgcagggaggccgctaaagtt

SEQ ID NO: 97620 - DNA, 122 bp, Homo sapiens
tagaaccagaggtggggagtctgggcagtcggcgacccgcgaagacttgaggtgccgcagcggcatccggagtagcgccgggctccctccggggtgcagccgccgtcgggggaagggcgcca

SEQ ID NO: 97621 - DNA, 122 bp, Homo sapiens
caagctgcgttatctggtgtttttccgtgggttcaacaagctgcgcatctggcgtttttccgtgggttcgacatcagtggtccctgctgtggatcacagctgacgcacgagcagttctcccc

SEQ ID NO: 97622 - DNA, 122 bp, Homo sapiens
tggcagcagtgagcgcggacttcgctcctggatgcgctgccctggcctccacctcggtcccggtccctactgattctttgtaatggttgtgtaatattacatggtgtggacttaataaagga

SEQ ID NO: 97623 - DNA, 122 bp, Homo sapiens
ctgggcatgcgccacttgtgcggcagtcgggtgggaagccgtgtctcgcagtcgtggactcgtgcagctggggcgtccgcagccgctcgtcacccgcgtgatgctgtttctggcgttgggca

SEQ ID NO: 97624 - DNA, 122 bp, Homo sapiens
ttaattgttaattatcatcagcattttaaagtatttcttcaatgactcagtagcagccagcgaaggttgtctgattgattccactgcccttatgattactatttcctcagaatctttcaaat

SEQ ID NO: 97625 - DNA, 122 bp, Homo sapiens
ggggccggggctgtgagctgaaggctccatcacctccagatgctgcagcagcaggaatgccggttcctgtaccctcggaaggaggggcagagtgtggagaacaagcccaagaatcactacaa

SEQ ID NO: 97626 - DNA, 122 bp, Homo sapiens
gtgactcaggtggcaagtgcagtggggagcccccagctttcccttcttggatgcttcattcgcttggggccaccaaatatcgactgaggactttctgcccatgccaggctctgctctcggtg

SEQ ID NO: 97627 - DNA, 122 bp, Homo sapiens
attttacggactgtactactgatccacctgtcggggagaaagactctacccgcagtttgacgaaaatggtcgtttccagatgcttgtaggatttcctcgctaagctccaccctctgcggcgc

SEQ ID NO: 97628 - DNA, 122 bp, Homo sapiens
gtgatctcggctcgctacaacctccacctcccagccgcctgccttggcctcccaaagtgccgagattgcagcctctgcccagcaaccaccccctctaggaagtgaggagcgtctctgcctgg

SEQ ID NO: 97629 - DNA, 122 bp, Homo sapiens
agcctcggatccaggcggggtcagtgttgcgcactggggatagtgcctctgctcggccttcggagggagggtttcaggtaggctgctgctaagggtcgggagcgtactgtgtgagggtgggt

SEQ ID NO: 97630 - DNA, 122 bp, Homo sapiens
ctccgtcctcccgtaggctccgctgtagctagcaatgtgacaccaggacgcactcgctctcgcgcgctctcccaggctcgttctccctcgccctctctctctcacacacgcacgcacacacc

SEQ ID NO: 97631 - DNA, 122 bp, Homo sapiens
tccataagaactcagcccgcatcattcgcactgctgtctttggctttgagacctcggaagcgaagggccccgatggcatggccctgcccaggccccgggaccaggctgtcttcccccaaaac

SEQ ID NO: 97632 - DNA, 122 bp, Homo sapiens
ctggatcttgtgactgggctcctgggtagagttcaaggttggagtgaagcggcttccttgcggttgtgtgggtgtcccaacctgggtcgagataccccgcggttcaaaggctcccccgcagt

SEQ ID NO: 97633 - DNA, 122 bp, Homo sapiens
ctccgcgggcgcgcggggccacgggactccgcgccgccacggctaacgcccacgcctccccgcaggtcaccatctgggaggcgctaaccaacagcaagccaggcacccaccccatgtcctac

SEQ ID NO: 97634 - DNA, 122 bp, Homo sapiens
ctcaaccgcgccggaaccggggggacccacgtgactcacctctgaccttctgatgccgtccgcgccattttggagactggcatgtagagaaagactctatagcgaatcttttgaaaagggaa

SEQ ID NO: 97635 - DNA, 122 bp, Homo sapiens
ccactatgagtccatctccaacctgacccatcagcactccctacttcccaagcccctaatcgccgaattatctttaaaaactctgaatactgcttggggagactccattgcaagtcccctgt

SEQ ID NO: 97636 - DNA, 122 bp, Homo sapiens
cgcagcgcccgcgccgccgctgagctcttctagcctttcatttttaaaaaagtttccccccgtgtgtgtgcgtgcgtgcgcgcgcgcgcgccgttctggcacaagccagccttgaccgttgc

SEQ ID NO: 97637 - DNA, 122 bp, Homo sapiens
ctggagaggcagggtgggatagggaacgtctcgagtggcgcccgcagtcatggtggtgttcgttggccgccgcctcccggcgctcctagggctgtttaagaagaagggtgagtgggtgtggc

SEQ ID NO: 97638 - DNA, 122 bp, Homo sapiens
cacaggcatctctgattttatgcacccaaggctaagcgctggctcttccgccctctctgccgcaggcacatcctctccaccccaggctgctctctacctccacagccaccacgggggactcc

SEQ ID NO: 97639 - DNA, 122 bp, Homo sapiens
gcctgggcgcggcctgcagtctggatgccccggactgcctggctcgcggctcgccgctctcggcctctgctagtccgcacccctcccaaagcccacagcccgcggcccgccccaccctacca

SEQ ID NO: 97640 - DNA, 122 bp, Homo sapiens
ggtggcggggaggaggccggcaggaacagccgtgcagggcgggggcggcgcgggtctggtcgggtgaccccgggcgcggccagggctgtaggaggcgagggcgtcgccccgaggccgtggtc

SEQ ID NO: 97641 - DNA, 122 bp, Homo sapiens
ccttaggcagtttgtcaggcactgctgaaggcagcctggaaggaagccggaccctgaggccggggagagagggccttgtgtttggagcccgatgcactgattggccgcggccggggaaaaac

SEQ ID NO: 97642 - DNA, 122 bp, Homo sapiens
catgttaacaagtgactcctaaatttagtgacttaaaataacaactgttttggccaggcgcggtggctcaggcctgtaatcccagcactttatgaggccaaggcgggcggattacctgaagt

SEQ ID NO: 97643 - DNA, 122 bp, Homo sapiens
cccatgtaaacattggcataaatagctgattttatccttgggatggcatagtctatcccacgactgccaaaagaacctggaccctgccatggtaaataaacccctcatcttgcccaagaaga

SEQ ID NO: 97644 - DNA, 122 bp, Homo sapiens
agagagacagagactttcccagaccccttccacaaaaaaaaaaagaaaaaaaaaatggtgcggaagttcagcccaactagatctaccttatatgaaatgctaaagggagttcttgaacgtga

SEQ ID NO: 97645 - DNA, 122 bp, Homo sapiens
tgttaaatatactgttagcctctaaaacagctgtctcctgaagaatgagagtggagcatccgtgtgtaccgtgtacagccagttagttactccaggctcagcactggattttcattgctgct

SEQ ID NO: 97646 - DNA, 122 bp, Homo sapiens
catcgctaggcgccccaccctcacagcgctcaaacctgacgccggatttcccattcttagcgcaaggaagaccccttgtggccattgtgggaagagtcagcaagggaaaaaaaaaaaagcgg

SEQ ID NO: 97647 - DNA, 122 bp, Homo sapiens
tttgtcacgcagattcagcacatccacaagctgggccggcgctggggccccaacgtgcagcggctggcctgcatcaagaagcacctcaaatctcagggcatcaccatggacgagctcccgct

SEQ ID NO: 97648 - DNA, 122 bp, Homo sapiens
caataagtggcagccaccaggcaggcccagctggagccaaaccaaggcctggattctcctcgtggatgtctggtaaggccccaccacgtaccccagtcacgtagtctctaaaactgaacaga

SEQ ID NO: 97649 - DNA, 122 bp, Homo sapiens
ctctgagcactgtttgcatgaacattttggggctcagaacacaattccaaagcatggcgccggggccagcagagagctttgaactaacggaaattggaaggcctcagaagcaaagtttttct

SEQ ID NO: 97650 - DNA, 122 bp, Homo sapiens
tcctatgggagttcccttcttgcaactgagcacgtcaaatgagtgggtagcgtcttatgccgttcactcagcacatgctggggtgagtcatgggaaattactagtgtggttcaacttaagga

SEQ ID NO: 97651 - DNA, 122 bp, Homo sapiens
ctgcatgtgtggcttctcatcagtgatgccttttaaaaaatgctggagcccggccgggcacggtggctcaggcctataatcccagaactttgggaggccgaggagggaggatcacgaggtca

SEQ ID NO: 97652 - DNA, 122 bp, Homo sapiens
gggatctcttcagtgaggtaaaccaataagatgtccaggaaggaacgaacaatcttttctcggatgtgcttcaattccccagaagctgaacatggtaggaagaaatcagtttgttcagatca

SEQ ID NO: 97653 - DNA, 122 bp, Homo sapiens
acttctttcagtacatttttgtacctattttttatagcttgttttcttaaaatgtccactcgttgcctttggttatgtttctttaattacctacaatctataacaatcaacccatctttttt

SEQ ID NO: 97654 - DNA, 122 bp, Homo sapiens
ccctgttcttcttcccggtgtgcacacatcccctattcgtgagatataggatagaagcttcgggtggctgtgtttggaagggttctggctgccgtgagccaatgcctgggctttgcctgtga

SEQ ID NO: 97655 - DNA, 122 bp, Homo sapiens
cttcttatctgtcaagccctatccactgagaacctttttatcagcctaaatttaaaaatacgtcaaatgcttaaaatccacattagagggggcagaaaagagcctctaaagtgggccatgcc

SEQ ID NO: 97656 - DNA, 122 bp, Homo sapiens
catttctcttaaggtaaacaagttgaaattagtcagagtagttagaacagacctcgaccccggtgggtgagtaattgtgcacctttctgaatgaggctggtgttttctttgacaatcattgc

SEQ ID NO: 97657 - DNA, 122 bp, Homo sapiens
ctgcttaggttcgaactctgggccactcttcctactccctctggtttccagcaggagaagcgcttcggaggagggggctaggggcgctcaacctcccgggttagaggaaatgcaagttgggc

SEQ ID NO: 97658 - DNA, 122 bp, Homo sapiens
tgggacagacgcggagataacgcactgacagcattagcattgtgtgtgccacttaaaaggcgctcaaggaataagggatgttagtacattttcccccacatttcctggcccgcactcattgc

SEQ ID NO: 97659 - DNA, 122 bp, Homo sapiens
cccatttcctcttctctgcttgctgttttctgatatatagttttaggcactgtctttgtgcgtacaccaggcatttgtaccatgtttttatatgactacctttatgctaaaagataacacag

SEQ ID NO: 97660 - DNA, 122 bp, Homo sapiens
aaacaagcaagtggcaaagctccctgtttcatgacagagtaactatattcttagctaaaacgtgtattccctaagaactctttaattctaagatctccaagtggactcaagctcagtttggg

SEQ ID NO: 97661 - DNA, 122 bp, Homo sapiens
ctattatcctaatatcatatgctatagtttggttactaccgatttgcctggcatccctctcgaatcatatttgtggccacccagattaactatgttagctgatctcttgatttaatatcagc

SEQ ID NO: 97662 - DNA, 122 bp, Homo sapiens
aaacattcatcccagcaaaagcctccagggctggagggtgaggggaaaagtttcaaagcacgtggatagtccagatctgggatgccctgtcctcatccggctcccatagcaccacgtggtcc

SEQ ID NO: 97663 - DNA, 122 bp, Homo sapiens
caatgaaaatacaccacgcttgtggcaaattcaccgtccatcgctgggtccgtttgctctcggatccacttcctcatagctgttgggtgcctattgtcctagaatcatgtagaatctagatt

SEQ ID NO: 97664 - DNA, 122 bp, Homo sapiens
tctgcaccccagggcctgttcttccctcctcgtagggagggcacctctctcaggacacggcgcactacatggggtgagactgtttttagttaattctgtgtctattcattaagaaatctggt

SEQ ID NO: 97665 - DNA, 122 bp, Homo sapiens
gacacccctgatccgcacactgttcaaggatcaactgtactttattgacctatttgcccacgtatcttccccaactgtgaactcaaagagtactgacacagtatttttttctcctgtaacct

SEQ ID NO: 97666 - DNA, 122 bp, Homo sapiens
ggtattaacaaaaaactgctgctaacagattattacaaaagtaaactagaaaagatattccgtgacatatttaaagtttattatggtaatgtaataaaagctgtcatacttagtgacctagt

SEQ ID NO: 97667 - DNA, 122 bp, Homo sapiens
gaaggagcccgggaggaggggctgtgggattcgggacccactacggggaggacagccgcacgggagggttccgggcagggggcatggagggctgttggctcctcaggtctcccccttgcaga

SEQ ID NO: 97668 - DNA, 122 bp, Homo sapiens
ccgcacccggcctgtaattcttatagaaacagggtttcatcatgttgtccaggccgatctcgaactccttgtctcaagtgatctgcccacctctgccttccaaagtgttgggattataggcg

SEQ ID NO: 97669 - DNA, 122 bp, Homo sapiens
tcaaaaaatgttaatccttgttcaagttactgaactaattcattctctctcgcgctcgagcgctctttctctctctctcttccgctccccccacccccattcccctgaaatcaatgtctgaa

SEQ ID NO: 97670 - DNA, 122 bp, Homo sapiens
tgtgtgttagtttcctcgggctccgccaagcaccacacacagcgtggctttcacagcagacgtctattgtctggcagcggtggaggctggaagtctgaaatcaaagtgtgggcagggctgtg

SEQ ID NO: 97671 - DNA, 122 bp, Homo sapiens
ttattatgtaaatggactttccacttggacagtgccatcttgtctgctccttactgtacacgttgctggcaaagagaagagaagacgacccaccattttgatcatgcctagtcacaggtagc

SEQ ID NO: 97672 - DNA, 122 bp, Homo sapiens
tgtaatgaaacacatagctgcaaagacgtctctccatggcaaacccacaggactgagtgacgtcaccttccacagacagctccgccctccacctgccacactctctgggtaccattcccagg

SEQ ID NO: 97673 - DNA, 122 bp, Homo sapiens
cggcacattatcaaccatcgagttccagcgggaggccctggagaatgccaacaccaacaccgaggtgctcaagaacatgggctatgccgccaaggccatgaaggcggcccatgacaacatgt

SEQ ID NO: 97674 - DNA, 122 bp, Homo sapiens
catttgagggcactttctcgaggaaaatcagctgtcctggaaaaaaaaagtcattgtttccgtggacaaaagtgttgtgacagcatgatccaaactggcttggggtagacaggattccagct

SEQ ID NO: 97675 - DNA, 122 bp, Homo sapiens
tcctcgccacccttcaccaggaaagggtgttccctctcgtcatggccacggatgatgatgcgcttgggccttcgcagagacgccatgactgtcaccttcaaaaatcagaatgtcatctcagg

SEQ ID NO: 97676 - DNA, 122 bp, Homo sapiens
tcttttggggcagcccagtcccatgggaagaaaatcgttccctcctgcccctgggaggagcgtagccaagtgtctgtaagcaactgggatcctggagctttggcagggtggagggaagacct

SEQ ID NO: 97677 - DNA, 122 bp, Homo sapiens
gccctccaccacctcctcccacggcaaccctcgcagagtagccaggaccacattcggatccggactctgaaatgacagtcccacaaccaacagcatcgatgtggtcttcttaatgatcagaa

SEQ ID NO: 97678 - DNA, 122 bp, Homo sapiens
gcagggtttgaaacatggcggacgacgtagaccaggtaagtgtattttaaggaggtcgctcgaaggagcttcttgtactaggctgctttttccagactcaggaaaaatggccagtcgtgcct

SEQ ID NO: 97679 - DNA, 122 bp, Homo sapiens
aggcaagaccctaaaatagaaatacctgaataatccccttccccagggactccgatatttcgtaagaaaattaagaagatcaagggtcagcctggatgataccggaggctttcttactaaaa

SEQ ID NO: 97680 - DNA, 122 bp, Homo sapiens
tgcaaggggtttggcttcttcctgcatgctctatgccatcctcaaggttcctttctgcttcgggggtctctctagattctgcttcttttttcctcaatgtcttactttttgggatctggcct

SEQ ID NO: 97681 - DNA, 122 bp, Homo sapiens
caccccaggcagggccagggtgggtcaccatctgcagaagccctcaggggcccccagcagcgcccctcctatccccctgccccagggcgggctgccgccttgtaacccccagaactcttggc

SEQ ID NO: 97682 - DNA, 122 bp, Homo sapiens
gctgcgggctgccgggaactgttctccgctcggggtgctgaaagcggacgcgggagagcgcgcagagaaggcgaggagccgggtcggccaggctctcctgcaggcgcgggtcctgctcgcgg

SEQ ID NO: 97683 - DNA, 122 bp, Homo sapiens
gacttttcctgcctgcggcgcagtccctccccggcttcgttactcgagtgcacacgcggccgggctctcggccctcgattgcttcagcctatcaccctgggatgccgcctgccgctgccgcc

SEQ ID NO: 97684 - DNA, 122 bp, Homo sapiens
ggtggggcggggttgagtcggaaccacaatagccaggcgaagaaactacaactcccagggcgtcccggagcaggccaacgggactacgggaagcagcgggcagcggcccgcgggaggcacct

SEQ ID NO: 97685 - DNA, 122 bp, Homo sapiens
gaacttctccctcggtccccgggagatttcccctctagccgccttttcgttgatgatctgcgtacagacctcagaactttttggttttcatgttagcatcagccgaggcgtttactgtgccc

SEQ ID NO: 97686 - DNA, 122 bp, Homo sapiens
gcatatgcctgggggctccaagatctagcaccagagggtggtgctcttggcctgatgtcacggctcagtgagacaccgctcctcaggacttggaaggacagaagagaattgtgtcacaaggg

SEQ ID NO: 97687 - DNA, 122 bp, Homo sapiens
gactgaccattggctgcctttcaccaaggcggtaagtcattggtctctggtgggaccgggcgctgcccccttcccctgtctcctgggtctctggaggagcccaggaaggaggctccgctggt

SEQ ID NO: 97688 - DNA, 122 bp, Homo sapiens
acacaacattctcttgtctcaggcagtccattatcccttctctctcaagcttctgtagaacgtggggctggccaagagagaagtaactaaggtggacaagttttagcctactaatgaggctt

SEQ ID NO: 97689 - DNA, 122 bp, Homo sapiens
aatgggagtggcgtgtctagaccccaggaggagcctggggcttgctctgcagggtaccagcggctttccttggggcagtgtgtctctttccccacacagtcagggctgtgggtgccgccacc

SEQ ID NO: 97690 - DNA, 122 bp, Homo sapiens
gcctgctcgcattcctgcttgtggcccgcgcaggggcggggtcggaaggtctaggccgggcgcggagcgaggaagcgggtggcgctgggacgcatgctctgggggagatgagtataatgacc

SEQ ID NO: 97691 - DNA, 122 bp, Homo sapiens
tgctgagccaaagcgccctggcagctggctgcgaagctcgtgcacccacgggtgcagccacggggctggttctgacccaggccacgcccgcccactctgcagcctccgtcctcattggtaca

SEQ ID NO: 97692 - DNA, 122 bp, Homo sapiens
aatccagaacagcctcacggcgcaggaccatcagcccacgccagatagctgcattatcggcgtggttgtgggccagcttaaggcggatgaagaccccatcaaggggttccaccagatgttcc

SEQ ID NO: 97693 - DNA, 122 bp, Homo sapiens
ggattgctggggcgtgtggtgaactttcataatgtcttgaggaactgccaagccatcttccgcagcggctgcattacctagttcccaccggcaacgctggggagggtcctggcgtctccact

SEQ ID NO: 97694 - DNA, 122 bp, Homo sapiens
tcaggcagcttcctgtggtttgccaaaaaccagctgggaaggcagccagactcccgccaccgtcctggaaccccctcctctagcagacattcactcagggcatgacctcctgaggtgcccac

SEQ ID NO: 97695 - DNA, 122 bp, Homo sapiens
aactcaattcatatgccaacgcgtgcgtaagcaatatgccagttttatagctcagaacaccgaggctcagggagtcacgtaacttgttcatggtttcaccgaaaacccaattctgccacgtt

SEQ ID NO: 97696 - DNA, 122 bp, Homo sapiens
ttttgaggtctgttattcctattaacacgatgtgtgtgtcctgcacgaggggattatagacgtgtgtgtcctgcagcacccacccctcagtgttagaatccatgagactagtgtgtccttcg

SEQ ID NO: 97697 - DNA, 122 bp, Homo sapiens
cccagcctggggtcctcttcaccacgcacgtcacctgcagggccacgcggccgggattcccgcttccctgcacccgcaatgcccgagaggcggcaacgtcacgccccctctccgtcccgccc

SEQ ID NO: 97698 - DNA, 122 bp, Homo sapiens
ggccaggccgccggcggggatgggcgaggctggccgggggcgcgcggcaagtgacagtagcgtctccccgcccgggccccagcctccccgcccaccccgggcctcgcctccccgcgcactgc

SEQ ID NO: 97699 - DNA, 122 bp, Homo sapiens
tacttcccagcagcttccagcttcggatggcctgtggcattcctgggcatgcaacggcatcgttccagcctctgcctgcctccatttttacacgcccttcctcgctgtgtctctgtatgtcc

SEQ ID NO: 97700 - DNA, 122 bp, Homo sapiens
aaaaaaacgaaaactcacagctggatttcctataaatcctctttttaaaactggctctgccgctctggcacataccagaggaaacgctgccagtctatcacaaaccaaggggggtgctcctt

SEQ ID NO: 97701 - DNA, 122 bp, Homo sapiens
taattagactaacaaatgtctaggaataaccataaagaacgtaaaaatttatctgaggatcggatcaatattttgtataaaaaaacggcttggatatgacatatacttgtacttctatgggt

SEQ ID NO: 97702 - DNA, 122 bp, Homo sapiens
gcagatagatacacaaccccctaaattttaaatatagaacttaatgaattattacaaatccgtggcacaaataatgaatacacaggtcaaaacaaacattgccagcactcctgaagctgccg

SEQ ID NO: 97703 - DNA, 122 bp, Homo sapiens
cggtttctatagctggaaagagggagggaggtggagaggactgcggagaagctccctgttcgacatcccagtccccgggccacctcccaaaaaagggcaggctgggctgcagactcggagtg

SEQ ID NO: 97704 - DNA, 122 bp, Homo sapiens
aatctgtttgtctgtccccagaaatctggagatttaggactggactcagaaaaggagtcccgaatggagcagtgtcatctgattcagatgtgatgtcaaacttcaggaatgtgtgaggacac

SEQ ID NO: 97705 - DNA, 122 bp, Homo sapiens
tcagagacacattcagggctcagccggtagatgtgctgagaatcttcggtagacaactgtcgaagtacggcggacaaactttaaagatttccagaagttaaggaaagagatgcaaaagcaga

SEQ ID NO: 97706 - DNA, 122 bp, Homo sapiens
ataaaacagactcacacaggcataaatttagaaaacatcccatgaacataaacaggtccacgcagggtcccagacaccgaatcgaactaagaaactccctcacagcaagacacacccatctg

SEQ ID NO: 97707 - DNA, 122 bp, Homo sapiens
atttccgcaggtagcgctgcgccaggatggccgtgtccaaggaggtcatgggctgtgcgtcgtggcccagccgtcgcaccggtggtgcgctgccgaactgccgcttgggtacccagctccgg

SEQ ID NO: 97708 - DNA, 122 bp, Homo sapiens
cagggcacggacctgacccccagcacggacctgacccccagcacggacctgaccccagggcgcggacctgacccccagcatggacctcacccccagcacagacctgaccctcagcacggacc

SEQ ID NO: 97709 - DNA, 122 bp, Homo sapiens
ctcgcaacatggctcttgcacttcttggctatgcaaacagaaatcctaggagtgtgccagcggatggcagaacctgtttccagaggtttcagttgggaggtgaaggggaaggcagtggatag

SEQ ID NO: 97710 - DNA, 122 bp, Homo sapiens
atgaggtgttttgggtctggcaataattgattgtcaaagaagttttcaagataataaaagcgtgagataattcagggacattggccaaagtatgtaaagtccatgatctggatgataagggg

SEQ ID NO: 97711 - DNA, 122 bp, Homo sapiens
ccccagacctctgaccggggggcagccagcgtccaggtaccccaacccctgccctgggtccggcgtccccccattagtgagtcttggctctacttatagcatctgacaccagaggggccgaa

SEQ ID NO: 97712 - DNA, 122 bp, Homo sapiens
catggctgccagtggagtggtctgtgcctccgtggctgtgggttgagtggtctgtgcctccgtggcttctggtgcagtggtctgtgcctccatggctgtggtttgagtggtctgtgcctcca

SEQ ID NO: 97713 - DNA, 122 bp, Homo sapiens
gaagaagccgctgtccttctcttgcaccctctccgccacggccaccgccagctcctcccccgaggccgcctgcgcctgcaccatctcctgcagctctcgcactgcctcctcccgggtctcct

SEQ ID NO: 97714 - DNA, 122 bp, Homo sapiens
cccgaagctgttcgtgtagttgttcacatagcgatggtcaccacctaggaagcagagggtcgggtcagcagaggagccaggtgggaaggaggagccagccactggggacttttggggctcag

SEQ ID NO: 97715 - DNA, 122 bp, Homo sapiens
gctggtggcgggtgtacttctgggcgtgaacttcacgctcactgggagcagcccatgcaccggccccctcggtgcgctcaggtctcaggtgcctccgggaaagaggagaaggcagctgtctc

SEQ ID NO: 97716 - DNA, 122 bp, Homo sapiens
ggttttatgaaagaaatgatacaaacataatgttctctaactttcacaatggacaagtctcgccacaataaatttggagatgcaaagtataaaatgtgttgatggcaaataaataattctca

SEQ ID NO: 97717 - DNA, 122 bp, Homo sapiens
gaaaagaggatatgagcaaatgttactattttgaccacctgggcgcgctggtacgctctgcgttgtatcctctttatctgccagattgcggtgagtcagaccgcccattatctccacctgaa

SEQ ID NO: 97718 - DNA, 122 bp, Homo sapiens
aatgctaaaaatcagattgaaaatggggtgaagagatgttgatattttgtatagtgtggtcgggaaaggtctcactgatgaagtgacaaatgagcagaaaataaagaaaggaagcgagcaac

SEQ ID NO: 97719 - DNA, 122 bp, Homo sapiens
ctcggacagtcccctcgcgtctcacgtgacacgcggcccggacgtgccaccctgcccacgcgctcacgcacgcgtgcacacaccagcctcctggtcgctgccccactccgtcccgacgcccc

SEQ ID NO: 97720 - DNA, 122 bp, Homo sapiens
ctgggtcatggaacatgggaagggttggcaattcctgtgtgaggcagcccaaggcaacctcggagccctcctgcagatacccagggggcctgccccgcccctggcccaggctccagaccaca

SEQ ID NO: 97721 - DNA, 122 bp, Homo sapiens
gcgcttttcagaccggcttaaaaaaatggctcaccatgagattacatcccacacctggctcgtagggtcctacgcccacggagtctcgctgattgctagcacagcagtctgagatcaaactg

SEQ ID NO: 97722 - DNA, 122 bp, Homo sapiens
atacagatcacaaatctgacctcctctccccatctctgttgctaccctactcgcctgggccgcatggtcacttgtggtggtctcctaactgctccccttgtgtctaccatggccatcatccc

SEQ ID NO: 97723 - DNA, 122 bp, Homo sapiens
tcactattcggtggtctgctgccagtctgatccactactattcagctgtctgagtcccagcgaaaccattacatctgagaaatatgctcagcaaatctttttgcagggaaagcgcttccata

SEQ ID NO: 97724 - DNA, 122 bp, Homo sapiens
ggccagagcagccatcaggctttaaatcccagccctctgctctgcatccagacagaaatccgaggtttccatcaggtgacaaagaccctctccttaaccaaactgtcaagctcctctgagcc

SEQ ID NO: 97725 - DNA, 122 bp, Homo sapiens
aaggcagctgagtaactacgtttgatttagtggtcgagccaggatgcctaggcaatctggcgccagagtctcggcctgtggttcccaggcgttggtgcccactggaatcccctggggatctt

SEQ ID NO: 97726 - DNA, 122 bp, Homo sapiens
agccccagagagctgactatactggtgatcaaacccaagaccttccgcctgtggaacaggcgtgttggccacctcaataacaaatcttgtgccacgtattgccatttaacatccagtagtat

SEQ ID NO: 97727 - DNA, 122 bp, Homo sapiens
cccgggagccctcagagtggcctccgctgttttctctctgagccactgatcctcagcccccgggcacgaagctggccccgcatggcctgcaattgccacgcctgcctgagccccacccttcc

SEQ ID NO: 97728 - DNA, 122 bp, Homo sapiens
actgtgcccaagttccttctggggccctggtgtccaactcagacaggcattagaggaagccgtgggggctgttgaacgttgaacctgaacactgaactagaggccccaggccggggctaatg

SEQ ID NO: 97729 - DNA, 122 bp, Homo sapiens
ggctgctttccagacctcgcctttccacagatgacctgaggtcttctgcctgggtggggccgtcggaggctctgttgtgtcaactgtgatgtgatgttctccagatccttgtcgggcctggc

SEQ ID NO: 97730 - DNA, 122 bp, Homo sapiens
cagcttgttgtcattgtcctcggtggcgtaggacaggagggtgcccaggcggccggaggccgtgcggacccagctgcagaaggacagggctcgcagggcagtgacgaaaccagggctgagga

SEQ ID NO: 97731 - DNA, 122 bp, Homo sapiens
tgcacaggacagggtccaagctacccaggcatttctatatctacaatgcctgcagcttggcgggggctctatcattactgtgaaatgaccagatacatttataaataagtgaataaatttga

SEQ ID NO: 97732 - DNA, 122 bp, Homo sapiens
agggcggccagtaggtagggcacgtaatgaggggccattgatttccccctgaagtggtctcgggagaatcggatcagagcatcactgaagctgcaatgggcagaggtggctcctggacttgc

SEQ ID NO: 97733 - DNA, 122 bp, Homo sapiens
cggcccggaaaactgagggtcgcccccgctgccccttcctggctgggcgcgcagcgctcccggcttacgaccccggcctcccccgcccgcagccccgcccccgccacggagggcaggggagg

SEQ ID NO: 97734 - DNA, 122 bp, Homo sapiens
ccaggtctgcatctgtgtcctcagaatttctcactagaaacctctttttctgtcttcttacgtgtttgggaatgtatccttttgttctccaagtatttactattattctggtttctggattt

SEQ ID NO: 97735 - DNA, 122 bp, Homo sapiens
attggcctggtctcctgcaggagagccccgagagctctctgagagctggagagacagcctcgcttggctgaaagacagaggcagttattgacatgaggctactcagcattggcagcctgacc

SEQ ID NO: 97736 - DNA, 122 bp, Homo sapiens
ttgggggtcgaaggtccgggcggcgccgggtgcattccttccctaggtctctggcggctacgtatccgatcctgtcctgcgagcagggccctcgggcggccttgaccaaggcgacagtgaac

SEQ ID NO: 97737 - DNA, 122 bp, Homo sapiens
ggtgcgaggccgtagactggtgtggtcagaccaggggactcctgcgttcaccctgggccccggagactagtgatcccgctccccagcagagcaccgccaaaagccccgggtgccggagctgt

SEQ ID NO: 97738 - DNA, 122 bp, Homo sapiens
cctctaatacaagcgctgctgccccagcccccttccaagaccggagctggcttctctaagcgcttccctagagtgaggatgtaataatctgctggaaggcgtgaccgtgccgtggaaggctc

SEQ ID NO: 97739 - DNA, 122 bp, Homo sapiens
ggccacggtcacctcccttgttgcgttagaaatgcattctttgacggacaagggtttccacggcggctgctctggtagatttggaaggtggagttccgctttcccacagggccgggctccac

SEQ ID NO: 97740 - DNA, 122 bp, Homo sapiens
gggcgtaattgtaggaatgtggcttattgtattgaaatgagcctggggttccactaggcacgtctgcctgtcgtcgctgacatgccggtttacacttttcccttaggaggtaaatcgggtgt

SEQ ID NO: 97741 - DNA, 122 bp, Homo sapiens
agtgagactccgtctcaaaaaaaaaaaaggaaataaagtcaagggaagaaagaaaactttcgagaaggaaggcatggttggtattgttacgtttcaaatgtgggttaagccaaatctactgg

SEQ ID NO: 97742 - DNA, 122 bp, Homo sapiens
ttgatgccgtgtccttccggacccagagcagccctgacggcagccacgtcgctggctttccgcacaaaggaggcaaagacgatgtccaccccatgctccaccccgaagcgcaggtctcggac

SEQ ID NO: 97743 - DNA, 122 bp, Homo sapiens
cggacagatagaaaggcgctcagagcgctgcagcccggactgagggcagagccgccagggcgcacttacgttcccaacagcctggggttgttactctgtgccagttgcgggtgcgagagcct

SEQ ID NO: 97744 - DNA, 122 bp, Homo sapiens
aaaaaaaagtcctggaaaagttcactgatggactttgttctccaaatggctggtatgaaacgttggctaggatgaggggactctgaaggttctaggagagatttcttttttggagttgagga

SEQ ID NO: 97745 - DNA, 122 bp, Homo sapiens
aagggagggggaaggggcggcgcggggcgcggccgggcaggttggggggcaggtaggggccgcttccgcggggcgggaatcccgcgccccctccccccgagcctcaccttttatggtaaagc

SEQ ID NO: 97746 - DNA, 122 bp, Homo sapiens
actgaacagatgactccctgttggccaaagggaccccagaaaagactgaagaactgagttcgtggccattgatggaagcgaggtcagaaacgcctcattacatgccctttatgttagagttt

SEQ ID NO: 97747 - DNA, 122 bp, Homo sapiens
ggcccggggccttccaacttgaccaccctggaggctctaggaccggtttcgacggcccctcgaggccccactgactgatccaggctgggccccagcttctgcttcttggccttgacatgcag

SEQ ID NO: 97748 - DNA, 122 bp, Homo sapiens
ccacatctctcccttagctgggtgcccgcgtggctgctacctccgaggcttctgtgtcaccgggtagtggaaatgtcaccgagtgtcagagcttcgagcctcctccagatccatccaaggtg

SEQ ID NO: 97749 - DNA, 122 bp, Homo sapiens
aaagggggtaaatttatgccctgggaaaccaacattcccgcagctgcaatgccagccggtcgaccaagataaagtatcagagcagaattaacagactggtgctcaagtccctgtttacacat

SEQ ID NO: 97750 - DNA, 122 bp, Homo sapiens
gtccagcctttgcctgtcactggaaggccagagagggaaacagattttcatctgaggtcacgcaggaggttctgagcacagctgtctcccgactctcgcaggtgtagcaggccaggcaggtc

SEQ ID NO: 97751 - DNA, 122 bp, Homo sapiens
tgacagcacggctttgcactaagaaatacttgacgagcttgatatactcaggcactatgtcgtcatcacaacagaggtgcattccatgaagggccagctcccagtgccactaaaccacggag

SEQ ID NO: 97752 - DNA, 122 bp, Homo sapiens
ccgcgcccccggccatgcgcggcccccctggccaagccggcgggcccacctcttcccgagcgccatccccaccttcgcctcctgaggcacaggtgggcgcggcagctagagtgatttaggtt

SEQ ID NO: 97753 - DNA, 122 bp, Homo sapiens
gcgaagagagtgaaattctgtctcaaaacaaacaaacaaacacacacacgcccttaagaacgcaatgaggataacatgttggcccttgtatttgagaaggcaacctggcttgactctgagct

SEQ ID NO: 97754 - DNA, 122 bp, Homo sapiens
aggaaagacaaaagacttgagaggaagcaaaacgaaaccagcttagatttgatcccgatacgtgggaaatcaggtggggaaaaggggctacaactccatgatgaccacaagtccagagggct

SEQ ID NO: 97755 - DNA, 122 bp, Homo sapiens
tgtcctgacacctaagttatggtaacagtcaatgcctactgaaggctcacctgggtcagacgccctgctaagcacttgacattgatcatctcatttcatgcttaccacaagcaggagacagg

SEQ ID NO: 97756 - DNA, 122 bp, Homo sapiens
atccacgcatgcagctggtgttgcctttctgcaaacacatctacgtggggtgcctgggctcggcatgtggagaaaaccacaaaaagcaacgcaggcacgtgtgttgtccagacaggaaaagg

SEQ ID NO: 97757 - DNA, 122 bp, Homo sapiens
ccaactacacacgcgagaggctggatttccttcacagacgtccaccaaagccacacatcgcgacacacggaggcagaaagcagcggtctcctaagaagttagacacgaggaatctcgggcag

SEQ ID NO: 97758 - DNA, 122 bp, Homo sapiens
ctcatggagggtcttttctgcaatacctgttctttgcttggaagctactgcccagctctccgttatgaatttgaatcctttctacccctgcattcacctgctcttggtgcagcctctgaacc

SEQ ID NO: 97759 - DNA, 122 bp, Homo sapiens
ggccttgaggcgaggccgccctaggtaggtgtggccgagacagcggggagcggaagtgggcgtggcctggtggcgtgggcgcggggcgggggtgcggggggcgtgtccgcccgggcgcggcc

SEQ ID NO: 97760 - DNA, 122 bp, Homo sapiens
ctcaaaaacaaaaacaaaggagaaacctaaaggacccagcctagtgcctagtgcctggtacggaataaaaatccagagaatggactgggcacggtggcttacgcctataatcccagcatctc

SEQ ID NO: 97761 - DNA, 122 bp, Homo sapiens
aggccgcagccaggcacggcaccctcccgtccccgagccacgtcgctgctcgtgggctcgcggagcactccccaggtctcacctcgggccccacaccagaaggagaaagctaggggccgcgc

SEQ ID NO: 97762 - DNA, 122 bp, Homo sapiens
acaagagcgaatctctgccttagcctcccaaagtgttgggattacaggcgtaagccaccgcgccgggcagaacatgcgttctttcactgttgaataccaagttcctcatatttctactcaat

SEQ ID NO: 97763 - DNA, 122 bp, Homo sapiens
gtgctgcagcccaggagacctgaaagaattaatacggttaccaaaggagctggtaggaatcgctgaaacagaagcaaaagctgatgtgatgaatataaaagtgctttgagagcatcaaaagg

SEQ ID NO: 97764 - DNA, 122 bp, Homo sapiens
tgcccaggctggtcttgaactcctggcctcgagtgatcctcctgtctcagcctcccaaagcggtgggattacagatgtgacccactgcaccaggtctacacaaggtgtttttttttacaggg

SEQ ID NO: 97765 - DNA, 122 bp, Homo sapiens
cccggctaatttttttttttttttgcagatcacagaacttttatttagatggaatcactgcgaattacatagaagctaccagcctaagccaaaacccacgaggttcatgtgaacttacagtt

SEQ ID NO: 97766 - DNA, 122 bp, Homo sapiens
atcaccacacctgtctgcctttccctaacactcatgcctcccgtctctaggggagtcagacgcggagaagggcgcgaggaagctattgtggacggggtctcgagcagcgcgggcgaagcttt

SEQ ID NO: 97767 - DNA, 122 bp, Homo sapiens
ctaatgcaacagcttcctaattcctgccttcactctccaattcaccctataaaaccaggacgtggtgtcagcatggccatttccacccttgtacaaaaattctttctcctgtggtctccagt

SEQ ID NO: 97768 - DNA, 122 bp, Homo sapiens
gtagttcaccaaaaactggaggtagtagaacactttgataaaaggaaagaatatagagttcgattggctgtcatcggactagtcttggaaaccaaaaactaccaaaacaaaggcaactattc

SEQ ID NO: 97769 - DNA, 122 bp, Homo sapiens
ggctagcatgtgtgcccactaaggcgtgtcacactcaggaaaacgaaacctaactaattccgcccttgacccaccccgactctgcccctacctcacctagtgtccatataagcgtgctgcac

SEQ ID NO: 97770 - DNA, 122 bp, Homo sapiens
tcggaaacgtcaaccctccgcccgcaccccgcgcccgcgggcgctctgcccttcctctggcgcagaggcccgacccgggccctcacctgggtctagcttgactatcttcacggcggccagtt

SEQ ID NO: 97771 - DNA, 122 bp, Homo sapiens
aagagagaaagagaccctgtaaagtcgcctgtgcctgggtcaccccttcggagtaggggtcgctgggtaaggtccaagtgccagctctgcagtccccagcggcgctagaaggaacctccagg

SEQ ID NO: 97772 - DNA, 122 bp, Homo sapiens
cctgcctgtcagtccctcctcacacgcacaccgtggctttgtgcctggtactgagtgtcccggagccccaaaccacagggtcaaccccatgaaagaaaccgggactctgctctcatccactc

SEQ ID NO: 97773 - DNA, 122 bp, Homo sapiens
cacctaggagcacccaggcttgcccagcaaaccctgcgtgccattcttctaccaggcagccgagaacagggagataaacatcatcatcttctaagagctgatcaagaaatttaaaacaacaa

SEQ ID NO: 97774 - DNA, 122 bp, Homo sapiens
agctcggagccaagcgcgcggctgaggaacgactagggtcttgcaaagttggagcctgggcgcgtagacccccggaccggagcccccggcctgaggccgcccgctaggaggaaaatgaggcc

SEQ ID NO: 97775 - DNA, 122 bp, Homo sapiens
agtgccttgcgcggacctgagctggagatgctggccgggctaccgacgtcagaccccgggcgcctcatcacggacccgcgcagcggccgcacctacctcaaaggccgcttgttgggcaaggt

SEQ ID NO: 97776 - DNA, 122 bp, Homo sapiens
aaatacacctttataagtaatactcaataactactgggtttgagaatgaaggtgtcagaacgaatgagattgtcctatgaaagaagaggcaggagccagggaggaggatcccacccggccgg

SEQ ID NO: 97777 - DNA, 122 bp, Homo sapiens
gtctctgctaaaaatacaaaatcacctgggcgtagttgtgcattcctgtaatcccagccacgccagaagctgaggcagaatcgttcgaatccaggaagtggaggctgcagtgagttgagatc

SEQ ID NO: 97778 - DNA, 122 bp, Homo sapiens
agggcccgtccaggagcagctgctccagcttcttgagccgcaccttggccgacatggtgccgcgcggcccgctcccgacgcgccggcctctcaccgccggctcggccagtccgtcagggcgc

SEQ ID NO: 97779 - DNA, 122 bp, Homo sapiens
agggacaggggcgatttggcagttccagacaccctgaaaggaactctgcggccccaaattcgtttgagagatgtgactgccgacacctttagccctcacagcctcccctggggaagcggaga

SEQ ID NO: 97780 - DNA, 122 bp, Homo sapiens
gagatgggaacgagaggcgcatcaacgcgtccagcatccttgaggggtccgtgaggggcccgggctgaggcccatccttccctgggacaccctgcctgcttttcccaactcctccactgaca

SEQ ID NO: 97781 - DNA, 122 bp, Homo sapiens
ggccaagtcccagccctgggactcccctcccctacccttccagcatccctacccattacccgtcccaaacccagctgccaagtgagggaggaaggctgagccccttggcccttaggggactc

SEQ ID NO: 97782 - DNA, 122 bp, Homo sapiens
cctgacagctgccctaacagaagctccagcctcacggtgcaggcaggaacaagcctggcgcgccagacagctcggccccgcccactcgccgctctcggaaagctggaaccctgcccctttgg

SEQ ID NO: 97783 - DNA, 122 bp, Homo sapiens
ccctgggggattgtgggagatgtaggcccgagggcgaggggcgtgcggtcctggagggggcgtggactacaactcccagcagcctcttgggcctggggcctgcgaatgggtcactgggcagc

SEQ ID NO: 97784 - DNA, 122 bp, Homo sapiens
ttctctgcaaatctggagcatttcctgcacttctgctgtccatggtcccaaaacactccccgtggtctctagggacccctgtgttgggacccaggcacactttccaccccaccctgagggtc

SEQ ID NO: 97785 - DNA, 122 bp, Homo sapiens
gggaacaggccggctccggtctccccgcgcgctctcagcgtcgtcaaagtttattatccacggagcgtcctggaatccacccgcttcggatactgaggaacagctgaacaacaacgcaagga

SEQ ID NO: 97786 - DNA, 122 bp, Homo sapiens
aagaggtaatgtggacaagagccttttagacccagacagacctcagcctggtccagctggcgaattctttgtatggtaatggggactaagcctcaagtatggaaatttgcctaaactaactc

SEQ ID NO: 97787 - DNA, 122 bp, Homo sapiens
cttgacatttttgaagacagcccagctacatgatttgtgtgactcaatgcaaaatgaaaacgtggggacacttactaaaaaacccagaaaactattaagaatttcaagatggtcagagcaaa

SEQ ID NO: 97788 - DNA, 122 bp, Homo sapiens
gacttattgcagtgtctttttgaatgtgtttttacatgtcaactccactttacatgctttcgtatgaaggaatgacttgtgcccagagcagatgcatgcaactgtgtgtacatgtctgagtg

SEQ ID NO: 97789 - DNA, 122 bp, Homo sapiens
aaacacagaaagtcctgtcctcatggggctgacttgctgatagtgactgtcagagtcactcgctccttccttagactcttctccagtgtccctgccttcccttccatcttactgtctgttcc

SEQ ID NO: 97790 - DNA, 122 bp, Homo sapiens
agataaattaataacatacttctacagaattaaattgggaagtgaaatgcatttggtatgcgagacgattactactacctatgggaagacttggttattaccatccataggatgatagttac

SEQ ID NO: 97791 - DNA, 122 bp, Homo sapiens
ccagtactggtagctgcccagctcgatgtaatgcgcgctcttcagcagcttctgatgcatcgttcccggccgccgccgctccccggctcgggagctcccccaggtcccgcctccccggggag

SEQ ID NO: 97792 - DNA, 122 bp, Homo sapiens
aggcggtgattggttcagggatggatatgtaattcacacccaaccaatcagagtctttcccgggactttcctaacagagcatcaggaaagacttgttggctcctctgaggttgctaagaaga

SEQ ID NO: 97793 - DNA, 122 bp, Homo sapiens
ggcgcgggggctcccggggataggcctgtcaggcgcaaagcctgagcacacggagctgtccgcctcagggacgcgcagcgcccttgggtctcctaaagggattgaaggggtgagggttcccc

SEQ ID NO: 97794 - DNA, 122 bp, Homo sapiens
agttcactgaatgtgcacatctctgagatgtgaaagaaagcagagtacagagaaaacccacggagtcgtgagagcacacaaactccacacaggcagtgggtgcaggaattcttttttttttt

SEQ ID NO: 97795 - DNA, 122 bp, Homo sapiens
ccatgttgtagcatggtcaggatttccttcttgcttaaggctgtgtactatttaattgtacgtatgtaccatattttgtttatccattcatctatccatgaacaacttcggttgctttcacc

SEQ ID NO: 97796 - DNA, 122 bp, Homo sapiens
aggaacaagataggaatgaggttttgttagggacgcagagcacctaaaaccaaaggatatcgacagtaacaaagctgtttttactgtagtgctgactgaacactcatgctggtgtcttcatg

SEQ ID NO: 97797 - DNA, 122 bp, Homo sapiens
ctccacattattcagatttccttattttttccttaatgccctgtgtctgtctcacgatcccgtccaggattccacatgatggtcgggagcatctcctcgggctcctcctggctgcgacagtt

SEQ ID NO: 97798 - DNA, 122 bp, Homo sapiens
ctacccgagcgctgttgcctggagaccacgggacgccgttgcctggagacagcggggacgcgttgcctggagactgtggaaggcccaggcaagagggcgcgtggcagcccaaggccatggcg

SEQ ID NO: 97799 - DNA, 122 bp, Homo sapiens
gacttcttgacgtggtgaaggaagcctgctttctctcgaggtggagttttccagagcttgcgaaaatcttctgcctatgaagaaaaaaaaatgtattgagccgtgtcaggcactgcgcccct

SEQ ID NO: 97800 - DNA, 122 bp, Homo sapiens
cggctccctttggaactgtcttttcttttgccctccccttttgtgtttcagtttagtctacggtcctcagagctgccggaagagaagaatcaatggatgataaaataactagacaatgatgg

SEQ ID NO: 97801 - DNA, 122 bp, Homo sapiens
agatgcgaaggcgctgccgtgtgacgggagcagcagcgagggtggggggccggggatccccggggccgccgcaggtcccctagcagctgctctcgaggaagggaatgaggctggggaggggg

SEQ ID NO: 97802 - DNA, 122 bp, Homo sapiens
ggggcgctgcgccgccactgcccagaaattgggcggcagtgaggtcgccgcaaggcttcccgtggaccctgcaaaacgtggcgtgggcattgcacaccattgtactgtatggaaacttctgc

SEQ ID NO: 97803 - DNA, 122 bp, Homo sapiens
tgtgcctgttgggccagggcattgcagaaccaggcccaccaagaggcacaggcagaggcccggccttcccatctcctgcccgtggccttgcctgcttggccttcccatctcctgcccgtggc

SEQ ID NO: 97804 - DNA, 122 bp, Homo sapiens
tgcaccactcgggggcccgtagtctcggcgcccctgggagccgcccggtggaagctcctgcggcaggtaagggagaacctgctcgcctcacctttgcctctggtcactcctctctcacgtac

SEQ ID NO: 97805 - DNA, 122 bp, Homo sapiens
accttgggcaaggaagttatttaaccttttcttgctccagttttccacctgcaaaatgggcgtgcctacctaaatgggttggtatgaggatgagtaaattattaactcagagtgtttggcac

SEQ ID NO: 97806 - DNA, 122 bp, Homo sapiens
gataaaatcagagcattgaaagtgaggcaggataggtagtcaaggaagtaaccatgtcctcgggatgcagcaactgttgtgactgtgcaatcagcacaataagcctctgccttcacattgtg

SEQ ID NO: 97807 - DNA, 122 bp, Homo sapiens
acttcatccccatggggtctcagatgctcagttttccgaaggaactttcatctcatgcatcgtactgaggagacaaaaaggcctgggaagctggttattttggtatcagaagcactcagagg

SEQ ID NO: 97808 - DNA, 122 bp, Homo sapiens
catgtcgcccgcaacaaggatcacaaggtttttctgctgggactgcaggttgcagcaagacgctatctcttccaagagagtcttcaaatgacgagctctctggccgcatcagcccttatata

SEQ ID NO: 97809 - DNA, 122 bp, Homo sapiens
acggccgctatagccctatcggctgctacaacaccaaaacgcatccacctaactggctgacgctacaccttggtctttccgggtccttgcacgcttcgctccaactcctgcagagctgagcc

SEQ ID NO: 97810 - DNA, 122 bp, Homo sapiens
cgcggtcccactcactgttcttgaggaatcgctcctcgtgcagcactgcgatggcgttgacgcagagcagggctgcctgcagcagtgagtacagggtaaaggccatggccgtccgaggccgc

SEQ ID NO: 97811 - DNA, 122 bp, Homo sapiens
cgctgggcagcgctcgcaggctgagacagaaacatgcataactcgagtccagggttcagccggatgctggtccacagcctgcagaggaaccgcatccttgtgtgggggttggggactcccat

SEQ ID NO: 97812 - DNA, 122 bp, Homo sapiens
cttgtgatttaacctccaatgtgcagagtggaggcgccaacagggcctgtgtcacatggacgctgtgggactgaatgaggccctgcaatgaggagctcagcacagagcctccctgggcaggg

SEQ ID NO: 97813 - DNA, 122 bp, Homo sapiens
gtcgaagcgctgctcctggagccgcggagggtgcgggtttggctgcggtggtttctgtggcggttgctgtggcggagtttggaggtgagtgggggctgtaggtttagcgcaacagggagcgg

SEQ ID NO: 97814 - DNA, 122 bp, Homo sapiens
ccctgccggcacctgcgggtccccttcctcctctgtgtcttttcccaggtgcaagtgcaacgggcatgccagcgagtgcggccccgacgtggcaggccagttggcctgccggtgccagcaca

SEQ ID NO: 97815 - DNA, 122 bp, Homo sapiens
ccagagacaaaacaggaataatagacatcattaaatatacatagggccccaggcggtcggcgtggtgggctgggcctcccttccccataacactgagctgctctgctgggccaaccgtgctc

SEQ ID NO: 97816 - DNA, 122 bp, Homo sapiens
acgtgcgtttgaagggaggacggctgaaggtacatgcagtctcccggacgtcacaaactccgcggacgcgggtcacacccgcgcgcacgcgcagcaggggtcttagccacacaggcgcacgg

SEQ ID NO: 97817 - DNA, 122 bp, Homo sapiens
ctcccctccctgcgcgtctccctcctcctcccttccctcgctgtcggcgcgctaaggtgacgacggcggcagccggactcgccacattctgcttactcgctcgctctggccctgagtgcatg

SEQ ID NO: 97818 - DNA, 122 bp, Homo sapiens
ttgccactccgcctctgctcccagtccatcatatcatgaaaaattggaatcatgacattccgaagatctggctggggtatcaaggtcacttctaggaaggggccaatcagggcagggataaa

SEQ ID NO: 97819 - DNA, 122 bp, Homo sapiens
ttttccccagaggagaatgggatcccgggcgggcccccaaatttgttggaagtaaatgctcggtgccgcagggtgaaaatagcactcaggcaaaagttttcacagcaagccaatttacttct

SEQ ID NO: 97820 - DNA, 122 bp, Homo sapiens
caggtcccagcaagcgcgatctgaccagctgggacagctcccaccgaggaaagtggtggccgtgagtcctcccggtcttttgggtgtatttggcggctctgacgtcccccaacacctgagtt

SEQ ID NO: 97821 - DNA, 122 bp, Homo sapiens
ttaagaccagtcttatattaaagcatacattaggtttttactaaagccctggtttcactgcgatgctgcagtcagttgtatacctcagccactgagagggaatagtggcatagatctggggt

SEQ ID NO: 97822 - DNA, 122 bp, Homo sapiens
taaattaaaacctgcagctggtggattgtgatcacacattcccgaagtaataagtgaggacgaatgcactgctctggaacataacccagtgctaactgggggtttcatttattcagtcaagc

SEQ ID NO: 97823 - DNA, 122 bp, Homo sapiens
ccgcaagcggggcgaggggttcggggagcggcgcggcctgggagacacagagccttcaggcgccggggcgggggcacaggcgaagactaaggcggcgccgggccccacagcagcagccgcag

SEQ ID NO: 97824 - DNA, 122 bp, Homo sapiens
ctctatctttactgaagttcagtgctggtgcgtagctcaacattgatcttactcgcagaacgtttccctgcaatgcttcctcctgccgcttgggggagatgcttgtcatctgcacccagtta

SEQ ID NO: 97825 - DNA, 122 bp, Homo sapiens
catttatgtgccccaaactggttagtatatgggtacagcattccctttccaattgggaagcggaaaaagagagtatgggatattttagaagggagcctttgaaccttattatatttccccat

SEQ ID NO: 97826 - DNA, 122 bp, Homo sapiens
gcatgtggccatctgaatcatttcctttcgcaatgtgttactcagtttcagggcctgccacgtgggggtgtttccattcctttctgcagctggacttggtggacgtggggaacgtggcagtt

SEQ ID NO: 97827 - DNA, 122 bp, Homo sapiens
ccccgggccttgaagatcctcttctactgagctagggcttccgtccccttccccatcccccgtggcacatgtgaccccagcctgagtgtgtcgggggtccatattctcaggcctgggccctg

SEQ ID NO: 97828 - DNA, 122 bp, Homo sapiens
gtcctagagactgacccagcttttgctcgagagcatgggacagcctctacccttagctcccggcagctgctgcgtttcgccagtgatgcggccaatggcatgcagtacctgagtgagaagca

SEQ ID NO: 97829 - DNA, 122 bp, Homo sapiens
gctcacaccgtcgaagttgtagtttctctcttccttcatagtgtcaggccagagacctcccgcgtctttcccctcagcaccttagagcacaagacattaagggccacccagaagccagtacg

SEQ ID NO: 97830 - DNA, 122 bp, Homo sapiens
cccttccgccgaaggagcccatgcagacagggctagatgtaccttctgcagcttctgcagcgacttgaggcgcgtcgctgctagagggtcctggtgccctcggcgtgcgtgaggtgctgtgt

SEQ ID NO: 97831 - DNA, 122 bp, Homo sapiens
cttcaaactcgaccatactaaagttattttgcacagatgcagacactgcctcagacttgtcgactttctggacgacattagagactttaatgtactttatcctgattcagccttccactgga

SEQ ID NO: 97832 - DNA, 122 bp, Homo sapiens
actgtgcctgccgacaccaaggtgatttgtgctctcgccactgcgtataacgagttggcccggcagaagctagctcccaagattgctgtggctccgcagaactgctacaaagtgactaatgg

SEQ ID NO: 97833 - DNA, 122 bp, Homo sapiens
gagaatatgttagtggctgccaggaaaacttgtcatcattttagtcattcggtcaaggcccgtcagatactgcaagagttccaaaatgatcaccaacttccatggaagaatttgaagcagga

SEQ ID NO: 97834 - DNA, 122 bp, Homo sapiens
ctctctgtcatcctccctcagagccgggctgtgctccccaagccaggggtatccagcccccgctcttcatcctaggccgggcaggcagccagccccaggcctgtgtcctccttggggggcgg

SEQ ID NO: 97835 - DNA, 122 bp, Homo sapiens
acatctaagtgtagggcctggccaggggccagggtctgcagtggatgagcaccaggacaacgtcttctttcccagtgggcgacccccccacctggaagagctgcacactcaggcccaggagg

SEQ ID NO: 97836 - DNA, 122 bp, Homo sapiens
gcacctggccgaccgccacaggacagggttatgcatggacgagtctccaggaagaatggacgtggaagtagaagtttgggcatccgggggtgggcggtggtgccggagcatcacagcagggc

SEQ ID NO: 97837 - DNA, 122 bp, Homo sapiens
ttctcataagcagtacacaacctagacccctcacatgctcagttcacagtagggttctcgcgttcgagcttctgtgagaatctaatgcagccgctgatctgacggcaggtggagctcaggcg

SEQ ID NO: 97838 - DNA, 122 bp, Homo sapiens
cttctccgccatgcggttctccagcagcctcagctccctgcgcaccgccttctgcatggacggctccagctccagcactttctggaggtccgccttggcctcggcctcattccacacctctg

SEQ ID NO: 97839 - DNA, 122 bp, Homo sapiens
gcctgggtgcccgcttcccgccgcccccgaccccggtccccgcgcccccacacgtggccgcgggaaccgacccccggatcacctggcggcggcgacccgcctcactcaccaatcggcgcccg

SEQ ID NO: 97840 - DNA, 122 bp, Homo sapiens
tttttccttcttgaggaatggagcttcgcagaggttgcatttagattcaacagttcacagcggcgggctgctgctgctgcctctccgaagagctcgcggagctccccagaggcggtggtccc

SEQ ID NO: 97841 - DNA, 122 bp, Homo sapiens
caggaaacaggaagatttcaaaactcacctggaacagctccaggctgggatctgatgccacgtgtgtgtgcgccacacccactgtcttccaaagaaccattccagtgcctgcgcacacaaac

SEQ ID NO: 97842 - DNA, 122 bp, Homo sapiens
tctgcatcactgagtcaagcatctagatgggacacagaaatgaggatgcaatgcgtttaacgtgggtcaaagtggcacggccctgacgctgctcccaggtgggcgtccaggactccaggagg

SEQ ID NO: 97843 - DNA, 122 bp, Homo sapiens
acggtgaaaacccatctcaggtgcctgcgtactaagacctgtgttcagcagcggcggcggcggcggcggtgggctcggaggctcacagccagtggacagggttgagtcagtgagttcgtgcg

SEQ ID NO: 97844 - DNA, 122 bp, Homo sapiens
aggcaacacccttgtgctgatggacacgtggacctacacacgtaataatgttgcatgggacgtgcatgtgccgtcttttcacgcacacttgagcgcaggaaacactggcaagagctggataa

SEQ ID NO: 97845 - DNA, 122 bp, Homo sapiens
agaccaggatccgacctcacacactaaacgtttcaccactttaccaaccattgcaggctgcgttttaaatattttacgcataaaaagggatgctggcccataaaccaccaatctgttggcca

SEQ ID NO: 97846 - DNA, 122 bp, Homo sapiens
ggagaagcctccgtagagcgcgtggtgaaggcatggaggcccccagtcgctgtccccccacggctccgtccgagcccctcacctgtcccatgggggtgtccccagctccctgggggcgtccg

SEQ ID NO: 97847 - DNA, 122 bp, Homo sapiens
aattgacccagggtgctcagggacgacctggaagtgtcacatgagttatgggtctcctggcggggcggagagtcaccgctgagctccacctttagtccctgcctcagggctgtgtgcagtat

SEQ ID NO: 97848 - DNA, 122 bp, Homo sapiens
tctgagctcacttttcagcaaaggtgaaggattctctgatcacgcatttgagaccgtccccgcatgtgcttggccccatggcttctgaacatgttcttttctatgccacgtttgtgtgcaac

SEQ ID NO: 97849 - DNA, 122 bp, Homo sapiens
gtggccagggggctgctagccgtgccgagacggggcgggatgcggagtaacacggacggccgccggcgccaaactgtttcccgaagccaccaagccggtccccagcgccagcgctgccaccg

SEQ ID NO: 97850 - DNA, 122 bp, Homo sapiens
gtcccgccaccccaaatcccagtgccggagcggggcccggctctgccacccgctgccacccggtgtggcacccaggccctgctggcacaaggccacggctaatctgctctcagaggaagctg

SEQ ID NO: 97851 - DNA, 122 bp, Homo sapiens
agcctggcaaactccctgtctcctcaaggtcagtccttcctcagcattcctctttggaaacgtctcccacggctggccctgctcctgccccctggctttaggggcagttatataactcttag

SEQ ID NO: 97852 - DNA, 122 bp, Homo sapiens
tatagtctcctgtaaacaagaagtgtctcagtctgatgtaactgctgcatagtacccggacggcctccgtctcggtcttcagggggtatgtgtcttccggccagctctcttcctgcttctgc

SEQ ID NO: 97853 - DNA, 122 bp, Homo sapiens
aaattagtagggaaagtttagtctatttctcaaaacaagccattataagtactttttaaacgcctatggctcccctccttagcatagagcccataagtattttaagcagaaaccctgtggct

SEQ ID NO: 97854 - DNA, 122 bp, Homo sapiens
gatagtcacttctgctggatagaagccccacacatagcaggccagcatcacaggctccctcgtgttaaaaggagtggttttggctacttgcacagatggtggccctgcataggagaaaaaaa

SEQ ID NO: 97855 - DNA, 122 bp, Homo sapiens
cttagggctgaggatggctttgagtcattcaaagccttccagagtcattctttataccgccggccacagtccttgcctccgcccttggagggacatttccctcctccccccggcgtctatct

SEQ ID NO: 97856 - DNA, 122 bp, Homo sapiens
ctggaaaaaatgccttcaggttccttcccatcccccaaggcagcagcaaatccttcgtgtcgcctcctactggccaaggcagccaaagatttgaaagtctttggctcgtagatggccagatc

SEQ ID NO: 97857 - DNA, 122 bp, Homo sapiens
gtccgccccgtcctgcgccgccacttccttcccagccagaagtttcgcgccaaattgttccgcacacaaaatggagcccggaaggaggcgaggtcatgcactttgcagccaatcatcttcgg

SEQ ID NO: 97858 - DNA, 122 bp, Homo sapiens
gcgcaggctgctcactcagccctggccagcagatggctacagagttggcacctttgtcagcgcttcctttctcactggagtttaatttaattgagaacttcaggcctcattaagggctgtta

SEQ ID NO: 97859 - DNA, 122 bp, Homo sapiens
gcgcagcagtttctaggtccccactgtccccgccgtcccgccccttcgcgtcccgggaaccggctggcttccgagccgcactcgccgatcctccaggcatgccccgctacgagctggcttta

SEQ ID NO: 97860 - DNA, 122 bp, Homo sapiens
catggaaccagcccgggataggtaggagctgaggtcctcgcaggaaaacttttcattccgcgactcttccaaggttgtgctttccagagcccagcaagtgggatcagctcagtaaatgctcg

SEQ ID NO: 97861 - DNA, 122 bp, Homo sapiens
tccacgcattttaaacccttattggcctttaaaggaatcccgcccagctcagcccctgagcgctggtttccacgtgggttgctgctgaccctccctcgagctccctgccggtctcttcaaca

SEQ ID NO: 97862 - DNA, 122 bp, Homo sapiens
ccaagttagcctgagttgactctcattgttcccctatctacccacagtccccatccaacacgaagaaatatttgctttcacattacagcataaagaccacctaagctttgacagctgacttg

SEQ ID NO: 97863 - DNA, 122 bp, Homo sapiens
gcggctgcgacgcgccgagaggccgcggtgagtgcagcagcactgggggggtggtcgtcccgacccccgggctcccgggtgggaaggagcagctgggctgcgcggagcaggcccccgtgagc

SEQ ID NO: 97864 - DNA, 122 bp, Homo sapiens
ccacagcccccgcccgggagggtctgagccaggcagcctccccgggagccggtgctgacacggccagagaaaccattccagacccggaccccactgtccccaacacctgcgggccagtgact

SEQ ID NO: 97865 - DNA, 122 bp, Homo sapiens
gttcgccgcgggctacaacgtcaaattcgatatgttcagcaagatctgcgtgaacggggacgacgcccacccgctgtggaagtggatgaagatccaacccaagggcaagggcatcctgggaa

SEQ ID NO: 97866 - DNA, 122 bp, Homo sapiens
gggtcaaagttcagtacataccagaggtgtgagaagccactgcacgcgcacagaaaagcccgtggtccgccaatagtcaaccaattacacctgaaactctgaaaggcttctaatttccggaa

SEQ ID NO: 97867 - DNA, 122 bp, Homo sapiens
acagatgggtccttgtaccaagcaggtccattccccaaattgaagtcctgtgactccagccgccaaggctgcaggcttccgtacatgaggacccaaaaacacaagctgacttatggggtcca

SEQ ID NO: 97868 - DNA, 122 bp, Homo sapiens
tccaaaactgatcttgtgacacttaagccaaccatcactttaagatataaacaaaggatgcggaaactataagggatgattgcatcagagagagtcttatgtgtgaattgagacccactcca

SEQ ID NO: 97869 - DNA, 122 bp, Homo sapiens
gacgctggatgcccacgaggacaaggtctgggggctgcactgcagccggctggacgaccacgccctcactggggccagtgactcccgagtcatcctctggaaggttgtgggccccaagggca

SEQ ID NO: 97870 - DNA, 122 bp, Homo sapiens
agggagtagatggctgcatccggggtggcgaatgccagacccgagtggacccctgtgtgtcggtgggtgctgcccctggggacaggtcactcaccggggccacacatggaggacgcattctg

SEQ ID NO: 97871 - DNA, 122 bp, Homo sapiens
ttctgagcaacatcacagtggcataaatagagaattcctggaacacactggcaagacacacgctctagaaggtgacaattctggggaaatctgaagggctggaataataaaaagtcaaacat

SEQ ID NO: 97872 - DNA, 122 bp, Homo sapiens
acttcccagctgctggtgtcccagtgtgtgtagagtcaggaaaacgatgtgaaattggcccgtcccctgtggagacccctggtgtcaggtgtgtgtagagtgtgggtaaccaggaccgggag

SEQ ID NO: 97873 - DNA, 122 bp, Homo sapiens
accgagcatcaggtgcacctcggcgtgatgctgccagccccagctgaggatctggcaggccgagaggccgagaccccgtccccaggcgtccctgaggtctgagggtcaggttgtccatgtgt

SEQ ID NO: 97874 - DNA, 122 bp, Homo sapiens
agtgagaggggtggaggcagggtgggcggggcaggggcagaggctggagtgggtgtatctcggggaccttcatgcctcatggcctccaccctcagctatgattccaacctcaacgcgtcccg

SEQ ID NO: 97875 - DNA, 122 bp, Homo sapiens
cgattggccgacggcgccaggggcggggccggaccttccgccttcgatttaaaaatttggcgcggaaagtcggaccgtggccggcgcctccccttagctgcgcggggcctgagcgcgggcaa

SEQ ID NO: 97876 - DNA, 122 bp, Homo sapiens
ggctggccacgtcagaagtttgccctggcccggcagggccgaatggggggaccctggccccggacagcgccagcagcggcgactcccggaaatccccccctcccccgcgccccgccctcagc

SEQ ID NO: 97877 - DNA, 122 bp, Homo sapiens
ccccgggccccagggagacctccagctgaaccctcacgggcacttttccaagctggatcccgggcctggcaccccctcctccagcctctgagaggccagatcccatgactgggggaacctgg

SEQ ID NO: 97878 - DNA, 122 bp, Homo sapiens
caacctcccgacagtggcacatccttcccaagcgccctctcccaaccagtccacaaaacacggggacaatagagagcaccccaaggaggaatagcagagaatgccgaaaagtaatcattcag

SEQ ID NO: 97879 - DNA, 122 bp, Homo sapiens
cagcaagaggaaagcacttcgtgtctaacgtagtggaatgagagtaacgtagaagaacaacgaatcccaggtctggcgtttatctcctaggaagggtgtgggagagctgttttccaagggag

SEQ ID NO: 97880 - DNA, 122 bp, Homo sapiens
actcaacctacccttctacaagagggtccgaaaaccactgttacgcccattgggtagccccgcccttggggggggcaaagggcgtgaaagcggaagtgacgacacccggcgctccattaaat

SEQ ID NO: 97881 - DNA, 122 bp, Homo sapiens
aaaattatatttacttgttcactgtcccatccactcaagggagcaaaaagttcacccggacgagcgtccggcacatagtaggtgcagataaataatcgttagatcaggccgggtgcggggct

SEQ ID NO: 97882 - DNA, 122 bp, Homo sapiens
gtgtttccttgtcctcggagaggagatcagcataggccggtgcaaagctcgcggtctgctcgttcccataagggggatgctgcggaggatatggccccggaccggctccacctgctccgtag

SEQ ID NO: 97883 - DNA, 122 bp, Homo sapiens
gactcgactggagaatggcagccctggcagggtctgcggccggctgcggaggtggggacgcggccgcgcggacgagtgacaggttggtccggcgcagcaaagggagcgggtgcggcggtagg

SEQ ID NO: 97884 - DNA, 122 bp, Homo sapiens
acccaagggatgagttaggaggtgaaaggaactcagagtccaagaaaccgggaggggctgcgtttcgaggagcgagggctcagctacttatttgctgctgaggtcttgagtgacatgggtga

SEQ ID NO: 97885 - DNA, 122 bp, Homo sapiens
ggcagcgtttgggggcgacgagttttgtgcaccgcgctggagtaccctgcacataaggtccgctcatgggcttctcagtacggactcgccggcgggaacaattaattgagcaaagcgcccct

SEQ ID NO: 97886 - DNA, 122 bp, Homo sapiens
ctcagtcctcatgtttttaggtctgggcagcactgacttagctggtcactctctcctcttcgaagcactttacttggctcccaggccaccacactcccctggttttcttcctacctcacctc

SEQ ID NO: 97887 - DNA, 122 bp, Homo sapiens
ctgccaggagccgggtgcaggccaggcaaggctgtctctcccccatgggccctggtcctccggctgcagccccggcatgccctgcgccaaccccttccacacacagctgtacgactggccct

SEQ ID NO: 97888 - DNA, 122 bp, Homo sapiens
atcctggggtgtagcagagactaaatttaacagataggtaagctaaggcccagagagagacggggttccctgaagtcaggttgtgaaagacatttccccaccactgcactatacagtataac

SEQ ID NO: 97889 - DNA, 122 bp, Homo sapiens
tcaattaaatatcttgttttaaagtgggattatctaaaaaaaaaaaaaccagttatatcacgtggtttgtattggagatgtgccaaacatggcaagaagtttttggatctttttcttacaaa

SEQ ID NO: 97890 - DNA, 122 bp, Homo sapiens
ctgctggcccaggtgctaaacccctcactgcctggagcccgcggggccggttggccactccgagtgtggggctcgctgagcccacgcccacccaggactcacgctggccagcaagcctcgca

SEQ ID NO: 97891 - DNA, 122 bp, Homo sapiens
cggcggcagcggcggcaggctggcttgtaccccgacaacgcgcgtctggcttctgccggacgttcctatctgggttcagaactggggccgggtgctgcaggtcccgcagtctgagaagtttt

SEQ ID NO: 97892 - DNA, 122 bp, Homo sapiens
atctataaatgttatgccagagcacttttctttttctttttatgtttggagacagagtctcgctctgtcacccaggctggagtgcagtggcacgatcttggctactgcaacctccgcctccc

SEQ ID NO: 97893 - DNA, 122 bp, Homo sapiens
gggtgcgcttccgccgtcgcctgttcccgccgcggagacccggcagttgggggatgccgacgcctgggccttgaggatgctgcggaagctcaccatcgagcagatcaacgactggttcacca

SEQ ID NO: 97894 - DNA, 122 bp, Homo sapiens
ttttcccattttaggggagggcgccggcagccagccgttaattagcatacttcccatgctcgtcatgaagtcacgggctaatctggcacacacggttcggaacaggctcctgcctgaatcaa

SEQ ID NO: 97895 - DNA, 122 bp, Homo sapiens
ggagtggcagaatctgtcaggaggcgcccctcctggagtattgggttatagggtttgaaacgtttttctgtctcctgggtgtcacctccagcatctgggaagagctcccctccaaggatgaa

SEQ ID NO: 97896 - DNA, 122 bp, Homo sapiens
gaaatgcatgaggctagaaagggagctggaacttaaagtggcggtgtttgtccgagatgacggtgctcctggtctgtcaccagactcaagcaatcctgccacctcagcctccagactaactg

SEQ ID NO: 97897 - DNA, 122 bp, Homo sapiens
gtagaccttctctgaggggctcaggccaggaaatgagtcaggttaggaggcagagacagacgaggagccgcaggggaaggctcatcactagcatgttctctgcctccccagattttgcctct

SEQ ID NO: 97898 - DNA, 122 bp, Homo sapiens
tctctctctggccatcactcctgctaaggacactgggaaggacatggtcaacgtagcagtcgatcaaaaagattccagggaaactgcgcaacagcctggggccgagaagcgaaacttgggtc

SEQ ID NO: 97899 - DNA, 122 bp, Homo sapiens
catggagatgctgttaatgctccatctagaccctgggcccctctttcctgtatgcatgcacgcacccttcttttgaagtgctttgcttctaaatcccagccccctgctctttttcagcagac

SEQ ID NO: 97900 - DNA, 122 bp, Homo sapiens
cagggaaagagggcgtttgcgcgtgcctcgccagtctctaagactgcgcagaggagagggcgggcctcaaatgggaactttggccagaaaatgtggtgggaggtgccctgcacccgctttgg

SEQ ID NO: 97901 - DNA, 122 bp, Homo sapiens
ccacaagcgcagggggagccaggcctcgggttacctgtgctcagggaggccgtgcttcctcgttcctttgtctcaagttcgcacctgggaacacctgccccagagatctgcataatgcagcc

SEQ ID NO: 97902 - DNA, 122 bp, Homo sapiens
aaatacaaaaaatcaggcaggcatggtgatgtgtgcttacagtcccagctactcgggaggcggaagtgggaggatcacttcagcctggaaggtcaaggctgcagtgagctgtgataatgcca

SEQ ID NO: 97903 - DNA, 122 bp, Homo sapiens
tggcgggatgaccccgggggttgttgcctgccatgggcacagtccgggagtcctgacctacgtctgagggccagagggcatcccaactggacgtgaaaggccagcctcaggctgaggacggg

SEQ ID NO: 97904 - DNA, 122 bp, Homo sapiens
gaccaagagcgcacacgagggccaccgccttcgtgatcagaagcgggtatgactgggcaccggttggtccactgcggctgttccaagctgcccccacagcctcaccccaggactccaccagg

SEQ ID NO: 97905 - DNA, 122 bp, Homo sapiens
gactccctcggagagtggtgctgtgagcctacatggttctttggaaagggtggagaggggcgcactaagagcaacagtatcccacactgagcaggcctcctcctgagagaccaagagaccag

SEQ ID NO: 97906 - DNA, 122 bp, Homo sapiens
cctggggaatgaatgtgtggagtcgcgtatctgtcctcgggtgaacggtgcgtggggccgcgtggctgtcctcgggtgaatggtgcgtggaactgtgtgtctgtcctcagatgaacaggagt

SEQ ID NO: 97907 - DNA, 122 bp, Homo sapiens
gcgtgattcccacatcctctccgcgacggccggccagggctctcgggacagcctccactccggtgtggggttctggggtttgtgcatctgacataaattccaagaagtaaacaccctcttag

SEQ ID NO: 97908 - DNA, 122 bp, Homo sapiens
gccgaggggcgcagggaaaagtttcacgtggtcaactccggggcggcgcgctaggggcaccgctggccaggtgtctcgggcgaccccgggcccgcgtcgccgcctcctccccgcggccgccg

SEQ ID NO: 97909 - DNA, 122 bp, Homo sapiens
cctttatttcaccatcttaagcaagttttatacagacagttctcagtattgtttttactccgtaactttagtttccctcttctatccagattttaaaaaatcatgtttctaattccatttta

SEQ ID NO: 97910 - DNA, 122 bp, Homo sapiens
tctccacaggagccgaggaggtgctgctgctggcccggcggacggacctacggaggatctcgctggacacgccggacttcaccgacatcgtgctgcaggtggacgacatccggcacgccatt

SEQ ID NO: 97911 - DNA, 122 bp, Homo sapiens
cacacccctccccacccactggggccctgctctgcagcgtctgtgccccaggggtcatgtcgtgcgcctgcacctgagtctgccgtgtttgctggtgcctgcgtgtgcacaggtgcctctcg

SEQ ID NO: 97912 - DNA, 122 bp, Homo sapiens
agtaaggcctcacagcaggcaccccagggcggggcagcaagcaggcaggaggggcctccccgggtggccttctagggaggatgtaccctggctgcccagcagcagccctgcttggccgtgtc

SEQ ID NO: 97913 - DNA, 122 bp, Homo sapiens
attaatcctaatcttctccaatggtcctttgggaagatggtagaatccctgtttcacagacgatcaaactacagctgagaggtgaactgactgaatcctgattgatctgaccattgtttaat

SEQ ID NO: 97914 - DNA, 122 bp, Homo sapiens
cgtcttctaactccattctcttcaaatccactttccaaactacagctggagggagctttccgaaaaacaaaagtgaccatgtcccatgtcgctcgccaccttgcagctgccagggtttccca

SEQ ID NO: 97915 - DNA, 122 bp, Homo sapiens
gtagttgccagagaagtcatgtgatgtaatgggaagagaatctcaaatgtcatcagtcgacgtgagtcttcttatctgtgtgaccatggggaagttacttatgcttcctcatgaccagtatc

SEQ ID NO: 97916 - DNA, 122 bp, Homo sapiens
actgatatcaacaggctgtggcttcggaaatatgagttgtactagcaaacttctcacttacgctactctattttcccatggtccctgaaggttgtatgtctacttagaactcttctcctcat

SEQ ID NO: 97917 - DNA, 122 bp, Homo sapiens
gggcggcggccgagccggccgagctcatccgacgagcgcacgagttcaaaagccaaggggcgcagtgctacaaggacaagaaattccgtgaagccataggcaaataccaccgggcgttgctg

SEQ ID NO: 97918 - DNA, 122 bp, Homo sapiens
cgcgacgcgccagaggcgggcgcggagcctgccggaagttgtagtagtatgtgggcggggcgccgcttaagggcttgtactgcgcatgcgccaggcttctgccgcacttaccttgaagaaag

SEQ ID NO: 97919 - DNA, 122 bp, Homo sapiens
aaagcgcttctcctgagcatcatatctcaacccctatttaacctttgggtgaggtgatgacgccccctctccaagctcctcagccaatccctcctcctgagtggtctgtgctggggattagc

SEQ ID NO: 97920 - DNA, 122 bp, Homo sapiens
caaatcctttgcgtccggagtggggtcttcactggctgctccatttgtctgcgtggggagcgggagacaggagctccctgtggctcagaccctgctcagctccgtggctccaggccaagtaa

SEQ ID NO: 97921 - DNA, 122 bp, Homo sapiens
taaaacctttgcacctacaaatgcgggtggctctcagagtcagagtaactgggtctcaggcgaagcctgtgtcacagaaaatctgcatgctgctgggttcacaggaccttgggcttttgggg

SEQ ID NO: 97922 - DNA, 122 bp, Homo sapiens
cttggtgctcttgcttttcctctctcttcctccatttccaggacctgaagggatggactacggcattcttctttctctaacctcgtgttatgcttctgatataccaaataggattaaagcca

SEQ ID NO: 97923 - DNA, 122 bp, Homo sapiens
gaggttcactggacgttttgggaaactgtaaggcaaaaataaaattctaagcctcccaaccgactgaatggacctccctctcagcccagggcattccaaaataaacctgaaaaattaattca

SEQ ID NO: 97924 - DNA, 122 bp, Homo sapiens
attctgcacccagtgtcctcggaatgttctcagagcacttttaaaaaccggagagtcggccggtggctcacgcctgtaatcccagcagtttgggaggccgaggcaggaagatcacttgaggt

SEQ ID NO: 97925 - DNA, 122 bp, Homo sapiens
atggcacatcaaagcatgtccactggtaatgtagtactagttcttccttcccaagtaaatcgaaaaacaaaaacaaccttgggcatctcctccagcatatattagtaaccaagaaagttcac

SEQ ID NO: 97926 - DNA, 122 bp, Homo sapiens
tggctcatagctcttctccagggacgagaacacggcggtggccagctcccgcttgatgtccggggtaacgtagcacagcttctccttgatgtcacgcacgatctcccactcggccgtggggt

SEQ ID NO: 97927 - DNA, 122 bp, Homo sapiens
tggactcgatgtacatgggaaacagaccatgagtccatcgtggggtgggaagctctggcccgggggtccccggtggtagaaacagcagattcttgcctgaggcccttgtgctataccccacg

SEQ ID NO: 97928 - DNA, 122 bp, Homo sapiens
tttggggcatatatttcaaacgcagcggccatcttgttactgcatggggagtgtcggatgcgcaggtcataaatcatagcactgcgcacggcacactcagacgaaaggaggtgaaacgcagg

SEQ ID NO: 97929 - DNA, 122 bp, Homo sapiens
tgaaaacattcagttaccaaaaaaacccatattgtttgattccatttatacaaaatgtcccgatgtccagaacagccaaacccatgaagaaaagtagtgattgcctagggagagagagggaa

SEQ ID NO: 97930 - DNA, 122 bp, Homo sapiens
caatggccagaccgtgaaacttaaatactgtttcacctgcaagattttccggccccctcgcgcctcccattgcagcctttgtgataactgcgtaggtgagtagtgcctgggcggagcctggc

SEQ ID NO: 97931 - DNA, 122 bp, Homo sapiens
gaggaggagatgcagaggaaggcaaagaacaactctagcgacccagggtgatccgggtgccggaaaacagaagctggaaaaaggagatctgccccggaaaggaggcatggaaagtgtagatg

SEQ ID NO: 97932 - DNA, 122 bp, Homo sapiens
tccccgactgcggcggggaagattgggcgcggtcccgccggagaagttgcactggctccgcggctctgccgccttgctgcccctgtgagtccccgaactctgtcgtttggatccggggcgtg

SEQ ID NO: 97933 - DNA, 122 bp, Homo sapiens
tcgttttgctaatagaaaatgcagatgatttgcagtgaccattttgttgcagttgactcacgattatagtcataggtatgtcctttttgcccatttcattatagtcaagtttgtttcttcct

SEQ ID NO: 97934 - DNA, 122 bp, Homo sapiens
tttggttcccggtacccagggaaaccaccagcatcggcagaggtgatagctggggaggagcggggatttggacgagagacacaggatgagtaccgggggcagccctgtgatcaacaactgct

SEQ ID NO: 97935 - DNA, 122 bp, Homo sapiens
gctgattccctggcccagatggggccggggaatctgcatttttggtaaatttccatctcacgacccaaatactaatgtttgagaatcagtgagccagtatattgaagttaggcaatcctgga

SEQ ID NO: 97936 - DNA, 122 bp, Homo sapiens
cctctgactggctggcggcccagcaaagtccttatcaaattcttggaggtgatcctgaagcgctcagaccgcgcgcggggcgagcgagcggggcgcggcgaggggcaagggcggggagggcc

SEQ ID NO: 97937 - DNA, 122 bp, Homo sapiens
taactcacaaacaaaatgtatgcttcctgttcattagactttatgctctgttggcttagacgtcttagtcccagaggtaagaatacttccaccaggagatacaacaatacttccattaaact

SEQ ID NO: 97938 - DNA, 122 bp, Homo sapiens
acccagtttctggaaaagggagagctctgcgatgggaatcacgacaccaggatacggtcccgattaactgtgtgaccttgggcaggtcattttatatttgcattcagttatcaacttccaga

SEQ ID NO: 97939 - DNA, 122 bp, Homo sapiens
tggacagaggagggggagctaggagtcggggagtctccgtggcgcgcgagctgtgggccgcgcgctcgggggccacgtgaccacggggaatctgggaggggtgggagtgagcgcgccaagct

SEQ ID NO: 97940 - DNA, 122 bp, Homo sapiens
ctccggggaccccggctttcccagggacggccggtgcccgtgtcacttccccgcagtcaccgctgcagtcatgttcctggagctgctcagcagacgtggatcccagcagaggctccgcacct

SEQ ID NO: 97941 - DNA, 122 bp, Homo sapiens
cagaaggtacccttagtgcaaacacatttgctaaaatacagctatccaatctgccttttacggtttttttttaaagcaaattgaattacatctttcataactgcctgtgacaggctgaagtg

SEQ ID NO: 97942 - DNA, 122 bp, Homo sapiens
atgtggcgcaggtgcaggactgtgggaagacaggagcgccagggaatgtctggccagcagcgcgctgccctcaaggggcctccttgaaggccccttgaagagggcaacacaactaatgacga

SEQ ID NO: 97943 - DNA, 122 bp, Homo sapiens
gcggggagggaagggagggttatttctcccccctcttcctttttattgggtcattaacaacggctcggactgccgctgcgccccccctttcatgtctgccgcgcctcccgccattatctgcc

SEQ ID NO: 97944 - DNA, 122 bp, Homo sapiens
ctattggtggattttaaacatgcccgcaaagtaataccttatgcctatttgatttataaacggcccctctgccaaggtcatcttaagggaaccaaggaaacggggctttcttcctcttttgt

SEQ ID NO: 97945 - DNA, 122 bp, Homo sapiens
ggtggatacatggagagtggcccatccaggctgtggaccgcaattctgcagtggaaggagcgaggctgacacagcctgcgacgtggaggaaccctggaaacgtggcaccgagggcagggagc

SEQ ID NO: 97946 - DNA, 122 bp, Homo sapiens
acctgggaaaagtctgaactactgggttctttctggcttggaccaggacaaggtgttgaacgcctaacttaggtctactaaggtgtagaaatacgcaaggctgcccctagagaacgtttgtc

SEQ ID NO: 97947 - DNA, 122 bp, Homo sapiens
ctgtgatatgacaggcttatacggcacctccaaagtgtgactgaagctgagcgtgcagggcgcaacggacgctgcccccgcgaggccgtggcgggggctcccagtgcagtcactgccgcttc

SEQ ID NO: 97948 - DNA, 122 bp, Homo sapiens
ctggacgcttctctgtgaggagagtccctcgccccttcttcagatttgggaatggactctcgggcacctgaagcgcctgctcaggatcaggccggcacctggacatgaatcccaaacagaaa

SEQ ID NO: 97949 - DNA, 122 bp, Homo sapiens
catggtggccgcggtgtggtcactgatgaggttcctcatcacgggcggtgtggctggaggcgcgtcgacctgatgtatggccaggagctgctggggcccagcaacaagagccgagcgcccct

SEQ ID NO: 97950 - DNA, 122 bp, Homo sapiens
ctaggtgtagaaaatgcgcgctctccgttacttctcggttactttgcccagcacaaaggacgacgcgaataccaacagactggacgagtcggtgactacagtttgcattaagaggcggcgcc

SEQ ID NO: 97951 - DNA, 122 bp, Homo sapiens
tgccgccgccgcgcgcccccagtacctcgctccccgcccaggccccaccatgaccggctccgcggccgacactcaccgctgcccccaccccaaaggcgccaaaggcacccggtcccggagca

SEQ ID NO: 97952 - DNA, 122 bp, Homo sapiens
tatggctctgcacagggccattcagttctccacagagagggactgtcctggaggggtggccgaggaggttgccccagggcttctgtccagtctggcgctgggcccacactagggcagagctc

SEQ ID NO: 97953 - DNA, 122 bp, Homo sapiens
aacgaaatcaagccccgcgtgcgctccaggggcgaaggactctggactcaccccgaccaccgggagagctggcccctacccacctcgggacctcacagcacgccctcaggccgtgtcgaaag

SEQ ID NO: 97954 - DNA, 122 bp, Homo sapiens
caagtgagtaacttatctcctctggacgctggggtgggaggcactccttcagggtgaggccgcacgccccggagtgcatgtggggaggtcttcggaggaggagcggcgcctcattttgtctc

SEQ ID NO: 97955 - DNA, 122 bp, Homo sapiens
aattccacccggaggtgcggctggagaggcagggagccaaggcgcgcaggtagcggggtgcgccctcttcactcggagcaccctgtcgagcagagcagctctaagcaaggccaggctggagg

SEQ ID NO: 97956 - DNA, 122 bp, Homo sapiens
gcaggaacaatcgccccagtgtgcaaggcacaagcggccttttcttcctcaccgggccggcgcacacagctcccagcctggcttcccttgaacaaacatatttattgtggccgccaccgagg

SEQ ID NO: 97957 - DNA, 122 bp, Homo sapiens
cagggtcagggctgaggcctgggggtcagggccccttacgttcccctcttttcccagagccggcttcccagcccaccatccccatcgtgggcatcattgctggcctggttctccttggatct

SEQ ID NO: 97958 - DNA, 122 bp, Homo sapiens
gtggcccctccaggtcccggcgtctccttggactcacattaccagcatttctgtccatttcgggtgagacccgaagcagcgagaccctatccaggtcaacgtctggtgagaggaattttttt

SEQ ID NO: 97959 - DNA, 122 bp, Homo sapiens
acttgggaagcgcaaggggtcagggagttccctttctgagtcaaagaaaggggtgacggacgcacctggaaaatcgggtcactcccacccgaatattaaccttttcggaccggcttaaaaaa

SEQ ID NO: 97960 - DNA, 122 bp, Homo sapiens
accattctccagccagcgttgtctcctgttcttctcacctccccctattccatcctgccccgagtagtctattcgtgctaaagcattcactgagaaaaactgtaaagggagagtcccttctc

SEQ ID NO: 97961 - DNA, 122 bp, Homo sapiens
gtcaaatcttaatgccacattgaccactgtgtcaagagaggccaggttccaactcagctccgtgtatagtgttcatggaatctcaatgctcatcaggcgctgctggggctgggcctcgggga

SEQ ID NO: 97962 - DNA, 122 bp, Homo sapiens
tcacgacccagacacagactcacggtgacagcacgggatcacgacccagacacagactcacggtgacaacactggatcacaacccagacaccatctcatggtgacaacacgggatcacgacc

SEQ ID NO: 97963 - DNA, 122 bp, Homo sapiens
ctcctggctgttcaagccgattaattgcagtggcctctacagttacctagtggctgctcccggatacggacgcacgcgagggatgcaggagtcatctttcactaatcaccggaatccccttt

SEQ ID NO: 97964 - DNA, 122 bp, Homo sapiens
agctaattggatggttggtaggcaggcaaaggttattctgcaatatcttttatttttactcgctcctcttctaatccatcacgacataaagacaaatggtagggagagatctgtgcatcgag

SEQ ID NO: 97965 - DNA, 122 bp, Homo sapiens
gcctcggtgtttagggaggagcctaaggtaaggagtcagaaacggggagtaaccgagctgcggcttttatataaggtcagtggtaggtaaggaaggggccttaacctctgctggtgaccaga

SEQ ID NO: 97966 - DNA, 122 bp, Homo sapiens
acgacactgaggcgagcgagtgggtgtgtgcgtggggggtcagccaaacttcctgtcccgcgctcgagctgcttccggcgggagccggaagacgctgtgtgtggacggaattcgggaccgac

SEQ ID NO: 97967 - DNA, 122 bp, Homo sapiens
taccctccgctgaccaggattcaccctggctggcagagactaccctacgctccgctcacccggccaccccgccccgctctgcgctgaccctccgttagaggctgactctccaaactaggacg

SEQ ID NO: 97968 - DNA, 122 bp, Homo sapiens
acgacggcatcttgaatttgggcattttgaacttgctgtctttggcagtcatgtccttgtcggccagggacaggtctccctccagccgcgcaccatccagcttagccttctgggcctggaca

SEQ ID NO: 97969 - DNA, 122 bp, Homo sapiens
cgcgttgctatggtgaggatggcagtccttgcttgctgtgggtaaccttttctaccttctcggacactgttttaaaacacagcagcgtgatagcatttcatttaatttggaccaaggtgggg

SEQ ID NO: 97970 - DNA, 122 bp, Homo sapiens
cccaggcacctatgtgaccagggcagaggccacagatgccgacgaccccgagacggacaacgcagcgctgcggttctccatcctgcagcagggcagccccgagctcttcagcatcgacgagc

SEQ ID NO: 97971 - DNA, 122 bp, Homo sapiens
gaaatgcccgcggagcggagctgagggcaagggtgtggggcggccccctcctgcggctgacgccttgcagagctccggagagagttcccccgaaagcgcccccggggagggggctgccctaa

SEQ ID NO: 97972 - DNA, 122 bp, Homo sapiens
ggtgatgaagtgtcataaatagttaatacaaattctgccaacaagtttggggttaatagccgatcttaaaatgggtaagggaaagaaagggagagggagggaaaaaggagagggaagagaga

SEQ ID NO: 97973 - DNA, 122 bp, Homo sapiens
ttgattacttttcacagtattggtctctgctatcaaccagtgctgtgcacttgtggggaacgtatgatggccagcagggcctctccacactgacttggatcttgagatagttctgagttggt

SEQ ID NO: 97974 - DNA, 122 bp, Homo sapiens
ccgagctgccgccatccccggacccctcgccgccctcgacggcgccggcctccagctcgtcggccgcgcgccccttgccccgccgctcctccagacccacctccaccgagcgagggcgcacc

SEQ ID NO: 97975 - DNA, 122 bp, Homo sapiens
ttgccctgacattccatattctgtgtctctgcagaccaccatcatggcagtggagtttgacgggggcgttgtgatgggttctgattcccgagtgtctgcagggtgagtaaaagtgaagatgt

SEQ ID NO: 97976 - DNA, 122 bp, Homo sapiens
tgggaggagaatgtggtgggtactcgagtccccgccacctgccggacttcgccaactccccggatttcctgtcctcgggccctgacactcccaaggaaagctctgaattgcgctcgctgttt

SEQ ID NO: 97977 - DNA, 122 bp, Homo sapiens
gtcagagccatgctcgctttgatccagccactgtagggggtcacccttaaggaggaccctcgccgtgctgcccctacccctcaggggagccctagcagccccaccctctctcacccagcact

SEQ ID NO: 97978 - DNA, 122 bp, Homo sapiens
ttgaatccctcttggagtgtgccagggacgtggaatccagcctctgtcacatcttggtcacgtgagttcagaacagtgtagcctgaatgacggcatggtctcatgggcaccctgagtccatc

SEQ ID NO: 97979 - DNA, 122 bp, Homo sapiens
gtggcctgctatttccttcaaatgaatgatttttactaattttgtgtacttttattgtgtcgatgtagaatctgcctggtctatctgatgtgacagcttctgtagcactaaagtgcttatag

SEQ ID NO: 97980 - DNA, 122 bp, Homo sapiens
acacagctgggactggaacccaggcagctggcgccagcaccgtgctcccgatctttccaccgcctgtcactgaagctctgggttcctaagggaccacaccaacatacgatttcacgactttc

SEQ ID NO: 97981 - DNA, 122 bp, Homo sapiens
tttaaatagtgtgcagctctggccacagagaggattattgaagattaagtaggctgggtgcgttggcctcctgccaagccaggaggcttttagcccaggagtttgagaccagcctgggcgac

SEQ ID NO: 97982 - DNA, 122 bp, Homo sapiens
ttcgcgggcagccggctccgtggacagcagggcgaagcgggtaatgtaggggtgcagcaccggcaggaggcgcctcagagccatggtgggcaaaagatcccttcttaactgacaagtggcca

SEQ ID NO: 97983 - DNA, 122 bp, Homo sapiens
ccatccagacccctactaccctgtgaccttgggttaggcagtgactttgcccgtggtggccgtcactaaaatgggaataataatacgtttcacgtactgtaatcttaattaacatttgtagc

SEQ ID NO: 97984 - DNA, 122 bp, Homo sapiens
taagcctttcccattcatcatactccccaacactgttttagatcttccagtcctggttttcggataattccaggtgcactatctcagaggtataaaaattcccaaaatgaaattaattttaa

SEQ ID NO: 97985 - DNA, 122 bp, Homo sapiens
agcagctccaggaacagctcactgtgcagtcccagcagcaggcggtgggcgtggaatacccggacctcatcggtgcccgcagcctgcacccgcagaaccacatcgctggcgttgccctgccg

SEQ ID NO: 97986 - DNA, 122 bp, Homo sapiens
catatatccctagggttgcaagacctctgtaaaatctcctggctttactgagaaataaaccgacacgggatgggagctggggcggaataaagctggcacagcctcctgcgtagcgcttggca

SEQ ID NO: 97987 - DNA, 122 bp, Homo sapiens
ttcttctgggacctgcccctccagtcacagctgctggtccagggcagaacacctgactcacgctgggccactcctgaggtgggtaccagattcaagccaggctaaactggagtccttctctt

SEQ ID NO: 97988 - DNA, 122 bp, Homo sapiens
ccctggggaccccagcctcctgcaccatgtcgcctccctgggggccccagcctcccgcaccgtgtcgcctccctcgggaccccagccctgcgtgcccagcctgaggacacagtcctctcctc

SEQ ID NO: 97989 - DNA, 122 bp, Homo sapiens
aagatcattactccacgttattgctctgtttcagataattgccagagaaaacgctaaggtcggtaatgaccaaggtaaggaaatatcgctccctgcacggtataccatttatatattgcata

SEQ ID NO: 97990 - DNA, 122 bp, Homo sapiens
agctgcccgagcggggtggcagggtcgtggccagggtcagaggcactaaggcagtgagtgcgctgtgcctgcggggccggagaaaagtcacctgatcagtctcgcttgcagctcgcactagc

SEQ ID NO: 97991 - DNA, 122 bp, Homo sapiens
gcagagaggaaggctgcggaggcggcgcggatgggcaggcggatcgtggagctgcaccagcggatcgccggctgcgagtgctgctgagccggcgaggccgcgcgggtctggagcggagcgcg

SEQ ID NO: 97992 - DNA, 122 bp, Homo sapiens
cccctcccgtcggctcattcagccgcggaagcccctgggagaccccgccccgccccgtcccgcggtgccccccgcgcactcaccctcgctcacccacgcggccttcctggcgggagagcgct

SEQ ID NO: 97993 - DNA, 122 bp, Homo sapiens
ttataacacatttcaaatagggacctttgacagggcagaagcatgaaaggacaccaaccacgagtgacacactatactatggctgtcctgtgtcacatgctatttggcctggggatatagca

SEQ ID NO: 97994 - DNA, 122 bp, Homo sapiens
acaagtgagtcatctccccactggaaaaggatcagacagaagctttgccccggtgggccccgggcacttctgagcagctgagaaaaaacaaagacagagaagccagcagacccaggcccctg

SEQ ID NO: 97995 - DNA, 122 bp, Homo sapiens
ttctttttttaatcttgttgcctctgagtagtagactcttcaattctggaatttggttgccgaagactctaaaggagagactcactcagtaattcagtgactttagaagcaagctgagtatc

SEQ ID NO: 97996 - DNA, 122 bp, Homo sapiens
acttggccccgactgctgaatggaatgagctccctctgtatttagatccactttgctgggcgctactcagggagagaagcaataattacaagttcctgactggctgacccaatcaaaagcat

SEQ ID NO: 97997 - DNA, 122 bp, Homo sapiens
gcaaagttccccgtacgtgcgccgtacgtgggcgcggtgccccagcgctcagcgtttcagcgagtgagtgggctccgtgcccagctgaagtctgggaggggcacttttccaggcggtcgcgg

SEQ ID NO: 97998 - DNA, 122 bp, Homo sapiens
cctttggtgctttagaaatgtggttttgagattaagtcaaatcaataagtctttattgagcgtgtgttaagtacaatagcacagaccaaagcgcaaagagattctggggatttcgacttatg

SEQ ID NO: 97999 - DNA, 122 bp, Homo sapiens
ctcacaggcagctgctcttcctcatggctgccccagagctcaaagcctcacaggcagggccggccactcacctgtagctctgggaggcagagcacgtctcagagggaaataaacaggagttt

SEQ ID NO: 98000 - DNA, 122 bp, Homo sapiens
ccaggccccgttagccacccagcttcagcttcgttgtaacaccgcgtcgttagcggagcacgccgtggcctcagtgcccgggctggagaaacacaacccaactccctgcagaagggcacgaa

SEQ ID NO: 98001 - DNA, 122 bp, Homo sapiens
cggtgcacggcgactccggggaatggggttcccacagctcctcggcttccataaaggccacggcgggctctgcagggcaagctggcctctgcgatcactgcgcagtgacccctcacaagtag

SEQ ID NO: 98002 - DNA, 122 bp, Homo sapiens
gggcctggccatcatcgtctgtgacgacctgcggccgcaggggccggcgctgtcgcagcccgtccgcctcgctcatggtacgggcgccagcctcacccgcagaaaccacctcacactgagcg

SEQ ID NO: 98003 - DNA, 122 bp, Homo sapiens
caagaaatcatgatgggaataatatcttttcttcttttttgagacaaagtctcgctctgtcgcccaagctggagtgcaacagcatgataatcagctcagggcaacctccacctcccgggttc

SEQ ID NO: 98004 - DNA, 122 bp, Homo sapiens
acacagaggacagcggcagcgacgagaacctggatcaggtgagggcaggccgcggaggcgcgggccggcggagccagagggctgtcggggccgcgggagccggagacggccgggcctggagc

SEQ ID NO: 98005 - DNA, 122 bp, Homo sapiens
cgcattttgaaaacacagcagggaaatggtggggcagacacttctcatcctcctctcagccgcatctcgcccaccttgcttctctctgtccgggccctacttctctccctgctcatcttttt

SEQ ID NO: 98006 - DNA, 122 bp, Homo sapiens
ccccatgtccttgccaacagtaagttttttacaatagccatcctaatgagtgtccatatacggtttttttttttttttttgaaacggagtctcgctctgttgcccaggctggagtgcagtgg

SEQ ID NO: 98007 - DNA, 122 bp, Homo sapiens
gccggcgctccgtgtgtggggctgggtggctccaccggagctgtggccactgcgagaccccgaccccttgctgcgtccactgccggcctcacccccgtgcctgaggaggctccccagtgtct

SEQ ID NO: 98008 - DNA, 122 bp, Homo sapiens
acaaagggacaggggcctgggaggccttttgagaagctctgagcagagctaggcgtgccccgatccggcttgaggagcccagctcctgttcctccccatgtgggaaagagactggccccgcg

SEQ ID NO: 98009 - DNA, 122 bp, Homo sapiens
cctggtgcattgctagaagaaaccctgctgagtaagagcaaattgtttttagcataccgccgattttactttccagtatttaaaaatgctgtgtatccttttaaatgaaaacgacttaaaaa

SEQ ID NO: 98010 - DNA, 122 bp, Homo sapiens
ctgggcgcctttctatctccccaagttcaccttttccagttggtcaaagcgattgctgggcgccttctatctccccaagtccacctttttccattctcatctgaaagccagccccaaagaaa

SEQ ID NO: 98011 - DNA, 122 bp, Homo sapiens
gggcggggtgggcgcggacgcccctcagcacacactccgcacccggccctgcaggaagctcgcgctgattgacagctgcgttgtcccaaaaaggctcagcgaagatgctgatctgcgggtgg

SEQ ID NO: 98012 - DNA, 122 bp, Homo sapiens
gggctcggctgagcgtgtgcggagcgagacctgggcaaccggggcgtggccaggtgggggcgtggccagtgggagcggcaggtggggcggggctcgtcggtcggggcggagccaggtgaagg

SEQ ID NO: 98013 - DNA, 122 bp, Homo sapiens
tgaggtcggaagttcgaaccagcctgagaaaccccgtctctactataagtacaaaattagcggggcctggtggtgcatgcctgtaatcccagctactcgggagtctgaggcaggagaatcgc

SEQ ID NO: 98014 - DNA, 122 bp, Homo sapiens
tctctgagggtaaagccggtgggaggctcagcaggccaggaggcccaaggacaggacttgcgaccttgaagccaaaggaatctcacttgtggggcctccttgtcagctctgctgctgtctca

SEQ ID NO: 98015 - DNA, 122 bp, Homo sapiens
aatggccgtggaggagatcaacaacaagtcggatctgctgcccgggctgcgcctgggctacgacctctttgatacgtgctcggagcctgtggtggccatgaagcccagcctcatgttcctgg

SEQ ID NO: 98016 - DNA, 122 bp, Homo sapiens
aggcctctgctgctggtttatttatctaaggattgcagcaagattttttacccttccctccgaaagtcatgaggccttagcatggagaagccagtgcctggatggtttgtggaggttgaagg

SEQ ID NO: 98017 - DNA, 122 bp, Homo sapiens
ggctgcagctccctcatttgaagttgcttcctcggcggcacctgggacgccccccatatgcgccatagccttcgtggtaatgacacagtttctcgttcgcttgcttcattaaatgtctacct

SEQ ID NO: 98018 - DNA, 122 bp, Homo sapiens
tggtgccctgaggaagggtcgtgggcatctcatccagggcgtagcgcaagaggccatgctcgtaaaggatgaagaactgtcgctgccatttcggagaccggtgcactgagttgtcaaagtcg

SEQ ID NO: 98019 - DNA, 122 bp, Homo sapiens
atctgctcctagcctgatgggctcccgtgtccacagggagctgggaggcatccattacgccggaccaaggagatggagcgtctaggaaatatgttaatgccggagccctccccgccggcccg

SEQ ID NO: 98020 - DNA, 122 bp, Homo sapiens
cgtgatcaataacccactggtagaacttcttcctcttcaaccctgggctgcggaccggggcgcaggatccccattcgaaactgttggttctggggctgtttcccattctccagagaaagtgc

SEQ ID NO: 98021 - DNA, 122 bp, Homo sapiens
ccagcaggtggaggtgtggggagggagtcagtgggctaggttcgctgggattgcatctttcgtttcattaacctttatagaagtgcagggtggggctttcgctgatataggacatctctgaa

SEQ ID NO: 98022 - DNA, 122 bp, Homo sapiens
taactgcaagatctcctagcggggatgggcggggccgcctgtgcagatgccaggagggctcgagctggacactcctggctggacgccaggccagtgccgcctacgtggagactgtccacaca

SEQ ID NO: 98023 - DNA, 122 bp, Homo sapiens
caggtgcttgtctattccggaaaatttatatcttgcggttttgtggttaagagaaaatgacgctaccaatgaaaggtccccttttaggcccccagggctgggctagcaggccccactgtggt

SEQ ID NO: 98024 - DNA, 122 bp, Homo sapiens
agtatatagtcattcagtgacagagacgagcaacgacagctggcagggagtggggtggcacgcatgaagatcacaaaacagccattttctatagatcgcttgtttcaggaagtgctttctgt

SEQ ID NO: 98025 - DNA, 122 bp, Homo sapiens
ctacagcggcccctggcggtaggaggactcagggggcggcctctgccgccggggtggaagcgatcgattgggtcgctggcagagtctagcacagcgcccggcacatagtaggctcttaattc

SEQ ID NO: 98026 - DNA, 122 bp, Homo sapiens
ctgtgttcaattctactaagcattgccaagagccatgtttctttgagtgggtggtcaaagcgttgtgggacagggaaaatggacatgattcctttaaagcaaaaaaagaaatactacagaaa

SEQ ID NO: 98027 - DNA, 122 bp, Homo sapiens
aaaactcaatattgtaactttataattcatttcacctttgtccctttaaaaaaatgttgacggtcacatcaatgaaattgtttctcctgaacagagagctctgagttaatagatccacacta

SEQ ID NO: 98028 - DNA, 122 bp, Homo sapiens
tgaaaccaggaagtggacgggaacctagtttggccagtgggatactgctggttttgacaacgaggaacagaaactgaagtttctcaaacttactggtggcttcaaaaacctgtccccttcgt

SEQ ID NO: 98029 - DNA, 122 bp, Homo sapiens
attggggaggtgtgaagatagctagcaatacacagcagtgggaggtgtggctgcagggagcgggcggctcttccaaccccgccaccgccaccgcgtcctgcatgcccacccccgtgcaggct

SEQ ID NO: 98030 - DNA, 122 bp, Homo sapiens
acagccgcactccagggacagctacacccacacacccgcacaaagcctgccagggtggggcgcggggggctggcgaaagccccagaaatcggccgtaagaagagccctgccctgaacccccc

SEQ ID NO: 98031 - DNA, 122 bp, Homo sapiens
ttgatcagagagcgtgtccgttgtgatcccagtcctttgaaactgtgaagcctcgccccgcggcctgccgcaggatatgttttggtaaatgtagactgtgcacttgagaagaatgtattttg

SEQ ID NO: 98032 - DNA, 122 bp, Homo sapiens
tcctcagtgtgccttctccctctcttctcttctaggacactgatcattgcattgagagcccgccctaacccagtatgatctcatctcaaaacccttaacttgattatatctgcaaagaccct

SEQ ID NO: 98033 - DNA, 122 bp, Homo sapiens
cagagggagggagctaagggcgcctagcgacacccccaacctcccactcctccctcctcgcgttcttccccacggtcccccgcttcgcccgactccggccatgtagcgcgcacgtcagcccg

SEQ ID NO: 98034 - DNA, 122 bp, Homo sapiens
aggagtgccacagctgcctccccatatccctggtctaggagctcctggccactccctgcccggaagtccttcatgaaactagctgtgggctctcccagttgagctaggtcctgtgccctcct

SEQ ID NO: 98035 - DNA, 122 bp, Homo sapiens
ggtggaaggcacaaggcaggaaattgagacaaaaggaaggagtgagctccaaaggcaatccgatgtttgccaagtggctgcattgagccttctagccttgctagtggttgatgctttttgta

SEQ ID NO: 98036 - DNA, 122 bp, Homo sapiens
gttcccttatgtatcacccttagcctccctctccatgcttaaggtgagggggctggactgcgtgggctctcagctttctccagttctaaggggtttgaaggttcatgggcaaagaagccaga

SEQ ID NO: 98037 - DNA, 122 bp, Homo sapiens
cgggtccggccggcatgactgcgacgctcagggctgccagtccgcctcggtgtcggtgagcggtgccgcctcaagacagcctccccgctcggtcagtacgacgagctcgcaagatggcggcg

SEQ ID NO: 98038 - DNA, 122 bp, Homo sapiens
acaaaaacagagaaaaacaagacagtaatggctcaactcacatagcaccaacgggcgaagcgttcttctgagcgctttccgagtcatcggtcctcagagcagcccctgaggcccgcaaggaa

SEQ ID NO: 98039 - DNA, 122 bp, Homo sapiens
ccaagatttacaccctgggttctggccagatcctgggttccacctagaaggaaatctgcccggccagggtgaacggccgcaagtgactggtttcagggtccatcccagactctcccctcttg

SEQ ID NO: 98040 - DNA, 122 bp, Homo sapiens
tcggaggcgggacccaaagtaggctaggcctacggaagctgggtcttcttgctgtgaggtcgcgttccccagtgttacggagggtccttgaggcaggagtgaaaattgggtctgggggttag

SEQ ID NO: 98041 - DNA, 122 bp, Homo sapiens
acagcagctgttaaaaggctttaaatggagaatgtgcctggcatgttcaattacagcagacgtgtgtgggtctggcacagaaagaacaaggggaaaagaagaaagaagtattaatagacaaa

SEQ ID NO: 98042 - DNA, 122 bp, Homo sapiens
ctctcccgcagatgtgcactcccagcaacacccctgccacgccgcccaacttccccgatgcgctggccatgttctccaagctccgcgcctccgagggcctgcagagcagcaacagccccatg

SEQ ID NO: 98043 - DNA, 122 bp, Homo sapiens
aagtctctggacctgaaggctcaaggaacattgattaaagtggaccatcctcactggtgccgtggcttatacctgtaatcccagcactttgggaggccaaggcaggaggattgcttgagccc

SEQ ID NO: 98044 - DNA, 122 bp, Homo sapiens
tttcgaggaacgcgccaaaaactgccaagggctgtgggaggtgtgttcttgcgtcatttccgagagacttccgcgccgcagtttccctgcttccccagctccagaacttccggccagcgcag

SEQ ID NO: 98045 - DNA, 122 bp, Homo sapiens
atgaaaaagtactaactaaatatcccgcatgatttctgtaggacatggaaaccatatcaccgtcccttcccacctgaatttatgtttaactgtgtgatgcttcatgtccgagatggatcctt

SEQ ID NO: 98046 - DNA, 122 bp, Homo sapiens
aggggtgctccgaacgctggtggagtggtgctccgacatagggcttctctccgttgtctccgcccggctcgaggctccctggcgggcgtgcctcacagggagcacaggcctgggtcccagct

SEQ ID NO: 98047 - DNA, 122 bp, Homo sapiens
ttctgttttactaaactgtagcaccttttgcaaatattgctaagtggtcacctccagcagcgaggtaggatgtttgaaggtgagacctctcaccagagtgcactaggttcaaatctcagccc

SEQ ID NO: 98048 - DNA, 122 bp, Homo sapiens
gcagtgcccaccagccacccccaagcccgaccagcactgctctgtgcacaactaatctcccgtacccttggctgctcgttcttggctgccccaggttccaaaatcccccctgcccagctctc

SEQ ID NO: 98049 - DNA, 122 bp, Homo sapiens
taggtgtgcatggggaggtcctgaaggggaggatgggtggagtgatttggtgatttggggcgaggggctgtaggttggatgtaaaggaatattcagtcagcctgaaacttattaaaacatct

SEQ ID NO: 98050 - DNA, 122 bp, Homo sapiens
gcctatttttaaaaatgtaagtccttcctttgaggccccccggaactggcagcaggccgacgggcaatcgttcctctggccgcacactttcaagtgaccgaatgtacccaaactgtttgata

SEQ ID NO: 98051 - DNA, 122 bp, Homo sapiens
agtagtaccatttcatttcttttaaagttgaattaatagttttactaaacactatgaaaacgatcaataattgcatttcctgaggcatttagcccaagaagtgcttttaaaaggtatatctt

SEQ ID NO: 98052 - DNA, 122 bp, Homo sapiens
ggggaagaagaaggccaagtccaaggagaccgccgggctggtggagggcgagccgacgggcgcgggcggcgggagcctctcagcgtcccgggctcccgcacgcaggctggtcttccacgcgc

SEQ ID NO: 98053 - DNA, 122 bp, Homo sapiens
cttgatccttttgagcagtttttttctgtgctgagctctctggaaccatatgttcagcaacgttatggagggcgctggccttcggcgcagacccagctgaaaccgtaaaatgctcggtaaaa

SEQ ID NO: 98054 - DNA, 122 bp, Homo sapiens
tgtgtgtgtgtgtgtgtgtgtgtgagcttgagattccaagtatgtgggggagggagggggcggtgtcggagatcaatccctgggccatgtgtttatagtgtgtgtgtctgcccagaagagag

SEQ ID NO: 98055 - DNA, 122 bp, Homo sapiens
taattgttggctttttacctactgccctctgtctagtgtggtatcttatttctttgtgttcgtcctgctcttcaaagttctttcctggctgaggatttggatttggatttggagctgtcatt

SEQ ID NO: 98056 - DNA, 122 bp, Homo sapiens
ggagggagggacgggcgcaccgaggaagggcgggggcctcccaggctagggtttcgcggccgcttcgggggatagagttgtcccctgtctcgagttccgtaccatccccctcctcgggccgc

SEQ ID NO: 98057 - DNA, 122 bp, Homo sapiens
ggtggcgcagggcaccaagaaggagggctgcaccatcctcttcatggtgctctacttcttcggcatggccagctccatctggtgggtcattctgtctctcacttggttcctggcggccggca

SEQ ID NO: 98058 - DNA, 122 bp, Homo sapiens
ctggatgaggcgcagggccccgggaaggatgtcgtccgggtccacggaaatgccgaagtacgcgacggcggcggccctcggggggcccggcggctcccggcagctggcgctggccgccgcct

SEQ ID NO: 98059 - DNA, 122 bp, Homo sapiens
tgtgcggggggtaattatgcattgtgatgatgtgcactcacccagagcttccgcaggtgccgggagcggaccatgtcaggagtgtcatacaggaagcagccaaatcccttcaggacctgcaa

SEQ ID NO: 98060 - DNA, 122 bp, Homo sapiens
aaaggccctggacagtgcagagcgggtccacagccattggtggccccggctggtgcctcacggccacttggctctccaacccgagggtggaggtgtcagcggtggcggcggggcaacgcaga

SEQ ID NO: 98061 - DNA, 122 bp, Homo sapiens
acacacatgtgcacacacatcttggtgtgtttagaaagtaccaaggagaaggtgctgtctcgagcatgtggttacctggttgtgtttatagataacaataagagctaccacttatgaacatc

SEQ ID NO: 98062 - DNA, 122 bp, Homo sapiens
gattctttaacctgaggatccctttcccaggtatatggaaccctgggaggaatgctgactcgacagccttttgccattggtggctccggcagcacctttatctatggttatgtggatgcagc

SEQ ID NO: 98063 - DNA, 122 bp, Homo sapiens
gcgtggcagaagcggtcgtcaggggcgtggcggcagttacttgggcggggccggtagcggcgggagctgcactggccaggggttccggctgtatatccatgagcgccgctggcagccgggga

SEQ ID NO: 98064 - DNA, 122 bp, Homo sapiens
tttccttggagcgcacacggtgaacctggctctcgcatacagtagcactttcattttaagcgccccagccacgcttccctaataacagcctgggaactgcaaaacccctgtaagcccagccc

SEQ ID NO: 98065 - DNA, 122 bp, Homo sapiens
ggaatgttgactttttttttgagtgagatgagctcttctcatgccagttaactctcatgtcggtgacagcacaatggagaaatattaggaaatctgacagggagaaacattcatgtctgata

SEQ ID NO: 98066 - DNA, 122 bp, Homo sapiens
cgtgggcgctggaacttgctggaagaccctgcgcagcagtgctgtgctctccagaagggacggtgagcgggggacgtagctgaggaccggcgaggcagagctccgaggcctggcgggctgct

SEQ ID NO: 98067 - DNA, 122 bp, Homo sapiens
ttatgatttccagatcacagagaggaaactaaagcacagagaggttgggttacttgccaacgacaaaaacccagggaaacaacctgcctctgtgatgtcccactggcattgtggccagcact

SEQ ID NO: 98068 - DNA, 122 bp, Homo sapiens
ccccctcccccaccagccctacctgggccgggggttggggggtgcacatccactcaggctcgcggctctgccgcccctcacccccaggtccctcgcgccctgccttcgggcccctacaaaga

SEQ ID NO: 98069 - DNA, 122 bp, Homo sapiens
gaaagtaatggccaaccaatttgcaaagtgaaagcattgcttggaaaaattacctgaaatcgctacaattttgaacacgcacacacattaagatacatacacatgtacacatatatgtgtgt

SEQ ID NO: 98070 - DNA, 122 bp, Homo sapiens
tttggtggccatcttcactttcttggctcgagttgcagacatgctcctctcccttagcggcggcagcagcgacggctcgggctcctcccctcacacttcggcagcccggcctccgcccgccc

SEQ ID NO: 98071 - DNA, 122 bp, Homo sapiens
acatgtatcctagatgtatgggacatgtgggaaagtgtttaaccttctgcaattataagacgggaggatggccagatgcagtggctcatgcctttaatcccagcactttaggaggctgaggt

SEQ ID NO: 98072 - DNA, 122 bp, Homo sapiens
gagaggggccctccgagttctgctgtcacctgggggcgcctcacttcattcagccagtggcggggctccctgggtcggcacagagtcaggggagggggctgggggacctcctggtgggaaaa

SEQ ID NO: 98073 - DNA, 122 bp, Homo sapiens
tgtaaataaataaataaaggaattccaaaggtgtccagttcccagaaatgcccctgcactcgggatggcttgaaacaggagctccaagcatctccacctctccctccagctcacctccgcct

SEQ ID NO: 98074 - DNA, 122 bp, Homo sapiens
cagcgtgtagctaggcaggtgccgctgactgttctagaactagatagtaaggtggactgccgttaacctgagtgtccacaacgcagtctcggaagataaggtcaacactgcagcacttgctg

SEQ ID NO: 98075 - DNA, 122 bp, Homo sapiens
cccaggtctgtgctgagcagaacgcagctccgccctcgcagtaccctcagcccgcccgcccgggtctgacctgagcagaactctgctctgccttcgcagtaccaccgaaatctgtgcaaagg

SEQ ID NO: 98076 - DNA, 122 bp, Homo sapiens
cccattcccacccagccctggctgtccagtctttgggttaaagagagccaatctagatctcgacacgtgcctataaaacacatccccctgccctggctcttcataggttgggctttgctttc

SEQ ID NO: 98077 - DNA, 122 bp, Homo sapiens
cgggtatgccttgcatgatcgcggggagctccttcctgtttttatcccacctagagaagccgggaagtaggggtttaggtccaatttgttggagtacttaaggactcgtttgcactttcttt

SEQ ID NO: 98078 - DNA, 122 bp, Homo sapiens
cgttgctccccaatcccgcagctcgccgcacccgctaacccggacgctccacgtcagccgcgccgccgccgcggggtccgccccacctcacaccccagagcacgcagctccgcccaccgctc

SEQ ID NO: 98079 - DNA, 122 bp, Homo sapiens
ggtcttgtaccatttagttaatctaaaggcaaccctgacaaatataaacattcagaacatcgtctgggatgtagtcaagtatcataaataaatatttctattttctgttttgtatgcaacaa

SEQ ID NO: 98080 - DNA, 122 bp, Homo sapiens
gcagagaaattaatacttgccctgagcttggaaatcaacaatcccaggaactgcgcccgccgggggttcagacctgaacctcgccgtcaggcgcgctggcgaacctgtagttcgggcctgta

SEQ ID NO: 98081 - DNA, 122 bp, Homo sapiens
gaagccatggacgatctaccggcatgggcaggacccagcttggtcagggtgtccttcacgcggcctctaaccagcgattcctcattgggtgtacaggcttaagggctctgcaaatgttgggg

SEQ ID NO: 98082 - DNA, 122 bp, Homo sapiens
ctgcaggcaggatcagcggtgttcactcaagcggacctgctggagctcatgcttgtgatccggggttttggcagagagctcggtgtgaggctgacccctgacttcagggacagcaccaggcc

SEQ ID NO: 98083 - DNA, 122 bp, Homo sapiens
ggagaatacgttcgtttgcaaattatctgctgactggcacctctcctggggttaacttgccgctgccacctacgcgtgagaaacccacaatcctcaactatttgtcgcttgcagcctgaaag

SEQ ID NO: 98084 - DNA, 122 bp, Homo sapiens
ggcggaacacagagctgccaaggacactgcaaggtcacatgtcatgtggttgacagcctacgctggggggccttggcctgaagcctggacctcaaccctcccctccacggcatgcgtattgc

SEQ ID NO: 98085 - DNA, 122 bp, Homo sapiens
cacccagcttacttgggcagtttgggagggaacacctgtcctccgagggctgctgagaggcgagtcatcagacagccagtgctctgtccccgctgtggtaggacataggccatgatttctgc

SEQ ID NO: 98086 - DNA, 122 bp, Homo sapiens
gtggcttagttttgtgcagtgatgaatccttaaggaattcaatatgcttggtggaaaaaacggttccaacccatgtctgtgacacagaataaaggtcaggattatagcctcaaacacatcta

SEQ ID NO: 98087 - DNA, 122 bp, Homo sapiens
tgcgctcaccgcgccccgtcaggcccctcctcctcagcagcaagccccgcctccgcctcccgcggcccaggctccggcccggcacacctgcatcttcagcagctcctcctccaccagccgct

SEQ ID NO: 98088 - DNA, 122 bp, Homo sapiens
ctcatcccctcacgcttcccatgaactaaccttgaaggacccgaccagagccctgacctccgtcccacacacctgctacatggaaggtgttctccacatcagttcaaggcagtgtcactctt

SEQ ID NO: 98089 - DNA, 122 bp, Homo sapiens
aaactcctctccccaactgaaacccagaactgacttcctagagattccaaggcaggaaagcgagctggctgcacttcaaacctgccactgctgaccccagaacccgctccctggcccctctg

SEQ ID NO: 98090 - DNA, 122 bp, Homo sapiens
acgtgagcaaaaatacggcctgcggtgggtgtgcgaccccacacagaagggcgagaggctcgtgtgccatcccacacactgggagccacccacacacccaggcatccagcagccgccgaggc

SEQ ID NO: 98091 - DNA, 122 bp, Homo sapiens
tcaataggagagagaactacagctcagctgccagctgaccgcgggagataatgccttgtgcgcacgcgcttgctcagaaggcgccgttcgccggctacctgttggtgtgtatgcagagcatc

SEQ ID NO: 98092 - DNA, 122 bp, Homo sapiens
tctggaagcataatgcctcctttggttacagtttcagcagcacgcctttcaaccaaaactcggtcaaggagtggaagaaactttctaaacgcttggcttgccatgattccctccacctcaga

SEQ ID NO: 98093 - DNA, 122 bp, Homo sapiens
tgtaggtgtctcgagataggacattccatcctcatgcctgtcatggtaagtggagatttgcgatgggtgaaccgggacactcttgtcaagagacaggctgaagagagagtgaagagaaggaa

SEQ ID NO: 98094 - DNA, 122 bp, Homo sapiens
agaaggctatcgggacatatttttctcgaaggtgtgacatcacaaataaaagaaaattaacgtatagtgaaatcatcactgtagttagagtcaaaatgccttgcctgtgttccaaactttgg

SEQ ID NO: 98095 - DNA, 122 bp, Homo sapiens
acactcttcacgttttgtgacatatgtgcttgtcgagtgatcttaagacagctggatgtccgaaccatgcagtaatagcagagaacctgcggaaggagaagcttcccaggacgttctgaggg

SEQ ID NO: 98096 - DNA, 122 bp, Homo sapiens
taggatgagaattattttggctgtgctgtccccatggcccctactcctgaccacatactccggtactctcgccctgagtccctgcttgcccccgcctacctgaccatcccaggtaggagtta

SEQ ID NO: 98097 - DNA, 122 bp, Homo sapiens
tcccgcgccggcgtttctcacccactgtcaggaggctgcccgagggactccgagggcctgcggcatttagaggctgtctcagagcccagaggcacggctgctgctgcgatcaatgctgagcc

SEQ ID NO: 98098 - DNA, 122 bp, Homo sapiens
ctgccacaggggctgggtttctggaatgttctttcatcccctgggagtcctgggctgctccgtccggccctccctccgtgagaaggggaagccgaggcttggatgagctgccctggccggct

SEQ ID NO: 98099 - DNA, 122 bp, Homo sapiens
cggatgacatttcaattccagtctgctctgcctaatgccttcgtttcctactctgtaggacgaaagcagccctctcatcccacaggttcagaagaaagctcccctttgcaggcagagatgcc

SEQ ID NO: 98100 - DNA, 122 bp, Homo sapiens
attggtttgcagatggcgagcgatgttgcttctgctcgcagtccccatttctgtgtatgccggggcgggttggggtgtgtatttgaaaggaaagttggctttcttttttcagaagggaagaa

SEQ ID NO: 98101 - DNA, 122 bp, Homo sapiens
gacggccggcgtccgactcctcccatgtagtgatcggtttaggtaggtcggcctggtccccggcggaggttacgccttccctcatccccggtagaggcagggcgggactgttgtggttgaga

SEQ ID NO: 98102 - DNA, 122 bp, Homo sapiens
tcctccccaagctctgtcttctggcaacctgcctggttgccgtggaaacaggttccactgcggacaaaggagggagctgggtcctgcttcctcctggtcttgtcgatgaggatttttagacc

SEQ ID NO: 98103 - DNA, 122 bp, Homo sapiens
gcctaacccctcagccccattctgctgagtccttgaggccacctccaccaaaagctactgcgcatggctttatttatcacagattttcaagttcacaagcaaaacacagggaggagttgaaa

SEQ ID NO: 98104 - DNA, 122 bp, Homo sapiens
ataattaagttcaatctcttcaaaaaactagcagaaaggctttctgacctcagtctcaaccgatagcctgtttgcctcctatactccagatgtatttatggacataggtaggctcccagatc

SEQ ID NO: 98105 - DNA, 122 bp, Homo sapiens
tctcagtgatgacccaggccaccttcttcaggattttagtgcaaatgcggcccatattggcgggtacttggtaaaagaatgtaatatattttgaaatcacaaagtgtcggctggagtgactt

SEQ ID NO: 98106 - DNA, 122 bp, Homo sapiens
ccgagcagtgtggacatcagccactttttatattcatgtacattcacctggggaaaaaaacggagggactttgctacttgtaaaaataacataataaatagatcttaaacataggaaaacca

SEQ ID NO: 98107 - DNA, 122 bp, Homo sapiens
aaactgaggtccggtgcgggtggaggctttggtctaggctggctcttcctgccactctagcggctgaaagaagcttgctcctcgcgcccagcaggggctggcggcgcgcggcagagctgggt

SEQ ID NO: 98108 - DNA, 122 bp, Homo sapiens
gaacccagctcgcagccacgtggggaagcgcggccctgccctcaggccccgccccactcacgcgtcaggccccgcccaccccaccgccccccgctcccgcgtccaggctccgccccgtcccc

SEQ ID NO: 98109 - DNA, 122 bp, Homo sapiens
ccccctctgtctgcgctcccgctcctcccagcccctccctcgcggcggggcgggaccaatcgctccccgagccgctcctgacccacctaccccagctctcgcgccgcgtgcagaggtgctca

SEQ ID NO: 98110 - DNA, 122 bp, Homo sapiens
gcagtttctggtttgatttgttgttgggatttccagtgttgcattaaaactgcaaatccccgaggggctgtaatgtgcaataactaaaaatgtagggcgagtttaggtgcagcttaactcaa

SEQ ID NO: 98111 - DNA, 122 bp, Homo sapiens
gccttgtagagactgtttcacagtaatcttgtcgaatccagtgggagaacgtagcaaaagcggagctggaagtttcctggcgtccctaacaggagagtagcgctgagagagttgaatattgc

SEQ ID NO: 98112 - DNA, 122 bp, Homo sapiens
aaaaaaaaaaaaaatccataaagccggggaccatctttgctccagggaggtcagctgacccgggctggcactggccctggcgcagttcccgcccctcccgggagcgctggcaccgccccttg

SEQ ID NO: 98113 - DNA, 122 bp, Homo sapiens
cctccccggggtctcgccagccccttcctgcagccgccgcctccgaaggagcgggtccgccgcgggtaaccatgcctagcaaaaccaagtacaaccttgtggacgatgggcacgacctgcgg

SEQ ID NO: 98114 - DNA, 122 bp, Homo sapiens
tttgcatatttctgctttccaagggccaatatgatttccagggcttgatctagattttctcgtgtgattatatcatgtttctcttgttcctttcccaagtgctactggcgggacgtgtggaa

SEQ ID NO: 98115 - DNA, 122 bp, Homo sapiens
ggcagaaggataacttgggcccaggagtttgagaccagcctgggcaacatagcgaaaccccgtctctccaaaaaataaaatattagcagggtgtggtggcatgcgcctgtagtcctagctac

SEQ ID NO: 98116 - DNA, 122 bp, Homo sapiens
taaaaaaaaaaaaaaagccagcgccgccttggctgtgggttggtgatgctcaccacgctgcgaaaccctgtggtttgcattcagtgtgattcgtcctgcctgctgaccactatgctgggttc

SEQ ID NO: 98117 - DNA, 122 bp, Homo sapiens
ggtcataatcttagcatcagatggtctcaatctctgtatttaattagagcagcctggaaccgtgtggttttgagctctagaaaccagaattcagatgaagaaggaatgtgaggggccaggga

SEQ ID NO: 98118 - DNA, 122 bp, Homo sapiens
cagctaaattagcagtgcgacgcgtgttttcttttcattgaagaattcagccagttaaaacgagtctaaatggaagtctgaaagctttttcttcattgttgaggaataaaatatttcgtgta

SEQ ID NO: 98119 - DNA, 122 bp, Homo sapiens
gtgcctatagctttgacagccgcttggagcatgctcagtcggtctccaggcaccgggaggcggctcccccccaccaccccccgggccggcctccaccgcagcctgtccggcccccacccctg

SEQ ID NO: 98120 - DNA, 122 bp, Homo sapiens
cctgccctattataaataaaaagcaatgtggttatctagcctctggagctggactgcctgcgttagaatctgagctgtggcatttattggggtgtgttgcttattctctttctgtcagagaa

SEQ ID NO: 98121 - DNA, 122 bp, Homo sapiens
atcacaatagtcctgtgagctcataggatcataattattgccatttggagatgaagaaaccgagacagagagaaatacagtcactttgccaaggaagtgcctttgatattgagtatgggaat

SEQ ID NO: 98122 - DNA, 122 bp, Homo sapiens
cggcatctgtctgagaccggcatttttaacgaggtgttgctgttgatcactgcactggaacgtgcttgggaagcaaggggtgctgcctgcgcactttgcactctgacctcgtgctcctggct

SEQ ID NO: 98123 - DNA, 122 bp, Homo sapiens
ctgccacgccgccggttcagctccgaggccggtaagtgaccttccggactttcgctggggcgttcttctgggagacgtagatcctgtttctggcaggcgaaaaccacgcgatagcccccgcg

SEQ ID NO: 98124 - DNA, 122 bp, Homo sapiens
tcggaggatgcgagtctcggctcacgtctgcctcgcagctttcctccgaggcctggaaggcgagctagcctttgccctggcagcaccctgccccagcccagccatcccccgccaccaccatc

SEQ ID NO: 98125 - DNA, 122 bp, Homo sapiens
ccgacttgggaagcgtcccgcccgctagcccgacccctcggcctcccgccccgcccccggcggcggaaccccgccccttgagcgcagttgtcccgtccgccgccattttgggaaggtcgacg

SEQ ID NO: 98126 - DNA, 122 bp, Homo sapiens
gccgggagctgcagccaatgtgttaggacttcaggtgcttcttggcacaaagctagactgcgacctcctaccatagcgcttggcgtcacctgctctcccggtcctgccccagggccgaggga

SEQ ID NO: 98127 - DNA, 122 bp, Homo sapiens
ctatcgagcgggtcctgagggattacagcgacaaggtaaagagtcctggccccgggcgtgcggtatcgcacccccgggccgccctccgtgcttgcacatcgcatccttccccacccccctca

SEQ ID NO: 98128 - DNA, 122 bp, Homo sapiens
gcctgcctacctctgggctttgaaccccgggtctggtgacttcgcttaaagacctcgggccgaaggcccgccaggctcaacctcggttcacaggacccccgacttgtgtgagtcgtacaccg

SEQ ID NO: 98129 - DNA, 122 bp, Homo sapiens
gcaagaacgcggaaatgcgaagcagctgctggtggagcccgcaggccagggtgggactgtcgcccggggcggggctaggaggggaggggcggggcgaggaggggcggggcgaggcgaggttg

SEQ ID NO: 98130 - DNA, 122 bp, Homo sapiens
taagagactagacatcattaggccccaaatctgatcttcagtctactcgtgctttttttccgcctcataaaaacacatttccacctttaggccactcaacatcttatttttaatgagttatg

SEQ ID NO: 98131 - DNA, 122 bp, Homo sapiens
gctctgaatgaatgaatccacgagtctctaactctggagcaggcctggcgcgacctcttccgccctgctctgggtgtccatcctgcaccctgtgtgtcccctgccctgtccaggcgtgacct

SEQ ID NO: 98132 - DNA, 122 bp, Homo sapiens
cacagctgcgcagagccgcccagcagaggttacccggataacgataagtggtccccgcgacgccccttaagtctctggggttatctggagcgcaggtttgcagacccgctgcccccgcggtg

SEQ ID NO: 98133 - DNA, 122 bp, Homo sapiens
cccaagacctcgccccttgccttcttgggccacctgcagaacacccttggttgtcaaggacgtgagacagccgaggacggggaggccccagggctgttcgggggaccttaagtgggtccaac

SEQ ID NO: 98134 - DNA, 122 bp, Homo sapiens
tttccttcttattctcatccactttcagtcagcgaggaaaccacagagcaacccaaacagcgaattcgagtcgaggaacctgttggggccagtgcgtcccaggcgcggacagggaggggctc

SEQ ID NO: 98135 - DNA, 122 bp, Homo sapiens
ccagctgaaggaaagaggaagtgctagagagagcccccttcagtgtgcttctgacttttacggacttggcttgttagaaggctgaaagatgatggcaggaatgaaaatccagcttgtatgca

SEQ ID NO: 98136 - DNA, 122 bp, Homo sapiens
gtcctctcacatttcacatttttctattaacttttattcttgtgctccacttttattccccgccccccaccaccgcccatagcagcctctctaatgtgttaatgtgtatttttgtttgcaca

SEQ ID NO: 98137 - DNA, 122 bp, Homo sapiens
gaaaccgaggctcggagacagtaggtaatttccccaaggttccacagctaatgagtggagcggcgatttgtggaacgaaatgaatgaaatcgatgtggcagcgggcccggacgggtcggtgg

SEQ ID NO: 98138 - DNA, 122 bp, Homo sapiens
gggccaggtcggttgggtgggtgggtgtctccacagtctgcgtgcgtgggccagcgcgttcgtcttacccttccctccaccccggcccctctccccttctcccctaacctcctaccccaccc

SEQ ID NO: 98139 - DNA, 122 bp, Homo sapiens
atttgtctccacagctgcttcctctgggctttgtggttgcccatttgccgccttctcatccgatcgcgttacccttaataaccatcgccctggcaggagaggggtgccgaattccgtctcct

SEQ ID NO: 98140 - DNA, 122 bp, Homo sapiens
ccgacgtcacgaacgtacaactgtaccgtcgcgagaggacgtgatgcgcccggtgattggcgccgccgctgcggctgcgcaggagacgacccccgcgggcgctcccacccccatctcgcgcg

SEQ ID NO: 98141 - DNA, 122 bp, Homo sapiens
tgctccaggagggcggagcgctcacccttgctccgggatctcctggctcaggacaaccaacgtggtcctgaatccaccctggacctgcccaggatctcaggctgggcggcctggctctgctc

SEQ ID NO: 98142 - DNA, 122 bp, Homo sapiens
ctcacgcaatcctcccaccttggcctcccaaagtgctgggattacaagcatgagccattgcgtccggcttgttttcggagtgggagctcgtctgcttttttaacctgtcctttagcctgagt

SEQ ID NO: 98143 - DNA, 122 bp, Homo sapiens
gggtgggggggcatgccaagaaaagtgtcaaccgcggagcccacccaatggtcaggtagacgaaccccttggagttccaaaggccaaaccgcggcggcccagcccggaggtcctgggcgttt

SEQ ID NO: 98144 - DNA, 122 bp, Homo sapiens
aacctgaggcctagaagctggcatgggccgctggctgcagggaggcgggaggttgggtcacgcagagagtagctgatccacagcccacagcctgctccctcggccccctagggacctggcaa

SEQ ID NO: 98145 - DNA, 122 bp, Homo sapiens
catggagatgggcacgcggatggacagcagagcgggcagaaggtgcggccttcccacaaacggcgggggccctggatatccacgtggaaaaatgtgacaggatttctgactcacatcacaaa

SEQ ID NO: 98146 - DNA, 122 bp, Homo sapiens
cgcctacctgagcatccggtccacctccgcccgctgctccgccgcctcctcggtgttgagcgcctgcagctccttgaggatgggaggtgtgtcatagtcgtcgccgtcctcggagccctcgt

SEQ ID NO: 98147 - DNA, 122 bp, Homo sapiens
agatttgtaggttataatctagttcacataaccaatagaaagtgtcctattttatatatacgcatataagattgtaattttaagatgttttgtgtctcagggtgctacattcactcttgcct

SEQ ID NO: 98148 - DNA, 122 bp, Homo sapiens
gcgccctccctgccccgcccgccgcggccgcccattggctgctggggaggcgcgtggccccgccccacccggccgcactcccgtgaagtgctcccgctaggtgctcccgccagatgctccag

SEQ ID NO: 98149 - DNA, 122 bp, Homo sapiens
acactcactcactgcttcccttggctgggagtgggggttcctttggctccatgccgcccccggctgggccatcgcaccctctgcctgcttatcttcattctccattggtcgacctgttcatc

SEQ ID NO: 98150 - DNA, 122 bp, Homo sapiens
gggcttctctgcgtgggtcgagaagccgacgggattcggaggaacgcgcagagcgttgcgcgctggggccgttgctcctccctgtcccagaccacttgtcccggaagggagcttgggaatcg

SEQ ID NO: 98151 - DNA, 122 bp, Homo sapiens
cctgacttccagaagcttccatgaccattcccggaagcgctgaggtggccatggaatccccgcatgactgtccgagtggagagcaaggctggagagctgcttcgtcagcccagaagtttcag

SEQ ID NO: 98152 - DNA, 122 bp, Homo sapiens
cgtggccgttgccaggtgacccgccgctgtttaccgtggggcggagcggagcgccaggctcgctgtactcgcgcacccaccatggcctcccgcagcgcgggcaccctactgaccgagttcaa

SEQ ID NO: 98153 - DNA, 122 bp, Homo sapiens
ttaattaaaaggatgtcctgtggtccctaaaaatgcaatgtaactaagaatgtactaaaacggtgtgagaatttgattcaatatatttgactcaatatattcttagttgctaagttccctct

SEQ ID NO: 98154 - DNA, 122 bp, Homo sapiens
gcactcctgcccgctgaccccgtacccagaggccgcagctgccgcagctcccgcagctcccgccgccctgtcaagccagcctgccgagccgctcctgctccaaaccagccgcgtccccgcca

SEQ ID NO: 98155 - DNA, 122 bp, Homo sapiens
cgcgcaaggccgcaccgggtcacgcttgattcccgcggaatggggcgcaggttgccagaccgggtccccagtgctagggctcaaggaagaatttgttcatgcagaagatttagaaaaatact

SEQ ID NO: 98156 - DNA, 122 bp, Homo sapiens
ctggccgtggtgaaaccccgtctctactaatatacagaaacttagccgggcgtggtggcacgcgcctgtagtcccagctactcaggaggctgaggcaggggaatcgcttgaatccgggaggc

SEQ ID NO: 98157 - DNA, 122 bp, Homo sapiens
ttctaaatctttgacgattatttccaagacataaattccaaggagatcccagctttcattcgtttaccatcctgtgcaccaaccacgtactcaaattcatgctattccttcgcacaagaaag

SEQ ID NO: 98158 - DNA, 122 bp, Homo sapiens
cccaagggtgggaaaatatgagactctgcttcccctcccccatctccatatgccagatatcgattttttcccttcttcttgcatttggaacagttgtccagcaagagaaagaaaaagcccat

SEQ ID NO: 98159 - DNA, 122 bp, Homo sapiens
gctcaaaggggcacaacaaataaatcctgacagctaagaagtgcaacccacgcggtctgacggcagaaaggccgcgggaagctgaggggcaggggatgggcggagtgccagggcggaatcga

SEQ ID NO: 98160 - DNA, 122 bp, Homo sapiens
aaaggtgaggctgtgctcagccctgacgctcagcaaaaccgataaccagcactttcattacgtgcacgccccagggccacgtccctgccgctgtcttggtcctgaagcctgttctgccccag

SEQ ID NO: 98161 - DNA, 122 bp, Homo sapiens
tggcggccccattagccacggcccaggaccccagggtgggagagtgaacggaaaggtactcgtgcctggagcggttgcaacatcctctgtaatgaggaagatacagctcagaggcactgggt

SEQ ID NO: 98162 - DNA, 122 bp, Homo sapiens
tattggctgtcggcgggggtggggacgttcgattcattcacccgagtagcacgtgtctcccgaagctgcaagcacaacagttcgcactggggctcaggcatcccggctagacgcagatacgc

SEQ ID NO: 98163 - DNA, 122 bp, Homo sapiens
cgcacgatgctccgccccacacgcatgccccacccacccagcaggcacgctcgccccgcccgccccttccagctcgggaggccctgctcctcacgcacgcactctcagtcggcctcaaccgg

SEQ ID NO: 98164 - DNA, 122 bp, Homo sapiens
cacagtgctgtctccaccttgcaggataaaggctgcagttccaaagctcccggctgatatcggcatttgctcctttgcacctctctggtcctcacacaaaggagccttcagatggctgtgtg

SEQ ID NO: 98165 - DNA, 122 bp, Homo sapiens
tcggtcatcctgaaggatcagttagtccacagggtggttcagccttgcttctcgttcagccgggtggagagtcagccatcccaccagaaggggctgtgttcacccaggagtggctacgttca

SEQ ID NO: 98166 - DNA, 122 bp, Homo sapiens
ccgccccgtcgcccaacccattggcccgaagagccatctgccctgcgtcctattggctttcgtcaagcccccgcccctgcaggtgactatatcaccgattggctggcttctgtatcagttgc

SEQ ID NO: 98167 - DNA, 122 bp, Homo sapiens
gcgccttcccgggcaccagggactgcgtggcttggccggaaatcaggctagaagcagctccgggaagcacagcccttagcccagcgccttcccacactgtggcaggaatagcactggcggcc

SEQ ID NO: 98168 - DNA, 122 bp, Homo sapiens
gtgctcggcgcggaccaatccgagggcccgccgggaagcaggtcagcctgggccaaagtccgcctcctccctcgcggcgagaggctcccagctaattaccgtaattgcggtgggagagctgc

SEQ ID NO: 98169 - DNA, 122 bp, Homo sapiens
ttataccattaactgcttggatttaatctgttagtgcaagataactttggctctcccttccgtcctcctttcccttatctcgccccacgtgaggacattctcctgtgtgtgaagctgctttc

SEQ ID NO: 98170 - DNA, 122 bp, Homo sapiens
tggcggcccagagagcaccgaggccagcagcaccagccaggccgtggaggactgcctgcacgtcagagccatcaagaccgagagctccggggtaagcggagctgggcagcccagccacgcaa

SEQ ID NO: 98171 - DNA, 122 bp, Homo sapiens
caaaatccaacacacttgcatgataaaaagcattcaacaaactaggaaaagaagtcaggccgagtgctgtggctcacttctataatctgaacactgggaggctgaggcaaggggattgcttg

SEQ ID NO: 98172 - DNA, 122 bp, Homo sapiens
ccgctgctgggtgctgttcatcatcatgagtgctgaaatgggagcctctgagcctgtgtgcggcacccggcgtttctgggaagcttcctatagatttttcctctcctggtttgagtacaggc

SEQ ID NO: 98173 - DNA, 122 bp, Homo sapiens
tgggcttagcacagacggctggatgcacaggcccagcctcccctctgcatcccaccccagcggccaccacctcgcctcgtcagggatcaggacaccatgcctggcactcagcaggtacccat

SEQ ID NO: 98174 - DNA, 122 bp, Homo sapiens
tttcagcattagtacctacatattgccagtgagaaactgggttggacctagtggtgttgtcgtgagtgccacctaaccaggaggccagagcggtttgaaaacatcctgaaaggaactcatac

SEQ ID NO: 98175 - DNA, 122 bp, Homo sapiens
aaactttaaaacaagaatcaacacttgccaaggacatggtttttaagtggatctttatgacggaaattcagaggatgatggagaccttctgagatgaggaactgaaagagaaaagcctttaa

SEQ ID NO: 98176 - DNA, 122 bp, Homo sapiens
gctttttacccccggcaatgctagactaattttcgtgggcactttctctttctcctgcagcgcctacactctctaacagtgaatgttagtagaaagatcaaaggttttagaatcacaaaagg

SEQ ID NO: 98177 - DNA, 122 bp, Homo sapiens
tcacaaggcgcccagtgcatccgggtagcgggatgccggttggaccaacgcgagggtgggcggggtctaagagctaagcgttgggggcggggcgggacagtggggaagaggacgggtcgagt

SEQ ID NO: 98178 - DNA, 122 bp, Homo sapiens
gggtcaccagtcttggaggaatgtcctcagtcccctttgccccagacaccaccagagatgcggcaacagaactctgaggcgcgccccggcttccaagtagctgggggcggggccgcgcctgg

SEQ ID NO: 98179 - DNA, 122 bp, Homo sapiens
cacacagacacagacactcagcctccactgcccttgggagttgggttggggagcgggtggcggtgtttggatggagacagcagcctcctccggaagccggcccagggcacaattagcaggga

SEQ ID NO: 98180 - DNA, 122 bp, Homo sapiens
tcgcacggccaccgccttcgtcgccgtccagtgggagatgcgagcattcggggctgaagccgttcgcaccgcctcctccatggagaagcgccgaggaaaacctgccaaggacaacctccggc

SEQ ID NO: 98181 - DNA, 122 bp, Homo sapiens
aagtggtcagtccttcttgggcctggaggttagcagtcaagtttctctgctttcactgctcgctcgctctctcctgcaatgattgatgatcactccgtggatagagaggcacactgtcagag

SEQ ID NO: 98182 - DNA, 122 bp, Homo sapiens
aatcatttcatcttagcaggcctctcaagtttctgcatatcatataagtagaggcactgacggcctttattttttatcttttcagtggtgtttatatagcaaatagccttggcagataaaga

SEQ ID NO: 98183 - DNA, 122 bp, Homo sapiens
ttcccagggccctggcgtggggcccaggacagggcgaggtaacaggttgtgccggccgcccggccgcagcgcggctcggagtttctgtttacttcccggtccgcccctggggacgggagccc

SEQ ID NO: 98184 - DNA, 122 bp, Homo sapiens
gtacacgatagagaggaatagtacgtaggagctggagcagtccaccaggcagccccagggcgtgcgcacgaaggcgccccagccgcacagcgggagcgccgagagcagcagactggctgccc

SEQ ID NO: 98185 - DNA, 122 bp, Homo sapiens
aagtagaaccaggcagagagttataaatgagctcttggcaaatggcttagaattcagctccgagtgttattggaggagcatatcatggctcatggtggattttcccccatttcctttgattg

SEQ ID NO: 98186 - DNA, 122 bp, Homo sapiens
actctttggtttcaaccccactgccttgtccatcattttattagactattataatagattcgtaacttacttttatttcagtttcacattgattcattaacttttctccattctatattctg

SEQ ID NO: 98187 - DNA, 122 bp, Homo sapiens
gtggaagcggtggcctccaggtggagccgatgaaggggcagataggggtttgaagcaggacgttaagggagcctgaagcaaaactaatctctggagctaaaaataggagtgggcctggcgcg

SEQ ID NO: 98188 - DNA, 122 bp, Homo sapiens
gtattatttcggcacctcggaaggagcgtgaaaaatgagagagactccatccggaggtgtcggatcgattcaggatcagggtgtaaattatatacaactaaatatccagccgcccataccgc

SEQ ID NO: 98189 - DNA, 122 bp, Homo sapiens
ctcctcccctcacccggaaaggatgctccgctcagctcggggcagccgggccccgggacgcggctccgggaggaagcccgggctccggctgcagcataacttccgctttaccgctgctgcgg

SEQ ID NO: 98190 - DNA, 122 bp, Homo sapiens
atatctaccatatctaaaatgacctttgagcacagtaagaggcagcagagaatgttggaccgagccccgacccctggctgtctgcccctgcttgggagtcaggagaccaatcccagcccctg

SEQ ID NO: 98191 - DNA, 122 bp, Homo sapiens
cccaagctgaactgctgcctggcctcccagcccggaaaggagaggggcaggagtggtgtccgatggcccagtggcacactatggccccggactgggctttgggtttgtttggcaagctgtgc

SEQ ID NO: 98192 - DNA, 122 bp, Homo sapiens
ggcgctggactggcctagactctgtgcagacacagaagagccagggcctggggctcccatcgaggaggaggacaaagggccctggccagggcaaggtgggaagccgggaagtgcagcctcca

SEQ ID NO: 98193 - DNA, 122 bp, Homo sapiens
taattaggtggtctcatcactgtagtttgacataagagattgccatttgccacctcagtccgtatgagaaatgggccttgacgtctttcatttgtaataaagactagattaatagcttgttg

SEQ ID NO: 98194 - DNA, 122 bp, Homo sapiens
ccgtgcccagcggccccatcagcgcatattcaggatgaaccccggacacgcgcccagaaccgtctggtgacccagtgatgaaagctcgaatcttataggatccgtattcatttcccgtgggc

SEQ ID NO: 98195 - DNA, 122 bp, Homo sapiens
ccatgccgacaccccacacggccgcaccgacacatcccacggccgcaccgacacaccccacggccgcaccgacaccccgcatagccaccccggcaccccacggccgcgccgacaccccacac

SEQ ID NO: 98196 - DNA, 122 bp, Homo sapiens
ggggggtgggggtgctgcgaggtgcgacaaggctctccctcgctgcaaccacggaaaaggcggatcagcctccattacaaaccgctgtaggaggggccagaagcttggcctggccagaccgg

SEQ ID NO: 98197 - DNA, 122 bp, Homo sapiens
tttcctggaatcgctttgctccaactaagttaacacgtaacaaagtttgttttccagcctcgcccttgatcttcagaatgcccctctcggctaggagggcttctccaagtggaagtggttag

SEQ ID NO: 98198 - DNA, 122 bp, Homo sapiens
atggtggctgaaccgagttcgaaacccagtctgttgatgtattagggaagcagaacaacgcgccacaccagggaccgtacctgatcgccaggccctgcgcaggaaggcaaaggcaaaagaca

SEQ ID NO: 98199 - DNA, 122 bp, Homo sapiens
ctgccctgtgacaagcttttttttaacttcctttttattgctgctctcatttctcaactccgccccatattcctgccagccaacaataactttaaaaatgttttcctagagtagttttcaac

SEQ ID NO: 98200 - DNA, 122 bp, Homo sapiens
ccccagtgtggcctcctggttccctccccacaggcgcccctctgggggttggagggctgacgcacaccctgcctgagatcccagccgcctggaagctgataaggagccctggcctcattaca

SEQ ID NO: 98201 - DNA, 122 bp, Homo sapiens
tagactacacggagtaggcgaatgccttgaagcccgggcggcaggggttcatgaagagggcgttgaacagggaccagacaacatggtcgggcacggaggtctcgctgcggatgtggatcaca

SEQ ID NO: 98202 - DNA, 122 bp, Homo sapiens
ctgccccagccgtccgaggtcggggaggggaatgtgtcagcccccaggaatctcatccagcgcctgcctttcagaaagtgaaggatcatgaattagagcaaataaatcaagcgcacacaggc

SEQ ID NO: 98203 - DNA, 122 bp, Homo sapiens
tcaaaaggatggtgcgcctggcggccgagctgctgctgctgctggggctgctgctgctcacgctgcacatcaccgtgctgcgcggctcgggagccgccgacgggcccgacgcggccgcgggc

SEQ ID NO: 98204 - DNA, 122 bp, Homo sapiens
ggaaacaattctgcaaaaataatcatactcagcctggcaattgtctgcccctaggtctgtcgctcagccgccgtccacactcgctgcaggggggggggcacagaatttaccgcggcaagaca

SEQ ID NO: 98205 - DNA, 122 bp, Homo sapiens
gcccccgcccggcgcctccgcggtcccctcccgcgcgcacctttccgagtgccagtggggcggccccgagaccgcaattgctctggcccggattgacgagcctccgatgcccatttactgcg

SEQ ID NO: 98206 - DNA, 122 bp, Homo sapiens
acacactcccctgcaggtgagcaaataggctcagagcaggaaccatgtgaacacaggccacggtggcaggccagggctttccccactgttccaagttgcctgctgggccccaaaacaattct

SEQ ID NO: 98207 - DNA, 122 bp, Homo sapiens
attctgagttgataatctctgccttgctttaataatttttcctcatgcctgggtagcccgcgagttgcacaataatcactcacacagctttgtaatcaatgcccaaagtaataggattcctc

SEQ ID NO: 98208 - DNA, 122 bp, Homo sapiens
tccatttctggcagcaatcagccgacccttccccatcagtatcacgtgcacctggaagtacgtgggtgggacctaaagcgcccacggaagtgacgtcggtcgccccgagtcgcatgatgtgg

SEQ ID NO: 98209 - DNA, 122 bp, Homo sapiens
ctatgcttccaggagcacgggtgggtggtcctgctgcctggccggccatcctcctggggtcggtctctggccgatcctccctcctcctctcaagccctgcacagcccggccaggcaggtgca

SEQ ID NO: 98210 - DNA, 122 bp, Homo sapiens
cttctccctccggggtacaggtcaggcaggtatcccagctcggcggctctgataggtcggcgatgatttcattgttagggaacatccgggcctttcccctccccgcaacacctccccagagc

SEQ ID NO: 98211 - DNA, 122 bp, Homo sapiens
cttaattctagggctgattgccgggagctaaaggatccccctaccctgacattcccggggcgccctattctgtcttcctcttcctaaggactcccctgactgccaggccacagccccacggc

SEQ ID NO: 98212 - DNA, 122 bp, Homo sapiens
gccaacttccagaccatcggcttgagtgcagccgcccgctttaaccagtgcaacacgacacgcggcaatgaggtcatctccgtgatgaaccgggccaagcaagcaggtgagctggggcccgc

SEQ ID NO: 98213 - DNA, 122 bp, Homo sapiens
ttgttcccacattcggtcagcaccaaggctaaggaacagcttcactctctaatctttccacgaaatagctgtcaccttgctccggtgctgaagttcgggatgcggaactagctgagcatgcg

SEQ ID NO: 98214 - DNA, 122 bp, Homo sapiens
aaaagccttcccaagctgtcagaggaagagccggcctgcccggggcaagcccgccgcacccgccatcgggcctgtgaactgttttgaagctgtgcgtgttttgattctcagttgagtagaaa

SEQ ID NO: 98215 - DNA, 122 bp, Homo sapiens
ggtgtggaagccgcagacctctctcttctaataatccaaatttttttcgatgagtgtgtgcgctgataatcacggggtgggggggggttctcatagttttttttttctctctctctgtgttt

SEQ ID NO: 98216 - DNA, 122 bp, Homo sapiens
cttaatagctatgtgaccttggccttgtaactcagtgtggtagacggaacaagggaaatacgtgcaaggtatagcagtggctcaggaagggattaactctgggagacatgatgtcttatggt

SEQ ID NO: 98217 - DNA, 122 bp, Homo sapiens
aaatcacaccctcaggcctgccttccttgggcagcatgcttatattatagccacattctccgcctccaccaacccctgccccccgccccactgccaccttttaacctctcaatttttgttac

SEQ ID NO: 98218 - DNA, 122 bp, Homo sapiens
gagtgtgagcgcaccagtctgttcatatttaatttacaaagcagcctcggaaccccgggccgggtggtctctttagacgctgcgctcttagcctgtctctcttccccaccccctcccctagc

SEQ ID NO: 98219 - DNA, 122 bp, Homo sapiens
atccgccatgggcctggacgctgctcccgggggcagcccccggccagggccaggcacacccgattcctggagcgtcctaggttcctctaaacccgcggccagcgcagtctcgggtttccatg

SEQ ID NO: 98220 - DNA, 122 bp, Homo sapiens
ggaagtgaaatgaacgtggcggaggtgattggggagtgctcccaagccttgggtggggggcgctcccaagcctgggtgggtggggggcgcaggctcacggacggcgacggggggtgccggag

SEQ ID NO: 98221 - DNA, 122 bp, Homo sapiens
atctggggaagcccccgagacctgccgtccccaggtgactgtggagcacacagcacctcgcgggtccagctgggaaccagtgcctcaccgctctgcccgtcccactggcctacaccaggccc

SEQ ID NO: 98222 - DNA, 122 bp, Homo sapiens
ctccgcgttcatacaggttgccacaaaaagcttgggcctgaagctcgaaggccccggacccgctggggaaagaactaggcctgccactcagggattcgagtccctggagtgtatcctgcatt

SEQ ID NO: 98223 - DNA, 122 bp, Homo sapiens
cccgcccgccgcgcatctgcgctccctcaagagcctggagcccgaggacgaggtggaggacgaccccaaggtgacgctggaggccaaggagctgtgggaccagttccacaagctaggcacgg

SEQ ID NO: 98224 - DNA, 122 bp, Homo sapiens
gcattgtgttgttggagcagcatacccgcgaggttctggtggagtcgcagctcctcctggcggaatttaaagtgaactgtatgcagcttggtgttgagagcaatggccggtacatttctgtg

SEQ ID NO: 98225 - DNA, 122 bp, Homo sapiens
gcagtgagttcgcagttacgggtttgttgccagaattaaaaaagccccaaacccttgccccgcgccccgcgcgcctccaacaccgagaaacgtccgaggaagcttatcttagcagttcattc

SEQ ID NO: 98226 - DNA, 122 bp, Homo sapiens
gcgccgtgactcagcactggggcggagcggggcgggaccacccttataaggctcggaggccgcgaggccttcgctggagtttcgccgccgcagtcttcgccaccagtgagtacgcgcggccc

SEQ ID NO: 98227 - DNA, 122 bp, Homo sapiens
taaatagactttgtataccacctgaccagcctttgtgcatttatcctaatcatgcatgaccgttaaccttttgcttagtccttaccatatgtaataggcagctgttaaattcaccaacagat

SEQ ID NO: 98228 - DNA, 122 bp, Homo sapiens
aattctctatggaatgaacctgaccctcgagtgggaatgttgggtgtgggcagaagagaccgtggtcggggtgggatcccagctaggtcagatcaggccagactgaggggaggcagaaactc

SEQ ID NO: 98229 - DNA, 122 bp, Homo sapiens
ctctgccatgaaacccctgcaagccacagtccctcaaccctggttcctaaccaggccctccgcataccccctagcctgtcccattgcccccggctggattttggcttaggatctagctccaa

SEQ ID NO: 98230 - DNA, 122 bp, Homo sapiens
tcatcgcctctccattgagagtctccggcgggtccgtgatcatcggacacgatcatgatccgtcctcaggccccgcctgtgcagagtgcgcggaggccaaggagttattggcagaaaagcaa

SEQ ID NO: 98231 - DNA, 122 bp, Homo sapiens
gagggacacagcttccaaaacagggaagggaaggcagggatgtctaaatgtaggtaagttcgtagatttgcttgcctttatgagaaggcctgagtctttagaattctaactttttacatcac

SEQ ID NO: 98232 - DNA, 122 bp, Homo sapiens
acttggataccttgtatagattctgttcctattagtaaatgtggggcctttccccctgatcgcctgcctgagaactcagagttgcaatgacataaaagcaatttgcttgaggattacaaagg

SEQ ID NO: 98233 - DNA, 122 bp, Homo sapiens
aaaatcacctgctgagcttgtttgaccacagacttgtgggctccacccttgaattcctgacgccctaggtctgggatggggcttgacaatttgcatttgtaaaaagttcctgaatgctgctg

SEQ ID NO: 98234 - DNA, 122 bp, Homo sapiens
tctcgggctctcctcccagtagttcactccttagtggctacagaaactggagcccgccatcgggctttcccctgaactgcagcttccgtccccgccaatctcttctccggccccagcgctga

SEQ ID NO: 98235 - DNA, 122 bp, Homo sapiens
tggtcacacagtggtcttgccaggcgcccagcactgagcacatgctgcagaccctctgggcgtgttttgggccctgctctgggggaagcaccccacaccgggggtgctgggagtgcccagca

SEQ ID NO: 98236 - DNA, 122 bp, Homo sapiens
acacgttccctgaggcctaaaggtgcccagggccgagcccaaagtgcttgggtcagggctcggtggagcgccgaggtgagtctgaactcccagccggcacgcgccgcccgccggaccaaaca

SEQ ID NO: 98237 - DNA, 122 bp, Homo sapiens
tacaaaaatgtacacagtattgtttatatagcaaaacagaaagcaccagaagtccatccacgggataatggataaactttggcataatggaatataactgtataatgactcaagttacttgt

SEQ ID NO: 98238 - DNA, 122 bp, Homo sapiens
ccactgcgccagaccacctgccgtcttaaatggtagatggcaaccctatctaaatagatccgtccctattattctttcacagcactcaagttatttttctttacagtacttattacaatata

SEQ ID NO: 98239 - DNA, 122 bp, Homo sapiens
ggctgttcctgcagccaagagatttccatgccatcccccggcaagccctctctccccccacgcaaatctatgacaggtctccaaggcatacggaaccaatcagggacatcctgtcaaggtga

SEQ ID NO: 98240 - DNA, 122 bp, Homo sapiens
actccacggcttccctaagacggatcagcgctcgcccatttcccgagttggaagacctctcgattttagttgattaaacttatgcagagatggagatgagggtttgcgctccaacttcgcta

SEQ ID NO: 98241 - DNA, 122 bp, Homo sapiens
tgcgtataagatactctttctttgctgtgggatttttctggtgcttgagatcttctttcccgagcgttctccttgcagagatcttttgatatggagcggcgtgcacgcagcccctaggttgg

SEQ ID NO: 98242 - DNA, 122 bp, Homo sapiens
ctaaaaccagagtttagtctctactcacttataagatgccttccccgcccaaagctggcacgtgccctgtgatgggcaggcatgatgattatggtgaccctaccatgtgccacacaaggaat

SEQ ID NO: 98243 - DNA, 122 bp, Homo sapiens
cccgggcgccctcggccctgtccgcgcccaccgcccggctggcgcgcagacccggttccccgcccgcccggcaaccctgtgatgaagttttcacatacgttcatttcattgaaacaaaagtc

SEQ ID NO: 98244 - DNA, 122 bp, Homo sapiens
aaaagatatatacatacacacacacacatagacatatacacacacacaaaattagccgggcgtggtggcagatgcctgtaatcccagctacccagcaggctgaggcaggagaatcgcttgaa

SEQ ID NO: 98245 - DNA, 122 bp, Homo sapiens
gagacagcagcctccatcggacccaaggcctccgaccgccctgacgaacctcagcggcagcgcagacgtcagagaggtttctttcgcaggcagcgaggggaaacttgcaacgcagaggtgag

SEQ ID NO: 98246 - DNA, 122 bp, Homo sapiens
agtggcgtctagggccaaggctccttgaatgcatacccaagggctgatgagaggtggggacgagtgctgccgaaggactcctcaactaccagaactacgtagggcccctaacatcccctcgg

SEQ ID NO: 98247 - DNA, 122 bp, Homo sapiens
agtccttggctcttatcttggaagcacaggcgctgacagccgtcccagcccttctgtctgcgggcctgaaccaaacggtgccatggggaactgtctgcacagggtgagtatggggccaggcc

SEQ ID NO: 98248 - DNA, 122 bp, Homo sapiens
aggctgcgggcgcggtcctgctgcgtgaagcccgagggaggccatgtctagtgtgggcgccgtcccggcttggaggaaaaggctgggctcccgttggatggtggatccccggggtgggtctc

SEQ ID NO: 98249 - DNA, 122 bp, Homo sapiens
ccgtgcaacttatgtttcccctcctgtaacgactgctgggaaacagcattctccaagagacgtggagctgtggctagaaatggccttgtggctatggtaatgcccaagtcttcctcatagag

SEQ ID NO: 98250 - DNA, 122 bp, Homo sapiens
cacctcctgaagtccagctgtgcccctagtgtccagatgaagatcaaagagctttaccgacgacgctttccccggaagaccctggggccctctgatctctcccttctctctttgccccctgg

SEQ ID NO: 98251 - DNA, 122 bp, Homo sapiens
agagtttacaaccctctagcacaaaggtgcatctcaactcatgtgcctgtcagaagtgcacgccctgccaacgggaggcagaaatctcacctatgctccagggcaggtgggaagggcggctg

SEQ ID NO: 98252 - DNA, 122 bp, Homo sapiens
cgccatctcacctcccacagacagcgagagagtgaacgtgtcaggaaggagaggaggcgtcgtctcacctcccacagacaccgacagagtgaaagtgtcaggaaggagaggaggcgccatct

SEQ ID NO: 98253 - DNA, 122 bp, Homo sapiens
acagcattaaaaagtcatacaaaattcttgcaatcttgaccgctggtagccatttgggtacggtataaaaaagtgtagagtatttttagtcagaattaaacataggcatctttactttgggg

SEQ ID NO: 98254 - DNA, 122 bp, Homo sapiens
cccgaggagaacccagaaccgacccagcccccgaggagaacccagaaccgacccagcccccgaggagatcccagaaccgacccagcccccgaggagaacccagaaccgacccagcccccgag

SEQ ID NO: 98255 - DNA, 122 bp, Homo sapiens
ttcttttgtgtgagtgtaatgtcttgaagttccctgtgtattttttacagttagaccaagcgtcactgtggactagccccatttcaagtgccctgtggccacgagtggctgctggtggctgt

SEQ ID NO: 98256 - DNA, 122 bp, Homo sapiens
gctctggaaagcccggcctggcagggcgcccggcccgcaggctcgcggttacattttccacgggccagactgggaatcacgtagggagagtctgtactcttcccagcagtcagccttccctt

SEQ ID NO: 98257 - DNA, 122 bp, Homo sapiens
ctccatttggttcaggctgcaatgccatctgttttgtcatccatgactccgtggatctaacggtgctcaaagtgtcaatggcagattggagaggtgtacattacctgtgacaagccctgtta

SEQ ID NO: 98258 - DNA, 122 bp, Homo sapiens
ccaaggtcatgtccctgctgcctgagtgcaaagcctacgttttctccacaagcttaaggccgtgagtgccctgacgccgggcccacccgggcctcggtgggagactcggggcagacggacat

SEQ ID NO: 98259 - DNA, 122 bp, Homo sapiens
tggacaccgcagcatgccagcacgaggccacgcctccgtggacaccgcagcatgccagcacgaggccacgcctccgtggacaccgcagcatgtcagcacaaggccatgcctccgtggacacc

SEQ ID NO: 98260 - DNA, 122 bp, Homo sapiens
ggagcgggaggtcgcggtgctcgtgcccaggtcgcccaatgggtgggcagaatgacacggcgcgaccagagaggcgcgggctcgggatgggggctctgcggctgtggcgctgtcctgtgggg

SEQ ID NO: 98261 - DNA, 122 bp, Homo sapiens
attaggtggtatcatccttattgacagaagaagaaattaaagttcactatgcattctctacgacgcagaaattccattcttaggtacatacccaacagaaatgaagtcagaagtgcactaaa

SEQ ID NO: 98262 - DNA, 122 bp, Homo sapiens
gaatgaggcagggagctgggagctgacctcaacagcaatctgcgctgttctgtatctctgcggtgtgttctcaaacccgggagatggtgccagcactttgtctgggatcacagaatttattt

SEQ ID NO: 98263 - DNA, 122 bp, Homo sapiens
gagcagctcttcagccagcgccaggctgcagttggcctccagcaggctgtggagcagtgccgcgtccatcgcgtcccgcagccgcgtgcggagagggagtgggagtgcgcgcccggcgtgac

SEQ ID NO: 98264 - DNA, 122 bp, Homo sapiens
gccccgcgccggcgctgcgctctgcgatgcgagccgctgcgtgtccagccggggctctggcgaggaaactcacttcaaaagcagctgcaccaagggggagattaaagcctttgccgccttcc

SEQ ID NO: 98265 - DNA, 122 bp, Homo sapiens
agccgccccaacatcatttcattttaggatgcgaggcgagacttgaaagcccctttctctcggcatgaggaaccccggccgcgctccccattctctctgcatgaggaacccctgccgcgctc

SEQ ID NO: 98266 - DNA, 122 bp, Homo sapiens
ggttagaagaggaggtcctggagctttggtcttctcttttccccctgcaattgtgcatttcggagggactcttgctgcaagctcggtaggcaatagcatccgctccaagactacacttccca

SEQ ID NO: 98267 - DNA, 122 bp, Homo sapiens
acccttggtcccgacccctgatacgactatgagccaagatcttgtcataatgattgttggcgtttatagggttaacaataagcagcaatagtagagaaaacatgggtaaaaagggaatcatc

SEQ ID NO: 98268 - DNA, 122 bp, Homo sapiens
aagaggcgctgcccaggcaggcgtctcccagcagggccgcctgcgggcgtccatcctctgcgaggccctttgccggccaatcgcgtgctgtggggaccacagaagtccctctctgcttgagt

SEQ ID NO: 98269 - DNA, 122 bp, Homo sapiens
gacttctaaatttacccatttagagatgtgcgcgcacagacacgctgcctcccagggagacgcgcgcctcgccggggctgaggctggcgctggggctggcgctggggctggggctggggctg

SEQ ID NO: 98270 - DNA, 122 bp, Homo sapiens
acccgccagagggagtcgggtctacggctcagggcagggctgggatgccaactccgccaccgaggtgctgggtaggggacctagctaagtctctcaaattctctggccttcggctccaaaac

SEQ ID NO: 98271 - DNA, 122 bp, Homo sapiens
ccacatacaatgttggtcataagcagtggatatcttagagggttacagatggccaggaagcggtcatatcccatcaaagtgagaatgatacagtttgtgccaccaagtcccaagaagaagca

SEQ ID NO: 98272 - DNA, 122 bp, Homo sapiens
gagtaggcaaagacaacaaaatgtggaaaaagcccctgcaccaatgcacatacagcaaggcgtattactcagggttaaagctcttaatagtaaggatcaactcctatatttgcatagcctgt

SEQ ID NO: 98273 - DNA, 122 bp, Homo sapiens
acccgcagtccctactcttgtggagttaatattttaatacttgtagtcagacaatagacacgtaaagaaataaaccatgcactttctaacattggtgtctcaaagaaaatgcatgagagcaa

SEQ ID NO: 98274 - DNA, 122 bp, Homo sapiens
acagtctcctccacagcgaaagtgaacaggcatatcacaaatgcacacacctcaaatgcacgcaccccgtaagcaagcgggtctgtgtgtgtttgtaagtgtggcttttctgtatccagaaa

SEQ ID NO: 98275 - DNA, 122 bp, Homo sapiens
tgtggtgagacgagtggaagagctcggggatctggctcaggcccacatacagcaacttagcgaagctgccggtgaagatggtgagggagcggaggagagggaggcgggcggggcagacggcg

SEQ ID NO: 98276 - DNA, 122 bp, Homo sapiens
cgggagtcctgagggttctgtgggcctgcgcgcatccctctcccatcgtgggggtggctccgtgaccttcctgccacgagcaggaggttgatgatgtgctacgttagccttgtaagatacac

SEQ ID NO: 98277 - DNA, 122 bp, Homo sapiens
acgtacgcagggcctgtgctgtgggccagccacttagtgcacttcctgagctcagaaacacgcaggtgaggcgcctctctgccgtcagcacagttctgggggccggctgcctggttttaagg

SEQ ID NO: 98278 - DNA, 122 bp, Homo sapiens
gaggttcctaaccctgcgtgaggctctttcacctgcctcaggttaagtaggcagaccccgcgggcgggatggtcaaagatatttagttcccggtaccggagggctaggtgccaggggcaatg

SEQ ID NO: 98279 - DNA, 122 bp, Homo sapiens
ggcaaacgccttcatcactttcattctttgagcgcctcgtgtggaaaggagagttactaacgcctgactcacagccacgtgaggattccaacgagcaaagtgcgtagcgcagtacctgaccc

SEQ ID NO: 98280 - DNA, 122 bp, Homo sapiens
tgaaagagagaaacaggcactaaacactaagctttgtgtgaagctgtgactaaggaactgcggttagctgtcttgttccccaagtgagctcataacctgccatgggcaagttttatatcagg

SEQ ID NO: 98281 - DNA, 122 bp, Homo sapiens
aggtgggggacgcagggagaagcagccgagcaggtgccgagaaggaggcgcccgcagaagcgcatgcaggggccacggggaaggcgccaggaggcggtgaggggccgcggtggccggaaccc

SEQ ID NO: 98282 - DNA, 122 bp, Homo sapiens
ggggcgggggggtcggggagggggaagctcttgattgattagtgatgtctgcgctaggcacggcttcataaaggtgcccaatgagaaagagggtgctgactgattagcaatgtctttcacaa

SEQ ID NO: 98283 - DNA, 122 bp, Homo sapiens
gcctgcgccggagcctcctgggtttctgcctctttaaacactttgaaatgcaattccacccgaaacgactggtagtaacattttgacgaaaccgaatctctgttttactaagcagcgacgcc

SEQ ID NO: 98284 - DNA, 122 bp, Homo sapiens
gctggagatgaagcggtggcagagaatgagcacgtgtcaggatctaagggcctaccagtccgctcctgcccctcgctgccctggaacaaagctgactccatgctgtgctccagtaccacctt

SEQ ID NO: 98285 - DNA, 122 bp, Homo sapiens
ctgtaatgggcatgaagctgcattataatagatcttaggtaatcctgtgctgggtgatagcgtgacttttgcacacatctggttttgattgtgttggaaataaagcagaaagtacaaccaag

SEQ ID NO: 98286 - DNA, 122 bp, Homo sapiens
cagctgggagcataaggcacccttcccaatcatttcccatattgatgaaaaactaagcaacgccccccctccaagtgaaccttcagaggcaccttgcactgttttccaggaggtggtgatag

SEQ ID NO: 98287 - DNA, 122 bp, Homo sapiens
tggtctcaaactcctggcctcaagcgatcctcccacctcagcctcctgagtcactaggaccgcaggtgtgagcttttctagaagccaggtccaaggaaagatgtagagtgtctatggggatt

SEQ ID NO: 98288 - DNA, 122 bp, Homo sapiens
acacctcaaagaaagacttaagatttatcactctttgagtctgttcatggcacctttacacgagtgtcttttatgtcccaatcactgtttgcaattagaaattctcagtacatgctcagaat

SEQ ID NO: 98289 - DNA, 122 bp, Homo sapiens
tcctacacaggcctcatgaatatagtcatcaacctgcctgagtgctttcattgtaaaggtcggtatttaatgtcggttgtacaggaaattgacttagcactttccctgtttttctattgcat

SEQ ID NO: 98290 - DNA, 122 bp, Homo sapiens
gggccttttgtggtttacaggatgggaaagaaatccctcgtcaagagccttagaaaatctcgtgagtggtggttctttattaatccacttaatcagtaaattacataattaatatatcaaat

SEQ ID NO: 98291 - DNA, 122 bp, Homo sapiens
gcccccggacctagcagggagcacacagcaaacgtgcaggaagtcactggagtgagccctcggcacacgccatctactccagtgatcgcagcgcggctccagccatgttcaagagcattaaa

SEQ ID NO: 98292 - DNA, 122 bp, Homo sapiens
acccagcgcgcgagagaaggagcccgcgcagcctccgaccgctcgcctcccgcctaccctcggggtccaggggtggcccccagccgtccaagagcagctcttcagccagcgccaggctgcag

SEQ ID NO: 98293 - DNA, 122 bp, Homo sapiens
aagtacacgtttaccaaaaacaacaacgacaacaaaacaaacaaaaaacagaataactgccgtatacaattacagctcagaggaggatctggattgtcacagatcagttcttatacatctgg

SEQ ID NO: 98294 - DNA, 122 bp, Homo sapiens
cccacgaaatgctggtgggtctgttcttcacctgggtgggatcgggcacggtgctccgctcgtccaccgccaccccgtgcaggtgacatgcagcgggtgctgcggctgttcgtccacttcct

SEQ ID NO: 98295 - DNA, 122 bp, Homo sapiens
caacaactccaacaacaagctgctggcccaggaggcctgggcccagggcacagccatggtcggcgtcagagagccccttgtcttccgcgtggatgccagaggcagtgtggactgggctgctt

SEQ ID NO: 98296 - DNA, 122 bp, Homo sapiens
gcggtggcctcgcgggtcccaggggcggggctggagcggcagcagggccggggagatgggcggtggggagcgcgggagggaccgggccgagccgggggaagggctccggtgacttaagggga

SEQ ID NO: 98297 - DNA, 122 bp, Homo sapiens
gtctatatggggtgactacataactgtacacgatcaattatttaattgggtttgcttcctcgggttccttacaaaaaaccctttccttccccaaaccacaaaccacgctggtggcttcctaa

SEQ ID NO: 98298 - DNA, 122 bp, Homo sapiens
gactcatcactgacaaccgggttactgtaatcccccgcgtagacgcgacgcctgggccgccgcactatctgtaagaggagcgcacacaaaatggctgcaacattagcgcgatccctcccttt

SEQ ID NO: 98299 - DNA, 122 bp, Homo sapiens
ctcccacctgccccactgcttcttctcctctcccttaggaactctagcttcacctcgcttcgtaatggaccccaattgctcctgctccactagtaagggataccgggtttcggggctttaga

SEQ ID NO: 98300 - DNA, 122 bp, Homo sapiens
tgcgcgctctgctctgcccttctctgcagcgccccctgtaggaaagaagggaattgcatgcggcccccccgcccccggccagagctgtggatttaccagggatctggcaaagcagtgatcag

SEQ ID NO: 98301 - DNA, 122 bp, Homo sapiens
attggctcacaagggcctggaaggtcaggctaggcaaagtgaattttatcctgttggatgcggggagcggctggaacaaattccacctccacaactgtgttgatctccgcatctctgttgat

SEQ ID NO: 98302 - DNA, 122 bp, Homo sapiens
ccggggagcggatccgagagggccgagtcctcgaaagaggccttgaggcgacgggagacccgggatcgaagtcagctgccggagggagagccccccatgccggctcgagagctcgggtttcg

SEQ ID NO: 98303 - DNA, 122 bp, Homo sapiens
ttccttagtttttaaagttttcctaactctgtggaaaaaatttttcttctgctctcactccgtagtcaacatggaaggcttctgtgaccaaaggtgtggaggtttctccccacacaccaagc

SEQ ID NO: 98304 - DNA, 122 bp, Homo sapiens
accacagagttgaggaaggaagagctgatggacggaagaaccatggcgggaggagtcatccggaagctacctcgctgccctgtcagttacggaacagaggagagatgccggctggaggacac

SEQ ID NO: 98305 - DNA, 122 bp, Homo sapiens
gtgcacttctaggaaatgccaccctacaggttcgacagctcgagctcccccgccctctttcggaaatcctcagatttgaactttagtaaaatgaagcctgggcttcgtttctaatgtcccct

SEQ ID NO: 98306 - DNA, 122 bp, Homo sapiens
ccagtggcgggaaaagcctcggggtgagccaggcctggctgcagagaggccccaagagagcgcggggagggctcgggcggccgggagggggcggtgacagctgtgactcgactccacgctct

SEQ ID NO: 98307 - DNA, 122 bp, Homo sapiens
tacctgccagggctcaggggtcagcttctaccactttccacctttcctgggcagctggctcgcctgccttcagggcaacagcgagccgtcacacggccagcgacaactaccagactgcaact

SEQ ID NO: 98308 - DNA, 122 bp, Homo sapiens
ccaggtcttgcccctctaggcaccgtggttcccccctgaaataatgccaggaagccttgccgaagggtacctagatgacggttctgaaatgagttcctaaccatataatgatcccacttggg

SEQ ID NO: 98309 - DNA, 122 bp, Homo sapiens
ctgcccgcagtgatgcctgtacgcagtggggcctgcacgcagtgggcctgcccacagtgacgtctgcacgcagtgacgtctgcccacagtggggcctgcacgcagtgacgcctacatgcagt

SEQ ID NO: 98310 - DNA, 122 bp, Homo sapiens
gggccggtgcaacctcctggtgaaccagtactccctgggcaacagcctctggtttccggtcggggggttcatgcagcaaggctccaccatcgcccctcgcgccttatccacccgctgtgtca

SEQ ID NO: 98311 - DNA, 122 bp, Homo sapiens
ccctaacatgatgtgactttagagggtagctgctgtctagacaagtcctagtgaagtcatcggctataaaaattttcagttactagagttggttgcactgttacaaaccatgagagacctga

SEQ ID NO: 98312 - DNA, 122 bp, Homo sapiens
gtggggggagaggggcagtctcagacagctggccgaagtacggcaggcctgcggggccagcgtggcgtcacggcctacagtcccgaggtggtgcagcagctctgcggccggatgcccaagac

SEQ ID NO: 98313 - DNA, 122 bp, Homo sapiens
tcaaatcccaatacttaatagcttttctctctctctctctgagatggagtcttgctctgtcgcccaggctggagtacaatggtgcagtctaggctcactgcaacctccgcctcccggggttc

SEQ ID NO: 98314 - DNA, 122 bp, Homo sapiens
ctgcccttctgccccgatcggcaggtggatgattttgtctgtgaggtcccagctctaattcgactctcctgtgaagacacctcctacaatgagatccaggtggctgttgccagtgtcttcat

SEQ ID NO: 98315 - DNA, 122 bp, Homo sapiens
gtcgaaatcgggcatcagcgccgtttagagaacaccgtcctgctgggcatggccgggatgcgaagatggccctgcaacgcacctcctagaatttggttacctagaaaaccatgtggaataaa

SEQ ID NO: 98316 - DNA, 122 bp, Homo sapiens
cccaatgccaagccaatcccttgagcccctgtaactaatgagaactttaaaaatgcttgtcgccagcatacaatgaattgatcttcatgttaatcttgacttttgatcctttgtggattaaa

SEQ ID NO: 98317 - DNA, 122 bp, Homo sapiens
agtgtttccagcccacctgggagacctcgttagcgcagaatccaaaaccgtgacctgagacggcagggctgtgatcgtcacggcaggccggcccggggggaaacacctaggtggaccgacag

SEQ ID NO: 98318 - DNA, 122 bp, Homo sapiens
tccatttgatttggcggtaggtaatctttcccagagcagtttcggtgttagtggttcaggcgggaattccaatgcaagaaaccagtgaacgaatgagagagtgagtagggaaagtgaaggtg

SEQ ID NO: 98319 - DNA, 122 bp, Homo sapiens
ccccgcacagcccggccggcccgccgctgcccgcgcccgccccggctcccggctcgcgctcgctcagacaactgagcccgggccgcggctgcacaagaactcatgcaaatcccggacgtcag

SEQ ID NO: 98320 - DNA, 122 bp, Homo sapiens
gcgccgcccctaccctttggcgtgctccgtctcctcctcattgtccccgtctatcccgcacgtgtcctggtcgtccagttccaggctctgctggctggccgcagactcgctgtcctccgcca

SEQ ID NO: 98321 - DNA, 122 bp, Homo sapiens
acctgctgcaggtactggttaatggtaatgtgcgccatgggagcgccgccgaacggagagcgccaccccctacgcctcaagcgggccagctggcgtcacttccggccctcggtccgtctggg

SEQ ID NO: 98322 - DNA, 122 bp, Homo sapiens
tgcgcgcgcgtgtccctctctctccccccgtctctcgctcgcccgctcgctcgcgctccccgtgttgctctcaaggacgaggtgaaatccctttgctggtcatgaggcggcttcagagacaa

SEQ ID NO: 98323 - DNA, 122 bp, Homo sapiens
ccctgatcgccgcgcgccaggaaccccagaggcgcagtttgagccctgggcctgtagagacgagcaaaggggctggggagggtgggggaagggagacagcaagatgatttacagatttactc

SEQ ID NO: 98324 - DNA, 122 bp, Homo sapiens
agggatctggggaggggacaagcaggcggggctccctggcgctcaccgttttagggtctgcgtgagaaagcctccctcacatcccccagggtctgccctccctgcaagctggtgggctgcgt

SEQ ID NO: 98325 - DNA, 122 bp, Homo sapiens
cgttccaagggtttaggatgcaaacactttgaggggttgctatttagtctatcactgtcccgagagcagaagctggaaagcaaggaactctccccttccagaaaggactctcccattgaaaa

SEQ ID NO: 98326 - DNA, 122 bp, Homo sapiens
gccgggaccgctgcctcctcaggtgggcaccggggcgcgaggctgagcccagggtctgggcggccccggcgccgctggaggcggggacccagccgagcgggcgctcccgctgggcttgccgg

SEQ ID NO: 98327 - DNA, 122 bp, Homo sapiens
aagaggacgtgggactgggatttactcggccaccaaaacactcacagggtattatcctatcgcccttcagtgcccagaataatcatgtggtctctcgcagtaaaaacaaaaccacaaccacc

SEQ ID NO: 98328 - DNA, 122 bp, Homo sapiens
ttcgagtgagacacagacaaacccataatctttgtcagaaatggaatttcacctgtcactcgctgatttaaccttcacttcttccctgacccacacccagaaccaggcaccctccagagctg

SEQ ID NO: 98329 - DNA, 122 bp, Homo sapiens
acgaggaacagaaactgaaatttctcaaacttacgggtggcttcaaaaacttgtccccttcgattagcccccacccccacccccaccctcccgccccacccagcccgattgcaaggtccaac

SEQ ID NO: 98330 - DNA, 122 bp, Homo sapiens
cagggaaggaaccaaacatgagtcagggaagaacaagggtcatgacagccatggccaagacgctatggggcacaggctgtagttggctgtttctctaaacttgtaaacccaggtattagtca

SEQ ID NO: 98331 - DNA, 122 bp, Homo sapiens
tttttgtatttttactggaggtggggttttgccatgttggccaggctggtcttgacctcccgtcctcaggtgatccaccaacctcggcctcccaaaatgggattacaggcatgagccaccgc

SEQ ID NO: 98332 - DNA, 122 bp, Homo sapiens
ggcagggccagctgcggacggagggacgggggctcaagggcgggtcgggtggggtcccgacgccccctcctcggctgggcgcaccccgggtgtccgcagggaggggcgatgttctggggggg

SEQ ID NO: 98333 - DNA, 122 bp, Homo sapiens
tccctcgcggctccgccccctgcccgcctctgactgtaccccgcccccaggcgccagccccgcctatctgggcttctggtcccgcccaggttcttgtccctcgggccccagcctcgcccctc

SEQ ID NO: 98334 - DNA, 122 bp, Homo sapiens
gactcgcgctaccttttgtgcactcgcgcctcgagatagcccctcactgacgcctggacgcggtgagcgcgctgaaggctgtgcggcctctaaagtctcagaattcctccctgcggcctcaa

SEQ ID NO: 98335 - DNA, 122 bp, Homo sapiens
accaatcagaggacgaggaaaggcagggggcgatgggacgaaagaaataaccaatagaaacgcaggggtctgaacctcctggccaatgaatatgactgaagggtgaatgaccgcggaagggc

SEQ ID NO: 98336 - DNA, 122 bp, Homo sapiens
ccctagtggggtggagtgtctgtgtgaaggtaacaccccaattaaagctgcctttctccacgctgtcactgagctccaaaggcaaataggattatgcttgaggaagggaaaagcaattgaca

SEQ ID NO: 98337 - DNA, 122 bp, Homo sapiens
gagagaagctaatgcttttaagggagataggcaggagcagtagacaaagcaagactagagcggttgtccagagccagttctcccatggaggcaggtggtagtacctctggaagaagtgtgga

SEQ ID NO: 98338 - DNA, 122 bp, Homo sapiens
tggctcacttgctggactgccactcacctcctgctgtgtgtctgggttcctaacaggccacggcgcgggggttgaggacccctgctttaaatatcatcaccatttaattcctttaaaaacat

SEQ ID NO: 98339 - DNA, 122 bp, Homo sapiens
aacaaaacgtatctgtgagctggaaatatgtggggcactggggacagaggcagagtgtctcgatggcctctgctggcatgtggtgcctggcatgttgtaggcagtcagcaaacagttcctga

SEQ ID NO: 98340 - DNA, 122 bp, Homo sapiens
ccagcaagcgggaactcccaggatcaggaaggtcccagagaaactccccaggggggaagccgaggccgtccagagagatccagggtacacacagtgacagtgccagctccacattcccgacc

SEQ ID NO: 98341 - DNA, 122 bp, Homo sapiens
ctgtgaacatcagcttgctggagccctgctggacagggagcctgtggtgagacgtgcaggcgagttgggtgaacagggggcctcggagggagagccctccccgccctgtgtgcccctcgcgg

SEQ ID NO: 98342 - DNA, 122 bp, Homo sapiens
gggtctgaggagagggagcgcaggcccccatttgtaggagtgagtcagctgacccgcccccggggttcctaatctcactaagaaagactttgctgatgacagggtttcctgggagtccatgc

SEQ ID NO: 98343 - DNA, 122 bp, Homo sapiens
cgtgctcccgggccgggactccgggtgcggagagcgaagctggggcgtgctggctgcacccgcactgttcgttcaccccgcggcctcgcaggcgcgggtgctcagattcactgcggggcagc

SEQ ID NO: 98344 - DNA, 122 bp, Homo sapiens
cctggctgtgtcccaggtgtccaaggcagcagcagacctgatgacttactgtgatgcccacgcctgtgaggatcccctcatcacccctgtgcccacttcggagaaccccttccgggagaaga

SEQ ID NO: 98345 - DNA, 122 bp, Homo sapiens
agcatttagccttcatatgcccttccctgcatgcttcccccaggccgtcaagacttggtacgctccaacttctgagtcgctcccgcagccgagaaggggccggggtatgcgagcttccgcag

SEQ ID NO: 98346 - DNA, 122 bp, Homo sapiens
ctgccatccccgtcgccctccccgcctgctcggccccgctagctcctctccttgcctccgcgtgtcccctagctctgaccccttttggctcccggttcgctgccgcagcactgccgggtctc

SEQ ID NO: 98347 - DNA, 122 bp, Homo sapiens
tgtagacattgaatcaagctgagtcattcatccagagagagaattaggaacagctgggggcggccactagcagtaaaagcagaggcctgagaggaacaaaatgcctctctaggaaatgttcc

SEQ ID NO: 98348 - DNA, 122 bp, Homo sapiens
aagagcccagctgagctgaagcaggaacactatgagcagcttttctcaggtttgcaacttcgggggaaatggcaattccttaaaggcagctgcccggccagcagcaatgataagatgccagc

SEQ ID NO: 98349 - DNA, 122 bp, Homo sapiens
ggtctccccgtctttctctccacgaacagctcgagcgccttctcgcgggcccgctgcgcgcggagaggacgagctcgctgggttgtaaaaagagacgagttttcatctttgagcatcgagat

SEQ ID NO: 98350 - DNA, 122 bp, Homo sapiens
gcgtgctcatctaccagcagcgtgggctgttggtggaggtgcctcgatctgtggtgggggcggggctgctctgggggggcagctcatcgctcaggcaaatgggttcatgcggtggtgtctgc

SEQ ID NO: 98351 - DNA, 122 bp, Homo sapiens
aagtcccctagaagggcatggccctggccagctggggcagtccttgaagaagctggcagacgctcccacagaacagaggagatgccatctgctggaaagactgcaccagatgcctcttgccc

SEQ ID NO: 98352 - DNA, 122 bp, Homo sapiens
ggagacccgttccagaacctggtgatagaagccgtgaatcctgttcctgaaaagcctacacgcacgtgcccgtgccccaggccccggcggcgggtgaggggcatctgtgtttaatgggcatg

SEQ ID NO: 98353 - DNA, 122 bp, Homo sapiens
atcatgccactggcccacactcagggtcagagtgtcatcaagggcagggatagtgagacccggggactccccctggaatctgagtttgcccagagagcaggtgagaccctttgtgacccatg

SEQ ID NO: 98354 - DNA, 122 bp, Homo sapiens
tcgctgggcctcaaccgcctgcccgcagggcagggctccggacctgcagcccaccatgcccgacccccgccccccacaccccatgggctgccgcgcggcccaagcctccccagtgggggctc

SEQ ID NO: 98355 - DNA, 122 bp, Homo sapiens
ctgcagccagagagctgtggtgggcagcgtccccagcgtcccctgtgttcaggtgggctgcgacaccgggcccctcctgacgtcctggcacccgcctttcactccctccttccttgtcaccc

SEQ ID NO: 98356 - DNA, 122 bp, Homo sapiens
aacgaaataaggggccttagtacccttctaccaggccctcactccccttccccatgttgtcgatggggccagagatgaagggaagtggactaaagtattaaaccctctagctcccattggct

SEQ ID NO: 98357 - DNA, 122 bp, Homo sapiens
ggaccgagtctcccctgcactctcattccgcgagtttgtgtgtgtccaaagttgagttaccggttttgcttctctcattcccttcttgaggctgcaagagcctgcctggaaaacatgtttgg

SEQ ID NO: 98358 - DNA, 122 bp, Homo sapiens
ttccccgggtaaggagtcccgggcgaggacgggggtcccggccgcgggcggaggcggcagcggcgactgctcccggcaccagggaagcggcaatgcagacctgccaccccccttccaccact

SEQ ID NO: 98359 - DNA, 122 bp, Homo sapiens
aaatgcttcagaaaagagtctactttcgatttccagaaaccacctgacatagatgtcttccgggattggctgctgctgatactccccagggcccctctcttttgtctcagctctgcctgtgg

SEQ ID NO: 98360 - DNA, 122 bp, Homo sapiens
acactagaatgtaaattagagggtaggattcttgttttgttgtgccctcagcacctggaccggtgctcaccacatgaggaagctgagccaaagtggtgaggtttcttgccaaggtgacatag

SEQ ID NO: 98361 - DNA, 122 bp, Homo sapiens
cctgattttcgcgatgtagccaagagggtctcggaactcggcccagctaggctcgaacaccgggcactccggtggcggtaggaaatcgtcggaccccggctccatggtgggcccgaggtctg

SEQ ID NO: 98362 - DNA, 122 bp, Homo sapiens
tggtggggaagctgaggcctggggggagtagcctgtgagtttggacaccaggtgcacccccgccccctcccaggccccaccaaggcaggcagcccccatgcccatctggcctgaccagcccc

SEQ ID NO: 98363 - DNA, 122 bp, Homo sapiens
cattcaatattgatggagtaaattaattatttccagcctcacctgtagcccctaacatctcgaatcctccctttcgacattagaaaagtgaaatgattgttctgtaggataatctgtggccc

SEQ ID NO: 98364 - DNA, 122 bp, Homo sapiens
accattccacctgcgtatcacaacaaactgctcaaagacgctccagcactttcaacaggccgggtgctcttggcgacaacaaaagtggtcgaggctgagggttcttacggaggggggtggtg

SEQ ID NO: 98365 - DNA, 122 bp, Homo sapiens
ccagtgggacccctgaggagccagccttttcttctactgccagctgcgaaccctggtcctcggaaaatcgacataataatccctgacgtttgctcttcagtctcgcggcatttaaggtatct

SEQ ID NO: 98366 - DNA, 122 bp, Homo sapiens
tcaaagagggggcacctgaggctggctgcctgggggtcctgagtgcagctctcctggcttcgaggcaccccgatggggagaaggcagtgccgcaattgtcctttctcagctgagggcccttc

SEQ ID NO: 98367 - DNA, 122 bp, Homo sapiens
cggaggaacaagattgtaattagtttgccggatcgtctttccggatggaccggcggtgcacgtttaaaggccagtgatgcgcatgcgcgttatggagaccggaagaggagctggtgtccgtg

SEQ ID NO: 98368 - DNA, 122 bp, Homo sapiens
gccaggggcgcagcgaggaaatggcctcctggcgcacaccccgccgccgccgccagccatcgccaccgccccgggctgcccagccggtacagacgccccctgccaggctccgggccagcgct

SEQ ID NO: 98369 - DNA, 122 bp, Homo sapiens
agtccccaggggacgggcctgtcctgtggggctcaccctcggtcaccctgggccggccagcggaccgcactgactttgctttcaacccccgtttgtgtaggtcataaaaccccggcgtaagt

SEQ ID NO: 98370 - DNA, 122 bp, Homo sapiens
cacgcgtcccagcttggagccagcgcacggccacggccacacgcgctcggaaagcgaggccggcgagaaggaacacagaaggccagcgctaactgcgccccagtttctttttattgatttct

SEQ ID NO: 98371 - DNA, 122 bp, Homo sapiens
cactgttccccatcgggctcctgagtacgaggtcatctgcctggccgtgacacccgtgcccgccaagggcctcgcctggcacagcggccagcccaccagcctatcagtccaccttctccact

SEQ ID NO: 98372 - DNA, 122 bp, Homo sapiens
tctaggtgaggctggtcacctaagcgagtacagctgggtcaggccaggctgcctcagccccgggcgttaggaaaccaccggccccgctgagtcaccgcgacacagcccggctctgccgtgac

SEQ ID NO: 98373 - DNA, 122 bp, Homo sapiens
ggtgcgcgcggggcccccacaccggctaatgtggcacattttggggttggaaccctctcccggcctccgggtctccggtaaaaccggaccagaagtacaagggggcgtgtgcgtttaaggag

SEQ ID NO: 98374 - DNA, 122 bp, Homo sapiens
ctggtgagagagagtggctgtggttgggggctgcagtcacacctgtgtgaggctggcctacgctcaaccttacaagggctgatgcctccaagcaattgtcctccaattatgttggcttctct

SEQ ID NO: 98375 - DNA, 122 bp, Homo sapiens
aacagccacatgccccagctgagggcttggcaccatggaaaagcaatgaagattcaagaacgaaccagcttagcacacgtgatttttagggcagtgagactattctatgtgacactgtaatg

SEQ ID NO: 98376 - DNA, 122 bp, Homo sapiens
ccctccacgaaaaacccgcaagtgctgctctctggattccaagaaagcctgtctcacctgcgaggtgcaggcgggtggagttctgggactccggtgcctattgggattgacaccaccggggt

SEQ ID NO: 98377 - DNA, 122 bp, Homo sapiens
attatgcattttttgggttttgaggtttctgaaatgcatccatcactcctgaccaattgacgtttacaaataccacgaggcctgaccatcaggcagctttgttttcattccctgcacggccc

SEQ ID NO: 98378 - DNA, 122 bp, Homo sapiens
cctctgaataccagatgataaaagaataacgatctcacagactgaccaattaaactgacacgtcttgatggtacgaatttaagtttcaaacaatgtcactaaggtcaatgtacacgagccct

SEQ ID NO: 98379 - DNA, 122 bp, Homo sapiens
gaggatcggaggcggggctagagaccaggaccaagtccggaaggcgtggctggggtggggcgaggatcggaggcggggctagagacggggaccaagtccggaaggcgtggctggggaggggc

SEQ ID NO: 98380 - DNA, 122 bp, Homo sapiens
caggcccctaaggcctccagtgagggccgggtctcatctcccactggataacagtgttgtcgggaacttccatccagcactggcggacactcccgtcgcagctgctcctgactgagcaagtc

SEQ ID NO: 98381 - DNA, 122 bp, Homo sapiens
attcccatgacaccaatactacagttttcggagtcacagtaagatacacagaattacatccgtaattaatatgaatgccaacatgtcaagcagtaatttgttacatggcaaacaaaatcaag

SEQ ID NO: 98382 - DNA, 122 bp, Homo sapiens
gtgcctgtttctccattttccctcattcgtaggaaagcttgggagtctggaagcgtctgacgggaactgaagggagaatctaaagcagtggtcagtgaggtcagagtgaagaaaccaaaaaa

SEQ ID NO: 98383 - DNA, 122 bp, Homo sapiens
gcgcttcctttgttccggagcgagtaggacgcgctacctcctggaggaaagaagcgactgcgtttcgcagtgctgacttttttttacagtgtgagctaacgtgtatgctctgaaaaacaccc

SEQ ID NO: 98384 - DNA, 122 bp, Homo sapiens
aacatatcccacattaaatagttatatacacatcagttcctgtggttctgtacagagcagcggctgaccccacccccacaggacacaatgtggggagaggagactgagggtactgaggccag

SEQ ID NO: 98385 - DNA, 122 bp, Homo sapiens
tgttttttgattgggagcatgtgtatttcctgggagttcactttctttaactttatgctccggtttttgatgggtttcctaaggggctctgcatttcccatggactcttccccttggctgtt

SEQ ID NO: 98386 - DNA, 122 bp, Homo sapiens
attgcctggtcaagctctccatgggagcccatggtagttctgggccaaccttggctcattcgtttaggagaaaggcacttccccaggaggcaagttactctgctatttggcctcaatgtcct

SEQ ID NO: 98387 - DNA, 122 bp, Homo sapiens
agtgggagttggggtggggtgagaaacttgagtgagagaagggaataaagtgactttttccggtgggaatacaagtccaccaaagaaatttagaaagatgtcttgtagtgtagagaacctct

SEQ ID NO: 98388 - DNA, 122 bp, Homo sapiens
tgccgcgtggagctgggtgtgccggaggtgctcatgtttgagactgaggacctggtgctgcgcaagaacgagaagagcgtggtgctgtgcctgctggaggtggcgcggcgtggggcacgcct

SEQ ID NO: 98389 - DNA, 122 bp, Homo sapiens
gcagaggatacgagtacttcttttaatgtaatatcactattttcatgaaatcttttcttccgtaaaagttggggctctgtgccttccaaaacctgtacctctttctgagtatctctttctga

SEQ ID NO: 98390 - DNA, 122 bp, Homo sapiens
ccccgcgcccgccccgctcccgcgccgcccgcccgctcgctcgcgagtcagctctgccgccgctgccgctctagcacaggcggagacacacagagacacacagactctgagagcagttttcg

SEQ ID NO: 98391 - DNA, 122 bp, Homo sapiens
gcagcccccggaccgggaggaatgagcgagccatgaggctgctgcggcgctgggcgttcgcggctctgctgctgtcgctgctccccacgcccggtgagtgacccccgcccggccccggcgcc

SEQ ID NO: 98392 - DNA, 122 bp, Homo sapiens
tgaggtgatgctgaccatggttactgggtttgctgggtaacgtgatggtcatggaaggcacggcttcctcacttccaaaagggctcccaggtgtcagacaccagcaaagtgtttgaaagtca

SEQ ID NO: 98393 - DNA, 122 bp, Homo sapiens
gtcctgtcttccttttggagctccccctcaaggaccccgggagcccatcctacagtgaggcgggccgaggccggcgcgcatcgaggggacgcgggactcggccagcccgcggtagggccggg

SEQ ID NO: 98394 - DNA, 122 bp, Homo sapiens
tcttagcagaaagctgttgagctgttgcccccaggagagggccttccacattcatgaacacgcaaccatctgagcagccacatagtaactgggattgttctgtatgaaaaaactgtatcata

SEQ ID NO: 98395 - DNA, 122 bp, Homo sapiens
aaaaacaagatatgcagaaggaaccacaatccctgaatgaccaaaggaagcagttgtccacgacctgaaatatttatcttgggctgttatgtgagaaaaaagtaagtttgcatcttcattag

SEQ ID NO: 98396 - DNA, 122 bp, Homo sapiens
atttgtttttttaaacaaagaatgatattgttgacagaaatgtcacatttgttcattcagcgaacaccctgagtgcctaccaagtgccagatacttattgttgctcctgacagtggccaaca

SEQ ID NO: 98397 - DNA, 122 bp, Homo sapiens
tatacatgcgtacatatttcctccaccacattaggaggcatcatattgttatcaattcgccgcagcgctcagcaatagatcaatgtgcctgccttcgcagggagggattgatgggccggatt

SEQ ID NO: 98398 - DNA, 122 bp, Homo sapiens
agctttctggaagccgggaggtgggggccggtgcagcaccgggctgggggcgccggggggcgcatcatcaccacgaatagctgtgctggctccaggagagaccctgaggtgcggccgctcgg

SEQ ID NO: 98399 - DNA, 122 bp, Homo sapiens
acacacgtgtggcctcgccggggccggctgtggatcgcatgaggcctggtgcaaaaccaacgggcagggccctcgttctaaaagcagaaaacggcgtgatcacaggaactgcgttccttcct

SEQ ID NO: 98400 - DNA, 122 bp, Homo sapiens
atgatttccacaaccagttcgcggccgagctggaggtgctggcagagctggaaggtggggcgcggcccccggccgttggggaggagctgcgaaagccgggacagtggcgacctcggggaggg

SEQ ID NO: 98401 - DNA, 122 bp, Homo sapiens
cctagcagcccaaggccgcctccccctcgtctttcttccatctctctttcctctgcctggcgagatgccagccagcacctcagtgtccccatctgggcagtggaaagtttgactctctgggt

SEQ ID NO: 98402 - DNA, 122 bp, Homo sapiens
agagaccataccacaggacagcgttttctggtgtatgccttgcgctctgcccgcaacgtgcgacccccagagatagacgtggtcagggtgacacacggcctgcaatgaagttcccgctggcg

SEQ ID NO: 98403 - DNA, 122 bp, Homo sapiens
ggagggaaggaaaaaggctaagtcaaaacttcaagctctctcattatgaggtatacctgacggggacaccgaaagccgcctgtacttcctctcatcaatacagcagagctttttgtcagtaa

SEQ ID NO: 98404 - DNA, 122 bp, Homo sapiens
ctgcctgggatgatattgctaagacattgccatgatgaggcagtttggcctttgttcccacggaaggtgatgttccttgcactttctcccagcagggtatgataaggatgttcctgtgcctt

SEQ ID NO: 98405 - DNA, 122 bp, Homo sapiens
ctcctcttcgcccgcctcacatctggactcctctgcccgcctcacatctggactcctcttcgcccatctcacatctagactctgtgggatgttgcaggaattgccctccgcccttcctcctg

SEQ ID NO: 98406 - DNA, 122 bp, Homo sapiens
gacgggcccacctgcccgcgaagctcccgaccactgggagagggctgagccctgatgcgccgctgccagagcatggcaggactcctggcatccagcctgtggctgacgtgccctccatgcca

SEQ ID NO: 98407 - DNA, 122 bp, Homo sapiens
gactggttgtggaagcgggtgaggcgcttgcacttgcacgaggccaccaggcgcaccttgcgcgcgcgcggcgcctcaccaccgggacacagcagctgcacgcgctgcgcgcggtagcggtc

SEQ ID NO: 98408 - DNA, 122 bp, Homo sapiens
catctgtgtcagtgcttggtgtattttctccagcctctcgaggctgccttctgttcaacccggttcaccgtgtggacattgcaggtgtgaggtggcagcacccgggatgtacctgatgccct

SEQ ID NO: 98409 - DNA, 122 bp, Homo sapiens
gttttggggtggcagaggggaataaataggggtcggtaggggggcagcagagggatatagcgaggcctcctgggcaatgggaaccactgtggttgttcttgggtcatttggtcccagaacgg

SEQ ID NO: 98410 - DNA, 122 bp, Homo sapiens
agtcgctggaagacggaagaggctcccctgcagccttgaatgtgagcacagccctgtggacgctttggttccagacgtctagcctccagaattggaagagaatacatctctgttgtttgaag

SEQ ID NO: 98411 - DNA, 122 bp, Homo sapiens
ttggagaagtcatggggaagtctgggagttgaggcatctggattccaattcctactctctcgtttccttaatttctttcctctctatgtgagggggcatattaagcaaacaaattatgatgt

SEQ ID NO: 98412 - DNA, 122 bp, Homo sapiens
agcgctgaggtggcaagggcaggtctgcgtgcgagccccctgcgggctggcagccaggtgcgcgagggccgcccttgccggcgctcccagcccgcgctgtctgctctcaggaacctggcctg

SEQ ID NO: 98413 - DNA, 122 bp, Homo sapiens
actccctgatacttaaactctaagacattgatcaacttctcatgcacttgtggaggcccacggatgcatctgaccttccctttcagcaaggcgtgaccgtgcctctctgggagcttctgcac

SEQ ID NO: 98414 - DNA, 122 bp, Homo sapiens
gaaatctaaaggctgaaaaagaggcagccctgataagagtcagaagacaattctactgagcgaatagttgtttaaaaaacaatctgtaactagtccagtttcacatctggggtattgaataa

SEQ ID NO: 98415 - DNA, 122 bp, Homo sapiens
agcgcttcaacccagcacctgactccggaaccagacccgaacgaggtgcaccggctgctacgtggccaccaccaaaaagccccagctgcagatttatttctaaatatgcaaacacgcagaca

SEQ ID NO: 98416 - DNA, 122 bp, Homo sapiens
ggaggaggagcggcagtccagtcccagggcaggagccagggcgctgataaagggagcagacgaggggcatttaatctagctggagatgtagtgaaaaaccatgtatcccaacagcctagggc

SEQ ID NO: 98417 - DNA, 122 bp, Homo sapiens
ggagaccctttgtactgccagcttttggctttttgcaggggaacaagcccctctctaatccgcagccttcgactcctaggcctaattaataggaatttgcccccctacttgggcctcaggcc

SEQ ID NO: 98418 - DNA, 122 bp, Homo sapiens
gcactcctcacttcccagatggcagggggcgctgagcagaggtgctcctaacttcccacacgcggtggcagctgcgcagaggcgcttctcacctcccagatgggcggcggccgggcaaaggt

SEQ ID NO: 98419 - DNA, 122 bp, Homo sapiens
aaaagtgactttgcagatgtgattaaggatgttgagacagggatattatctcaaattatccgtgtagggcccaatgtaatcacaaaaatccatagaagtgaaggaaggaggcaggacagaca

SEQ ID NO: 98420 - DNA, 122 bp, Homo sapiens
actgtcaccatcagatatgcactgtcacagcaagacttgtactgtcccagaaatgagagacgcagagtctgtcacaggaagatgcacagatgctccagggacacacatgcactgctctgaag

SEQ ID NO: 98421 - DNA, 122 bp, Homo sapiens
agtacaaatgtgacacagacaccagctcctcgtgctcttggctcccagggtttctttcaccgcgcctcagcacctgcagcttctccactcttacagcgcccgccgtcgtcaaggcaacagag

SEQ ID NO: 98422 - DNA, 122 bp, Homo sapiens
ccaggggtgtgacccggtgacctttgctcccagaatccctcaccagagtccaactgtcaccggatctcctggcgaccctgcctgagccagcctccccggggcgccaggcctgcggcaggagg

SEQ ID NO: 98423 - DNA, 122 bp, Homo sapiens
agcagcagcatggagttcccagggatggactagggcgtcaaagccaccttttgtctcctccgcttacctgaggggcctggttaagcttaagtttctctaagaggttaagctctatggccagc

SEQ ID NO: 98424 - DNA, 122 bp, Homo sapiens
taatttatagtgacagaagtcaaaataatggttgcctttgagacagcagtaactgaaagccggcacaaggggacattttgggcctctggaaatggtattttgatctaggtggtggtaatgtg

SEQ ID NO: 98425 - DNA, 122 bp, Homo sapiens
caggactgtgcttctgttggatgtgaacctttttacattaacttaggagctataaagccacgtttccattcaaaaatctttctcagtgttacaggcaaatttcaagaacggttttatatttc

SEQ ID NO: 98426 - DNA, 122 bp, Homo sapiens
ccggacgggacgggaccggctaggctgggcgcgccccccgggccccgccgtgggcatgggcgcactggcccgggcgctgctgctgcctctgctggcccagtggctcctgcgcgccgccccgg

SEQ ID NO: 98427 - DNA, 122 bp, Homo sapiens
tccggctgcagctctctcccggcgaagctgggaattgggtgggattacacggagcagccccgccgccgccgctggcagaggccggcttggagagggcgggggttcccctccgtcagtcgccc

SEQ ID NO: 98428 - DNA, 122 bp, Homo sapiens
aaaaaacgccctttgaagttgaagagagcttcccctttcaatagtcttcattatccaggacgccaaaaaagaataagtgcctcccaaacaactgaatataggagctgtgtctcctctgtgtt

SEQ ID NO: 98429 - DNA, 122 bp, Homo sapiens
ggagggccgcccgttgcttaaaatgaatccctccgcccatctgagcccgccccccgggagcgcggggcccaatcccgttacaaggaccacggacttccgtttcgttccgcctgtaagtcccg

SEQ ID NO: 98430 - DNA, 122 bp, Homo sapiens
gcctcaccctccacggagcatgggcttctcttcccaggtgtcccccaggtgtcaggggctcgggggaggatgtcctggcctcacccagggatgggtggcagggacatgtgtacaggacctag

SEQ ID NO: 98431 - DNA, 122 bp, Homo sapiens
ctcaccctcttctttgtcagcctctgaaccggattcagagcccagagggctagcggagcccgggctgtcctcctcgccgccgccgccagggccagcgctgcctgggcagctgccacctgcct

SEQ ID NO: 98432 - DNA, 122 bp, Homo sapiens
agaaacatgagaaggccagggctacacatggatcgtacatgtgtcagtaacactgacacacggccatgctgcacgggagcacagacagataacagagcaatctcggtctccagggtcccatg

SEQ ID NO: 98433 - DNA, 122 bp, Homo sapiens
tgttttaatttgccagccgtaagtacggtcagaaagaagccggacaacaggcccacaagccgccccgcagacgcgcacgggaacaaacacgaacacgttgtgagccaggccagagaattatc

SEQ ID NO: 98434 - DNA, 122 bp, Homo sapiens
agggaggaattcttagatttctgaaagttgtgcgaaacggaccccagaggcctggaaaggcgcgtccccagcctccagggtttcctgcgcagccctgggcatctcggaagggggcgacccca

SEQ ID NO: 98435 - DNA, 122 bp, Homo sapiens
cctgtctgcctttacacgcctgacctcgccgtatttcatgaacaggcatgcacagccaaccgcgggcctgtctgcctttacacgcctgacctcaccatatttcatgaatgtgcatgcacagc

SEQ ID NO: 98436 - DNA, 122 bp, Homo sapiens
ccacactaaagttagagaaccacaggctcgctcacaaccctgacttctccatgtcagttccgatctttgcgaaccgcagacagggaaggtcttctctcaggggtcatgcccgcggccgccct

SEQ ID NO: 98437 - DNA, 122 bp, Homo sapiens
cttctcctgggaagggcaggacccagcgagcagttggtggcactgcctgattcatcctcacgttcatgtcaagtggtgagcacacactccattatcagaaaaccttgcagttatgcccagct

SEQ ID NO: 98438 - DNA, 122 bp, Homo sapiens
tccactctggcccctgccccttctgtctggtttcagcctggcagcctcatcctttggcaacgtctccaaaactctcagtcaaatgggaacagcaaggcctgcccatcaactgctacaaacac

SEQ ID NO: 98439 - DNA, 122 bp, Homo sapiens
agttccctgtccctttccagaagtaaggctccttaaaacgaaaggcgctccggggccgcgcgtattccgcgtcccagccaacccgcctccggcccgtcagcgtttctcttttgcttaggtgc

SEQ ID NO: 98440 - DNA, 122 bp, Homo sapiens
accaaataaacctctcttctcttgcaggggtgaacgaggcagctgtttcactgtacattgcgggggtccatcccgcagaccctgacccaacgacggatgagtaacgtacactgacacagata

SEQ ID NO: 98441 - DNA, 122 bp, Homo sapiens
ctctctagctactggagttgtctaagagaccggctctgtggtggcaggtagtgatctccccgttgttgaagggttagagcagggccagctgaccaccagcctcctctggggcttacttccag

SEQ ID NO: 98442 - DNA, 122 bp, Homo sapiens
gtgcctcgaacgtggggggcgcggtccttacgtgtgggcgtgccttgttgctctgaggggcgtaacaaagatggtggagcaggcggagggcagaggcgtcggcaagttagcgtgcaggcgcg

SEQ ID NO: 98443 - DNA, 122 bp, Homo sapiens
gaggaggtaaggggtggagtcactggagtgaataagtcccatgacaagtgaggtttctgccgcctgggagagtgtcacgtgtggggaatgacacaacgcccacgcctagagcgggctgagtc

SEQ ID NO: 98444 - DNA, 122 bp, Homo sapiens
taagaagacctctttgacagtcagtgtccagtaggagcctgctagaggagagagcagcagcgtctgggtctggcccaagtctcacagctggaaacaagggaggatcttatctctgctctttc

SEQ ID NO: 98445 - DNA, 122 bp, Homo sapiens
gacccttgtacgacttaaagttctcaatctcaatcagtttcaggaaccccatgacggccgcggcgccggcggcagtaggacaggccgcgccgtacgcccgagaactgaggtagcccgcgcgg

SEQ ID NO: 98446 - DNA, 122 bp, Homo sapiens
tgcaggaagctcagcggggccgggctgcctcccactcccgggcgctgacgctgccctctgcgctgcatttcgcctcttcactgttgctcacccgggccggtgccaatgtgcatgaggcctgc

SEQ ID NO: 98447 - DNA, 122 bp, Homo sapiens
gctggtagccttcaccccgaaggtgagccgggccagccgagcgactaagcaagggaggggcggggtgaagagtgtcaaaggccccccttcatgtacacaaacacaccccctcccagcccctc

SEQ ID NO: 98448 - DNA, 122 bp, Homo sapiens
tgtgagctgccctggaagtgtccgtcagaaacacaaagtgccgcttactgggagcggttccgtacccactggcacaggctccacacaaaatggagaaagatcaatgcttggctttgggcggg

SEQ ID NO: 98449 - DNA, 122 bp, Homo sapiens
ccaaggccacacagctccagacactctgccggagctctaggggagctcacccctgcgcggcgggacctcccccatcgggttgccccttcaatctgcagccgcgcggaggcaggccccgggaa

SEQ ID NO: 98450 - DNA, 122 bp, Homo sapiens
ttttttgggcagagggaaccagagcacaaggttaaaaatattccttgtattggccgggcgcggtggctcacgcctgtaattccagcaccttgggaggccgaggcgggcggatcatgaggtca

SEQ ID NO: 98451 - DNA, 122 bp, Homo sapiens
ggtcgagattgcagaggtgagatagactccagtctcccatagcgctcccatctcccatagcgctcccaggcttattaggaaggggaaattcccacctgataaattttggtcagaccggttga

SEQ ID NO: 98452 - DNA, 122 bp, Homo sapiens
ggggtggggtggggtaggttggggtgggggcggggtggcgtcacgtgccagcggcggccccgggaaggttccatttcttccgcggcccgcactcgcggcgctcggggcccctccctcgcccc

SEQ ID NO: 98453 - DNA, 122 bp, Homo sapiens
ggttgaaggagtagtgggggtcccctttcaggtgcagctgggactcgtggggtgccaagccgtgtgccgggtgagaggcgggcacagaggccagcgccccgggcccggagcttatggggggc

SEQ ID NO: 98454 - DNA, 122 bp, Homo sapiens
acgtcttcgccacgctgctggatcctcgctacaaggcctccctgtttacggaggaggaggcggagcagtacaaacaggatttaatcagggaactcgaactcatgaattctacctcagaggac

SEQ ID NO: 98455 - DNA, 122 bp, Homo sapiens
cgtcctctggggtccgaccagcgagagtgggtcggacctggaaggtctgagctatgggatcgagccaagttataagcaaagaggcaaggcggggcgggaagaatgggccagggctgggagac

SEQ ID NO: 98456 - DNA, 122 bp, Homo sapiens
gtcagtatctgctgaggaatctaatcttcagcgtttttgcttcctcacacgtgcccgtcccggactgtttctgggctgcagctcttgctgtgtacctgattgtctgagtttatttttgagtg

SEQ ID NO: 98457 - DNA, 122 bp, Homo sapiens
tgcagagcccctcaccatctggtccaggttgcggaagtggcagggctggcgcctggggggcgctggcggcgaggggtcgggcgggggcagggccagctcccgccgcacctcctcctcgatct

SEQ ID NO: 98458 - DNA, 122 bp, Homo sapiens
aacccatcccctaggacctatgtaaatcaatcactgcctcctcaaacctctgtaggaaatcgattgcattctgccgcaaaccggagaccctctctcgggctaccagctttctctgcatgcgg

SEQ ID NO: 98459 - DNA, 122 bp, Homo sapiens
gcgatgacgctgcagcgggggaccgcggttttaaaggcatcatcggtagaaacggcctcacgcatttccataattcactctgcatcaattaatctttcactgtcgataggaacctgcggctg

SEQ ID NO: 98460 - DNA, 122 bp, Homo sapiens
gggcttggggagaggtctcaccgatgatgctgatgctgacagcacggctttcctggggcccgtggctggaatgggtggccacacagctgtaggttccctggtcctgaggccctatctcaggg

SEQ ID NO: 98461 - DNA, 122 bp, Homo sapiens
aggggtctccggcattggcagatatgtacactatgatgccaatgatgttactcagacctgcggggcgcagggtggcggggtgggggatcagagagaaggacgttagtttctcaggaagtcgg

SEQ ID NO: 98462 - DNA, 122 bp, Homo sapiens
cctgaccccctcactctcttccctgcagcggcagagcggggcgctggtgccggcggcgggcgtgcggcacatcagccaccggcgcttcctggccactttcccgctggctgccgtgagccgcg

SEQ ID NO: 98463 - DNA, 122 bp, Homo sapiens
tcagagcccctcccggtcatcattgtgggtgagtgtcaggccccagccagggaggggctccgctgagccttccgggtaccccccaggtctgagggcaggagctgggcaagtccaggcctggt

SEQ ID NO: 98464 - DNA, 122 bp, Homo sapiens
ctctcaatggtgaggtcctcaatctctccctccccaccacagttagctatcagagatatacggtgtccttaagatagggcaggcagggccacctgccccccagctgaccagtgtggatgtct

SEQ ID NO: 98465 - DNA, 122 bp, Homo sapiens
tggctcacaacatgagccatgtgtccctgggtggccttacgagctcaacaagcttggggccgtaactgtccttggccttcacccacaacctaaattatcctggacacagaccagatactcaa

SEQ ID NO: 98466 - DNA, 122 bp, Homo sapiens
tgaggttagcttagtgccagaggccggctgatggcattatcttgttcctttaagtttcctcgcccacacctataccttgggcctcccagtgatatcactgggaagccctgtggcatcctgac

SEQ ID NO: 98467 - DNA, 122 bp, Homo sapiens
tactatgccatacaaacactgcagactaagatatatgagattgccataatagcatctcttcgtccatctgtgaaagccctctgactcttactatacaccatggagaagcacacaaatgtaag

SEQ ID NO: 98468 - DNA, 122 bp, Homo sapiens
agcaaccccagggtcacagagagtggatggaacaggttgagaaagaggaaaggacttgaccggtcaaaacttaaacgtgagaacaaatctaaaagccattgtcacgcactgtgcacagagcc

SEQ ID NO: 98469 - DNA, 122 bp, Homo sapiens
tttgtgctgtcaggaagccacagttcagtggtccccccgctgatagagatatagcagctgcgggtagcaatgcttctcagagtgcaaagactctcctcttattctctgcctacacaggctca

SEQ ID NO: 98470 - DNA, 122 bp, Homo sapiens
tgaggggagcgccagcatctctcaaaagtgagttcgtggttttgctctcaatggaaaagccggcgggaggtgctaaggtggggatgctgaatccacggatggccaagcggagacgcggcact

SEQ ID NO: 98471 - DNA, 122 bp, Homo sapiens
gcgcagcagcgggagggaccggtggcgttgggcgcggggagggtctgcgcggggagggtccgcacccgggagcgggggcggctgctcgctctactcctgggaggggcctttcgaaggaccag

SEQ ID NO: 98472 - DNA, 122 bp, Homo sapiens
atcctccaggccctccctgagcacagtcagctgacaaacacactgaaaaagtgaaccctccggggggtcccttgatcttttgtggtctcaccactcacagaccagctactaccaaaaaggga

SEQ ID NO: 98473 - DNA, 122 bp, Homo sapiens
agattagtgattacaattattgatggcagctgattattcattaggcatcaaatcaatccccgtgcttcttcattactcgaaacagtaactctgatgagaggtctaaaggaggccatgtccac

SEQ ID NO: 98474 - DNA, 122 bp, Homo sapiens
catggggatcgtgtgactttcccaagactgcccagccccttgggggaggttggaagctgtcgccctggggctgctgggtttcagaggcctctgtggagttcattctcatatggcttggccat

SEQ ID NO: 98475 - DNA, 122 bp, Homo sapiens
cagcccccaggaagggagggaggtgggagtaaaggacaggcgggagagaagggaaggcggcggccaggtgaagacgcgtatcccccagtcccgtccactaggtaacagacatgccccttcag

SEQ ID NO: 98476 - DNA, 122 bp, Homo sapiens
ctccggctcgatgccggggggaacccagcctccgggctcccaatggtccgtggctccccgcgtgttagagacgatgccgccttccagccccaggtcccggcacccccacagcctcggccccc

SEQ ID NO: 98477 - DNA, 122 bp, Homo sapiens
ccttttcagacctgaggatgttttataaagggtggtcatcgtctttcacattgtaagtttcgtttctggttgaggcaagaggttggatatattcagacttcctacagcgtgttctttagaag

SEQ ID NO: 98478 - DNA, 122 bp, Homo sapiens
agcgccctcccagggggagcggggggactccagagcagggcacagaaggcttcggggcggcgttcagttgcctggcataggtggtggtgacaccttgcttcattttattcttgttctttaaa

SEQ ID NO: 98479 - DNA, 122 bp, Homo sapiens
atttggttggttctggaaggagcgccatggctgcgtagctttgctgtgcaccgtgcagggcggcggccagcacagcttggtgcccaggaactgctgacggaccgaaggaggagcgcctgaga

SEQ ID NO: 98480 - DNA, 122 bp, Homo sapiens
ctctcatccactgtgtcccgcgcgccggcctccgggaaccttgtgcctgggaccccgcagcggctgcttgtttctcggggcacgaggtccccaagctcatccttgttgggatggtcccattt

SEQ ID NO: 98481 - DNA, 122 bp, Homo sapiens
ttgggccgccccggctgtgactagggctcgggggcccaggtccaaatcacagagctggggcgagacctaagtgcggtccaggggctcagcaccctcttccctgaagggcactgggttctcct

SEQ ID NO: 98482 - DNA, 122 bp, Homo sapiens
agatgtatgtgcttgtgtgtccatgtatcgtggcaacagtcagcaatacagccaggaaaacgtgcctttcggttttccccagcacctgtcgactgtggcacctggggcccgttggtacaatt

SEQ ID NO: 98483 - DNA, 122 bp, Homo sapiens
caacgggaacttggatggatacagtctgggcctgctgggccagatgttccgagggcggcccggcaagcagcctgtcttgcacattgcaactgactggcttaatctacggcaagagtccttca

SEQ ID NO: 98484 - DNA, 122 bp, Homo sapiens
cagcgcatcggtgccgcagccgcgggcgggcgccgctagggctgccaggggtccgaggcgcgggcaaggctgctcaccccgctgtgctgtgcaccccaaaccttccctgttttcctttctac

SEQ ID NO: 98485 - DNA, 122 bp, Homo sapiens
agccattacagcatttcaaggcaggagggtgactcgatttgattaatgttttgaaaagaccgctcaggttgttttgtggtgaatggatgattggaaaccaagagcaaaagccggaccattgc

SEQ ID NO: 98486 - DNA, 122 bp, Homo sapiens
ccacgacctgctggtgcgcctgcaagagtgctggcccaactggtctccatgcgtggtgcccgttggagggggtgggagggctcggctctgctctccccccgtgggtcttcgtgtcacagggt

SEQ ID NO: 98487 - DNA, 122 bp, Homo sapiens
gggcgaggcccggggaggaaggccttgaatggcaggcccaggagtgtagcttctgcggggcgggggcagagaggccgagaggtggcttagcacagagtgaagtgcttgctcggtgagccggc

SEQ ID NO: 98488 - DNA, 122 bp, Homo sapiens
ttgaaggagtaaatgtcaccagggcctccatcctattgtggtcatagtactctttagggtcgacatgataagacgactccaaacctccattttgtttaactgctggaagtttcttcttttac

SEQ ID NO: 98489 - DNA, 122 bp, Homo sapiens
cagccccgcctccagagggccgaggctggccacaggccacggaggtcacgtttatctgctcgcagagcaaggccacggctaatcggagcggccggagctgagccttttcctagcggccgcgg

SEQ ID NO: 98490 - DNA, 122 bp, Homo sapiens
cagggcgcggctgcgcaccgcgcacaggccccggtagagaccggccacctgcaggaccgccggtcccgcgccacccgcagccgccaccaccacagcagccatggccgcccccgcctcctcct

SEQ ID NO: 98491 - DNA, 122 bp, Homo sapiens
cagggcctgagagagcacgctgcgccgtacttccagcagctgcggcagaccacggctccacgcctgctgcagttccctgagctgaggctggtgcagttcgactcaggtatgcggcagttggg

SEQ ID NO: 98492 - DNA, 122 bp, Homo sapiens
gatgttaccgagacttgaagaatcaaggcacctgcccaactactgagaacgcccaaccaccgagtggtggagccaggactcaactcaagtctgccccacttcaaagcccgtgcagtcacacc

SEQ ID NO: 98493 - DNA, 122 bp, Homo sapiens
tgtcaaaaaagatgacggagttgaccatggctgatagtacagggctcacagcgatggcggcgtctgcaaagataaccactgatctttttactgtctttatagtttggccttttctagaatgt

SEQ ID NO: 98494 - DNA, 122 bp, Homo sapiens
gcgtcggcctccgcggcggggaggccgccttgccggggtgcatgaggctgcggagtactccgcgggcccgggaagctaggggtaccctcagcctctgctgctccacggcagtctccagagac

SEQ ID NO: 98495 - DNA, 122 bp, Homo sapiens
ccaccactgtaaacggggccaactttccaaatcacacaggtgagatgatacatacaagcccgggacaggatcagtgtcacaaattgtcagggttatgatgactgcacctacgggggctaagt

SEQ ID NO: 98496 - DNA, 122 bp, Homo sapiens
gcgatccgggtcgggctacgagggcagcaccagctggaaggcggccttggagggtaagcgcggagcggcctccctctcctggcccagggacccctgcccaggcccgacccgcgacccggagg

SEQ ID NO: 98497 - DNA, 122 bp, Homo sapiens
ccaccccaccccactcactctgtacttgcagtgagccaggccatagtcaccaatcttcaccgtcaggtcagccgtgagcaggcagttccgcagggccaggtcgctgcaggcaggggcagggg

SEQ ID NO: 98498 - DNA, 122 bp, Homo sapiens
agaaaaactctcacatcctttggatgtttgcagttcatcataactttgtggttacctttccgcaacataaatttaaaaaaaaaatcacacacacacatacactcacacagacccatatatag

SEQ ID NO: 98499 - DNA, 122 bp, Homo sapiens
gcccgcacctgtcctgaggccccgctgctcccacccgaacctgggctggccccgggctcccgttgtctgtcctggacccccgcccgccctccagccacctggcacctctcatccactgtgtc

SEQ ID NO: 98500 - DNA, 122 bp, Homo sapiens
agataggcaggcagcccacatggcagagtccagctgaaaattgtgagtgaacccccaatacgggagacagggagtgagtatccttctgcaatccccttctcactggggaaccataaaatcca

SEQ ID NO: 98501 - DNA, 122 bp, Homo sapiens
cgcgtcctcatcgcgggggctgggcgctcaggcacgcgggtgcgggaggcagccccaccccgcccccaaatccctgcgatcctgggattaggtccattcccggcactgcccgtggaatcgag

SEQ ID NO: 98502 - DNA, 122 bp, Homo sapiens
gttcgtagatgggagaacggggtctccttgctggggaggaggctgagggccagaacagggcggtgcgcttgagtctcacaccttccagaagcttcaccagcgctcatggtggtgacttctaa

SEQ ID NO: 98503 - DNA, 122 bp, Homo sapiens
ggagctgaaaattgagtcgttatagaaatattaggacatattttcaatcatttcggtgcccgaagggaggcaagagctcagttttatattgagacattacgccggctgaaggcagagaatgc

SEQ ID NO: 98504 - DNA, 122 bp, Homo sapiens
tgggactcaggtgaagagggagtacagaagcctgggagattcctctctgcttcggaacgtcggtgccacccaatccatgatgggcagcaggggattttaaaaagggagccggagaacagaga

SEQ ID NO: 98505 - DNA, 122 bp, Homo sapiens
aaccccaggatttaagatggagcaacttccaaaaactcttgtcctttcaagccatttctgcggtgacactgaggctactggggaatctgtttggccagtggagggcacttcagcctcttgct

SEQ ID NO: 98506 - DNA, 122 bp, Homo sapiens
agtgattcctcccacctcggcctccccaagtagctgggaccactggtgcgcccctggctgcgtgcttcttttacaagcgtgggtgacccaggcccagcagctttgcagttgcaggcccactc

SEQ ID NO: 98507 - DNA, 122 bp, Homo sapiens
ctggacgacacagtgagaccctatctcaaaagtaataataataatgaatatattttaatacgagggaggaacgagccagggtttcagagaaggttctagtactagtgttgctgccctagggt

SEQ ID NO: 98508 - DNA, 122 bp, Homo sapiens
ggctggttgttccgttgcgagctgcagctgcgatctctgtggtaggcccaggtgagtgagcgcctctgatggaagttagggcagcttaaccggctctagtggtttcgtctcttatctttttt

SEQ ID NO: 98509 - DNA, 122 bp, Homo sapiens
ggccccgcccaccaccggcgcctgcccatccgcccaccaatcaggagctccgcagctctgcggctgctcctcattggctctgccccgggatctgttgccagggggatctcccagggccccac

SEQ ID NO: 98510 - DNA, 122 bp, Homo sapiens
ctgacctgggagcggccgccgccgtccagtcccacccgacaaggacttcagagcgctgaccgcagggggcacagggtaccagaaggttccgccctgcatgcttccagcttggctgagaaagg

SEQ ID NO: 98511 - DNA, 122 bp, Homo sapiens
aacagacagcagccttcctgaggccatcgaacatccgcagattttacacagacacgtgatcgtgggagcacagcgccaagagttccccggggtctcgtaaggcgccaaaaaggagggtccca

SEQ ID NO: 98512 - DNA, 122 bp, Homo sapiens
ggagggctgatggccaggggtgtaagggcccacagcgctggcaggtgctgctgctgctggcggcctcctccacacctgggccagtagcagcaggaggcttcactcaggaagagctgcaagtt

SEQ ID NO: 98513 - DNA, 122 bp, Homo sapiens
agaagcaaacagcacatctaatggcggaagataacacacctaatgaagagtttcagcatccggccccactccctgcttggtttgcttgctgggtgatgggggtgggggcagctgcagggagg

SEQ ID NO: 98514 - DNA, 122 bp, Homo sapiens
aggccctgtcaggggcaacgggggctcccccgacggggagggctgggcatgtgatcagaacgtgtgggtgaggcggcagccgagagcttcccaggggagggtcctgtggaccccgcgggggt

SEQ ID NO: 98515 - DNA, 122 bp, Homo sapiens
tttcctttacatttcaggttatatgtcacttacaacatcaatttaagtgcggcaaacattcgttattctaggttagcataaaatggattagaaaatttcacagaggactatgcatggtagtg

SEQ ID NO: 98516 - DNA, 122 bp, Homo sapiens
tgtgcaggctcgagcggtcaaagctctttccgggggcccggggaactactctccttgcctcgctctgtctccttcgaagtgctctgcgcgaggttcagagcggccgccgcctccaaagggac

SEQ ID NO: 98517 - DNA, 122 bp, Homo sapiens
ccaggcgacagcgggggggcgtcgcgggccgggcgagcgtggcccggtgggcccgagggtcgcgccgagctccccgccgctttaaaagctcccacaatgcagcgctggcgtcccagttccgt

SEQ ID NO: 98518 - DNA, 122 bp, Homo sapiens
agcagaagcatgtcacatcaagcgctcgtcatcgttattcgttcacgttttcaggtttgacgcagaaggacaagccttagatggtgtttccatctctgatctaaagagcggcggagtcggag

SEQ ID NO: 98519 - DNA, 122 bp, Homo sapiens
ccagcgagagtccgctgaagcggagcaggcaggctgcggggagatgggcgttaactaggtcgccaacagaggatggccagccccaccccagaggacagcgcacccacggcccagctcgtcac

SEQ ID NO: 98520 - DNA, 122 bp, Homo sapiens
cctgagaaaagccacaaacaaaatcatctctgaaattttttaagcaacaacttcctgaagcgtggaatttatggggccagtgagacactaaaatttcacaactctcacatacattatctatc

SEQ ID NO: 98521 - DNA, 122 bp, Homo sapiens
aagtcagaggcaagaatgccctcattcataccccagtggtctatacctccagcagcaagtcgagtgagcaagtgatgtcctgaaaggcccagtggatcagtggaatgaagcgggcaggaaga

SEQ ID NO: 98522 - DNA, 122 bp, Homo sapiens
cccttccacgccggcctctggggctggaaggtgggcgcgggcgccttgcagaggcggatccggggcaccaccacgccgggccataagctgctccgccgcaggcgctgcaggggcaggagact

SEQ ID NO: 98523 - DNA, 122 bp, Homo sapiens
gaaataagaaggccagtggtagtgacagacctaagagtgttctgtccctcttaggccccacgacgcgcaccgctgcgtgctgcctgggagctcattcttaggtttttaggtctttaaagagg

SEQ ID NO: 98524 - DNA, 122 bp, Homo sapiens
ggaggctcagagaggtcactcaggacccaaagtgtgcccagacgggccctaactacgtggcgtgacctcaggcggggcaaacagatcaaggacacagggtccccacccaccctgaccactcc

SEQ ID NO: 98525 - DNA, 122 bp, Homo sapiens
ctcccggcagtgctgaccctgcagggcaagtcaggggccaggatgccctcggatcagggccgggatgggaggggtcagcctcagggagcagctgccttgggggacacacctactctgctccc

SEQ ID NO: 98526 - DNA, 122 bp, Homo sapiens
aggtggggatgctgaatccacggatggccaagcggagacgcggcacttcaccgggggcagcgaggggcccagaccttgctcggattgtcccggtggtaactgggagacctcgccagtgaggg

SEQ ID NO: 98527 - DNA, 122 bp, Homo sapiens
aattgtctgtccgccagtgcttggtgtgctggtctgtgtggctggggttctgcttctgggcggcagagctcccgtgagacgaggtggaggaggcagagagggagctgaacagggaggggtcc

SEQ ID NO: 98528 - DNA, 122 bp, Homo sapiens
ttggggggttcccaggggtcgccctggcgctccggccacaacttgggcggctctgtgcggcggccctcgcctgcgcctttgcgcgccacccaaaactttgcgcacactgcagccgccgcctt

SEQ ID NO: 98529 - DNA, 122 bp, Homo sapiens
tctctgggcgtcctaatctccaatttcaggcaaattcgctaggaagaaccttcccgagcgcgccttctccaacaggacctccaagccagcctcacgcacgcaggcctggctctctcctgcag

SEQ ID NO: 98530 - DNA, 122 bp, Homo sapiens
gctggggctcacctggggaccacgtgcggaggtactagaaagcatgcaccgactagtcgccgtaccttccaaaaatacccatgggagtctgggcttccctgagtttagtgtaactgctgccc

SEQ ID NO: 98531 - DNA, 122 bp, Homo sapiens
aacatagcaaaaccccctgtctacgaaaaattttaaaaacttgccaggtgtggtgttgcacgcctgtagtcccaactagtcaggtggctgaggtgggaggatcacttgagcccaggagatgg

SEQ ID NO: 98532 - DNA, 122 bp, Homo sapiens
tccttccactcacatccaaccagcttttaacacccggatctcccggagcttctttggttccgctcactccccccgcccccacgcccccacgcccccacgcccctgatttccccacccttttc

SEQ ID NO: 98533 - DNA, 122 bp, Homo sapiens
tttggtggtcctcagcgccatctcccccatgggcaccgaccccccaaggctgcaccacggcgggtggaccccaaagagagcccagactaattagaggcatcttatcagtcttgacttgaaat

SEQ ID NO: 98534 - DNA, 122 bp, Homo sapiens
aagttcggtgacctctgcccagccgagagcaggggagggtcccgcggccagggccccgagcggctcaccctccacggcgtggttcacctcttggatgaacagctgcagcttcatcaccaggg

SEQ ID NO: 98535 - DNA, 122 bp, Homo sapiens
tcgcacgcgacccaatccagctcagagtgcagggtttccctcgcaccgctcccaccaccccgcggccccagacccacggttcacccccgccccacataatggattcgcccgctccccgcggt

SEQ ID NO: 98536 - DNA, 122 bp, Homo sapiens
cgcgatacaaactttctcggcccgccccagcccgctgtggcgggaacattctggaagtgacggcaatctctgcggcagtcttctgtcggaagtgacgttgctatcccagaatcctcagagaa

SEQ ID NO: 98537 - DNA, 122 bp, Homo sapiens
ggtagttgataccaaattactttccagaaggttttggtatttagatgcccatcctcccaccgtctgatgacactgtttagtccagctttttctgtgaagccccagagtaagtagggctggaa

SEQ ID NO: 98538 - DNA, 122 bp, Homo sapiens
gtgcggactgattgaagggggatgaaaggcccggccccgctctgtgagaggtgcccctcgcgctcctccacgtccctgtctgtccgtctgggccactggctcccgcacatcacaggcatctg

SEQ ID NO: 98539 - DNA, 122 bp, Homo sapiens
agaggagggattcgcaccttaaaagaaaggcgtgggaccaaccccagatcccaccactctcggcctcaagggcaggcatgactagaggcccttggtggccaggacccactgccttcttcacc

SEQ ID NO: 98540 - DNA, 122 bp, Homo sapiens
tcagctctcatgagctcgtaggatctggcttcagacatgactgggttcaattcttaaatgcgatggaggcaattattattattggtctgagtataggtcctgaccatgccacttaccagctg

SEQ ID NO: 98541 - DNA, 122 bp, Homo sapiens
cgccccgtccggccagccgccccgttggggaggtggggggcagcccccaccccggccagccgccccatctgggaagtggggagcccctctgcccggccgccaccctgtctgggaggtgtacg

SEQ ID NO: 98542 - DNA, 122 bp, Homo sapiens
gaccggccccctcacgccattagcgtaatcgctttggaatcaatttgtgggctacgcaggcgacgtagcaaagacggttggcttttgctcatcgaaaattactctaaacctattccccaacc

SEQ ID NO: 98543 - DNA, 122 bp, Homo sapiens
gagctctatcccaggcagcaggccccggcctagaaggatgtccgaggttgggggaggtcacggtcaaaggaccctcataagggagcatggagtcagaccctgaagagactcccacccctctg

SEQ ID NO: 98544 - DNA, 122 bp, Homo sapiens
aagttttatattttatgacctcagaggcactttctttctgttttttgaacaaggaagctccgcacttttctctgagctccacaaattatgcagccagccttgcagcaggcaacacatcaaag

SEQ ID NO: 98545 - DNA, 122 bp, Homo sapiens
taaactttttgtaacaaaaagaagcacatatattttcgggaactaggggggtgtgggtggcggggggcaatggtattgggaaattttattattccagaaggttaaggaggagcatgagcaat

SEQ ID NO: 98546 - DNA, 122 bp, Homo sapiens
gaaaatatgtaacgggagccagctccatgccacgctctggtctgggctcaggatatgcagcgaacaagacagtccaggacctgtcatttaaaggtgcaagaaagcagagaacacaaaagcaa

SEQ ID NO: 98547 - DNA, 122 bp, Homo sapiens
agaagatgttagcacagtctttcttagttcaccagaccagcagtagaggctgtgagagagcgacatgaagaaaatttcacagggcacagaaaattccatcccttacacaccagcgagcttcc

SEQ ID NO: 98548 - DNA, 122 bp, Homo sapiens
acctcagctgatccacccgccttggcctcccaaagtgctgggattacaggcgtgagccaccgagcctggccaaaccatcacttttcatgagcagggatgcacccactggcactcctgcacct

SEQ ID NO: 98549 - DNA, 122 bp, Homo sapiens
cgggcgcgcgggctcggggcagctgcgcggcgtccttggaggcaggtgctggcggcaagacgagctctcggaggatgctgcggcgcggggcgcgtcgcccccctcagtccaccagagcccgg

SEQ ID NO: 98550 - DNA, 122 bp, Homo sapiens
tgctccgtttcttggcgcagctgttcctcctcacggaattttctctccagttcctggcggcgcagctgctgttcctcctggaggaattttctctctcgttcctgacggcggagctgctgttc

SEQ ID NO: 98551 - DNA, 122 bp, Homo sapiens
cacgaaggagtcgaattcgccctcagggaccgtccacgagaggcccacggagtcaggggtcgcatctgtcacagtcagctcccccaggcggggagacggtttggtgtctggggctggaaaag

SEQ ID NO: 98552 - DNA, 122 bp, Homo sapiens
ttcaacccttttctgccagcagcgagctgaagtcctgcctactacgtcctggtggacaaacgctgaattttcaagaagttgcaacacccccgagagacacccatgcctgtgaatatgggcac

SEQ ID NO: 98553 - DNA, 122 bp, Homo sapiens
taaactcctgatcttaggtaatctgcccgcctcggcctcccaaagtgctgggattacaggcgttaagccaccacgcctggccggttatataagcttttaactttatgtaaaataacattaat

SEQ ID NO: 98554 - DNA, 122 bp, Homo sapiens
gcaggggtgaggagaaacggaactggggcgggggcagagcaaagcagccctgccttctcccgaagaagaagggcacgagtcagacacccctgctgtctctgagtccacagcctggtccagga

SEQ ID NO: 98555 - DNA, 122 bp, Homo sapiens
gcacatgcagggagagcaggagagccggggagtaagcctctcccctctgctacatctcaacgagatgtagcccctcccctccttagaaagccctgcagtgccaaagaatgagtccactgacc

SEQ ID NO: 98556 - DNA, 122 bp, Homo sapiens
agagcccgggctcggcttcagccacagacaagtccggccaccgcaagtaaggcttagagccgggagtcggttcgcaccagccactgctcgctttatttccgccgctgaactccgccctcccc

SEQ ID NO: 98557 - DNA, 122 bp, Homo sapiens
gggaatgtgctggggacagcgggagttcacagccacccccgcaggcgccttcctggagcacgtccacaggccatgtgcagctgcatcccccacgacggcagggacaagttccttccataggg

SEQ ID NO: 98558 - DNA, 122 bp, Homo sapiens
cgtgctgcctgcagcaggcacccacttcacagtcatcatctgccatctccagttcaaccccgcagagtaagcagcaactcccccagccccgcccattctgaatgaggaacgatgtccagagg

SEQ ID NO: 98559 - DNA, 122 bp, Homo sapiens
ttagatgataatgacaataacatgactactactatactaaaactgtcacctggtgcctaacgtgcttgacactgaagtgatttgcttatattaacccatttaattctcatatgaaccctttt

SEQ ID NO: 98560 - DNA, 122 bp, Homo sapiens
ctgctggaggtcccagagcggcccagagcgcgctccctttgattgggcctgggaccagagcgcggcgagtctccggcggccgcggcgcgatcggctggctgtttgtaattccatcctttttt

SEQ ID NO: 98561 - DNA, 122 bp, Homo sapiens
gcctgaccagccagcttccaccttctttcagagaacaagctctttggaagcaatgtaagtcgcatggcattcaggcatccgtcctataggcatacaaatgccatacccacctttttttttgt

SEQ ID NO: 98562 - DNA, 122 bp, Homo sapiens
gtgctggcagtgttgcgggccagactgtggagagatcccgtgcagatgcagtttccattccgtccggcctcaaaaaaaaaaaaaaaaccttcaagtgtgtctggcgtgctgtttgaagaagg

SEQ ID NO: 98563 - DNA, 122 bp, Homo sapiens
cttgtgtggctgctgactctatcagttgtacacatgacttcatgcattaactctcgcctccggcggattctgctcctgcctcggagatttgaggtatgtgaaagtcgggaaatcacacacac

SEQ ID NO: 98564 - DNA, 122 bp, Homo sapiens
tctcctccagccccccaccccctcctcggtcaaggcccggcggcagtgcttgctggggctcggagtttgtccccgctctgctgcctgttctgttgtgtgcactggaatattgatttttcagt

SEQ ID NO: 98565 - DNA, 122 bp, Homo sapiens
gatcaagcttctgagttccttcctgcagccagcatcgttttccagcacctgtggccctcccggaacccactctggtgcaaaagccctgggcactcagaccaaccctcactccaggccggcca

SEQ ID NO: 98566 - DNA, 122 bp, Homo sapiens
atttccggcggcggaggcggcagtttcctaagcttggcttctctccggtccgctgaccggcgtcagggaccaggttttggtagctgtgggtagcctcagttgtcctggaatgaaagacggtt

SEQ ID NO: 98567 - DNA, 122 bp, Homo sapiens
gagggagatgagagggaggaaggaagaagggagaattctatggtaatgctagtggtagcacgcagcacaatgtttttgaagtgatttctaatgctttcatcaaacacttgcatcctcatccc

SEQ ID NO: 98568 - DNA, 122 bp, Homo sapiens
agggaagaggaccatttgagtagaagaagcaacacgagtagagatttggcagtttaacagcgtatagttaagtcccaaggattgcaagtggtttggcagggttgggctgagaagaaggagtc

SEQ ID NO: 98569 - DNA, 122 bp, Homo sapiens
ccgactccggggccgagatcggactcagcaagagccggccgtttggctgaaacttggggccgagcttttggggctgaagaaggagcggggtgtggaggaggaggcgaaggaggcggcgacga

SEQ ID NO: 98570 - DNA, 122 bp, Homo sapiens
agaaatttgctctttcacagtctggaaactggaagtctgacatcatggtgttggcagggccgtgctctccctgaaggctctagggaagaatctgttccatctctttcccttcacttctggtg

SEQ ID NO: 98571 - DNA, 122 bp, Homo sapiens
agatgggggtgacagaatcacagaatccctgctatgttcctccaagtgtgcccagagatgcgtgtgtgtgtgtgtgtgtatacacaaatgtctgcttatcctcaggcaggaagggtggatgc

SEQ ID NO: 98572 - DNA, 122 bp, Homo sapiens
cctgacacccggggcggagagaagtactggctccgcctcttccgaaccggcaggaagtgacgtcatgcccccggccggcaggtcttttagtctttttccccctcccttactcttcgtccccg

SEQ ID NO: 98573 - DNA, 122 bp, Homo sapiens
gcccgtcggcctcgctcccgccacagagcccgcagcacgccgccgccgcagcctaggtcacgtgagtacccacgcgcgcgtcttgccagcggattcatcaccggcctgctcagactaggttc

SEQ ID NO: 98574 - DNA, 122 bp, Homo sapiens
cgaaagaaggaacgctgaacctgtccacgggaaacgggagactcctatagcacagaaccgcgtgctggctttagcccaaagcctttagcgcctaccttcacccgtgctttgcctcacagtcc

SEQ ID NO: 98575 - DNA, 122 bp, Homo sapiens
gagtggggattgttggtgtctcctgggtcctgcctactgccccatcccgcagaagtggcacgtgccaccggagctagtaagagtgctgtcggcgatgcttttcctgctgatcggctgcctgc

SEQ ID NO: 98576 - DNA, 122 bp, Homo sapiens
gggtgcaccatccttcaggtcagaagcttccagaaggcagaaatgctgagctccctgcatcggtgcaaggcaggccccgtatggctctgcacctcgagggccgactgcgtcctctgggctcc

SEQ ID NO: 98577 - DNA, 122 bp, Homo sapiens
aggactgcttgaggccgggaatttgagaccaacctgggcagcatagcaagacccctatctcgaaaaagttagaaagaaggaaactctgggagtggggccctgtgatgtgacaacgggccccc

SEQ ID NO: 98578 - DNA, 122 bp, Homo sapiens
gcgggcaggattaaacgacttcacaccacgaggtgcaagactgggcttcggggccttcctcggtgttgctattttaaaagaagctgctcagtaacccagaagaagatgacgggggacggtgg

SEQ ID NO: 98579 - DNA, 122 bp, Homo sapiens
cctgcctcttaaagatgaggggcgctcactgtgtctgttatggcaccgtggtctctggcgcggcggaggaaggtttccggccccatgttcctggcgattttgagcctggtacacggtgtggt

SEQ ID NO: 98580 - DNA, 122 bp, Homo sapiens
cacccaggctggagtgcagtggcgtgatcatggctcacggtagactggacttcttgggcacgggtgattctcccacctcagcctcctgagtagctgggactacaggtacatgacactatgcc

SEQ ID NO: 98581 - DNA, 122 bp, Homo sapiens
gaactcctgacctcaagtgatccaccagcctcggcctccccaaagtgctgggattacaggcgtgagccgccacgctgagcctcctgaagatttaaggaaaaaaaaaatcgttctagaaatac

SEQ ID NO: 98582 - DNA, 122 bp, Homo sapiens
actaacgtgtggacacagggacagatacagaggattgcaaactccagtttctgaaaaactcgattccaaagcaagggaaaaggtgccctctagtggtaaacacagcacactacaccacagca

SEQ ID NO: 98583 - DNA, 122 bp, Homo sapiens
cagcctctctccaaacagagcacgatgctccgtcccttgatgcggcaacggagccgctttcgtattgaatgacagagaccaggggtgtcaaaggctctgggccctgcactgcctacgcaccc

SEQ ID NO: 98584 - DNA, 122 bp, Homo sapiens
tgacgcccctcccgggctgtgctgaccacccaggcctcccaacttgtttcccagggtgctcgctaccacctggtttacggtttctttgtttagttctctctgcccgctgatgccagtttttg

SEQ ID NO: 98585 - DNA, 122 bp, Homo sapiens
gttgaggaaagcaggacgtcgattacagcgaacacatcaaaggggtggtctttccaattccggcttttgtttgagtcagaggggagcctgaggaggccaaggtctccggttctgggaaaggc

SEQ ID NO: 98586 - DNA, 122 bp, Homo sapiens
gctcaggccctgactcccctggttccctcagttccccacctggagctgaagtgagcccggcgtgctgagggctcctgtctgctaagtgccttacgggcatccccgttctgcccttctccaga

SEQ ID NO: 98587 - DNA, 122 bp, Homo sapiens
tatggccctggacgccccttcccctctccctggctccgcacagccacacacttacgtgtgcgtggtccctggacgctgttccccctgcgaacacggtgccactgtttccgggagggctgccg

SEQ ID NO: 98588 - DNA, 122 bp, Homo sapiens
cgccggcagggctctgtcaagatcacctgggagcgagaaaaatgaacaaacacgtaactacggagacgatttagtgcactgttgatttcatttcatgcgtggcagctgggatggaaacgctg

SEQ ID NO: 98589 - DNA, 122 bp, Homo sapiens
tcagtctaggagtttgaggctgcagtgagttatgatcctgccatttccctccagcctggtcgacacggcaagaccctatctctaaaataaaaataaatggttttaagttttgttttctaatt

SEQ ID NO: 98590 - DNA, 122 bp, Homo sapiens
attgtatcattgtgcaacttgtgtttcctcttggtcaatcccaaagtgcccctgggccttcgcacactgttgttgtttagagccacatcaatatgacagtttgcttcctcccttcccctggt

SEQ ID NO: 98591 - DNA, 122 bp, Homo sapiens
tgtttcccccacgctgtccctacatctgctctgatctaaaatgtctttccttttatgctgcgcccagtcttggggctcaaagatttgcccaaacctcattggccctcgtgactaggctcatc

SEQ ID NO: 98592 - DNA, 122 bp, Homo sapiens
tggccgagcatattaaaatctagttttcaaaaactgaactgcaggcgccgctgtaccaaacgcttccctctgctccccaaccccagcctacagaaaactggtcccttcctcctaccccgcag

SEQ ID NO: 98593 - DNA, 122 bp, Homo sapiens
ctacggcagccgtggaactgctctgccttgcaggcgaaagtgtggtcagctatatcggagcgcgatgggggcctgagaggcgcatctgcgcaggcgcccggctcctaagtctacccaggaac

SEQ ID NO: 98594 - DNA, 122 bp, Homo sapiens
cgctccctccgtccttcttctagtagtctcaagttgctattgttgccatctttacgtccacgagttcccaatgtttggttcccacttataagtgagaatgtatggtatttggtttgcccgcc

SEQ ID NO: 98595 - DNA, 122 bp, Homo sapiens
gcgcacacacgcacacaccctcgggcgccttggacggggtgcgctggggagccagaagttcggagcgagcgcgggcgggcagagccgccgcctcggagcccggagccggcctgcacccccct

SEQ ID NO: 98596 - DNA, 122 bp, Homo sapiens
gggatgataagtaagaaacatcacccatctaatgctagctgtatgaaacacacacgcacacgcacagacacgggcatctcactagagagctgaaaggagggaccaattacaacacagggatc

SEQ ID NO: 98597 - DNA, 122 bp, Homo sapiens
tgtttgagtctcaggctcccaacggccgtggcgtgcgtcacccttgcgtcgcccttgcgtcgctgcacgtggggcgtgggccctcccagttctaaaaagcaaaagcaagtgaaagaaaagct

SEQ ID NO: 98598 - DNA, 122 bp, Homo sapiens
ccttatatgaaatatgtatggaatggtgaacttctggatataattaaaagtactgtgcatcgtgactggcttttgtatattattcatgggttctgtgggcagtcaagtatcctttctgaaga

SEQ ID NO: 98599 - DNA, 122 bp, Homo sapiens
taaaaaacaaaaaaccgcaaccgtccagtgtctgcctccatccttttctcatactgttgacgtttttacagttcttggggaatttttacttaaaaaaaaataaaactacctaagccccacct

SEQ ID NO: 98600 - DNA, 122 bp, Homo sapiens
gatgggttgcttttcgcgtgccccttgtgatgggaggattaggtcgcaggctccaccctacgtcatcctcccaagcttctcaagcgtctggcgcttggggtcactgccctcaaggaggcacc

SEQ ID NO: 98601 - DNA, 122 bp, Homo sapiens
ttttttttttttggtaggtcaagctaaagacgaactgaaaatagacaacctgaagtcagacgggaaagctgccaatctagtctggccagcagaatttctttcagtaggtctaggctccctcg

SEQ ID NO: 98602 - DNA, 122 bp, Homo sapiens
tgggtttattgaagtataatttacatttaataacactcaccctttttaggcagagttctgcgaattctaccactacaatcaagatatagaattttcccatcaccctcccaaaatttccctat

SEQ ID NO: 98603 - DNA, 122 bp, Homo sapiens
cgagccacactccgccccacgctcgccgctatggttacttgccagccgacccacgcgagccgctatggttactagcccgccgcccctcgcgcccacgcccctttcgctatctcgcgacagct

SEQ ID NO: 98604 - DNA, 122 bp, Homo sapiens
gctttctctgggtccctctctgtgtgtctctgccacctgcttttcttttttatctctttccgttactctcctccctttctcgttttcctcttcccctcttccctgtgagtatctctctctgt

SEQ ID NO: 98605 - DNA, 122 bp, Homo sapiens
agccagaatgggatttaatgcatcttccatgctccgaaaaagccagctaggtttcctcaacgtcaccagttactcccgtttagccaacgagctgcgtgtgagctgcatggagcggaaaaagg

SEQ ID NO: 98606 - DNA, 122 bp, Homo sapiens
ccacccaagacagagagggtgggctgctggagcccggcggaggggagcgctcggaggcgccggaggcagcgagaaagccgcgccgagagtgtgcgagggagggtgggggacaggggtgaggg

SEQ ID NO: 98607 - DNA, 122 bp, Homo sapiens
cagactgctgtgctagcaatcagcgagactccgtgggcgtaggaccctccgagccaggtgcgggatgtaatctcgtggtgcaccgtttttttagcccgtcggcaaagcgcagtattagggtg

SEQ ID NO: 98608 - DNA, 122 bp, Homo sapiens
gggcataatagggtccttccgagtctttctgttaatacttgtatcccacattctggtaagcgtttggtgaataaaaatttcatttatttgctttatgtgggagaatacaagttgaaacctgg

SEQ ID NO: 98609 - DNA, 122 bp, Homo sapiens
cccttctgctagactctctacgtttaggccccaagtttctgggagtgaaacgatgagggacgccaaataggcggaagaagcccatttgacccaggcttatggcagcgaaggggaggatggga

SEQ ID NO: 98610 - DNA, 122 bp, Homo sapiens
ttaaaggctttaaacacagaggacaggtgcgtcttttcttgctgtggctgacgtcctagccgtgttaagggggtgggggctctggcctcgctgacctcgcctgccatggcaactgtaaggct

SEQ ID NO: 98611 - DNA, 122 bp, Homo sapiens
acatcctttaactatttcttttatacaggatcctaccctaaggatcattttattctttgacggggtcattaagcaatcactctatactggttcattattggaagtcactgcaatatccagaa

SEQ ID NO: 98612 - DNA, 122 bp, Homo sapiens
ccaggccctggacagatggggagccctagggggagggacatcctccaccaaccattcttacgtgttattgcccctgccctgagcctgagagccaactgctggacccccaggttgggctgaat

SEQ ID NO: 98613 - DNA, 122 bp, Homo sapiens
gggagaactaccagctgctccactaaccacacaccctccagtgatgcttctgaatggtcccgaggggttgtggtggctgggcagagccaggcaggagccagagtcagcctggggggtgatgg

SEQ ID NO: 98614 - DNA, 122 bp, Homo sapiens
ggtagtgctcaggggtccagggagggtggagagcctgtattggggtggaaccctttgactcgacaagctaagggctacgttgaagtggcttatctgcactcctagttccagagacagtagtt

SEQ ID NO: 98615 - DNA, 122 bp, Homo sapiens
ataaaaacggagaaaacccgccagatgctatctgcatgccgtctgcctgctaatcatgatcggccgttccctttctcatattaacacaattctatctcagacgccgggcggccgtggccagc

SEQ ID NO: 98616 - DNA, 122 bp, Homo sapiens
gcagatatcaaataacaccttcatcgtctgagcttataatggaaaaccccacgttcaaagcgtctcttgaaagtgaaaaagcaaactccagccaagaagaacaagcgcttagagtcttcagg

SEQ ID NO: 98617 - DNA, 122 bp, Homo sapiens
cagcaccagacagttgagctcacttgcctgatatttccagtgtcagagggacacagccaacgtggggtcccttctaggctgacagccgctctccagccactgccgcgagcccgtctgctccc

SEQ ID NO: 98618 - DNA, 122 bp, Homo sapiens
gggcggggccggaagtgtggggacagcgcggggccgagaaccggaagtgcggggcgggcgcgggggcagagcgaaaggcttgaggaccaggtcggggccgggttccgggtcggggagcggct

SEQ ID NO: 98619 - DNA, 122 bp, Homo sapiens
actgcaccacaggacacacatgcagcctgatcctgcccatacactctggagaagcgagttcggggagaaaagggttctgggtaattgtgtcctgcacaccgggattcaagaatgaatggttg

SEQ ID NO: 98620 - DNA, 122 bp, Homo sapiens
cgttctggagggccaggtgggggtaaagtcaggagcagccgaagagcccgtccatagcatcgggcagctccttcagggttcccagctcgaaatagttctgtgccccttgcacgttcttccct

SEQ ID NO: 98621 - DNA, 122 bp, Homo sapiens
gcctggctgatgagctctcaggggatgaccaagtacctggtctaggagcctcacctccaacgggaaactctccaaaacacagatttttatcaaatttgttcaagccctaattagaggccacc

SEQ ID NO: 98622 - DNA, 122 bp, Homo sapiens
agctacctccgagcttggcgcgagccggagggctcccgggaatgccctccccgccattttcgccgatgagctcgggctcacccttccactggaagcgacagcgccttcttttcgagggctgc

SEQ ID NO: 98623 - DNA, 122 bp, Homo sapiens
accctcctcagaaaggaattttagcagtcatcagtcctctcacaggccccctgggggtctcgcattgtctgtttgcacctgcagcccttcccccagtgtggcatgtcctcataatctttgac

SEQ ID NO: 98624 - DNA, 122 bp, Homo sapiens
ggccgggctcgcgatcggcgggcatcgcgtctctacgcgcggctttgtctcccgcgaagccgcctcagatgttcggcgccctccccaggcctgggctcgctctgtggtttcctcgggccgcg

SEQ ID NO: 98625 - DNA, 122 bp, Homo sapiens
actgaagccttgacctcctgggccctcatgagctcaaatgatcctcctgcctcagccttccgagattacaggcatgcaccaccacgcctagccgataaaaatatttagtgggcccctagctt

SEQ ID NO: 98626 - DNA, 122 bp, Homo sapiens
gggatgtctctgcaggtctaaggttccccttgggagtctaaacaaagactacggcagcgccgtcccctcccccgggaacccgacgccgcgcggccacagggggcctggaggggcgggcaggg

SEQ ID NO: 98627 - DNA, 122 bp, Homo sapiens
agctctctagcttacaagggcatttgcttgggtgagaggatgttgggaagatcgaacaatcggcttaataaatgccaggcatttgtgaagccgtggagtggaatacattcgcagaaagttct

SEQ ID NO: 98628 - DNA, 122 bp, Homo sapiens
tggacggtgagctggctggagttgcggctggcataggggcagagctggcatttgtacggccgctcatcagagtggatccgcaggtgcttcttgaggctactgctgtccacggcagcgtagtc

SEQ ID NO: 98629 - DNA, 122 bp, Homo sapiens
ggccatgcaacaccaccttcttctccccccaggccctgtttgtcttctgcggcctcctcacgtgctgctactgctgctgctgtctgtgctgctgcttcaactgctgctgcgggaagtgtaag

SEQ ID NO: 98630 - DNA, 122 bp, Homo sapiens
ggctcacacaaatttgtagttgtaaagggaagagtattgtagtagagaattgtgggtactcgttggtacgactccatcacccaacaggaggcacttccttaaaggtcagttatattgtgcca

SEQ ID NO: 98631 - DNA, 122 bp, Homo sapiens
ccatccggggtgccagctcgccgctgtccccacatctggctcccgtgttcccggctgtcacgcagggtcacgtcgtccccaaagttctgctaacacgaatgaagtctcgttggtgtgacatc

SEQ ID NO: 98632 - DNA, 122 bp, Homo sapiens
ccgggcgtgggaggagggcggagccaactccccacaaggaagtcttgtgcaactctcaggcgcctgcagccacgtgagcgcgcggctttcattttactcaggtattattactattattactt

SEQ ID NO: 98633 - DNA, 122 bp, Homo sapiens
tggaggttgaaaataggaccaagatttcgagtaaagttagcttagtggttatgtcacattcgttctccccgagaaggagcaataggcatgactaacgggcgctggcagattaaaccaagacg

SEQ ID NO: 98634 - DNA, 122 bp, Homo sapiens
cataatgacggcagccagtcagacacagctgtgggtacagttggagcaggtggaaagaaacggagatccagccttagtgccaaagtggttgccatagtgtctcgaaggagtagaagcacatc

SEQ ID NO: 98635 - DNA, 122 bp, Homo sapiens
tgctctgtagaatgggaatcatgcgtgtctgtttcctgctctgtagaatcagaatcacggcgtgtctgtttgctgctcttcagaatgggaatcacccatgtccgtttcctgctctgtagaat

SEQ ID NO: 98636 - DNA, 122 bp, Homo sapiens
tctttgttaaaggccacaggtatccatgcatgctgcagtgtagctcattcctactttccacgtcaccccctggggaataatcattttaatgatgggcctcaaggaaaggaaacgccattcta

SEQ ID NO: 98637 - DNA, 122 bp, Homo sapiens
agaccagcccggagcgggaaggggcggtgcgcggcctctgcagagggtgggcggagttcccgcggtggccccgcccctggctgggggcgcccgaagcaacccggcctcgcttgtggggagcc

SEQ ID NO: 98638 - DNA, 122 bp, Homo sapiens
agacgacggatgccccgcgcggctgcgggtgctcctctgctggacacaagccggctttgccggggccacaaaagttctggcgtggaacaccctcagtacaggcggaaaatcatcctcttcgg

SEQ ID NO: 98639 - DNA, 122 bp, Homo sapiens
cagtgtcatcacaagagtccttttaagtgagagagaggcaggaaagtcggagtctgagaacgggagatcagagaacagaagcagaggtcagagtgagagagatttgaagaggaaggaagggg

SEQ ID NO: 98640 - DNA, 122 bp, Homo sapiens
gagctccgcctccttcttatagagtactcccctttctcttttcctagtctcgcgcaggggcgggtagccaggactcttcagccactcagaggcctctacctcaggacctcaaccgatgattg

SEQ ID NO: 98641 - DNA, 122 bp, Homo sapiens
tgtagtttcttcctcgtaacatgagtgctttcagctggacagtagattacaaagcatctccgatcacgttaaggcagatgatcaatctgtggctgcatctgtaactcctcctgggaaaataa

SEQ ID NO: 98642 - DNA, 122 bp, Homo sapiens
tctcacccagcccattcttctcctgtgttaacttccaggttccccttattattatagtgccgccccccggggctccgcccctgccgctgctgccgctgcctatgaccgccactagttaccgc

SEQ ID NO: 98643 - DNA, 122 bp, Homo sapiens
ttccttgaccaggaaagggaactccctgaccccttgcacttcccgagtgaggcagtgcctcgccctgctttggctggcacagggtgcgctgcacccactgtcctgcgcccactgtctggcac

SEQ ID NO: 98644 - DNA, 122 bp, Homo sapiens
atgtgcatctcctatagcatctcataaagtgctcatcaagcaggataatatcaggaaacacgtgttgatacctgaatcaatgtgtgtagtcatgctcaggctgcttgtcagtttcttgaaag

SEQ ID NO: 98645 - DNA, 122 bp, Homo sapiens
taattgtactttttctccttttctctatttttgtcatctagattcaccaaaaccacctgtcgctcccaagccaaagactaccagtccactgacgccagtgaccgcgcccaaattcccttcct

SEQ ID NO: 98646 - DNA, 122 bp, Homo sapiens
atccagcggccggccatctctctgacttaagtcacccagagcacatttgggaaagtttctcgctcgcgctgtgcgcttttttccaattggggatgaaaaggacatggaaagaaatcgcagca

SEQ ID NO: 98647 - DNA, 122 bp, Homo sapiens
cgcacctctcctctgacgggaaccgaaggagccggtaggttttcacacttgcagcagatccgctaagagaacgcgggattcagccgagaagccacggggagcccgaggagcggagcagaggc

SEQ ID NO: 98648 - DNA, 122 bp, Homo sapiens
gggcctcctcaggaatctccaacctccgaggcgattctagtttaagcctgatgaggcagacgtgcatccgggcggatgattagccggtgtgggcgcggcctggagcgggcccaggctgggga

SEQ ID NO: 98649 - DNA, 122 bp, Homo sapiens
tttgtgacatgtgcagctatactatgacatcataaaccccatcgtgagggaacctagctacgggtcagagctagtccactaggtgctaatcaaatgctgtgttacaacactgtgaggttttc

SEQ ID NO: 98650 - DNA, 122 bp, Homo sapiens
gacactttgaagtctgggggacgcgaaggtaatgaaacctgaagagcgcacaatctcacacgatcgacgcctctgggctcaaacaggaggaagaaggacgcatgcgtcacgcgcacgccagg

SEQ ID NO: 98651 - DNA, 122 bp, Homo sapiens
cgtcctcccacccctcagtttggggtgggtctggaggggctgccccagggcagccagatgcgcatgggtgtgttgggacagcctgggcgcctggacttacttctccctctcccgggcgttct

SEQ ID NO: 98652 - DNA, 122 bp, Homo sapiens
cagcctgtaggctgagttggaattgaattatttaaggaaggccatgagggcacaggctcccgcaatgctcatgtgcatgactgtgattactaagtcacccaacctcttaattttctggattt

SEQ ID NO: 98653 - DNA, 122 bp, Homo sapiens
ttttaggataaaggttttcaatttttgcaaaaattgctgttgggattttgataaggatgacgttgaatctgtggattgttttgagtagtactctcatcttaacaacagtaagtcctccagtc

SEQ ID NO: 98654 - DNA, 122 bp, Homo sapiens
cctctacctggatgatggcggcgtctgcgacttcctatgcctctccctggtggatggccgcgttcagctccgcttcagcatggactgtgccgagactgccgtgctgtccaacaagcaggtga

SEQ ID NO: 98655 - DNA, 122 bp, Homo sapiens
cacctcctctgcagccccctgggctgcagcccctaagggagagagaacctggggcccctccgatgcccacccaatgaggggggcatcatcccaggaaggaggtatttgaggaccctcctgtc

SEQ ID NO: 98656 - DNA, 122 bp, Homo sapiens
gggatcccaggttgtgcaaaaggcctggcacatgtgacttccatcatccatgaagcagctcggtcttccagcctgggagacgcggctgggggtggcggggagtcacttccttacttctccaa

SEQ ID NO: 98657 - DNA, 122 bp, Homo sapiens
tccttattcaagtgagaaacgaatttggccctccttatctggaggagagggttagaaggacgatggatggatttggggacatgtagtaggactgaattcctaggctgagctccaaccacctc

SEQ ID NO: 98658 - DNA, 122 bp, Homo sapiens
gcctggccaggccaaccccggctgctgccttataaggcgcgccgtcgccatggcaacgtgcgctaagttgcagcagtcgtgtcaaagttcactatatagagagctcagtgagctgatcgcgg

SEQ ID NO: 98659 - DNA, 122 bp, Homo sapiens
tgggtgagggcagagctgccctggacaccagggtctcctctgtctgcgtgcatcgcttgtcgagcccgcgagtgataaaggcaactgggacttgattgtccgagtgacagttgtgatcttaa

SEQ ID NO: 98660 - DNA, 122 bp, Homo sapiens
gatcccaccggcagggggcgccgcgggtcaaccattctcaccccactgggcagggtgggtcggctgccgtctccgctttacagataaggaaactgaagctcagagagcttcagccaccctcc

SEQ ID NO: 98661 - DNA, 122 bp, Homo sapiens
gggggcggcaacatggcggagtgagcggcggcgtcggggcttcacaacaacagtggtggccgtagcagcggcggcagcagcgtcaatagcatcggccacagcctgagcttcagcaccggcca

SEQ ID NO: 98662 - DNA, 122 bp, Homo sapiens
ccacagcagttacatttgtaaggcttctccccggtgtggataagctgatgcatacagagacggttcctggtcttgaaggccttcccacagtccctgcactcgtgaggcttctccccactgtg

SEQ ID NO: 98663 - DNA, 122 bp, Homo sapiens
gggagctgtctctgagaacctgcgggagagcgcccgggcttgctgcttcccggacccgcgcgtctctcgagcaccctcgtcccaccaccttgtgaggccgtagtgttatttttattttttag

SEQ ID NO: 98664 - DNA, 122 bp, Homo sapiens
ggtcttcccacctgagcctcctgggtagctgggactacctgcatgtgccaccacatctggcgtgtgtgtgtgtgtgtgtgtgtgtgtgtgtgtgtgtgtgtgtgtgtacggggtcttgctat

SEQ ID NO: 98665 - DNA, 122 bp, Homo sapiens
ctgtctcactccaaggacaagctgctgggggtgtgtgtggagactgggacaagccccaaacggggtcgtgccaccctgatttccctaaagaagatggccgggcacagtggctcatgcctgta

SEQ ID NO: 98666 - DNA, 122 bp, Homo sapiens
cctctccatatgacctttgggaagcagacatttccaaactggtgattgtatatctgtgggcgtgggaaaggtctttatttcatttttagaaatgggtctcaccattttgctgaggccgatat

SEQ ID NO: 98667 - DNA, 122 bp, Homo sapiens
tcaagctggcttttgagcttctgtttttttttttaatcagtgtgtaacaccaacacccaccgaaaccaaacggctctgggcagaggacacagccattcacgccccctgccaggaaaagctgc

SEQ ID NO: 98668 - DNA, 122 bp, Homo sapiens
ctcggcctgcccagttaatttttgcattttcagtagagacggggtttcgccatgttggcccggctagtctcgaagtgaccccaagtggtccaccggccttggcctcccaaagtgctagggtt

SEQ ID NO: 98669 - DNA, 122 bp, Homo sapiens
gagccgagattgcagcctctgccccgccgccccgtctgggaggtgaggagcatctccgcccggcagccgccccctccaagaggtgggggacacccccacccggccagccgccctgtccggga

SEQ ID NO: 98670 - DNA, 122 bp, Homo sapiens
tactccccatcacagggctgggggcggctgcagcgctatagtcctggaaggccttggcctcgccggagtgctcgcaggcctctcttcggtcaggcgctgcgcagtacaggtcccagaagacg

SEQ ID NO: 98671 - DNA, 122 bp, Homo sapiens
agggcatgggggagagagggactggaggccgacgaaggagtcccgcttctccctctggctcggggaggcctggagttgcaaagacggaataggaattgcatagcagttttcctccagacgtg

SEQ ID NO: 98672 - DNA, 122 bp, Homo sapiens
acctgatagcactgcccctttagtgaatacaaacttgtccttctctgaggggttgatccccgccaagcatgtgggagggacaacacaggaggggatgaccagtcctcaagagaccctgacag

SEQ ID NO: 98673 - DNA, 122 bp, Homo sapiens
agtcagtaccgctgatttctgcattcattcagcaagtatttatgatgtcacctggctccccgccagacactggggaaacaaacgtggagacagggcactgcccgcacagggcacattttggg

SEQ ID NO: 98674 - DNA, 122 bp, Homo sapiens
atcgttccattttaattaactttaatacgagcagccacatgtggcctctggttcctgccacggactcgggagcaacccctcctggtcgcggcttatgcgccttctctgtgtgctgctggggt

SEQ ID NO: 98675 - DNA, 122 bp, Homo sapiens
aaccggggctgcgcgccgcgcttgcgcgccagctggagttccgggtgggcgtcggcttggcggaccccgcacttggaacagccggctggccctaccggccccgggcaatgaggggcttagca

SEQ ID NO: 98676 - DNA, 122 bp, Homo sapiens
agaatttgctggggccagacagcaaggcccgtgaggtttcatcccattcaaacccagagacgtcaagtcacttgccagaggtcacacagcttggatgtgacagagtggggaagcccaaagct

SEQ ID NO: 98677 - DNA, 122 bp, Homo sapiens
ccctcgccaccgcggctttttgtggcttttcgcccccgccgctgaggctttttgccgccgcggtgtttgttcccaccaccgctgctttttgcggctttttgccccctgccgccacggctttt

SEQ ID NO: 98678 - DNA, 122 bp, Homo sapiens
gaggcggaggcggaggcagaggcccctaggagggcgaaggccggcgggttaacgaggaggcgctgagtgcacggctgggctccacgctgatttctcctaatgaattaataatggcgctcggg

SEQ ID NO: 98679 - DNA, 122 bp, Homo sapiens
gcagcacaaactcagcaggcgcgaacaaatggtaaagagaaactgggcaaacaagcatcacggctcctcagctgagaaagtgggggccctaaaaagggccttttgttgatagaaagggacgc

SEQ ID NO: 98680 - DNA, 122 bp, Homo sapiens
gacaaaaggaaaatggaagcgtgtgtgggaagcagaagggcagcccccggaagggagcaccgagtgcggtgcgcccagacccccgtgcgcccagacccccatgtccctaaaccccagggtgc

SEQ ID NO: 98681 - DNA, 122 bp, Homo sapiens
ccaacggcattctcagcgctgcagcccagggagttaatttagccagtggcattgtgtgtgcgtgtgtgtgtgtgtgttttttaaaacaaatcaaaaaatctctttaatgggtcaagaatagg

SEQ ID NO: 98682 - DNA, 122 bp, Homo sapiens
tccagaggtgccctcgcgtgggcttgctctgtgcgcctcggggacttcctcaaacggactcgggaaagacaagacagttggctcttaaataacttcctaagaggagccctcaccctcctccc

SEQ ID NO: 98683 - DNA, 122 bp, Homo sapiens
ccaagtctccaggtgctatctcctgccagggcctctatcctgagaccagagctgcatttccgcatccccgaggccctcacatggcctgtgtcccgctaaactcagactctttcctctaaccc

SEQ ID NO: 98684 - DNA, 122 bp, Homo sapiens
cataagtggcagctgctgttatgttggtaggttggaatgaagacatcttggggagaaagccggtgaagctcccttgcaaggttgttctgttgaaacactgtccagagaacactgattgaacc

SEQ ID NO: 98685 - DNA, 122 bp, Homo sapiens
tggcgcgagaccgtgcgcgcgagttttaggaggtccacgggcaccacggccccgggacagcgcttctccaggaactcttggaagccctggacacccatgcttcgtcggtgggcagacgcgat

SEQ ID NO: 98686 - DNA, 122 bp, Homo sapiens
cttgagtaactgtctcgacttccaccatatccatcacgtgagctgctataatcatcatagcgactgcttccaccataagatggcgggggccctcgtgtaagtggagcactacgtgagttacc

SEQ ID NO: 98687 - DNA, 122 bp, Homo sapiens
tgacgggcctgagggacgacaagttgacgctcctttcgtcatcacctggtctaggagggacgcccggggagaccgtacgtcactgctctgcgccggaagaccctattttcaggttctcttcc

SEQ ID NO: 98688 - DNA, 122 bp, Homo sapiens
ccaaggtttttaagaaaacagttgccacagagacaaagcagccgcatccacagctgggcgcgagcttctcctgggagctgtggcagagcgctctctgctgctcaccccatgctccgcaggcc

SEQ ID NO: 98689 - DNA, 122 bp, Homo sapiens
aatctcagcccccaactctgcctgatgccctttatcttgggcctcttgtctggaggtaagcgagggtaaccttcccttcctgctgtctccagcatccctccttggccttttggggccaggct

SEQ ID NO: 98690 - DNA, 122 bp, Homo sapiens
cctaagaccaggagttctagaccagcctgggaaacacagggaaagcccccgtctctataacgcgcctgtgatcccctgaggcaaggagtttgagaccagcctgacccggtctctacaattaa

SEQ ID NO: 98691 - DNA, 122 bp, Homo sapiens
ggaaggattcaggctatggaaaccggctcgaggtcaggcggcgtggagttgccagggctgcggttctaagacaagtgtctcacccagttcgcacccatcgcgaaacagattcaaggcacaat

SEQ ID NO: 98692 - DNA, 122 bp, Homo sapiens
acgcgcgcgccgcggatcccggaagcggtgtcagatgctggggagccgggcgggcgggtgcggtggcggcgggcggcgcgggggcacttgttgttcttcgcgaagtcggagcccgagcgcca

SEQ ID NO: 98693 - DNA, 122 bp, Homo sapiens
ggacccgctcaaggcggctggcctgcccgtgggggcctccgacggcctcctgagcgcgcccgagaaagcccgggccttcttgccgccggcctcggcgccctactccctgctggaccccgcgc

SEQ ID NO: 98694 - DNA, 122 bp, Homo sapiens
ttccttttttgtcttgtggtgagagcaattgaaatctactatattagctaattcccagtacgcaatacaatattgtcaccattctgtacatgacatgtctagacttactcatcctacacaac

SEQ ID NO: 98695 - DNA, 122 bp, Homo sapiens
agccgccaggtctgcccacatggttggcagtcagcatcaggctgagggtacagggaggggcgtcccaatcctgtgggcggaccagtttggagggaccacctggcaggtcaggtcccctagaa

SEQ ID NO: 98696 - DNA, 122 bp, Homo sapiens
ggaattacaggcacaagccacctggcccagccatctactttatattcaaataaaactttacgtcccattataaagggaaaaaatggcaaaaacaggaggtaaccatttaacaagaaagcaga

SEQ ID NO: 98697 - DNA, 122 bp, Homo sapiens
tttgaaactcaagcgcgttgggaatcggaagtgctggggggcgcgtgttggggcgcgggccggccgcgggaagtggcggcgagcgcccgccggccgcgctgctctttgttcggcgccaggcc

SEQ ID NO: 98698 - DNA, 122 bp, Homo sapiens
gacaaggtcttcccttctttggacgaggaggtccccccggccgaggtaaggtccccttggcgctggccctaacttgccggcggcgggacagtagtaggacccgggcctggcacccgcgagtt

SEQ ID NO: 98699 - DNA, 122 bp, Homo sapiens
taagagcagtattgctcctgagagtctttatcatcttttctcagtggagaaccctcatcacgatttgtcatggaccatcagtgcctaagatgcgaagggagaaatgtattgcacataaaacc

SEQ ID NO: 98700 - DNA, 122 bp, Homo sapiens
cgaaaaagaaaggaggcggccagtccgtaggcgtgactttaactcaggaagcacacagagcgcagattttgcggataactggcttgacaagcaggctccccttatttcccattatgggcact

SEQ ID NO: 98701 - DNA, 122 bp, Homo sapiens
ctgacggctgaaagtttcagtttcttcactgctcctgttctgtctgagagccaggagatccgaggggcccactgcactcagccaggggcgagggatgcctggtagaagtgtcatttctattt

SEQ ID NO: 98702 - DNA, 122 bp, Homo sapiens
agtgaggaggatgggatggggtgaatctgggtctatcgcggcggggcagcgagggcggcacgaaggctgacccagagctggggaccgggcagggaccacacctcccagccagcacggcaggc

SEQ ID NO: 98703 - DNA, 122 bp, Homo sapiens
gacagtggcctttttttcagagtgacttagcactctccccccaaaactttcttcagttatcgcccggtctccctccctaagacgcctccaccccagctgggtcttaaggtctaaacaagtat

SEQ ID NO: 98704 - DNA, 122 bp, Homo sapiens
ggggagatggactcacagcatcttgtcaggtggggtgcagggtggcatggcacccaccatcggtgccactgatgtaaagtccaggtacagagcacaacccgtgcacatatttgggggcttgg

SEQ ID NO: 98705 - DNA, 122 bp, Homo sapiens
taacagtgttctcggtatcgaattggcgctcaccacagattctgacctcaaggttgaaggcgctgaagtcagtgtcttcgtcaggtgtggggtgcggggtctttgagactgcacggtgcact

SEQ ID NO: 98706 - DNA, 122 bp, Homo sapiens
tatagacctctgctgctcatcaggaaacttactggagatgaaggccccagctgttgtcaccgggtttggaaagcaccttaactgaatcatgtaagcatcaggacataagcagcactttgtgg

SEQ ID NO: 98707 - DNA, 122 bp, Homo sapiens
tactaacccgatacgcatgcatcattgtgaactatagcctagctggattccagtctcctccgtcctcggtgtcttccttgggcgcaggatcccgccgggaccccatgccttggtgcatttcc

SEQ ID NO: 98708 - DNA, 122 bp, Homo sapiens
gggtcattttgtgtgagaagtcagcacctctagcactccacgccatgcatgcataggtgacgccatgcacaccgagggcacagaggacacaactcatctgccccataaaatcctcctaactg

SEQ ID NO: 98709 - DNA, 122 bp, Homo sapiens
ctctccaaatgaaatgccttttctttttcagagatggggtctcgccatgttgagccagctcgtctcaaactcctgggctcaggcaatctacctgcctaggcctcccaaagtgctaggattac

SEQ ID NO: 98710 - DNA, 122 bp, Homo sapiens
tctgctatgggaaggccccgcattttcaggtgtgtgtgcgggggtgtgggggtgtaaacgcgcatgtgagtgtgagtttggcctccacgaatcctctctgggagcccctgccccagtcaagg

SEQ ID NO: 98711 - DNA, 122 bp, Homo sapiens
aggacctttggctcgggagaggcaggtgaggtagtgggcatccgaggggatgcggggctgcggggctggtggccaggacttgcccctcactgcttggcttgctctgcagactgtgggctgcg

SEQ ID NO: 98712 - DNA, 122 bp, Homo sapiens
gtctgggctgataggagcggctccagtttggccaacgcaggtcgtgccccgcgaacagcgcgctgctgaacttttcatccggacgagaaaaacgctcagatgcgcgccagctccagggaatg

SEQ ID NO: 98713 - DNA, 122 bp, Homo sapiens
aagatcatgaaattgaacagaagtttttaaaaacttagtcagagctctctaaggaagtgacgattaagcaaagacctgaaggaggactcagagctgattagatgaagagaagcaaggttaag

SEQ ID NO: 98714 - DNA, 122 bp, Homo sapiens
tgccgaacctctgtgggcccttgtaagacgggacactccctacctgatggggggattgcacgggggctaacaagatcatatatggaaagcacttgagcagagcctggtgctcacccgggctg

SEQ ID NO: 98715 - DNA, 122 bp, Homo sapiens
tgacgctggttcaaaatgaataatcacagtctgctatgagacaggaaaatcaccacgtggcgaccaaggctggaggttcttagcccctcgtcaaagggattttcctgaaatagtgaccacct

SEQ ID NO: 98716 - DNA, 122 bp, Homo sapiens
atccctgagaagggtggctaccaccagagatgtggcagctctggtctcaggaagcatagccggaggatgtcccaggcaaccaaacagccattcatcagtaaggagccagagtgagggctgct

SEQ ID NO: 98717 - DNA, 122 bp, Homo sapiens
accctggctccgagagagcggggacagtgacagtgcttcagacagtcacccactgaggaacgggcaccacccgtcgcccgagacctgtgtcgccacccactgaggaacgggcaccacccgtc

SEQ ID NO: 98718 - DNA, 122 bp, Homo sapiens
ctcctacaggtgcactcactgcacgcatgctgcagtgcctgccttagtgctggactgactcggtgctggaccgacacggtcctgaccctcctgccgagccttctggtgtcctggctggtgcc

SEQ ID NO: 98719 - DNA, 122 bp, Homo sapiens
ggcgcatcctccaccaccagccagtggaggttgggcacgtgcagcagcgtgttggccatgcgcgtcagctcggccttctgcaccgggcggctgtaggtgggcgtcaccacgtggatggtggg

SEQ ID NO: 98720 - DNA, 122 bp, Homo sapiens
tttctcccttttgcatttggtgctacagacttgagacaccagcagaagttgtgttcagcccggccccgctgcgcctgtccgggccggggctggcgccggttgtgtttgtgtccaccttgcct

SEQ ID NO: 98721 - DNA, 122 bp, Homo sapiens
ttaaacccctttgaaagcaacactagtgtattattttcccatggaattgagctgatgaggcgtgggctccctaacttccctctcttttcacaaccatcagttttatttattattgttaattt

SEQ ID NO: 98722 - DNA, 122 bp, Homo sapiens
ggcgggcgggaggcgggagccggagcccattggtccaatttagcttggctggggctactgcgccgtgggctaggcacagtcctgaggggcgggactggagctctggcgcccacctctccctt

SEQ ID NO: 98723 - DNA, 122 bp, Homo sapiens
gggggttggggggtagagagacattcctctctgtcccccatgtccctgaaattcccggttcgttggccctagtgaggtaatccatctatgacatcactcagctcagagttccgggaagtggg

SEQ ID NO: 98724 - DNA, 122 bp, Homo sapiens
tgggggacctagaggttgggagcggcacggaggggcggggacctgcgcccgactggctgacggggaggggggagcggcgggggcggaggccccctccgggcggcgctgggactgtagcagct

SEQ ID NO: 98725 - DNA, 122 bp, Homo sapiens
tcgtccacgcccacaacagagaggtggccccggtagggccttgatttctccaaccgtaagcgagccgcggtgtgggtgactgcagtagggcaaactcggtgcggtgaaggcttggttcaatc

SEQ ID NO: 98726 - DNA, 122 bp, Homo sapiens
tctcaccgaaggcttgtggccatctctgtaaagtttctggggaggtgggcacggggtaaacgccggagggttctgtggagcctatgggactgactggaggccaaagaactttgggccgcaga

SEQ ID NO: 98727 - DNA, 122 bp, Homo sapiens
gctggacctcacggtctgcgaagctaaaacactcggggaggatcctcttcacggccacgtcgcggttgtcaaacatgcccctgcgggatgaggagtgggagttgtgtctgggaagcacgagt

SEQ ID NO: 98728 - DNA, 122 bp, Homo sapiens
tcggagaggcgggggcaggggcggcgctgcagggctacggggcggctggagccgaggctgcggcggagcgtggtgggcgggcggtggcgaaggcgacacgcttcgggcggccaacacctggg

SEQ ID NO: 98729 - DNA, 122 bp, Homo sapiens
cacccagcccgagaccctccgttgctctctgactccgaaggaaaatctagttccttcgggcgcctgggactcctttctggaggatcagacgagtcgggctccgcgaagcccatgcgggctgg

SEQ ID NO: 98730 - DNA, 122 bp, Homo sapiens
ggctgtcagggcgcacgcggagcacgcagaccttcgctagcctcgcgacggtgccgctgacgtgaatgaacagctctagacagcctttgccggtgatcttggcgcgaaacttcatgatgcca

SEQ ID NO: 98731 - DNA, 122 bp, Homo sapiens
aatacggatggtcctcgcctatctgtttgctcagttgagcctctggtctcggggtgtccacggtgggctcctcgtgctgggatccgccaacgtggatgagaggtgagtgtggcccagtggca

SEQ ID NO: 98732 - DNA, 122 bp, Homo sapiens
ccgccagtattgctcttacttcaataccgacatcgcaggataaaggcagtcacatttaggcgcgcaagcgcaattcttgattaatgagccaaggcagacttctcaatccgagttttgagttt

SEQ ID NO: 98733 - DNA, 122 bp, Homo sapiens
ttttatgtttccaggtttctccttattctctaagacgagtagtattgcctggacgaggaacgccctacacagtgcctgccaaaggctgactgtcatccctgtgtcatttgagggtaagagtt

SEQ ID NO: 98734 - DNA, 122 bp, Homo sapiens
gagggccggggcctagggaggggcggtgtcgtagggcggagcccggagctcggcccctgacgagcccgaactcgtcaacttcctgtcggtacttgaagaagcggagccagggctgagatccc

SEQ ID NO: 98735 - DNA, 122 bp, Homo sapiens
aaaacaaacagaaaaacagcacctaccaccgagggctcttgggaggattaagcagtgctgcgtgtgacagtgtccggggtcaagactcaataatgggtcacatccttagaggtcctgttagc

SEQ ID NO: 98736 - DNA, 122 bp, Homo sapiens
gaggtgcggagggagagtcgcaggcgggaattggggctgcgcgcggcgcttgcgggacagcgcgatttccggaggggcgtgggctcgacacttggaacggccggccggctcgggcagtaagg

SEQ ID NO: 98737 - DNA, 122 bp, Homo sapiens
ctaaatacacctacgtatccaggctaccgaatattgggccggacactctcctggcttagccgaggatggcaagtgatatgacaggtgatatcccagttttcatttctgatttgaggttattg

SEQ ID NO: 98738 - DNA, 122 bp, Homo sapiens
ccctgctctcccactgcaggcctcttcggcacaggaattcggtcctacttcaccttcctccgcttcctgctgctactcaacctgctgagcctgctgctcaccgcaagcttcgtgctgctgcc

SEQ ID NO: 98739 - DNA, 122 bp, Homo sapiens
ccacaaagccatagtataacgttataatagtaaatagcataaccttataataaatagtttcgccttattgaggtaggtagtaagtgtgctttaggtagatttggttggtgcaaatgtaattg

SEQ ID NO: 98740 - DNA, 122 bp, Homo sapiens
cccaggtccccaggtgtgtgaactccacgctgcaaagactaagaacaggattgaaaccggcggcaccacttacttcctgaagttcccttttcttctggtggtttctgggtcagagggcgagg

SEQ ID NO: 98741 - DNA, 122 bp, Homo sapiens
acagacctggtggtcttcgggtatgtccgaatagcaaagaacggcttagcagttttgaaacgagaaaagttcccttattcccctcgcagggcgtgtgacgggggtgtggcgcgcttcttcag

SEQ ID NO: 98742 - DNA, 122 bp, Homo sapiens
gccgcatcttcctggcagcaccaggcgcaaggcaggctctgtaggcggtggcagcggcggcggctgctccaagtcccgctccgcaccccacccacctccccgaaaccggaaatggctgcagc

SEQ ID NO: 98743 - DNA, 122 bp, Homo sapiens
taagcccctttgcccatgatttcactttctagtttcagttaccattagtcaaccagggtccgaaaatattacagtcaagatattttgagagacagagaccacattcacataacttttattac

SEQ ID NO: 98744 - DNA, 122 bp, Homo sapiens
tagatagaggcaatgaagatgctacaagctgagacaatggtataaacaaattacaaacatcggccacccactggaagccagaccatgtgctaagcatttcccatgtactctcttgtttagga

SEQ ID NO: 98745 - DNA, 122 bp, Homo sapiens
gatagcttctttgctatcttgtataacaagatgcacctggcccattttgtacaattcctgcgtcaaacctggaatgaaccatttgtttaagcagcactagtttcttttagtgagaaatggta

SEQ ID NO: 98746 - DNA, 122 bp, Homo sapiens
tgcgtctggagggcaggggtgcctggacactccaggcaggcgacaggtgacaggtgatcacgccccctcaacgccgccggggcccacaaggccccgctccctatgagttcagtcctgcccca

SEQ ID NO: 98747 - DNA, 122 bp, Homo sapiens
agtcgcttggcgtcggggtgtgcgacagcgccatatggaggggcccgggcaccgtgaggccgtggaactgcggggcggggcgggcccagggcgcggcctcggcgggcccgcaggaccgtgag

SEQ ID NO: 98748 - DNA, 122 bp, Homo sapiens
ccgggaaatcaaacgtccatttacatcttgtcctgcaaagcttcatcaaaacttctttgccggccagtcacgtccccttatcacttttccagcccagctttgtgactgtaagtgttggacgg

SEQ ID NO: 98749 - DNA, 122 bp, Homo sapiens
tctgctctttgtgatagagtgcaggttaactgcctgagatctgagccagcctgtgtgggtcgtgactaagctcttcctacccactcctttcagagcatgtcctaaggcaaccaatcctgagg

SEQ ID NO: 98750 - DNA, 122 bp, Homo sapiens
ttctcagccgcagggtctccgcctgcatcactcgactctaaaatttccttccctagtgcacggaactgctgtccaggactctgctctccgactacctcagggaggattctgttttgggaaaa

SEQ ID NO: 98751 - DNA, 122 bp, Homo sapiens
tatcttcctgctatgttatatcatgacagtgtatgttaaaactctagcttctgggccaggcgtggtggctcatgcccaaaatcccagcattttgggaggccgaggtgggtggattgcttgag

SEQ ID NO: 98752 - DNA, 122 bp, Homo sapiens
gttcaccgggaagcttgctccccctccttctgtattcctggcaaatgacaacgggcaaagcgaagcgtgggccaaggacggaggaggcggtgccgcgcgtctgccgtggtcacaagccacag

SEQ ID NO: 98753 - DNA, 122 bp, Homo sapiens
tggttttgtgagctagagacaagcgatgagctgcactgaggatcaaggatcaggcattagcgctaacaagtgcccttgctctttggcaaaattctccttttacagagcacaagcaggattgt

SEQ ID NO: 98754 - DNA, 122 bp, Homo sapiens
ctcaaacaggtcacttgggccaacgaaagcacttgggccaacgaaagcacttggggaactcgtggggaagccgctccttcctgctgtttccagaaggctcctacagagcagctgctggctag

SEQ ID NO: 98755 - DNA, 122 bp, Homo sapiens
aggagcaagatgtttgtatgtttaataagtagatgatttgccatacgttatgtgaatgtgcgtccatgagtgttcttatgaagaatgttctgttctgagtccctgtttgaggagcatgatta

SEQ ID NO: 98756 - DNA, 122 bp, Homo sapiens
ggagggcaagcggagatgccctcgcggggcggggacgcgcgatggggggcgtggggacagcggcgccccgaccgcccgacacctgaccgcgcgcggggaggccacgggccggggcggcggcg

SEQ ID NO: 98757 - DNA, 122 bp, Homo sapiens
tgttatccacacgtgccctaccagaggcccaggcaggttctagcaggtggacaccagctccgccatccccaccgttaaatactagcagaggcccacattcaggtgccctcccaggaccagcc

SEQ ID NO: 98758 - DNA, 122 bp, Homo sapiens
tctatttctctgggttcattgtttcttgtttgactttcatgggaagtttacagtcgttttcgttcttccaaagtcagttcctgacttctctggtcaaggggttgaagaaacaactaggaaaa

SEQ ID NO: 98759 - DNA, 122 bp, Homo sapiens
acagtctgtctttccttctccagttttcaatgagtcccagcccccagccccgcctcttggcgtataataaacaggagtgcaggggggagtactatcgtctgccctcattctttgatatcttt

SEQ ID NO: 98760 - DNA, 122 bp, Homo sapiens
gcacggcgcggcggaacaggatatacacccaggggtccaggatctggttccaggtggccacgcgcaagtagatgagcagctccttctccgtggtgcgggacagctgcccggcggggctcatg

SEQ ID NO: 98761 - DNA, 122 bp, Homo sapiens
ttccctcccagctccgcccctcgctaataagttcctgaagcagctgtggctgttccagggcgggggtcaggctgagagtggtgccccagccaggcccaccacccaggccctgcatctggcgg

SEQ ID NO: 98762 - DNA, 122 bp, Homo sapiens
caatcttggtatagattgcacacttaggcattaggctgttcatcagaataaaaagtatcccgtaagaggtagattatgaacatccatgactaaatatcctagaaccttgtcaggtcaaggct

SEQ ID NO: 98763 - DNA, 122 bp, Homo sapiens
tgtgtcgcgctctctggttccttacgggaaggccgaggccgctaggaagggttgcacggccggactcctaacagcggctctctggcctggcgggagcagaggggcgctcacatccgcagccc

SEQ ID NO: 98764 - DNA, 122 bp, Homo sapiens
caagaagctacattagctgggcactgggttgcatgcccatagtcccagctaggaggcttacgtgggaacatcagttgagcccaagagtttgagtccaccataggcaacatagtgagaaccct

SEQ ID NO: 98765 - DNA, 122 bp, Homo sapiens
ccctcgggagcagatgggtcccggcggcgctggtggggagaagggctcggggctggggggcgagaggcctccccctggagccaccttggggaaacctgacagtgtgaagtgggggttagggt

SEQ ID NO: 98766 - DNA, 122 bp, Homo sapiens
ggtccaccagaattctgtgctcataagggcatcccgagcgccatgtgcgaagtgggtggccggggccggggacgtgcgtatcgctcaggtgctgctgtactgtcccaccaggcttacaaaaa

SEQ ID NO: 98767 - DNA, 122 bp, Homo sapiens
cgtggtagtggttggggcagttactgagcagccctagctgtagcctccgcctgcaaacctcgccccttcagtctgagccccgcccccgcaacgcccgggcccaccctctcccttgtcccacc

SEQ ID NO: 98768 - DNA, 122 bp, Homo sapiens
tctgtgtccgtgccctggcccttgctcggaccgcctctgaccccagccacgcagcctggccgagccccccaccagactcccccgccagtgactcacagagccacgtccaacttggcggccag

SEQ ID NO: 98769 - DNA, 122 bp, Homo sapiens
ccgaactcttcaaaaaactacccatctcctttaggattacaccattcaccatctggacctcggtcgactttcccagtctcatatccattctgtgcataggagtccccccatttcctcctctt

SEQ ID NO: 98770 - DNA, 122 bp, Homo sapiens
cccgcccccatctcatcctcctctaacccgggccttgctgggctcccccttccccagtcccggccgccttctcccagtgtgcgctgcctgcacctgtgcctggagagcatcgaccccgcctc

SEQ ID NO: 98771 - DNA, 122 bp, Homo sapiens
ggttacagatggccacgtagcggtcatacgccatcgctgacaggatgaaggactcagagacgacaaagaagcagaagaagaagagctgagtcatacaccctgtgaaggaaatgatgttcttc

SEQ ID NO: 98772 - DNA, 122 bp, Homo sapiens
catccccccaagccagtagctgtgctgcgcagctccctaagcggttgtcaccgctggagacggttgggagaaccgttgtggcgagcgctacacgaggcaaacgacttctcccttctttgaac

SEQ ID NO: 98773 - DNA, 122 bp, Homo sapiens
gaccaggcaaccgaaatcccttctcagcagcgcctcccaaagccgggcaccgccttccttcggagaaggcgcagagtccccagactcgggctgagccgcacccccatctcctttctctttcc

SEQ ID NO: 98774 - DNA, 122 bp, Homo sapiens
gaggccgaggccaaacgatcaccagaggacaggagttggagattagcctgggcaacatggcgaaaccccatctctactgaaaatacaaatattagcaggcttggcggcacacgcctgtagtc

SEQ ID NO: 98775 - DNA, 122 bp, Homo sapiens
ggagtggagataccttccctgacttgactgagacagagcctgatacagctccatgtccctcgtcattgtccatggtttcacttgcacatttgtgtaattatttgattaatgctttccgttta

SEQ ID NO: 98776 - DNA, 122 bp, Homo sapiens
gtagcattttctgtgtgtttgtgttggggtgcccctccccacatccccaccccgctttcccgctgccaggagttttcattcaatcatttttgtggaagacctagtgtgtgctagaacaaata

SEQ ID NO: 98777 - DNA, 122 bp, Homo sapiens
tttgctctctgcaggcagtggcactgctgtgcgtggatatcacatttccttcccagagtccgtgggaggcctccttgaatgtgagaagtgcaaacagagagggacacatttgttgtacagaa

SEQ ID NO: 98778 - DNA, 122 bp, Homo sapiens
gtccctcacctccgcctccgaccctgcccgcccgccctcaccctcgcctttgaccctgcccgccagctctcctgctgccgtgtgccgtgcttgtgctgggacagttttccgagatgtggcag

SEQ ID NO: 98779 - DNA, 122 bp, Homo sapiens
atggcgtcacgtgacataattaccaccagaatcaatcaagatgaattgcacgtcagcgcccggtggggatttttgcttagttgatcctggcccaagcctcttgtgcaatcgatggctcaggt

SEQ ID NO: 98780 - DNA, 122 bp, Homo sapiens
ggaactctagtctcgaaggacctagggctgcagggggacgtttcacctgaaggactgcctcgtttcaacaacaactttatggctcccggaagtgcctcctccccgtccccttcctttccagc

SEQ ID NO: 98781 - DNA, 122 bp, Homo sapiens
ttggagagtggtgatgtgtcttgcgaaattaaaccacagagaacgtcgatttgaaactttcggagtttcggagaaactggccctagctcagctgccagtgaccagtgagatggattcagaat

SEQ ID NO: 98782 - DNA, 122 bp, Homo sapiens
agcacgcggggcgggctgtccttgtccctggtggcgggcttctgctcgtccctgtgatgccgcaggagctcgtccctgtgatgccgcagcagcccatccgcatgcctgtcccggtgcctctc

SEQ ID NO: 98783 - DNA, 122 bp, Homo sapiens
cctccccatcactgagccccacaccaagcgcggggaaactttccctccgcgcgcggattccgtggtgagaaaagtgaggcccaagtgtcaaccaagtttcccaccatgttgggtttcctggc

SEQ ID NO: 98784 - DNA, 122 bp, Homo sapiens
ttcaaacctagtgcacttcccgccacccgcctccaggcgcaggctggccttctgattggccgatagcgcaggctctccttgacaggattggttgaactcacccttggattctcgaggggaaa

SEQ ID NO: 98785 - DNA, 122 bp, Homo sapiens
gtgcgtcccacctctgttctcagcccctgcggtgcccgcagtcagtggggcagtgagaaccgcgcaggaaatagctggcgccatggtgtcggttctggttgacagagtgccacctggctaaa

SEQ ID NO: 98786 - DNA, 122 bp, Homo sapiens
ggtctgtggggacaagtctaggacttccttactcggagcacccaaggctggtaaagtaaacgaagcccctaagcatccagaaaagaggccctgcaggaaagaactggcgcatggctcctgga

SEQ ID NO: 98787 - DNA, 122 bp, Homo sapiens
atgttcaccctaggctgcaggggacagcgctggaccgtacagacctgcctaacatgccagcgcagccaacgcttcctcaatgatcccgggcatttactctggggagacaggcctgaggccca

SEQ ID NO: 98788 - DNA, 122 bp, Homo sapiens
cctgaagaaaagacaatttccaagataaattggcgcagaggtctgctctcactgtctccccggggctgatggtgtgggcaggcttccatcagcccagtaagtgatgggcccccagagaaatg

SEQ ID NO: 98789 - DNA, 122 bp, Homo sapiens
ccgccaggagccgcctcccggcgccggaccagggtcccccagtgctcgatcctggggccccgaccttgatgccaggcccccagactcacccgggggcccccagacgctcaccaaaaatgtca

SEQ ID NO: 98790 - DNA, 122 bp, Homo sapiens
cggggcagaggccccgggaagactgcggtgtgcctagggccacacagaagacaccctccgcggtggtcttgtttcaagtccaatttatttcacacaacacacaggctgctgagggaatccac

SEQ ID NO: 98791 - DNA, 122 bp, Homo sapiens
ccatgaactgacctgacaggcatccttcccttggtcattatagccacagacggtccccctcgtgaccattttactcttggatatattcttgttcttgagcatctcacaacatttctcatgac

SEQ ID NO: 98792 - DNA, 122 bp, Homo sapiens
aggctgcgggcgcggggtctggcgaggctccccgggcgaggttggctggcgcggctactacggggtggaacttgttggtgacattcagactctgttggctttgacgggttgacgccgccgct

SEQ ID NO: 98793 - DNA, 122 bp, Homo sapiens
acagcttggacaagttactcactttttggagactcatttataaaacagagagagtacatacgttgcaaagttgttatgaaattaaacaccacctggcacatagtaggaactcaataaatgaa

SEQ ID NO: 98794 - DNA, 122 bp, Homo sapiens
taggaaaggagggattcccgcctcccgcgagccccctctctccacccccgccgcctctcccgccaggctccccactcctatactagggagccacagcgccccccgggctgtcctccgccagc

SEQ ID NO: 98795 - DNA, 122 bp, Homo sapiens
ttctattctggggtgtaaggggcagctggaccactccagctgggactgctaggaaggttgcgggtccacccggccgagccgaacgagggaaatggtcctcacccggccactcgccggttgaa

SEQ ID NO: 98796 - DNA, 122 bp, Homo sapiens
atgtgcaaatgatgagcgcccccaaaccagaggggcaggcgcggccggagtagtcgtcagcgcgtgcaaaccggcgaggacggatgggcttcaaaacaaaataccaaaaccaacaacaaaaa

SEQ ID NO: 98797 - DNA, 122 bp, Homo sapiens
aacaggactgggaagatcttggccaggcagcctgcaaatgagtaaaaaccagagcctccacgctaagccacattctcacctcgcaattctctgatgcactcctgccgatgaaggactgcttc

SEQ ID NO: 98798 - DNA, 122 bp, Homo sapiens
agattgtgaactgtcctttcttcattttattttatagagcttaaaaatgactactgaaagcgaaatgtggcacatgcatacaatggaatattagccttaagaaattctgacacatgctataa

SEQ ID NO: 98799 - DNA, 122 bp, Homo sapiens
gacatcaggggcagagccctccctgagcgtcccgacattgatgctggcagaacctaggcgcggctcccgccgaaccagccgggccctggtcacaccaagctctgactcccagagtcccctgc

SEQ ID NO: 98800 - DNA, 122 bp, Homo sapiens
ggtcagcttgaggtggacagactaaagtggagtctttcaatgtaaaaacagtatagctctcgcgtgtttaggattgacttaatttctgtcaaaaacatctcacaattttctgtgtaaggctc

SEQ ID NO: 98801 - DNA, 122 bp, Homo sapiens
ccgcgtggcttctgtctccgggcgcagggacctgagggtaaccgagtgtctgttgctctgcgtccacctgtggcagaggctcacggggtaacgggcgctttgcccggagacaccgtggatat

SEQ ID NO: 98802 - DNA, 122 bp, Homo sapiens
tctgaggcaatcaggctggagcagagattgaaggaggggcatgtgttttggggttcttttcgaggacaaatggagtaaccatggccaaacttctcagatcctctgccccttggactggctcc

SEQ ID NO: 98803 - DNA, 122 bp, Homo sapiens
gcagacttctcggcgttagccccgcctcttgaggcgcttccgccgccgggctcctggacacgcctcctttaattggctaacgtcacgctgggagtgggcggggaaaatatgtcagactgtgc

SEQ ID NO: 98804 - DNA, 122 bp, Homo sapiens
gttgaggaaaggactgggcgcaggtctagattttggcatttattggctggtgaattaacgcgagggagcaaacctcttgagtctcagttctgcacgtctaaaaatggagataacgatgttta

SEQ ID NO: 98805 - DNA, 122 bp, Homo sapiens
taaattgtatctagcaacagctgttctccaccaactcagtttctggattccaggtcctcccggacaaaaaaattcaaaatgggaaggtggtcatggatcagtgaccatagattttactattt

SEQ ID NO: 98806 - DNA, 122 bp, Homo sapiens
cccgctcctccctgtatttctccgactcctttgctgtcttcacctgcgtggttctcagctcggtcagctctgactgcagcagctccatctcccactgcaggtccttgttctgcgccgtggcc

SEQ ID NO: 98807 - DNA, 122 bp, Homo sapiens
ttgctcctgcccctccaatgcaccagcctacctactgggatcccctgtatgtgtatttgtcgccaatgacactaaacattttcactgtcccaacccagacgcaccagctgacgaggagttcg

SEQ ID NO: 98808 - DNA, 122 bp, Homo sapiens
gtttagtgttaaacagtggagcaggtcctgagcgggcacggccaggcctggaggagcggccgcacacacagccaggcgctaggctccctgcgggacctcgggaagggggaagagcgtcaaca

SEQ ID NO: 98809 - DNA, 122 bp, Homo sapiens
ggctgagttgcaggctgggggtgggggtgggttgtggtggaggagcaataggttgaagatcggaggcattatcagtgggatctattgtttcctggcacattgggaggaaaaacaaagggatt

SEQ ID NO: 98810 - DNA, 122 bp, Homo sapiens
ctccctaagccattgaggacctgctggtttctgggaactcacttctttgaagatccggggcgtgaggtagggttgggtgccaacctgtgtcatccaaacacattaagagggccctgtcagtg

SEQ ID NO: 98811 - DNA, 122 bp, Homo sapiens
cacgctagctccccggagagcaccacccggggagcaacatcggcggatgcagagcacacacgctggccatatgtcattggggcgccgcgctggcagcttttcatggctctaatttcccgagg

SEQ ID NO: 98812 - DNA, 122 bp, Homo sapiens
gaacatacataacatttatcagttaaatcaataaacgtctttgtcttctactgcacacttcggagtgcccccaaacaattacaataacctcacagaacgatgatcacagatcaccatagcag

SEQ ID NO: 98813 - DNA, 122 bp, Homo sapiens
ggcttgaggccgagaatgagatgtaaaaggactcctgaaaactacatttcccatgatgcccgtctccccacgcaaccgcggccgcgacgtcgctcccatggcaacccagaaggcctcactcc

SEQ ID NO: 98814 - DNA, 122 bp, Homo sapiens
ctcccacctggaatccaaagtgccgtggagatctttgagccggggcacaggatccttaggcgtgtgctccagcctttagtgggtgcctccaggatggctgggaagaccagtcatgagtcaga

SEQ ID NO: 98815 - DNA, 122 bp, Homo sapiens
tcttcagggaaaggagagtggagccccagagctgtcgaccctgtcactgtccacaggcaccggggtcctgttaggatccccctcccccaacctgcttcaagggtagccctgttcctgtctgc

SEQ ID NO: 98816 - DNA, 122 bp, Homo sapiens
tagcagggggtgtggtagacagaagggatgaaagcaaagacagaccacagcgcgagatgacggtctcaatctgtacagtactcgtgtaagcgctctggatttaaagaacctagcatatttga

SEQ ID NO: 98817 - DNA, 122 bp, Homo sapiens
gagcaagtcctgcccggctgtgcaagagcgaggacagcacagtcggctgccttggagacgcggggcaccgccctcgcctctctgctgcagctagcgggatgccagcggccactctggacggc

SEQ ID NO: 98818 - DNA, 122 bp, Homo sapiens
aaggcagcacatcacaacctgtcacattgaaataggcgctcattctgctatttcaccttccgtcctgagcagagcctgaattacgtttttgggcaatttcatggtgtttcaccagagggcgc

SEQ ID NO: 98819 - DNA, 122 bp, Homo sapiens
gaattagtacccaaggttctttgtcctgcatccaagaaaattaaggaacatggacacaaacgtgagcttggagcaaaagttcagtaagcaaaagaagaaagctgtctccactgtggagaggg

SEQ ID NO: 98820 - DNA, 122 bp, Homo sapiens
tagggctcctgcccctctcctgctcgcggctcccagcgcctccacggggcctgactctgacgctctggagctggggagttcatttcaaaagctgcttattttggtcagactgaacagcctca

SEQ ID NO: 98821 - DNA, 122 bp, Homo sapiens
gtccctaaacacttttgccaagaccaaaaatatgaatctgcagacagagcattttgtaaacgatcaggagtccttttccttttttgccagctggtagttagtcaaatgctgttttgtaaata

SEQ ID NO: 98822 - DNA, 122 bp, Homo sapiens
gtttcttctttctggtgggttcgtggtctcgcgggtttcaggagtgaagctgcagacgttcgcggtgcgtgttatagctcttaaggcagcacgtctggagttgttcgttcttcccagtgggc

SEQ ID NO: 98823 - DNA, 122 bp, Homo sapiens
ctcatcctgatccggggagcctgggggatggcaaggggctaatgtgcttgttgggagtgacgctgtctctgctagggagcaggaggtcagtggggacagtacggactaaactcataattgga

SEQ ID NO: 98824 - DNA, 122 bp, Homo sapiens
tgcatctcagccccctctttccgtccttcccgtccagccccagccctgggcctgggctgccgacacctgggccagagcccctgctgtgattggtgctccctgggcctcccgggtggatgaag

SEQ ID NO: 98825 - DNA, 122 bp, Homo sapiens
atgttggatttagcagccctgagggccagggctggcaggcatgcccagtgctctcgtgggcgcaccccggcatgtcggctccactgctgtgtgcctgggggcagcttgttttcctctgctct

SEQ ID NO: 98826 - DNA, 122 bp, Homo sapiens
atatgttctctgaaatgtggtccatttattagctctcagtcacagctggactgagacaagcgtgatccctttgcattttatgtaaaacccatatgtgaggaaaatatacaactgccacttcc

SEQ ID NO: 98827 - DNA, 122 bp, Homo sapiens
tcccttccggccactcttttccacccccagccatagttactggcagtttgctgactaatccggtttctggtttaatgtctgttggccctccctttccccacattacaagctccccgaaagca

SEQ ID NO: 98828 - DNA, 122 bp, Homo sapiens
gcggcggcccccccgggcaggccaatgggagggccgggtgcgtttgaaaactggggtgggcggcggggcggggtctgcgcctgcgcgagggctacgcgcgctccggccggggcgcgggcgcg

SEQ ID NO: 98829 - DNA, 122 bp, Homo sapiens
gagacattgagacattttgtagtgatttgcttcttattcttgacaatatgatgattagagcgcataatcataaactgccaagatgcatgctttgtttgatggcaggaaaagattgaattatt

SEQ ID NO: 98830 - DNA, 122 bp, Homo sapiens
aagggattttttaaaattcccatttgataagtgcctggggttgcctctggagttacacagcgctgtctcatcaatctttctgccatgctttcactcagacattactggctgagtataaactc

SEQ ID NO: 98831 - DNA, 122 bp, Homo sapiens
cacccgctgcgggtgcctgaacgaaccgggcttcctcagtgacaacgatcttttcagaaacgccgagcccaggcccgtcggcagcagaaagtgccgcgtgtctgcccccgagagcggagagc

SEQ ID NO: 98832 - DNA, 122 bp, Homo sapiens
ggactgcgggtctggtggggagcagcagacgtccccttcacaccgagaaccacgggggcccgtccaagacctggcctcccttaaacctgaaccccccaaatcaggtcacgtagaatcaagaa

SEQ ID NO: 98833 - DNA, 122 bp, Homo sapiens
agcctgttcttcagccactgaccctgcaggtgggtgcaggtgcgctctttaagacctaagcgtggcagtcggctccaacctccgccgagggtcagctggggcgaggccggcctcccgcccct

SEQ ID NO: 98834 - DNA, 122 bp, Homo sapiens
tctgccccgcggccagcatggtgggtcctgctgctacagagctgcatgtgaacctggcaccgtcatgggtgccgctgtcaccgctgtccctggaagcagccatccctgctgctgccaccgct

SEQ ID NO: 98835 - DNA, 122 bp, Homo sapiens
agggccccaggatgtaggattcagcattgctctttttgaccttaggccctactgcggcctcgcctggacgttttgtcacctggccctggtgcctccagacagaaccaggacgcataggtggg

SEQ ID NO: 98836 - DNA, 122 bp, Homo sapiens
ggtgaaaacggagtcacgatacagggcaacagcgccacctcacggccggccccgtagcagcggcctccattggcgcctaaaaatggtcaggattcacattcaggtggattattccgcgccag

SEQ ID NO: 98837 - DNA, 122 bp, Homo sapiens
ataactccaatgagagcctctcagttcacatatgaccccatttcatccttgcaagaacaccgggcaatagataatatcttaaaattcccattttactaataaaaaattcctagccagacgtg

SEQ ID NO: 98838 - DNA, 122 bp, Homo sapiens
tggcctttcttttatattatgcttccataggcttagaactgggaagaaaaaaagggcctgcgactagcagtaaaaaattcctgtctggttagtgcaaatttcagactggataaagttggcag

SEQ ID NO: 98839 - DNA, 122 bp, Homo sapiens
gggtttcccgcccagccgaccaggctcacgtccgtgggcgggacttccggccggcagccccgccgcccctgcaaggtgtcttacgcttccgcgggtgccctaggttgccaagggcaatgggg

SEQ ID NO: 98840 - DNA, 122 bp, Homo sapiens
aaccagcaactctgggaactgcctggcctgagagccccactggctgctgaccacagtgggcgtgcggtgaaccctagggcctggcttgcagtcaggttcagtcctctgcttcgactgtattc

SEQ ID NO: 98841 - DNA, 122 bp, Homo sapiens
agacagcccgggtgctgcaggtgtgagtaacgcaccccgggggcacagaacacctgggtgcggagccccagtttgaaccagcccagatgacccggtcacccctgccctcgcctgcttcactg

SEQ ID NO: 98842 - DNA, 122 bp, Homo sapiens
tgagggccacactttggcttcacgggtccccagagcctagcccacgagtgagggaaggcacgggccagactgcccattatccactcacacttgctctggacgaaagcacccagtgtctgccc

SEQ ID NO: 98843 - DNA, 122 bp, Homo sapiens
tgttttcaattgttgaccgaaaagaaggaagggagactggcaggagacgcaggagcggcgcgccccgcaaagtcagggaggttcctcggcctcacctctggactcccctcggaatggtccgc

SEQ ID NO: 98844 - DNA, 122 bp, Homo sapiens
tgttacctggagtccaaggcttctgccactaagcccggccaagcattcgggtgggacagccgccaccaagccaggtgtctggggtctcagtgtcctggatgactccatctgcaagaccaagg

SEQ ID NO: 98845 - DNA, 122 bp, Homo sapiens
tctgggggctggtgacacctcgatcttggtcctgccatacctagaggtcgggacagacgacgctacctgcccagacaccaccaagttctctgcctgcaaaacctgggaccaggactcctgtc

SEQ ID NO: 98846 - DNA, 122 bp, Homo sapiens
caggaacctcaggcccctcagtaacacattccctgcggtcttcgagaactttcctcagggcgcccacagccctgtgccatcttctccacccgcgcttcacgctctgattctcgccgcggctg

SEQ ID NO: 98847 - DNA, 122 bp, Homo sapiens
ggaggccgcgcggccaccggccactcacccacagaccggtagcccaggatcgcgatcttccgggacttggactgcggcatcttggcggcctcctcagccccggcccaaccacatcaaccgcg

SEQ ID NO: 98848 - DNA, 122 bp, Homo sapiens
taaagttcattttataataagcataccaaaagaccatatttttagaaattaaatgactaccgaatgccttggagtgataaatgaagcatagttaaagtcttctagaaacaatgccagtaatt

SEQ ID NO: 98849 - DNA, 122 bp, Homo sapiens
tgggggacttagcacccggtccagtggctgcggagggtgtactgggccccccagcagtgccggcccaccagcgctgcgctcgatttctcatggggccttggctgccttcccacggggcaggg

SEQ ID NO: 98850 - DNA, 122 bp, Homo sapiens
ccgaaaggatcattgttagccgcccccgccccgcccaccccggctgtttatttatgcacacgtcactgggccggccccgccctccggcatctcattaaggcagtgtgttcctctcgccctgt

SEQ ID NO: 98851 - DNA, 122 bp, Homo sapiens
atgggtcagtcccaatgaataagtagttcttttaagtatttggaatagtttgcaaagccccgtgtgaatgcatacagtcccacagtccctggaggccacaaagcattcccaactccttgtca

SEQ ID NO: 98852 - DNA, 122 bp, Homo sapiens
gtgtgaccggcacatccgcaccgtcttcaagttttatcagtcctcaaacaagaggctgaacgagctgcaggaaggtgcggcgcctctggagcaggagatcatccgcctgaaggatctgaatg

SEQ ID NO: 98853 - DNA, 122 bp, Homo sapiens
aggcagccacctcacgcaaaaaggcagagggcccactgagctgttaacacttaagccgtccgtggatggctgaagtaaaagagtggtgtaccactccctctggggcttctggggtcacgagc

SEQ ID NO: 98854 - DNA, 122 bp, Homo sapiens
aaaaacacatcctagtttgacaatgtaaagataaccaccagcaagcagtgtaagaatagccgcagaacttccaaatcataaggaggaaaaaaaaattagggctgggagcagtagctcacacc

SEQ ID NO: 98855 - DNA, 122 bp, Homo sapiens
aatttcattcacactaacagaagagaaacaatgtgcttcatacggtattatctttaaacacgcagagaaacaaatacctaccccacagttctcaggcgcagctggctggccaccctactggg

SEQ ID NO: 98856 - DNA, 122 bp, Homo sapiens
ttaatatccaatggcaagccgccgggaaacgacggagctgggatttgaggattggctccgcgaaccccacaacacccggggactccagcgaaccacacggggtggatccaacagccgcaggg

SEQ ID NO: 98857 - DNA, 122 bp, Homo sapiens
taccgtaaggctgactgtagacgtactcgggatctctcgtcgacttgtcctcaatgaccacgcttgagagtaccttcaccctagagaaaagcctccacgttgggcaccagatgaaggggtgg

SEQ ID NO: 98858 - DNA, 122 bp, Homo sapiens
tccttgctctcgtttctgggggagaaagccatgtatacctccagcactcagaagtgctcgcgacaatgagctcattgggatttgctactcaattagattctgctttgtacatgtagcactta

SEQ ID NO: 98859 - DNA, 122 bp, Homo sapiens
tttcttactggggcaccatcttgggctttcattatgctctagaccagtttgacatccctacgtccaaagctcttcctctacatgggttgatttgttttttaatgtctctgagcactacattt

SEQ ID NO: 98860 - DNA, 122 bp, Homo sapiens
gagacgaaccccacgtcaacacccccaatgccaggcccacggccttcttcgactcacgaccgtgacctctgaagccagtcacaaacccctagacctgctggaatcagaatcccccttcccac

SEQ ID NO: 98861 - DNA, 122 bp, Homo sapiens
cgcccagttggtgctctgggtatgaagtatttgtttctaggggggcaggcaccagcgatgcgatttcacctgttaatgagctgcgtaggggcgggcgttgggggagccctcagctgctttca

SEQ ID NO: 98862 - DNA, 122 bp, Homo sapiens
tttttttgtattatggcctctgaaaaatgtttccactggtaggcagttagctatcgaaaacgtggaatagtagactgatacttggggttagggtgccatgcaatcttgttatagccctggat

SEQ ID NO: 98863 - DNA, 122 bp, Homo sapiens
ttactcttaaaacacacgcgcgcacgcgagcgcgctcgcacacacacacactggcgtgcgcgcgcttttttaaggggcctatagactccatttcggctgcaggttaaagtcatcccaggaag

SEQ ID NO: 98864 - DNA, 122 bp, Homo sapiens
accgcagccaaagggcctgacgcctgccttcattcagggtagaccaaatccccactggggcggccccctccgaagccaacctcaccccccacgggcagattcctaacaaaattcacgctccc

SEQ ID NO: 98865 - DNA, 122 bp, Homo sapiens
cattggtatatttcattttcttaaaattctgaacccctcttcccttatttccttttgacccgattggtgtattggtcatgtgactcatggatttgccttaaggcaggaggatcaggtcaccc

SEQ ID NO: 98866 - DNA, 122 bp, Homo sapiens
ggaggaggcttttgaggtcgcttgttagctttcatctgagattctggctatgggagtgggcgtgcgtgtgcgcaccgtggccccaggcgaggtttcgtcttttcccaatttgtaccaccacc

SEQ ID NO: 98867 - DNA, 122 bp, Homo sapiens
actgcctccatgggtcaggaggcccagagccggcagtggcttgtctggccactagccagtcggtgggggtgcactggcgctcatgtccctcctgccgtctcccacgccccccccgacagggg

SEQ ID NO: 98868 - DNA, 122 bp, Homo sapiens
actcggggcgcccataacccggcccacccgccgctgctgtcgcttccctagagctccatccggtcgccattcaccactgagttaagggaccagctaccgaagggcagcagcggccagccacc

SEQ ID NO: 98869 - DNA, 122 bp, Homo sapiens
cagctgggagtacccaccccctccatgcctggtggagtcacccaagccccagcgacaccccggcctgcccaaggtactggtgaccctggaggccggggccctggcttctcagtcagggtctc

SEQ ID NO: 98870 - DNA, 122 bp, Homo sapiens
acttggagaagagtgctaggtgagagggcaaggccttcctcagcagcagccctctgccctcggagtgatacggcacctccatgaacaccaggacaccctcaaaaaggaacttccagagaaaa

SEQ ID NO: 98871 - DNA, 122 bp, Homo sapiens
cgtagctggtttcagcgcccgcgaacgcccccacgtgtgtggtcctcggtcgcccgcatccgctttttatgccaggatcaggtcccagcctcctgcgtaaccaaagggctgtgctgtagtag

SEQ ID NO: 98872 - DNA, 122 bp, Homo sapiens
tttcatcctctgcattcagaattttccatttgctcaggcccccagcagggcgtctggccacgttgggccgtgtttgtattgctggagtaaaggatgccagcacacttactcttctgcttcct

SEQ ID NO: 98873 - DNA, 122 bp, Homo sapiens
ggcggcgcctggttgtcaggcagttttgtaggagttcgggccaattggaggcgcaggcaccgctcgacccgggcgcagcgcgcaggcggtggcgaagagacgccgagcgggccgagtgcggc

SEQ ID NO: 98874 - DNA, 122 bp, Homo sapiens
agtagagaacgggctagacagctggaaagccactctccaccccaaatctatgctgctctgcgtggacttgagatcccgtgtcttatcctgcaattagaaaccccccattgacacctcctgta

SEQ ID NO: 98875 - DNA, 122 bp, Homo sapiens
cctgagaaaccactctgaaagaactgtgagacctttgcactaagaccattagggattctacgcaaggttctctctgctccttgcaaaattacaggcgtcatgaaggatggcggctcgtaaat

SEQ ID NO: 98876 - DNA, 122 bp, Homo sapiens
caagggaaccgggaagtacctccacataatgctctactcctctctctccccccaccggctcgcacttcccagccagaaggaacagcgcttctccctgggaaggtattaacgtcaccgatatc

SEQ ID NO: 98877 - DNA, 122 bp, Homo sapiens
ctgagcagccaggttgaaaacagcaggtttagttcttgggataagggagctggacagatgcgcagcacaaaagattgggtctcctggaaagcaaaggaggggtatgacttggggaaattctg

SEQ ID NO: 98878 - DNA, 122 bp, Homo sapiens
tgtgtggacagtgtggatgacctcttgaagctcttcccacagatcttacagtcaaagctccgttcctgcagagagagagagagagagagagagagagagagagagatgcagaactcctactg

SEQ ID NO: 98879 - DNA, 122 bp, Homo sapiens
gggtacagggatcagggaaacccggggagagagagtgggctccaattctgaatgcagcgtcggcaagtagaaatttatggccatgtaaaatcactaagagtaaccatcgggggaagagggat

SEQ ID NO: 98880 - DNA, 122 bp, Homo sapiens
gctaccgccttggcagctgggcaacttggaaggctcccctgggatggcgggggagtggggcgcatgccagaaagaaaaaggcatttggagtcacccttacttctactgtcaaggggacgtga

SEQ ID NO: 98881 - DNA, 122 bp, Homo sapiens
cagtctctcttcaccaacagtgaagtccaagtccaacaggatgattgcagctaaaataatcgaagccatgttgcaataatcttaaaagtaataatcccccccttgaatctccaatctgaaca

SEQ ID NO: 98882 - DNA, 122 bp, Homo sapiens
gtgggagggacggtggcagggcggggtctctgggtcggggttttctttggaaagctggaccggctgtgccctgtgtgtgggagctggctcgtggggcttggaggtggcgagcgggagagtga

SEQ ID NO: 98883 - DNA, 122 bp, Homo sapiens
tcgaaggcagctggcagctcggaagaatcagctgacattgcaattggtgttgaaacttgacgacgctagtccagggtccacttattaaccatgccaccttctctgagcttcgcattgcgaat

SEQ ID NO: 98884 - DNA, 122 bp, Homo sapiens
ctgagccaaagggtgcaaggacagccggcaaggcccgggccaagacctatccccgcccagcgagccaggcctcgcccagcacctatccgcgcccagcaagcctaggcctcgcccagcaccta

SEQ ID NO: 98885 - DNA, 122 bp, Homo sapiens
catagtaacaaaatagagatcaaattctcacacactgagacaaaaagcccattccaagttcgaatttcagctcattctaacaggaaagcttattgccctgtcacatcaaactatccagattt

SEQ ID NO: 98886 - DNA, 122 bp, Homo sapiens
cgccctctcgtggcggactggccaggtcgcagtctttgttgttgcgctggaggcggcgtacgggacaggggagaaagatgtgggtggagtctgggaggcagatgcgagaatcagatcacaat

SEQ ID NO: 98887 - DNA, 122 bp, Homo sapiens
cagccggaccgggtggacatgctgcaggagccgctgctggaggcgctaaaggtctacgtgcggaagcggaggcccagccgcccccacatgttccccaagatgctaatgaagattactgacct

SEQ ID NO: 98888 - DNA, 122 bp, Homo sapiens
cactgcctgcctgttgaacccggggaggctcttgtctgactgaaatcactgcaggcttcccgacgatcccctgggtgtgtgtgggcaggcgcacttgccactgggcacaggtgataaagcat

SEQ ID NO: 98889 - DNA, 122 bp, Homo sapiens
agcgctgacttctatggcagccgcaagtcgggctgagccctgtgttcccggggtcaacttcgcaggccacccccaaggatgccctaccactgagcctgatccatccgtcccccaacaagggg

SEQ ID NO: 98890 - DNA, 122 bp, Homo sapiens
tgggaacgctgcgtctcactgggctccctctcagtgttagtccacatcgtcagtgaccaacgctggggcacaggaaatgcagcctgtgcattgtgctaatgtctgtaaacggtgcctttgca

SEQ ID NO: 98891 - DNA, 122 bp, Homo sapiens
gagatgcctcttccttcccttcaatagtgggttaaacccagctggcaccctctggaactacgggtaagtcccttctttattcctactacacttttaggtcttgtttttgttttttgtccaaa

SEQ ID NO: 98892 - DNA, 122 bp, Homo sapiens
actacagagcccagatttgttctgctttgggtgtgggtggattttcaccttgtctgtcgacggtgcaggacctgtccctgtgtgctttgaggtttctagggtgtgatgttggtttgtggttt

SEQ ID NO: 98893 - DNA, 122 bp, Homo sapiens
aggtacacaaccattctcaaccatgctgtcataggcagaattggctttgttgggctattccgtagtgtggctattgtctcccccttcatcttcttgctgaggcgactcccctactgtggtca

SEQ ID NO: 98894 - DNA, 122 bp, Homo sapiens
gagggagggagggctttgttgatgctcactccgacgtgtgtgaacgtgagtgcgatctgccgctgccctgcgcctgtttccggtccctatgaacttccccttcccgcaaggtgtgaggaccc

SEQ ID NO: 98895 - DNA, 122 bp, Homo sapiens
caagttacatcccatcgccaggcccagcaccatccacacagcagccccacacgtggggagcgtcgctgtggttatggccgacttgccgtgtaggctaagattgttccccttacacacacaga

SEQ ID NO: 98896 - DNA, 122 bp, Homo sapiens
actgtggccaaaagcccagactcagagtccaacagagcaaagatcaaattccagctccatcgttttctagctgggtgcccttcagcaagagcagaccttagtctcagctttctcctgtgtaa

SEQ ID NO: 98897 - DNA, 122 bp, Homo sapiens
ctcaggtgatccacctgccttggcttcccaaagtgctgggattacaggtgtgagccaccgcgcccggctgagaatacctgtatttctaggcaatggatgctgtagtatttagagctccatgt

SEQ ID NO: 98898 - DNA, 122 bp, Homo sapiens
gaaaaatcaaagacctctgcagatcagccataattggctgtggtatggtccctgggatctcgcttggttctttaagaaaaatgtttttatgagtcagagataaatccggagactggattacg

SEQ ID NO: 98899 - DNA, 122 bp, Homo sapiens
aacggaggtcagcactgctgaaggctgtggggcagcttcggcagatgattcccaggagggcgcttcataaaacgtcaaatgctgtgtaactcagttatcctaagggcacaggggacggtaac

SEQ ID NO: 98900 - DNA, 122 bp, Homo sapiens
gagtgggagcgagacggccctgagtggaagtgtctggctccccgtagaggcccttctgtacgccccgccgcccatgagctcgttctcacgcgaacagcgccgtcgttaggctggctctgtag

SEQ ID NO: 98901 - DNA, 122 bp, Homo sapiens
ggggctgcattttaaacacccgggaaaacaagcttgttgcactttcctgtgacctagctgcggtgcacctctgtttcccctcttccccggtagcagctttgtttgcattgctgcactccaac

SEQ ID NO: 98902 - DNA, 122 bp, Homo sapiens
catctgcattactggggagctgccaggcagtggtggggatgctggccctgcacctgtccccgtcctcaaccctccctaggcctgggccatctctctggctgcctgcagtctggccctaccta

SEQ ID NO: 98903 - DNA, 122 bp, Homo sapiens
acctccctcctgagtctgaacccaaggccagagcaaggacccttcaccttcattctcagtcggtgctcagcacataagcgaggggctctaggaccatggagaggcagccctgggcacctgtc

SEQ ID NO: 98904 - DNA, 122 bp, Homo sapiens
gtccttctaactcctcctcccgcagctggggagcggttggcagcagcgggctggaaattccgacgattaaacaaagggagtgggtggagacttgacatgcacaatcctaggcgcccaactgc

SEQ ID NO: 98905 - DNA, 122 bp, Homo sapiens
cagaagcataggtgggtacatccctaaggcggctccccagcctaggctccaaggaggcagcgtggacaggatgtgtgatgagatgcgtgagaaccaggccctgccattgtgtgacttttgct

SEQ ID NO: 98906 - DNA, 122 bp, Homo sapiens
ttcttcaaccctctttagcagaggtgaggggcagtgcccatccagagtggagccctccctcgccaaagccttaggtgggtgtgtccctgggcccagcccagagtctggcaccaacgggcctt

SEQ ID NO: 98907 - DNA, 122 bp, Homo sapiens
accgtccttctgttctgagtcttgggcggtcccagccctgcggactggagaggagcggggcgttgactgagcctggagcttccatgccctggtccttcgacctcacagcagccggcacttgc

SEQ ID NO: 98908 - DNA, 122 bp, Homo sapiens
attcaagatgaggtttgggtggggacacagccaaaccctatcaccaagtataatttttcccgtgattacaaggttggttcaacattaagaaatttatggccgggcatggtggctcacacctg

SEQ ID NO: 98909 - DNA, 122 bp, Homo sapiens
agtattgagaccagagaattatttttgttgctatcatctcccagttagttgatataggaacgggcaaatggacttagttttactacttcatgccctgaagtcatttctcttttggagcgaca

SEQ ID NO: 98910 - DNA, 122 bp, Homo sapiens
ggtcgcgtgcagcccccggccccgccgccaagccccgcggggactctggagcaggaagcccgcggcaggaagagaacgtgtcccccaggcccctgattcccagatccaccgtcccagccctc

SEQ ID NO: 98911 - DNA, 122 bp, Homo sapiens
gtggtctgtagggtgacatttcccagtaggtgaggcatgtgactgcccgggtacccgtgtcgctggggtgggccaaggtcccacctgtaacctcccacgacccctaatggggtgaggtccag

SEQ ID NO: 98912 - DNA, 122 bp, Homo sapiens
caataccaacagagaaaacacaaacatgcctattaagaaaaagaataagagaatcacttccgcagaacttgattttgttttgatctcctgagtgtctttgatgttgggcagagctgctgcct

SEQ ID NO: 98913 - DNA, 122 bp, Homo sapiens
tttgcttggaagggaactctcacgggctttccattggtatccagaggctgtgtggaactccggaaggcagagaggcttggctctgaagggtaggcaccaatccaggcccggccctcctctct

SEQ ID NO: 98914 - DNA, 122 bp, Homo sapiens
ccccggagccgcgcgcataatcccgggaccctctctggaaggcgtgcggagagcggtgcgcgtggcctggcaccggaaggagccagcttccgggctccgaggcaccccctggacagcgcccc

SEQ ID NO: 98915 - DNA, 122 bp, Homo sapiens
ccagccaaatccctgttttctgtcagcctcctctagctccctgctataagacagaagcaacgattggcaagtcctgggctcagggcaccaacaagtctttctggctttggtagccagttcca

SEQ ID NO: 98916 - DNA, 122 bp, Homo sapiens
agcagagaagaaacataatctctgaaatcacacagctattcggtttcaaagcgttcctagcgcccagctctcctaactcctggccagtgttcttgacattatggtaatacataaagactttg

SEQ ID NO: 98917 - DNA, 122 bp, Homo sapiens
gctgtggcgggcttctgtcaatcaggttgaccagatggctgaagaatgaatccctgaggccgggtaaggtggctcaagcctgtaatcccagcactttgggaggctgaggtgggcagatcacg

SEQ ID NO: 98918 - DNA, 122 bp, Homo sapiens
acagtcattcaaccaacaaagaagcctggctggccagcctcagatgtacttcattcctcacgagtgtggatgtggaaaatatatatacacatgactcactattctcttgctcaagttaccat

SEQ ID NO: 98919 - DNA, 122 bp, Homo sapiens
aaagaaatgttcttgataagacaataggggataggtatgtggcattatgtttaatcgtgacgaaaatcaagaagggtgattaaagtctcatcataaaattaggtacagtcacgctacatagc

SEQ ID NO: 98920 - DNA, 122 bp, Homo sapiens
ccaaatgagcttctacacttcctgaaaatggtacacagcttcctatacaagccagcttctcgtctgatggtcgttcttctccctgagtagagcacccaggactctggtctaggctcatcgag

SEQ ID NO: 98921 - DNA, 122 bp, Homo sapiens
aactcactccccccatcacagccttctaccggagaaccacacgctccatttcccagcacccgctgtgagttcaggggtgggcacaggccgtgccccctgaaattcagcacacagccccgaga

SEQ ID NO: 98922 - DNA, 122 bp, Homo sapiens
taacttttaacgagggggtgccccagagggccccacccaccccagagtcagaggcccggccgcagctctgtctcagcacattacagggaacccaggagttctgatcctgattccaggccagc

SEQ ID NO: 98923 - DNA, 122 bp, Homo sapiens
gagggtttcgtttgtgagggggtcccgggaatccagcgaggccgggtaggtggtggggggcgcgcggtggcccggggtgtccgtcccgccgggggcgcggaggccgtgtgggccccgggcat

SEQ ID NO: 98924 - DNA, 122 bp, Homo sapiens
gagcccatctccaccgcggcacctgcatggtctcagccttccggttcggtgccgctgtgccgggggctactctcttgccagtggggaccacagccctcggtatcccataggtcaagggcgtc

SEQ ID NO: 98925 - DNA, 122 bp, Homo sapiens
agacactacctcttccccagctcctgggctagaagtagaattctccattgcttttatgatcgtgaactacgtttgtagagtgctttgtagcctaaaacttacctataatgtgaattaattct

SEQ ID NO: 98926 - DNA, 122 bp, Homo sapiens
gctaacgcctgggcctgtgctgcctgagaattcccaacagagtattaaaatgtcttggcacgtggttgaaccagacaaggacttgagatcagcgacgtctttatcatctttgtgtcaccatt

SEQ ID NO: 98927 - DNA, 122 bp, Homo sapiens
ccaaaaaagcgcagagcagcccgagcagaaggcagccactgaggtgtccaaggagctcagcgagagtcaggttcatatgatggcagcagctgtcgctgacgggacgagggcagctaccatta

SEQ ID NO: 98928 - DNA, 122 bp, Homo sapiens
aattgaggttgcgtaagggagcggggtacaaagtacatgtgctgtgcttcagtttgcatccgcctggtctgttacacatattatctggaaaatactgtggggtaggtggtgtgagggcaaat

SEQ ID NO: 98929 - DNA, 122 bp, Homo sapiens
ttttccttccttgggttctaatattgccgcactaggggatataggagaggaaaagtaaggcgcagttcccccaacctcagacttatcaggaagaagatatacatatgagtgtggaaggcaga

SEQ ID NO: 98930 - DNA, 122 bp, Homo sapiens
ctatttacagcacccgggagacgggttcagatctcgccggcctccttctcttctgacctccgtgaagccatcttcccgttggagctctcaagcctccagtccgggggccctcgctcgctccg

SEQ ID NO: 98931 - DNA, 122 bp, Homo sapiens
gggaaagtgagtggcaggccgctgtccaccccccgacagccctggacctggccctctgcccgggttccagggtcagctcccagggtaattgggctttacccactctgcacttccccagccgg

SEQ ID NO: 98932 - DNA, 122 bp, Homo sapiens
tagaagtttatcactttgattgaagacagggtttatcaaccttggcactattgacattttcggctgtatcattctttgtggtgggacaggatgattctgtcctatctacaatcctgtgcagg

SEQ ID NO: 98933 - DNA, 122 bp, Homo sapiens
cttcccgggtcgctcccccgactcagaaagctctcaagttggtatcgttttcccggccctcggaggtggattgcagatcaccgagaggggatttaccagtaaccactacagaatctacccgg

SEQ ID NO: 98934 - DNA, 122 bp, Homo sapiens
taatcgtaccaacaattaaagccatacaccctcaaaggtctgagtgaaaataactaatcacgtagaattctatactcaactaattatcatttcaagaatgagggcaaaataaatacattttt

SEQ ID NO: 98935 - DNA, 122 bp, Homo sapiens
gctggaattacaggcatgagccaccatgcctggccttcagtgagttttggtagatgtacacggttgtgcaaaagtttccttctcttgcccatgaccccaggcaaccactaatctgctttctg

SEQ ID NO: 98936 - DNA, 122 bp, Homo sapiens
cacccttcactaagtcctctggtcctcactgtgtccctgccaggctaaggcttccttagccgtggtaaagcaaataaaggcctgacttaaatcaggcctcctgaatctgacacttgccagct

SEQ ID NO: 98937 - DNA, 122 bp, Homo sapiens
ggctggggagaggggctctggcttcttggtgccctcctctcctgctgatgaggtggggctcggtgcccggccacacacattacggaagaattcctgcacaatgccgtacttgggaggctcgg

SEQ ID NO: 98938 - DNA, 122 bp, Homo sapiens
cagacatttggccagtcacccttcattgttggccctctatctctgtctggcgaggagcaacgccacaactgtggtggtttttggagtgggtggaccccggccaagacggcctgggctgacca

SEQ ID NO: 98939 - DNA, 122 bp, Homo sapiens
cctggaactccgaggttatcagggagactgaaagtggacgaagacagaaggcaggatcaacggtccttatcaggaaggtctcaggtgctagttattgcttatatgactttgggcaagttaat

SEQ ID NO: 98940 - DNA, 122 bp, Homo sapiens
aggctctgtcccacaaaggcagcctgagccaggaccctaaagaggcctggtcatcgggaccggagggagttccgcttcccaggccggctctgcaaacgcgagcctgcgccaaggcgccctgc

SEQ ID NO: 98941 - DNA, 122 bp, Homo sapiens
ggggaaggtgaacctgtggccgtcggcagatctgcagatctgccggactgcgggtcggggcgtggcaggggcctagtccccgccccggccgtcagcctgtcgcctctggctcgggccgggcg

SEQ ID NO: 98942 - DNA, 122 bp, Homo sapiens
acaggatgcacgggcagccatgaacctgcacaacaacgaggctggccgcaaggtgagtcccgcagcccttggaaataggcagctgctggctatatccactaccagctccaggtgcggacaac

SEQ ID NO: 98943 - DNA, 122 bp, Homo sapiens
ctgccctgtgccctgctgggcttcccaggcggaaggtgacctctccaggttgagtggccccgggtcctctccctagttgtgcccactccgaggcctggggcactaagcaccatctctacact

SEQ ID NO: 98944 - DNA, 122 bp, Homo sapiens
tggtgcagggacctccctccccagggggcctcccagagaagtccgggacgccacgtgctccgacccctgccttgggggtgaggccccttagggagccaccagtgcagtctcccccgtcccag

SEQ ID NO: 98945 - DNA, 122 bp, Homo sapiens
ctagtacctttcttttccccgggtggggttgggaggtcataggtaatgaccccaggatcccgtttctccctcttctctggttttggtttcttctgcttgggagggagaagacataggcccag

SEQ ID NO: 98946 - DNA, 122 bp, Homo sapiens
gtccctcccccaggcctctatctccagacatcctaacccctctgtccctccctttgcagccggatccagagcaatgtagaaggcctatacctgactgatggggtccctttctcctgttgcaa

SEQ ID NO: 98947 - DNA, 122 bp, Homo sapiens
tggagtctccttgtggcatgtaattgagcccagcttagaaaggccagtgctctgcttctccgagacagtgcctttgattgcagagtgtgtgatctgagtaatttaatttatcgctcatcttt

SEQ ID NO: 98948 - DNA, 122 bp, Homo sapiens
ccttccggaagatgcgttggccttggcggctcccaggcccaagttatcaggcacactttgcggtccagctgcttagaggagccgggtaatgaatgaatgggtggcaaaagcccactcagtgt

SEQ ID NO: 98949 - DNA, 122 bp, Homo sapiens
ctggcccgcctgctatgacgatcatgtacagctgcattgctaatggccgagcggtcctagcggagctgacactgactggaggttcttaccaggtacctccggatccacgccaccgcccccac

SEQ ID NO: 98950 - DNA, 122 bp, Homo sapiens
cagctttcagaaaagggaaagggctgagaacagcctcctccaactccagcacccaaggcacgggcagcagccttgctccaaagactgcaggctgggagcacaccatcccccatgcagaccaa

SEQ ID NO: 98951 - DNA, 122 bp, Homo sapiens
cccacaaacccagccacgttcccgagagccctgcttagacatcggccacctccccactcccgccccaccagactgaaattgctaaacttgtggcctcttaccttgacacatttccgaaatca

SEQ ID NO: 98952 - DNA, 122 bp, Homo sapiens
cctcttaattccagccagtcagagcgcggggccatctgccactcccaggatgccacgcgacgggagcggacgctgcgaggatgcacctccacacgtcaacctcccacaaacagcatggcttc

SEQ ID NO: 98953 - DNA, 122 bp, Homo sapiens
gccagatatcaaagtgctgctcacacatacagattgaccgcctcaaggtgcggcccgggccgccgcccgcgtggccgcccactgcgcttccacgctggccgcctggtcgggccgcagggcca

SEQ ID NO: 98954 - DNA, 122 bp, Homo sapiens
ctgctcatagcagatttcctatcaaaggctctcctggcctcctctcttatctgtggcccccgcagggcacccactttcagaaactccctggaaggcccagcacctgcctctctccacccctg

SEQ ID NO: 98955 - DNA, 122 bp, Homo sapiens
gggcggaccccgcaggctgggaccccggcggctggcccgctccccgagaagggccgtggtcggggggctctcactcacgagccgctggctctgggtcagccctgcccccagggcagcgctcc

SEQ ID NO: 98956 - DNA, 122 bp, Homo sapiens
aaatagcgtttttacctgcgagtggcctggcctgagtccgtgagagccgcgccgtagaaacgccagagacccatgagaaacccaatcaagcgagacctgtcacgcagagcgaaacgaaaggg

SEQ ID NO: 98957 - DNA, 122 bp, Homo sapiens
acttagaaggcaatgggaactggcagtgatgtttggagcatttcttccttgatcaattaacggccttctccctattttatttatgtattattattatttttagatggagtctcattctgttg

SEQ ID NO: 98958 - DNA, 122 bp, Homo sapiens
gctcacaacgccatagcgaaaccgaaacctcattacaggcagcgaaggcagaactgcaggcgcagaaaacagaactacgatgccgagggcaaaccagagagtccccagcacaccgggaaaca

SEQ ID NO: 98959 - DNA, 122 bp, Homo sapiens
gaatcggcgccctggcccagggggcaaggctggcagcagtggcagcagcagtggaggaggcggtgggggtcctggaggaaggaccgggccaggacgaggcgacaagaggagctggccctctc

SEQ ID NO: 98960 - DNA, 122 bp, Homo sapiens
tgtcgttcgatcactgttgcaatgtcaagcacgttcacatttgtggcctcatttgatcttcggaagtgccggaggatggggatcattactccagtgtcacaaaggaggcaagtgaggcgcga

SEQ ID NO: 98961 - DNA, 122 bp, Homo sapiens
agacccggggccgcgtgaagatcaagatggagttcatcgacaacaagctgcggcgctacacgaccttcagcaagaggaagacgggcatcatgaagaaggtaccaagccggggggctggccgg

SEQ ID NO: 98962 - DNA, 122 bp, Homo sapiens
gaaataatgtaaaatcagccttggaaatggggagaaaatgtcgggttattcgagatatgtcgtcggaaactccaaattagcaaatatgtatgaaaataggaaccatctatgaagctggaaga

SEQ ID NO: 98963 - DNA, 122 bp, Homo sapiens
ccatgatggccatccggagcgagtccttggggatgctctcgctgcatttcttgcaagaggcgcgcccgctcttggcgtactcgactcgatagagcttatccgaagactccgccatcctcccc

SEQ ID NO: 98964 - DNA, 122 bp, Homo sapiens
ggtgagtttggtgtggtttcttcctcgcgtagctattgtggagttgtcctttgccttcagcggctggaggcaaactgttggtaccagggaagggtggtgatgaaagttgcttcagggaggcg

SEQ ID NO: 98965 - DNA, 122 bp, Homo sapiens
cccctctctgctcacaaacagaatggcaactgcctatttctctagttgtttccaaagagccgccatgttcagaaacctcaaagtggtgaagacaggtggaaaatggtgaatattttgaattt

SEQ ID NO: 98966 - DNA, 122 bp, Homo sapiens
gtactgcagaaggtgtacaccctctgtgatatggttcataatatccaaggaggggaatgacgttactcccaatatcgcaggttgtgtatcccctctgtgatatggttcgtactatccaatag

SEQ ID NO: 98967 - DNA, 122 bp, Homo sapiens
atgacaactgaaatacgtcaaatatgcatctctcctctggcctccttcccacttttaggacgtgatcacgtgactaccttgaaagggaggggctggtttgtacgaacgtcttcttccgcctg

SEQ ID NO: 98968 - DNA, 122 bp, Homo sapiens
ggcgcccgggtgcccaacgggtggacagggtctctacctgcggcagtctggcctctgtcacgctcgacccggcctcctcctcctgcgcctcctctggccgccgcagccaccagaagctgcgg

SEQ ID NO: 98969 - DNA, 122 bp, Homo sapiens
tgagcttgaagttgcaaaaaattaactctctggatctggctacaagggactgtataaagtcggtaagattcaggaatctgagaagtcaccctgactcctttgctgctctatctctatctgct

SEQ ID NO: 98970 - DNA, 122 bp, Homo sapiens
gggaaagaaggtggtgcgaaaacgcgtttgaacttgggtcctgccgctgcccgtagccggcgtccccaacatggcggctccccaagacgtccacgtccggatctgtaaccaagagattgtca

SEQ ID NO: 98971 - DNA, 122 bp, Homo sapiens
ccagtgctgcgtggctgtcccggggttctcgtcagcctccccggtgctgcgtggctgtcccggggttctcctaggcacctgcaggactgtgcagttctggctttgtctttcctgaaatgcca

SEQ ID NO: 98972 - DNA, 122 bp, Homo sapiens
tgagaccatcctggctaacacggtgaaaccccgtctccattaaacatacaaaaaattagccgggcgtggtagcaggcgcctgtagtcccagctactcgggaggctgaggcaggagaatggtg

SEQ ID NO: 98973 - DNA, 122 bp, Homo sapiens
caggaacatgatcagtatctcagagaggcagacaaggaaaacgtcagaagagaaacttaccggacatgtgagttgtagatgttaaaggacagacagacaacagctaggacaatgcccaggct

SEQ ID NO: 98974 - DNA, 122 bp, Homo sapiens
cgccgcgccgaaaccagcagcggtccgggtcgaaccagcaccggcctcgggaggttccgccgcctgctctgccgctgttccaactgccgctgtagagccactgggatgcgcaccaccggcag

SEQ ID NO: 98975 - DNA, 122 bp, Homo sapiens
gcgggacaagtctccatggcagcgactaaaggacagcgatgtgaaccactgacaacagttcgcggcgtttgacggcggcgggggcgtggcggggttttatctgtgtattgacgagagccggg

SEQ ID NO: 98976 - DNA, 122 bp, Homo sapiens
ggccgccccgtaccaggggcgccaggggaagagccatccagggctgggcgctgggagctgcggcccgtgtctgtcaatttctctcctgattggtttccagccaccggtcccgaggctggcta

SEQ ID NO: 98977 - DNA, 122 bp, Homo sapiens
agagacaggcaagaaccccaggatagaagttttgtagcctattcaggttggaatatatgccggctatgtctgtagtatgtgtgtgtgcctgtgctggggacggcacacaggggtcactcttc

SEQ ID NO: 98978 - DNA, 122 bp, Homo sapiens
ggaagggagttttaaactgaattgtgctcagactcccagcccagtcttcccggagccatccgttccttcatccaatgcggacacccatatctaaggttcgggcaggatttccggggcaccct

SEQ ID NO: 98979 - DNA, 122 bp, Homo sapiens
cctcgtgtttgtttattccccataaaatcgcaataaagcttatgataattaccaccattgcgcggtgctttctagtttacagagcaaatttcctttctgtcatttcgtccagtctcgttaag

SEQ ID NO: 98980 - DNA, 122 bp, Homo sapiens
aaaattcttcctgcttccctttcctccagttcccatgagcatgagagaagaagcaatgcacgctccggcagattcctaggaaccaaatacctctgaggagcaccagatttcagtaagacaga

SEQ ID NO: 98981 - DNA, 122 bp, Homo sapiens
ctcccgctgcgcgcccgccgcttcaggagcttctcctccttcccctcagccccaacatggcgccagacccctcagcggctgcgttccagaacctaccgtacacgcgcgggcgcctgcgcacc

SEQ ID NO: 98982 - DNA, 122 bp, Homo sapiens
ggtgagaggaggaatacttaaaaataacaaaaaagagagaaactgccacttgtaagacatcgtcagcattacaggtagtgaagaccacagagaactttgagttggattctctatacttcatt

SEQ ID NO: 98983 - DNA, 122 bp, Homo sapiens
ccccctccagccacaccgccgcaggccaagtttcccggcccagcctcccgcaaggctccccggggcgtggagcggaccatccgcaacctgcccctggaccacgcatctctggtcaagagttg

SEQ ID NO: 98984 - DNA, 122 bp, Homo sapiens
aatctctgaaagactgaccgactgactctgacaggatccggggctgagggaaggaggcggcggccatggagttgggcgagctgctctacaacaagtctgagtacatcgagacggtgcgcggg

SEQ ID NO: 98985 - DNA, 122 bp, Homo sapiens
caaagaggggccgtgtctttctcttccactgaaagcaaccagctgtggcaggccagccagcgagagtgggtattgtcatggtgaagcatgtcagtttgatggccagctgagactgagactgg

SEQ ID NO: 98986 - DNA, 122 bp, Homo sapiens
cccggctttggaagaggctggcgcggagcaggcgccttggagcagggtctcgggggtccccggaacagtcacgtgttctcgagacgccgttaaacccccgccccctcttccccaccgccgcc

SEQ ID NO: 98987 - DNA, 122 bp, Homo sapiens
acgggggacactgcactttctgatgcggtcggggaagccgggagtcagcctactggagtccgctgccatccctggccagaagcagccagcgccaccccaagctccccagcccctcgcccgtg

SEQ ID NO: 98988 - DNA, 122 bp, Homo sapiens
cccttcaatctgcagccgcgcggaggcaggccccgggaaaggcagtcggcgctcggtgctcgcactgcgcctcggcgggcggaaactcacaagtgtcctcaacgtgctaaacaaaccatcag

SEQ ID NO: 98989 - DNA, 122 bp, Homo sapiens
gaggagggagggaaggagggcgggccgcgcgggagggggctgtgggaacggccgcgcgggcgcaggcccattcacggccagaaaccagggctttgaaatccgagcccgggcgctgccagact

SEQ ID NO: 98990 - DNA, 122 bp, Homo sapiens
gcccgcgacagcgtggagcaggtggtgcccctgcccaggactcctggtgggtgatggctccgggaggccttggctgggacagagcggggcctccgggtcggtcagcggcccgagcccggctg

SEQ ID NO: 98991 - DNA, 122 bp, Homo sapiens
tgcagccagggcttcctgggccacaaagggttaatgacctgtgttttggctacccagttccgttaatgtccctggggtaaactgaggcaggaagcagaaggaaatgacctgcccagcctttg

SEQ ID NO: 98992 - DNA, 122 bp, Homo sapiens
cgcaggagcggatgtttctctggctatggaagaggggaactgaccatcctggggaggacccgcctaccttgcagactatggaggagccctctgagcccttccagtgcatcctgagccaactg

SEQ ID NO: 98993 - DNA, 122 bp, Homo sapiens
gtaaccactctgtgcctcagtttccccatggagatgtcactaaaacttgcttcataagggcgctgagaggattcaatgagttaatactggatataaagtggtaacgtgcttaaaacagcact

SEQ ID NO: 98994 - DNA, 122 bp, Homo sapiens
ttccccagcatcctgatgtgtcccctctccccacttcagaggccacccactcagcaccaccggcctggccttgcctgcagactataaactataaccactagctcgacacagtctgcagtcca

SEQ ID NO: 98995 - DNA, 122 bp, Homo sapiens
agagacccctccagctggaggaacccctggagccaagccctctgaggcatgatgggaccccggtgccagccaggagaaggcccctgggacacgggtaggcacagggcaactcagctggggtg

SEQ ID NO: 98996 - DNA, 122 bp, Homo sapiens
tatttctttcgagatccacggactctctcctagctcctgctggcttccctggcatccttccgctagcaaacagcccaggaaagacaacgggcattaacattttaaaaagaaaaagaaaaaga

SEQ ID NO: 98997 - DNA, 122 bp, Homo sapiens
tccaactctcaggagcaccggaatcacatacactgtcccattgagtgggctgctgaggaacgccgggtaagtgatgcctctgaagatctatttctatacaggacacatgaaattcttgtaag

SEQ ID NO: 98998 - DNA, 122 bp, Homo sapiens
atttagaatctgtacatagaaaggttttcttttctttcttttcttttggtctattttaatcgtgttcgtttcaccttttaactgaccagaagacgggagcgcgtttgcgcgtttatttgggc

SEQ ID NO: 98999 - DNA, 122 bp, Homo sapiens
cagactggtcttacttcagccagcagggcctccagccgccgccggagggcagcattctctcggcggagctgctggttgtcagccagtactgcttgcagccgagcctccagtccctgcagata

SEQ ID NO: 99000 - DNA, 122 bp, Homo sapiens
cacttccagtcgccctgatgactcgtcgtgggttcctttaggagacccgaaagttcagggcgggctgtgtgggtaacacctctgcccaggttcccggagggccctacgtggctgcccctgga

SEQ ID NO: 99001 - DNA, 122 bp, Homo sapiens
ctgtgcaaatccacatgactcaataatccaaacatacagagagcctgggaacccttaccccgctctggcgccctatgtgtccgctttcattggcttcttgtatttccggcttgttttcttta

SEQ ID NO: 99002 - DNA, 122 bp, Homo sapiens
tggaccttttcgatttacctcagctacatttttctggaaagatacccttttgcaagttgccgaacagcacaaagatactaatccacacagtgacaccacagaataaatgacttcagaggaaa

SEQ ID NO: 99003 - DNA, 122 bp, Homo sapiens
ggtgagctatcggaaagtgtctgtgacattcgttagcgtagatttttgtgcattgagtagcggctggtgagactcctgacttctttgcatttgggctcagattactgttcaagaagttccag

SEQ ID NO: 99004 - DNA, 122 bp, Homo sapiens
ggggccgtctgaggccgtcacctgctcgcggaggagctgttccgctcctgggctgaacgacgctgagcggccagcccccagctgccagttttgatggggacacccctttccaaactggacat

SEQ ID NO: 99005 - DNA, 122 bp, Homo sapiens
tgtgggtcctgaccattcttggcaactctctcctcagctgaactttgacctggaccggggcgtgtttccagtagtcatccaggctgtggtggacgaaggagatggtgagtgcgtcctcttcc

SEQ ID NO: 99006 - DNA, 122 bp, Homo sapiens
tggggccagagcgtggctgggggcgcccgcctggcaccgaggcctgagactgaagagacccggccagatccattaccccgagaaacaaaacgaaaagccagcccctcttgttgtctcgttga

SEQ ID NO: 99007 - DNA, 122 bp, Homo sapiens
ctccccagcatcatgcaggaagctgcagccccgcagagttaggacagctcatttggcacccggcgagcccttcccaggcccgcagcccagaatagagccggggcccaagacgcccactggag

SEQ ID NO: 99008 - DNA, 122 bp, Homo sapiens
ggaggggtccggaacacaatggccacttgtcggtgcacatcagcttgcgaaaaggagcctcgggcctcccagcctggtcccgtgaaatacacctcaatgtcctctgcaggagatgcggtggc

SEQ ID NO: 99009 - DNA, 122 bp, Homo sapiens
tgggcaaaacctcactattatttctagacaatggggctttctgtagtgaaaatggtggcgcgctctgcacatagaatggccacaagccagttcccagttttctccagtggatttgccagatt

SEQ ID NO: 99010 - DNA, 122 bp, Homo sapiens
caagtttacagcactctagtcaattagtatttagtccaaaatacagaagaccaaagttaacgcttgcattctgtttgcaaagcaaggttatatcgctaataaataagctttcttagaactct

SEQ ID NO: 99011 - DNA, 122 bp, Homo sapiens
gccgagttcgccaatcctggagggcaagcatgtttacgtcatttggcccgcctgcccgcccgaagcctttctcggtgaccgactgcagggagctctcaggagccaccgagagccagacctcc

SEQ ID NO: 99012 - DNA, 122 bp, Homo sapiens
ccagagggggcacctgactgtgctgcagggctgcccatgtcctgtctgctgcaggagctccgaggtcactgcgtctgtccttcccacagggccatcaacgatcctgaggctccctgaggtca

SEQ ID NO: 99013 - DNA, 122 bp, Homo sapiens
gggggtgagtgttctttggagggttcaacagaagtttaaggcacattttcattatgttgacgtaactgtgtttttaaaccacaatttgaaaacagcccttgaaccctaagttatataccaaa

SEQ ID NO: 99014 - DNA, 122 bp, Homo sapiens
acggtttgtgatctggactccctgagcacccgttgggagctgggggcagcctagggaagtcgggacctactcctgtacccttccaaggcaagcatcctgggccacctagccgtttcagggtc

SEQ ID NO: 99015 - DNA, 122 bp, Homo sapiens
acatcctcatccaacaaccatgagaaggacagtggagtaggacgtacagatgaaagcttgcgaaatgatgagagctcagagcaggagaatgcagccgaggaccccaatagcacatctttgaa

SEQ ID NO: 99016 - DNA, 122 bp, Homo sapiens
caacagtgggtagagcctaccccatgcccaggtccccatgggggctgagcccccgctgtgcgcagtgactgccctgtgccctaggcactgccccaggctggcacagcaggcacaagctggtg

SEQ ID NO: 99017 - DNA, 122 bp, Homo sapiens
ccattaccgctggcgggcctggctgctcggagatgcggtggccggagtgaccgtgggcatcgtgcacgtgccccagggtgagaggccctaacagcagcctgtcgggagcacaagctctagag

SEQ ID NO: 99018 - DNA, 122 bp, Homo sapiens
gttaagttttctttttatttgaaataacatcagccctcacttgggaaggggattttagggcgttctcgggcccacctaagtatctggaatttgtggtctagtaagttttttaagcagtccgc

SEQ ID NO: 99019 - DNA, 122 bp, Homo sapiens
aacccctgcctcggaaaaccactgtgctgatgcgccagcagagggccgagaggacagccgcggcggaacccaggggcgacagttccctggggccaaggggagccatgtggagcccggcccag

SEQ ID NO: 99020 - DNA, 122 bp, Homo sapiens
tagctgggattacaggtgcacgccagcatgcccggcaaatttttgaatttttagtagagacgaggtttcaccatgttggtcaggctggtctcgaattcctgaccttgtgatccacccgcctc

SEQ ID NO: 99021 - DNA, 122 bp, Homo sapiens
tagtcgtcgccccagcccgccgggggcgcagcgcccgagccgcggccctcgagacgggaccgagagcatcatgggcagcactgtcccgcgctccgcctccgtgctgcttctgctgctgctcc

SEQ ID NO: 99022 - DNA, 122 bp, Homo sapiens
cttgaactcctgaccttgggatctgcccacctcagatttccaaagtgctcagattacaggcgtgagccaccgcgcccggcataaagctttaattcttgttaaataacactgggatgggttag

SEQ ID NO: 99023 - DNA, 122 bp, Homo sapiens
cccagagctggtccctggctccaggcgcaggccgagtaggagctgggcgggcagcggcgtcgggcaggcccttccagccgggctgacaggccgctctgacccagccatctgactccgcttgc

SEQ ID NO: 99024 - DNA, 122 bp, Homo sapiens
gatggagaaccagggctggtttttctctaagggagcaccccttgtcatccatcactctctcgttgtcctcagtggcaccataaatgcagagacttgccctgtgcactagcagctggaggcca

SEQ ID NO: 99025 - DNA, 122 bp, Homo sapiens
aaaaaaaagaagaaggaaaaccagccaaggtcttagcatcagcttccttggaaggggccccggcttcctgtcccttgtcacagcctcccttgcccggccgtgagcctccaacgcttcggctc

SEQ ID NO: 99026 - DNA, 122 bp, Homo sapiens
tacataattaatgtttaaaatgttcaaccggccaaggcggattacttgaggtcaggagctcgagaccagcctggccaacatggtgaaaccccatctctactaaatacacaaaaaattatctg

SEQ ID NO: 99027 - DNA, 122 bp, Homo sapiens
atgtacatgtgttgcctgtcataacaagcagatggctaaactcattctctttactgcttgcggtatgtctggaaaactgcttaaagcttgaactgccctttaagcttttatagcttcttgga

SEQ ID NO: 99028 - DNA, 122 bp, Homo sapiens
gacctcaggtgatccgcccgcctcggcttcccaaagtgctgggattacaggcgtgagacacggcaacaatgtgaattacagttacgtagacaggaatgttattgattgtaagcccgagaggc

SEQ ID NO: 99029 - DNA, 122 bp, Homo sapiens
gctgcggcccacagactcgcagagccactgctacaggacgtgcttttcaccggcctcggacggcagtgacttcacttttctaagacccctcagcgttcagcagcccacagctctggcgctgg

SEQ ID NO: 99030 - DNA, 122 bp, Homo sapiens
cttaactccagtctttgccagttgaagtccagaggttaaaagacattcagtttaggatgacgaagctgctttcctgtggcttctgaggcagatgaagtcatagaggagtgctgtccaggtgc

SEQ ID NO: 99031 - DNA, 122 bp, Homo sapiens
agaagtccggccaagcataaaattacagccacaaacagccctgcagagaacatctcaggacggcggctgctgggtttttgttgttgttttcatctttcttggccaaaggaagcaggtgttaa

SEQ ID NO: 99032 - DNA, 122 bp, Homo sapiens
tgctgcttgggagctccccgtggctctgccgggacccagtcaactgtccgggttcttatccgcctctttggaatggatgatgtacatgaaggtctgctcgatggtgaagtcaggggggaggc

SEQ ID NO: 99033 - DNA, 122 bp, Homo sapiens
ccaagtgactgagggccgaagacactcacctgtggagcctgtgcacgtaggtagaggcggcggctctgagtccaggagctccagtgggcagctccccaggtagggcccaactcggggggaga

SEQ ID NO: 99034 - DNA, 122 bp, Homo sapiens
ggcgctcccgggcggcggtggcaccacgtagccgcctccttccaccgctcgctttatccccgccccttctcgggccaaccccaagcgccgctgaccccgaacgtcgctgcggggtaggtagg

SEQ ID NO: 99035 - DNA, 122 bp, Homo sapiens
ggccggaagaagccacctcccccgcacgcgtttagccggcccccgcgattcggcctaatgcgacgattggctatggctccaaatcccgcccttccgattcctgtctctaggtcacctccgca

SEQ ID NO: 99036 - DNA, 122 bp, Homo sapiens
ctgcccctgccccacccactgggtagatgagcagcttggcttcttacctgagaattgaagcggatttgacagatattacaggaaatgacgggccgcttggtcttgagcaagggtcccccaaa

SEQ ID NO: 99037 - DNA, 122 bp, Homo sapiens
cctctagttgtaccccagcctcgttggagagcagcaggtgctgtgcgccttgtagaatgccgcgaactgggttctttggaagcagccccctgtggcggccttccgggtctcgcagcctgaag

SEQ ID NO: 99038 - DNA, 122 bp, Homo sapiens
atcgcgcacgtgaccgcccgccccgggaggggccggagccgccgtcgccttccgcgggttcgagccccgcccctgccaggccttgcccatgccccattttacagaagaggaaacggaggcgc

SEQ ID NO: 99039 - DNA, 122 bp, Homo sapiens
agctgcttgagtgacacacttgcaagcttcgcccacgttcctctcccggaatcaccggggcggccaaaccccaggaatctgcctgcttgaaggaatcaaatccaccgtttcactgcccacgc

SEQ ID NO: 99040 - DNA, 122 bp, Homo sapiens
gtcacacagccaggaagtgcagctggcagggttcacagccggtctgtcgctcgccaaagccggtttgcccacacacctggcccccgcggtctccagtccacaccctggtccacagccagagg

SEQ ID NO: 99041 - DNA, 122 bp, Homo sapiens
cggaacctccctaaaggaatctaaacaaggaccactccaagccgcagcgtggaaagccgccgtggtgctaccaggcgctaccgtggtccgtctaccatgtggcgtccacagtccgttgagac

SEQ ID NO: 99042 - DNA, 122 bp, Homo sapiens
ttggaaaacgaccaatcagagctcacctaccgcagccaatcagaaaccagccatattgaccgatcagaacttagctgcaccaaccaatcagaactaagcaagtttgaatcctttatttgccg

SEQ ID NO: 99043 - DNA, 122 bp, Homo sapiens
actcttccattccatcgccacctgtcttaatttaaacattcccatgacccaccccagaagcgccaacctcccgcccacaaggagcatggaagtcttggtttctggctactgcgcagactcca

SEQ ID NO: 99044 - DNA, 122 bp, Homo sapiens
ctcctggtgcgctgttttttaagcccatccgaaaagcgcagtattggggtgggagtgacccgattttccaggtgctgtctgtcacccctttctttgactaggaaagggaactccctgacccc

SEQ ID NO: 99045 - DNA, 122 bp, Homo sapiens
gctggcctccccccaagccctgggggcagcgggcgggtggcgctgggagatcagaggactcggaggagtcgggcccagggggagggggcggggaatttccccccacgcctgcctgggcctgc

SEQ ID NO: 99046 - DNA, 122 bp, Homo sapiens
attaaaatattcctgtcaaaattattagtattgaaattaggcttggacacgagagagaaccgtatttgagtgatgtgagaagactaaatcttttccacatgagtcagcactgccatactaat

SEQ ID NO: 99047 - DNA, 122 bp, Homo sapiens
tacactttatttatatgcagatgcagaaaccattgaactgcgttagaaaatggcaatctccggagggtgtgggaggggaggcaacagcacggcctgtgtgcccagggtgccagcggagcccc

SEQ ID NO: 99048 - DNA, 122 bp, Homo sapiens
catccaacgggacgattgttagaaagattcagaagccacatgatccagtagctggggagacgtcccaaagccaatttcaccggatgattttaaacaggattttcacggattctggactcatg

SEQ ID NO: 99049 - DNA, 122 bp, Homo sapiens
gcgcgggcgcagagaccgccgccagcactcacctgcccgcttcccctagcgcagcgggaacgacgtactccggcccggaccccgccgtccgcctcaaccaacccccaggcggtggcggcggt

SEQ ID NO: 99050 - DNA, 122 bp, Homo sapiens
ctgcgaaccggggatcccgtgaggtcgcccgccatccgtgggcagtgaaacgcgccagcgcgcagagcagactcgcctgcgctgccgtttgctggacgtttcttgagcacctactggggacc

SEQ ID NO: 99051 - DNA, 122 bp, Homo sapiens
gactgactatggtcatctcattccattcttattgttacaaggaaaaaagaatgacaccttcgtttataaaaagaattccatatgttctactagattgccaaaatgagggtggacatgaaaac

SEQ ID NO: 99052 - DNA, 122 bp, Homo sapiens
gtgtgtgtgtgtgttggggggctgcgtccctggtagccgcgtgtgccctgtgatggagcccgggacctgcccgcccgaggccgcctcggcgaacttcgttttccctcgaatctccagccacc

SEQ ID NO: 99053 - DNA, 122 bp, Homo sapiens
cactgtgctagaatgagtcttacagcaagagttcaaagttcaaattctaattctagaactcgttgagtgtaaaattcacagcaagtcatagaacctcttggaaccccagtttccacatctgg

SEQ ID NO: 99054 - DNA, 122 bp, Homo sapiens
gtaactctacggcctagcaaccgttgccaaggagctcgactctgggagcggtctagagcccgggcgcctcctggggggtggggaaacggtttcgtgaggagaatttgaggtaacctcgccaa

SEQ ID NO: 99055 - DNA, 122 bp, Homo sapiens
ccactgcactccagcctgggtgacagcgcaagactgtctcaaaaaaaaaaaaaaaattctcgtaaggaacatgcagcctagaaccctcgcaggcacctgtgcagtttaatagggttcacact

SEQ ID NO: 99056 - DNA, 122 bp, Homo sapiens
agaagaagcgcttggagtccacggtgatggaggtgccctccgggagctctccatacaggccgccccctgggcccccggcgccgcctcccgggccgcctgccagctcgtcgtcctcgcctccg

SEQ ID NO: 99057 - DNA, 122 bp, Homo sapiens
ctgctcctatatttagttactggtgttgtcagttgggaacgttagagcctggcaggggctcggatgggcaaccggagcctccggagccatgtgtgcaagctggccctaccgctggctccagc

SEQ ID NO: 99058 - DNA, 122 bp, Homo sapiens
tgtatcattaatcagtgtcatcagtgtcctcagaagacactagcagagtccagggtgatgcgttcagccacaagcacaaagactgctttttctaaagagcaggatgaggtgaatgtgggaac

SEQ ID NO: 99059 - DNA, 122 bp, Homo sapiens
acctgggggaggggggcgtgttgtgagccatcaaagaaggctctctacgtgcgcgcccgccggagaccagggatgaggtcactaaatgactgccccggccaacccccaccccgtctttatcc

SEQ ID NO: 99060 - DNA, 122 bp, Homo sapiens
ctcataacggccctgcgaccttgtgcaagttggttaacttcagcttcacgttttttccgtcgccacacgaggatgccagtaccgcccgcaccagcagccagtactccgctgggatagttaat

SEQ ID NO: 99061 - DNA, 122 bp, Homo sapiens
aggcccagcccaacttcgcgggtccaggcctggggtttccaggtcaagcaaagaggggaccgagatgtgggagagaaactccacattgactgtccactctccccgacctagccacacaaagg

SEQ ID NO: 99062 - DNA, 122 bp, Homo sapiens
tgcaatagtgtgttggtggtagcttgaactggatcataagaactaattgttggccaggcacggtggctctcgcttgtaatcccagcactttgggaggccgaggcggttggatcacttgaggc

SEQ ID NO: 99063 - DNA, 122 bp, Homo sapiens
cctcgtccggcctgccccatctcttggcttaacagagggatctggagagctgttattccccgcgttcccccgcggagtggctctcgagtgcggggaggtgttgcggaggggagtggacttag

SEQ ID NO: 99064 - DNA, 122 bp, Homo sapiens
ggacggagaagccgggactcctcacatcccacatccggcaggggaagcccagcaggtgagcgcaggtccccccagtccccgagggagtgcgcccgacggaaacgcccctagcccgcgggcct

SEQ ID NO: 99065 - DNA, 122 bp, Homo sapiens
caagcccagcgtggagggccagcagccagcagcagctgctgcctgcgagcccgtggaccacgcccagagtgagagcatcctgaaagtttcgcagcccagagccctggagcagcaggcgtcca

SEQ ID NO: 99066 - DNA, 122 bp, Homo sapiens
cggcaaattctaggcctgagaccaaaaagtttgagaaccctgcccctaggcgacagcaagcggaactgcagcaagctcccagtaattccgggtgctgcacttccggtcaggcggtcgggctg

SEQ ID NO: 99067 - DNA, 122 bp, Homo sapiens
ttctccctcagtctcttcctgttttgttcattcattacatttatcactgccaaaaatgatcgcatttacattctgtttacttgtttactgttatcttactaaacaagagcagggactaagca

SEQ ID NO: 99068 - DNA, 122 bp, Homo sapiens
tgataagggtgagctcagaagccatcagatcgtggcctcactggtcccagttgtggagtccgatgagggtgagctcagatgctctgtggtcactccctgtgccgtgcttcggggacgctgag

SEQ ID NO: 99069 - DNA, 122 bp, Homo sapiens
ttgccaggagcactggcgccagccagagctggagcggcgcttctcccgggtccaagaggtcgtgcaggtgctaagggctctccgagccacgtaccagctcaccaaagcccggccccgaggtg

SEQ ID NO: 99070 - DNA, 122 bp, Homo sapiens
cccttcccggagcctcggcaccacagtaggtgcgcggagccgcagggctcgaccgcttcgcggaaactctcgccaccctccgagctgccgccccgaccccagctcccagccccctcacctcc

SEQ ID NO: 99071 - DNA, 122 bp, Homo sapiens
gactaacaaaatagttttaatagtaacttcatatgtgccccgagttcattttagattcttcgtgtttgaaacttagtagaaaaggagggtaagaagatggaggccaaattggggtgggagtg

SEQ ID NO: 99072 - DNA, 122 bp, Homo sapiens
acatcctcatagcactccccacccccaagggagcctcagtgccccccagccccatctcaccgtccctgctgctcagggtacttctgtttgcagtaggtctccagtgatgcatacactttctc

SEQ ID NO: 99073 - DNA, 122 bp, Homo sapiens
cagatgcaattagctgatttgagcactctgcaacaacgatcaagtttctcatgttaactccgttcaaaaagagaccaatgtgaatatagtctatgttcttgtcttggtttcagttatttgct

SEQ ID NO: 99074 - DNA, 122 bp, Homo sapiens
tgtcctacgtgaccgccatggacctttttgtgaccgtgtgcttcctgtttgtcttcgccgcgctgatggagtatgccaccctcaactactattccagctgtagaaaaccaaccaccacgaag

SEQ ID NO: 99075 - DNA, 122 bp, Homo sapiens
tgatgacatagataggcaaatcccattctctatgtgatgctccccctgcgacggtcatgccgagagattcaccggggtctttttggatatttaccaccttctcatgacaagtaattgtagga

SEQ ID NO: 99076 - DNA, 122 bp, Homo sapiens
ccgtcggtcggggctggcgcggtgcatcgtgggcactgtagtttccgccgcgtttatggccgcgttaagtctgagtgccgctttgagttgttgaatgaagtgaacttcatttgtcagcgttc

SEQ ID NO: 99077 - DNA, 122 bp, Homo sapiens
tgaagagactgactgtacttcaaatagggtggtcagagaggcgagtcaccctggagaaggcggcgttgaagctgaggatggaaggatgaggagcagccagttatatggacattggggaggac

SEQ ID NO: 99078 - DNA, 122 bp, Homo sapiens
aaaaagtacaaaatactagtgctgagccccaatcccagatattctatctgaggaaagaaacgggcatcaggtatttttcaaaagctctctgggtgattcttatatgcagcaaggattgagat

SEQ ID NO: 99079 - DNA, 122 bp, Homo sapiens
gtagggtatgtggctgccccggcgctgagggtcccccagggcgctgatgacgttgcccagcgccaggaggctgctgttgatctggatgctctccttgagccgctcgccggtgctgcccgtct

SEQ ID NO: 99080 - DNA, 122 bp, Homo sapiens
ggaaggaaggacggaaggaaggacggaagactggcacgaggtcacaacatgagttagtggcgggaacaggacttctgcaggcccggggtttgggcctttgcttcagatctcactattcacag

SEQ ID NO: 99081 - DNA, 122 bp, Homo sapiens
ggactcaaagccagcccgggagagagtgaggactcgaagccagccctagagatccaacgccgacacctgctcacaggaatttgaggcactcagggaaggacaggagaaacgatgaggagacg

SEQ ID NO: 99082 - DNA, 122 bp, Homo sapiens
tgccccactgatctcctaagttggggcaatgctcttgagacctggccgatcgcagatccacgggaagctacagggtagtgccacaaggtcccaggagactttccgccagcttccctcaacgg

SEQ ID NO: 99083 - DNA, 122 bp, Homo sapiens
cttcttctttaagcagtcaaattggtggcccacttttggcaaatggatatgatttcatgccgtacttttaatatactaacctgatggctggtaacattttacttccttacacttttgttttg

SEQ ID NO: 99084 - DNA, 122 bp, Homo sapiens
atgactggcaaccccgtggtacagagggttagagatccccctccaggcccatcgggagcccgggccaagggaccagcaccccgtgggtttcctgccctcactcaccatgatgcaccggctat

SEQ ID NO: 99085 - DNA, 122 bp, Homo sapiens
actggcatctgcctcctggagtcagagcgtatggcacgtggctgtcatcttctctgtatgcgtctctctggattgtgcttgggaaaggaagggtcatgtcctattcatctttgtttcgtagg

SEQ ID NO: 99086 - DNA, 122 bp, Homo sapiens
cccagcccttcctcgactcacgagctgaagcccaagataagcccgtttctccaggtgactcgggtacgcagaagccccagtggggagtggtaccggggctgggggctccgtgcagacagcat

SEQ ID NO: 99087 - DNA, 122 bp, Homo sapiens
aaccgcgaaacccagcgattagtgttcagctcgattaggacgaacccgggcccttagctgcgcaggaacaaccgcaagcctctagcctgaacgggagcggcaatgggcgcctccctagatca

SEQ ID NO: 99088 - DNA, 122 bp, Homo sapiens
ttgtcacacaaggcctccaactgggacggcgtccaccgcgccccgccccgcccgcggcaccgtggcatcttgggacatgtagtctttggaggggcagctgcctccaccaagtctcctccccc

SEQ ID NO: 99089 - DNA, 122 bp, Homo sapiens
ggtgtgtgtcttggtgtaaataaaccgctactgcaaccgatttcgctcatcctttggttccgcattgaggctcgccagggtctaaatccgcacagagactaggtcttccttaggcttctact

SEQ ID NO: 99090 - DNA, 122 bp, Homo sapiens
ataaggccactggggacagtcactacgttttcaggaaccgctcagcccctctgagtgccccgcagatggacctggcggcgttcctggctacggctgactgggctcccggagcgaggagcgcc

SEQ ID NO: 99091 - DNA, 122 bp, Homo sapiens
cccccaggagaaacaagcttggccactatgctgtcatcaagtttccgctgaccacggagtcggccgtgaagaggacagaagaaaacaacacgcttttgttcactgtggatgttaaagccaac

SEQ ID NO: 99092 - DNA, 122 bp, Homo sapiens
ccataatttggccaaaccctcctttccagcctcctattctgccactctcttctcaaattccggaagattccacccacaagactgcaaacaattcctggaacttagctgtgttgcctccctcc

SEQ ID NO: 99093 - DNA, 122 bp, Homo sapiens
gggggttaggggccctggagccacacgcttctgctctgcaggtgtgggcggacagccggtcgcctggaatcatctctcaggcctcggcccccagaaccactggaaccccccggaccagcctg

SEQ ID NO: 99094 - DNA, 122 bp, Homo sapiens
cacttggtattgtcagtctttttcatttgtatccattcttgtccatatatagtggtatgtcgctttctttttttttttttttttttttttgagatggagtcttattctgttgcccaggctgg

SEQ ID NO: 99095 - DNA, 122 bp, Homo sapiens
tattgttgtataacaaattgacccatggcttggtggtttaaagcaataaccatttattatcgcagcaaccatttatcttgtagcttctgtgggtcaggtacccagtgtggttcatctgggtc

SEQ ID NO: 99096 - DNA, 122 bp, Homo sapiens
acagcacaggatgaggtgcagacccatcccgaactgccggactcggcgctctgtccttcccgacctccctgaagaccggcacattccatgctggtctcacttcagacagccaggagggccct

SEQ ID NO: 99097 - DNA, 122 bp, Homo sapiens
gggactgttaagtttacagagctgctttcctcccccgggactgatggtacggtccccgggcggctccccacccatctgtcgcagaccttggtacaggcccagggggccctcggcggcctctc

SEQ ID NO: 99098 - DNA, 122 bp, Homo sapiens
actgtgttaagtcactgtgattttggtttgtttgtttcagataaaccacctaagctaagacggcaccccagacagtcaccctcacttccctatcatggggttcctggggactcctcccctca

SEQ ID NO: 99099 - DNA, 122 bp, Homo sapiens
ttgacataccatttcttatttcctattcatatgccgtttctgtgaagtagcattgcacatcgctgcagttgtataacacacataactaaatcaatggctctcaacctctgctaatataaata

SEQ ID NO: 99100 - DNA, 122 bp, Homo sapiens
ctttcaattgtctggactcatctgtgactgtattcttcccaacatgcattctttcttcttcgaggggttgttcaataacagcaggtatgtttgtgccataaagttcacagtgtcctaaaaac

SEQ ID NO: 99101 - DNA, 122 bp, Homo sapiens
ctgtctgtctatgctatggaattatgtattattcagcctttaaaaagaaggaaaccccgtcgtatgctataacatgggtgaacctgaaggatattatgccaagtgaaacacaccagcacaaa

SEQ ID NO: 99102 - DNA, 122 bp, Homo sapiens
aggtcaatgttacatctggctccggagctcagagccgagaagcctctggctgcagaacctcggccgcacgcctcctctgagaggggctgggacttagagccgagagctcctctgggagcccc

SEQ ID NO: 99103 - DNA, 122 bp, Homo sapiens
cgccgtgccccaactcaatcaacaggcctccggtacttgcacagccccactccattcccccgccctgcccccagctccatcagcccccgggccctgcgcccgcccgcccgcccgccaggcca

SEQ ID NO: 99104 - DNA, 122 bp, Homo sapiens
tcgtatattactgacactggaacagacatgttttaacaaactggttgagccgtatcagtgcgaaccagctgaatgtcagcgctgttccctcctgtgacagaagccaccggcgcctgcctgag

SEQ ID NO: 99105 - DNA, 122 bp, Homo sapiens
aaaagaggaggcattctctgtcattatagcatatcaattgttatgctaaggagacacatacggtgcaggaatactaagtaacagagagaggattaccttccgacagttctcttattaataag

SEQ ID NO: 99106 - DNA, 122 bp, Homo sapiens
ccggtcatacttcactgtcaggcggctgggtctccgggacctgggtatcttggaggagtccgggtgggacttggactctgagtctgtggatgatgtccttctcctcccagaagcccagtgga

SEQ ID NO: 99107 - DNA, 122 bp, Homo sapiens
tttatcatctcttcttttccacttggggacttgggctgaaaatcaggagtggctggaacacgcccatttactgtttggttttgcaggttgttggagggtactacagaagaacatccctctgg

SEQ ID NO: 99108 - DNA, 122 bp, Homo sapiens
ccaggcctgaggcaagtggtggtcagggtcccaggcggccggcggaggggccacagagaccggagttttcaaacttcattgagcaccagcgctttcctttcatgcccaatcgcatggagacc

SEQ ID NO: 99109 - DNA, 122 bp, Homo sapiens
gaatcatagcagagaagggaggaacaaccctaacagtgttcactacaaggagatagaacccgggagtgaaaaggacaaatagcaatagcttagaatggatgttaaagaaggaggctggcggg

SEQ ID NO: 99110 - DNA, 122 bp, Homo sapiens
tctggaggtttccctacctggccttccagaacgggggaggtatggcttttccgctctttccgcctgcggcggggcggggcgggcacctgagggttgggtgggacaggagccctcaggcaggg

SEQ ID NO: 99111 - DNA, 122 bp, Homo sapiens
tgcggagttggcggaggctcctccagggactggggcacagatctgcgtagaaacgggtggcggggaagagaggggaggagagctctgagtgggaagcggagccgggggcctgggacccgtcg

SEQ ID NO: 99112 - DNA, 122 bp, Homo sapiens
actaacccccagcaggcctggttccaccctgggcagcaccccctctagttctaataaagccgcctctgtctcacaccaacctctgtcctgtctgtggacccccgggggggcacagggtgagg

SEQ ID NO: 99113 - DNA, 122 bp, Homo sapiens
actcccaggaggacccgccgagtcccgaggagcctgggagtggcggggctgggggcagggcggtgggtgaggcttgagctgctttcccgcctcccctcctcctaggagtcgggctggctggg

SEQ ID NO: 99114 - DNA, 122 bp, Homo sapiens
cctgccccggccccacctcctgagcaaccccccgagccgagctcaccgcaggccccgccccggacccgcctcctgggctactcaccaagccgcgctcactgcaggccccgcccctgccccgc

SEQ ID NO: 99115 - DNA, 122 bp, Homo sapiens
tgtggactgggcctgggcaaggctgtgctgctcctcccaggactgggcccacggccagtacggccagctccttcagggaaacgggcctagcaggggaggcaggcactccactggggaagatg

SEQ ID NO: 99116 - DNA, 122 bp, Homo sapiens
aaggcatattccaaattgtgaatgtccccatcatgcactttgtaataatttttcctgacccggatccattccagcaccgtgcagtgaggacttctgtctgtttttgttttgttttaccttcc

SEQ ID NO: 99117 - DNA, 122 bp, Homo sapiens
gaggttgcccaaaattctcatcccagcccagcttctgaaagaaacagcagatgccaggcgcggtggctcatgcctgtaatcccagcactttgggaggccgagttgggtggatcacgaggtca

SEQ ID NO: 99118 - DNA, 122 bp, Homo sapiens
atgacaggaaacaggattttgaggctgctgcagcctcaaacagggttgtcaggatggactcgctgagacttttgagcaaaggctgggatcagaaaggaccaggagcctgtgcctgcgctgga

SEQ ID NO: 99119 - DNA, 122 bp, Homo sapiens
tctgtgtatgtggcatggctgtgaaataagtgcatggcaaagagttctttcaaatgccttcgcctaagaagatcaatcacagtggctgcaagccctgaggtggaaggtcagagcctattggc

SEQ ID NO: 99120 - DNA, 122 bp, Homo sapiens
ggggcggggccgcggcgggggagggggcgggacgagcggccggggtcccgaccccaagcgcggaaggaaaagccgggtaacccaagtaacttggaagacagtttccgctgccgtgcgagtct

SEQ ID NO: 99121 - DNA, 122 bp, Homo sapiens
gaactccgggctgaactcctcaatgggcaccagagtgaccccgtgctgcaggcagagggacgagatgctgcaacgcccgtggtgcggggaggatagggggtgcaggcggtacgatggggggg

SEQ ID NO: 99122 - DNA, 122 bp, Homo sapiens
tctacaagaagcgagatgagcacaccctcctctgttaaatattgcaaggtgacactggatcgcctcccacacagggattttcaaaaggtctggcggggggactacagtaaacaagaaaggtg

SEQ ID NO: 99123 - DNA, 122 bp, Homo sapiens
agggggtgcccaggttgggcagcctcctctgggatcctgctgttagccgacagactgagtcgggctgaggcccagttgccccgcgcggaacagcagtggggcgcctgagccgcgggagcgtg

SEQ ID NO: 99124 - DNA, 122 bp, Homo sapiens
taattactgttaacccaggcaaacaagttaatttcacataaaacatgaaatcaggccgggcgctgtagctcacgccattaaacccagcactttgggaggccgaggtgggtggatcccctgag

SEQ ID NO: 99125 - DNA, 122 bp, Homo sapiens
atcagctgagctttggtgttgctaggaagtgtttgcttcctgtggaacataaacatcagacgaggccactccataatcacatctaaacacggccaaaatatgagcgatgtacaagccacaga

SEQ ID NO: 99126 - DNA, 122 bp, Homo sapiens
gggacgccgagcggagctctcggagctctcggggctctaggggcctggggctagctgctccgcggcgcggggagctccgggggtccaaggaggagccgccgccgccgccgccgtgacgctgg

SEQ ID NO: 99127 - DNA, 122 bp, Homo sapiens
ggggacagcatgagacctgggaaccccacagccgggacctccccaaggcccagtgtgtcccgggaaggcatctggtgtcaacaccagccaaaggtcacaggtgggcatgtaggcccggcatt

SEQ ID NO: 99128 - DNA, 122 bp, Homo sapiens
tcctctgctctccatggagaggaaggggcaggaaatactccagtgccagccacaggacctcgcttgtgccccagggtattaaaggcagagacagaacagagggcagccacggggctggcatc

SEQ ID NO: 99129 - DNA, 122 bp, Homo sapiens
agatatgttgctcatctccaaaattatctgctgcctgcagagctgcctgcttttcaactgcggttagagtttggtttaggagcagcataacatccttccatgtgaggtgaaacacctgagtt

SEQ ID NO: 99130 - DNA, 122 bp, Homo sapiens
gccaggcgcgccgtcccaccccggctcggcttgggggtggccccgcgcctccgccgccgacgcagctagctggtttttaaattgctaatctcattaacggcgcgcccgtccgagaggcgagg

SEQ ID NO: 99131 - DNA, 122 bp, Homo sapiens
tgctgacagacgcccatagatggcagcagccctctgaagcaacagcggaggtaacgtgggcgttcgccttaggagccggggcagggtgcagagctagggtagtgggtgaatgttcacacaag

SEQ ID NO: 99132 - DNA, 122 bp, Homo sapiens
cactgactattctaccaatggcaggtccaacgcagcacttcagtggcgcggtcctttccacgtcagacaacattctcgcacacaccctctcattcaagccctccactgccctgcgggtccca

SEQ ID NO: 99133 - DNA, 122 bp, Homo sapiens
aagtgacgtccacagcggagatgtttgtgacccttagcaatgtctgcacgtggaacagcccgtggctgccttgagtcagggcctgggaagatgatggtatcgtctttccttccatgtccctc

SEQ ID NO: 99134 - DNA, 122 bp, Homo sapiens
gggtggacggagaggtaacaatctgctttcaacaaaaacctgtcgccaccgaatcgaaagcgaaagggaagggagaagaggggcagcttcccgcagcggccccgcgtctcgggacaggtaga

SEQ ID NO: 99135 - DNA, 122 bp, Homo sapiens
tatggaacaaacatttatatgccacttgctatgtgccagacctggcctgggcctttgacacgggggcatggtactggtcttattcatccttgtcttttttttctttgagacagggtctccct

SEQ ID NO: 99136 - DNA, 122 bp, Homo sapiens
aaggggtaatgacatggacttggcggggggacaagacaaagctcccgatgctgcatggggcgctgccagatctcacggtgaaccattttggcagaatacagcatggttcccacatgcatcta

SEQ ID NO: 99137 - DNA, 122 bp, Homo sapiens
gaccctgtggagggaaagaccttggcaccttccagaagttcggagaataattgtgtgtctcgagcagaaagttcctcacgtggctagttctttgaattaaactcaaacatgtcctaatttgg

SEQ ID NO: 99138 - DNA, 122 bp, Homo sapiens
tgtcgcaggctgaggatgtccaagacctggcgagtctcgggtcagaggagccggagggggcgacccgaggccccgcgccccggctctgcgctggggggtggtgctggctatttctctctgct

SEQ ID NO: 99139 - DNA, 122 bp, Homo sapiens
gcggcccttcttccttctgagttgtttttcaggggctgcgctggggtcccacggacacctcgccagaatcagctgggttcccatgggaaggggaagtgccgctcctgcgtccctgcaccctt

SEQ ID NO: 99140 - DNA, 122 bp, Homo sapiens
aacagctgggtgccctccctcagcagtggctgggccagctggagcacatgccagcagaagcggccagaatccttgacatctccagggcagtaacacagctcagaagcctggtcattgatctg

SEQ ID NO: 99141 - DNA, 122 bp, Homo sapiens
ggaattcatgattaatgaagcactgttccaggcagcgaggacgcagtggcctatggaagacgctcttgcggaactcatgattgatccagcactgttccaggcagcaagcacacggtggccta

SEQ ID NO: 99142 - DNA, 122 bp, Homo sapiens
ttgcctctgcccgccccctcccgggccgcctcctcatggggcttcacgcacctgcccagccgggacagccaggtctgcactccaccgggtcccaggctccgggagcccagcaggacccaacc

SEQ ID NO: 99143 - DNA, 122 bp, Homo sapiens
gtgggcacagccctggccctggcccggaagggtgtccaactgggcctggtggcattccggcgccattacatgatcacactggaagtccctgctcgagacaggagctatgcctggttgcttag

SEQ ID NO: 99144 - DNA, 122 bp, Homo sapiens
acgagtgggtttgacctttctaggtccgcccctttgctcctccgaggatggatggcacagcggccacccccagacttggtcgaaggttctggccttccctttctcttctcaggcggggccag

SEQ ID NO: 99145 - DNA, 122 bp, Homo sapiens
ttttttcattcgcaattttatggacagaagattcatccttaccacagatcttagcaacctcgtcatatgattttctttgttgttgttggttttttttttttttttttttttttttttttttt

SEQ ID NO: 99146 - DNA, 122 bp, Homo sapiens
tgatcagctagaaccaagtctcgcgagaacaccgcgagcaacgttccagcccctgcgttgcgagattgtgaaaattctaactagtcctttgggattggggttgtggaacctggagctggaag

SEQ ID NO: 99147 - DNA, 122 bp, Homo sapiens
cgctcctccgggatccgcgtggctgccgcggcccgggcgccgatgcggctgggcgggtgccgggccttagcagcagtagcagccgcagctgcggctaccgcagctcctacaggagtgggagg

SEQ ID NO: 99148 - DNA, 122 bp, Homo sapiens
acgtgtaaataataaaaaagttttggcttttttctttagaaaccggccacctgcttcccccgcgggggccgctggaggaagggcagccgacccggccgctgggggaagtgccaggggcccgg

SEQ ID NO: 99149 - DNA, 122 bp, Homo sapiens
cgcagtggctggtgccggcttcggcattgacccgccagccgctgtctccaaggaagacggcgagaactaggccttcctcaagaggatgatgccggcctaccgcttccggcccaaccccccgg

SEQ ID NO: 99150 - DNA, 122 bp, Homo sapiens
ggtacctccgaagtttctgcctcccggctgtgaggctaggaaggaagcggctggggtgagcggcagcggtgtctggctctcgcgctttctccagctgcagttcgttccagctctcccgactt

SEQ ID NO: 99151 - DNA, 122 bp, Homo sapiens
acctgagggcgtcaagggtgacctgggaagacatccgagagtgaggcagctggtgaggcccgcgtgcccttgtggcagttccgtcttgggacgataatgaagatggcttttgagcgtacaaa

SEQ ID NO: 99152 - DNA, 122 bp, Homo sapiens
gtggttcctggagcccaggaccacccgcctggaaagggataagttaatgggagtagggtacggtgaaagacagaaagaaaaaatataattggatatccccagtccttcaagtgagaaggagc

SEQ ID NO: 99153 - DNA, 122 bp, Homo sapiens
agattagctcagcatcttcatttacatgttccacaccaacaaagatgagctcagcatcttcgtcatctacttgtttggtttcttgtatgttcttctgtggttcaggctctttctcttcctca

SEQ ID NO: 99154 - DNA, 122 bp, Homo sapiens
agcacaggcagaggcacataccccctccaagtcaaagttgtgagtggggtggtgtttgcgcgtctgtggctgggactggatgtgtcagggatgggaaaacccatcatgctggtcacagaaaa

SEQ ID NO: 99155 - DNA, 122 bp, Homo sapiens
aataaaaaccattaaatacagatcatggcacgaggccgcctctccatccctccaagctatcgtccagcgcagtccaccgccgcctcaggccgtgccgctggccgagtaggagaactggggga

SEQ ID NO: 99156 - DNA, 122 bp, Homo sapiens
ttttgagggaattttaaaaatgaatcacgtgcacctcttaagaaaaccgagtgtcacaatcgttgttaccacgcaggtgagaggagaggagggaggacgggaaagggaaggggcatgagaaa

SEQ ID NO: 99157 - DNA, 122 bp, Homo sapiens
cgcctccgcctctcccgacgcggtgaagttctgctcagcaagaaaaggcgcgtcgggacccggtcctgcataggccctgggccccgctcccaaaaacaccctgcaaacccggccacctctaa

SEQ ID NO: 99158 - DNA, 122 bp, Homo sapiens
attgtttcaccaaccttttctttaactcaatgtgaatgaaggcactcaaaaggagaagaacgttacgtgatattacctacctcgggccccaaagaaccctggagaccctcaaccaggacaca

SEQ ID NO: 99159 - DNA, 122 bp, Homo sapiens
ccaagaatggctctgtcacactcgaagccaggcttgatcaataaacacaatggtattccacgtctagcgtgaatccaatgtttcctcttaccccactgaagtcagaggtggttcaccccctg

SEQ ID NO: 99160 - DNA, 122 bp, Homo sapiens
caatccggcctcagttgccggctgcccggaggggccgcgtccggggattcagcgggtcaccggggtcagctccctgcccggaccgacccggttcttaggcctctgcttggcatgaaagcggt

SEQ ID NO: 99161 - DNA, 122 bp, Homo sapiens
aaatccacgcccgccgtgtgggtgaaatggcggctttgcctcccagacgcgtagctccggcgacgcagagggaagaacctgagtgcccgccaggccgagctccgcaccccaccccccggcag

SEQ ID NO: 99162 - DNA, 122 bp, Homo sapiens
aagaacgatcatagtaactgctctaacctgtgttgaattatactgtatcaccacaagacacgatcacagagttacttataatagtgtcctggctgtgttcctctgcctgcaacgccgtcccg

SEQ ID NO: 99163 - DNA, 122 bp, Homo sapiens
gtccaccttccggaagcgggccgacgacactgtgttcttcgacatcccaatcccgaccagcggcaaaggcctcttcttggcgctgcctctacctcagcaagcccagcccagcaacccactac

SEQ ID NO: 99164 - DNA, 122 bp, Homo sapiens
ttgacgtcttactcctgaggcagagcagggtgtgcctgtggagggcgtggggaggtggcccgtggggagtggactgccgctttaatcccttcagctgcctttccgctgttgttttgattttt

SEQ ID NO: 99165 - DNA, 122 bp, Homo sapiens
gcagctgttccctttgcaccggggactagaggtcggacagctgggattagtcagaggtgccgagctgtgtcctccgccagcccaaccatggggaccttctccaagtggaaacctcggcttgg

SEQ ID NO: 99166 - DNA, 122 bp, Homo sapiens
ttcctgtctgccccttgaggaccagaagtggattttatgcatctttggggccccagggcccggtacaagtgcaggggagggtgagggaagccccgtgctcaccggcagtagtagatgagcag

SEQ ID NO: 99167 - DNA, 122 bp, Homo sapiens
tttttagaaatgatggatgcattccttgatttatccaggtttctagggtgtctttggggacgtcagtaggaaggtttgcagtggagcctgtctaagcgggcttagcctgccttcgggcccct

SEQ ID NO: 99168 - DNA, 122 bp, Homo sapiens
cgaggggtactatctgtgaaacgagggctgcctgtcccagcagccagctttgtacagagacgtcccggagccacgagagagtaacggctaacccgggggagggggtggcgagggtgattcca

SEQ ID NO: 99169 - DNA, 122 bp, Homo sapiens
gtcaaaattaaagttgcaagggtgggtttggagcggctctgggtgggagtcagcgtccagcgtgccgaccaccccctttctctgcagtcctctcacgcaggactccgccataaaacctgaaa

SEQ ID NO: 99170 - DNA, 122 bp, Homo sapiens
tatatcctgcaaatcaatagagggcagtgcttttataggggccctcacgtactctaattgcgtctctggaataaatagactgaagggccagctaaatgaaaaaagccacagtggttcgctgt

SEQ ID NO: 99171 - DNA, 122 bp, Homo sapiens
gggagatttggaggaagctttctacgtcctaggaggctgagatcccacggagccggtttacggttgagagcagacagtttcgagtagatagcgctggaagagacacgaagaatctctcttgc

SEQ ID NO: 99172 - DNA, 122 bp, Homo sapiens
ttttttaaagaaatggcccgtatcaccatgtccgcgtggtgccaggcccagcgcagactgcgccactgcctgccggtgcctgttgactttgtggtgtgtttatcccgggtgtgtgtgtacgt

SEQ ID NO: 99173 - DNA, 122 bp, Homo sapiens
ggtggctcattgtggtgggccagaaaacgcgtgcaagtttccgtagtgtagtggttatcacgttcgcctaacacgcgaaaggtccccggttcgaaaccgggcggaaacagactcttatgctt

SEQ ID NO: 99174 - DNA, 122 bp, Homo sapiens
gagaagaatgagcgtgtgcagaagcacctgaaggccctcacttcggagctggccagtgcccgagatgagtccaagaagactgccaatgacatgatccatgctgagaacatgtgactgggccg

SEQ ID NO: 99175 - DNA, 122 bp, Homo sapiens
atcagaggagtaagtggaagctcgtgttctctgtccccttgatttctctatagagaacaacgtgagttgggaaagaaaagagtcagagggaaacagaaccttccaaagagctacagtacttt

SEQ ID NO: 99176 - DNA, 122 bp, Homo sapiens
aagggatgactcaccccagtgattcaaccgcgccaccgagcgcggagctgccctggaggacgcaggcgggtctagttgcccgggtcccccaaggcccccggattcacccaggcccgcgactc

SEQ ID NO: 99177 - DNA, 122 bp, Homo sapiens
tttcatgaaataaacatacttctaggagatgtctccttttatttatacaaacatacacaccgaactggaacgtaatttgaagttgggaggtggaaaactaaaggtcaaaaagggaagaaagc

SEQ ID NO: 99178 - DNA, 122 bp, Homo sapiens
aaagtgttggggtcatgagggttgggtagtggaggggccggcagatggctaaatacctatcgtaggccatagctgtcaggagatagcactcagtcgctccaagggagtgaaagaaatagatc

SEQ ID NO: 99179 - DNA, 122 bp, Homo sapiens
cttctccccttaaagcccttgaagactagaaaggaagacagacatagaaatagacaattgcgtacagtgtagtgagggccacagaaaaggcaaatctccttggtctctgcagcagtgtccat

SEQ ID NO: 99180 - DNA, 122 bp, Homo sapiens
ggctaacctgctggatgatgagactcacaaagcccaggcatccctgtagcccttgccaaccgtcatgtatgtgagtgagactatccatctgacgggatgttcatgagtgagctcagaggaga

SEQ ID NO: 99181 - DNA, 122 bp, Homo sapiens
cagttcacgctgcagtctttaactccatacttcttccttctagtacaaagcaggagtgtccgttgtggccacgcctcacccaggaaactcctgaatcctggcagctcctccccacggttccc

SEQ ID NO: 99182 - DNA, 122 bp, Homo sapiens
gacttggctttctgttttcacagcagctattcccactgctctgtgaggctgctcaaccatcgctgtcccctttcctttctcccacacctcctctaggcaactctgcctcaagtttgctttct

SEQ ID NO: 99183 - DNA, 122 bp, Homo sapiens
caaattttccttaagaggctatcaagtaccagtatcttcacgttggtcagctgttacatacggcccaccagttcacaactcaacagcacgtacactacatgttcaaatctgtaatctttcac

SEQ ID NO: 99184 - DNA, 122 bp, Homo sapiens
accctgcctccacaaaaaaaatttttcaaattgtgaaatgaagagacattggtggaacatcgcattctgacagtggccacctgtagtggcaaggtgtggcaggaataactgccctgtgtgca

SEQ ID NO: 99185 - DNA, 122 bp, Homo sapiens
gcggctccacgcttactttcgagggtgctggcgggtgtggctggagctcactctcactgccggaagtgaggagcctctccaactcactcaggggagatttttaaaaatagtcttatttctca

SEQ ID NO: 99186 - DNA, 122 bp, Homo sapiens
caaatgtcggccccctgagggcagggatttcatccgtcttgtgcacggctgcatcctcagcgcctagaacagcacctggcaaacaataggtgctcattcagtatttgtccaataagtgaatg

SEQ ID NO: 99187 - DNA, 122 bp, Homo sapiens
gcggcaggtgccaggagggcgggctggccgctcaccttctccacttgcttctgcaggttgcggacaccgctctcgcggcagtactgcttgatgagcagcgtcagcacgtccgatgacagctt

SEQ ID NO: 99188 - DNA, 122 bp, Homo sapiens
tgacttttccaaggccacagaactagtaaagagcaaagccaaaaggtcccccgttccccacgggccccaggagttctccacacgtaacccgactcaccgccagacgccgaccagcgcttctg

SEQ ID NO: 99189 - DNA, 122 bp, Homo sapiens
aggtcccatttccggtccatgggccccatggctcatcatcatcccaagcagcaaatgccacggccccttcttgggctgctggcatctggccattcagcccaggagttgcagccaggagcaga

SEQ ID NO: 99190 - DNA, 122 bp, Homo sapiens
ccgtctgtgctgaccaggtggccgtgctttgtcgtgggaggcctagggtctgcggatgggcgatgatggggtggggcttggaggagagtttgtgcaaattgccgctgcgagggctgctgtga

SEQ ID NO: 99191 - DNA, 122 bp, Homo sapiens
gaagtggtcgagtggggctgaagtacttacttgacgagtctggttcagaaaaggtcaggtcggaacccacccagagacaccggctctaggcagcgtgatccgaacaataatttgttctcgcc

SEQ ID NO: 99192 - DNA, 122 bp, Homo sapiens
cagaagaagagggaatgacttgtggaccaacattcaagaggagtcagggagtggggttgacggcatagatgtagctttgacccacccaaagaatggacatatctgaaataggtacaaaggaa

SEQ ID NO: 99193 - DNA, 122 bp, Homo sapiens
aatgaacccaaaccaacatctgctgctgtcttgcctgcccagaacaggcttggttttgaccggagaaagcagtcacatttcagtgactctcactccggcttccctaggtgaaaatgacagag

SEQ ID NO: 99194 - DNA, 122 bp, Homo sapiens
tcttcggttaactgttttttccatgtgtcatgcacatctttccacatcattgtagttctacgttttcatttttaagggctacagttcacttcatcccataatttccttactcaatacaagta

SEQ ID NO: 99195 - DNA, 122 bp, Homo sapiens
cctgtggagagggaagtaacgacagcccacactgaagagggatggtgtcaataggaaggacgggacagattcaagtgacatcatggaaacagatactacagaattcggcagttgatttgata

SEQ ID NO: 99196 - DNA, 122 bp, Homo sapiens
cttggtggccaatgaggagcctcgtgggggtgctctcggctgccatggcaacggaggggccgcccgcttccccgcggggcgaggccggctctcccaggactggccacattgcagtcacgcgc

SEQ ID NO: 99197 - DNA, 122 bp, Homo sapiens
tgcagacttacccggaggacaggtactgcgggcttctctccacacccccccactccccaccgccaattcagtctacctaaccgtccctgcggtggccaaaaatattaagagcaaagtacttt

SEQ ID NO: 99198 - DNA, 122 bp, Homo sapiens
gctgccccctgaactcctggcgcctggttgcctgggcaaccctcttctggggcgcctccgcgacctcttaccattggtttagacgacgcagcgtgcgtctgacgtcattgcgcggcgcgacc

SEQ ID NO: 99199 - DNA, 122 bp, Homo sapiens
gcgccagaactcctagacgggaaactttcccccattgaagctagaaccggtcatgcgactcggctaagtgtggggaaacactggctctagactccaggtgaacatcgcagggccgaggtgca

SEQ ID NO: 99200 - DNA, 122 bp, Homo sapiens
ggaggacccctcgttagcgcaggacctcggcagccgggggttgggctcgagggctgagggcggcgcgccatgcgcggattagctgccatccggcgggtctttctgccggggaccagtggggt

SEQ ID NO: 99201 - DNA, 122 bp, Homo sapiens
ctctccacgttgctgcctacgcgtgctgcccggacgtagggcactcctagcggctcggcccgcccagcctgcagcctcagcactgcagactccaaggcccagcacagtgcccggcacagagg

SEQ ID NO: 99202 - DNA, 122 bp, Homo sapiens
ttgatgaaacgagacaaagttcttctcccctcagccttgaaaacgccccgccaggctggacgagcaggaaggtagagcggttaatataaatagatatcgtgatgaaagaacacgatcatctt

SEQ ID NO: 99203 - DNA, 122 bp, Homo sapiens
ggtggctcccgccccatggtaacttcaggttcgcgggaaagttcggtcctgggttagactcgcacccgggatttgtgctttccttttgaggatcggacaggggcacccagccgaaggcactt

SEQ ID NO: 99204 - DNA, 122 bp, Homo sapiens
tcccgcgccgtgcccgcggcggaaggcgcccctgcagcgcgtgcatccgcggagcggtggcgacctcagcctgagcagaggagttgcagtgattcctgcctcgctttcagcggactgcggag

SEQ ID NO: 99205 - DNA, 122 bp, Homo sapiens
agacccctccctctgggaaggccggtgaccgggacagtccacctcgcaggcgcgccggcgcggagcccggacctcagcccgcaatgactcagcaagggccggtgggattctacatggtcctg

SEQ ID NO: 99206 - DNA, 122 bp, Homo sapiens
ttgcttgcgggcgagcgattggtgcgtgctttgggccccggcggggagctggagccagagcggctaccccgaaagctgcgggccgagcttgaggccgcgctggggaagaagcacaagggcgg

SEQ ID NO: 99207 - DNA, 122 bp, Homo sapiens
gagcacagtcaaaacaaggaagactgcccagccaacagcagctgactgcagaggcatgagcgagcccagcccagcagagataagctaagctgagcccaggtcagctaagaccctgcacactt

SEQ ID NO: 99208 - DNA, 122 bp, Homo sapiens
ggcggggcctcggcggcgggctgggggcggggtctgtcgggggcgtgaccaagctggttacgccccagaggaggcgcccagccctgttcagaggatgtggggccggaaggactgtggaagtt

SEQ ID NO: 99209 - DNA, 122 bp, Homo sapiens
taaagcagagggcaagaggagtgagagggaggggtgtcgcattcacttctggttccggagcggactagacagccagcccagtccttgatagagcccgtcgccactggtggcacaggtggcct

SEQ ID NO: 99210 - DNA, 122 bp, Homo sapiens
aagaaaacttggctgaacaaaatcagtcccagtctatcactctgctctaaggagtctttgcgattaaaggcttgatgttttttctttaaaaagaaaagaaaaaagctgccagcaataattag

SEQ ID NO: 99211 - DNA, 122 bp, Homo sapiens
gaaagcatcattttatttatttagcaacaatggaaacaaaataaaactgtacacagggaacgataaaggccatcaggaaagaaaccaaattgttacaatgtatttctctacaaagtatgggg

SEQ ID NO: 99212 - DNA, 122 bp, Homo sapiens
ctcataggtggtcagggcggttctgcccgagctgacctgtgagccgcgaatgccctggaccgagggagggagagccccctaggtggacagactagactccttcagtggaaaacattcaacag

SEQ ID NO: 99213 - DNA, 122 bp, Homo sapiens
tgttgtcgttgagctccagcacctgcagcgactccagggtctcgaaggcgtcctcgtgcacgcccaccaggttgttgttagccaggctaagcttcaccagcctcccggccgagcggaaggcg

SEQ ID NO: 99214 - DNA, 122 bp, Homo sapiens
ctttttcatgctcttggtagttttgaggggtattggtcaggtattttgtagaaagttcatcggtttgggtttgtctgatgttttctcatgattacactggagttatgggtttgggggaagaa

SEQ ID NO: 99215 - DNA, 122 bp, Homo sapiens
gccagccgggaaactgaaggcctttgctatggtgtgtctccttcctgggaatcaccacctcggaggaggcatagtgccacaagggacggccttgagaacaccggaccggagccaggagcgcc

SEQ ID NO: 99216 - DNA, 122 bp, Homo sapiens
acctgctcgggttcccgcgccccacgcttgctgcagaggcaccgcctcctacgcccgagccgcgggccctttaagtgctgacggcccactccggccccgaccccgcccctccacgcccccaa

SEQ ID NO: 99217 - DNA, 122 bp, Homo sapiens
ggacatggctgtctcgcgtctgcatccgcgtgcacactgatggcggcttgggcatggtggcggcagcagcaagaccagtgtcacccccgaggcccgggctccaggtccccatgtgctctgag

SEQ ID NO: 99218 - DNA, 122 bp, Homo sapiens
caggggcctgcaattctgtgatagcgttggggcctgctttccacgcccacttttctgcaacggtttgtgatctggactccctgagcacccgttgggagctgggggcagcctagggaagtcgg

SEQ ID NO: 99219 - DNA, 122 bp, Homo sapiens
gagcacctcgccagcagcctgaagctcacatccactcaggtgaaaatctggttccagaatcgcaggtacaagtgcaagagacagcggcaggacaagtctctggagcttggcgcacacgcgcc

SEQ ID NO: 99220 - DNA, 122 bp, Homo sapiens
cacctttcctgccggcgaacgctggcgaccgcccgaccctgccctctttctctcttcgcacgcaggtccggaaatcggctttgatatggaactactccgctctagcctggaaaggagacccg

SEQ ID NO: 99221 - DNA, 122 bp, Homo sapiens
agttaggggtacctgtcccatgaaccacaggagggttcgccatggactctaacagacatacgatgggagccacctaggtaatttaaacttctctagttgccacattataaaaaggaatacgt

SEQ ID NO: 99222 - DNA, 122 bp, Homo sapiens
agctatggtttccatggtagagtagaagcatccaccatgtgtgacattcagcagatggggcgctgtgggtggcttggagcactctggttgtaactgaggcaggcacagtgtttaggaagcct

SEQ ID NO: 99223 - DNA, 122 bp, Homo sapiens
ccccgggagccgctgcctgcggtttcctagtcgatcccagcttctctagggagtgtcaggcgcacacagggttaagttagttccctccctggtaggagggagaggaggaggaggggaaaagc

SEQ ID NO: 99224 - DNA, 122 bp, Homo sapiens
gtccccatattctgtacttctgtgttctggacagactgaagttagccagtgttcctcttgcgttccagtttcttcattgttccctttctccccaaaataagcatatcatgctgatttccagc

SEQ ID NO: 99225 - DNA, 122 bp, Homo sapiens
cggggcagcgggacagatggacggacggggcgggcaggagttaggagcagagctgtgcgacgggccgggccaggactcttaaacccggagctgggatcagataagggcttgtccgggggccg

SEQ ID NO: 99226 - DNA, 122 bp, Homo sapiens
gagaccttgtctctaaaaattaaaatatttagaatgtttcctagcataaaagatgtgctacgtgtgtattattactgttgctattgccagaaagtacaatcaacaggaactgctggtggctt

SEQ ID NO: 99227 - DNA, 122 bp, Homo sapiens
ggaaaaatagctccgttgtgcacccaggggccaccttcatcagaaaggcctctgggttcacgcagcgctagggaaggcagcgcctcggtgcgtcccaagccccattacctgcacaagtgcca

SEQ ID NO: 99228 - DNA, 122 bp, Homo sapiens
acctgcttccattcagcccattcatcactcagcccctcactatgcgccctgcaggtatcgcgccaggtgtccgggactttcaggcagagaaattaagcaaagaaaaaaatgcaggttgcatc

SEQ ID NO: 99229 - DNA, 122 bp, Homo sapiens
ctgaggggcagagggaagtgccgcaaaccccctggtgggcgcggtgccagccccccaggccgattcccatccagttgaccgagcttgtgctggtcaccgcggtttccgcaggacagagtccc

SEQ ID NO: 99230 - DNA, 122 bp, Homo sapiens
atgagctggggttggactgcgatacaaggagccctcacatttgccagtggaactgtaaatcggtacaacctttctggagagaaatagagaacgaatgcagagcttaaagaatgtctagaggt

SEQ ID NO: 99231 - DNA, 122 bp, Homo sapiens
accgtggacgtgccgggatgtccccccctgtggtgggtcccctgcgacctacctgcatgccgcagatgcgcacacccaggcaggctgaggtgctctgcgcacacttcctcatgtggcgggcc

SEQ ID NO: 99232 - DNA, 122 bp, Homo sapiens
cagcaggtctcctccccgccaggacccaccagaaacctaggtggtcccgggcactacctccgtcctccgtcctcagcaggttctgcccgttctcccgtccagcgctggttccccgcggacgg

SEQ ID NO: 99233 - DNA, 122 bp, Homo sapiens
ttgctcggagctcaggcccggcggctgcggggaggcgtctcggaaccccgggaggccccccgcacctgcccgcggcccactccgcggactcacctggctcccggctcccccttccccatccc

SEQ ID NO: 99234 - DNA, 122 bp, Homo sapiens
gaaggaggctttaaagcgcctaccctgcctgcaggtgagcagtggtgtgtgagagccaggcgtccctctgcctgcccactcagtggcaacacccgggagctgttttgtcctttgtggagcct

SEQ ID NO: 99235 - DNA, 122 bp, Homo sapiens
cagttcagtgatgctcaaatatcagactcatcagctacacttgaaaaggcaaatttataacgtcaatctgtaaaactgagttaaggtatgaaagagtattataaaacatatcaaagtaaaat

SEQ ID NO: 99236 - DNA, 122 bp, Homo sapiens
ggtgtgtatggattgtgcagaggagtcactgcacctgatccggacactaggtggttaaggcggggtactcatgttggagacagcctgagacaacgctggggtgtcttctgcctgcataaccg

SEQ ID NO: 99237 - DNA, 122 bp, Homo sapiens
gtgcgacctaccctgccatacagccgcgcccaccgtgcagacagcacgtgcttgcagagccgggatgggcccccacagctcctccgcccagtggtggcgttgataatctccaggtccgcgct

SEQ ID NO: 99238 - DNA, 122 bp, Homo sapiens
atgtgtgtatactccaccaggtctcttatcaatggacagtacaaacagtactaccacgaacgtccctgcactcgtatctttgtttacaactgcaagtgtttctgcagtatgaattcttagaa

SEQ ID NO: 99239 - DNA, 122 bp, Homo sapiens
gggcgttccagaaagcatctgaggaggctggggaaagaaaaaggtttgggaaggagctgccgtccatagagttacacactgtcatgcagaagcacaactcggtgagtgactcggggaaccgt

SEQ ID NO: 99240 - DNA, 122 bp, Homo sapiens
caccccgccctcgccgagcctctcgacggcactgattcccctcccttcagtcgggctctccgatcttccaagctgagcaatgcggtggtttctctttcgtgctgcagaagtgccagcagggt

SEQ ID NO: 99241 - DNA, 122 bp, Homo sapiens
gcaggatgagtcaaagccgccgttctcctacgcgcagctgatcgtgcaggccatctcctccgcccaggaccggcagctgaccctgagcgggatctacgcccacatcaccaagcattacccct

SEQ ID NO: 99242 - DNA, 122 bp, Homo sapiens
cccatctccccaaacaaattctggctgtgatgccaactgcagcaggacggttagtggtgccgctggcaccgagagcacctggcctggtggacctgtctcccagacctgctggggagcgccgt

SEQ ID NO: 99243 - DNA, 122 bp, Homo sapiens
tctgctagagcaccttgccttcctggtggaaaccccacatgcaagtacgagagattacagcgtggcttccaagaagagcaaactgcactttggggaagggggagagacaacagggtaaggca

SEQ ID NO: 99244 - DNA, 122 bp, Homo sapiens
cgccccctgtcccctgtacctgcggcggcggcgtgtctggcgggacccagcagcgcggggcgtgttccgaccacttaaaagttacaaagtgaaactccggcgcctcctgcacatgcgcagag

SEQ ID NO: 99245 - DNA, 122 bp, Homo sapiens
ggaggagagagggaggtgggggggcgctctgttactttcgtctcaaaacgctgtcgaagccgaattgtggaaatccggcttggaggggagcggtgatgggtcccgggaaacgcgcgcggcgc

SEQ ID NO: 99246 - DNA, 122 bp, Homo sapiens
acttggtaatgccattaaagtgacttcacaaatcactccatgcttcagagaaacagggatcgctggccataagccaacatgagaagtttatactagcttcaacaaaaaaatgcaaagtaccc

SEQ ID NO: 99247 - DNA, 122 bp, Homo sapiens
caagtccgtctttttcaaaaaacattttgaatgctgcatgcctcatgcttcccagcgcctcgcgggagagacccggctatagagcaggaggtgagaccccccctccggtacccccacccctc

SEQ ID NO: 99248 - DNA, 122 bp, Homo sapiens
tcggcctgacccggttggaggagtcgccgaaataacacgagtgcagggtctccaagacggcgagagtttccaggtcactccagctcagagaacagcagaggctttcggactatcaagtcagt

SEQ ID NO: 99249 - DNA, 122 bp, Homo sapiens
accactagacgagttcagggtccctggcgctcagccccttgacgggtgaggctaggatcccgcggcggctgcagctacaatcaatgctctctctgtcccggggtggagctgctgccctgagc

SEQ ID NO: 99250 - DNA, 122 bp, Homo sapiens
cacggtgcaggcagctcaggaacgcccgctcgcgggatgaggctgcggctcgcccggccacgtcctgaggcctgcagccgctggttttcctatttggaaactccttagacgtctccgcttcc

SEQ ID NO: 99251 - DNA, 122 bp, Homo sapiens
actgtgacctccctgaaccctgtggggcccatccaacggttcagaggagctggaccaggccggaaattaatctaccatcaaaaagaaggccacttcccccgggtaacaactgtttcagatct

SEQ ID NO: 99252 - DNA, 122 bp, Homo sapiens
cctgaccctttttcttagggtctgacccacagcccccacctacaaatatgccagacgcgtcgccggctccttgcacccgactgagggggttctgatttcctggagcagcagcggggcgtgtg

SEQ ID NO: 99253 - DNA, 122 bp, Homo sapiens
aggccttgggatgcagaactgctcagtcaagatgctcagggccatggtgggaccctgctccgcgtggcctgtggcaggcggcctctgcctctgcaggagagggtctgtgcagctgggatcca

SEQ ID NO: 99254 - DNA, 122 bp, Homo sapiens
aagtgcccactgggagtaatgctgcaagggtcacggaagtgcccactgggagtaatgctgcggtggtcaaggaagcgcccactgggagtaacgctgcggtggtcatggaagtacctactggg

SEQ ID NO: 99255 - DNA, 122 bp, Homo sapiens
ttccctccgccccgcttagcccccacgccccgaacctcgtccgtggaccggggaggccaacgcgaagcccaggcctaatcccttcgccttggccctgctaacttccgggggtgttctcgggc

SEQ ID NO: 99256 - DNA, 122 bp, Homo sapiens
ttttgtttaattcgttgaaagaaagatgcctatttatctcacctcagggtcttcttggtgcgggaagtccccagggtagatgtcctgagagtcaacagtgaagccgcatggggagacttgtg

SEQ ID NO: 99257 - DNA, 122 bp, Homo sapiens
acctccgagaagaggggtgtcggggagtgttcccagcacctgctcggtggaagggctctccggagactggcactcagtatctgagtatgaggagcctcacttcccggggtgtcggtaaactt

SEQ ID NO: 99258 - DNA, 122 bp, Homo sapiens
gagcgagactccatctcaaaaaaaaaaaaagcatgcacagcctaacactggaggtgctgacgccaggtaggtcagcagtagacccagccccaacccacaagtttcgctctccagactgcgca

SEQ ID NO: 99259 - DNA, 122 bp, Homo sapiens
agaagctgtcggccctagaagtgcagttccaccgcgactcgcagcagcaggaggctgagacgccgccaacttcgtcctccggttgcgggggcggtgcgggcaaacctcgcgaggagaagagg

SEQ ID NO: 99260 - DNA, 122 bp, Homo sapiens
ccttgttcgatctctgtttcgtaatcatacccagccctccctctgatctctctcatcctccggagccaggtctctgacccctgggacccatgcaaaaggaggtgaaattgagtgtagtaaaa

SEQ ID NO: 99261 - DNA, 122 bp, Homo sapiens
ggatgaggaggtacactcagccattgggccctctctgctgccaatcagagggacatccgtcgacggccccggcctcggctcgttgattggagaaactgttcctagggtgtttgcggcgggcg

SEQ ID NO: 99262 - DNA, 122 bp, Homo sapiens
tttgcctccctcacaaaggcggcggaaggtgatcgaattccggtgatgcgagttgttctccgtctataaatacgcctcgcccgagctgtgcggtaggcattgaggcagccagcgcaggggct

SEQ ID NO: 99263 - DNA, 122 bp, Homo sapiens
ttagaacagtggtccagccacagtctctggccctttggaattattatggagtcttggggtcgggcgcagcacactgctaagacattccccagtctctaatcctgacctgtctaacagagtag

SEQ ID NO: 99264 - DNA, 122 bp, Homo sapiens
tcaccaaaggattccctattattgaactcaatgaaccttttcagtcctcacgttaactgacgtctctgcagcacttgaagctgttgacctccatgaagtgctttttctcccttggtttctat

SEQ ID NO: 99265 - DNA, 122 bp, Homo sapiens
cctctgcactgtgcacccaatggggagggaccacacgcctggaggatggcgactgtaagacgtgggggctgggctctccattgctcaaccctggctcctgtctgggagagctgtccaaggcc

SEQ ID NO: 99266 - DNA, 122 bp, Homo sapiens
caaaacagtgattttcttcagcatgcaaaacgtccagagcctgccagttttagaaggcgacggaggtagttgggggagctggaatcctgcgaagacctgaagaaacaactgattccccccag

SEQ ID NO: 99267 - DNA, 122 bp, Homo sapiens
ccgccatcacccggaagaggactgcggaaggcgcccgggaagcccggaagtggcttcactcgggttagggaactaactggaagagcgggcggaagtatgcgataagcgagcgaagacgcctc

SEQ ID NO: 99268 - DNA, 122 bp, Homo sapiens
caaactttcccagtaaggtattactgcagggtaacttaccacagcaacccatacgcagaacgaacagagggaaaaaatgcaaaggtaggaaggaggcaggcagtgttcaaaagcagtaatta

SEQ ID NO: 99269 - DNA, 122 bp, Homo sapiens
tggggtccctccaccggctgtgtcctttattcttctttctcacccaacgatttacctgaacggttataaagtgcacgttatttccctaaggtaagcgtgtggtagcgcctcctcctcctcca

SEQ ID NO: 99270 - DNA, 122 bp, Homo sapiens
ctcgagattaaggaaggatatttaggggggagggtgtgtgtgtgtgcggcggattaaagacgaaaggagtatattcaacaatgactgtttagctcagtggttctccaccttggcaacacgtt

SEQ ID NO: 99271 - DNA, 122 bp, Homo sapiens
ggggacccagggacagaccagccctcatgagtggcgacttgagcccaccagtgctagaggcggggggcaggcacgccgggcacagcagttcaggacgtgggaggggaaggggtggggctcca

SEQ ID NO: 99272 - DNA, 122 bp, Homo sapiens
ccacaaaaatgcagtccagatttgagaagcagctgacgtctgtggccagagtgacccacacgccacggaccagggacagcaggggcgaccacggggcggcccccagggagcggtgccaggcg

SEQ ID NO: 99273 - DNA, 122 bp, Homo sapiens
tgctcgtgggtggagaggtgtgggtgacctgacgaagaagaaccggtacctttgtctttacgactacagccccgcactcagaggtgtactatggcggttctgagaaggcttcacagaagtga

SEQ ID NO: 99274 - DNA, 122 bp, Homo sapiens
gtttccagctgagcggcggcggcctccactacctccatcgcaccgcgccagaaaccgggtcggcctcaggattggggcccctggacaagctcacggctctctccagaaatagaaaaacaact

SEQ ID NO: 99275 - DNA, 122 bp, Homo sapiens
aggaccgatccactcgcgagctgacaatgccacgcgctagacttggcctgacggtggcaacgcttggcacctgggggataggggccttctcctggcctcagtccccaaattctgcgcagaat

SEQ ID NO: 99276 - DNA, 122 bp, Homo sapiens
tgtattttgagaaagcacaaggggatgattttgcttacaaactgctgttccaagagaaatcgatggcacagaattaccaaatctgacttgattgtagtagaagaggaactcattcactgaac

SEQ ID NO: 99277 - DNA, 122 bp, Homo sapiens
caaaccaacatctctcaagctcacattgtgccaggcatagtactagctagccactttgtacgtatttcttctttaaccttcataacagctcctcagatagctgctgttacgatccccatttt

SEQ ID NO: 99278 - DNA, 122 bp, Homo sapiens
atgtcatcttctctgagaggcccaccgcagtggccccagtgagagagtatcctctctccccgcctcccaccacatggctgctggtcactctcctataaggaatcatctgaaattatctgctt

SEQ ID NO: 99279 - DNA, 122 bp, Homo sapiens
ctctccgcccctccggtcgcttggtggcgtctcaggacgcagcgtgatgacgtaggtccccgacattccatatacaagatggccgcagtcggcaaggagagacgtcgctgaggggcttgcct

SEQ ID NO: 99280 - DNA, 122 bp, Homo sapiens
gccccggggcaccgagagggcagagccgggaccaccccaggatcccagcccccagcccgccgccgccagcccgcccccgctccccgctgcgcacctgcggtcccccaggagcggagacgagg

SEQ ID NO: 99281 - DNA, 122 bp, Homo sapiens
gggaatcatgtaactcgcctcagggttgctgtgaatatttaataagatacttacacagcacgtagcatatcacctgaattcacaccacttggtagtatattatactttttacatctttataa

SEQ ID NO: 99282 - DNA, 122 bp, Homo sapiens
gtgtcttccccgcagcccagcaagaaagggggcgccgggggtgccctggcggataacaggcggtcacgcctgatccccgcataacagatccactctccgtgtggctacgagcatgaattgcc

SEQ ID NO: 99283 - DNA, 122 bp, Homo sapiens
gcccgggaaggcaagccccagtcaggcggaaggtagctggctgcggggcggggcgactggcgggcggcgggaggcgccaaccgccacagacgactcccagctggccgagggcgggaaggggg

SEQ ID NO: 99284 - DNA, 122 bp, Homo sapiens
agcggacagcagggaatgtttggcagaagcagggtccttggtgacaagctgctcttttcccgttgtatttgcatttggctgctgggaagctggaggctggtggcctctctctgcctcgtcgt

SEQ ID NO: 99285 - DNA, 122 bp, Homo sapiens
aagattgacaaataacaataaatgaaagttttactattttcttcatgtaccccatggattcgcttatgcactcctcttaggaggcattattttataactcaatctctgttattcaggaaagc

SEQ ID NO: 99286 - DNA, 122 bp, Homo sapiens
cagtggtatcacaccggtctaagcttctacaaaaatctcagccttctgatcctcgggacacgactagcaatccaacaactttgaactagcaatttcatcttctggcttttttggaagtcctt

SEQ ID NO: 99287 - DNA, 122 bp, Homo sapiens
caggttaatcttctcccagattacaagggcccctgaaggcaaaggctgcatttccctgtccgtttggggggactcctgagggcaggggcatatctctttctccttcagattagggagccctg

SEQ ID NO: 99288 - DNA, 122 bp, Homo sapiens
ggcactgtatttggctttgcaataacaaagtctaaaacttcttgcagagcagagcttactcggtgggagaaatagaaactgttggaaacgttaaaaaacgcaaggcaggtgcagtgatgtgc

SEQ ID NO: 99289 - DNA, 122 bp, Homo sapiens
catctcactggggcttgtcggacagtgggcgcagtccatggagtgtgagctgaagaagggcgggacatcgcctcacctgggatgtgcaaggggtcggggaattccctttcctagccaaggga

SEQ ID NO: 99290 - DNA, 122 bp, Homo sapiens
tagagttgcaaattgatgtgatttagtctcctctcctccttgttagaattccagtttttccgtctccaaatagccggggttggaagatgggttctcgccctgacaccgcagagctctgtctc

SEQ ID NO: 99291 - DNA, 122 bp, Homo sapiens
ccatttgtgttccttagacatcagttgggggcagagactggatttcagaggcttgagaagcggccagacttgtgtggcgggagtgtagctgacccccactggggcacagcttcccacaggct

SEQ ID NO: 99292 - DNA, 122 bp, Homo sapiens
tcctccgaagtctgagaaaagctcagcccccaggaacctggacctctggtcctctgtctccgctgaggcccagcaccagaagctgtccggcaccagcagcccttttcacccggtacggtcca

SEQ ID NO: 99293 - DNA, 122 bp, Homo sapiens
agcacgacctgccagagcgcttgctgacgagccacactccacacctactacgcgctgtcacgtgcttgacaaaacccgacacacaacgcacaacgctaaagtttattgctcaacaatgcaaa

SEQ ID NO: 99294 - DNA, 122 bp, Homo sapiens
ggcctccgcagctatttatttcagagccttggttttatggctgtcattcagccttgggtgcgtggagagagtcagtctgcctgagtcaatgtctcatgctctctgcggctaaggtgaatgtt

SEQ ID NO: 99295 - DNA, 122 bp, Homo sapiens
cggaggcccactgtgacgagcgtgcggcgccgcccacggaggcccactgtgacgaacctgcgttctgcctcagcactgtgtatcctcggggacgtcggcgctccagctgcactcggccgggc

SEQ ID NO: 99296 - DNA, 122 bp, Homo sapiens
tctgctctgctgccaccctgagcgcctctaacatcccgggagccccgcggccgttccgggcgggccgccaccgcacctgctcatttgcataccgcgctcccattggccggccgggagccccg

SEQ ID NO: 99297 - DNA, 122 bp, Homo sapiens
tgaggcctttctacagcaccgtgaagtcccgtgcgcagacggaggccaaagccctcgggacggcggcggcaccaggcccagaccattctcattacggccagctggacccctgcgagccgtgc

SEQ ID NO: 99298 - DNA, 122 bp, Homo sapiens
tgggacagagctcagccctgcccctgtgtgccccagagacctgcgtggcccggaggaccacgggtgccacaggacctccccagccatctctgggagaatgtcaggggctgcactgccacttg

SEQ ID NO: 99299 - DNA, 122 bp, Homo sapiens
cggccgcgtgcaccatgcactgggcggcctcggcgtggttgcccagctccgcgtgcttcccggccatgttctgcaaccaggtcagccgaaggtccggtgagccctggtagccccgggcaatt

SEQ ID NO: 99300 - DNA, 122 bp, Homo sapiens
gcaccgtgtcagccacatagtaggcgtctactggagactttgtttagatcagttagtcaacgcaggcagcagctgaatcaggagagagtccccaacgcaaagaaaggggctcctgagaccct

SEQ ID NO: 99301 - DNA, 122 bp, Homo sapiens
ggcggaagcggcccaggccccacgctccgcctacagcccatccggcacccacctcacagacgtgctctcatatgggacaggcaccagagtggcagtatgtccccagccggctcccggctgcc

SEQ ID NO: 99302 - DNA, 122 bp, Homo sapiens
ttctccctttcccaggtgcttttctttctgaagatctttgttattatttaactcctctttcgcaacaccactgacattgcaccggcatcgccgcgggcccactgtctggcttagaaggtgct

SEQ ID NO: 99303 - DNA, 122 bp, Homo sapiens
actataagcgtctcactcccgtgagagccttgaggtcacggcctcacacccgcacacctgcgtgtccatgcagccgctcctcccgcttgcagccctccagcctgcgccaggctcctctgcat

SEQ ID NO: 99304 - DNA, 122 bp, Homo sapiens
tgcctggttccttagcaaatctgagttccagtcccaggtccactactattagctgagtgacgcttccagcccgtttcccccgcctggaaactgaggacggcaacccccaccctcgcagggcc

SEQ ID NO: 99305 - DNA, 122 bp, Homo sapiens
cgtactcacattcccggcgggccccaggcgctgcgcccacccccatcccgactccagacgcgaccctcacccgacctcgtagcccaggcgctgaccctggtccccaagcccaagcgccaccc

SEQ ID NO: 99306 - DNA, 122 bp, Homo sapiens
aaggggaggctcttgcgtgtcaatttctgccaagtgccattttatgtctgtggggtgggacggttatcgcagctagagctctttccagaatgtcagcactgagggccgaagtgggcgtggag

SEQ ID NO: 99307 - DNA, 122 bp, Homo sapiens
ctccaaccctctggttcacaggcaatcatgtgcagaggcctttagctttagagtttggggcgcttttttctcctggaggtgccaggtacggctccatgctaggtctgcagcattcaccatgc

SEQ ID NO: 99308 - DNA, 122 bp, Homo sapiens
tgagggatcccctcctgatgccttctccacctggagctagcacagatatagatgactgtccgtatgtattctagcccacagagtctcacagactccttgctccgcacttctgagatggcaaa

SEQ ID NO: 99309 - DNA, 122 bp, Homo sapiens
tcttatgccttctccccatccgctgctgcgtcctcatcctggcttcccaccgctgagctccgcgtgtgcggcacccacctcagggggcctttacctggtccagaagtgcatctgtctttgca

SEQ ID NO: 99310 - DNA, 122 bp, Homo sapiens
tgccaggaatgtcatgcgccatgtggatggcccttctgcaatgggaactcgtgccctagacgcttatcctctatctgcccctcgcttgactataaagtccttgaagtcaggactgatgtgct

SEQ ID NO: 99311 - DNA, 122 bp, Homo sapiens
gattctgaaacagaaatgaaactgtccttttgacaactctcttatataataaagtatcaccggcttgtgtatgatccttgttgagcggaccgtgtttttctgtcaccaactggcttctgatg

SEQ ID NO: 99312 - DNA, 122 bp, Homo sapiens
tgtggatggtgaggaagtaaaacgtcaataaagcagtatcataaataaaaaaataaataacgtttattctgtaccacgcggctgtcagtgtccggagtctccagggcagagcgccccgggga

SEQ ID NO: 99313 - DNA, 122 bp, Homo sapiens
catggcctccctgcctccccttcagagcgtggagcaccgcgtgctttcccgggatccatccgcagagctggaggctaagcagccggattcaggcatgtcctcacccaataccacggtgtcgg

SEQ ID NO: 99314 - DNA, 122 bp, Homo sapiens
tgaatgaatgaatgaatgaatgagccccaggtgtttaggagaccctaacagaggtgcccccgttgtagggacgactctcacctgcagatggcctcctcaggcccttcgggtggcactgggga

SEQ ID NO: 99315 - DNA, 122 bp, Homo sapiens
tctcagttggaggactcggggacagtttttatgaatatttgatcaaatcctggttgatgtcgggcaagacagatatggaggctaaaaatatgtactacgaagccttggaggtaagacaagcc

SEQ ID NO: 99316 - DNA, 122 bp, Homo sapiens
ggggcaccacttaagtgatagagaactaacataagcaaatgtggggctcagagacaaaagcgattactctccagggaagcagcagagcactcttatctagggccttttgccaaaatagggtc

SEQ ID NO: 99317 - DNA, 122 bp, Homo sapiens
ggaggcagggcgcccccacaggagtctggctacagcagggctgagaagtgggctggctcccggctccctgtggttctgagacccagcttggcggtagctgcacctgggccaggtgggcagct

SEQ ID NO: 99318 - DNA, 122 bp, Homo sapiens
cccagccccttgggctcgctgccttatgcagtcaccaaggttgaacatgcgcagagggtgcggacgcagtgtctcttgggaattatagtcccggagtcgtagtcacttttgacttggctgcc

SEQ ID NO: 99319 - DNA, 122 bp, Homo sapiens
gacagtcggctgcgcagcggccccgctttcatttgtcagacacgcgtttgccggtgtacccgcgcaggcagctacacctgtactgagagaatttacatcgccttgcttcgggatggcattga

SEQ ID NO: 99320 - DNA, 122 bp, Homo sapiens
actataataaattaaatatacaaacaataaagcctattataaagacatgtaaaaatactacgcaaatccggagggaagacatttaattcttcctagataggtaagcttaagaaatgattcta

SEQ ID NO: 99321 - DNA, 122 bp, Homo sapiens
tgggagtgctccgcctagtcacttttcttaaggtggctcgtcgaggcctgacttcttccccgaaatcacgtccctagacagcctcctattttaccactaactttactcctgcagttattcag

SEQ ID NO: 99322 - DNA, 122 bp, Homo sapiens
tcgcagcgcatcgttctcagaagtttcccgcgggaggaaagctccactttatgaattactcgaacagcttccctgggaatgcccagccccgaagcttccctgctgaattcaaagtcagagct

SEQ ID NO: 99323 - DNA, 122 bp, Homo sapiens
atttggaacacctggcatttcacatggtctttggccatatgcccctggcttgagaaactccgtcatgaaaatcgacaagtgtgggtcagaaataagggaggacgacagtttcgttccttcca

SEQ ID NO: 99324 - DNA, 122 bp, Homo sapiens
tctgcagaatctggaccggctgacatttgaacccctagcaaacctgcagctgctgcaggtcggggataacccctgggagtgtgactgtaacctgcgtgagttcaaacactggatggagtggt

SEQ ID NO: 99325 - DNA, 122 bp, Homo sapiens
gtaacccgattttcaaaatggcaaacaaactcttggttaaggtgccaagcaaaataaagtcgtcttaatttacatgggaatgaattcctagcaaactgagtcttttcaaaacgcacaaacgc

SEQ ID NO: 99326 - DNA, 122 bp, Homo sapiens
gggcaactccaggaatcggggggtggcaaggggctcagccacaggcagggaacaaggccacggccagcaactgagcagagcctgcctgccggtcaacgctggccatagagcctggcagtggc

SEQ ID NO: 99327 - DNA, 122 bp, Homo sapiens
cgtgaaaaggcaccatgccagcccccagcagtgcctgcgcttgggtcccggctgtgcccccgggcagtcatatgcctctctgggcctcagcactctgctctgtagctgtgtcaaatggaaca

SEQ ID NO: 99328 - DNA, 122 bp, Homo sapiens
aattcctccggggtgaactctgagatagaaagttggcccgggaagctcaaggagggagagcggcagaggggaagactctgcaattctgcttgccccccaccccggcccaggcaagccaccct

SEQ ID NO: 99329 - DNA, 122 bp, Homo sapiens
aggacggcccgtggcctccggattggacggcgcgagctgggtgtgtgtgggtcgctcaatcgctccggagcttctggagggggcagatgcaggtgccggctgctgcagtgcagtagctgctg

SEQ ID NO: 99330 - DNA, 122 bp, Homo sapiens
gttgttgtccctccaaacgcctcagatccgccaagatgcaagggcctggatccagttgagcggcaaggtctttgagaaaagacttcatttcccaaaaggctccgcgtctgcggagtcgcagg

SEQ ID NO: 99331 - DNA, 122 bp, Homo sapiens
agttggaagcctcagatgagctactccagggaaagtgctgggactggcattctggctgcccgtcttcttcccagccttgccttgctgggagacttgacctgtccccctgcactctggccact

SEQ ID NO: 99332 - DNA, 122 bp, Homo sapiens
tccagcagcgtccagcaagcagctggggaggtcgtggggaagccgtgcagaggctgctgccgtaaatccctcagtgatcttctcccctgcctgtctctggtccttgattcctttcccacaag

SEQ ID NO: 99333 - DNA, 122 bp, Homo sapiens
gtatcctccagcccttagaacagtccgtggtacttagcaggttttcagtacatctgtgcccggcgatggaaagaatgaatgaatagtgagaccgaagatcgcggccgtaagcctctgggcac

SEQ ID NO: 99334 - DNA, 122 bp, Homo sapiens
gaagattgtattaacagtttcatcgagactgccttcgtgggaaagcagagcaagacctgccgcccaagcacaatttgaagagcctcaaaaaagactcctgcccaacccctccaaaaaaagct

SEQ ID NO: 99335 - DNA, 122 bp, Homo sapiens
caacccctggcctcctccccgacccccgaggagcgccgggccctgcgacgctccaccactcgagacagaaacaagaaggcagctgcctgcttcctgctcagcactggggactatgcctgcgc

SEQ ID NO: 99336 - DNA, 122 bp, Homo sapiens
tcttttggggtcttatgctgcttcagctaagcgggcacttccgagttaacttgactcatccgtctactgccatattaggtttatatttaaacatctgactaaacctactactgttccatgtc

SEQ ID NO: 99337 - DNA, 122 bp, Homo sapiens
gaagaaatagggagcaggcaattctcttgaacaaggagtcaaggagcctagtcacaggctcgaggaaagcaggtaacatttattgttatttatttattctcccagttgttgtttaaaagaat

SEQ ID NO: 99338 - DNA, 122 bp, Homo sapiens
gactccctgcctcccactccttacctctcctcttggactcttgtgtagggaaactgagcacggggaacttgatgccagagagtgagctcgccctgggaatggaggtgtagagacaggggttt

SEQ ID NO: 99339 - DNA, 122 bp, Homo sapiens
gaaacgcgggtacatttggggacaccggggacgagagcccagcccggacttgggggagtccgtcagtgccggacgcgggtccctggcttgcggacgggctggggccgggggcgtccccgtct

SEQ ID NO: 99340 - DNA, 122 bp, Homo sapiens
agcgctgcaagaagaacaatggcaaggctgagttctgggtaaggggcgcacgagccgtgccgtgtgtgtgtgtgtgtgtgtctgtgtgtgtgtgcatgcgtgcatgtgtgtgcgtgcacaca

SEQ ID NO: 99341 - DNA, 122 bp, Homo sapiens
gtgtgtcctgtgctgtgcaggtttgcatgtttatgaagcttccttcttggaatatatggacgatctttcacctggctgaggctcctcctcctcttgcgtcctcaacaaggacccgcggccac

SEQ ID NO: 99342 - DNA, 122 bp, Homo sapiens
gggaggccgggacactggggcccagtcgggctgggcaaggggcatcgggagccctggaggcgcaggatgggagatgggaggcgtactcctgcaaaggaaagagaggggcggcccgtcaatca

SEQ ID NO: 99343 - DNA, 122 bp, Homo sapiens
ggcgtttcggggccgacccggcaggagcagccgctatccccgggcagctgagcccagcagcgagggctggtagaacgatctagacgaaacactgaacttaatagcaaaaccacttctttcga

SEQ ID NO: 99344 - DNA, 122 bp, Homo sapiens
cgccgccttcgtccgcatactaatgagggggcgccggccggccgccagcccggtaccccgcgcccccacccgcccccagcgccgctctcgcgcccattcagctgggggccgccgctcccccg

SEQ ID NO: 99345 - DNA, 122 bp, Homo sapiens
tctagttggggcagaatcgtacaggccggggggatcaatgctctgagccatggcactctgcgttgaaggtcccatcccaggacgagttgtgctcaggtggctctgcgtggccttttctggtt

SEQ ID NO: 99346 - DNA, 122 bp, Homo sapiens
cgagctcttgagttaaccatttttaggttctgggcctcagtttccctgtgaatgaaatggcgaaaacactcccacataacgggaccttgagaacgaaatgaaaagtatcaagggctgaccgt

SEQ ID NO: 99347 - DNA, 122 bp, Homo sapiens
tggattctcgggcgttagtccgaagtttaagttcccttcgttcactcctttgccctggatcgaaccgcagccccaggacgcagcgggttccactggaaacggggaatcggggagaggcggtc

SEQ ID NO: 99348 - DNA, 122 bp, Homo sapiens
gcccgggcctttcagccacccagggggggccccggcggccgagctccccgcgctccgccgcgcataattaatcgggcttcacagggcccgggacaaaggcgcccattcaccccgccgctcct

SEQ ID NO: 99349 - DNA, 122 bp, Homo sapiens
gaggctgaagtgggcacatcacttgaggccaggagttcgagaaaagcctggccaacacggcgaaaccccatctctactaaaatacaaatattagccgggcatgatgatgggcacttgtagtc

SEQ ID NO: 99350 - DNA, 122 bp, Homo sapiens
ctggagtccacttgctgtggtttaagccccagtcttttgggcttcagcttctccgtaatgcgatttgcctctttgttccaggaaggcaggcacttctgtctcgtgctgtcttgattgttggt

SEQ ID NO: 99351 - DNA, 122 bp, Homo sapiens
tggccgcctccccctaggttgtggatgagtcttggcctagggttcagggccctccggccgcgggaggatctcccgccaagcttgttgcttttccaagttagtgcctggcgtgtgtgtgggct

SEQ ID NO: 99352 - DNA, 122 bp, Homo sapiens
aagggacctgtggttcgtgctgcgaagatgcttccacttaaagcatgagaaatggggtgccgggatgtggggtgtggtgtgtgccctcatagatgggggtgggagtgtggctggtgtgtgtg

SEQ ID NO: 99353 - DNA, 122 bp, Homo sapiens
gaaactcaccatagtgtcttcagtctccaaactgacttctccacagataagtaatcacatcgataaggccatctgttaaactccctcactttccttcccttctaccacatcattatccattt

SEQ ID NO: 99354 - DNA, 122 bp, Homo sapiens
ctcggcgcactggcgcctttccccacaggagctgcctcagattggcccaggagactgtcgcgtcaggagacgaattccgcaccttcagcaggtgacggccccctgattggttggtgttcccg

SEQ ID NO: 99355 - DNA, 122 bp, Homo sapiens
ggggccatgtcagtggctgacggtcacaggtcaggaagccagtgcggcctcctagtagcccgggctctgccaggtggggcgggaggcttctgatgctcaccttggcagacaggcacccccca

SEQ ID NO: 99356 - DNA, 122 bp, Homo sapiens
gttcaagaaagacaaaatctacactgaaatccttgtttggtgagctcacaagcttttctccggtaatttcttgtaactgtccagtatagatttttaacatacttaaaactcctattagtcaa

SEQ ID NO: 99357 - DNA, 122 bp, Homo sapiens
gatccttaaattccttccagaaaaagaaaaagtcaaccttattacaatgagtacagtaatcgcaaatgaatttttgtgctcacgtcatggaatagatgcatgccagttgcattcagtgatgc

SEQ ID NO: 99358 - DNA, 122 bp, Homo sapiens
taactctatactactgctacctctgtgctgcaattatctttttttttcttttttagtgaccgggtttagctctctctctgttgcccagctggagtgcagtggcaagactcatcaaagctcac

SEQ ID NO: 99359 - DNA, 122 bp, Homo sapiens
cccaacctctcactgccatcccagaacctgggacacactaggcaggcactgcatgctctccgaggggtagatggcagcagattgagtggaccctgtgcagccagagacagaaactgtgaagc

SEQ ID NO: 99360 - DNA, 122 bp, Homo sapiens
cacagcgaactgagataagacctggggacatctcgactctcactctcccctccttcaccccgtcgaagagaggatctccgttgttcagaaaaataactaagatatcagtttgttcttttgtt

SEQ ID NO: 99361 - DNA, 122 bp, Homo sapiens
tctttgtgtgtttttagataaaggtagcaaaatggaaactccctattgcttttctaagcacgccttcctttgcacccccatcttctgtggctgttttagccagaaatgatacatcattactg

SEQ ID NO: 99362 - DNA, 122 bp, Homo sapiens
gccccggaagaggcagctgatgcactccttgtttggagactatagggctcagatggaagccgaatggcgtgaggccctgcgggctctcagagctggtgaggagctagccactggttgattca

SEQ ID NO: 99363 - DNA, 122 bp, Homo sapiens
ctgccgagcgcgcctgcagctggaacagctgtgccggtgggatcatggggtagcgtatggcgcgcagcgcccgctcggccacggcagggggcggccgcgcgcgacccagccaggcctccagc

SEQ ID NO: 99364 - DNA, 122 bp, Homo sapiens
tcttcttgccctgcctctgtggaaatggtggtcgggaagcagccccgcccctcatggaggcgtggcgttcgcgccccactgccggctgcgtcttctccctcgctgaaagtctgaagggagcc

SEQ ID NO: 99365 - DNA, 122 bp, Homo sapiens
acctcgtgatccgcctgcataggcctcccaaagtgctgggattacaggcgtgaaccaccgcgcctggcctgcctggctaattttttgtgttttgtaaagacaagagtctccctatgttgacc

SEQ ID NO: 99366 - DNA, 122 bp, Homo sapiens
agaagctgtcgccttgttacgaaaatagtcgggtcgggaggcgagcttccttcctctctccggcccaggaactcgctcctcggcctccttgtccgggtcaagggggtgggcatccccaaggg

SEQ ID NO: 99367 - DNA, 122 bp, Homo sapiens
accctcatccaaggcaatggtgctgctgggcctggatgactgagccgaaccagagaagaacgggagacaacaccaaggcagagaaactgaattaaacaaggaaatgaaaggagcgtgatgat

SEQ ID NO: 99368 - DNA, 122 bp, Homo sapiens
tacagttttgacagctgaggcgggagcacgggaggcggagctggtggcagcgcagcgccccgccccggctccagcatcagccaatggtgacgcggcacccacagcctttcgcccaatcagct

SEQ ID NO: 99369 - DNA, 122 bp, Homo sapiens
tggggcggagcttcgctgcctttcaggttttatgtacgctggcggccgccaggccgttcccggaagttgatggccttacagtcgtagaactgattggctgatcatgaccatgcagttagcca

SEQ ID NO: 99370 - DNA, 122 bp, Homo sapiens
aacttctctttgctaaggttcctggcaaatttactatgctctgaaatcaataccccacaccgcacctaaagcaaacagtgctgaccatctgtagccttggaatattagttttcaagttaagc

SEQ ID NO: 99371 - DNA, 122 bp, Homo sapiens
ggcggaggcgatggatttgggcaaagaccccaacgggcccacccattcctcgactctgttcgtgagggacgacggcagctccatgtccttctacgtgcggcccagcccggccaagcgtcggc

SEQ ID NO: 99372 - DNA, 122 bp, Homo sapiens
ctcttccatcttccttcttctgtccctccttccttccttctatgacttatctcagaatgacgttacaattgttattgtgtttgagtgccgacgctgaggcattggctagaaacttctataat

SEQ ID NO: 99373 - DNA, 122 bp, Homo sapiens
gcgggcgagggatgagagatcacctaatgagaacaatttacgctatcacagcgatgcctgcgctaaagcctagactttatgcagtgtctccatgtaacaaaactgcactggtaccccagaaa

SEQ ID NO: 99374 - DNA, 122 bp, Homo sapiens
ggttgcttccctgatccattcgctgcagtctcagagttggagcagcttggcgtttactcccgggcctttcccggatgggagaaggaacctgcgcgggaacttgaattttttcgagtcagaat

SEQ ID NO: 99375 - DNA, 122 bp, Homo sapiens
ccagcgccaggctcctcccccccggcgcggatgacactagaacctccttaagttgcgtcgcgccacagctgtctgcgaacactgagctgcctggcgccgtcttgatactttcagaaagaatg

SEQ ID NO: 99376 - DNA, 122 bp, Homo sapiens
ctcagtgtccatgagtcccagatgaattggccaagtcctagaaatagaggggctgcagagcggggaggaagaggtcccaatgaccagcccttgactgccaccgtttgtcactggccccctgg

SEQ ID NO: 99377 - DNA, 122 bp, Homo sapiens
cgtctccctccagaggccgccaagccagggggaaccgatgtcccgactggggctgaaacccggttcctgcgcccctaccccctacccgccgcgcgtcctcggctccctcctgggcgtccgct

SEQ ID NO: 99378 - DNA, 122 bp, Homo sapiens
gccctcctggttcttgttcttaggcagggccgtcgtgccctggttcagggcgtaagggaccgaagaagcctccgaccctttaatgtgcatgatatccgggctgctgtagggattcctctgca

SEQ ID NO: 99379 - DNA, 122 bp, Homo sapiens
accctgtctcgaaaataaataaataagacctgagaacccagtatgggaatggccctgagccgtggctaggggggtagacaaggcggtccagacagacccctcaagaagatggggcttcgagg

SEQ ID NO: 99380 - DNA, 122 bp, Homo sapiens
ccgtgaagttccccaggtgattcaaggtagagagtacaggaccgctggtaggaaaggacccgtgcgcgcacacgtgcacacatgcgcacacatgcacattacttattttacaaagacaaaac

SEQ ID NO: 99381 - DNA, 122 bp, Homo sapiens
tctacttaactgaataatatagaacatattaaaaaatcctgtggagtgcggctatagtagcgtttacaggaagtgttgcagctttgtttctggctatttactgtaatgcaagtgtttactta

SEQ ID NO: 99382 - DNA, 122 bp, Homo sapiens
cattttaccccaccaccgcggctttctgctcccgccgccgcggctttttgcccccgccgccgcagctttttgcagctttttgcccctgccgcctcggctttttgtggttttctgcgtgcgcc

SEQ ID NO: 99383 - DNA, 122 bp, Homo sapiens
atgaagtgctcttgatggcttcctgttaccgcatgggaagcctctctgttacctgggccccgcccagtaggctgatgtgtttctctaagttcctgcttcctgaactgcctgcccccgccacc

SEQ ID NO: 99384 - DNA, 122 bp, Homo sapiens
ggccccattgttccccggcggccgtcccgggcactccaggccaccccccgggaacccaggcgtccccaactcacggctctggggtctgggaaaagccggaaggcggaatccagccccagggg

SEQ ID NO: 99385 - DNA, 122 bp, Homo sapiens
ccactgaagcactgatgtgagtaacaaactgcagctggccgagaaatccaggaaatcaagcgtgaccagttgccaaagtgggactgcaaagagcgtattcatggagggtctcgaaattgcca

SEQ ID NO: 99386 - DNA, 122 bp, Homo sapiens
agactactgatagtgcatctgtcaggggcatttgaaccaaagcgactccatcttgaatagcgactgggtaaaataagactgagacctattgggctgcgtttccaggaggttaaggcattctt

SEQ ID NO: 99387 - DNA, 122 bp, Homo sapiens
ccgcgagccgtagcggggcgcccaggaaggagcaggtccgggctctgcgctcagctccagcgagaccaacaatagctcccgcggggagcggagccccagcgagcctccagccgcgcgcgcac

SEQ ID NO: 99388 - DNA, 122 bp, Homo sapiens
actcctaggaacatagattgtattctctaaaaaatgcttctggccgggcgctgtggctcacgaggtcaggagttcaagatcagcctggccaatatggtgaaaccccgtctctactaaaaata

SEQ ID NO: 99389 - DNA, 122 bp, Homo sapiens
tgattgtgggttctgataagagattcattctaatctgacttctgttaacctgccagtctccggataagaagagaaggggtagaaggatggattggagggaaagtaggggtaacagggcttgg

SEQ ID NO: 99390 - DNA, 122 bp, Homo sapiens
tgtgcacacagctgggagtggtggctgcctagctgtgtgtaactgtgtgtccatgtgctgcgactgtgcagcttgtttgctgcaggccacatcatgggcttttctggctgatgctgtacaca

SEQ ID NO: 99391 - DNA, 122 bp, Homo sapiens
accctggcccaggatggggccccccgggggggtgggtgaacacccaggggccctcctaggcgtaggacgtgaccaccagttctcactctaggtccccttcactgaggggggaaggggcgggg

SEQ ID NO: 99392 - DNA, 122 bp, Homo sapiens
cgcagatatgaatttctgtgcagtgggcggtgatgggctgatacgcggccgctggccaaccgctgcagtggctacggcctatcagacccacacaggctgagctatcacccgcggggaagcca

SEQ ID NO: 99393 - DNA, 122 bp, Homo sapiens
gtaggcagggctgtagggtggtccggaccaccgggcactgtcaaatggcagatgtccctccgctctgctctgggtggggctggggccggagtggattttataaacactctgggagggtccca

SEQ ID NO: 99394 - DNA, 122 bp, Homo sapiens
tgaagtggcttgctcaagtcccctgaggttagccgaggcctgcctgatgggctggagaaccgcggcgctgcctgggtcttgggccagtgggtgggggccatgaggatgaggagtctgtgggg

SEQ ID NO: 99395 - DNA, 122 bp, Homo sapiens
gcctccaacccaccctgtcattcccacctagagaccctcagcctcagggctctcagcctccggcacttttggctgcgtgtggtaaatgcagatgaccagcttcacccagaccaaaagtaaca

SEQ ID NO: 99396 - DNA, 122 bp, Homo sapiens
gtttcttcctggtttctcggacagctcctggaccaagactcagggaacattgagacagagcgtttgtcacaggaggagcggggtcagggcgaagtcccagagccccaggcatggctctcagg

SEQ ID NO: 99397 - DNA, 122 bp, Homo sapiens
aacacaaatttgtctattacttcaggaagcccagggggaaccgcgccccgctgaagggctcggggaaggcgcgctcccgcgtcccgccccctcctcccccagcactcacactgtggtagcgg

SEQ ID NO: 99398 - DNA, 122 bp, Homo sapiens
gggctgtgggagtggacacggcccttcctttcctcgccgaccctttggggcgtctcccatcgggaaatggcagcccctgacctgccccgtggggatgaaacgggctctttgcggggggcctg

SEQ ID NO: 99399 - DNA, 122 bp, Homo sapiens
tgaagagcaaaccccctcctgctcagagctgctgccgcctgcgcccagggctgcactccgcgcaggcctcatagccaggccatggcccccacagagccctggagccccagcccggggtcagc

SEQ ID NO: 99400 - DNA, 122 bp, Homo sapiens
gggctcttcatgtctctcaacccctgattagaatccgtgtcgatttctggacacgcgggccgagaggagctgagatccggccggcatttctcagccatgagttcttttttgtttgtttgtct

SEQ ID NO: 99401 - DNA, 122 bp, Homo sapiens
gtgcatcctcccggcctcccagaaggaatccatcactttttccacttttataggtgtttccgcactgtctttctgtccggatctggcagacctgggtttgagtcctggctctggacttataa

SEQ ID NO: 99402 - DNA, 122 bp, Homo sapiens
attagccttggataatgtcacctccatacgtagagtggcatggaacaaggatggctggaccggcatggggagctgccgctatgtccacgtaattccggctggtggaagaagttagagagaag

SEQ ID NO: 99403 - DNA, 122 bp, Homo sapiens
ggctcgtgggggccacaggggagcgcgaaagtcaccacaggccccgggacctcggcgccgcgacccctgcccgtccctgagccccggcccctgaggcttcacctgacgagcgcggaggcggg

SEQ ID NO: 99404 - DNA, 122 bp, Homo sapiens
agacagcgccttctctgttggccagagagaacagtcagacttgaggctgtgtgagaagaacgctctaaccacgagagctgtctgacagaggctgcgctgctgaggagcaagtgcgcaccctg

SEQ ID NO: 99405 - DNA, 122 bp, Homo sapiens
gtaggtttgatctagaggccccatcaggttcatgctcaacttgtcttggcaagaatccatcgcaggtggcgctggtacttcctggcactaagatcgattggcgggaccgggacttcgcggct

SEQ ID NO: 99406 - DNA, 122 bp, Homo sapiens
aaagattttcaagaggtgaaggagtgagctatacagatacccgcggccatcccaagtccacgtaatttggtcctgcctatcctgctcccctcccacacccatcctcctggggctcaccatgc

SEQ ID NO: 99407 - DNA, 122 bp, Homo sapiens
ggctgtgctgagaagagccattccatttccaagaaggaacagggaggggatggtgaggagcgaagataaccaagtcagtcaagcagggcagagcacggtgtaatccatgccctaggccatca

SEQ ID NO: 99408 - DNA, 122 bp, Homo sapiens
gcgccgggccggccagctccagcaccagcacagtgcggcttctggaatggacagaggccgcggccccgcccccagggggcggcctgcgggtcagtgtctgtggggattggctaagcctcgta

SEQ ID NO: 99409 - DNA, 122 bp, Homo sapiens
atgcacattcacttgcaaagccccagtcccacacaatcatggtctctaaatcgccaatcccgcacagctacacttttgggcagtttgaatcaggtccaggagctataagggaggatgaccag

SEQ ID NO: 99410 - DNA, 122 bp, Homo sapiens
tgttactgtgttttgcagtcagcctcagtgaataaagctttgggggaggggcatgaacagcggtagctgtcagggaccacctggtgttcttcagtgctggccctgatagaggccatttgccc

SEQ ID NO: 99411 - DNA, 122 bp, Homo sapiens
caaggagccaccttcctcgtcacgtttggaaactcagagaaacctgaaactatgacttgtcgtctttccaataaccagaggtaagagccggatcctgcttggcacggggcagcattgtcaca

SEQ ID NO: 99412 - DNA, 122 bp, Homo sapiens
cagttccacaggctgtataggaagcatgactgcgaggcctcagaaaacgtacaatcacagcggaaggtgaagggggaaacaagcaccttcttcacatggtagcagaagagagtgcacaagag

SEQ ID NO: 99413 - DNA, 122 bp, Homo sapiens
ggctgggctgggggaagaggagccagtggactgagaggcccccagcctgcctgagcctcccggcaccccacaggcaggccccccacaatgtgcctgagcctcccagtaccccacagcctggt

SEQ ID NO: 99414 - DNA, 122 bp, Homo sapiens
ggatgtagcttatcgcccttttaagggactctcccacgttcgactctaagcggaagtacccgctcagggctccggaagtggcctcagagcccctcagcaacatgcccgcagagaattcttcc

SEQ ID NO: 99415 - DNA, 122 bp, Homo sapiens
gagcccgatggaaatccggtaccctgaaaacgagccggagagacttgattgggccattcacgcctcaggatgaggactggccagtctgcgcctggagggcgggccggtcccgctgatcacgt

SEQ ID NO: 99416 - DNA, 122 bp, Homo sapiens
cgctgaaagttagggaggcaaatatgtcctagaaacacagattatctgtctttaagactccggggcccgtggtttatgcgtcggcgaacagccatatcaagtccctggccccgcggaaacgg

SEQ ID NO: 99417 - DNA, 122 bp, Homo sapiens
gagctccctctccgcagcgtgtgaggagggcgaaactatctccaagcttcttagcgtgtccgctggaaaccaatccccagcgtctccgacttggatgtcaacggcgggaatggacggagtca

SEQ ID NO: 99418 - DNA, 122 bp, Homo sapiens
ttctccatgtcctcccaaggcctggcagctcatttccttttactgctgaataatattccacggccacgtcccaccgcgtatttatccactcggtgctgaaggacatctgggttgcttccggg

SEQ ID NO: 99419 - DNA, 122 bp, Homo sapiens
gtagctgggattacaggcgtgtgccaccaggtgtggctaattttgtattttcagtagagacggggtttccccatgttggccaggctggtcttgaactcctggcctcaagtgatccactcgct

SEQ ID NO: 99420 - DNA, 122 bp, Homo sapiens
ttttttagaggtggggtctcactatgttgcccaggctggtctcaaactcccaggctcaagcgatcctctaggctttgcttccaaagtgctgaaattacagatgtgagccaccatctgacaat

SEQ ID NO: 99421 - DNA, 122 bp, Homo sapiens
gagaaaggagagggcggggtagggatgcagctgtgctgcattctgggaagggcgttggtccgtcgctcgcgcagcctcctgggagttgtagtcgcgatcctgaggtaacgggtgagtatccc

SEQ ID NO: 99422 - DNA, 122 bp, Homo sapiens
ctctcaaagaggcgggccgagctgctgtcattgtcccagtccgagtcaggaaggtcccagcggttgttgatgtcactgtactggccctggatttccaagctgtcaaagtctgtgggtgacag

SEQ ID NO: 99423 - DNA, 122 bp, Homo sapiens
cggaccgatgctgccggcggccgctcgccccctgtgggggccttgccttgggcttcgggccgctgcgttccgccttgccaggtacgcgggatcctggggcggtccgggccggcaggcgggtt

SEQ ID NO: 99424 - DNA, 122 bp, Homo sapiens
aaaacagaggcagtgcaggggacagtgagaggctggggtgtccaggagacctgagtctggcggtaggggcgctggtttctcatccttgaacctagttgcactgtcagtcggcccctcatgcc

SEQ ID NO: 99425 - DNA, 122 bp, Homo sapiens
attggttcctcccggacaatgtgtgtttccattgctgaaggtgggtgagaaaatcagaaccgttcccttgaagatgggcagatgtgtgcacagcactggctggtcaaactttgctgaccacc

SEQ ID NO: 99426 - DNA, 122 bp, Homo sapiens
aagcttgggaattttccagtttcttggacacctgacagccggatagaggaacagacttgacgtgagcgtgggagttgcacacacaaaaattcctccctagcgtttcgtttccatcagtggga

SEQ ID NO: 99427 - DNA, 122 bp, Homo sapiens
caggactatgacatcacccagctccaccgaggtctggaggccaggccggaggtggttctccgcaatgacgtggcaccaaccatcatcccgacacccatgtaccgtcctcggccagccaaccc

SEQ ID NO: 99428 - DNA, 122 bp, Homo sapiens
agaggcggatacccgcccggcctagccccgctacctcccaagagaccaacacgacaagcgcgcgcccaccgcattgccatggcaattcaaccgccgctgacaccggaaccggaaacttcatc

SEQ ID NO: 99429 - DNA, 122 bp, Homo sapiens
attacaggcacaagccactacgcctggctggatgctgttttttctaacctctccctcagccgaggcagtatgcttgcctgagaccttgaagtggcagctagtggctgtttaaaatccctttt

SEQ ID NO: 99430 - DNA, 122 bp, Homo sapiens
cctccgcggtgcagagcggtaacctccgcttccccacgcagcagcccctccgcagctcgccgggctgttttcagccctgccctggcccaaggcagaaggagatactaggcgtggggccaccc

SEQ ID NO: 99431 - DNA, 122 bp, Homo sapiens
tgtaggttgcaagggcagtggccgggtggaatccctgctagggacagagcaggaaggcctcgcagcctcaccaagcagcagccctggggtggagctgcgtttccagggttaagcggaccagg

SEQ ID NO: 99432 - DNA, 122 bp, Homo sapiens
tcttaatttttttaagagacagctgtaacattgtttacaaacgtataaataccatcccagcgagaaactagctttgtgcttctgtcataaaagagacacaggtttctaacaggaaatggaaa

SEQ ID NO: 99433 - DNA, 122 bp, Homo sapiens
agccaccatgcccgaccttacaaatctaactttaaactcagggtggttactgtgaaacagcgagagaggtattgcacccggcctgcaatatcatcttaaaacaaaaatttggccgggcatgg

SEQ ID NO: 99434 - DNA, 122 bp, Homo sapiens
agggcagggccagcgccggatgcgcccagcagcccgggctcacaccagagcagtgcatcccgccctaagccagcggggcgacctcaccttcagagacctcatctgcggggctcccacctggc

SEQ ID NO: 99435 - DNA, 122 bp, Homo sapiens
tcctcacttctcagacggggtggccggtcagagacgcttctcacctcccagacggggtagcggtcgggcagagacactcctcagttcccagacggggtcacggccgggcagaggcgctcctc

SEQ ID NO: 99436 - DNA, 122 bp, Homo sapiens
gggcccgggatggggggatcaaagggctctggcgggacccagatgtggatggggcagggccgagcgtggggactgggcttttcaatgacgggcggggttacggttgggcagcaggtgggcgt

SEQ ID NO: 99437 - DNA, 122 bp, Homo sapiens
agtatccgctaacttccagactcttcctttcaaatatctttttggctaattttcctttgccggggatgggggttgtggggggagtggggatctcccacaaaatctatgctataatatgtctt

SEQ ID NO: 99438 - DNA, 122 bp, Homo sapiens
ctataatgcttttgtgacatttggaagcaatataataaaacagttcagagcacagggcctcgggccagtcatcctaggcttaaacctcaactcagccatttactaattgtgctttaaagatg

SEQ ID NO: 99439 - DNA, 122 bp, Homo sapiens
ccagggccccgctgcgcaaacttgggttattttcagccacccgtgccctttcctgcttctcggagctggaaggctgtggactgaggcctgcgcgaccccgccagagatggggctgagtccca

SEQ ID NO: 99440 - DNA, 122 bp, Homo sapiens
agccgctgaaagagaacaacgctgccgctgctgctgatttcatgccatttcctgacccggcgctgtaacttggcctctgagccttggccacagaacgcagaggccgtggcatctggccgcag

SEQ ID NO: 99441 - DNA, 122 bp, Homo sapiens
caattctacctgagatttgggtggggatacagatacaatccatatcaggggccacttccacggggacgggaagaagcagatgggagtagtcctgggcaggtgggctcatggctgtgtgtgca

SEQ ID NO: 99442 - DNA, 122 bp, Homo sapiens
tcgctgccctgctcttgcccttcaggttggatgtcagtgccttgagttacaaacctgtgtcgggggctccatctgtcaccacagccggacacagtgccccacacctgtgctccccagtactc

SEQ ID NO: 99443 - DNA, 122 bp, Homo sapiens
ccagcatcctggttgggaagggaagggctatggggacacttgaatgcagccctcctaccccgtcagtgtgggctgaaggccccagccccaaactaagggtgagcaggacccgcagccgctcc

SEQ ID NO: 99444 - DNA, 122 bp, Homo sapiens
gcactgcagggacaggatgtcctttggagtcaggtgacctgggtgcaagtctggcttttccggggaaccttaggccaatcaccttctctcgagggcttcagctataaagtcagtccgtagga

SEQ ID NO: 99445 - DNA, 122 bp, Homo sapiens
acacctcaaccccctcagctaaacctgagatccaagcgctccggattccaaacgtttcctcgagcaggtcctctctagccggccgcttatctatggtttctgctatagggcgctctagcctg

SEQ ID NO: 99446 - DNA, 122 bp, Homo sapiens
gccagggctgtgtatgtctgtgcgtgtccgtgtatgtgcacgtgggtgtgcaggcatactcgtgtgcatgccagtgtttgacaaaggattcctagacacctgcgtgtgtaagtcccaattct

SEQ ID NO: 99447 - DNA, 122 bp, Homo sapiens
tgtctggctctacgtgccgtgggggattgagaggcatctctggccaggccaagggcaacccggatcccggatctgggtagacaacagtgggactagttttgggaattcgttttttttttttt

SEQ ID NO: 99448 - DNA, 122 bp, Homo sapiens
gcccccatgtcccggtacaggccccccccagagctgggggggcctgagccatgtcggacccgggtgccattgggatctagggcaccctggcctttggcctccaggaaggcagccctgtgctt

SEQ ID NO: 99449 - DNA, 122 bp, Homo sapiens
agccaggaccaggtttcagggccacaggcgtaagccttataaaactggagtttggctgagcgtggtggctcatgcctgtaatcccaatactttgggaggctgaggcgggtggatcatttgag

SEQ ID NO: 99450 - DNA, 122 bp, Homo sapiens
ccagcgaccagagtgacagtgacagtggggagggcctctgctgcaccaggcatcaccacccgggggcagtgtggagcccggccctggagcctgatcacccaggcttgcagcccgcctggcct

SEQ ID NO: 99451 - DNA, 122 bp, Homo sapiens
tctgtcctgtgaaatcctcaggaaaaatcccagcccccagcctggcattcaagccatcaccgctggccttagtctgccgtgattgacaccgtgctccagccaggataacgcacttgcagctc

SEQ ID NO: 99452 - DNA, 122 bp, Homo sapiens
gggtcgctcagccctggcgtcctccaccaccacaccttcacctgcgcccggctccctgcgcgcctggacagcgcctgctgcccgcctcccgatggccctgccccaggtgggtggaaacggcc

SEQ ID NO: 99453 - DNA, 122 bp, Homo sapiens
gtaggatggtttccattgaattaaaatccacctcctcccagtcccatgctccttaggggacgcaagcagccgtctttcctccctgttcacgcctctcttgttatgctcagtttcctgctgac

SEQ ID NO: 99454 - DNA, 122 bp, Homo sapiens
acggcggcccccaagcaggtttcctcctgtgcagaccctcacctgcactgaaatggtgcacgtgcccccgccacccatgcatggacattcctgccctggtaacctgggcaaacgcctccctg

SEQ ID NO: 99455 - DNA, 122 bp, Homo sapiens
aggcttgaatcctgaatctccatgctggagactttgaggaagtcacttagcctctctgggcgtcagtctcctcatcaagaaattgaggaaatttcacctacctcctagggttattggaagac

SEQ ID NO: 99456 - DNA, 122 bp, Homo sapiens
gattcctggagatccaaattacagggtgcgggaggcctgcagggtcttcttatctggaggcgggttttgttccctgcactggcgagttacccagctgtcgccgatggcagttcgtccgcttg

SEQ ID NO: 99457 - DNA, 122 bp, Homo sapiens
ctgacccaggtggccaagctgaccgggcactcctaccgcgtgctgtacctggtgagttcacgccaggcacttcaaggtgccccgggattctggacaaactgccatggccaccccagagcacc

SEQ ID NO: 99458 - DNA, 122 bp, Homo sapiens
ccagtctgaaggcgacgcccctgcacgaaggagtcaggcctaggggctcgggacccagggcgacactcaattttctaacaggagccacagcccagaagctgagaagccttccggccgatctg

SEQ ID NO: 99459 - DNA, 122 bp, Homo sapiens
ccgccccttcgctttccctttggttccaccgagcttgacagagcggaaagtcccttcggccggcgccgggctggcagccattggaggaaggtctgtcacagggaggcccaatcacggcccgc

SEQ ID NO: 99460 - DNA, 122 bp, Homo sapiens
ctggcgcccgcgggtcagctgagcggcgctcgggctgtgggagcgcggggcgggcgggggcgccggggctcggcgcgtgcgacggagaggggtggggggcgcgctcgcgagggacggaggcg

SEQ ID NO: 99461 - DNA, 122 bp, Homo sapiens
tgcagctgctgttcttccctttcctggagcagctgttcctcttcgcggaattttctgtgacgctcctggcgcagctgctgttcctcctccaggaattttctctctcgttcctggcggcgcac

SEQ ID NO: 99462 - DNA, 122 bp, Homo sapiens
cgtttcgaggggcctcttgcgggaatccggggcctcgggctccatggggggggcctggggcggcggctgctgctgctgcggcggctgcggcggcggcggcggcggctgctgtggcggcggcg

SEQ ID NO: 99463 - DNA, 122 bp, Homo sapiens
cggtccagggagaccgcggagggattggaacaaagggtgggcgttgtggggggcagaccgcgtcggcctgtgaggagtcagggtgctcctcttggttcaagaagagaagggaggtgggggga

SEQ ID NO: 99464 - DNA, 122 bp, Homo sapiens
atttcactcattcattctctccctgtcccccacgggttacaagacgctgtgaggaaggaacgcagacaaccccgtctgaacactcccacattgtgctgcttgaagacatgagccccgtcttc

SEQ ID NO: 99465 - DNA, 122 bp, Homo sapiens
ccatatcaccatggagcttggagccccagcctcccccacgtcatcgtggggcctggaggacggctgggagaggatggagagaaccagattccattgatgtcaatgcgatgtcagggcagtga

SEQ ID NO: 99466 - DNA, 122 bp, Homo sapiens
acggagctccccgctctgcaacagcaaagacagccagggggctcgagcgctgagctcgttcgcaggcctttctgtgaatgtatcaaagcctttgttgtttgtgttaccttttcaatgaacca

SEQ ID NO: 99467 - DNA, 122 bp, Homo sapiens
atattgggtgaaaggaaggatgagaaagtgttacgtctgtcatcagaggagcctgggatgcgtgtgagcttctttgttacccttgtctaatggcttattcttggaacccaggcctgtacact

SEQ ID NO: 99468 - DNA, 122 bp, Homo sapiens
ttctaattctttaaaaattgttgatccgactatggatgtcttgcaactctcaaaaaatcacgtgtgaaagttaagcattagttccgtgtaaaatactgtgctagaaattgtggaggatgcaa

SEQ ID NO: 99469 - DNA, 122 bp, Homo sapiens
aggcggcgcgggtgcaggagcaggacttacggcagtgggggctgacaggtgagcgggctccgggcggacttcggccaggcgggccaacctattgggactgcctcttgcgggccgggggcgca

SEQ ID NO: 99470 - DNA, 122 bp, Homo sapiens
ttgggttttcaacagtcccagctttcactgccagggtcccagtcagattccaggaatttgcgccctaactttgcttgctaatcctggtttagagctatcccactaaaatatttaatcctaat

SEQ ID NO: 99471 - DNA, 122 bp, Homo sapiens
ggtgggcggtggcgcaagggacctgggactcagggcagggggtgactggggcaggcccgccggactcgctctccattcctgtgtgctccacgccgcccacccacctccgcctccccgcccct

SEQ ID NO: 99472 - DNA, 122 bp, Homo sapiens
gaaagaaaatggtatttactgagctggaaggactgttttctcaaccgtttctcaagagcacgcaaggagacgtgcactttcctgggtgacatcaggttctccgtggggattttaatccaaat

SEQ ID NO: 99473 - DNA, 122 bp, Homo sapiens
gctgcagcctggtgctggctgggtcctgaccgcacctgtcgtggcaggaaacacattcgtcgtgccttggctggtccctgtgtgactgcgtcccgccacgtgggccacaccctgggcctacc

SEQ ID NO: 99474 - DNA, 122 bp, Homo sapiens
ggtacatatttccagttccggattccttggtgagcctggacaagcccctcccgctctctgcgcctcagtctcccaagcctgtcaccggaaacccctcccgcggtgccgcccctagcggggcc

SEQ ID NO: 99475 - DNA, 122 bp, Homo sapiens
gatgtgtaaccagccttcttaatagctaatcccttaaacctcactgcgtggattatttggcgtcctatttcgcgtgactgaatgtagactaattaacaaccagctgagctgagcactgtgcc

SEQ ID NO: 99476 - DNA, 122 bp, Homo sapiens
cttttgtagtcatttgaaagcaattttaccatatagaaatcctctaatgtatcagtcactcgcaagtctaacatgtgttaaaaatgaatcttctctccattccaaccccctctatttaatac

SEQ ID NO: 99477 - DNA, 122 bp, Homo sapiens
ctaagaagccccagtacgtgggtttaggaaggaatacatgatagtagttaagaaaaagcacgaactttagaggcagcctgatttggattcaaatgccaatttgtcccttggctgtttgacaa

SEQ ID NO: 99478 - DNA, 122 bp, Homo sapiens
gctttggttgttttagtctcatctttctcacctcctgaccctcttcccttggccccatcacggcttttacacaatgccaagagttcacagagtggttttggttgcatcttgtgaattaggct

SEQ ID NO: 99479 - DNA, 122 bp, Homo sapiens
cgcagcctccccggagtcccggtgctggagggggtcgggagatccggcagcctctgtccgcgggccggcgaaactccaccccctcctggcacccgctgtccgttcttggctagaaaacctct

SEQ ID NO: 99480 - DNA, 122 bp, Homo sapiens
gtcggccaggcctgggggatgggacgggccccgaggagagcgggtgccaggggcgagacccgccgcccttccccggcttggtcccgcgcttcctgattttctcgctccacgcctcccattct

SEQ ID NO: 99481 - DNA, 122 bp, Homo sapiens
tttctgtcggcccaacgcggcggggaggcgcggtctcctccgctcctcgccgatccctcgcgggccacctccagtcgcaccagctctgggtcgcccaaccagtcccctcccccaacactaca

SEQ ID NO: 99482 - DNA, 122 bp, Homo sapiens
ttatctcttttgtttcggctgcaaaaggttcactgcttgttatctcgcttcttgttcacccgcccatctaccttacttctgccctttgcttttacttattctgccctctaactttcagctcc

SEQ ID NO: 99483 - DNA, 122 bp, Homo sapiens
ctcgcggttgagggagggtctctgagggaagcttcggaggagcgtttggtgcagtggccacgaggtgactgcgacagtcgcccgcgtgcatctctctgccccgagggggcgctgcgagccct

SEQ ID NO: 99484 - DNA, 122 bp, Homo sapiens
tatgttaaattaattcccctgtggcaaacttctcaacgcaaacacatgcgaggcaggaagcgtctacagcgctcccgttcctgcgcacgcaggcccgtatgcatgtctgttcatacgcatgt

SEQ ID NO: 99485 - DNA, 122 bp, Homo sapiens
tccattcatccatcccactgcgggcgcagcaccatatccattcatccatcccactgcgggcgcagcaccatatccattcatctgtcccactgcggaggcagcaccctatgcattcatccgtc

SEQ ID NO: 99486 - DNA, 122 bp, Homo sapiens
ttggctgcggccaggccgtttccggtggagctgtcgcctagccgctatcgcagagtggagcggggctgggagcaaagcgctgagggagctcggtacgccgccgcctcgcacccgcagcctcg

SEQ ID NO: 99487 - DNA, 122 bp, Homo sapiens
gaggaggaggagggtcccgccggctaagagttaattagccccgcacggcgaggggggaggcgccagttttctggggacactggctgccactgtactcctacccaggggagctcacggagagt

SEQ ID NO: 99488 - DNA, 122 bp, Homo sapiens
ttatacacacgtgaattaaaatcaaccaacatttgtgagattgggtttggtatctttgaccgtttttctcccctgcaagacgtagataatagcaccaaccccaaggagtttggggatgatta

SEQ ID NO: 99489 - DNA, 122 bp, Homo sapiens
ctccgcatttcaaaggccgctccagcgctgacatgctctgactgtgattctacccagatccgggaggatgggggcgggggcttcaggactcctgctgcctggaaagattggacagcagtttc

SEQ ID NO: 99490 - DNA, 122 bp, Homo sapiens
tcacagctgagttcgtgctgtctgctgtctgggagctgaggttgtctgtcccacagagtgcgtgcactgtgggtggctccatcttgcttgggagactcaaaacaccatggccgagttctaaa

SEQ ID NO: 99491 - DNA, 122 bp, Homo sapiens
tcctccttgtctcgcagctgccgggacaccttctgcttctgggcacggagctctgccatgcgctcgttcagctccgagaactcctgcagggccagctttcgctgctgatgggcatctttgag

SEQ ID NO: 99492 - DNA, 122 bp, Homo sapiens
taatcctgagtaatcttgatccccacaagccgatcatgattatcagaaagtaaaggtagacgtcatgcttggaggggaagtgaccttgtagattagtattttttttaaagaataacagtttt

SEQ ID NO: 99493 - DNA, 122 bp, Homo sapiens
acccctccagggcgggaagcaggtttggtcacgggcccctgaggaggaatcgtagctctccgagcccaggcctagtcctcaccaccccactccaccacccaccctcccgccttgtcccgtcc

SEQ ID NO: 99494 - DNA, 122 bp, Homo sapiens
ggaggacctgaggcccacgggggcggggccaggggcggggcggggctctggaagggcgggcgagactgtggaggacctggagctggcgggggtcagggtaggggggaggggcagggctcggg

SEQ ID NO: 99495 - DNA, 122 bp, Homo sapiens
ccagatgacagcgggaggccgcaagaggggagggaggaaggaccgagggagcgcggatcccgctctcggatcgcaaactctgagccagagctctccgcgcgcgcctgaaccgctggccgccc

SEQ ID NO: 99496 - DNA, 122 bp, Homo sapiens
atggatcttgaagttgagaacaaaactccccagaatcagcacaatcacttaatgagcttgcgaattgaaattatctttgctacagcccaagaactgagtggtaattagtgtccagggacacg

SEQ ID NO: 99497 - DNA, 122 bp, Homo sapiens
gccttggattcaggggagaacactgaaataagttaccccaaggcttgaatcttagtcttacggacatcaactcagatttccatcccctgggagaggttctcaggcctctctctctgggctta

SEQ ID NO: 99498 - DNA, 122 bp, Homo sapiens
cctccagcgtgcccctagcccaaaaccacggcggatggcagcggattatccagccccgaacgccgcaaagcgagctcaccatgatggcgcctcctgctcggccaggtccggaaagagagaac

SEQ ID NO: 99499 - DNA, 122 bp, Homo sapiens
ctttaccatagcgatcttcccagagtgtcagtcacatggcccctcaatggcttccatgtacgtatgtatgttttgagatgcagcctcgctctgtcacccaggctggagtgcagtggcgcgat

SEQ ID NO: 99500 - DNA, 122 bp, Homo sapiens
gaagaagagaaagagccgccgggagaagcgcggacgccgccgcttcccgggctccagccgcggcccagaagaggaggagcccagacgcccttcgcgcgccattggtccatccgcctagcaac

SEQ ID NO: 99501 - DNA, 122 bp, Homo sapiens
tggtttgatggccaggtttactaacattttgcccaaatctaattcaaagaaaacaaggtacgagaataaaattgtggagtaaggcatctcaacattactgtcttctcacttcagaccagtta

SEQ ID NO: 99502 - DNA, 122 bp, Homo sapiens
ttttcttttttttctaaagctaccatcatttctaagctgatactttagaagcctcttaaccgacctgcttgcttccgctccagattttcatccacagagcagccaaaagtatctcttacata

SEQ ID NO: 99503 - DNA, 122 bp, Homo sapiens
cgacgagccctcccgactctgcgacaccgggctgtagtaggcgtccatggcagcggccggcgactcgcagtaagagacgcaagtctcagcattcatgcctggcttgcgcaggcggcgggcgg

SEQ ID NO: 99504 - DNA, 122 bp, Homo sapiens
gtggcaggcaatttttatttgtaaagcagaatatacacacactcactggagtgtgattcccgtagagtttaaattgctcagcagctagggcaaaattgtcattttagataaaattattgtat

SEQ ID NO: 99505 - DNA, 122 bp, Homo sapiens
cacgcacatgcagcgggaagtcccccgatagggacaaccacatacctttgctctccatttcggtccctttcgagtgctgggaagttcaatggaagttggccggaagatgtgggcccgcttca

SEQ ID NO: 99506 - DNA, 122 bp, Homo sapiens
gggtgtggacgccccgccgccccgcaggggaaagctcctggagtctggggtctgctgccccgagctctgggtgtccaggtaggaaacaggtagagagtatccgggtttcctacccctccgcc

SEQ ID NO: 99507 - DNA, 122 bp, Homo sapiens
cactcccgcgtcccacctccacgcccggggccgtggcccccacatcactgtgcagctccccggccccagccgcgcctccggggaagcccgtttttaacctttcatccattgggactcaaaac

SEQ ID NO: 99508 - DNA, 122 bp, Homo sapiens
aaaacaaaaacaaaaaaaaaacaaaaaaacccagcagcgtcaccaggtccggttggcagacgtgctccgtcaccccactgattaattctgggcgtggggctgcgcccctaaggcgcttgcaa

SEQ ID NO: 99509 - DNA, 122 bp, Homo sapiens
gcccccgccgcccgccgccgcccgcccggggctagaggcggccgccgggagggcgcgcggcgccggagacatgtccaggcggaaacagagcaacccccggcagatcaagcgtgagtcaaact

SEQ ID NO: 99510 - DNA, 122 bp, Homo sapiens
ggccttgacctcagaattgggaacatcctctggaagggttgttcccagcatgtgcgaggacgaggacacgggcctggtgtcccctcgggcggggcctcggcagcctctcccatgagagcaca

SEQ ID NO: 99511 - DNA, 122 bp, Homo sapiens
ccagagcctcctgatgctgggcagcagtgatgtcatcatccaccgcgacggctccctcagcgccaagagggcgggtgagtgccttccctgccacggccccttcctctgtgggctgctggtcc

SEQ ID NO: 99512 - DNA, 122 bp, Homo sapiens
aatcctgcaattccagatcattatcaaggtcactgcctggtacattaactcagaagcacgcgggtgacagggtgtggccagtgcaccaagcagaacggccaggcaagctgcgcccagacaca

SEQ ID NO: 99513 - DNA, 122 bp, Homo sapiens
cccgcttcaggctccctagatactttctggggcccaaccgaaggccgtagccatccaaagcgttcccagcctttctggggagtgaaacttacccccggggttcgtcctagaggagcgtgagc

SEQ ID NO: 99514 - DNA, 122 bp, Homo sapiens
tattcgagggcaggctgtccccatgacagcctcaggcgcaggagggaggacggcctgattcgagtctgtggaaggaggaagaagctcatttcctgagccagcagggacacagaggtggatgc

SEQ ID NO: 99515 - DNA, 122 bp, Homo sapiens
ctccttatctctaagccaggccacctgcaactctgccttagctatcatcttctgcttgcacggactccaaagatcaatcaggggtacaagccaaaggtactcttaggactttctggagcatg

SEQ ID NO: 99516 - DNA, 122 bp, Homo sapiens
taggcagagaatacaggggctgctggatgtcgaaaggaacgcaccagcataggagcacaccggcatgctggcaggccattgaccagcggaagaatgcagagtttgtcgcgggaggtcagaga

SEQ ID NO: 99517 - DNA, 122 bp, Homo sapiens
aaagtactacgacttttgactgaatcagtctacctctctgggccctggtcaggctgagctcgtgccaaccatgcctcccatgtcccatttaggttccccctcctaccttcagccaccttccc

SEQ ID NO: 99518 - DNA, 122 bp, Homo sapiens
cagatccacctgcgctcgcacacaggcgagcggcccttcaagtgcaacatctgcgggaaccgcttctccaccaaaggcaacctgaaggtgcacttccagaggcacaaggagaagtaccccca

SEQ ID NO: 99519 - DNA, 122 bp, Homo sapiens
aacaggtctagtcagaatgacatgactgtgctccttctcttctaacacttgctattttctcgtgtttcattcatcccatcttctactttttgcttttctagtgctgctatctcactgctgag

SEQ ID NO: 99520 - DNA, 122 bp, Homo sapiens
cttcctcacccgcgtgtactccgattacctccagaccatcttgaaagagctgcagtcgggcgagcacgcccccgacctggtcatcatgaattcctgcctctgggacatctccaggtatggtc

SEQ ID NO: 99521 - DNA, 122 bp, Homo sapiens
gcagaaaggggaggagagcagtcctcattctttcagcaaacttactgtgcacttacaacgcgcgaaggcgctgtgctcagagaaacaaaacctaaccggttgtggccctcgagggtgtgtgg

SEQ ID NO: 99522 - DNA, 122 bp, Homo sapiens
ctatgtgattaaggactacaggaaatgccgaatcggggttgtgattgtggggctaggggacggggtgtaattaagatagatgacttttgaacaagaatgggaaagaccttggctgaccttat

SEQ ID NO: 99523 - DNA, 122 bp, Homo sapiens
ctgtaaacagaataaaattgaacaaattagggggtagaaaggagcagtggtgtcgttcaccgtgagagtctgcatagaactcagcagtgtgccctgctgtgtcttggaccctgccccccaca

SEQ ID NO: 99524 - DNA, 122 bp, Homo sapiens
gatatgggtacagcaataagtgcattagcttcacgtgcatccgccttctaacctgttaagcggaaacaaaagttccacgggatgcgtgagaagaaaacaaaacatgtttcaatctcattttc

SEQ ID NO: 99525 - DNA, 122 bp, Homo sapiens
tcctgcagacattcttgctgctttccggtcccacgggacggctcccaggctcccgcctcacggcaagaaaaataaaggcctccccgcacagccagccagcttcgttcattcacgtcaccgac

SEQ ID NO: 99526 - DNA, 122 bp, Homo sapiens
caattctgttgcctcagcctcttgggtagatgggatattacaggcgctcaccaccatgcccggctaattttttgtatttttagtagagacggggtttcaccatgttggccagactggtctcg

SEQ ID NO: 99527 - DNA, 122 bp, Homo sapiens
gccttcctcaccctgacatattcttggcttttctttacccacttaagcacccactgacagcgaccccttcaaattggacataaggggtttttttggaaaggaccgtatttctcaaagttctg

SEQ ID NO: 99528 - DNA, 122 bp, Homo sapiens
gcagttctgttcagtgaattctttctcccacaatattctccctagcttaaaaaagcaggtcggccgccctccccacagttgccgtctcccccggggccggccggtcttatgatccggcggat

SEQ ID NO: 99529 - DNA, 122 bp, Homo sapiens
aatcatctttttagactctgggtcagatccggttgcacatcttcataagcgggagttttccggaagcccgcgtgccgtggtttccctgacaggtcagaggcagcgccgtgcagacactgtct

SEQ ID NO: 99530 - DNA, 122 bp, Homo sapiens
ataaagaccaaatctagcgccaatatttcccgacactcacatcccagagaaacccacgcgcgggtgctcaaagcaaatgaggccccatccttagcaaggaacctcagagttcatgaactttc

SEQ ID NO: 99531 - DNA, 122 bp, Homo sapiens
gtcatgtcatacggtcccttagacatgtaccggaacccggggccctcggggccccagctccgggacttcagcagcatcatccagacgtgcagcggcaacatccagcggatcagccaagccag

SEQ ID NO: 99532 - DNA, 122 bp, Homo sapiens
agacatgccgaagtgcatctgtctgggtagttaacatgatctaaacatccctcttcgttccgctaactccggctcttcttcgggctcctcggcagcgctccgggccagccggcccgtgcccc

SEQ ID NO: 99533 - DNA, 122 bp, Homo sapiens
ggtcacagccaccataggggcctgagcaagccacagtcagatttggaaggaaaggctgctcggtcaggccccaccacagcctcctgtcctgccacctgctttccgttggccacttgtggcca

SEQ ID NO: 99534 - DNA, 122 bp, Homo sapiens
ccatctccttctaccctcaggtgatcatgaattggaggcggaaaaggtaaccccctgggccgtatgtgcaggctctctcggggcccctaggagcagggcgttccagcaaggctgccgatagc

SEQ ID NO: 99535 - DNA, 122 bp, Homo sapiens
tctatcgagcatttattaggtatttaaaaaagtgttctgacggccgggcgctgtggctgacgcctgtaaccccagcacttggggaggccaaggcagatgggtcacctgaggtcaagatttgg

SEQ ID NO: 99536 - DNA, 122 bp, Homo sapiens
acaggcaggcagggcagccccaggtgtgcaacgggcaggcaggtggcacaggccctagtgcgcagcgcccactctgccaacctggtgggcgaggagcaggtgcgttcacctgtgctgcccag

SEQ ID NO: 99537 - DNA, 122 bp, Homo sapiens
actaggtctcttcatggcgtttctgggagaattcctcagtactagcttcagatccccagtcgtctcttccactgtacgtgtgcctgaagctcaccacatcccttacttcagtccttctattt

SEQ ID NO: 99538 - DNA, 122 bp, Homo sapiens
tgattagctagagtcataaaatggggagatctagcatggccttggggaacatctagtgggcgtcacacatccaaatgcctgcagaggggccaggcaggtcagacaataggggatgatggggc

SEQ ID NO: 99539 - DNA, 122 bp, Homo sapiens
cagaatgcaccgctctgagagggctccaggtccggggcggggtggggggggggggtggttcgttcctaccctcaggtgcgggaggaaggagcctgggattaggttaatgaaactgctggcag

SEQ ID NO: 99540 - DNA, 122 bp, Homo sapiens
gaaggagagagtcagggcggcgggaagacatttctccgagttctcccgaagggagccaggcgcgagcgcgacctggggaaagtccagagtgccagccacggggaagggcgggcagtgcagag

SEQ ID NO: 99541 - DNA, 122 bp, Homo sapiens
caggccaggcctggaagacagaggccatgcagaaagcccttcccaactgggccagggccccgctgcccccacccctgccccttgcccggctcggggtccccaggctgaagcagcaacggcgc

SEQ ID NO: 99542 - DNA, 122 bp, Homo sapiens
acagctcccagcgtgaccgacgcagaagaccggtgatgtctgcatttccatctgaggtaccgggttcatctcactagggagtgtcagacagtgggcgcaggccagtgggtgcgcgcacggtg

SEQ ID NO: 99543 - DNA, 122 bp, Homo sapiens
cacccgtccgcagacgcgcgcccttcgtcgcgcccttacctgagcgctgtggttgccccgcgccgggactgcctgtgcggctcctcgctcgcacccccaccctgccccctgccagtcccgcc

SEQ ID NO: 99544 - DNA, 122 bp, Homo sapiens
gaaggcccaagtgggtagtgaggagaggcccagggactgtccggccttgaaccctggccccgtgcttcccaaccagaagttctgtgggaaaggagagtgccttttgctcagcagctgaccta

SEQ ID NO: 99545 - DNA, 122 bp, Homo sapiens
agggagcccgggcccagcaatgtaaacttcgtggtgtggaatggttcagcacaggggagacgtgaaagctctctagccagcctggctcctgtcccatgtggattggagtcagttgttccctt

SEQ ID NO: 99546 - DNA, 122 bp, Homo sapiens
aggagcacaccctaacagtcgggtgcttaggattttgtgtcgacgtgtagaaagagccatcgaagcacatgagacgggaatttgtaagagacccacgcctgcaatgtcgagccccaaaggtt

SEQ ID NO: 99547 - DNA, 122 bp, Homo sapiens
ggagaagcgctctcgggacattgcggcggcgatccccgcagagggtgaagccgggcgctgcgcagggagcagcaacatgagggcgctcttgcccaggacaagcagagctgtacgtttgggta

SEQ ID NO: 99548 - DNA, 122 bp, Homo sapiens
gttctctggaaaaaaagcactgtgccctccattgattttgaaagagcaccctcctgaaggcgctgggctgacaccagtgcccacctgctctgctcatcttcagcttcaaaaggccacaggga

SEQ ID NO: 99549 - DNA, 122 bp, Homo sapiens
gtgcctgcctggctttcctgcctgaggcatttgacttcattgcacgggaccctgcagagacgctacacctgtctgaaccactgggtgggaaacttttggaagaatacacccagcttgccagg

SEQ ID NO: 99550 - DNA, 122 bp, Homo sapiens
gagacgatgccaccggttcctctccgccgccaccagcagcaccgacaccgcagaggccgccgccatgtccctggagcccggccactccgtgactccccagtacagaggcagctgcgtcccac

SEQ ID NO: 99551 - DNA, 122 bp, Homo sapiens
aaacccagaagtgttcacctcacgctggtcctccagccacatcaggaggatgttggggggcgagaagccagacacctcacacaggagccacgaggccgcctcgggagggtcagacgaggcca

SEQ ID NO: 99552 - DNA, 122 bp, Homo sapiens
agcttaacatcgcactgggttggttgctgtcacctcccctgtgcagggtttaaggagactcgaggaggctgattttttttcctcttctcctcttctctcttctcttctcccctcttcccccc

SEQ ID NO: 99553 - DNA, 122 bp, Homo sapiens
cgccccttcagtgaggatcctaaatttacatcccgagtgtggccccatcaaagactggagcgacgttcactgaaatgatacaagaccagcaggggcgcagggcgctgcggccctcagaatgc

SEQ ID NO: 99554 - DNA, 122 bp, Homo sapiens
cagcttgccttggcggttaggcagttgtagtgtccaacagtggacagacgtgtccctgaacgaggggttcctgtggtgggatcccaggttctgagctccactgctctccctctgtagccctg

SEQ ID NO: 99555 - DNA, 122 bp, Homo sapiens
gcaggaccgagggtggaggcgggagcggctgcactgccttcccatttccccccaggatagcgatctggcgtcgccgggccgggccaaagcggccgagcgagccgcgctgatggcgagatttc

SEQ ID NO: 99556 - DNA, 122 bp, Homo sapiens
cgagcgcctctttcctctgccagtttcctccttcttctcagctgtcggacccctgggaggcgcggggtgggaagtgggcaccgaagggctgggagttaaatgcctaagttgagcggaaggag

SEQ ID NO: 99557 - DNA, 122 bp, Homo sapiens
ggagttgaggaaggagcgctcgagtttccgagggacattggaacgcgcagctgtccatcacgcgctcatctgcatattcgggggcccgcccctcccctgctccgcccgctgcagcctccggg

SEQ ID NO: 99558 - DNA, 122 bp, Homo sapiens
gcaacttcttacaggccctgttgcctcacctgtgcaagtttccagcatgtgacctgctgacgtgcccgtcccagaggctcagggtccctgagcccagcagaagccagctaggccagatgaca

SEQ ID NO: 99559 - DNA, 122 bp, Homo sapiens
aacaaaacccagcatgggttcaattcctgtttcaattccatctgactcacccttaagttgcgttcttaaatagtgatcccattttgacccacaatctctcaaaaagaagcatatgattttct

SEQ ID NO: 99560 - DNA, 122 bp, Homo sapiens
ctctgtctaccacccaggtcagcaggcggggtttgccctggaccagcgtgtggagagacccgggcacacggctgctcaggacgcagtcagacgcggaacccgacccctcaggtttgatcaca

SEQ ID NO: 99561 - DNA, 122 bp, Homo sapiens
tgacatgggctcaggccttcctactcagacgggggcgcattttcccccaagccctcttcacgcactgctccattctgcagaattaatgagcaggatacaaattcacaaattcctaaaccagc

SEQ ID NO: 99562 - DNA, 122 bp, Homo sapiens
tcacctggcccgtcgcggtcccgcccttctttctgtcccgccttccaatggccccaaccccgtaactacccctgccggggtcctgttagccctgcccccgcacctgaagagcgtctggcgca

SEQ ID NO: 99563 - DNA, 122 bp, Homo sapiens
cccgtccaggtagggctccgggcagggggcctgtcaggacgaagtggcaggactggccctcggggtccccgtgggtaaaggaggagcggcttcgcgccctgggacagcgcgcgccccggctg

SEQ ID NO: 99564 - DNA, 122 bp, Homo sapiens
acagacaactcacatttcaccttccaggactccgaagctcttgtcacacgtggcaggggccggttagaagactcggcggctgcgccagcgctgatgagcgaggacagaggagcatgaaactg

SEQ ID NO: 99565 - DNA, 122 bp, Homo sapiens
ttaattaggacaattttctcttcttagtttttaggatattcattttgactcaactcatcacgtatataagtagggtggatgactgagtctacagtgtggtttctgataacttggtggggaca

SEQ ID NO: 99566 - DNA, 122 bp, Homo sapiens
tgatccgcccgccttggcctcctaaagtgctgagattacaggtgtgagccactgcgcgcccggccgtgggtcaatcattttgagtttgggtcacgtgttcaccactttgcagcccccactgg

SEQ ID NO: 99567 - DNA, 122 bp, Homo sapiens
acagcgttttcctgataccttgaatgtcattggaacttcacagaggagccaacggaagagcgtgggagaggggatgcaccgtgtctgggtctcagcaggctcatgtgttggccctggctcca

SEQ ID NO: 99568 - DNA, 122 bp, Homo sapiens
tcgtgcacatggttcagccaagcagaggctgccaagacccatgcctactgtgccgttagccgtcctgggcccttcatcccttgcaaagctctgtgctttttccagaaccacataaacacctt

SEQ ID NO: 99569 - DNA, 122 bp, Homo sapiens
ccctgggcggattcctgaccgcccccttcgcgcccctccccctctcactttcgctttccccgcctgccccaaccctcgcccccgggcgctcggccgctcccacctgtcacccccatgcagac

SEQ ID NO: 99570 - DNA, 122 bp, Homo sapiens
aaagtatacttaagctgcttttaagtagcatccttctaacatgtctttaaaacacaatcacgtttacaaaaatctgacttataaactccatttctaggagatgctttgggtgtagtgccagt

SEQ ID NO: 99571 - DNA, 122 bp, Homo sapiens
cacctgatcctaatctcctctgcccttatggactcaggaatcagtcagagtgtagccctgcgtcggcctgcacttatagtacaaaccagtgctttagtcagtcctgccttgcccccacccaa

SEQ ID NO: 99572 - DNA, 122 bp, Homo sapiens
tgtctgatgctggagtgtggaagccatagtggacgggtaggtagagggcctgacctctgacgccatggacagtgtgtgatggcactgtcaccttcagccccgagcaagcacctgttgcaaag

SEQ ID NO: 99573 - DNA, 122 bp, Homo sapiens
ggtctggggtcttgagggactaggggcaggcacccttccccgggaggtgtgggggggtgccgagggcaggagggtggcagtcctgcactctaaaggctgttcatctgcagatttccaagccg

SEQ ID NO: 99574 - DNA, 122 bp, Homo sapiens
cggacaaggaggaaggggcccggctcaacatggcagaagggttattggactgagggagaccgggttaaagtgtccccaaagagcctctggtcagaatgacagtcgagggtggagacattgat

SEQ ID NO: 99575 - DNA, 122 bp, Homo sapiens
tgtgtgccccgaagagacgacatcatttgaacactgaacactccgactccgcggccaggtcgtcctgggattgaaacaatcctagtccaacgacacttaactcgaggacagtgcgagccctt

SEQ ID NO: 99576 - DNA, 122 bp, Homo sapiens
ctctggcccgtttcccagtctctgagcttgggccaaactctaggacctccggccccggtccgcccctgcctcaccaggcggtcccggcccctgtacgactccagcgccgacgccaggccgct

SEQ ID NO: 99577 - DNA, 122 bp, Homo sapiens
ccatgaagtacatttagcaacgtcaattaacaagttctcctcatttttaaccaatgcatgcgtcatatttttaagtgggtatttgtcccgtgtgtttgcttgcagggtgactgtccactact

SEQ ID NO: 99578 - DNA, 122 bp, Homo sapiens
tcttcggaagtagctaagcggattagaatggggctcaggcgcgtggctgatctcgaacggcgctctataccacccccaccgccccctagtaaccccagaggttattgttaattggagctgaa

SEQ ID NO: 99579 - DNA, 122 bp, Homo sapiens
ccgctgctcccaaggagccctgaccgaggtctgaccagcacccccgccccgcgagatggccgtccacacctccactcagcgcacgtgtcacgttggggtgcgagcaaggtcgggaagccggg

SEQ ID NO: 99580 - DNA, 122 bp, Homo sapiens
tatgtgtgcaacaaagacggccacccagagcagccagaaagtggaacggacccaaacacccgcccacaggagagtggacgagccaccacgtggtggagtgctacgcagccatgaaaaagcac

SEQ ID NO: 99581 - DNA, 122 bp, Homo sapiens
atcgtggctgtgtccgtggagctgcgccttccaagttaccaattccagtggggctgttcgcgtctgccaccaactttcctaagactgacctcgccagccgctcagaaagcagcgttcaccac

SEQ ID NO: 99582 - DNA, 122 bp, Homo sapiens
gcgacctgcagtcgccagtgggcgggccccagatatcagacgtcttaacagtgccccaaccgcttttatgcagggtgattccacgatgcaggagatctctgagcagcactgtgggggctgaa

SEQ ID NO: 99583 - DNA, 122 bp, Homo sapiens
aatgtgcattttaacaagattcccaggtgactcatgtacatgaggggctgagaggctgggcgtggtggctcatgcctataatcccagcactttgggaggctgaggtgggtggatcacctgac

SEQ ID NO: 99584 - DNA, 122 bp, Homo sapiens
cttatggaggcgactgggactctatcttgctgtatgtcttcagccagggataatgcatctcgatcgtccctttgggatgatgttctggtcaccgtcaaccctatcagacatgttccttagtt

SEQ ID NO: 99585 - DNA, 122 bp, Homo sapiens
aaagtgctgaataaggccgggcacatgactgatgcctgtaatcccagcactatgggaggccgaggagggcagatcacgaggtcaggagttcaacaccaccctggacaacgtggtgaaaccac

SEQ ID NO: 99586 - DNA, 122 bp, Homo sapiens
gtcctcaaagatcaattgggaacgaaagtgaaacacttaccagaagcatctcctctttcccgcactggctcctctgtctgtttgagatttagtaggccattgccgtttccgattctcactga

SEQ ID NO: 99587 - DNA, 122 bp, Homo sapiens
gaaggccacccccaggattcgcaggaatctgacagctgcttgtgactgtgctgaagatgccgagaatgtaggcagagcccgggcagggccggcgggcaggcggccacgcgctgcagcaaacg

SEQ ID NO: 99588 - DNA, 122 bp, Homo sapiens
tctagctcaagccttttctttgctctgttgtatgaccacaggcaagtcacttctcctccacggaactgtaaacagggagaataatacttacccctgagtttgcaggcattgaccgcattgtg

SEQ ID NO: 99589 - DNA, 122 bp, Homo sapiens
aggagggcgtccgcgtgtacagccagctcaccatgcagaaggccttcctggaggtgagcccgcctgcgctccggcgccacgcccctcctgcccctgcgccctcctctcccccgcccgttcct

SEQ ID NO: 99590 - DNA, 122 bp, Homo sapiens
ggtcccctcaggcgtccgctccccactgctggccccagagtgcgcccgggggtctagaggcggagtggccactcagcacagagccatcagcgaggtcatcccagccaaggagacgcgcgaat

SEQ ID NO: 99591 - DNA, 122 bp, Homo sapiens
tcaaatacccccttcctctgggaaaactttccacaaggctagatttctattctaggcttccgcgacacctgcccctcaccttcaaacaccgctcatattctgactttacatcccgcttgtat

SEQ ID NO: 99592 - DNA, 122 bp, Homo sapiens
cagagatgaggaggcgctaaacagttggttccctatcctgagggaaggaaaggcaagcctcggctccagatccggttccatgccatgttttggaatttgtgtttacgtctgccttcatcccc

SEQ ID NO: 99593 - DNA, 122 bp, Homo sapiens
atactctgctgtggccagaaccagtaaatctagcaggaaatcagaggccgaacatgatcccggactgctgccgttgcaagattcttggaggctgcagcgccacattctgagccagcacttcg

SEQ ID NO: 99594 - DNA, 122 bp, Homo sapiens
cggtggcgagggaggacctcatccaggagctgagctggcagaagttacagtagtgcacgacggcaatcagcgcggccgagcctgtgaacactgggaactgcaagaggcgaagggttaggaca

SEQ ID NO: 99595 - DNA, 122 bp, Homo sapiens
ccctcccttaacagtgctgttggccagtgatgcatgcccaagactcagcagctctcaggccgccagcagccttgtaagcattgctcctccagggcgctaagcccagagtccaggaaccaaga

SEQ ID NO: 99596 - DNA, 122 bp, Homo sapiens
gatccagcagaactgtttcagagccaagatcttgggacccacaaggaatttccctgtaagcgcgatgcgaggaggcacaggcttcttcatcttcgtggctgtccaattaggaagaaaatggg

SEQ ID NO: 99597 - DNA, 122 bp, Homo sapiens
aggtctcgtacggggagggcaaggccctggctgaggagtggagctgccccttcatggagacgtcggccaaaaacaaagcctcggtagacgagctatttgccgagatcgtgcggcagatgaac

SEQ ID NO: 99598 - DNA, 122 bp, Homo sapiens
attgtcactgtaggtgttgctgccatcatgctgatacaccactcgccctgctgccaggtccgctggtgtgaaatacttgcacccagcaggtgccccaaacaccaccagctgcccatgtctca

SEQ ID NO: 99599 - DNA, 122 bp, Homo sapiens
gcccaggccctggacacgcgtccggcccctgcctccgtgcccggcccccacgccgcctcccgtccctcagatctccggccggcgtccccacgaccggccccgactaggcccccggctgggcc

SEQ ID NO: 99600 - DNA, 122 bp, Homo sapiens
gctggagctgggaagggagaacggctgaagctggattgagctctgtggtgtttgcacccccgtctggacgcagggatcgggggcctgaaggcctgtctctgcagggcgagcggccacactgc

SEQ ID NO: 99601 - DNA, 122 bp, Homo sapiens
ctatgtatacaactatgagactgttctatatgtatcattgcgcaacctcggtttttgcttcgttctgttttaacctaacaggaaatcctgcatacctttccatttcagagcacttggagcta

SEQ ID NO: 99602 - DNA, 122 bp, Homo sapiens
gcttcgccgcccgggggcgacctccccgcaccacacgcttccccgaggtcgctcttctcccgcccccaggctaactctatcggccaatcagagcccgcggcggctccggatccgaggggccg

SEQ ID NO: 99603 - DNA, 122 bp, Homo sapiens
aggaggcaggctcatgcttaacatgagggaagactgtgatgggtactgaacgttgggtaccgacatgggtaaggatggtccccactttgagagattgtgataccaagctaggattttgtaac

SEQ ID NO: 99604 - DNA, 122 bp, Homo sapiens
atgagccccaaatacaccttcctctgcaagctagggctctcattgggattaagaggaagccgcgcggtcatacagactttggctgggatcccagctctgccatttcctcgctgtgtaatatt

SEQ ID NO: 99605 - DNA, 122 bp, Homo sapiens
aggaaaaggagagaaagtcgagcgactgtggggttagacggaggcagacagagcgtgggccgagcgatgcggggctgtgcgcccaggcggccgcgagttgtgactggagccacgatgcacgg

SEQ ID NO: 99606 - DNA, 122 bp, Homo sapiens
agggagcagccggggcacaccctagcccctccccagagggacccgggacccgaacgagggcgccccacctgggactccgggcgctctgcacctctgcgagcccgctttctccgccggggccg

SEQ ID NO: 99607 - DNA, 122 bp, Homo sapiens
cgttgggtgcagaagaggatttggtttcagttgctattcccgttgcactgtcgttatctgcgttgccctcgtctccagttgtggtatctgtgattgctgtgttgacagaggaacagtcatcg

SEQ ID NO: 99608 - DNA, 122 bp, Homo sapiens
catggaggcctcgcaggcaagcaggtggcagcccccaacattctgggcaggctctggggtcgagggagcacgttctgatgcttaaatagcctcaccttttatcctgactggggtagtcctgt

SEQ ID NO: 99609 - DNA, 122 bp, Homo sapiens
cacgccggagctaagttctttgggtgagacgtgcaacaacgcaggccccaaagctctctgcgcgcagcgccgcggggcttggccttctccagtcctcgggagtcagccaccgtctctggctt

SEQ ID NO: 99610 - DNA, 122 bp, Homo sapiens
ggggttgggcgggcagtgggggagaaaggtgggcgcctgagaaagaggcagaccagacttcgggagtgaggaaaaaccatcatgaggagggggatctagctagaccagcagctctcaaggta

SEQ ID NO: 99611 - DNA, 122 bp, Homo sapiens
acagggaccggtgggacactgtcgctcagcacctgggcattggcagagagtgtcagctggcgccgctgggacttggatggaatctgcccctccttttcactctggccaggtgcctgttgaca

SEQ ID NO: 99612 - DNA, 122 bp, Homo sapiens
gatttgcagactcctctcattagggagccgcctgaatctcttcccttagaaactaaaatacggatcgtgactacctccaggcaggggttttgcatgactgcctcctacctggaggtgacagc

SEQ ID NO: 99613 - DNA, 122 bp, Homo sapiens
aaagtcccgtagagagaaaggctcccccgcaggtgagaccactgtcctagacgattatcccggcaggtgagtttactgttacacattgcataggccgtgcaggtgatgccggagtcccgctt

SEQ ID NO: 99614 - DNA, 122 bp, Homo sapiens
gcaaaggggcgaagggaaatcaaaaaccggttgaaaaagaaaaaagtgtcttccctcaggcgtgggtcagagaatttggaaaggcctactctgaggggagtaaaacttcaccaggccctggg

SEQ ID NO: 99615 - DNA, 122 bp, Homo sapiens
acctccctcccctttttttccgccttctgccagcagaagcagcagccgcagcacctgagccgctactgccgctcactcaggacaacgctatggctgagcctgggcacagccaccatctctcc

SEQ ID NO: 99616 - DNA, 122 bp, Homo sapiens
tactcctccctgtttgtcatttatgaaattcctcccagcgacgctgcagacgaggagcaccggcccctcctgctgaacgtctgacatcgcggagcctcgactccggacacgcgcctgcacct

SEQ ID NO: 99617 - DNA, 122 bp, Homo sapiens
tcagcttccctttccaaaggtaaacacagagacatcggggtttcagcagtgcagaggtctcggagaagccctgagtcctctctccacctgggggattgcctccacctctgagcatccatgga

SEQ ID NO: 99618 - DNA, 122 bp, Homo sapiens
cctcgtcacagccgccgcctcagccgcggctgcagatctcgcggtgtttgccggccgccgcgccgccatattgtgtgacagtattttgatttggactgggctggcggagccgcggcgagagc

SEQ ID NO: 99619 - DNA, 122 bp, Homo sapiens
tccgggtgggcctagcagtcgctccatttatcgcttgagatctccagccttaccgcggctcgaaatggaccccaactgctcctgcaccactggtaagagaagccgaccctgcgccctaggaa

SEQ ID NO: 99620 - DNA, 122 bp, Homo sapiens
ggaacgcgcggggattgggcctccttcgttgttaccctttaccggcacctggctcgggggcggggctgtggtttcgcggaggaatgatttaccatcctcggacgtcctcggcactgcgaaga

SEQ ID NO: 99621 - DNA, 122 bp, Homo sapiens
ttaaaacggccgcaatgatactggtttctcccactatcatcacaagttattccctccggccgacccatcctgccgattaccacctggcctgtaggttaacttcatgtagccaattctgtgcc

SEQ ID NO: 99622 - DNA, 122 bp, Homo sapiens
aataccctgcagcctcgaaattctggcctcagggcctcagaatagctgggactataggtgcgcacccccatgcccggcaagagacaatttttttttttttttttttttgagaaggagtcttg

SEQ ID NO: 99623 - DNA, 122 bp, Homo sapiens
attacagcacccagaacagtcctggcacatatctggtgctcagtaagtgtttgtaggatccgtggatgaatgattgaatgtatagaaggatgcacaggtgaatgaacggatgtatctttccc

SEQ ID NO: 99624 - DNA, 122 bp, Homo sapiens
ttcccgggttgtgctcagcccctgcagctgccatcggctggagaagtccaggttaggaaacgcatccggggaggggatcctagagaaggggcgcagccaaatacccgggaggtgggataggt

SEQ ID NO: 99625 - DNA, 122 bp, Homo sapiens
tcacacaggctacccaacacctctgacgcctccatccggtcacacacatacccactaatacgtaggcttcacacaagcaggtccctctaggtgaccccagcgtctcaccctcctcccagcct

SEQ ID NO: 99626 - DNA, 122 bp, Homo sapiens
cgccagggggccccccgatgcggataaagggctgtttcttcccagcctctttggaatgcccggctgccttttgaaaggggatccccaggactccggtccagatctggggtttctccctcctt

SEQ ID NO: 99627 - DNA, 122 bp, Homo sapiens
ccctcagagggagagatggaagctggcaggacgcagttgctaccgcgcggacccggcccccgaccagccttggcccctcgcgcgccgggacagggccacaaatgactgcacctgggcttcgc

SEQ ID NO: 99628 - DNA, 122 bp, Homo sapiens
cagttcttttttttaagagatgggacctcgctctgtcgcccaggctggagagcagtgttgcgatctcgactctttgcagcctcgacctcccaggatcaagcgatgctccagcctcagcctcc

SEQ ID NO: 99629 - DNA, 122 bp, Homo sapiens
ggccttcagtctcttcaggccacggtggtcggggtccaccaggaggccgctctctaccgccgtccaggcctctgcgtgacgctgctcctccaggcagcactgcccgcggagaaggaacatgc

SEQ ID NO: 99630 - DNA, 122 bp, Homo sapiens
agcaatgcactttttccttttggtgtaaaggttatgtgtgctataaaaaatgactcctgccgtgagtgctgcggggaggtggaggctgggcttggggcaggaggtggtggtggtcaaagaaa

SEQ ID NO: 99631 - DNA, 122 bp, Homo sapiens
agccagagacgctgacgccatggggctggggttggggctgggccggggctttgggaggtccgaactccccagcagggagccagggctctgggccagttcccaggcccagttaatcttcagta

SEQ ID NO: 99632 - DNA, 122 bp, Homo sapiens
acagcagcagcaaaagcagcagcagaagcaacagcaacagataagtgttttgatgaattgcgagatggatagggcttgagtgcccccagccctgctgataccaaatgcctttaagatacagc

SEQ ID NO: 99633 - DNA, 122 bp, Homo sapiens
ccgccacgcgccccggtccattgtttcgcttatctgggttccaggcaggtgcgggcggcgcgcggggtccgcacgtgtcaccccggcggctggggcgccgggacccgcgggcgccggcaggg

SEQ ID NO: 99634 - DNA, 122 bp, Homo sapiens
gccaattttgcctcaagttttaatcctaaagggatgctggattttgtcaaatgttttttccgtgtccatgaccttaattcttaaccctggctgctctttagaatcctccaggattaagcttt

SEQ ID NO: 99635 - DNA, 122 bp, Homo sapiens
aatcatccttgccgcttttttgctcctccaggctgtagagggcgacaaaaaccgcggaggcgcattggggtggggggtgtctactgaaggccgctcccgacgtgcgcgtctttacgtagacg

SEQ ID NO: 99636 - DNA, 122 bp, Homo sapiens
ggctggacccagcgcttctggctcctccccaggggcggggagctaaggggagagaccaatcgtgaggacagtgctgactcacaggctcagaggggctgagcccccaccccgccccaacctcg

SEQ ID NO: 99637 - DNA, 122 bp, Homo sapiens
gagaccaagacagaaagcaagaatgagtgagagagagagagtgagctctggagatatggacggagctgggtttaggatgaggcaagggagatacttagacaacaaactgtaaggagacactc

SEQ ID NO: 99638 - DNA, 122 bp, Homo sapiens
gaagctggaggtcgggctggggggggcgggaccccctcgtctgagtctgcgcattgagagcggaggcgggtccaggcgcgggctcgcgcgcccgggcgggtcctcgcgggggcggagtctgc

SEQ ID NO: 99639 - DNA, 122 bp, Homo sapiens
cacctactcatgtacatctttcatgggtacatacacgtgcacacacacacgtgtacacaccgatgcacacactcagttcaggaccacagtcattacccctccccctgccctgtgcccctacc

SEQ ID NO: 99640 - DNA, 122 bp, Homo sapiens
ttaggagcacagcactgacggctgcagtggctcgaaaggctgaaactacaaagtatggcccgtgggtgactcgggcacagacctgccgcgtgcaggtctggccctggggagcgcatggtgtc

SEQ ID NO: 99641 - DNA, 122 bp, Homo sapiens
cttcctcaagttccttgtgagattaaaccaccagtgggtggtttaatgcacttgtgtgtacgtaatttcattggtttgcagagattgcacagcagatgctcacgtgtacttaaaaaaaaaaa

SEQ ID NO: 99642 - DNA, 122 bp, Homo sapiens
catggggaggccccgccctaccaggcacggaggagccccagcaggtaattagtgaattcacgggtgagacgaggctcagccgaagcctcctgggacccaaggagaggaacagccaggcgaca

SEQ ID NO: 99643 - DNA, 122 bp, Homo sapiens
tgcctccggtgacacacattcacaccatctgctgtgaaatacgcgagtgccatgcgtgatcgcattgtctccacctcggatttgcaccgtccctgtttgcacctatcctggaaagccatgtc

SEQ ID NO: 99644 - DNA, 122 bp, Homo sapiens
gcagagttgagggggtcagcgccgggtggagttgccgacgggcggggggcgtcactagtccgcgtaggcacctccggggtccgcaggcgaggtgggcgtgcgggccgaggcgggttggcgag

SEQ ID NO: 99645 - DNA, 122 bp, Homo sapiens
tgtcacaccccatgggcgctcagttttgtttttaaacccataggggagacagtttccggacgcccaacaatcacagggcggcccaggaccgagagagagcaatagactcgcctcttgcttcc

SEQ ID NO: 99646 - DNA, 122 bp, Homo sapiens
ccaactgcagcatcttccgcttttgttgtctgagcgcggccgcgggacaagggatgctggcgggcggcaggggcgagcgccgcgggcgagaggcggctcccgacgcgagtgcgcagcgcccg

SEQ ID NO: 99647 - DNA, 122 bp, Homo sapiens
ggccatcacgtccccgcgagcgccgcctcctggtggcctctgagtgggaggaccttccagcgcttccctcactgtcctcatgggcttcctgccctgagggaagttggctcgaagggcagaga

SEQ ID NO: 99648 - DNA, 122 bp, Homo sapiens
gaagttagtcccttgcggtgatccgtcctttcatcctggcgtttgcctgcagcaagatggcggcggtgtcaatgtcagtggtactgaggcagacgttgtggcggagaagggcagtggctgta

SEQ ID NO: 99649 - DNA, 122 bp, Homo sapiens
caacccgctctcttgaactcagaagtaagttcctctggttttgctagcctggaacagcggcgctcgcttcggtcctctatggcgtggacccagcagcccagccacgcgtcttcccagtcttt

SEQ ID NO: 99650 - DNA, 122 bp, Homo sapiens
gggcctgcgctcgctacctctttcatcccatgcagccagatgagaatccaactgaacatccgagctttatgcatcaatatcctgtggcacatacactttaggctctttgtcaactgaagaac

SEQ ID NO: 99651 - DNA, 122 bp, Homo sapiens
ggaggggagggaaaggggaggagtgcctcgccccttcgcggctgccggcgtgccattggccgaaagttcccgtacgtcacggcgagggcagttcccctaaagtcctgtgcacataacgggca

SEQ ID NO: 99652 - DNA, 122 bp, Homo sapiens
gcccagcgggtgtccgcggagactggatggaaccgggttggaggacgcccagcgggtgtccgcggagactggatggaacagggttggaggacacccagtgggtgcctgcggagactcgctgg

SEQ ID NO: 99653 - DNA, 122 bp, Homo sapiens
ccttttgtgctgccagctgcagtgggttcatggtgagagctgagttgatgcatgcgagtgcgagggtgtgttaatgtgtgcacatgtgtgactgtgtgagggtgtatatgtgtgtgtacata

SEQ ID NO: 99654 - DNA, 122 bp, Homo sapiens
gcccatcgccgcgagcatggctcagacgtcctcctgctcttctgcggtccaagcaggcggcggtcccagcaggcgacggtccccgccccgcctcgctcccagccgtgccccgcctcccagcc

SEQ ID NO: 99655 - DNA, 122 bp, Homo sapiens
gcggggccctgagcacctggggtttcctgagtttctagctcttgggaccacccggtttcacggatttcaagggtttgggcccactgagcccttgtgggtgcccagtcccagagcagccaccc

SEQ ID NO: 99656 - DNA, 122 bp, Homo sapiens
cgcggaggtcccggcgtctcggtggtcccaccgcgccggttgtcgccgcgcgaagccgcccgggccccgggacacaaggacccgaatcaggagagtctctccagtcggcatggtggctctgg

SEQ ID NO: 99657 - DNA, 122 bp, Homo sapiens
caccaggacctgcttggaaagagatacttcttcgttcccttcctgctatcccaggccttgcgtccccattaggcgcgtctcgccctgtctgttaagcaccctccaaagtcatctcagtgagt

SEQ ID NO: 99658 - DNA, 122 bp, Homo sapiens
gagcgtggccgaggcggtggtgttgccggctgagttcgtcaccatgcacgtgtactggcccgtgtcctgcacggtgacgttggtgaagttaagcgtgccgtcatgcaggacggagatgcgca

SEQ ID NO: 99659 - DNA, 122 bp, Homo sapiens
gagagggagggcgcaggccgggtgggggaggcggcggccaaatctcagccacagcaacagcgccccgcagcgctcaccgcccgcccccggccgccgccgccgccgccggccgcggccccctc

SEQ ID NO: 99660 - DNA, 122 bp, Homo sapiens
ttcaaacttctagcctcaagcaatcctcccacctcagcctcctaaagcactgggattacacgtgtgaattactgtgcccagcttgattttctatattgtttttctgtttttcatttcaatga

SEQ ID NO: 99661 - DNA, 122 bp, Homo sapiens
ggtcacacggtcacaccggccccggccagcctgagcgaggcgcagccggcgggtcccttccggcatcagaaagtgccctttccgtggcaccagccccctagctccgtgcaaacttttcatgc

SEQ ID NO: 99662 - DNA, 122 bp, Homo sapiens
ctggcggacggacgtgctgctgaccgagctggttcgcccccggttcggctcgtggagagccggcccctccgtgagtcttctgtcagtcattggctccctgcggtttccttggggacgtggcg

SEQ ID NO: 99663 - DNA, 122 bp, Homo sapiens
caccggtcaagtctcccctcaaatggcacaacgttaggggtgtcgctggtttagcaggaccgtctctctctcctgatctataccacgtgactctatgctttcttgtttgcagcatgtgatag

SEQ ID NO: 99664 - DNA, 122 bp, Homo sapiens
agagctcttacccacaactaccaacatccagcgaccaccagaggaccctggcgctccacccggcgctccgaccagcgttcccttgggcgatgcagttcaaccacagaacccgtatgacactg

SEQ ID NO: 99665 - DNA, 122 bp, Homo sapiens
taagattatgattccttggtgattcattataccatatttggcacttgaaaaaggaccaaccgtggaccagtgagtagcatggagctgacatgaaagaaggaagttgattaatttataagtgc

SEQ ID NO: 99666 - DNA, 122 bp, Homo sapiens
accaggcctaacatttaaagcccgtctttccagctcctagatcacactcctggtgctttccgcaccacactccccacctcagcagacagtgccctgaactcgaggcaggcagagatcctgac

SEQ ID NO: 99667 - DNA, 122 bp, Homo sapiens
gcatggggcgcctggcctcgaggccgctgctgctggcgctcctgtcgttgggtgagtgtgcgcggggctcagcggggcacacggggactggcgaggccctggagggctcggcggggcgcggc

SEQ ID NO: 99668 - DNA, 122 bp, Homo sapiens
caggagctagacatggagaggccatgcacgctgcaggaggctagtgccagagacgccacccgtgctgcctgcctactgaacacaccagaaccagggtgaaaaaagcctttccttctgcagtg

SEQ ID NO: 99669 - DNA, 122 bp, Homo sapiens
caggacacttgaagtctgctggaacccccggatgtggggccctctgaccccagatgagggcgtcagtgatgctgcggtgctgcacctgcccgacccctgcacctgacccggggcctcttctc

SEQ ID NO: 99670 - DNA, 122 bp, Homo sapiens
ttgcccacactacaacgacagaggaagcctcaggggaaccctcctcctctcccgaatctccgggcttcctgcatccctgggaggcaatgtccattaattccagctatgaccagcagagggca

SEQ ID NO: 99671 - DNA, 122 bp, Homo sapiens
agcgggatctcccggtctccgccacagacccgggggtcccctgctcctgcactgaagacgcgcgcggcctccgttgcttatccagatccccggccagaactctgccccggcaccgaacaccg

SEQ ID NO: 99672 - DNA, 122 bp, Homo sapiens
cacaaaatcgtgaacaatgtaaaatggctgatttaagccaccaagccttggcttgtacagcgacgggtgaccaaaacaccacttcttccaagaggctctaagcagcctcacggagacataga

SEQ ID NO: 99673 - DNA, 122 bp, Homo sapiens
ttcttttttcttttttttgagacaaggtctctgtcccttaggctggagtatagtgggcaccgaccactgctcactgcagccttgagctgctgtgttcaaaccatcctcccacctcagcctcc

SEQ ID NO: 99674 - DNA, 122 bp, Homo sapiens
gcgacgcggccaagcagaggctggtggtgctggtcaaggacaatggcgagcctccgtgctcggccaccgccacgctgcacttgctcctggtggacggcttctcccagccctacctgccgctt

SEQ ID NO: 99675 - DNA, 122 bp, Homo sapiens
gagggttggaaatgttttttacccccagtctgccctttgaggaacatctgtttctttgtgcgtgtgtttaaatttatgcctgttggagagaaagttaccagaagcctttctgtaactgtaac

SEQ ID NO: 99676 - DNA, 122 bp, Homo sapiens
tgctgatctaaaaatctccaagatgaccactagaaaaagtggcaggtcgtcgtatagagtcgagggagaaagaaatagatgaaacaaagggggacaaaatacacttagagctgtttcttctt

SEQ ID NO: 99677 - DNA, 122 bp, Homo sapiens
ctccttccgcccgccagaggtcgcaggctgcgagagcaggttcctggtttggcaagcactcgccccctcaggcccgttcattctcgcgagagaaagcgcgaggcctgccgggagtgagcgcg

SEQ ID NO: 99678 - DNA, 122 bp, Homo sapiens
ttttgttccttgagttatatggaatttaatatgtctacttaaatcctaatgataggttcacggtcttatggtagggtgagtactaggacagagggagccatgaggcttacaaagtgcaagag

SEQ ID NO: 99679 - DNA, 122 bp, Homo sapiens
acagagggcctcactggggcccgaggccctcagcttttactcagaataagatgggagccacgggagtgctttcacctttcccatgctcacccattctacgtttttcttctgcattcctcatt

SEQ ID NO: 99680 - DNA, 122 bp, Homo sapiens
cacatgccaagggaacagacctgctgagcctcccatgcctcatcagccaatggctcatcccgaagcagaagccagttgtgcaaggcatgactgtgcattgtttcctatactcacttcccttt

SEQ ID NO: 99681 - DNA, 122 bp, Homo sapiens
ggactggcgatgcgtaggccactgagagcacccggagtccgagtgacggaatcaggcgggcgcccgcgtcgctaaggagtgcgtcacagtgcgcgggcggccgggggcagggccagggctga

SEQ ID NO: 99682 - DNA, 122 bp, Homo sapiens
cgagcggtcgaggggatgggctgtgtcgcagtccgactggccttatagcggtcggtgccccggaggccagctcggccaagcccaccccgcccgcccaagtcccgcccgcgccccaccctgcg

SEQ ID NO: 99683 - DNA, 122 bp, Homo sapiens
agcctggggagctgagggcccggcagccgccttagagtcctggcttggccctgggccctgcgcctctgacccaccgccccttcccgggcccctcgattgttcccccgggagcggccgtcagg

SEQ ID NO: 99684 - DNA, 122 bp, Homo sapiens
aaaagttctccaggtttttcttttggtaggcagtgcattaagtagggcatataaggagtccggggaatttgcatggatataaagatgtgctattttaagctttcctgcacatgccattagtg

SEQ ID NO: 99685 - DNA, 122 bp, Homo sapiens
agtaagatgagcttgtcccaggagtcagctacccaggctatgacacctgtagctgggcaccggcagcctcttgtgggcagaggaggcagccaggaggcctatgaggcacctgtgggatctgc

SEQ ID NO: 99686 - DNA, 122 bp, Homo sapiens
ggccgggctgggagcgggcccctccagagaggacaccgtggccgtggtgacaggagggaccggaggggacgagggggccatgggaggtttggtctcggcggccgaggccggaaaggcagcct

SEQ ID NO: 99687 - DNA, 122 bp, Homo sapiens
gttgccggggtggggggggcgaccggggcaggggcgcgcagccgctgggaacacagctgccgcacgtagctcggcggcggcggcggggacatccgcagccccagccggccccgctcacgtgg

SEQ ID NO: 99688 - DNA, 122 bp, Homo sapiens
ggcgcctcctgttcccgggagcagcgacagcctctaatttcctgtgacagcagcggcccccgcaccgccccacgctgccgtgctgtcagagctgctccgggcccagagctccagcagccctg

SEQ ID NO: 99689 - DNA, 122 bp, Homo sapiens
cagacgtgaagaccttaccccgctatgtcgtcgaccccggagaccggaagtggactggcgcggtggccgctgggaaatacagtcccgaacagaaaaagcctcagaagccttgagctgtgatc

SEQ ID NO: 99690 - DNA, 122 bp, Homo sapiens
agcatgagggtcacacggcgtctccagtgtcacagctctggggcctctgcccgcacctcccgactccacctgatgcagacaggcctccctaccagccaaggagcacgcgggctcggtccact

SEQ ID NO: 99691 - DNA, 122 bp, Homo sapiens
gtctctctctgcccagggagtttgctggactttctcaagggggagacaggcaagtacctgcggctgcctcagctggtggacatggctgctcaggtgagtcagcccctcccgcctccccacac

SEQ ID NO: 99692 - DNA, 122 bp, Homo sapiens
ggctatggggcggctcttccctgaggccccaggcctggaccccgtcgcgctgtctggcagcgtgtgctgcatttccctctggaggattttcccaccggaacctgtgtgatgtgttgtggagg

SEQ ID NO: 99693 - DNA, 122 bp, Homo sapiens
ccgagagccccgcctgcaggcggtgtagatacatgtagatactgtagatactgtagataccgccccggcgccgacttgataaacggtttcgcctcttttggaagccgcctgcgtgtccattt

SEQ ID NO: 99694 - DNA, 122 bp, Homo sapiens
ggccgtctcggcatttccaggttcttaacgctcttgatttttaccctctaggactcattgcgtacacgccctcaccgccgcccagtttcggttcctaacaaaagcacgttcctcatcagcca

SEQ ID NO: 99695 - DNA, 122 bp, Homo sapiens
caagctttctcttgcacctatctgatggaggctttgtcagccgctgctggaacctcaactcgagcagaaacagctgaaacatctactcaagctgtcacccctgtgataggtctcataaatcc

SEQ ID NO: 99696 - DNA, 122 bp, Homo sapiens
agccctgcctgctgataccacctcacagacgcaggcgaaatgtcttcaccagcttcttctcggttgccaagggggcctgctttcaaggggttgttttgtatggggtgtgggtgttaaccagg

SEQ ID NO: 99697 - DNA, 122 bp, Homo sapiens
gccgccgcgcgctcgggctgtttcttaacttgtgacttagctcctgggcggcagaaagtgcgcggacggcgttccggggccggacgttcccccgctggcaccccaagccgcgctccgcagcc

SEQ ID NO: 99698 - DNA, 122 bp, Homo sapiens
aatgtcctagtcggcagcagtgtcggtgttctagaccggcagccgtgggaacgtcctagtcggcggcagcgtcggtgctctggaccggcagccgtggaaacgttctggatccgagcatccca

SEQ ID NO: 99699 - DNA, 122 bp, Homo sapiens
acaaagtggggtgggccccgcctgcagggcgtctgtgggtgcgaactgggcagcgtaaggcgcatcctccagtgctctgcctgctgcctccactaggtgcatttcagagggatctgccagga

SEQ ID NO: 99700 - DNA, 122 bp, Homo sapiens
gcgtaactggcacagtgcggggagcccgggactcccatgtagtagagagctgtggggtgccgggtgtcaaatctacctcagcctgaggagaagccagagtgtgggcaggtgggggactctgg

SEQ ID NO: 99701 - DNA, 122 bp, Homo sapiens
aggtctgctactgtagctcttccattctttagggatagactgatttctctgcctgtgaaacgcagaaatatgtttccagataattccacctatgcttatatactgggacggcagctgctctc

SEQ ID NO: 99702 - DNA, 122 bp, Homo sapiens
ccctgaataacgaatctcagtttttcttaaggtcctcctcctctgagctacactgtgggtcgaaaagggcaggattatcataaatggaaagaagctagagacattttagttaaataaaaaga

SEQ ID NO: 99703 - DNA, 122 bp, Homo sapiens
cgcctgtcggaagaaggggactttcccacaggtcagagggcagagtcccagcccagtctgcgagtcagggggcagagatcccgcacgggtgggacgggaagggggcctgacgggtcaggggg

SEQ ID NO: 99704 - DNA, 122 bp, Homo sapiens
gagcaaactcccaaggaagtaaatcccctctctccctgccacctaagtagcaagtaaacccgtacttagccttagaactcgaggttcagtctcggtggagacgggtcagcccttgtccccgc

SEQ ID NO: 99705 - DNA, 122 bp, Homo sapiens
ccgaggccgcactcagtgcctgggtctcgcgcagctccagggctctcaggcgacactgggcgtttcctttccggcttcggaaagttttgttttggttcaaggaaaggcgccctgttgaccaa

SEQ ID NO: 99706 - DNA, 122 bp, Homo sapiens
ttgcggtgcagggtgggtgggtgcagtgaggctggagccacgctgggggggctgggctggcggggggaggctggagccgcgccggggagagggaggcggcggttgggtgctggagggcgctg

SEQ ID NO: 99707 - DNA, 122 bp, Homo sapiens
ccagggcttctccatcactggctctccccaggaagcagcctcagctggcgtgctggggaccggagctggccatgagggaggggtggacagtggaggaaccggctgcccagctcagcagggat

SEQ ID NO: 99708 - DNA, 122 bp, Homo sapiens
gagggagccgcggaggactggcagctgcagatgctggagcaggccagcctgtggctgggccgtagcttcctgctggcaggcttcctggtatcgagcagctgccccagcctggagcaggcggc

SEQ ID NO: 99709 - DNA, 122 bp, Homo sapiens
gatgaccgtgcggaagccgttgaagtgccctgccgggcaggggaaggaggaggtgctcttcgagctgttggtgtccagggcactgggaatcgcagccttccagccctcgaaatcggtgacgt

SEQ ID NO: 99710 - DNA, 122 bp, Homo sapiens
ggctctaagaaatgagagtctggcagttggtgatagctgtgaatgtatgcaggggacctgcggatccatacaagaggagagggcacagagctagctgggggcagaaccaggctggggctcta

SEQ ID NO: 99711 - DNA, 122 bp, Homo sapiens
ggagctgacagtccaatgagggagtctataaagttcaggccagacaaaagcagagagaaccggagaacaggctggatgcgtaacatggcagccccacctaatctgtgagcggtgggtgcaac

SEQ ID NO: 99712 - DNA, 122 bp, Homo sapiens
ttccctgttgggtcatattccatctctaactctggaatcttgggtattgggctctccaggcggggggccctgctcagggaggcagtagggagccaaacctttaaccagaggatgggataagt

SEQ ID NO: 99713 - DNA, 122 bp, Homo sapiens
ggaagtggcacctgcggccggggaggcagggcctggattttgctgccccctggtggctagcggcctgtccaggcaaaaggcttggacctgcagcccctgtggctcagaggaagagacagagg

SEQ ID NO: 99714 - DNA, 122 bp, Homo sapiens
ctgctgagcagtgccaggctggagggacgctggctgaagggcgccagccgggcacccacccgccacctcgggctgatggagagatgacccgccctggccctgtcctcgttggcgatggatgc

SEQ ID NO: 99715 - DNA, 122 bp, Homo sapiens
ccttagatgttcgccaagtacaatcccaacacctgggggcttaataaatgcatgcttagtcggttttatagatataaataaccttgtgaagtgtctttataaatttgttcccatcttctgga

SEQ ID NO: 99716 - DNA, 122 bp, Homo sapiens
cggactggaatgggtaccgagatgaaatgctgggtgcgctccggctccccccgcccgccccggggcagaaggtttagggctgggaagaactctgattaggtttacagcccaggttcagccga

SEQ ID NO: 99717 - DNA, 122 bp, Homo sapiens
ctccgctctctctcccgcccggggcttccaccgcaacttctgtgggcgtcgcatcgcacgcgtgttcaaggacacccaggaaaaggcttcttagggtcccatcctggggcgctaaatgggaa

SEQ ID NO: 99718 - DNA, 122 bp, Homo sapiens
accggtgctcgcagcccctgtcacgtaccccctggcttgctcaatcacgaccctctcacgcggacccccttagagttgtgagccgttaaaaaggacagaagttgagcacctgaagagctcgg

SEQ ID NO: 99719 - DNA, 122 bp, Homo sapiens
cctttcgcttcctcttcttccggtcccgttcctgctttctccgccgccttttctccaaggcggcaggggacagctccttggcactgccctgggggaaagaggcacccactcattaaagttct

SEQ ID NO: 99720 - DNA, 122 bp, Homo sapiens
cggagctcgctcgcgctagggcagtccttttgactttttaaaccaaatttgaacacaatccgagctcctgcaggggtgcgggagcttgggtgggcgcggggccctggggcgcgctgggtgtg

SEQ ID NO: 99721 - DNA, 122 bp, Homo sapiens
attagagggcccattgggttctaagccacctcctttggggttccaggggcagcctgcactcggaaggctctgggctgcagcttgagatactccaccggccctcactctccctcccgaccatc

SEQ ID NO: 99722 - DNA, 122 bp, Homo sapiens
ctcgtcctcaggtctaagggcgacctcaaagacccctttacccgcacccccaaggccccgcgctgctgcctaagttagtgacaatggccgtagggcaaaccttcgggattacttgcgtgccg

SEQ ID NO: 99723 - DNA, 122 bp, Homo sapiens
cagacactgcggcagcagctgcttccagagtccaggaaatctggtgacactattcttattcgtggtttggcagattcagagatggtggcagcttgggaggttgcgacagcttcatccctggt

SEQ ID NO: 99724 - DNA, 122 bp, Homo sapiens
ataacctgtgaaaactgcagattgtttacttgcattgatttgacttttaattggcaacaccgtattctgctggggagggcaagagagggcgtgtgggtccccgtgtccacggactgaccgca

SEQ ID NO: 99725 - DNA, 122 bp, Homo sapiens
accagggcgcagcctcagtgcctgggggtcggcagcagccagcgtcaggcggctcccgcacgcttcttcctaggcggcaggccgtggctgccacgtgactcccgctaacaccggatgatggc

SEQ ID NO: 99726 - DNA, 122 bp, Homo sapiens
gcactaccgaggtttagcactaagatacggcttcagagctgtcactcaaataattccctacgactggagggtggtacctggttgtctagtaacctctagggctttgagctaacagcttggga

SEQ ID NO: 99727 - DNA, 122 bp, Homo sapiens
gcggggacgcgagcggcccagacaggaagggaggcggtggcgcagctctggtgcgcagcgcgccgcagcgacggaacttctgcaaaagctgcctgcccgcgcgttatcagcggcgcgcaggc

SEQ ID NO: 99728 - DNA, 122 bp, Homo sapiens
cactgaattctgctgccagccacgtccttgatactttgtgggtgatttatttcattggctcgctattacttggcagcggcggtggctcctcaagccagcgtgggctccaggtggccccgggc

SEQ ID NO: 99729 - DNA, 122 bp, Homo sapiens
cctgggctcaagcgatcctccatctcggcctcccaaggtgttgggattacaggcgtgagccgccagccaggcctgatttgattgtttctccactaaaccactatgatgataaagactgcatg

SEQ ID NO: 99730 - DNA, 122 bp, Homo sapiens
cagaacggctccgctcctcctccaggtgtaaagcagaggccaactcgagggctgcatccccgaaattgttgccaacctcagatttgatgaggggggaccacatactatttaaccttacgaat

SEQ ID NO: 99731 - DNA, 122 bp, Homo sapiens
acacgcctgtccacacccacggaatgcagggtagagagcgagcccggcggtgactctgggcgcggggtaaggcggtgtaaatgcggggtcagccacggtggcaagtgcaccatgctgggggg

SEQ ID NO: 99732 - DNA, 122 bp, Homo sapiens
gctgcctagaaggacccctaagctaggggcgtccactccagagcctgatccaaaacagaacgctaacggccgttgcccttacatctctcatttggaagtgacaggtattaaataacggcata

SEQ ID NO: 99733 - DNA, 122 bp, Homo sapiens
tccatccacttgagtcttttacaggcaacctcagaacccagcagctgaggggagggcacccggtgcccttgatatggccgcagcaactgcaccgcaaagttcagccttctcttctttgacag

SEQ ID NO: 99734 - DNA, 122 bp, Homo sapiens
accatttggatacataggtatggtctgagctatgatatcaattggcttcctagggtttatcgtgtgagcacaccatatatttacagtaggaatagacgtagacacacgagcatatttcacct

SEQ ID NO: 99735 - DNA, 122 bp, Homo sapiens
ggctttctgcaggggaatgaggaactcaacttttccaaaagcagcaatcataagaaaccccgctgagggctctccgggcacctgaaggagccctgggaggatggcgatgttgcctatggatg

SEQ ID NO: 99736 - DNA, 122 bp, Homo sapiens
cgccctccactctcacgggggcgggcccaaagtcactagagttttgctcctgggacgggacgtccgagaggtaagaggctgacgtctaggtgacgcgccaacttaatcatgtctgacgtcac

SEQ ID NO: 99737 - DNA, 122 bp, Homo sapiens
ttaatcagcacattcagttctcttcagcattcttctttatagtgcctacaatgcctgggccgtgcagttgtgtttcagagtgcccacctctggcctctttccacttaccagaaaaaaaaaaa

SEQ ID NO: 99738 - DNA, 122 bp, Homo sapiens
ctcctcccagtccccaggaagtgcacagggaagcggcacctttgttcctggagagaattccgggttgtccaaggcacatgtctgaaccgcttcgctctctttgccgttcccttgcccctttt

SEQ ID NO: 99739 - DNA, 122 bp, Homo sapiens
ctgtttgtggcgttctcatcttatgcaaaacctcctgaaataaatcagtcatcctgcaagcgggaggaggcgggggccagaggaggagggagaaggtggggagccaggggatgggacgccct

SEQ ID NO: 99740 - DNA, 122 bp, Homo sapiens
gcattgggaagtggtgacacacggttacttcggcttgggtgtcggtgaccaggtacgccacggagccggccagggtggaggagggaactgtcttctgcccaaactcagagtaccggaggcct

SEQ ID NO: 99741 - DNA, 122 bp, Homo sapiens
aaccacagggcagaggtctcagcccgtcggggctcccagccagatggggaaggagaatttcgaaggaatcgccttacaggcatttgaaactctgcaggcagaggccaggggaatcccgggtg

SEQ ID NO: 99742 - DNA, 122 bp, Homo sapiens
acctaaaagttgtggctggactgtgggcggggccatagtgttgcttgttcagctgtgtggcggggctcggacgccgggcggaagctctgtgggcggggccagaaagttttgccttactggaa

SEQ ID NO: 99743 - DNA, 122 bp, Homo sapiens
gtggtggaagtcggagcgagtctcctgggcccgaaccggctgttggaagtgcgagggcaccgagagccacggtacctgtgagggatctctttaacttcctcagatgggatgggggaaagatc

SEQ ID NO: 99744 - DNA, 122 bp, Homo sapiens
cggctgcggctgcggctggagatgggttcgtgctgcagagcggatccgcctggtgtcgaacggcgccaattcctttcaccgagttcgcgagggagacgcggagactcgcctggcgcgagcga

SEQ ID NO: 99745 - DNA, 122 bp, Homo sapiens
cgcccagagccgaataaacaagagttccgtgtttcagtctctgcttctctgtacctatttcgacctctcagtcgaggctgggtctctaatatacctttctctattagccatgctgcttctcc

SEQ ID NO: 99746 - DNA, 122 bp, Homo sapiens
tccccgtgcgccaggcccgcgcggcggctctgcgactccgcgccgcgctcgcccaactcacgccggttttatatttagaaagagctgagccatcctcccagcggcccccccgccgggcccct

SEQ ID NO: 99747 - DNA, 122 bp, Homo sapiens
aagcgtaagatacatcagcagtcagggcaaatactgaggatgccatagcagcaccacactcgagaccatgtatagttagagatgacctcctgaaaggatctgaaaaaaaatattcctgacca

SEQ ID NO: 99748 - DNA, 122 bp, Homo sapiens
ccgagccaggcagggcgctgtcagccttaatgtgagcgctgactggcagcgctcagcccgcgctcagcccgcaggaagcacgaccagtgaacccatattgctttgacagttgcactcatcta

SEQ ID NO: 99749 - DNA, 122 bp, Homo sapiens
aagcgtggaaagaggagaagggcgtataccttgtgaccgcctctggttgtcttgggctcgcgcctggcgccgctacgtggagtcgctctctcgtcgtcacttttggctgccgacttgttgag

SEQ ID NO: 99750 - DNA, 122 bp, Homo sapiens
tcgcccgaccttcgtgagccaaggctgagtttattgtcagaaagatgactaagaaatccccgacacagtgtatcatcagcattatgattggagaaacaacacctacaaaatctatgattcat

SEQ ID NO: 99751 - DNA, 122 bp, Homo sapiens
gccggagctacgggctgggggcggtggcgccacgtctgactgggggcagggacctgggcgcgccgttcaatccggagccccggcgtcgacgcgcggcccactgggtgagccaatgggaaggc

SEQ ID NO: 99752 - DNA, 122 bp, Homo sapiens
tgcatatgcatgagggggcggggccgcgccgcggggtggggccgggggggggtccgggggcgccccaggctttaaaggcggtggagggcgtcgcctgccagcgccccggcccggcgcgcgcc

SEQ ID NO: 99753 - DNA, 122 bp, Homo sapiens
gggtacgagacccggcgcttacttgtaggtgaggccgtcggcgctggcgaagagctgctgcgcggtgagcccatcctcgggcacgtagccggtgccgccgctgatcaggtagtccgccatgc

SEQ ID NO: 99754 - DNA, 122 bp, Homo sapiens
cctgaacctttactcgtgaagagtgacacacaaaccaaggccaaactaaaaaacaaaatacggaaaagtgaccccgcatgtttgggaaccatttaataagaggcctcaggtgcgggagccaa

SEQ ID NO: 99755 - DNA, 122 bp, Homo sapiens
aaggctggatcccttggagtacaatcttctcactgggcacctgctggccataggccagcccgcagagagcagggcaagggtacgcatgtgcccccgagtggctctcttagccaggctgggcc

SEQ ID NO: 99756 - DNA, 122 bp, Homo sapiens
tcttgggcttctgcagggcggaggcgggggctggtgcgggagcgcaggggtccaggctcacggggggcgacggcagagacggcgaggccacggccactggtggtggcgctggagccagactc

SEQ ID NO: 99757 - DNA, 122 bp, Homo sapiens
cttccctgcggctcccccggctttcggagcccgggggcggcctgtggcgcgcggagcccgcgccggactgcgcctctttggaccttgaggggaaacatgcgtttgccttggatcgtttgaaa

SEQ ID NO: 99758 - DNA, 122 bp, Homo sapiens
aggagcggccggaagtagccggaatctctgaaagactgaccgactgactctgacaggatccggggctgagggaaggaggcggcggccatggagttgggcgagctgctctacaacaagtctga

SEQ ID NO: 99759 - DNA, 122 bp, Homo sapiens
gtgaaggcccagtgagagcatgggcgcggatgccatcacgctgggcgggctcgtccttcccgtggggaacctgccctgcaccccgcagccctggcctcctgccagccataaggagagcggaa

SEQ ID NO: 99760 - DNA, 122 bp, Homo sapiens
gccgcccgcgtgggccgcggtgggaggcgccggtggcaggttcccgcgggccccggtcggcgaacagctctgcaaggaccgccgcaggccacaagtgcacggggtgccaggagctccccgtc

SEQ ID NO: 99761 - DNA, 122 bp, Homo sapiens
tccttaggttgaaatcacagttaaaatatagctaaagactcagctgggcgtggtggctcacgcctgtaatcccagcacttccggaggccgcagcaggtggatcaaccgaggtcaggagtttg

SEQ ID NO: 99762 - DNA, 122 bp, Homo sapiens
aaacctcagtacctaagtctgtcattaccagttttagtactttccaaaaatagcaattgacgtaaaataaaccagtactaactagaaccaagaaatcagagatctaattcatctttaggttt

SEQ ID NO: 99763 - DNA, 122 bp, Homo sapiens
ctccagttctcccaaagggggacccttcctagtggggggtcctaatcctcaagcatcagccgaggacttggcttcaggccagtttcgactctccagctcccataacaacccagttccacgac

SEQ ID NO: 99764 - DNA, 122 bp, Homo sapiens
agccggctgccatttctacgcagtgtgcaatcagcactgtgacattgaccgcttccagggcgcctgtcccacctccccaccgccagtgtcctccgccccgctgtcctcgccctcccctgccc

SEQ ID NO: 99765 - DNA, 122 bp, Homo sapiens
ccgtagggttctttctcgaggactctaccctcctcccccacgtcctgtctcagctgcagtcgtaagtccgtgcaccatccttgacgttttgctgccacctctgtccacattcttcttggatt

SEQ ID NO: 99766 - DNA, 122 bp, Homo sapiens
atcagctagcactgggttggacgacacttgccaagacgagctggctagaggatggttctccggacctggtcccacgtggttcccaggtaagcccccgcccaggatgcagccccgttgtccat

SEQ ID NO: 99767 - DNA, 122 bp, Homo sapiens
tttcgtcaccggagctctcacactccgcgttccagccggacggtcatctgaaaaacaaagcgtttccatttatggctagggaacagctggccgcagcctgtgcttggcttctattttaaagt

SEQ ID NO: 99768 - DNA, 122 bp, Homo sapiens
gcccctggttggccagcgccacggctgtcgcacattttgcctgtcatcgaggtcgcaaagcgccgctttgcggctccacgtgaccaccctcctgtcaagcgctgagcgcgcgactacccggc

SEQ ID NO: 99769 - DNA, 122 bp, Homo sapiens
ggtagactgggtagttcttcgctctgtgtgtcatgttgtcagctaggatattgaggtggccgccatcatctgggagccaggctgagagctctgctgggctctgatgtctctcaagtggctga

SEQ ID NO: 99770 - DNA, 122 bp, Homo sapiens
agagaagccgcagcccgcagtgtccgacccagtcgtcccgcgccggagccggccccgtagcgtgccatggcctgctacatctaccagctgccctcctgggtgctggacgacctgtgccgcaa

SEQ ID NO: 99771 - DNA, 122 bp, Homo sapiens
atcaaattctatatatccggaggccaagaactatagcagcttttcctatggatttagggccggaaaactctagctcctccagacagaacttgtagcaacctgaatcatgaaattaaggggta

SEQ ID NO: 99772 - DNA, 122 bp, Homo sapiens
cctcatttcattaaagctccgaatcatttagtccatgcgcacccagtctctgtaagcgttcgatctggtgtgggcggacacgaccacgatggttggtgcgcacaggacattcatatgctcag

SEQ ID NO: 99773 - DNA, 122 bp, Homo sapiens
tttggccgagttggcggctggacgaggacgcagagcccagctctcgagagttcaagcaaccgacggttccccagggctcccaggagcggttacctgggcactctgtgcccctccttcctgtt

SEQ ID NO: 99774 - DNA, 122 bp, Homo sapiens
gcgttagactccaccttggaaggctgtatttgcccaataaggcaagcaggtactgtcccccggccgccactcgctcagtgcacttcccccaactttcggccaaaggcccctcccccaggccc

SEQ ID NO: 99775 - DNA, 122 bp, Homo sapiens
ttgggcaacatagcaagaccctgtctccaaaagaaaaaacaaaacagcagcagcagccttcgttgagtcagattatcagtaaaaacaatgaagattattctctaatgagggaagcaatatca

SEQ ID NO: 99776 - DNA, 122 bp, Homo sapiens
agggcaggcccaggccagcaatggagcaggtacaccctggtgggcgggtggacaggcaggcgggcgggtgggtggctgcgcgtcacctgctggttctgtaggcccaggttaacaatggagca

SEQ ID NO: 99777 - DNA, 122 bp, Homo sapiens
tccccctttttcttttgaatgctggagaccggaggaacatggactaccaatcccagaatgcgttttatgggacccgctcaccgcgcaggcgctcttgcccaagccactgagagcgggacgcg

SEQ ID NO: 99778 - DNA, 122 bp, Homo sapiens
gcatcaacagaaacacacagcagcaggacctggataagatgcatgctaagcaatgaccgtcggtatcaacataaacacatagcactatggcttccatatacagcattgggctcctcatctgg

SEQ ID NO: 99779 - DNA, 122 bp, Homo sapiens
ggcggttccagggggctgggggcctgccagggacactaatggaacacagctggaccggcccgccagggaggaggaggaggagggcctagagggggctccagcggcaccagaggcggctagac

SEQ ID NO: 99780 - DNA, 122 bp, Homo sapiens
aattatataattttcttgataaagactaggcgtacatcttttatgagatttatttctacacgtaaacaatgttgttgcttttgaaaggttatcttttaaaacattatatagaaagtgcttgc

SEQ ID NO: 99781 - DNA, 122 bp, Homo sapiens
ggcggggctacatacacagccgtggtcccgcccggcccacatccgggcttccgcgtagtccgggcgccctggcctctgcaccgtcctagaaacctgtcttacgtcgaggaacccgggggaca

SEQ ID NO: 99782 - DNA, 122 bp, Homo sapiens
tgtggagagtggatcccaaaggcaaaattaagctggtcagaacggggagcccagcaatctcgttggtcaagtgtgtggtcaacatccacttcactaactctggaaacattcctttcaattag

SEQ ID NO: 99783 - DNA, 122 bp, Homo sapiens
ttgtagctgttattgccggaatgggctcctgtggatgctgctctgtggctggcacttctgcgcgtgacgccgtggcaggaggcttcctaacattccatgggtcgttcatccccggtggtggc

SEQ ID NO: 99784 - DNA, 122 bp, Homo sapiens
cccagccccgggcaggcccggcaggcgcgctcctccactgacctgcgggcggcttgggggcggcgcggaacagctgcatctcgcgcccagctccagcccgcctgccctccatggcgccgact

SEQ ID NO: 99785 - DNA, 122 bp, Homo sapiens
cggcagaaggctggagggctgcatggcggcggcggccgggtcggagagggtcgccgaggccgtgcgcttatagccgggatgacgccgcagttgggccggatcagctgacccgcgtgtttgca

SEQ ID NO: 99786 - DNA, 122 bp, Homo sapiens
gtgttatctggagctgtaggagtcctccgaggaataaataacgtttctggaataatatctcgccggagctttttttcctcaatggctgcaggattcctcagggtgccgatatcaaaggcctg

SEQ ID NO: 99787 - DNA, 122 bp, Homo sapiens
atcaggatggtcaggggaagccagagacggaagctgcaaaaattcaccaggctgtgtggacgggaggaggggctccgggtgagggggattggccgcaggagatcgggaggagttatttggag

SEQ ID NO: 99788 - DNA, 122 bp, Homo sapiens
agggcgctccgcaggccctgagccggccggggggtggggtctctgcggggcggggcggggcggggcgagggagaaggggcaggccgccgctgccacgcagtactcccgccttggcgccagag

SEQ ID NO: 99789 - DNA, 122 bp, Homo sapiens
acagacaggccagtccctgtcctcgaggagcccatgatccgcggggagacaggcatttaacgacgactcacacgatcacttaaatacaactgtggtgaaccgcacaagagggacgcgcggcg

SEQ ID NO: 99790 - DNA, 122 bp, Homo sapiens
gccggctgcgctgtcgcctgctcacaccgtcccacccgcaccgccggctgcactgtcacccgctcacaccgtcccacctgcaccgccggctgcactgtcacccattcacaccatcccacctg

SEQ ID NO: 99791 - DNA, 122 bp, Homo sapiens
ttaaggtggccttttttggggggtggatcagggcgtggaccatctcggtggggtgcatgccgcgcctgcgatggacgttggaggaggagagggccgggaaccgggttcgtattgcctagccc

SEQ ID NO: 99792 - DNA, 122 bp, Homo sapiens
cggcttgacggaaggctcactctacgagttcaaaatcgccgccgtcaacctggccggcatcggggagccctcagatcccagtgagcacttcaagtgtgaggcctggaccatgccggagcccg

SEQ ID NO: 99793 - DNA, 122 bp, Homo sapiens
ggatggcatccgggatcccacctttgaagtggccagcgatgggaccctggagtccatgctcgatagcaccaacgaggggacccgggaagcctcgcgcgacgggaccacggacgaggcccggg

SEQ ID NO: 99794 - DNA, 122 bp, Homo sapiens
cataacgaggccacgtttttccagccaagccacactcgaagagtaagtgccgtcacctcacgctgcagttcggtaggtagagtccgccatttttccaccaggacagcccgggtttggttcct

SEQ ID NO: 99795 - DNA, 122 bp, Homo sapiens
gtgttctgtcgcaggtgcacacctcccatcgtccccagcgcggacttggagagccggcctcggtctggacagagcagctggagggcttcctggtctttacctgaacagtttaaaccttgcgt

SEQ ID NO: 99796 - DNA, 122 bp, Homo sapiens
cctgagaggggaggccgacccctgaggatagcagccaggcctggggaccgcgaggccgcccgttatttccctgtcacatcgcggggaggccccgtgatcctgtacttgagggtctgtctggt

SEQ ID NO: 99797 - DNA, 122 bp, Homo sapiens
gccagctccttggtgagcgcgtccaggcgctggcgcagctggcgcacctcctcgcgcgcgcggttgcgctcagcgcgcaccttgctccatttctcgcgccaattggcagtgcagtccgacca

SEQ ID NO: 99798 - DNA, 122 bp, Homo sapiens
ccatctgcccctcgaaagaactcatagcgccgccgatcccagagtccgggaccccaaaaccgcagctgaagccaaggccagccctgaccgcgccgccacttccgggaagccgcgcgctgcct

SEQ ID NO: 99799 - DNA, 122 bp, Homo sapiens
caggcacgacggtgtgggtgtgcccgcccggggcagaggagctgcagggctcgcggcaggcggcgctgtgcaagcagcgacgtcgcggcccgaggaagtggaggcggtgaacgcgcgtgggc

SEQ ID NO: 99800 - DNA, 122 bp, Homo sapiens
tgctggtcaaggcttcagtgtggagtaattgacactttcgaggtaacttgcgactatcatcgctttctttcccgcgtggggcaaggaatcccccgagctgccaagtttggggcttaattttc

SEQ ID NO: 99801 - DNA, 122 bp, Homo sapiens
atgtgaccccagctgcagggaagggctgtattgggacgtgggccagtgccagggacgcgacgtggcgtgtgttcccctgtgtgtgtggcggctgcaggggcaccttgtgagaggagggctgg

SEQ ID NO: 99802 - DNA, 122 bp, Homo sapiens
aaaacccaagaacctgaggttcagcggacggcttcctgcggcttgctggggccggcttggcgggcaggtatcctgtgtggactgcgcgagcagttggagtgcggatgggagttgggaaaccg

SEQ ID NO: 99803 - DNA, 122 bp, Homo sapiens
tcgagtggaaagcgaggacgggggtagcccccacagaccctccgcccgggcccagactgccgccgccacctcggctcggctcacccaaaccccagcaggccttcgggccttcttacctggcg

SEQ ID NO: 99804 - DNA, 122 bp, Homo sapiens
cagctagcatgcccaagaaatagtacatgggtccatggagagtggcatcagtacaaatgacgtggagaatggtgaggttccccaagataactgtcaggtagatgaagcagaagggaatagag

SEQ ID NO: 99805 - DNA, 122 bp, Homo sapiens
actagagttcccaactttggccaatagtttgtaagcactgataaggatatgtaacattctcgtgtaatttctaaataagtttcattacttctaacctcaagattatcatttttgtccttttt

SEQ ID NO: 99806 - DNA, 122 bp, Homo sapiens
gtagtcataggcttagctcttagctaaaacaaaaaacaaaagcagaaacagcagcacatgcgtatgtgttatatttattaactgtgcagttttaaaaggtagaattttctaattagttgaaa

SEQ ID NO: 99807 - DNA, 122 bp, Homo sapiens
ggtcgcttcaaaatgctaatgctttccacctcagctaggattgcagggaaacccagggcccgcccaccccccgccctctgaccatctcagaaatgcccagacacacatcagcttctctctgc

SEQ ID NO: 99808 - DNA, 122 bp, Homo sapiens
tagatgtgaaatgcatttcttttggtactgtaacagcctttgagacctgagcaacagggacgcattaaagattattacaaagtgcctagcctaaaagagtattaggaacaccttcaggcaag

SEQ ID NO: 99809 - DNA, 122 bp, Homo sapiens
ccccgccgtcccgcccactaccactgcggccgcacccaccttctgtcgcctccctgctaccggaggagcactggaataggaaccaagtcctctgcatctagacagggattattttctcttct

SEQ ID NO: 99810 - DNA, 122 bp, Homo sapiens
atccacccacccttcccacgcttgctcaggttggtttagccgagccgagtgtaatgtaatcggttgcagaggacaaagggagagttggggccaagaagagctctcatccttcctgtgattgc

SEQ ID NO: 99811 - DNA, 122 bp, Homo sapiens
tgcacaagggctgaagaaggggggccaggcagcgaggtgttgtttcagagcccatccccacgggttctgctgccctggctctgtcccagcctgccatggcccagcctctccatgcagcctgt

SEQ ID NO: 99812 - DNA, 122 bp, Homo sapiens
gcagcgcccctgccgctgaagtttcttaagccccggatgccttaatgagcctcctgcacccgctgggtagtagtagttgccgttctgtacgcagccggctgagctcctcgggcgcccgtcct

SEQ ID NO: 99813 - DNA, 122 bp, Homo sapiens
ggtgggaggagcctgtaatgggtggcatctgtaatgggcggggccttgctgggcagagcccgcggcgggggaagccgcccctctcctctgtccaggcgctgggtggtccatccgcctggtca

SEQ ID NO: 99814 - DNA, 122 bp, Homo sapiens
gaagcagcgtgagagggaggcggctcccagtcagaggagtgcagatgtagaggaggtgcccggggtcctgaccaagaactcccgccccaccagagaactggagtccagagctgggacgccag

SEQ ID NO: 99815 - DNA, 122 bp, Homo sapiens
tcttattggccggcgccgcggtgtcgtcagagcccgggtgggattccccggcgcgcgccgcggccccgcccctgccggccctctctgggccccgccccgccaccgcctccggccgaggcgcg

SEQ ID NO: 99816 - DNA, 122 bp, Homo sapiens
acacgtttccatggtcccactggcttgctttgcagggcttccacaagaatgggctgggagcgtaactgagtaactgagtcatgattaggggttaattaagaggagaaatgggctagctgttt

SEQ ID NO: 99817 - DNA, 122 bp, Homo sapiens
ttttctgggagtgtagccttgcctgttcattcacatgttgtctgtggaaggctgcggtcacgctgcaactgcagggccccgtccttgagacggatgcattgacaaagttgaaaatattgacc

SEQ ID NO: 99818 - DNA, 122 bp, Homo sapiens
aaagtgagatcccgcgagactcccagggtatggtctctcaagagccctggaaacgtgtgtcggcgccgccggatgcggcgacttctcagtggctgtggctggcgttggtccgaagcgtggtg

SEQ ID NO: 99819 - DNA, 122 bp, Homo sapiens
ccataaattatacatctactgtatacccacagaaattaaaataaaaaatgaaacctgtgacgtgtgtttctatgccagtatggactgtattacaattcagtcctgaataaggtacgtgatcg

SEQ ID NO: 99820 - DNA, 122 bp, Homo sapiens
ctcttacttcccttctctgggggaagttaggtcaaggccaaggaggctcctagaccagatcgctctctcggcctcgcctctcaactgcgcccctggaatccctaagagcaggctttgatgca

SEQ ID NO: 99821 - DNA, 122 bp, Homo sapiens
tcggtccgttttctgctaagatttggggattttcaggcctggagggaaagtcccttgggacgatcatagagcgctagcactgaatcagcctggagagcgcggaaggaaagggtcggtccgca

SEQ ID NO: 99822 - DNA, 122 bp, Homo sapiens
acgatcagaactgctatcatttcaagcccttccaagttcatggtcagctaggtcatggtccgaccacagccactgagaagtgctcctctgcctggctttctttgtaaagccattaaactaca

SEQ ID NO: 99823 - DNA, 122 bp, Homo sapiens
gtgcaccaggaagaacccagcaccgcccctgggattccgaacagtctgatcctgagggaacgtcagacaagcccaagttcagggacttcctacaagataactggtccatatgctcaaaaatt

SEQ ID NO: 99824 - DNA, 122 bp, Homo sapiens
agatgagttccacaagcctcaggcatcaataacatgcatacatacacatagcagccaacacgctattaaagcaaaatatatacctactttaacagaaatccaggagctgccactctctggtc

SEQ ID NO: 99825 - DNA, 122 bp, Homo sapiens
gctccgcggcctctcccgaccctgtgccaccaactgtaggaggcctccaagtgcaggatgcgcaggcaggaggggcccaacagggccgtctggtctaaatgtcttttaaaagcaactttagt

SEQ ID NO: 99826 - DNA, 122 bp, Homo sapiens
agactctaattttacagacattctgcagaaggatctccgtgtaactgttagggagtcattcgcaggcaagttgtgtatgatgttcacccactttgatgggtatgctgacaattacatccaga

SEQ ID NO: 99827 - DNA, 122 bp, Homo sapiens
atcttcttcgaaaaaaaaaaaaaaagaggacatttcagatgccttcaaactacctcacttcggagggtgcaactgcaatcagtaaattttcaagtctaaaagaaacttgggagatcatcgtc

SEQ ID NO: 99828 - DNA, 122 bp, Homo sapiens
cgtgaagcgccattagcgtgagttagaactggagcgttgcagtaacaactcgggggaagtcgttgtccctgaagggctctgcggctggccaggatgatctgggtggacggtgggtggtttct

SEQ ID NO: 99829 - DNA, 122 bp, Homo sapiens
ggaaggacttcgagagggcagaggcttcccggaggagcccagcgggcctggggccacactcggaaggccgggaaggccctgtgcagggcacgtcgcaggcgctcgaggaatgcgagttgcct

SEQ ID NO: 99830 - DNA, 122 bp, Homo sapiens
cttgccaagtccagtttattttaattctggggaacgttgtcttcctcctcccccctccctcgccaccacccacctctggtgttttttttgttttgttttgttttgttttttttgagatagag

SEQ ID NO: 99831 - DNA, 122 bp, Homo sapiens
agccacggcgcccagcctactcattcttcaacaaacatttaacaacaagtactatgtgaccgactccgaactgtccactttcttcctatggtttgacaacagaaaattatagaaaatctagc

SEQ ID NO: 99832 - DNA, 122 bp, Homo sapiens
agggcagccgcttcagcaagaatatgactgggaagatgatgcagaagcttcgggtgatgacggccagagcaatcctccccacaacaggccatgttagcactgttgtatatctcagtggggca

SEQ ID NO: 99833 - DNA, 122 bp, Homo sapiens
cagttaaacctaagtagtttctcactttttgaaacaataactctgcaccaaatattgcatcgcatgctgctgattttcaagagagaagcaataaacacaacttctgctaaattgagcattat

SEQ ID NO: 99834 - DNA, 122 bp, Homo sapiens
tgtcggcggcctcgttagcgatgccgtggacagtatcctcgttagcgatgtcgtgtgtggcgtcctggttagtgatgtcatgtacggtgtcctcatggggagctagaaaaacacagagttaa

SEQ ID NO: 99835 - DNA, 122 bp, Homo sapiens
cccagagtggggcaggtgccatcggaaatgcagctaaacgggagaataactcatcttgagcgggcagagctggagggcctggtcgtggagaggggagactggctgggtggcctccatcaggg

SEQ ID NO: 99836 - DNA, 122 bp, Homo sapiens
gaggccagggctctccgggaaaaaggcaggcgcatatatgcccccctttctgggaaaagacggggaggggggcttctcctgggagactccaggcttcgaaattcctcgttccctatcctccg

SEQ ID NO: 99837 - DNA, 122 bp, Homo sapiens
ccacacctgtggccaaaagcccttgtccatccatgtttccagggcagtgtccgagtcctgcgtgaccctgtgggggtcaacctctatgagcattcggtcagcaaatgccacgtcggccagcc

SEQ ID NO: 99838 - DNA, 122 bp, Homo sapiens
tgtgaaacgtttgttgttttggtcttcacaataaaccttggtaccgccaactctttggtccgtgccatctaaaagcgctgtgacactcaccgcgaaggtcccggctttattcctgagaccac

SEQ ID NO: 99839 - DNA, 122 bp, Homo sapiens
agtgccatctctaaggtcaactctgatatgggggtcccaccagcagtcacctccacagagcgctgtcactgtgtccccgccagggccagggtggggggctgcagagatgggagggtcctgtg

SEQ ID NO: 99840 - DNA, 122 bp, Homo sapiens
tctgagccccagggagcggagggcacggagccgggcgagtcctgcggtgtcagaatcctgcgccgccctgacgctggggctcagggttcattccgggggcgcgcgcgtggctgcggaggcgg

SEQ ID NO: 99841 - DNA, 122 bp, Homo sapiens
tccttacacgtcttgtactgaaacgagacaaagcgtgagggaagtggggctgacaggtcacggcagtttttctggttacttgaggttctccaagtccctgaattttggcactcgtgtaaccg

SEQ ID NO: 99842 - DNA, 122 bp, Homo sapiens
ccgatggatgtcagagacccgttaagtgcattagtgatggggatcgggattgtagtaagtcgtcgttaaggaagaatttcccgtgagagattaggctgaaagtgtgcattaagtttctgccc

SEQ ID NO: 99843 - DNA, 122 bp, Homo sapiens
gcttggctcatgaccacctcgccgggcgccggccgctccatggccagggcgagagcgctacgcctgcggcccccgacaccccaccatgcccgctccgcccgccccgccctccccgcccagct

SEQ ID NO: 99844 - DNA, 122 bp, Homo sapiens
cggcagcaaccaagcagggtgagtgtgcgggctgcgcgggcggcgcggagcggagggagccgcgcggcgccacactcactcgcactcgcactcacaccggcgtgcacgccggcccgggaccc

SEQ ID NO: 99845 - DNA, 122 bp, Homo sapiens
ggatggaaggactgcccttcatccatcaggtacctaagcagaatgattcctgcagcaggccgatggggcaggagcagcccctgcctaggaggtccctgcccattccccacccctccccggtc

SEQ ID NO: 99846 - DNA, 122 bp, Homo sapiens
aacttttgcaatattatcatgacctggcaagaatgtgctgtttgcagatgcaggcgaccgcgtgttctttgttgacatgccaagcaaaggaggctggaagaggagcccttccaagatgccac

SEQ ID NO: 99847 - DNA, 122 bp, Homo sapiens
gagagtaaaccctgtgaaacacgcatacttagcaggcctgacttgcgcttcccgtgacgacgtggctaattgggaagtgagtcaccagtatctagctcgtagtagcactgggggactggctg

SEQ ID NO: 99848 - DNA, 122 bp, Homo sapiens
acggggcgggcgggaagctgggcggggggcgcagctgcgccaggcgtgggtgacacccggcgggcgcagcgcgcgctgctgcaggcagccccctccgcggggcttagggctaggggcagggc

SEQ ID NO: 99849 - DNA, 122 bp, Homo sapiens
tggtgcttctgtggttccgtccccatcaaccctagaggctgtgctaattaacatgatggacgtcaaaaatgggttttcctcgttggagcagtggcctgttctagcatggcaagcagtggcaa

SEQ ID NO: 99850 - DNA, 122 bp, Homo sapiens
gaatctggtattttgttatgaaggtttcttgaagagattatttttttttgcaattaattacgtttagtgtagagtgcatatacagcaaattaaaggacccagaaagctggatccaatagtga

SEQ ID NO: 99851 - DNA, 122 bp, Homo sapiens
ttgtcacctctctcgcccccaggccaaaatcctgagcatgatggaagacaataagcagctcgcgctccgcatcgatggggcggtccagtcggccagccaggaggtgaccaacctgcgagccg

SEQ ID NO: 99852 - DNA, 122 bp, Homo sapiens
actcccaccaccaaccctcccctggtgctcccagttgggcaatatggccagaggtgagcacgtttgtcaggaatggaattaggcagggaatgaaaacaggtctggcctctgggaaaactggc

SEQ ID NO: 99853 - DNA, 122 bp, Homo sapiens
tacatcagagtgatgtagggatacaaagaacatcgaggcatggacttcatttccaaaggacgtgactcttgcatgcagcaaactaagataaatgctagaaggagatggtagtgcatgaggag

SEQ ID NO: 99854 - DNA, 122 bp, Homo sapiens
cccccttgggctggagtcacctcctccagaaagaattctgccagctcggaggacacatcccggaagagaaggggagcgatctctccaggcttgaaaagtccaaatctccaagcgggttgggg

SEQ ID NO: 99855 - DNA, 122 bp, Homo sapiens
tcctggctccgcctccggctacgttcagtcttgtctctattgcccacattcgcaagtccacggcggccaacgcacctgacaggaaaaggtctgtccactccccaccgtctccgactacaatc

SEQ ID NO: 99856 - DNA, 122 bp, Homo sapiens
gcgcaggaatgcaccggaagtccgcctcccgggacccgccgccggtcccaggacaaataccgtgactctatttcccatgagcctacgcgctccccaaatttaggagccatttgaaatgtctc

SEQ ID NO: 99857 - DNA, 122 bp, Homo sapiens
ttgattggccgttgtgcaaaccacgtagtggggacgccctctgattggatgcaggattggcgggaaggcagcaggctcagagagggccctctgactggatgcaggactggcgggaaggcagt

SEQ ID NO: 99858 - DNA, 122 bp, Homo sapiens
agagtcattctattcagatgatgaccctccctgaccctcctggtttctggagttttcattcgctaagggctgcccttcggttttcaattactggcggagagggcggttcgtttctggcgggg

SEQ ID NO: 99859 - DNA, 122 bp, Homo sapiens
atgggcctgcctggccagagtattggctccggtgaccatctgggcttcccagggagaagccgcataaggggaagtagctgaagaacaaaaacaggagtgaggagggaagagggagcaggagg

SEQ ID NO: 99860 - DNA, 122 bp, Homo sapiens
gtgaggtctccaaagtggccagccacctagaagtgaactgtgacaagaggaatctgacagcgctgcctccagacctgccgaaagacacaaccatcctccacctgagtgagaacctcctgtac

SEQ ID NO: 99861 - DNA, 122 bp, Homo sapiens
ctcgggactcactcggctcgaccacgggaagggaaggagcgcgaacgctaaatcccgtgccgcggggagccaagccccctgggccggaaatgcctaatctgaacttccgccctgcccttcag

SEQ ID NO: 99862 - DNA, 122 bp, Homo sapiens
gctccagggcgttgttctttctgtttttatgcaattgcacttccttggcaggcagccaggcgctccggtgctcacaggccatgggacagtccagttccctgcagacccagcggggcatgggc

SEQ ID NO: 99863 - DNA, 122 bp, Homo sapiens
ggactgggtggagaccctctggctgggtaaaggcgcggcagagctggcgcaacagagggacgggcgtggggcgaggacgccaggatctggacccctgcagggaaagggtctgagcttttccg

SEQ ID NO: 99864 - DNA, 122 bp, Homo sapiens
tggtcacgtggtatccaggcaggtgcaaatagttcccagctcgtgtgtacacactggtcacgtggtatccaggcagttgaaagtatgttcccagctcgtgtgtacacgctggtcatgtggta

SEQ ID NO: 99865 - DNA, 122 bp, Homo sapiens
ggacctgactccagggaaacggggagtctctatccagctctggaggggatgagcttctctcgccttccgtacaagcttctgctaggtgggagcagatctggggctgaggagaaagcaagatg

SEQ ID NO: 99866 - DNA, 122 bp, Homo sapiens
aaagcccctcagatgcagatttcgggctaaaaatcccaagaatatatacaacagctttcccgaccggggaaaggcgcgagttgtgaagtttctagagcgcatttttccccgtttccccgagt

SEQ ID NO: 99867 - DNA, 122 bp, Homo sapiens
caaagacagcggacgagtcacccaaggtcacggtgctggagcacagtggcagagcagggacggggactctgctcttcttgacctccaggaggtggcaagtgtgaaacctggaccctgctcca

SEQ ID NO: 99868 - DNA, 122 bp, Homo sapiens
actaggataggctgggcatgtggcttgtgacagtaaacccagaacttgaggccaggagttcgagatcagcctggccaacatggtgaaaccctgtctctactaaaaattcaaaaattagccag

SEQ ID NO: 99869 - DNA, 122 bp, Homo sapiens
gcactgggtgcctggggagggacgagggactcgtgtgctgggcagtcccatgaggattgacgctgtacacactcagggtgtgtcagtatctgggctgcttcctgggccaggcaggcctacgt

SEQ ID NO: 99870 - DNA, 122 bp, Homo sapiens
tacctgtttcttagggtccagataaaaaagtcctactatctgtgtctctatcccctgccacgccaactctgcagccttcatagtttcctgtgtgtgtctgccttccccctttaacctgacat

SEQ ID NO: 99871 - DNA, 122 bp, Homo sapiens
ttgtcctgggttcaaatcctggctctactatatattagctgtgggactgtgacccacccccgaggactccctcagtctgaatgcccagctagccactgtgtgcatgaaggtcagggaatcag

SEQ ID NO: 99872 - DNA, 122 bp, Homo sapiens
aaattgagataggagcggaggcggagcgcggccgtgcagggaggggcagggcggtgtaggcggcttcatttaccaagctttgctggccattgtttccatgccaaacccttgccaaggggatt

SEQ ID NO: 99873 - DNA, 122 bp, Homo sapiens
cttttgaggtgctgcatagctagtttgacctgtgggaccactgaccatccctcctcttcccggtgctcctggcctcctgtggctgggatggtgctggggaggaggtggggggtgccagctgg

SEQ ID NO: 99874 - DNA, 122 bp, Homo sapiens
gtctccgccgctagtctccagctccaaaatggcggctgccactgtggggcttctgccggccggtagtccctggcgctgctgacccagcatcggcttttctacgtcttgaacctggattcgcc

SEQ ID NO: 99875 - DNA, 122 bp, Homo sapiens
agcaggaaaggaaccctggaggttgtaggcggatcctggagtgtggaggggcgaattgagcgcgggaagcagcatgactagcaagacaatctgactcagagcagggaaaaatcaagcccgat

SEQ ID NO: 99876 - DNA, 122 bp, Homo sapiens
cgggcctcagctgcctccacgcggggcagggctcggcagcctgccatgcccgaggccccccgcacccccgcccgtgggctcccacacagcccgagcctccccaacgggcaccaccccctgct

SEQ ID NO: 99877 - DNA, 122 bp, Homo sapiens
tgagtgtgggttgtagccacagcgagcaccgtcttttcacttgcacagctgcacccggcccgtggtgttttgagtacctggggcagccatcttgccatgtggcacacacagcacacagtccc

SEQ ID NO: 99878 - DNA, 122 bp, Homo sapiens
tacacctaccagatgtgccactgggtgacatgccagatcttttacataatgccattctgccggacacaagacagctgaggggtggggaggtgtgtcttttaatgctttgggatgggagtaga

SEQ ID NO: 99879 - DNA, 122 bp, Homo sapiens
agaattccctcccgcatcccgatcttccacctggagaaccaacggcgcagccagggaagtcgaggcacgcccacagtggcaccaacagctgggacctcttatcgcatttgcgtttcagcttc

SEQ ID NO: 99880 - DNA, 122 bp, Homo sapiens
ggtgccaaggtaggtccagacgacgcctaggcaaccgggggcggggctcccaaagcctgtcgtcgtggcaacgagtagtgattgacaagcctctcgctctagccctgggcgctcccgcaagg

SEQ ID NO: 99881 - DNA, 122 bp, Homo sapiens
cgctgaccactcccatgtcttctcctttggtggctacaccttgcgagggagctccatcttcggtaggcctggggagagtggcaggtgctgctgcatcaattatgagggtgaagtttgagctt

SEQ ID NO: 99882 - DNA, 122 bp, Homo sapiens
cgatgtgaaccgaatgttgatgtaagaggcagggcactcggctgcggatgggtaacagggcgtgggctggcacacttacttgcaccagtgcccagagagggggtgcaggctgaggagctgcc

SEQ ID NO: 99883 - DNA, 122 bp, Homo sapiens
ggagtcctgcgtggacggagcagccagcctcgacatccggaagtcacgcaggcaccagaacgcagcagatgcagtgacctggtaggctggtaccgacagccaagtaacgccttagaaactgg

SEQ ID NO: 99884 - DNA, 122 bp, Homo sapiens
tactcgggaggctgaggcaggaaaatcgcttgaaaccgggaggcggaggttgcagtgagccgagatcgcaccactgcgctccaccctagtgatagagcaagactttgtctcaaaaacaacaa

SEQ ID NO: 99885 - DNA, 122 bp, Homo sapiens
gcaattgcacctttttgtctgcatgaatctcaagattgtaagtggcgcattcctattgtccgcttgaggggagcaaagcagtatgtcaagagaattccagtccagtcagtatttatggtact

SEQ ID NO: 99886 - DNA, 122 bp, Homo sapiens
tgaccttctcaagagggtggcaagtcctgctttgcaaatcactgagtaaaggaaaagccccgaggagccttgggactgctagcctacctgctcaataaagttccaccttaagatacaggcta

SEQ ID NO: 99887 - DNA, 122 bp, Homo sapiens
catcgcccactgggggactcatgcagcggagctctagcttcccgtataccaccaagggctcgggcctgggctccccaaccagctcctttaacagcacggtgttcggaccttcatctctgaac

SEQ ID NO: 99888 - DNA, 122 bp, Homo sapiens
tagaatagtcagtttcttctttctgggacagtctgaagtaaccttccagaaactgagcctcgctctgcaacccatccttatgtagaagaccatatgagttagagagtctccaggccctatct

SEQ ID NO: 99889 - DNA, 122 bp, Homo sapiens
attgggttttataactttataaaagcctttcatttgttttgttccttattcagtcattcacgcatttgacaaacatttatggcattcctatagtgtactaggcactgtgctgatgtccagca

SEQ ID NO: 99890 - DNA, 122 bp, Homo sapiens
caagtataaatgcatggcctaacatacctgaaaatgtttctctatcctaaaatgaaaatacgttagtttccctccaacccccaccccaacccctgccctgctttggaaatgcagattaaatc

SEQ ID NO: 99891 - DNA, 122 bp, Homo sapiens
aagctattttaagccttaaaacattgtcatcttgtactttaagctcaaggcaattgaccacgcttgatttgtttcttactaccttgcttcaagagtttatcaaatctttagcttcagcagaa

SEQ ID NO: 99892 - DNA, 122 bp, Homo sapiens
ttgaagatgatcttccacctcagcctccgaagtagctgaacggggactacaggtgcaggccgccctgctctaccttttttttttttttttttttttttttttgagacaaagtctctctctgt

SEQ ID NO: 99893 - DNA, 122 bp, Homo sapiens
ctcccgtacgcttccacccccgagggtctgctagcttggtgaaaagacgtgggtgggaggcgtggtggcccaggcagagccccccgcagctgtcgctcacctcttcccctcgctctcttcca

SEQ ID NO: 99894 - DNA, 122 bp, Homo sapiens
ggcctccgtaggcccccggcccggcccaccgctccggctgaggcgggactgccccacggacgccgccacgtcatccccacgcccgccccgctacagccctgggactgaccccggccgtcgcc

SEQ ID NO: 99895 - DNA, 122 bp, Homo sapiens
aagaggaagactaacgttctaaagaaacaaccaaactctctatacaaacactgcctctggcgcagaggcatacattaaaagcttataatagattctgtacacatttagagctagagctttct

SEQ ID NO: 99896 - DNA, 122 bp, Homo sapiens
actgactcccactgggtaagtggagtcctcacttggccctctcagtgttttactgcttttcgattccttgtatccctaggctgtgaggaggtccccctgcctggggggatgggcacgggagg

SEQ ID NO: 99897 - DNA, 122 bp, Homo sapiens
aggaggctggggctctgggaggggtccaggagacccagaaacgcggttgcggggcggcgacgccccgcgagacccgggatccggggggcgcggccgggacttgcttaccgagcgggcgctgg

SEQ ID NO: 99898 - DNA, 122 bp, Homo sapiens
ctcaggtgatccacccgcctcagcttcccaaagtgttgggattacaggtgtgagccactgcgactggcccaagctcttctatatagatggtattagtattagtcagggttctctagagggac

SEQ ID NO: 99899 - DNA, 122 bp, Homo sapiens
gtccccctcctcgccctctaccccgttctgcacccgccgtggtgtggccgggcagctagtcgctcactcaccagtccctggccactcgtgtgccgagcagcagagcagcttccggggcctca

SEQ ID NO: 99900 - DNA, 122 bp, Homo sapiens
tatcactgaaagtgatgaatggtgcaacacttcttctaatcacttttttcagggggaacgcggtcccccaggtgagagtggtgctgccggtcctactggtcctattggaagccgaggtcctt

SEQ ID NO: 99901 - DNA, 122 bp, Homo sapiens
gaactactctttacctatacggatgccggatcgcctgcagccggggctctggtccctggacgcccaccaggcacgggctttggagaaccatactgaggtccagttccagaaggagtgcgggc

SEQ ID NO: 99902 - DNA, 122 bp, Homo sapiens
gaagtctattcagcttcttaataacccatattcagtccctctgatcaatctcactgacaccgtccagatttccacactcgattttgcttcaaatagtttcctaatctttagatcatggacct

SEQ ID NO: 99903 - DNA, 122 bp, Homo sapiens
gtttccactgctgggccaaggatagagggggttcaggcaagccacaaaggacctgagccccgaatgtggattcaaactcagactacagcccccagtgttccctcagcctcactcctctgcta

SEQ ID NO: 99904 - DNA, 122 bp, Homo sapiens
caccctgccttctgccccatgggcaggcagcggagctcgtaaggggttcttgagttattgcggtctcaggccatggcagctccaggccttgctctgaggattgccaggtctacatgaatgag

SEQ ID NO: 99905 - DNA, 122 bp, Homo sapiens
agccgcctcgtcattggccagaacgcttcgggtggcgcgctcgggactggtgaaggcctgcgttgctcccgccctcggcccggggcgcggcccgcgattggctggcgtgggcagagcgtctt

SEQ ID NO: 99906 - DNA, 122 bp, Homo sapiens
tactctctcccctcttcaccaccaggcaccaacctgctagatctgcacacagtttacattcgcagaaacagtagccacttcccttatagggttctgtctccctgttttcagcagaaatacct

SEQ ID NO: 99907 - DNA, 122 bp, Homo sapiens
aagctgttctgagtagtgtgatgaagtctcgcacctgcacgctgtccacactcccctccgcgagtcacttagtggccatctcggtcatcagaccgactgtcgcggtgttgcagtgcttctgt

SEQ ID NO: 99908 - DNA, 122 bp, Homo sapiens
gcgctgaaccactccatgtgccggggccgctggggccatgaccttgcgtgtgggcagctgcgtgttctggcaccagacgtgtccctgcctggctagagtccgcgctctcccctccagggctc

SEQ ID NO: 99909 - DNA, 122 bp, Homo sapiens
gcttcccggctgccgccccgccctgccgcgccgcgccccccgtccccgcccccgcctcctcgcagggtgggtcccccagtgcccacctcatttgccggccaccgctgcttgaggtctttcgt

SEQ ID NO: 99910 - DNA, 122 bp, Homo sapiens
cccgaccagaggcagttccagccgccagggtccctcacacaacgctgaaagcaaaatacacgtatttgacgtgcctcagagctgacgaagcacccaaaagcagccctcactaaaggagtcga

SEQ ID NO: 99911 - DNA, 122 bp, Homo sapiens
ctcctgaggctcccctcacccccacccacctccgaggccctcccgaggctcccgggctcgcgctcctctgagttgcctgcggctgactccaggtgtggcctgggtctagtgtctgggggggt

SEQ ID NO: 99912 - DNA, 122 bp, Homo sapiens
actaaaataaatatctaaaatgctgaattgccaagacctgcaggtacctcaatgttagagcgcttccaaaagtcaaaatactgtgaattttaaggaattttacaaatactgacatttaagta

SEQ ID NO: 99913 - DNA, 122 bp, Homo sapiens
cttggaaccggaactgggaactttcctggttgccaggagccgaggcggggggtcgcgctccgcacccgcaggtgctggtggaacagcgtcccggcctcttcccgcccgtccagagccgggta

SEQ ID NO: 99914 - DNA, 122 bp, Homo sapiens
agccgcccgtcagtgccctgcccacctccgggtgcccgccttccctggaaacattcccaccgtcttcctgcagctgaagcagcggaatcaccctgggatggcctggggaggagcccgcagaa

SEQ ID NO: 99915 - DNA, 122 bp, Homo sapiens
tgcgggttctgtttatttgttagagaaacccgccggcccggggcgcggcggctggtgcggcgactcagctcttcttgcgcagctggctgtaatgcgtgcggcccaggatgggctccatgacg

SEQ ID NO: 99916 - DNA, 122 bp, Homo sapiens
ccgcccgccgcaaaacagctcctcccaggggaaacccaaagccagccagctcctcagagacgccgcccaagccaggtcaccacagccactccgcccccatccccgaggacaccgcctccact

SEQ ID NO: 99917 - DNA, 122 bp, Homo sapiens
tcccgggctgctgctgcttggcctcgggactggtgcccggcactggtccctggggggaagcggcgccaaagttggggggagggggagagggccgggggcctggcgaggggctcaggagctgg

SEQ ID NO: 99918 - DNA, 122 bp, Homo sapiens
ctggagcagtcgctaacattttggtagtcgcgttgtggcagctactgtccatgtctgagtcgccagcgtccgtcagccggggctgggttgcgccgtccgttgccttgttccctgcttgtcac

SEQ ID NO: 99919 - DNA, 122 bp, Homo sapiens
gggaaaagaggaaatctttcctcttaagaccaaatctgtggtgcctcagcttctgttcagcgtggaggcaggagtggcagctacctaacttggtctttcgcattcaaatatgctacatttaa

SEQ ID NO: 99920 - DNA, 122 bp, Homo sapiens
cgggcggtccaggcggaggaagcagcgtgcgcggcgggtgtggacgctcctggagcgaggcggggggcggcggcggtgaggcctagggagggcgcggtccagggtcccggtgcctggctgcg

SEQ ID NO: 99921 - DNA, 122 bp, Homo sapiens
gaggagttcaatgaactgctgtccaaataccagttgagtgaagcccagctgagcctcatccgagacatccggcgccggggcaagaacaagatggcggcgcagaactgccgcaagcgcaagct

SEQ ID NO: 99922 - DNA, 122 bp, Homo sapiens
tgcagggcccgggctgtgactcgtggggacggttccctgcgccccggcgggggaggtgggcggggaggggcggcggggcgccggggcggggctcgggacggccgggctgggagctggagccc

SEQ ID NO: 99923 - DNA, 122 bp, Homo sapiens
cacaccgggcttcctccttctgggcttctctgaacacccagggctggaaaggactctcttcgtggttgtcctcacttcctacctcctaaccctagtgggcaacacactcatcatcctgctgt

SEQ ID NO: 99924 - DNA, 122 bp, Homo sapiens
ataattagagaggagttgggctgagccgagtcctctttcagcagcagcagccggagccgccgccgcagcccggtggggcaaccctgactcggaccgctcgggagagccccaggagaggccag

SEQ ID NO: 99925 - DNA, 122 bp, Homo sapiens
gcctcggagggctaccctttctaactgtcatcactagaacagttctcagcagcctggggacgaatgtccaaaacctgttccaggcccttgatgattagtaggttgggtttagtgtattgttt

SEQ ID NO: 99926 - DNA, 122 bp, Homo sapiens
attggcaaggcagccgctgtggctttactctgccggggccctgggcagccttgtgcagttcgacgccggccctccttctaccgcctgggggtttgggctcccagacctcctctgctgtaaac

SEQ ID NO: 99927 - DNA, 122 bp, Homo sapiens
aaacaagtaaaggaaaacccagccatgcgagaggctgctgtcggaacctggcgagcaggacgtggctgctgctggagaggagccgagggtgacggctcggtgtggggtggacactggtccag

SEQ ID NO: 99928 - DNA, 122 bp, Homo sapiens
gtgacaaaggagaaaaaaaaaaagtgtttgcattggctgttctcaccttgcctgtagtgccgtttcccaagtttgcgtggcagtgcccaggaaatgttggctgaatattagtatatcccaaa

SEQ ID NO: 99929 - DNA, 122 bp, Homo sapiens
tggacctgtcccccagagcccgggcgactagctgaggttcgcgcctcttgattgaaggatcggaatggatggcgaaggggcaggctcgctgagcgctcactagcggctcctcgcagcctcta

SEQ ID NO: 99930 - DNA, 122 bp, Homo sapiens
ccagtgtcccgccccccacgcggcgagggcgacactaggccgctgcccccgggcgccccgcgtcccctccgcctgccccggcttcctgcgcgcgccgcccgggacttcctcgccgcagtgcc

SEQ ID NO: 99931 - DNA, 122 bp, Homo sapiens
cagcagtgggaccaaggagtggtttgcacttccaagccataaacagagcttgcctaaacgcggtatgcttgctatacaaaccaagcttcaagacaagagttctatctccctctttgttttct

SEQ ID NO: 99932 - DNA, 122 bp, Homo sapiens
aagtgggtggatctcgaggtcaggagattgagaccatcctggccaacatggtgaaacccacgtctctactaaaaatgcaataaagtaactgggcatggtggcgggtgcttgtagctgaggca

SEQ ID NO: 99933 - DNA, 122 bp, Homo sapiens
accaaattacagataaactagttagcttcacagcctctatggctacatggttcttctggccgatggtatgacacctaagttagaacacagccttggctggtgggtgccctctctagactggt

SEQ ID NO: 99934 - DNA, 122 bp, Homo sapiens
tcaggaacaacccaaatatccatcgacagaaatgagtaaacacattgtggctcagccacgcgatgggacgtgattccgccacggaaagaatgcagtgctcagtgaagccccgtctccactaa

SEQ ID NO: 99935 - DNA, 122 bp, Homo sapiens
gaaattgaaagagggcgcagccattggcaagaccgctgtgggggtgggagctctataagccgcccctggcgaactccattgtcggggggcctctataagccgcccctggcgaactccattgt

SEQ ID NO: 99936 - DNA, 122 bp, Homo sapiens
agccagcctcctagctctcctgacgtttgttgtccagggtccttaagtccaaccaggttgcgctgtgagagccccgcgggcttcctactggcttgtcccacccctgcgtcctggccatttgt

SEQ ID NO: 99937 - DNA, 122 bp, Homo sapiens
atttccagctgctgtcattttattctcacctctctcacttgcagagaggcaggaatccttcgtagcccctaaaccttctccatttcctcattgcaaagtggggattaaaacctcgggctccc

SEQ ID NO: 99938 - DNA, 122 bp, Homo sapiens
cctgcacttgagctcaggggctcagggttgtgctgacacgcctgcctgtccacccctcaccgacacctctgcagtcctcctcagggcccaacagggtccccaggaccccgctcccattctgc

SEQ ID NO: 99939 - DNA, 122 bp, Homo sapiens
aagaagcccaaccccaggcctcatgaaccgcctgggcgcggccggcaggtggcgctgtgccgcctgcactcacctgggacgcgcgaggccctccgtgacccgcagatccccctaggcctccc

SEQ ID NO: 99940 - DNA, 122 bp, Homo sapiens
ctgacagacaattcaagagtgtttggtttccaccactctgtgctggtcaccaaaataatgcggtagtcataacgcaaaagcaatatttagcactaccctccaaaagaaactctggactggca

SEQ ID NO: 99941 - DNA, 122 bp, Homo sapiens
ccgagagtacccattccgcttgttgcatgacccaggccttttggcttcagtcgtccagtccgggaaggtttgtcttgtacaaactcgacatgtctgataaggttacctacctgaatggaagg

SEQ ID NO: 99942 - DNA, 122 bp, Homo sapiens
aaggagcaccttgagctggatgggggctgcagcgagcctggttcgggctgggggcggactcgctggggctcccagggcttccaaaccacgaaacgcccaggtggagggagtaaggctcccgt

SEQ ID NO: 99943 - DNA, 122 bp, Homo sapiens
cgcataactgaggtccatgttttcttgctggccacccatcagcggctgctctcagtttgtcggcagctgcttgccatgtggccctctgaaccaggctctcatgaaacagcagcttcctggta

SEQ ID NO: 99944 - DNA, 122 bp, Homo sapiens
gtggtgagagtaggggctgggtgcggggcggggcgggcgtggaggccggcgcggcgctcacgctgctgaaggtgtagggcacttgctggtccaagtatccggctttcatcctccgctccatc

SEQ ID NO: 99945 - DNA, 122 bp, Homo sapiens
agcaacagcgctggaattagaacccagatctgtccaatgtccaagtccttgctttcagcccggcggctccccttgactcctcacagtgtccgttctgtagagtaaggatcaaaccacctact

SEQ ID NO: 99946 - DNA, 122 bp, Homo sapiens
tagagttctgtccccacgctccaatccttcagatttggatctccccttcacacacaccctcgccttgccccaaagtcagcatcccccagcgctgagatatgaagaccaccccgtcaaagggg

SEQ ID NO: 99947 - DNA, 122 bp, Homo sapiens
agggaaaggagatgcctgcctgcctgcctgcctgcctgcctaccggtctgccttttggtccgccgcttggtggggccccaggtgtaacctctggctgtctcttctgcctggtttttgttgag

SEQ ID NO: 99948 - DNA, 122 bp, Homo sapiens
cccgaacgctgaggattctgctagctgttccgccctgagttaattatagctataaaatttcgcgaccagcaagcagaaaccgggcgacttctccagacacctaagactacgcttcccagaaa

SEQ ID NO: 99949 - DNA, 122 bp, Homo sapiens
catcaggctgaaatcaaagtgttaaccagggctatgttttcatttggagctcagggttcccggtaatcagaattcagttcctgcagttgtagggctgaggtcccattttctagccaatctag

SEQ ID NO: 99950 - DNA, 122 bp, Homo sapiens
atttttcatccctcatccccctcccaccctcctcccttttggagtccctgagtgtgtatgcgctgtttagctccgactaataagtgagaacatgaagtatttgcttttctacgttggagtta

SEQ ID NO: 99951 - DNA, 122 bp, Homo sapiens
tgagccaggatagctaagggaaaacaccattacagaaaacgaaaaccaaattggaaacagcgagatgataaaccaaccctggcagaaacatggttgtaacatggaaggatagctcaagaaaa

SEQ ID NO: 99952 - DNA, 122 bp, Homo sapiens
ttagcccagtcttaaggaggtcaggaatttcatatcacatgcaaacattaaaggcatttgcgccaggtgcagtggctcacgcctgtaatctcaacgctttgggaggctgaggtgggcagatc

SEQ ID NO: 99953 - DNA, 122 bp, Homo sapiens
cagctcggactctgccaggcctccgcccgtggccggcggcatcttccccctcctctgggtcgccctccggcccggaggcacactttgtctgaccagccgccccgccaaggagtcacaagagg

SEQ ID NO: 99954 - DNA, 122 bp, Homo sapiens
ttggtgtttattgttctctccaattagtccaggattggagaggagaggtactgagcctggcgatttaatcagaccttagttaaccggcaatagttattatcctaggatgctagtactgcaag

SEQ ID NO: 99955 - DNA, 122 bp, Homo sapiens
caaagtgctgggattacatgcgtgagccaatgcgcccggtgctttgcctactttttaatgcggttgtttgtttttctctcgtaaatttgtttaagttttttatagatgctggatattatact

SEQ ID NO: 99956 - DNA, 122 bp, Homo sapiens
cgcctcctccgtggatcggctgcacggcggagaatgctcgcctcctcgcacggtggctaacgtgctgctgcggctccataaatattaaatgggcattaaaagaagccgttgcgtttccagtt

SEQ ID NO: 99957 - DNA, 122 bp, Homo sapiens
gccgcgggcccggggggagcggggcggaggggcggctcgcccagtgcgcctgggtcggtgcgggcgcagactgggagctatagattgcaacgtgaagatggcggagtccgggttctctggga

SEQ ID NO: 99958 - DNA, 122 bp, Homo sapiens
caaagaaagaagaagtaaaaactaaaaggcagaaatgaaatccacaagcagacagcccggcgcctcaccctgggcctggtagttaaagatggacccctgacctaatcagttatgttatctat

SEQ ID NO: 99959 - DNA, 122 bp, Homo sapiens
aggtttcaacacaggagactttaagcaagttccagtgtgtctatatttggtctggctgatcggctggactctggccttccccgctcacgttagcagacagctctgccctagtgggcgcttag

SEQ ID NO: 99960 - DNA, 122 bp, Homo sapiens
ccgtggctgggcggagagcacgagcggcagcactgggtgcggatggtgggcagctggcagcggcccagtaggcgcagcgtctcgcagaacccgaaggacaggcggtcccgctcacagcctgg

SEQ ID NO: 99961 - DNA, 122 bp, Homo sapiens
aaaaaaaaaaagaagctagtgattccatatcttcaaatcaaatttcagtggagtgtttaccgggcaaggaaggcaggggggtcagcttgctgacagcctcaacctgccagccctcagcctgc

SEQ ID NO: 99962 - DNA, 122 bp, Homo sapiens
gcaaaatctagttctttccagctatgccctgccctaaaggaatctttggggccaagaagacgtgttcattcagaacttgtgccttcacttttagacaataatttgagtacctggtccctaaa

SEQ ID NO: 99963 - DNA, 122 bp, Homo sapiens
cactcaccagagacaaccactctgttttcagaccgcctggatggggggccatagcgacctcggggagctccgccacctccacccccgccgccgcctcggcctgttccacggccgcttcgagg

SEQ ID NO: 99964 - DNA, 122 bp, Homo sapiens
tattcatctaaggaaataatctaaatgtttatttaaaatgtgcacaaatagaagggtgctcgctgttgcaccagacatgtgatgaacctaagaccggatggaccatttgatggatctgctag

SEQ ID NO: 99965 - DNA, 122 bp, Homo sapiens
ccacaggtgtacccgcgacaccaggctcagcgtcttgctttcctcctggtagcgcagcagcgaaatgctcttcatgacgtcggctgccaggatgaagttcttgacgctgatcatctggtgta

SEQ ID NO: 99966 - DNA, 122 bp, Homo sapiens
tgaagcaggaaacttgcaagatagtacttgctttaatgacaacagcctacagtaaatacgcgagatgccagaacatttttttggcacaataagaagaaaaggaccagaaggctcagaggtgt

SEQ ID NO: 99967 - DNA, 122 bp, Homo sapiens
tttttccttctggaagttctgggaaacgtattccagaactctgtccggaaacaattgggccgcaggagcgcgggccttctgggaagggtagttcaggagctctgggcaggcagagccacttc

SEQ ID NO: 99968 - DNA, 122 bp, Homo sapiens
gaaagtaaagtacaacataaatccaaggcattatcattgtattcttatgctttaagtaaacgtagtcttagaagcaggtggatttattgacgttgttgatggttgcaggtgagagcacagag

SEQ ID NO: 99969 - DNA, 122 bp, Homo sapiens
caggtcctgagccctgccccacgggaaggcagctaaggcccagcgagaaatcaagcgcagcgccagtgggctggcactgctgggggccctagtacaccctccgcagccgctggcccgggtgc

SEQ ID NO: 99970 - DNA, 122 bp, Homo sapiens
cctcagggatcactgggggcttgagtgagccctgaccctctcctgggccttcctatgcagcgaggggccggaccctgtggtgcctgagggcattgtttgtggctctactctagatccgattc

SEQ ID NO: 99971 - DNA, 122 bp, Homo sapiens
gttctcctggggagatgggccttggccacagagagcccttgccattgggccccgagcgagcgggggctgggatccagagggcagtgtggccttggctggtgctgacgcgaggcggggctccg

SEQ ID NO: 99972 - DNA, 122 bp, Homo sapiens
tcgggtggaggctgaggcgggggcccggcctgatggacagcagggagatgggccgataggcgactggctccctccccacccggtgtgcgtgggtgggaaatcattccagctattctgcctta

SEQ ID NO: 99973 - DNA, 122 bp, Homo sapiens
agggggcagaaccaagcaaaagccagccagagttgaatgttccaaatgaaccgatccgcacgatcacacaagaaacccctctcctcaaaacacacgccctctcctctccctgcgccatcctg

SEQ ID NO: 99974 - DNA, 122 bp, Homo sapiens
cgctcagttcattctcactctggaaaacctcaggtgaggtggcccgactctgagcaaccccgtgggcgggaggaaagaggcaaataccaggcacagttcgaccctcggaaggtaaggccggg

SEQ ID NO: 99975 - DNA, 122 bp, Homo sapiens
ccgggctgcgaagcccggccccggactgcgcgcatgcgcccgtctttcatacctgcactccggacgcgcccttcgggtctgcactgacaatgacttgcttgcatcctttgtggacaccttat

SEQ ID NO: 99976 - DNA, 122 bp, Homo sapiens
agcgaggagaggatcaggttggcggatggagaagaactgtctgggagtgggaggatgaggcgatgatagatggctgttctgtaattaaaatacaggaagcaaggtttctctcctcagcaccc

SEQ ID NO: 99977 - DNA, 122 bp, Homo sapiens
ttcctcacctggaatgtgggcgacctcacacaggaagccgcctcttctagtgggcaccgacggagcgagcgcgcgtctgcagcgggactgagcgccgggagagacctgcgcaggcgcaggcg

SEQ ID NO: 99978 - DNA, 122 bp, Homo sapiens
gcaaacccacaggcgtgaactgtcatcactcccaaaccaacatgggcccctacacctatacgccaacccccagggtccctcctactgcttttgactccccccacactcacctcatccacctg

SEQ ID NO: 99979 - DNA, 122 bp, Homo sapiens
tgcacctgcttaagctgcctgagcatgccctcatctctgaacagcaaagataatcaataccgaggggtatgcagtggagtaatccacaccccaccccctttcccttgctcaggcaagggtac

SEQ ID NO: 99980 - DNA, 122 bp, Homo sapiens
ggtgtctaccctggccttgataagcagacaccactagccctgaaagcaaaggtgctacctcggcctgcgggaccacagcggatgcgcggccccagtcagcacacggtgaggggcgttaccac

SEQ ID NO: 99981 - DNA, 122 bp, Homo sapiens
gacccgggcattcgcgcgccccgggaacacctagggcagggactagttcgtggaggggctcgtctggtggcagtgcatgagtagtggaggccctgctcagtttttcctgtgcgagtgtgtgt

SEQ ID NO: 99982 - DNA, 122 bp, Homo sapiens
agccgtatcagtgcgaaccagctgaatgtcagcgctgttccctcctgtgacagaagccaccggcgcctgcctgagggcactcccctcactgggactctcagtaccacgcccacctgtcccca

SEQ ID NO: 99983 - DNA, 122 bp, Homo sapiens
tccagggcagagggcgctgggcggcgccgggaggcgcgaggcacccgggagagccggctccgtggcttcctactacctgaccccctgaccacctagttctggagccaggcttcttcaccctt

SEQ ID NO: 99984 - DNA, 122 bp, Homo sapiens
gcgactgttttgggggacgccggacgccatgttgtggaaaataaccgataatgtcaagtacgaagaggactgcgaggtgagctggggctccggggtgcagccccgccccgccgaggacagtc

SEQ ID NO: 99985 - DNA, 122 bp, Homo sapiens
aggcctgagtatgggcaacgggcgtccccgtagttgtttaggcgcgtgtgcacgtccgtgcgcttctgtgtctttgtgtacttgtgcgtggttgtgaaactcctctctcagctcggaggggt

SEQ ID NO: 99986 - DNA, 122 bp, Homo sapiens
atgcttaccaggcaaccagtcgcagcacctgcctcctgttgccttggttacggtgggtggcggggctttggccactgataatcagtgagcaccttgactatttaaaatatctcctggggagc

SEQ ID NO: 99987 - DNA, 122 bp, Homo sapiens
aggagctcacaggtgagtgactcacacaccggaagacgagatcaataatgtagacatgaacgctggctagccagtcccagaggaggtgtcatctgaccaaaccaaggcaagtctgggcagtt

SEQ ID NO: 99988 - DNA, 122 bp, Homo sapiens
ctgcccctggttgtgcggtccgcacttaactaagaggctggcatctctgggaacagcctccgggacccgcgcgctggtgcgtgctggagggagtagggaggggtggggcggtaggcatcgcc

SEQ ID NO: 99989 - DNA, 122 bp, Homo sapiens
aatgatttggacagatgtttactaagtttgcctttctaaaattttcttgtacgtggttaacggcaggtgattaatattcatgcaaggaggttttcaccagaatttcatggagttgacatcta

SEQ ID NO: 99990 - DNA, 122 bp, Homo sapiens
taaaatggctgaggagagagtcgcgacggtgagcgccgagattctctttagttgcccggccgcagggcaaggcaagctggcgggtggcttttgtcccatgcagcggttcctggagagaggcg

SEQ ID NO: 99991 - DNA, 122 bp, Homo sapiens
caggagagaagaaggtttggacagtgtgattcatggtgtccagcgaagaccagcggcggtcgggttactgggatggttctcagtgagccctccctttccccagtagtttcggtttctcaaca

SEQ ID NO: 99992 - DNA, 122 bp, Homo sapiens
gcaggcggggcctggaatgtaggggtggtgactgagggcgggccctggagtgacggtcgccgagcgctggctggcggcatttctgcaccagcagaggtcaagtctctgcccagcgccgggcc

SEQ ID NO: 99993 - DNA, 122 bp, Homo sapiens
cgccgcctcccgccgcctgcagcagcgacgcgggtcccaaccagaaacccgcacaggcgacgacgacccgcaccggcttctgcagcagctagtgctctctggaaacctcatcaaggaggccg

SEQ ID NO: 99994 - DNA, 122 bp, Homo sapiens
tacatgtgcacaacgtgcaggttagttacatatgtatacatgtgccatgttggtgtgctgcgctcattaactcataacaagtttataagagtaagtttcttgagagtgggagactgtttcct

SEQ ID NO: 99995 - DNA, 122 bp, Homo sapiens
agttcgaatcccaatctcaacgctagaaatagaattttagcgttgaagttaggattttagcgttagaatcagattcctggcttagtcatgaaagcttagcattagaaatagaatcttagctt

SEQ ID NO: 99996 - DNA, 122 bp, Homo sapiens
aggaagcgggaaagggcaggagggctgacctggtccgtgatgctgaggatccccatggctcggcccgggctccgtccgcatcgagctcccggcggcggcggcggcggctccaccggggacac

SEQ ID NO: 99997 - DNA, 122 bp, Homo sapiens
cgaactcctgacttcaggtgatccacccacctcggcctcccaaagtgctgggattacaggcgtgagccaccatgcccggctgggagcaggaccttcttgtgctccaatcattggtgtgactt

SEQ ID NO: 99998 - DNA, 122 bp, Homo sapiens
taagagctcccagccgccgtgatatatcagcttatgtcatcctgacacctacgcagatgtcggctcgaatccactttgcctgagcattgtctcagagaaatctaatttaaaaattaggcagc

SEQ ID NO: 99999 - DNA, 122 bp, Homo sapiens
ggaactcaagtcacacagctaggaggtagcaggaccaggattcaaacccacagagtctgacgctggcttcccgccccttggccactgtcctgccttgctgaggtcgtgggtagctcagtctt

SEQ ID NO: 100000 - DNA, 122 bp, Homo sapiens
gtgcgccggcctcccccagcagcgggttcattcccgggctcctgctccttctcagttactcggccctcggtcccttgggcacaatacctggaatcgagctgcgtctgccgagaagcgtctcg

SEQ ID NO: 100001 - DNA, 122 bp, Homo sapiens
aagaagatgccacttctggagagagaatagggatctcaacttagcctggcagtgagaatacgaatggcagctggaatgacccaacagggggctaatgtttgggctattgtgtgtgtcacact

SEQ ID NO: 100002 - DNA, 122 bp, Homo sapiens
gctccccggtgtggatgcgccggtgctgcgtcaggttggagcgctgccggaagctctggccgcactcggcacaggcgaagggccgctcgccactgtgcacgcgccggtgctgcagcagcact

SEQ ID NO: 100003 - DNA, 122 bp, Homo sapiens
catttaatgcctgataattaccaggatctgtgttgagtgctggggatgcaggaatgaagacgacaacacattgtgccaacatattgtggagacagacatgtaaataactaaaatttacacaa

SEQ ID NO: 100004 - DNA, 122 bp, Homo sapiens
ccttcccacacctctgccgttgtccacgcaggtgcgacgttgtgtgtcatctgtcaggaccggagctcactgcgccagacggtcgtccgcctggagctcgaggacgagtggcagttccggct

SEQ ID NO: 100005 - DNA, 122 bp, Homo sapiens
gggagaccactacgcctcgtgcccgcgcacgccgcgccgctctcctcggcgcccccgccccgcctgctcctcgcagccccgcccatgtgcctttctgcggctgcctccttctggcccccacc

SEQ ID NO: 100006 - DNA, 122 bp, Homo sapiens
tatagagggagtaaaatcccacgtgcttcgtgctgcagcagctggagggtggacctgggtcgacctggggggatgctcagccctgcgggtccgggagcgcgcagaacagcggggagggcttc

SEQ ID NO: 100007 - DNA, 122 bp, Homo sapiens
ggagcaggcccagcattccctcccgagcaggcccagcgttccctcccgagcaggagccgtcgtctgtgttgcttccctgcaagtaccattcgccactgatgaccattcttctgttcctctgg

SEQ ID NO: 100008 - DNA, 122 bp, Homo sapiens
aatgatcgtgcgaaaacccatgacttctggccagcaggtaactctcggtcacagtggccacgatgtggacacacactacagggacatcacctggccctgtgtccatgactgcacggagggga

SEQ ID NO: 100009 - DNA, 122 bp, Homo sapiens
ataaatattagcaacaataccagtactaagttttgtcattttttattaacttcttgtaaacgaccctactttcctgctctcacacactccttacacctgcatcccacctgatttagccactt

SEQ ID NO: 100010 - DNA, 122 bp, Homo sapiens
caggtcctcgacccccggcatgtaagggtagagtcaaggagggtcttcttaagcgttcctcggcgcggtcctgaagagattaaaggcgtcaaatggaccgctccacacctgagctgccgcca

SEQ ID NO: 100011 - DNA, 122 bp, Homo sapiens
gcaggcaatgaattcagggccacctgatggaaaacttgccttcctctgtccccaacacaacgaccagtacctccctgacccacccgctttgagaacctcggcttcacgcagtctcacggcat

SEQ ID NO: 100012 - DNA, 122 bp, Homo sapiens
ggtgcttttcctctttttgccgccgtactccattgagagtcttagtcatggagggaaacccgaaaaccaccggtgtccgggacagatactctgacgcattctcccggaacaccctggggact

SEQ ID NO: 100013 - DNA, 122 bp, Homo sapiens
ttttatgtctgatgatggagttggcatccacagggcaggcagctaggaagggaagataaacggtaactggaggagaataaggacgtgctggaacacatgagtatgagctggagctcataatt

SEQ ID NO: 100014 - DNA, 122 bp, Homo sapiens
ataacaagacaccattccacacccgtagaaagatgaacgttaaaaaagactgacaggggccgggtgcggtggctcacgcctgtaatcccagcactttgggaggctgaggtgggtagatcttg

SEQ ID NO: 100015 - DNA, 122 bp, Homo sapiens
tcaaagccgccgttctcctacgcgcagctgatcgtgcaggccatctcctccgcccaggaccggcagctgaccctgagcgggatctacgcccacatcaccaagcattacccctactaccggac

SEQ ID NO: 100016 - DNA, 122 bp, Homo sapiens
gtttgatatgaaaatgagtttgcccagaatgcacagcggcagaaggaagggggcgcggggcggagtcacgctgagtgacaggaatgtgcagacgttgaattaaaagcagcttggcacaaaca

SEQ ID NO: 100017 - DNA, 122 bp, Homo sapiens
gggctgcgggggattgcgcaaggccggggtttctggaggccgaggccgcggtgttttccgcgaggttattatgagctgagtgttcctggcaggcgcccagggactttccgcccccctccccc

SEQ ID NO: 100018 - DNA, 122 bp, Homo sapiens
aactcataagaaaggctatgcaattgctaccgcgctataacttccaggcacttcgtggggcgaaaataaatgggaaaactacagctcccatgaggcgaaggggccacgatgcccgcggaagt

SEQ ID NO: 100019 - DNA, 122 bp, Homo sapiens
gaggccacttcgccggcccaacctcctttcaagacagaagcagaccccatggaatccaggcgccccttccctccattcagccccggccggctcgcccgctagcgccagcctcccccgggcag

SEQ ID NO: 100020 - DNA, 122 bp, Homo sapiens
acagctcattctcgaagctgccaaggtcctgccccaactgagggctttcccaagagctcacggtgaggtgagcccctgtaacaagtgaccccagccacgctccgctcccagtcccttgactc

SEQ ID NO: 100021 - DNA, 122 bp, Homo sapiens
cagccgaggtctctcctattcggctcagaataaacttattctacacgatttgggtttttccgttaccaaaccacaagccaggactgggagtttctcattcattaatcgctgtttgctaaaat

SEQ ID NO: 100022 - DNA, 122 bp, Homo sapiens
tgatgcccactaagagtttgatattcatttagtttattgtttgtctccccatcaccaaaacgtaagctttatcagggtggggtcctatcttgtatttctagcacaaatattaataggtactc

SEQ ID NO: 100023 - DNA, 122 bp, Homo sapiens
gccggccgcggggggatagctgcccaggctcaggaggctcttgggctcctgccagccccccgcccccggatcctcccggagcagcagggcctctttagccttcttgcttttgggtgacgtga

SEQ ID NO: 100024 - DNA, 122 bp, Homo sapiens
gcctaatttggctcctaggcctaaaggggccagaatttctaaacgccacttgtagttaaacgtcaaacagtattttatacacacagtataagtactgtgacatgtgtctaccttttgcaata

SEQ ID NO: 100025 - DNA, 122 bp, Homo sapiens
caccagaggcagcgggcgtctgcggcctgtcaaaaactggcgcttttttcctcccctttccgtggagagactatcaactccatctgtcacaaaaattaaggctaaatctcctctccagaagc

SEQ ID NO: 100026 - DNA, 122 bp, Homo sapiens
cccgcccctccacactggagcaacgtcactgatctaacccagtgcaacttagggcccccccgtggggaagaagtcgctccccggcccttcccggggccctaccgtgtacccaaaacgcagcc

SEQ ID NO: 100027 - DNA, 122 bp, Homo sapiens
tttctgttagaatacccatgaaactacaaactttggtgcctttgggatggagagctgggtcgctgggggacagtggtggatactgtttcatccatctcttttaccaacttttgtagatgtat

SEQ ID NO: 100028 - DNA, 122 bp, Homo sapiens
gtgccaaagaggaaagtgcttccggcagcctggttaggggtggaaccaggaaagcgcaggcgtagcaattgctgcttactcgtaggtaggaggaggagtttctcagacctaggtgatggagg

SEQ ID NO: 100029 - DNA, 122 bp, Homo sapiens
tattgtccaaggacttccaggggggagtgtggtgtctgatgttttcacagcagagcatggcggctgggttccaagagggaatgttctaaacgtaccttgagagaaagctcagttccaggatt

SEQ ID NO: 100030 - DNA, 122 bp, Homo sapiens
ccccaccaagttctccgctggacccagatgccagtggagcacagagcggccgccagggggcgccttggggcaagagtggtgggggttgtggctgggcgggtctctgttcctggaatggggca

SEQ ID NO: 100031 - DNA, 122 bp, Homo sapiens
ccataggaggaggaccagaaacatctgccaccctcagaagtggacaaagaccccacgtcccggaacagagcctaggagatgccgaagggaccagagcggtctcccccagtggtgtgtgtgaa

SEQ ID NO: 100032 - DNA, 122 bp, Homo sapiens
gaaagtctctgaagggaatggttcagcctgacggggtggagcagtgacgcccgggctacgcgccagggttgcctggcagccaggagttcgaggaccggcggcggggcggggcctgtctccgg

SEQ ID NO: 100033 - DNA, 122 bp, Homo sapiens
cagggccatgcgcggcccacgacgccggggccccggaggacgaggacgacgaggagcaggcggtggcggcagctccccacgctcacaaggccactgcttccccgcctcccggctccgcccgc

SEQ ID NO: 100034 - DNA, 122 bp, Homo sapiens
atcgggtggggccctcgacggcggcgtaggttaggaggtcctgcagttcccccgggaacccgggctccctgagtgaggctcaaatagaaattcagaagcaaacaggtactaaagtgcgtcct

SEQ ID NO: 100035 - DNA, 122 bp, Homo sapiens
tttccacatcagagagacataaactggaattctatgtggaatgtttccaaagatggcttccgagtagtgattggtatagttattgctttggcttacctgtatgaattatggaggatgggtga

SEQ ID NO: 100036 - DNA, 122 bp, Homo sapiens
gagctgccctcacctccagggcatagggggcttaaggcagcaaaagaagcatggggggtgcggggcacacaggtcccctgcccacagccctcaggagtctcggtgctccagggagagctggg

SEQ ID NO: 100037 - DNA, 122 bp, Homo sapiens
acagacatgactcttgtcctgcactgacatgaaggcctcaaggttccaggttgcagcaggcgtgaggcactgtgcgtctgcagaggggctacgaaccaggtgcagggtcccagctggagacc

SEQ ID NO: 100038 - DNA, 122 bp, Homo sapiens
gagggtatgacttcctggaggcaaagataaggcgataaaattcctcctcctgagtctttgcgtccccaagaggccaggagatttggtgcagtcctcactttactccccgccccctaagtctc

SEQ ID NO: 100039 - DNA, 122 bp, Homo sapiens
agtacaagcggaggactcgccaggcgctgagccggaatgtggactgtaccacagtgactgcgaagggaggggaagacgacggcaaggaggcctactacacgagcagtaaggtccacactttt

SEQ ID NO: 100040 - DNA, 122 bp, Homo sapiens
tgatccgcttcaccttgtcgcgcgcccatcctaaacccgcgcgccccgcctcggctgcaacgttgctgacaggctggcgtgtcccaagctctttcattctgttaccgctggggcaattccga

SEQ ID NO: 100041 - DNA, 122 bp, Homo sapiens
gcctggtaggaccacggggcagggaatgtgagcgccatctgagctcacggtgtcctgagtcgcggcttcgtgactttggcaggggcctccggaccagtgaccccagtcaaacccagagggtc

SEQ ID NO: 100042 - DNA, 122 bp, Homo sapiens
aggggcacgtcctgccgggcggcaatgcctgtttctgcctctccttggaaccactgcggacgtctgtctgtcctgttgggttcctaagatgcctccccgttccccaaagcccacagagaaca

SEQ ID NO: 100043 - DNA, 122 bp, Homo sapiens
ggccctcacatggtctgatctctagatagccgccgccaaagagctcttgaagaatttttgcgtcactttgaggcgaataaacttaatgcttccccgcggccgcggctccgcgctcccgctgg

SEQ ID NO: 100044 - DNA, 122 bp, Homo sapiens
tatcttggagatttttcacatctgttcagaatgatccacactgtgtttcacagtctttcacggtcacctctcaaagcaggcattgcatattgctttgcagtaaacaagacccagcgcctcgg

SEQ ID NO: 100045 - DNA, 122 bp, Homo sapiens
gggtgttaggccaaattctattttcattggctgtcactgctgccggcctttgtaagggggcgctctgattggtcgataaggtgggggcgtcgagggtctttgagtcctaaggcttctaattg

SEQ ID NO: 100046 - DNA, 122 bp, Homo sapiens
aagggcatcaaaccacgatgcaagcttggctttaagtgaaggagagagagggaaggaagtcgggtagaagtgtcctaaattatcatgcatctaagaaacgtttgtcaaagccattggggaat

SEQ ID NO: 100047 - DNA, 122 bp, Homo sapiens
tgctgcggccccgtcctctggctcccaaggggcttggctaacagggaccctgagcaattccgtaacatgctgtcttcctttcctagacccttgagaccgccggctacgtgaagagcgtgtta

SEQ ID NO: 100048 - DNA, 122 bp, Homo sapiens
ctgccccgaacactttcctctgtccagctcttcccgtgccccggggctggggaaagcgtccggcagccccgccgctccctggccccgtcccaggagccaccccaccgtagggctccagccag

SEQ ID NO: 100049 - DNA, 122 bp, Homo sapiens
tacggttctggtcggaagctgccacaggccacatgtcagcggactgatgtggttatgttccgataaagctttatttacaaaagcaggcagcaggtcgtatttgaccctcaggctgactgtgg

SEQ ID NO: 100050 - DNA, 122 bp, Homo sapiens
agagcaaggacaagcgcatttacggcatttcctactctgtaaaatggccgcgcccatagccgtggctcctgacggcagccatgtttgaaaattggacgcacagaaggcagtggcaggttttt

SEQ ID NO: 100051 - DNA, 122 bp, Homo sapiens
gtctccgcgcattacgtcagtttcaagacaccaacactattaatatcaaaggagccttcgcggaggaaagcgccaccccagaccgagctcccttaaagagacagcgcgcgtccccgcgccgc

SEQ ID NO: 100052 - DNA, 122 bp, Homo sapiens
atcacttggcacaacaggcctcccctttaacatggaaggtattcagtaagggtcaaaaatcgaaggacctgagggtctactcccagctttgtccttggctttttgggacctaaaggaagtca

SEQ ID NO: 100053 - DNA, 122 bp, Homo sapiens
gagcggtgaaagcggctgccttcccctctcctgacaccagcaagggggaggcaccatcaccggccctgccccatcatgcatccaatgattactagcactagaagccaacggcaaaggacccc

SEQ ID NO: 100054 - DNA, 122 bp, Homo sapiens
tgttataacaaacatgacaaatgtgttgcctagaccagtttgccgttagtagcttcagatcgcctaagtcacaaactgcatctggaatgggtaggttggttcaggagaaccgcaggacatgg

SEQ ID NO: 100055 - DNA, 122 bp, Homo sapiens
cagcccctcgcgtggcgtggcgcagtgccttcgcgacctggtggccatgcagtgggccgacgcggccggggaggcggtgcccgaggggcccgatggcggggggccttggctggaggatgagc

SEQ ID NO: 100056 - DNA, 122 bp, Homo sapiens
ggtgagcccaccccataacaccctctgaggggctgctacaatgtcaggggtacccaagaacgaagacctccctactctctacactatcaaaattagtccttccattttctagccctctcaaa

SEQ ID NO: 100057 - DNA, 122 bp, Homo sapiens
cgagaagggtagaatcctgagagacattccaagagcagacatcccatcagctatgcaggacgcagtgtcactgaccgtgactttacgtgactcagatggaatcaggcttgagcttctcttct

SEQ ID NO: 100058 - DNA, 122 bp, Homo sapiens
ccaccagaaggaagatactcggaacacatccgaacatcagaaggaacgaacaactccagacgcgccaccttaagagctgtaacactcaccgcaagggtgcgcggcttcattcttgaagtcgg

SEQ ID NO: 100059 - DNA, 122 bp, Homo sapiens
ctgtcaaggtacaggggctgcgagtgatggctctgctcccttgttctgagacccctggggcgcccctgctggccgggacgtccctctggtgggaccgcgacagcggccgcgggctcgcccca

SEQ ID NO: 100060 - DNA, 122 bp, Homo sapiens
gagctttgtttctgctttgccaccagactgcggctgtgctttccccgaggccctgggatccgcctttgtggtggtaacaggactccccttctctagaggcagagaacccacttttccctctg

SEQ ID NO: 100061 - DNA, 122 bp, Homo sapiens
cttagttgttctactgctgttagtgagaaagccttattatcatcatatttagttgcatatcgtgtggcaaaagagaaaatagctaacacagctgctgaaaaaattattcttccagcatgttt

SEQ ID NO: 100062 - DNA, 122 bp, Homo sapiens
caggtgcatggaagagggtcccgcagagccctggggagcccggctggggactctgggaagcggacggcatccacacgtgtccacgcattcatcgttggtacgagatccaactccctacctcc

SEQ ID NO: 100063 - DNA, 122 bp, Homo sapiens
caacatggcaaaaccctgttctatgaaaaacacaaaaattagccgggtgcggtgggcacccgtgttcctagatacttgggatactgagacaggagaatcgtttgaacctgggaggtagaggt

SEQ ID NO: 100064 - DNA, 122 bp, Homo sapiens
acatgctagcttactatgcttggaggcatacacatgtgtatggggagaggagggcagaatcggggagcattaggagaaaaacctaaagtaggcacaggaaagattccaggggctcacacatg

SEQ ID NO: 100065 - DNA, 122 bp, Homo sapiens
cactcagtcaactctgagttaatcaaaagagagtgtctgggtgggcctgacctaatcaggcgagcccttttaaaaagtgggttcaggccttccctggaaggaaggagattcaaagctgaaga

SEQ ID NO: 100066 - DNA, 122 bp, Homo sapiens
cccacccctccctttccggtcccccaatccacagccgcaagtttccccaacactgcgttacgctacgccacgcccccggaggttcctaaccctgcgtgaggctctttcacctgcctcaggtt

SEQ ID NO: 100067 - DNA, 122 bp, Homo sapiens
agggtggcggcgctgcgggctcagccagtagtcgcccaggctgcggcgggcggcgggcgccggcaagaccgggccccggctgccccagaaacacaactcctggtccaggcggtgcggggccg

SEQ ID NO: 100068 - DNA, 122 bp, Homo sapiens
gggaagtggatgacagtgtgacaagaggcaaccaaggcaggtttgtgcaagattcagcttcgttgaggaccacccccgcaacctgcccagagaggcctgggggttggaaacattgtgaaaac

SEQ ID NO: 100069 - DNA, 122 bp, Homo sapiens
cccctcccccaccaccccccctgcccagtgtgggggctaaggccctcccaacagcacccccgcccccacccctgccaggcctgggggccatggcccccccagcacctcctctaccaccaccc

SEQ ID NO: 100070 - DNA, 122 bp, Homo sapiens
ttcctgcgagcccaccacctcctgcgtggtcctagggtctgtgtttcaaactggatttgacgtggagcctggccgagcaaccaacagagatggtcaggctgggggaggggctcaaattcttt

SEQ ID NO: 100071 - DNA, 122 bp, Homo sapiens
caggtgaggaagtgtaaggtgggcgtgtggccctccagagccatggagaagatgctgtctcgagggaagagccggtgcagagactcggtgctccaggcaggcccggtgacttggaagctgag

SEQ ID NO: 100072 - DNA, 122 bp, Homo sapiens
tcttcttccagacgcggtactgcagggagcccaggtacttgcagacatcgataagcatgccgggctggactggctctggctccatggtgcagaagagtctggaaaagtacaatgggtatggt

SEQ ID NO: 100073 - DNA, 122 bp, Homo sapiens
tctggtgactcagaagccaacacactgcgggagtccagccgtcggccccctgccgtgtggcgaggcccagtgtgtcccctttgtaaggacagcacaagcaggagttaatggaccggccatcc

SEQ ID NO: 100074 - DNA, 122 bp, Homo sapiens
tcatgcagctccagaatgaagccataatccaattttagaaaacgtatcatctgggccgggcgcagtggctcacacctgtaatcccagcactttgggaggcccaggtggcagatcacttgagg

SEQ ID NO: 100075 - DNA, 122 bp, Homo sapiens
ggcgtttccttgcattccctgcgtgctgggctacggagagtgtcaaggccagagaagccacgccggcctttggacctggggcgcctcgggcagccaaggagagctgcggtggccgctcctcc

SEQ ID NO: 100076 - DNA, 122 bp, Homo sapiens
ggataaccaaacaggttttcctgaaaaaaatcattaggaggcagattccaatgagaccaacgggaaacatttttaaaagcataaaagatcgcctcaggcatatgctgagggaataaaggtgc

SEQ ID NO: 100077 - DNA, 122 bp, Homo sapiens
ccgccgcttcctcatcctggcacactctcttcacagccgaagaaggccagttgtatggaccgtgtggtggtggtgggggtggtggcggcggcggcggcggcggcggcggcggcggcggcggc

SEQ ID NO: 100078 - DNA, 122 bp, Homo sapiens
tgccatccactactggcaaggggaaagaagtttaaagaacagactgtcattccccaaattcgaagggaagaatcaaattgttagtcttttacctgggcatctcagagtgttctaagattaca

SEQ ID NO: 100079 - DNA, 122 bp, Homo sapiens
ggctgcaaaatggctgccatttttacctgttgccacgcgatggcgctgtcgcaacaggaacggtagctttcctggccagctcgcctcgcgggcccctaaggtgctctacctggtattgagcg

SEQ ID NO: 100080 - DNA, 122 bp, Homo sapiens
agaccacaaacccggcgccctggctgcaaactcctggccttccgccgcggcccccgaaggcgctctggcctggcaggagatccactcagacccttacccggccgccagccaccatggcagca

SEQ ID NO: 100081 - DNA, 122 bp, Homo sapiens
agaagcaggaggcgcacagatgggcgggatctgcactggaggcggtgcgaccttgcggggcggtgcaagctggcggaacccgcgtgagagaggttggtgttgcgaagggaactagtccggtg

SEQ ID NO: 100082 - DNA, 122 bp, Homo sapiens
tcacctgattctaactccatgcctggcactctcagcagcatgaggcctcttcagaaccggcggagcacttaattgaatctgctcccaaactgccagctaaatgtgcactaattaaagttgcc

SEQ ID NO: 100083 - DNA, 122 bp, Homo sapiens
gaagatggccgaataggaagagctccggtctacagctcctagcgtgagcgatgcagaagacgggtgatttctgcatttccatctgaggtaccgggttcatctcactagggagtgccagacag

SEQ ID NO: 100084 - DNA, 122 bp, Homo sapiens
tcctggcttaccttcctgtacagctgactagagagtgctggggactgtgccccacgccttcgcatgtggaagactaaatcccccgcgtgatggcatctggaggtcgggcctctggggaggtg

SEQ ID NO: 100085 - DNA, 122 bp, Homo sapiens
tggggcggcaagggcttcggaggcttggcccctgcttggctccggacctggctcccgcctcggtaaccacactctcggcctttggctttaccgagctgggacccttctcccatcccccttcc

SEQ ID NO: 100086 - DNA, 122 bp, Homo sapiens
gggagacttgtttctccttgtctatccctgctgccaccttgtggtcacagatgatagtaccgtcttcccatcctactctcctaaacacacacgtgcacacatacacacacacctgatgacac

SEQ ID NO: 100087 - DNA, 122 bp, Homo sapiens
gtcccgagccctgcccggcggggaggcagctaatgccccgtgagaaatcgagcacagtgccggtgggctggcactgctgggggacccagtacaccctccgcagccgctggcctgggtgctaa

SEQ ID NO: 100088 - DNA, 122 bp, Homo sapiens
ttttactagtttttttcgagaattctttacaatgaaattcttagtaatatgtttgtcatccgttatatttggggattgagaaaacagaattgttcttatatttatattttaataaatatttt

SEQ ID NO: 100089 - DNA, 122 bp, Homo sapiens
gtggttggatgcctggttgctccctccaggcatgttttgccatccactgactttgacacccggagctctctctttcaaaccctcatcggagcagatctcagccagcatcaactcacattatc

SEQ ID NO: 100090 - DNA, 122 bp, Homo sapiens
attttatatttatgagacttaattccagtttatgttccaacctgcacattacattctttacgtgatttattgctacttgtaataatactatttataacacttttcatccttagttctctcaa

SEQ ID NO: 100091 - DNA, 122 bp, Homo sapiens
tctatgatcagccacagtcagctattaccataaattggtctctgtttattttgaagatcacggctgcttcattttgcaggattaagtagggctaatgtatcttaaagttaagatcttgaatt

SEQ ID NO: 100092 - DNA, 122 bp, Homo sapiens
aaaactggtaataaatctggaggctttgtacaagatctgaaagctgccttcacaatttgccggaggaggcatgtatagccaggagttaaggagattatgtaaaccaaggaggagaatggggg

SEQ ID NO: 100093 - DNA, 122 bp, Homo sapiens
cctgggctcagacactgagaagccagcgtcaggaagctgctgcatgagcaaaggcaggtgcgggaaattccaaggggagcttggcttggaggctccttatgtcctcaggctaaaatgattct

SEQ ID NO: 100094 - DNA, 122 bp, Homo sapiens
gggcctagaaaaatggtgggtttctctccatctagattcaggcggtcatctgctgcctaacgcagtctggggtccctcatggtaggggaggcggggtcaggaatgggcggggcattcgctgt

SEQ ID NO: 100095 - DNA, 122 bp, Homo sapiens
gggctcaagccgcccatcccagatgcggtcttccccactccacgcccacctcttccagcccgcaccccaaatcactgagctgcccacaaaaatgcagtccagatttgagaagcagctgacgt

SEQ ID NO: 100096 - DNA, 122 bp, Homo sapiens
ggtggcccagaccaaggtgtccatgaccttgtcagtttcactgccctgagtgccctgtcccgtccccagtccctccccgctggtgggcgccagcccgcaccttccgtgcacacacaggtgta

SEQ ID NO: 100097 - DNA, 122 bp, Homo sapiens
cccggcctcagggaggagcttccaggagggcaggggtctcctttggagcagcaccggggacgtttgctcggcaagggctttttgtgcgaagtaaccgaagccagtcaggctaatggcggcag

SEQ ID NO: 100098 - DNA, 122 bp, Homo sapiens
gttccacccctgcccaaggagggtctgagactgagcccttgacacgagaacagtcctccccgttcagattccagcagctggcatgcaaattgttaatgctagaggcagaggcaagaatgtca

SEQ ID NO: 100099 - DNA, 122 bp, Homo sapiens
cccccccgcgagtctccggctccaagatccaccccgaggctgcgggacccgccagatcctcgacccgggagaggcccaggcgcctttaccaggtttcattttccgtttaggccaaaatcccc

SEQ ID NO: 100100 - DNA, 122 bp, Homo sapiens
atatctgctgtcttctgtaaatataaaacctcaagtccggagatccctagacactgggagcgatcaagggccgggagtgtgccttgtggacgaatgaggaagtgggaaggccgtcctgagaa

SEQ ID NO: 100101 - DNA, 122 bp, Homo sapiens
catccttcagtgatgtgtggacggacacattccgcgtatcccccaatcagtggatggacgcgtgggttgcagagcacgccacacacattcagtcagtacacgagttaacagttgcgtgcttg

SEQ ID NO: 100102 - DNA, 122 bp, Homo sapiens
agactactgaccgagacactactttcggcatggtttccaggagcaacctgaaaaactctacgcaaagaagagggtcgcgccgaaatgacgtcacgagcgcgccttgcgccttttccctgcgg

SEQ ID NO: 100103 - DNA, 122 bp, Homo sapiens
agggtcttgctctgttgccttggctgtagttttgaactttgatgtgaggaaattctcctgcgtggctgctcctgcactgcatggctctgagcatctgctctatgtctatttctgtcctccat

SEQ ID NO: 100104 - DNA, 122 bp, Homo sapiens
gtcgttgtaagagattcaggactttcctggagcaggcgcggcccgggagcctcctgggggcgcggggagggggggcggttgtgggaaccgaacttggccgctggcaccggtccggcgggggc

SEQ ID NO: 100105 - DNA, 122 bp, Homo sapiens
acacattaagctacacatggtttacatccaacagatattacttttttagttaaaaaagttcgtatgcccaggcctggagtttctaatccaagatgtgtgcattagggctccccatgtatata

SEQ ID NO: 100106 - DNA, 122 bp, Homo sapiens
cgggcgcgcgcccctcccccgcccggcgcctcacaaaggccctttgtcccgccgagcccccgggactccagttcctgaaaagttccaggagaaaaatcaaagagagagcaaaatcggcgagc

SEQ ID NO: 100107 - DNA, 122 bp, Homo sapiens
atctacttttctttcttcctccactctccgtgagattttagggttctagccataaatgtccgtacaaagcatctctgatcaaaggggcaactttagggtagaaaaataaacaccctgaaagg

SEQ ID NO: 100108 - DNA, 122 bp, Homo sapiens
ggattagagtcaaaagaattttgccatttggccaatagcattccccacctcctgacatatcgattttttttctagattcccttccccctgccactcccctccccccaacacacacacacttt

SEQ ID NO: 100109 - DNA, 122 bp, Homo sapiens
tgttatgtcgatgttcgacaacttaatcattaaaagccccttatccaattaaatcacttgcgtttttaccttacagttaggaatccttttgtctatccaacttttcccaataggggttgcaa

SEQ ID NO: 100110 - DNA, 122 bp, Homo sapiens
aggaggccaaggagggcactgggagctccgttccgggagagctgtctaaggacgcggaaccgggtggggaggccagggaggtaaccaagagtccgagccgggcctggaaattctgaggagga

SEQ ID NO: 100111 - DNA, 122 bp, Homo sapiens
gcccagggcgagcccaagccggagccaggcccccagcgccgcgcagcccgcgcctccccgcgtccacatccgccgcgcgcaatgccagcgcgtccccccggagccagtccctgtcccgcaga

SEQ ID NO: 100112 - DNA, 122 bp, Homo sapiens
aagggagggcgcagcctttgtcccgcaggtctcccgcgcccgcctcgctgtccccgcgagcgagcttgggctcgacccccgttccccctgaacgcacctgcaaacaaaggagagccgttcct

SEQ ID NO: 100113 - DNA, 122 bp, Homo sapiens
ttgtaaaggatgttaagataccaggtcaagcatgccaaattacttcccaaaattgtagtacggctggcaaaggatattttgaactcctattttccaaattctaactaacaccaatagggaat

SEQ ID NO: 100114 - DNA, 122 bp, Homo sapiens
cggcgagccgccgactggctggtcccctccatccacctcaccctccccgcccctccctcccggcagccccagccccggcgagcacccagctagccgcctcctgcaggggctcgggagagcaa

SEQ ID NO: 100115 - DNA, 122 bp, Homo sapiens
gacacctcctgacacgtcctgcgggtgcccggtcctcagttggctcgagccggatcccggcgcgccaacggctcgaccttgccccccacgaggcagggcttcctgcccggcaggaaggactc

SEQ ID NO: 100116 - DNA, 122 bp, Homo sapiens
aaaaggggaggggcagccccgtgtcctgggggcccccagcaggggaagtggcgggtgttgcgctgggcatcctgtctgggacatctgtctgggagtctgtcggtgcctctcacctggcgagg

SEQ ID NO: 100117 - DNA, 122 bp, Homo sapiens
ataataggtgtgcatcagaatcacctagcttgttaaaacacattgctaacccctaccttccgcctaagtgggaggaatttttatttctgacaggttcccaggtgaggctgaggctcccagtc

SEQ ID NO: 100118 - DNA, 122 bp, Homo sapiens
ctttacaactggttttcatttcctttccaatttaaaagtgtgtatttaatgtttcatcttcgacactgtgataatcatgaagttttgtgtgagaaagataagggagaagataatctatgatg

SEQ ID NO: 100119 - DNA, 122 bp, Homo sapiens
gtgtgtcttctcccagccctgcaggtcttaatcgcctctggctccaaagcccaacacagacgccgcatctaccacaaagcttctctggatcctgaaaccaccaggagacacatcctctagtg

SEQ ID NO: 100120 - DNA, 122 bp, Homo sapiens
cacaattgtgaaaactgtcattattgtaatcgtcctttattaatctgatccagtgtgcaccgcactcggaaaagtccgaaattaggctctagccgtgttaagattttgttttgttgtctgtt

SEQ ID NO: 100121 - DNA, 122 bp, Homo sapiens
ctcacaccttgggaaagggggctgcggggtgggccacggcagggccatggcggcttccaccggttccgctgtgttttgggagcacagtgatagcttgggaggaggcacaaggtccccattta

SEQ ID NO: 100122 - DNA, 122 bp, Homo sapiens
ctgaacatccaactgccttggtgaggggagaggaagaaattttacaggctttttattggccggttatttttctgtgtgtcccatacaggcccccaccatgaagggtttcacagccactctct

SEQ ID NO: 100123 - DNA, 122 bp, Homo sapiens
gtgggggtgacggacaccaggaagggcaggaagaagtagcaggttacaccatcccctggacgatcccacctctgcctgacaatcagtagcctctagagatgttcaagtgggggcactccctc

SEQ ID NO: 100124 - DNA, 122 bp, Homo sapiens
ggggcagggcgttagaaaaaccccagccggtggcccgggtctgaggggggctccaccctccgtgggctaaggcgtccctgcgcccaggagccgaggccgacaaagcgtctccccgatggtgc

SEQ ID NO: 100125 - DNA, 122 bp, Homo sapiens
agcctggcgcctggtgtcccctcccttcccaagccccctcagcttttccactgccaccggcgtacaagcaagtgccgagccggcctccgcaagtcggactagcctcccggcgtccgaggcca

SEQ ID NO: 100126 - DNA, 122 bp, Homo sapiens
gggacctctggagggtgattaggtcatggtggcagagccctcatgagtgggatcagcgtccgtacaggagagatctgagagagaccccatgcctcttccacagcaaggcaccacctaagagt

SEQ ID NO: 100127 - DNA, 122 bp, Homo sapiens
cacgctctcgcgcgtgggccgcagctggcagcacaggaagtccaggtggaagagcggcggcgtgggcggcccggcgcggcgcggcgagtgcgggctggtatcggccgagctcgctttttctg

SEQ ID NO: 100128 - DNA, 122 bp, Homo sapiens
gagctcggctaccctcaagctgactgggacaccctgggccagttgggcactacctctctgcggctgctgggtgtgggtggcactggggactggagggtagagcatgcatgcagcccagtgtg

SEQ ID NO: 100129 - DNA, 122 bp, Homo sapiens
cagcgctagagcctcggcgccggttccggggccggtccgcggtcccacagccgccatgcgcgctctccgcgcacccagatctggtcgcgcctgggcggccactggacctcacaggacgcgga

SEQ ID NO: 100130 - DNA, 122 bp, Homo sapiens
ggaaccccctcgtgggcccgaggggcagacagacaggagtgcttcctaagaattacatcacgctgcgcaacgctgcggctctcggactccctggtgcaaaggggggtggggtaggggctgtg

SEQ ID NO: 100131 - DNA, 122 bp, Homo sapiens
gagggggtggtcgggttgtgccattggggtgtccggaagcttctcagccagggtgggggtcgtggagtgggggagggaggccagccgggctccagaggggtcagggcgcgacgagaaccaac

SEQ ID NO: 100132 - DNA, 122 bp, Homo sapiens
cgcccctggctacactcgataacagaaccacttactggcgattcacaggaggggaccgggcggcagggcggggcggggcctgcggggcgcggggccgcggcgcggagccggcgcagcgattg

SEQ ID NO: 100133 - DNA, 122 bp, Homo sapiens
aatgggtgaaagcagcacaatgtggcaagaggagagaacaggattccgattccgtgggggcgtgggaacactgagttccgcgcagggagtttccctgttcagagcaccttgtgcgcgagttg

SEQ ID NO: 100134 - DNA, 122 bp, Homo sapiens
ttctttcatcctgcgtccctcgtttcctaaagagcatgtataaagtcgatttcctagtgtcgacatgagattcaactgggtaaccgatggaaatggtcagcattagtcagaatctatgaccc

SEQ ID NO: 100135 - DNA, 122 bp, Homo sapiens
tgaagtacgacccacatgggaagtaggaagtgcggcgcctgagcttcctgtataaataaacgcgctgctaccgctgctggcgagctgtgccccacgctcccgctgcaacagtcccgggcatc

SEQ ID NO: 100136 - DNA, 122 bp, Homo sapiens
gagtcagcatcatgaacatttattatgattattttatttaaaaaaaaagccccacatctccgggcaataaactacaatacagtaaaaagtagcatctggtgttaagacactctgccgacagg

SEQ ID NO: 100137 - DNA, 122 bp, Homo sapiens
tcgggcctggggcgcggcggacagagacccggtcccagagcctggcggagcccgacaatccgccctgtcaggaggaatctcatcaacagcccgtgaattaattgtccttgcagttgggaaat

SEQ ID NO: 100138 - DNA, 122 bp, Homo sapiens
gccccgaggctctctgggacctgtcacccgcagccccggggtgccactctgctttctgtgcgcagctccaaagctgacagcaccgtggtgggaccctgcgtctgcatcacccaccagcttgc

SEQ ID NO: 100139 - DNA, 122 bp, Homo sapiens
gtggggcaggcttccctggaatgctcttcagaccggctgttcctagatcagactgagaaccggaatggttgacaaggtctgtatgttttgcttgcctgggggcagatctgcttgaataatca

SEQ ID NO: 100140 - DNA, 122 bp, Homo sapiens
actcttcggaatctgcccactcggggctgcagggcaagtgtttaggatggttcccagccccgcgctggcggtgaaaatttcaacgtcattccttcaattaaaaaaaggggggggcaagggag

SEQ ID NO: 100141 - DNA, 122 bp, Homo sapiens
gtcaagcgatcctcctgcctcagcctcccaaagtgccgggattataagcatgagccactgcgcccagcttaagaataagattttaagagaaatttagcaagtactgctgtaaacacacattt

SEQ ID NO: 100142 - DNA, 122 bp, Homo sapiens
tccaggacttggtctccaggactgaggtcaactgacgtgggcgtggtctgactgtgtgggcgtggccagggaatgaactcacggctctggcttaaggggtgtggtgaacgaaggatggggcg

SEQ ID NO: 100143 - DNA, 122 bp, Homo sapiens
gagctaaaccagcctgcagagcctcctcgatttctgccacactgcagctctgggagatgccggcaatcaatagcgctttccgagggttcatgtccatccccctgcaccagtcttctaaaagc

SEQ ID NO: 100144 - DNA, 122 bp, Homo sapiens
cggcggctcggcgcccggcttccagcacgcttcgcaccacgttcaagacttcttccaccacggcacctccggcatctccaactcaggctaccagcagaacccgtgctcgcttagctgccacg

SEQ ID NO: 100145 - DNA, 122 bp, Homo sapiens
aggtgagcctgatgcgactccacaatgacaaaacgtcctgcacgtgttaaaaactcaatccggaccagcttccccattcgcctgccagagcagcagttaaccttcccctgggatgggctcca

SEQ ID NO: 100146 - DNA, 122 bp, Homo sapiens
ccctctcctctctctgaactgaatttcttgatataactctcaataagcccagagggagggcgtgactgcccaggccccgcccccgggctctgattggcctgcatcttgcggcgcgggcggcc

SEQ ID NO: 100147 - DNA, 122 bp, Homo sapiens
tgatgaattgttcttttaatgagatttttcatgatttaagtcattttaggatgattttaacgtcttccttctagtagtgtagaatcttcatatgagtagaccccaggagagcctgattctaa

SEQ ID NO: 100148 - DNA, 122 bp, Homo sapiens
gtgcgtgggaggagcggtggtccgtggggtccccagtctcttctttttccccagggggaccggtttgccccttaattttacaaacgtgtgaaaacaggatctcaaatccacgaccccgtttt

SEQ ID NO: 100149 - DNA, 122 bp, Homo sapiens
tgaatcctttgaaaatttgcaccatgggctaaaatgactgtggtatgtctgtgtttccagcgtaaccgtagtgctcattcattcattcatcattgattcattcaggcagtgcaaagtttcac

SEQ ID NO: 100150 - DNA, 122 bp, Homo sapiens
aaagccgcggcgatcatggtgcgggcgaggcgagggcgactcgacggcggggctggagggcggcggcacaggcacccgcgctgggcgcacgccgggacggcgggcacgggtgagcgcggctc

SEQ ID NO: 100151 - DNA, 122 bp, Homo sapiens
agcgcccccggccaggttagagccctcctagctccgtccgcgcagccgctgagcaattcacgtccagggctctctgggctgcctggtttgggaaatgtcacgttgattcccgcacgtgccca

SEQ ID NO: 100152 - DNA, 122 bp, Homo sapiens
tctgggacacaggcctgagttctgattggccctgacccgcccacggcaacctatcagctgcgaggctttacgtcttcccctgggaccagcttttagtgacatcccaggtgctgcgtgaagcc

SEQ ID NO: 100153 - DNA, 122 bp, Homo sapiens
tgtcaaaaaacagtgatcctgcggtatgtcgcaggagactcacagtaagcaaatgctggccgcctggagggcaggcatggtgccagttgcatttgggtggccccatcagagaccctgacggc

SEQ ID NO: 100154 - DNA, 122 bp, Homo sapiens
ggtagtttgcttcctctgcacccctctggctgcctccctggctctcttccttgccccttccgtgcaatagttccctgttgaatagcaactacctagcccaggtgttcaggacccaatttcag

SEQ ID NO: 100155 - DNA, 122 bp, Homo sapiens
ggcagtccctgcctctggacacccgtcttcatttctgaacgcctgcctacaaaccaggggcgcccacaccctcctcaagttcaataatgtggcagaactactcacagaactcagcgaagcgc

SEQ ID NO: 100156 - DNA, 122 bp, Homo sapiens
gattagaccagcgaggcacagagaggtttagcaccttgctccagtcacacagccaggccccggagcagttctggaggaaaggcccgcttgggcttgggcatggtcggattgaactggggtca

SEQ ID NO: 100157 - DNA, 122 bp, Homo sapiens
caaaaacgccaaaaaggaaagtccttttccaggacaagcgcacgcgtgctggtcgtggagcgccccctcctcatggagaccggcctgggattgatgtccttcattaacaatgaggctaaact

SEQ ID NO: 100158 - DNA, 122 bp, Homo sapiens
tcggcagtagcgtcgtaagcctgagcgcttgtgtaccgtgacatactcttctgctcaggacgtctcggtctggcaggtagctttagagcaggtggtgttcagggttcccatgcatgctctgt

SEQ ID NO: 100159 - DNA, 122 bp, Homo sapiens
acgagcgaggaccggaggcttgttttttggctcttgggggttctgaaagaagtagaggttcgggatgggtggaggagtgctgtatccccaaatctcatggcctctatctccctgactcagct

SEQ ID NO: 100160 - DNA, 122 bp, Homo sapiens
ttcctggacccctggatggagaattttacagtccttttgcttcagtgatggtggaggccacgggagtggtgaagaagttatccaaagtgagattttattgttgttgttgagatagagtcttg

SEQ ID NO: 100161 - DNA, 122 bp, Homo sapiens
tcaacttttcagaaatgatcatgcgattgtaaaacagtgggaatgcagctgtgtaaactacggccggttctatggatgtttctataattgaagaattgctttttgtcaaaaatacggattcc

SEQ ID NO: 100162 - DNA, 122 bp, Homo sapiens
taagtgcactcaaaagtcacatgcggctaacttgccaccgtaacacagcagcctttaaaccgcgctcacgctgcctcgcggctgtggcggccccagggcagtgatgcgatgctgtccccgta

SEQ ID NO: 100163 - DNA, 122 bp, Homo sapiens
gagtgagctggtttaatactctgagaatgagcagggagatccagagaatgaatccctgaccgcatcacctaaactgtcttccaaacatgagacaaagctgactgttcacactgattgcccag

SEQ ID NO: 100164 - DNA, 122 bp, Homo sapiens
tggctgagggggtcctggggaggggtctgtgagagctcttcattaaacagtggctaaacacggtttactgaatcagtagtagtcattgcttgagtagtctgattctcagggcagatcccggt

SEQ ID NO: 100165 - DNA, 122 bp, Homo sapiens
atgtgtggagccgtataggagggtggggcctgtgcccagagggtcctggattggctgagacgccaagggcggtcggagtggtcctggttgaaggggggagaaaaacagccagatctttgact

SEQ ID NO: 100166 - DNA, 122 bp, Homo sapiens
tgcactggagtcctacagcactactttccatattcaacaaaacctctctttgcatagatacgtgtgtgtaaaaacagaacattcatactgaggccagagtgccatcgaaggtaattatagag

SEQ ID NO: 100167 - DNA, 122 bp, Homo sapiens
ctgtggagaatcagctacatctcttactaggaacttctcattcagccagttattccactgcggagatggtccaggaccattagggccatgctagacattgggaggctgcctgtcaggtgaac

SEQ ID NO: 100168 - DNA, 122 bp, Homo sapiens
aggggaatttgagagttgaatttgagtgtgcgcttgtaaaggactcaaccctgccagtcgcggttcaagatcagggttggctgtaggtgggaggccgtgcagttcctgggaaagctaactca

SEQ ID NO: 100169 - DNA, 122 bp, Homo sapiens
cttctgaaaaagaaccacatctgaactgcccacgtggtcagcttcatggcacttactacacgtaaagactgcgcttttcacactggagcgtgagacaacccaaggtcttaggagaaagcagg

SEQ ID NO: 100170 - DNA, 122 bp, Homo sapiens
ctttgcccgggtttgcccctagctgcggaggctgttctacatctgacccttggagcaggccggctgacagcgtagtaaaggaagatttctgcgggagggcggccagtgcaaaacaattccct

SEQ ID NO: 100171 - DNA, 122 bp, Homo sapiens
aggaggccgggcgcggtgtctcacgcctgtaatcccagcactttgggaggccgaggccggcggatcagctgagttcgggagtttgacaacagcttggccaacagtgaaaccccgtctctact

SEQ ID NO: 100172 - DNA, 122 bp, Homo sapiens
ctttaaccttgccctcatagactgggggggttagtgctccccgcttccagcgattctcgccgcctcctgctcctgtgtagtaactgggccttcagactttagtctcgctccgcagcctccgt

SEQ ID NO: 100173 - DNA, 122 bp, Homo sapiens
tatcctgatgaacaactaactcctgaaaatatgccattaattttgagggatataagaatgcgaaaaatggggcgccgattacctaatttaccttctcagagcagaaataaagaaacacttgg

SEQ ID NO: 100174 - DNA, 122 bp, Homo sapiens
ggatagctcagcagcctccattttccagatctttctcgaacccgcagcttcttgggcagccgttgcccgagtgctgacggaagcggccgaagtccgggcccggagctggctcgggcgcggag

SEQ ID NO: 100175 - DNA, 122 bp, Homo sapiens
tgttgtccatgactaacgctcttcttcagtctctcttagtccttgatttatgtcaagacgcgttgatattggaagtctgtgcagtgtgtgtgtgtgtgtgtgtgtgtgtgtgtgtgtgtgtg

SEQ ID NO: 100176 - DNA, 122 bp, Homo sapiens
tgtaaaatgggattacggattctgcctgtcacaccgggctgctgtctgggggacacagggcgcctatgtcgtgcggccctgctcttggcaagcgctcggcaaatggtggctgccattaccgc

SEQ ID NO: 100177 - DNA, 122 bp, Homo sapiens
acctcgttagcctaacagatgttgcattaggtgaaaaatttccttaaactgctttttttccgtgttgtctcttcaattcctgtggattttacctaaacccacctcttcatattttacaccta

SEQ ID NO: 100178 - DNA, 122 bp, Homo sapiens
cacttaagtcacacgactgactaaattcagtgtttcacttcaagttttaagaacagctcacgcttgtggagatagaaaaaaaatgtttttgggaaaccagataaagaatccggaataatttg

SEQ ID NO: 100179 - DNA, 122 bp, Homo sapiens
cgcgcgggtcgcaggcgagcggcccaggagacccgtgcggtccccacgcgctctgggacccgtgcagccagccggctcagcttgcagctatactttgataccaaacaaaacttttttttttt

SEQ ID NO: 100180 - DNA, 122 bp, Homo sapiens
atggccagaagtggcggtggggggtggggttgtcggaggggctggagccgcgcaggaaagcgcctttccagcaaggggctgctgccgtctggtcacctttccagaactccgactaagaaagt

SEQ ID NO: 100181 - DNA, 122 bp, Homo sapiens
gcgatgaactccgagacagagatctggtccggcatcctgccgggagggacgagacacaagcgggggcggggggtgagtcacggcgcaggctcccggggccgcgggccgcccggaggctcatg

SEQ ID NO: 100182 - DNA, 122 bp, Homo sapiens
caggtcactgaactgcgcttcactgcgccagcccctccccttcagtattttcatcgcgtccgaggaatcggcatccaccacagcagacagaaggcagggaagatcatcccccaggccccaag

SEQ ID NO: 100183 - DNA, 122 bp, Homo sapiens
tgaacggacagtggttcccggcgccgccccatctttgcctgggaaggggagtggatgtagcgttgctcttatgagtcacctgtccgaggatgaactggagatccagaaattggtcaccgaat

SEQ ID NO: 100184 - DNA, 122 bp, Homo sapiens
gacactgagcttgaaaacattacatgctagccaaacatattcttccactctaggacaatgcgatatatatgactgacatttgtaaacaaagataaaatgtaatatgaagaaagaagacagaa

SEQ ID NO: 100185 - DNA, 122 bp, Homo sapiens
gtggtcctgttggcctgctcttcaagtcaatggttgtaggattatcaaccctgccattgacgtttgcttcattcttccctctccagtccctggtgagatttgagagagagagctccattcaa

SEQ ID NO: 100186 - DNA, 122 bp, Homo sapiens
gttgcagcaagtcagcaaaaagggctatgatgaccaggcagcattgagcaactctgactccgccttcccctcttcgcacaccttctggttactgaaaacccagcgttagtagaaaagtttct

SEQ ID NO: 100187 - DNA, 122 bp, Homo sapiens
acagggtaccagccccccagccaggccccactcgcccctccgatggccctcgcccacacccggaggccgcagctcagagctcatggatgtggccaccgtgcaggacatcctgcgggactttg

SEQ ID NO: 100188 - DNA, 122 bp, Homo sapiens
cctgggcgagaggatgggggcccggacagggcacgggaaatactttctgggtcctgcatacgaacgtgggtttgtgctggccgctgagatgggacatctgactaaagttggagaaaagaagg

SEQ ID NO: 100189 - DNA, 122 bp, Homo sapiens
aaggccgcgtcgagcggtaggtgcagtcgtcgctgtggtgaccccaggtcctgatgcgtccggcccagggccagccaatggcggtagaggtcttgggcacctgacaagaggggcggtccccc

SEQ ID NO: 100190 - DNA, 122 bp, Homo sapiens
ggccacgcccccagcagagacggcgcctctaggacaccatcggggaccgaggtacccgagcggtccgcccgccttccctgcagtgagacgatcccctggggggttccttgggagcggaggga

SEQ ID NO: 100191 - DNA, 122 bp, Homo sapiens
cttcgaagatatataagctctggaaaactgcaattttgagctggtctagtgctattttcccgggcttctgcctgtacccggtgacagaagcaaactctcttatttcccagctcgtctgcatc

SEQ ID NO: 100192 - DNA, 122 bp, Homo sapiens
cagactaaacataatgccaaaggagttcggagaatgctccacagtgaaggtttgattattcgcagatggaatatggaaaaaaaaaaaaaagaatcaggtcccaggggtaagcctaaccaatc

SEQ ID NO: 100193 - DNA, 122 bp, Homo sapiens
ggttggagaagtgtgggatttttctcttgcaggaaccaagcacatgggctgtcgtacacgcgaggggccagggttcagagctagatttctggtttcagtttctctgcagggctggggcaggc

SEQ ID NO: 100194 - DNA, 122 bp, Homo sapiens
gtttcactcctgaaatcaagcgagtgtacgaacccaccggaaggaagaaactccagactccgaaggaacaaactctggacacaccaaatgtaagaattgtaacactcaccgcgacggtccgt

SEQ ID NO: 100195 - DNA, 122 bp, Homo sapiens
taaatttgacaaatgtattaaaaattcaaggctaaatgggttgaacaaaagattggaagccgaggtaatctgtgagagatccatgcccagctggctaagcttttcatccttcggttcttacc

SEQ ID NO: 100196 - DNA, 122 bp, Homo sapiens
ccttccccagcccaatgcctgtcttgctctcactcacctgagccaggctgatacacctcccggatgtccagctccaacaactcagcactgaccggctgtagaacttgctcccgggctgctct

SEQ ID NO: 100197 - DNA, 122 bp, Homo sapiens
cccagcctactggtattacgtaatggccgccgggggcgccgtgctggtgctggtctccgtcgcgctggccctggtgctccactaccaccggttccgctatgcggccaagaagaccgatcact

SEQ ID NO: 100198 - DNA, 122 bp, Homo sapiens
atcagttcattggtatggttgcccactctttgttatgtgaattagtatctgtgtttcacccgttgtttgtgtttagtccttgttcactactggagcaaggaattcttaactaggcttctgtt

SEQ ID NO: 100199 - DNA, 122 bp, Homo sapiens
gcttacctgggtatgggcattgtctggaccagtggctttcattgccgtacttgaaacaggcgccaggtggaggtggattgctaggaggcttctgtgtggagctgtggccccgtgggcctgca

SEQ ID NO: 100200 - DNA, 122 bp, Homo sapiens
aaaggggccttgtgtggctgaatgggtgtttatcctggagcctgagttaactcagggctgcgaggccgggcgggggccctggcactggcctgcctggtaaacatgacctgagctgggcacgc

SEQ ID NO: 100201 - DNA, 122 bp, Homo sapiens
gtttttcctgttttgctttttgaagcaccctacccttcctctcttcctctttggcagtcacgtggtgtcttgtttgaatggcagggaaaccattattccaatatatgccctccgaggagtta

SEQ ID NO: 100202 - DNA, 122 bp, Homo sapiens
tgcggcgctagatgcggacacctggaccgccgcgccgaggctcccggcgctcgctgctcccgcggcccgcgccatgccctcctacacggtcaccgtggccactggcagccagtggttcgccg

SEQ ID NO: 100203 - DNA, 122 bp, Homo sapiens
tccattttctggaaccctccacctcccactcccaacaagggccgcgccgggaggtctccccggggacccccactcagcttgctcaggtcctggaggcatgcagagggcgtcggcgccgacag

SEQ ID NO: 100204 - DNA, 122 bp, Homo sapiens
acggcccctcctaatgatgtttcttttcctatcattgtcgagcccttagaaccccaggatcgagggagggaaaacaagcgctcaagcactccctcgttggtcccaggacacaaggcctcgtc

SEQ ID NO: 100205 - DNA, 122 bp, Homo sapiens
ataatttccaacaataacagtctgcagttaagttttacacatagccgtttatattttaatcgcaaagcaccagaaaaaatgcctaagagaacattctgtttcaaaaggaaaatgcttttaac

SEQ ID NO: 100206 - DNA, 122 bp, Homo sapiens
gcaagatcaaggggataaatcaacaaggcttcccacacaacagcacagatcactaacccacgcctccaacagaagaggaagttccttgtttagagcattaaccctccctcccacttgctggg

SEQ ID NO: 100207 - DNA, 122 bp, Homo sapiens
tcaatcttcctcctctcctctctctgtcccttcacctctgatcagtcccagcctgattcccgttccctgatgcctcaccttcttgctgccagatgcctctaggaactagggtccttcagact

SEQ ID NO: 100208 - DNA, 122 bp, Homo sapiens
aatcaatgcttttgaaagactgccccctgccggagacaaggggcgaggacacgctgggcccgggtgctccagtaggcgccagggcgcgcgggaaagggagcctgctctctggggctcagaac

SEQ ID NO: 100209 - DNA, 122 bp, Homo sapiens
acagacatctgtaaatgtctacttttacagatgagaatacttatctaaaagggctgatgtcgggattcagtgaaaccatatgtttaaggtactttctacaggatcatagtaaatactcaaaa

SEQ ID NO: 100210 - DNA, 122 bp, Homo sapiens
gcaggcccgttctcccacactggagtgggttaggcttctcgcctcaatccttagcccttacgccgggctcagatcctcacctcgtccccagacatggctgcggctcgagtgggctcggcacg

SEQ ID NO: 100211 - DNA, 122 bp, Homo sapiens
aatgtttttaaatatttcaaactgaaactacatcttaccaatgtagaattgccacaaagacggctggaataaagaaaaaaaggaaagttattaatagctgctttattataaaataccattaa

SEQ ID NO: 100212 - DNA, 122 bp, Homo sapiens
gtcccagggtaacacaccagcccatggtgtagacctgacgtgttcaacgtcccagggtaacgcaccagcccatggtgtagacctgacgtgttcaacatcccagggtaacacacttcccatgc

SEQ ID NO: 100213 - DNA, 122 bp, Homo sapiens
agcgggcgcgcgggcgacagggtgggcgtggaccgatgggggcaccgcccctgggagaggcgggcgccgcggttccgggggcgggacgcgccgaggagtggggcgcgagccgccggttttga

SEQ ID NO: 100214 - DNA, 122 bp, Homo sapiens
agctggcagccatgaaggcgcttgcctccctccacttcctagggtgcagtgtgggtggggcgggggcagctagggagtcctccgggctctgccgagccccttccccagtgtgaagtccagcc

SEQ ID NO: 100215 - DNA, 122 bp, Homo sapiens
tattattgcccttctggtggcagcttaaatatccaggctctgagcagcctttcctggtcccgtgctctaagcatctcaccacctgcatccccagctcatcgccctactttatttcaccacaa

SEQ ID NO: 100216 - DNA, 122 bp, Homo sapiens
gccgccggaaaggactcgggggcttctgcttcctctgggcctgtggactcttcggcttcccggccctcaggacccgactgcgccccccgggagagcctcttgggctttcggagcgggctgga

SEQ ID NO: 100217 - DNA, 122 bp, Homo sapiens
agaagggtcgtcacctccatttatccctgtgtggacgccacagccctggcaccaagtggccggctccgtcaagggaaagcggggaaggacagaaggcaaaagtacttctcaccttgtctctg

SEQ ID NO: 100218 - DNA, 122 bp, Homo sapiens
aggagttcctcggcaatcggctgtccccagtccccagtcacctccggcggacgtgaccgccggatgctatgcagctaggtgggccaggggggcctttgcattgccttccctgaccccttcct

SEQ ID NO: 100219 - DNA, 122 bp, Homo sapiens
aaaaaaaaaaaaaagttccaggaagaataaacgactggattcttcagaaatgccaaaacacgggagggcataggtcaggaaattaaattagcttcatttactaaaatgtagagtaatgggtt

SEQ ID NO: 100220 - DNA, 122 bp, Homo sapiens
tacagcaacagcagagcattcaaccgggctgagggtggtgcccgtgacctgtgcccagctcgtacccagtgcagcggccctgccccacaggccccacgagggggcgcccgtgtggcgtgcct

SEQ ID NO: 100221 - DNA, 122 bp, Homo sapiens
acgaattctggatcgtgacttcggttttctcgccgtgcagttccttttcccgccccccttcggatccctccgacctgcggcgggaaagtcgcgcgcctgcgcactaagcatctggttcggtc

SEQ ID NO: 100222 - DNA, 122 bp, Homo sapiens
agcgggcggctggagtcatcttttgcagctcgtctgcactgaggatttctccctgcttggcgtgggcgcgggcgggggagccgtaggtgttgaaacccctgaggcttctgccccccgaaggc

SEQ ID NO: 100223 - DNA, 122 bp, Homo sapiens
tgcctgggtacagagtcacatccacaacaatgaaagttgtagatatctgcaaggactcatcgtgggaccaaggattcaggggctcattctttctcctctctctgtgtgctggttgcctcagg

SEQ ID NO: 100224 - DNA, 122 bp, Homo sapiens
ggggcagcagacggggctggaggggcgtttgctcatgagcacgcaggccaggagctgtttcgggggcagcggacagggctagaggcgcgtttgccaggcagcgcgctgcccctgcgcatcgc

SEQ ID NO: 100225 - DNA, 122 bp, Homo sapiens
ccagcccctaggcaacctgcgcccgccagtgcaacagagtgccccaggcggccgcaaatgcgtcaaggaaggggaagccacaggccccagtaaggtattcctgggagggagagggaggaaaa

SEQ ID NO: 100226 - DNA, 122 bp, Homo sapiens
ccagcctccttgggacttgacacatcctcctgggatcatctcagatgggactgactgtgccggcaccatggaggtggtgctgatctttctatgcagcctgttggcccacattgtcctggccg

SEQ ID NO: 100227 - DNA, 122 bp, Homo sapiens
ggtacccgggaccggcagcccccccggaccgtggcggcgaagcaggagcgcgctaggcggcggcgccagccggagtgaagccctccagcctttggaaaaagtaattagcgctgcggacaaac

SEQ ID NO: 100228 - DNA, 122 bp, Homo sapiens
cctgttttcctgtagctttgaaaatctcaaatgcaaggccaaacaacgaattattattaacgtgatagaggaaactggtactattaatgtcatgcaaggagaaagcccattttgagtagaaa

SEQ ID NO: 100229 - DNA, 122 bp, Homo sapiens
aggagcagaatggataagagcataggatcaatggtcaggccactggcatcattctggccccgtgagttacccaggtgtaaccttagtttatttcatctttctgcgctttagtttcctcatct

SEQ ID NO: 100230 - DNA, 122 bp, Homo sapiens
gcgtttggagtaagcagggaaaggtgtcggcgtccagcatcctggtgcggagaacgctgccgaaccactgtgagaaggcggggagactgcttgtcaggctgagctgacttcctgggcggtcg

SEQ ID NO: 100231 - DNA, 122 bp, Homo sapiens
gtttttaaaaattcttaaaaggaggggaaggaaggattacagagcaggggaagagggcagcgctagacttagcagcctgggcattgaagaaggactaaaataattgtttctagtggggaaac

SEQ ID NO: 100232 - DNA, 122 bp, Homo sapiens
acaggcgaagagcaccttccagaacaccgtcaggaagtgcatcacgtagtcaaagcacgacggcagccgctcctcccgggacccgtcctcctcctcctcctcgtcccctgtgggcacacgac

SEQ ID NO: 100233 - DNA, 122 bp, Homo sapiens
ctgcctcatggcttaatttaattaagtattctgtaatagctctgcagcagacttgtgctgcggaatgggctccaatttgccctatggcaactgcaggagcagagcaactataagatatgcaa

SEQ ID NO: 100234 - DNA, 122 bp, Homo sapiens
tgataataataataataataatagcattatgtttcccaggtatgcacaaatcaaccagaacgtgactaatctacatgcaggcctttatcaaatccatatttatgttacctgcatgtgtttac

SEQ ID NO: 100235 - DNA, 122 bp, Homo sapiens
cttcagatcccatgtatccattagcagccttggcgtgtgcgttgtgaggatgtctgccatcggattctgatgtgcacactggtgaaaactgcagagcaggggaaatgggcctgggtaggtct

SEQ ID NO: 100236 - DNA, 122 bp, Homo sapiens
gcgggcggcgtctgggagatgggatgggctgtgagtcatcccccgcccagaacggaccgacgccccccctcaacctaaccccggacgaccgccctcctccccctcgtcttcttccccctcct

SEQ ID NO: 100237 - DNA, 122 bp, Homo sapiens
gctctgcaatcttctgtttaaacaccagagcgcacctcggtgctggcctcggcgggggtgcggggtgcgggtcgcggggtgtgcggtcacccaggaggctgcgaagagtgcaggggtcagct

SEQ ID NO: 100238 - DNA, 122 bp, Homo sapiens
acccacctctaactcggaagaaggcaatttaaactaatttggtttaccggaattcaaatacgtacaattcaacataatgaattgaactgaaattgaacacctgcttgcgtaaacctagtcgg

SEQ ID NO: 100239 - DNA, 122 bp, Homo sapiens
ataccagtccgggcggggcgcctgcggcccctgctcctccgcggccgctccgcccagccccgcccggccgtgcttcctgcctccggcctcgaccgccacctgcccacggcctccctgctggc

SEQ ID NO: 100240 - DNA, 122 bp, Homo sapiens
ccataaaccccaaattgtaggaaacacctggaaaatttacaaacctatggtccagcaattcgctaaataaatctgggggcacattttgaaggaaattttccagtatcccaggatagatggaa

SEQ ID NO: 100241 - DNA, 122 bp, Homo sapiens
attcagcaaccttgacaacaagctctggcactcagtttctatttcccgggagttgcccagcgctccgcccacgcccgcttgcagaactcgccccgcctccgccccacccatcgtgtgacgtc

SEQ ID NO: 100242 - DNA, 122 bp, Homo sapiens
acaggacacgcagacgctccaacgcgcacgaataccccgacccacatgggcgcggacacacgtccccacagccgcccgggcagctgcaaacaccggagcatactcacatactccggggtgca

SEQ ID NO: 100243 - DNA, 122 bp, Homo sapiens
actgctctcttcttcaaatccctgaagtgatcttgaaatagctgcttacaaaaatgtctacgtggttatgtagcactcagtctcaggctggtcatgataaagaacatttactagaaagctca

SEQ ID NO: 100244 - DNA, 122 bp, Homo sapiens
tgtttgagggtttctgaaaacatcggtacctgaggggtgattgtcgtggcctgggcttcgcgtctctgagtgctgcaccggaaatgaacgggagggccggggtcagctactgcgcgccgtct

SEQ ID NO: 100245 - DNA, 122 bp, Homo sapiens
gcaagagggacgcgttaactgaaagttgctgaagacaggctcctgtcggccaggtgtgggcggccgccgtccagagagaaactcctgccacgtgtgtgaggctgaccgaaccccgcacaccc

SEQ ID NO: 100246 - DNA, 122 bp, Homo sapiens
agatgggtgctgcaggccctggggttcagccagataccgggcacaggcctgggggccagtcgggctaggacaagagtaggccttggcccgggggggtagggggactcctggagtgccttagg

SEQ ID NO: 100247 - DNA, 122 bp, Homo sapiens
ggctgagccaagaaaggccgcttccgatcctccagcccccgaggcgcgggggcgcgcggacgcccggttataactgaacaacccgagccccacgtctctgattggctcaggcagaggaaggg

SEQ ID NO: 100248 - DNA, 122 bp, Homo sapiens
cctgttcctgctgaactgagccagtgtacacaaaccaactgtgtttcagctcagtaggcacgggaggcagagcccagggaggccaggcagcaggatggcaggcagacaggcggcagcagggg

SEQ ID NO: 100249 - DNA, 122 bp, Homo sapiens
acacccccgccagcttccaagagaccttgcacccctgcccgcctgacccctgctgcagcccgacccctgcccgcctgacccctgctgcttcttagtatccgcagctgcaactacctataggc

SEQ ID NO: 100250 - DNA, 122 bp, Homo sapiens
ctcttaatggttgaccatgaaaatttcatctatttccacgacagagttggagatacattccggttggtttttctgaatcattgagccaaaaacaaacacacgcacagtttggcttactccta

SEQ ID NO: 100251 - DNA, 122 bp, Homo sapiens
cctcaggtgagtccacctgcctcagcctcccaaagcgctgggattacaggcgtgagccagcgcacccagccaggttatctgctttcttgtgtttgagattttccatttaaaaaaaaggacct

SEQ ID NO: 100252 - DNA, 122 bp, Homo sapiens
aagcctcctgtcagtggaggtcagctcccagaggctgttcagtctccatgtatgagagggcggttcactgctccgctgaggtgccttgctaattgtccttgtctggcgactctcccctatcc

SEQ ID NO: 100253 - DNA, 122 bp, Homo sapiens
atcagtgaagtccttccacatccatggggcgtccaccaactaggagcttaatcaacacaacgctgtggcctctccagctcagggacgtgcctttcccgtgtcttcttctcacacacaaacgt

SEQ ID NO: 100254 - DNA, 122 bp, Homo sapiens
gcccaccgcggccggcgcggaacgactaggcggaggacggaatccggcgcagcgctgccgcggttctgccccgacgcaggcaggcttctcccggggagtaaggcatccagagatccagcgcc

SEQ ID NO: 100255 - DNA, 122 bp, Homo sapiens
gggcttcgccgtcgcagccgtcgcagccgtcgcagtcgtcgcctccagcccaccccctcccggtacttggctccaaatccgggtcccaagccgatcgtttcccacccccattccctccccct

SEQ ID NO: 100256 - DNA, 122 bp, Homo sapiens
cgctttggccagctcagcggctccgcccctaccgcgagcggcgctgggcggggctgcgtgcgtggcgtgtccgctggaccaggggacgggggcgcgccgcaggtgtaggagctttgcgcgcc

SEQ ID NO: 100257 - DNA, 122 bp, Homo sapiens
ttcaaattctgtttccttggttctaagacacagatcctccctcatttcaatgttttctgacgtgtcaactcaagaatggaaaaccaaacatggtatgttatcactcccaagtgggagttaag

SEQ ID NO: 100258 - DNA, 122 bp, Homo sapiens
ggttgactctgggtcagcaaagggagcccggccctttctagcggggggacgtcctgcagccgctggaggaggctgagtcacgcttttcccaccagaagtctacctgtgcctgcgcccgccgg

SEQ ID NO: 100259 - DNA, 122 bp, Homo sapiens
gtgggcgagagacattttaatctggaagagtcttgtgatttgggagacaggtttggtaaccgttcgttattcagtaataaatgtcaggaaggattgccagatttttaggcagtggctctgtg

SEQ ID NO: 100260 - DNA, 122 bp, Homo sapiens
tcgctcataatatcaagtaagctccatgcgggcacagctatgatctgctttctttgctgccgaccctgcgcccagcacggagactgtagttactactaggacctcgcctacccgcggaacac

SEQ ID NO: 100261 - DNA, 122 bp, Homo sapiens
ggcgccacaaacggccaccaggagacagcaatacctcccccttgatgggtggcgggatcccggagccaacgcagaccggacgtcggaacgccgctttagccccgggtgcgggcatctaccca

SEQ ID NO: 100262 - DNA, 122 bp, Homo sapiens
ctccgcgcaggttattgaagcagctgggcctggggcgcccactaatgtggccctgagggccggagcccgcaccgacgggagcgggagccggagcagctgcgggcgccgagtggccggtacgc

SEQ ID NO: 100263 - DNA, 122 bp, Homo sapiens
aggacgcctgcctttcaagcccggaagaggatccttaagaggtcttgcccggcgtctctccgtgaccttggaagccctgctccaattatgcctcctccgggacaccggcctgcggagagctc

SEQ ID NO: 100264 - DNA, 122 bp, Homo sapiens
aacaagccagtgagagccggtttaatggggcggccggcgaaaggggcttggtgaggcccgcgctcctcggggtgggggcgcggggatgggtggtcgcgatgccgggagggcaggcagggccc

SEQ ID NO: 100265 - DNA, 122 bp, Homo sapiens
ggcccctgccattctcctctccttttctgttgcgcttcccggcagaccaaggtgaggagtcggaaggctggttctgagaggcaaagtgagtgctggggtgtgtgggcttcctacccccaggg

SEQ ID NO: 100266 - DNA, 122 bp, Homo sapiens
aggccggcgagacaatgggcggcccgaggaggcacctgctcgcctgaaaggcccataaatcgccgccgcgtccagctgccttcccgcccctccccgcggacccgctagcgggaagcgcggcc

SEQ ID NO: 100267 - DNA, 122 bp, Homo sapiens
tcgcgggggcagagggggcgcaccttgggcgggcccacttaggggcggggctctagagggcggggaggggcggagcctgtcaggggcgggacgcggggcggagtcggggtgggggcggagcc

SEQ ID NO: 100268 - DNA, 122 bp, Homo sapiens
cccgcagggacagagcctgccaggtgctggtgactcggatcctgacaggaggtcgctctgcggaagactggcaggatcccagagcaacagactggggctcgatgccccttccccgccaggtc

SEQ ID NO: 100269 - DNA, 122 bp, Homo sapiens
ggccaatgtgtagcttggtggcgcccttgaaggccactggggggtaggtgtgtcctcccccggggctggaggccgggtgcctggtgggtgggcctgacctggcccacctcatccctccagcc

SEQ ID NO: 100270 - DNA, 122 bp, Homo sapiens
tcctgtaattttcagccaatcctagcccagcgtggcgcagtagtgggtcagggagggcaccggaacagcgcgacccgacagcccgggaaacggacagccgtgtcagaagggcaggtgccagt

SEQ ID NO: 100271 - DNA, 122 bp, Homo sapiens
tgatctaacattgttccagagggttttaggtcagcagttctcaactggaggtgattttgccgccctggggatatttgacaatatctgaaatcactttggctgtcacactgaggagtgctgct

SEQ ID NO: 100272 - DNA, 122 bp, Homo sapiens
gcctgcgccttcttgtgcagctcgaagcgctgggtgcctggctcaaacttgcgcttggggcggaatgtcttgtccttgttgaagacttgcttcaggaaggggttggacatcttggtgacgcc

SEQ ID NO: 100273 - DNA, 122 bp, Homo sapiens
agtcctcactccccttcccctgggattcctcaggctgacctgaggctgagctgactctcacggtttggactgggtgacttggctcaggggctcctgtgggatgagcaccatgagctgctccg

SEQ ID NO: 100274 - DNA, 122 bp, Homo sapiens
cacggagtccgccccgcgggtttcagctgttggtcgttctgaggggcctttggaagtgaccggtctggttcctaagcaataaaattgaccgtggtgaaaatagtcccgtgttgctttttctt

SEQ ID NO: 100275 - DNA, 122 bp, Homo sapiens
agccgagacataaggcttaaacgtgtttgcccttaatagagcatctcgttggaaataagacggcccagtggaaaagtctagctccacagaacgaaacatactcagggcgggtcagttcctca

SEQ ID NO: 100276 - DNA, 122 bp, Homo sapiens
agccgacctgaaccctcatgacctccatctttagcagcaagctggcatttggtaaatgcgcgaaagcaggagtggggagagggagacaaaaatgccaagcagcaccgcctgggttgctgaga

SEQ ID NO: 100277 - DNA, 122 bp, Homo sapiens
ctgtgggcctgaatgcagtcagcataggggttagccacatgggttttagtgtctgtcagacgtgggttttgatcatagatctaccagtaaaaagctgggtgaccctaagcaagtcacttatc

SEQ ID NO: 100278 - DNA, 122 bp, Homo sapiens
gctccgcagcgctgggcggtctcagcctcggcctcgggctcttatccagtagacagggtccgccccgccccgccctcccgccgacggggtcgccctcgcgtcctggctcctcctcctcacct

SEQ ID NO: 100279 - DNA, 122 bp, Homo sapiens
cagccgtgcctggagcatcactcagcaacgaaaagcagcgctgcgattcacacagccacgcggtgagtcccaaatgcacctccatgagccaaagatgccatatttgtatgacgttctggaaa

SEQ ID NO: 100280 - DNA, 122 bp, Homo sapiens
cccgcccccccccccgccgtccaccgatgtgtttcagaagcacagtcacagagctactcccgaacaaatgtcaaataaatgtagactgtggttgccaggaagacagccttggaacggtgctc

SEQ ID NO: 100281 - DNA, 122 bp, Homo sapiens
gggagaggttcctggcaggagttcctgtcagatgccattttccattctggttacttgaaccggggtcctttttcatcctctacctcaggggccagagcttcctcatcaccctgcacccccta

SEQ ID NO: 100282 - DNA, 122 bp, Homo sapiens
cccgggacgcagggcaccagcagtccctactcttcccgggaaggatcaatctgaagtccccggcggcaagaagagaagggtgctcgaggccgccgccatcttccccaacggaacttcccaaa

SEQ ID NO: 100283 - DNA, 122 bp, Homo sapiens
gtgctggctcctacccggactcgggcttccgtaaggttggtccacacagcgatttcttcgcgtgtggacatgtccgggtagcggttcctctggaaagtggcctccagctcctggagctgctg

SEQ ID NO: 100284 - DNA, 122 bp, Homo sapiens
acagtccacaaggaggtggcgcatgaagggggcctcacccatcggcctgggagacaggggcggcaatgggggctggtggggtggggccagggcccaggcggcaggagccagggtcgggggcc

SEQ ID NO: 100285 - DNA, 122 bp, Homo sapiens
ctcggtgtccgtcctccgggtgccgccggatggggagtctggctgagccggagcgggagccgcggctgggggaggcggagccggggtgggcagtgtggtgtatctctctccaccccgggccg

SEQ ID NO: 100286 - DNA, 122 bp, Homo sapiens
aaaaaaaaatcataaggagcccattagttttaaggcagtcacacaaaatgtattaaataccgaatgcaaagaaccccctgccaggctcttctactgctttagaattctttcctctgctcctt

SEQ ID NO: 100287 - DNA, 122 bp, Homo sapiens
tctcccctcaaagaaaagacattcaggtgtttctcaacgacatcttctgtccagcaagctcggtttgaatacgtcacttaccagtgccattgcaggacccaaattcacagttcataaaagat

SEQ ID NO: 100288 - DNA, 122 bp, Homo sapiens
atttgtctgcgtggggagcgggagacaggagctccctgtggctcagaccctgctcagctccgtggctccaggccaagtaacggtgccctgaatcccggcccctgccttcctctcagccctgc

SEQ ID NO: 100289 - DNA, 122 bp, Homo sapiens
ggattgtagaggtgccctagaaaagcctcatcgccaggagggcaggatttggggttggtgcgagggagccccgggttcccctgatccccgaactcactgcccgcggcgctggcgcagcggag

SEQ ID NO: 100290 - DNA, 122 bp, Homo sapiens
gttgcagtttagtctacagcaaaagatggcaccatcgctaatatttacagctggaaagagcgctggctggaccacactcctggagcatctttactaatgcagcttaacagcagttgcccaga

SEQ ID NO: 100291 - DNA, 122 bp, Homo sapiens
gacctgcaaaaaaagtcaatggaaacggtaacggatccgctcacacacgtgtgatgagtccgaggcggtttccagcttcagtgggcaaattccggttcccgcagcaggctttccggagatca

SEQ ID NO: 100292 - DNA, 122 bp, Homo sapiens
ccggctgtggcctccctctcgctgtgggcggtttcgtgggggagcgggggtgggcgcctgcgcccggtcccaccctttccacagcatttacgagggagggtttcagggccaattggaagctg

SEQ ID NO: 100293 - DNA, 122 bp, Homo sapiens
gtagattcgcttcctgtttgctgcagcttatgttgtgacactggtgggggttagagacagcggagggcctgaagactgtggggaaggccgagggcaggacgcctggttcccgggacaggaag

SEQ ID NO: 100294 - DNA, 122 bp, Homo sapiens
ggtgagggatctgggggccgcccctcggcaaactttccttccccgggcttctgcggaggtcgcactggggctgtgaccgtgctgagaatgacccctgctgagcccaggccgggcaccccgat

SEQ ID NO: 100295 - DNA, 122 bp, Homo sapiens
ctccgagacctggccagggtgtccaggagcggggcgaggttgtgggcgccccacgagtgtcgagggcgctcccgtcccctccccgcatgccccgtcctcgccccggcccgaggcccagctgg

SEQ ID NO: 100296 - DNA, 122 bp, Homo sapiens
tcacggaaggattccagacaagattgggaggagagggcagggtgatcccggaggatatgacgacaggactctctttggggatgggcaggacatgagagtcaggatcacttgaggtgcagcgg

SEQ ID NO: 100297 - DNA, 122 bp, Homo sapiens
ctttcaaagtctacgcggatcttttcagcagcacagtctttgaacaccgagtatgaggagcggtgtctgagttgtgacatttaaaaaacaaggccggagcaaacgtagagagggagaaagtt

SEQ ID NO: 100298 - DNA, 122 bp, Homo sapiens
cccacaatgcgcaagtcagtggcgtcacatccgggcacccggatgtttcctggcgggaaccggatcctgcctgggtgggggtgggagtgggcgtgggggtgggggtgggggtgagggtggaa

SEQ ID NO: 100299 - DNA, 122 bp, Homo sapiens
gaggggaggctggaccacaggagggcagcgccctgggcaaccctatgtagatgaagctgccggagaggatcaaagaaccagacaggaggaaagaggcggtgaagtctcctgtctcatccctt

SEQ ID NO: 100300 - DNA, 122 bp, Homo sapiens
cagccccgtgggacaggggtcttgccctttattctctgacagcggccagctcctagggcacgcttggtgcgtggggacactcaacagggagatgctttctctgtgtcaatagacttcactca

SEQ ID NO: 100301 - DNA, 122 bp, Homo sapiens
tgccctaagcagctcacagtcagtgaggaagacccccggtgtcagacccctgcagcctcacgtggaaggggcgccgggaatgccacaggatgctggggacaaggcagggggctcccccaaga

SEQ ID NO: 100302 - DNA, 122 bp, Homo sapiens
gaagctcggcgcccagctgtgcctggatcacgtctgcggccactgtcaagaagctcagcacgcccaacgcccgaggctcaacctcagtacgggtcagttaccgtctcccttcatttcatggt

SEQ ID NO: 100303 - DNA, 122 bp, Homo sapiens
tactaaaaatacagcaattatctgggcgtggtggcacacttgtgtagtcccagctatttgcgaggctgaggcaggagaattgcttgaacccagagaggtggaggtttcagtgagctgagatc

SEQ ID NO: 100304 - DNA, 122 bp, Homo sapiens
cggccaccggcccgggcgtgggggctttgagggcaccggcgcggtaggtcacccgggtttcgcgggccgcaagctcggagacgcgcgtgtcccgcgttggctgcctgacccggaatggcgca

SEQ ID NO: 100305 - DNA, 122 bp, Homo sapiens
taatgcatttatgagggcagagccctacagcctaattgcctctcattaggtgccacctcccgacaccattgtgttagggattaagtttccaatacatgcttttgggaagacacattcaaatc

SEQ ID NO: 100306 - DNA, 122 bp, Homo sapiens
gagggagaactgacgcctttcgctcggatccttctccccttccgagaaccaggtaggtcgcgtttattttcaagtccgactgttttcgcggtaacatttgtgagaaacatcacggtggatcc

SEQ ID NO: 100307 - DNA, 122 bp, Homo sapiens
aggccccatcgctcctgcttcccggctgtgggctgcagggaggatcccagtccaaggccccgctggaattagacggagtggctatttccttaacatgagttgacattaaacggaataaccgc

SEQ ID NO: 100308 - DNA, 122 bp, Homo sapiens
gtttgctgccctttatgctcctacctcaccaggtacaaggaacatgaagatggctatatgcggctgcagctggttcgctacgagagtgtagagctgacacagcaactgctgcggcaaccaca

SEQ ID NO: 100309 - DNA, 122 bp, Homo sapiens
gtgtgactgtgttccatatcctggtttggcaaaagtggtaatgtagtatttggagagaagcggcatttaaaatcggcctttgcaaaaatatgaaaattattctgaagtagaaaatgtcaggc

SEQ ID NO: 100310 - DNA, 122 bp, Homo sapiens
ggccgggcggggaagactggtgtggtctggccatggatgggctccaggccagtgcagggccgttgaggcgcgggcggccgaagcgccggcgcaagccccagccacacagcgggtcggtcctg

SEQ ID NO: 100311 - DNA, 122 bp, Homo sapiens
gcttgctagaggcagggtcatggcttagttatttttgtattccctgaatcttgactagcacgaggtgtatagtagacattcagtaactgtttactgaatgaacgagtgaataaagtcattga

SEQ ID NO: 100312 - DNA, 122 bp, Homo sapiens
ggagacccggcactggctttccagcttggagaagtgggggactgagcatgggtttgagtccggtggacgcacccagcaggctgttggctacaaattccatcttgcgtcttggaaagaagctt

SEQ ID NO: 100313 - DNA, 122 bp, Homo sapiens
aaacgcgttgttaggcgactccatcattgtgccagcctcacagagtgtcctgtacacccacgcggcccagcctgctacacacccgggctggagggtatggccgactgctcctaggccacaaa

SEQ ID NO: 100314 - DNA, 122 bp, Homo sapiens
ccccctgcccccgcctcctacgaccccgctctggccgcgccactctgacccccgggttaccggcctgcagtcttcacccgaatcagcctcaggatatctccacagtctccctccttggcctc

SEQ ID NO: 100315 - DNA, 122 bp, Homo sapiens
agtgccaaatgccataatgctctctgtcagtgatttgaaattattctataagccacatatcgggtacactattgttaatgaaatgcacacaagatgatgaacaacttccttttcctgctgga

SEQ ID NO: 100316 - DNA, 122 bp, Homo sapiens
tagtgagacagtggaagtaaaccccatctgccgttcccgtgcgtagagaaaaacgttgaccgcgaggctggggaggagagttgcctctgaggaagaagggcacagagacccaaaattagttt

SEQ ID NO: 100317 - DNA, 122 bp, Homo sapiens
gtaccagcgtccaggcggggttaccgtggagacagaacgtgctgtgtggatgcggcgaaacgctgaggcgcggccttcgctgtgtggtggggactcacaagaccgacgtcaagatggttagt

SEQ ID NO: 100318 - DNA, 122 bp, Homo sapiens
ggcgacactttctccacaaaaagcgtcaagaaaccacgacacttggtttctggacttttccgcggaacagtaaccagaacaatcgccatgaaggttcgtttctgtcatggctcagtgcagcc

SEQ ID NO: 100319 - DNA, 122 bp, Homo sapiens
agaggagcgacgctctggtgtgggcagcccgagaggtgatggggtttcagtaaatcatggcggggagttcaggccaccgccggagtccagtgggtagggctctctacggccggaggtggctg

SEQ ID NO: 100320 - DNA, 122 bp, Homo sapiens
ttgaggatgctgaaggccatcgactggcgccggtcagcctgcaaggaagggctgtcagaccgggagacccaatgctgccttcccaggccagcgtgctgtgccacgctctatcagcaaggtcc

SEQ ID NO: 100321 - DNA, 122 bp, Homo sapiens
gttccgcagtttgaccgcaggggacggaatctgcggcggcctggaaaactggcgggggcgcgaggcgccgctctctcttgggtcagattctcagctcccagctccccgctcccggctcccgg

SEQ ID NO: 100322 - DNA, 122 bp, Homo sapiens
agttggtcctccacgcctccatcacggacagacacagtggggccctccacgcctccatcacggacagacacagttggtcctccacgcctccatcacggacagacacagtggggccctccatg

SEQ ID NO: 100323 - DNA, 122 bp, Homo sapiens
ctggccccgggcaggggaggaaccctcggccaggctctgccagggtttagcattggaggtcgttggggtaggacggagggtgggggcactcgattagaaagcgaagcactggagcccggtga

SEQ ID NO: 100324 - DNA, 122 bp, Homo sapiens
ctcccgcccccgccgtctcgcacctcgggagccaggtccaggtccccgtactcaccttggcgcaggacagacggctcagaacgcaccacaaatctgcagccaactcggaaaggtcaccgagc

SEQ ID NO: 100325 - DNA, 122 bp, Homo sapiens
tttgtacaagtttttggggaaaagtgcagccctgtgcaaaaccactggacctggatcagacgtggagaaacacacagccttgtaggaaagctacgtcacccacagaagggctatggtcctct

SEQ ID NO: 100326 - DNA, 122 bp, Homo sapiens
aaaagggaggggtaggaaggacaattgtgtaggaagaaactcagaccacagtgcagctctcggaaaatctcagccaggttgtcacaaaccttggctctagttggagatggcgtagagatgtc

SEQ ID NO: 100327 - DNA, 122 bp, Homo sapiens
gctcctctctggcatatccagtttggtatgacttggctcctgggcccctgtgtggagtcccgtgagaggcagctgagtccaactggccttttggggtatcatcagggcactcttgcaaatag

SEQ ID NO: 100328 - DNA, 122 bp, Homo sapiens
tttatgtttcgacttccccgaatttccttgtgcctgcgttttgctgcctgggatccctagcgtgagaagggctcctttacactcagaggtgccgtaatggagccaagggacggcatcctcgg

SEQ ID NO: 100329 - DNA, 122 bp, Homo sapiens
gtagtgtctgtggacttggtcaccgacagcgatgaggaaattctggaggtcgccaccgctcgcggtgccgcggacgaggttgaggtggagcccccggagcccccggggccggtcgcgtcccg

SEQ ID NO: 100330 - DNA, 122 bp, Homo sapiens
gcagtgctgactcacgctgggcaaaatttgtacttcccaaacaactcagcctgaaccaaccgcagtcaactgcaacctaggaaagaagaggcagctcactgattgttttaaatcaagtgctg

SEQ ID NO: 100331 - DNA, 122 bp, Homo sapiens
gccagagccacggccgccacccccccggaccgtcacccccatccttccaccccgggcagacgccgcactactctctgcgtgccgcactcccagcagggcccctggatcggttcgctcttgtc

SEQ ID NO: 100332 - DNA, 122 bp, Homo sapiens
gctcccggccgcggctccacttcctcctcttcccctgctccctcgccgctcgctcagcgccgcgccgctgccacctccgctgtcatccccgccacccacccccaccggagccgcagcccgag

SEQ ID NO: 100333 - DNA, 122 bp, Homo sapiens
accgggccctcgtcctttcctagcaccaccatttaaagggatgtttgaggggtagggcagcggagcattccagacacggagttaaacccgccccaccccgctggcccacgtccagcccgatc

SEQ ID NO: 100334 - DNA, 122 bp, Homo sapiens
ggtttggatttcggagctggagctttggaatcaaacctagcttccaaacgattgtgtacccgtgaccttgggcttgttacgcgcgatgtctcggaccctcctttatcttttctgtaaaaggg

SEQ ID NO: 100335 - DNA, 122 bp, Homo sapiens
ctcctacagcactctgcagctccaaaaatacttggctcacttccccttaggaatgttttacgaaccctccactagactccataagaacaaagacaatgtcattgtcatacccatctccagcc

SEQ ID NO: 100336 - DNA, 122 bp, Homo sapiens
gtcccgcccttcgctcgcctccgaagcctcgcctacttgacgtcatacaatgccgcaaagcgcagggctgatctccgtctccgcccccagctgctttctccgagaggaggtggctgagtcgg

SEQ ID NO: 100337 - DNA, 122 bp, Homo sapiens
ataaaacctctgatttgctgcgtgctgccgggcacattctctgccctctcgtccgaaggacgagtttaaaatggagagtttaaaataatagcatttacaggaggaaataaagagcgaggaga

SEQ ID NO: 100338 - DNA, 122 bp, Homo sapiens
cgaacgtggtgaaaccctgtctctactaaaaatacaaaaaaaaaaaaaaatttggccgggcgtggttatgggcacctgtagtcccagctgctcctggggctgaggcagaagaaccacttgaa

SEQ ID NO: 100339 - DNA, 122 bp, Homo sapiens
tatgaccacatccccattgtgtgtgtgtagagaggatgagagtttatgtgttcctctgaacgttattacaaaagaaaagaacattgttctctagaaatatgaaagaaaaagaaaagaacaag

SEQ ID NO: 100340 - DNA, 122 bp, Homo sapiens
acacacacacacagagacacaccgcgacacacacacacacacgcgcgcatacacacagcccgacacacacgcacgcgcgcttcttaaaggagacggctcataaaggattccccactacggta

SEQ ID NO: 100341 - DNA, 122 bp, Homo sapiens
tcaccctatgcatctcttcacctgtagccttcgtaacagcctttagaataaaccactaaacgtgtttctctgagttcttcaagctggagaaccatcttcttccttgtcagtccctctgagcc

SEQ ID NO: 100342 - DNA, 122 bp, Homo sapiens
atagccgggtccaataaccctccatcccgcgtccgcgcttacccaatacaagccgggctacgtccgagggtaacaacatgatcaaaaccacagcaggaaccacaataaggaacaagactcag

SEQ ID NO: 100343 - DNA, 122 bp, Homo sapiens
ctagaagtggttacttttcccttgtcattttagagaatatagagctagaaaatcggggaccgagcctgaagcctcaactaccagtcgcgttgctccgcttcaggtcggtccaggtctgtgcc

SEQ ID NO: 100344 - DNA, 122 bp, Homo sapiens
atagtgagggcgagggcacggacagccaggaaggtccggggatgcccggaaccatcatcccgttccttgtccgtcctttagacgaacacagagcagcctcctccggtaaggcttctgcccac

SEQ ID NO: 100345 - DNA, 122 bp, Homo sapiens
tactccattcatgcccctcactttatctatgtttatcctggtcccggattgtgctttctccgttttctgtttctgtttctctatcatcttaatggcagacaatgtgaagatggtgaggcttg

SEQ ID NO: 100346 - DNA, 122 bp, Homo sapiens
actcatatttccactgagactgagcagacttagtcatgctccagaaatagagagctgacacgagtctagagaaatttgcatgcaaatttgtgtgggctttggatagtcagagcctactagag

SEQ ID NO: 100347 - DNA, 122 bp, Homo sapiens
gttgctgggtctcttgcacaaatctcagcctcagtgtcttcctcaccaaagcaactcactcgactggacaaagacacactgaatcttgcaacattgccaatgcttggaacgatttcttcctg

SEQ ID NO: 100348 - DNA, 122 bp, Homo sapiens
atcaccggtggatctcactgagcaggcagaggacctggcgcccccgacccgcagtgcaggcgggcttccaccagggggcgccagggaccatgcccttccccacaaattcccctccactcccc

SEQ ID NO: 100349 - DNA, 122 bp, Homo sapiens
cagggagattacaggtgtacaaggtcacacagctggcctgggaaagagcctggatgcccccgacgtagatctgtgggtcttcagtgctttcccccactagtccagacaggcagatctgagct

SEQ ID NO: 100350 - DNA, 122 bp, Homo sapiens
actggaattcagcccagcgccgcacacagcgcgacaccaggcccccagccttgttcccgccgtcagggacggctcctgtgcctcacccacagttacgctggggatgtttcctgctactcctg

SEQ ID NO: 100351 - DNA, 122 bp, Homo sapiens
tggactgttcagagctcgccccagcgcccccgattgggtagattcgggctccaccccctgcgtcacagaagtcatctaataggtggctgcagggataggctgtaaccgcagccaatagcagg

SEQ ID NO: 100352 - DNA, 122 bp, Homo sapiens
tgtgcaagagaatgtgcactgaagtatcgtgaatagaagccaaagactggaaacaacctccgtgcccattagaagaaacagatcaatgaattacatgcatgcatgcagtgggtaccagacag

SEQ ID NO: 100353 - DNA, 122 bp, Homo sapiens
ctgcttagttcctgagcttagcaagtgagcccggctcacactgcagccggggattaaagccgaggggctccaggaagcctcttctgagagtgccggagttggaagtgcgtccagccaacagg

SEQ ID NO: 100354 - DNA, 122 bp, Homo sapiens
atggcaggtggggatggatgagcctccagaggcgctgggtgggcagcccccgcccctcaacgcctgtcacctcagggcctctcaggtgtggctgcagcatcctctccaggaagtcttcctgt

SEQ ID NO: 100355 - DNA, 122 bp, Homo sapiens
gcagactgagtggccagtagtcaaaagcgcaaccgagggccagtggcgcaatggataacgcgtctgactacggatcagaagattctaggttcgactcctggctggctcgggtgttaatcttg

SEQ ID NO: 100356 - DNA, 122 bp, Homo sapiens
aggggccctccgcagccaccggggatgggattaagtggcaggttctcgcccctgtgtagccgccatcgggcagaccatctggcttggctctagccaccgggacatctgtccccggttctgag

SEQ ID NO: 100357 - DNA, 122 bp, Homo sapiens
aacatggggacacccgagccctccccggccgcccccccctccacctcccccactcaccagcgccttcccagcctgcagcacggtcatcagctgttcccggaagccctgatccacgtccccgt

SEQ ID NO: 100358 - DNA, 122 bp, Homo sapiens
agatgcccagaaatgtgtctttaaagtatttaccatagagcaacatgaatgtcaaaatgccgtctgttagtgagtcattgtttttttaaaagattagtgatggctttgtagtctttccggga

SEQ ID NO: 100359 - DNA, 122 bp, Homo sapiens
gcagagagagagcccacgtagtaagtaaggaacgggggcggttagagattctggagaggccggatggaaaatgcacacacggtgagcagaaaccatgatcctgagacgctgatgtccaggag

SEQ ID NO: 100360 - DNA, 122 bp, Homo sapiens
gaaaagataaagctattgttcatcaataggtgaatggctgaataaatcgtgcaatattcacgctatggaatattatgtaatgtcaaaaattatgtgaaacttatatcagtttatttcggggg

SEQ ID NO: 100361 - DNA, 122 bp, Homo sapiens
gaatctacgtcacccgaaaagcgactataaacgccggcgcctccgtccccagccgcggctcgggaatccacccgaagagtggctataaacgtccgcgcctccattgcgctctcctcttcact

SEQ ID NO: 100362 - DNA, 122 bp, Homo sapiens
tggaggtccgcagtggggaaggtgggcagaggtgttgctcagatgtccccattcctgtttcgtttgcacagaggggttttctggtgcgtcctggtccaccatggccaaaccaacaagcaaag

SEQ ID NO: 100363 - DNA, 122 bp, Homo sapiens
tccgcccacaaagccctgcctcttttcgggcgcctcccaaggcaggagcggattgaagggcggagctgccagggatcgattgctgtgacactgtctcctagggtggagcaggagtggaggag

SEQ ID NO: 100364 - DNA, 122 bp, Homo sapiens
gaaagtgagcttcagaggaagtggcctcggcggcgttggtgtgttttaagactgggatcgcgctcctgtatgcctggtcacccctgtgtgagccgcgcttggcgcctgtctcctccctagca

SEQ ID NO: 100365 - DNA, 122 bp, Homo sapiens
ctccctccctctgccctttatggggcaactagaaggaaacacgcccccgagccccctccacgcttccttgaaaatcctgaggcctgtggtctggaaagaggaagttgttgtcccgttgttgc

SEQ ID NO: 100366 - DNA, 122 bp, Homo sapiens
tcccttccttcaccttcctcccctgaccttcaagtccaaaaatccagcaggcacagtatgcggtcagtgtcaggggcagcattggctgcattttatctcactctgtccacttaaaatatttg

SEQ ID NO: 100367 - DNA, 122 bp, Homo sapiens
agctccacagcttcagggtagggactggccgagggctgggccaggggcggctgctgcctccggcctcctcctcctcctctgccgccgctgcccgcagtcagcagcatcaccacttgcctccc

SEQ ID NO: 100368 - DNA, 122 bp, Homo sapiens
gcatgggctgccagctctcctgggtttgaaggatgcggtacagctgcttcagctgagcaacgatgttatccttgatgtctggggttgagatctgcaggcggacactgccactatcaaaggat

SEQ ID NO: 100369 - DNA, 122 bp, Homo sapiens
ttaagcctgcggatatgatgggtcacagactccccgtccgaggtgtcggtctgttcctctcgccgctcccggctcccgctgcggctgttggaactggagcgcagcccatcttgaagccctgc

SEQ ID NO: 100370 - DNA, 122 bp, Homo sapiens
gggagcagcaggaaggcaggcagctctgggagcataaagtgtgatgcccacttagggactcggaagccaaccctgcaccctctcattttctctccactcttctctcccatcctgctggtccc

SEQ ID NO: 100371 - DNA, 122 bp, Homo sapiens
gcgtggtgggcaggatgctctccccatagcggtggacccatgtctggttgtagaactcctcgatcacctgcagggggagatgcagcctgggtgagcaagccaggggccaggacccagtcttc

SEQ ID NO: 100372 - DNA, 122 bp, Homo sapiens
caggtcagcctgattcctaggccggcgttccttattgattacaacataaggcaaacaagtcgtctttggagagagaggttggggagagaagaatgtttaatttctccatgcccttcaatgac

SEQ ID NO: 100373 - DNA, 122 bp, Homo sapiens
cattggatcacaaggcatctctgtctactcgagagtttctggtttgaaagtgggaggcagcgtggagactctgttgtggaaacaggaaccgtctttacctgaaacaggcagaacacacaagt

SEQ ID NO: 100374 - DNA, 122 bp, Homo sapiens
gagaattaaaataaataaataagcttgcatttgtatatggatgtaacagagagaggaagtcggcgccacagagcaatcacaggcgcggtcccaaaacgcctgctttgccaacagttcctcct

SEQ ID NO: 100375 - DNA, 122 bp, Homo sapiens
caagaggtcaaaaccctgggtgtaggcaaatggaattcaagtacccaaaggttcattcatcgttagaggagagcagaaggactgtgcaacgcgaagtcaccccgaggcacagggccagcaga

SEQ ID NO: 100376 - DNA, 122 bp, Homo sapiens
agccggaacgaagcgagctggcggtgggcgtgcggagtggcagcaacgcgagagggaacgcgctggggctagcgcggaggcccagagcccaggcgggggaaaaggtgccgaccggcttcgaa

SEQ ID NO: 100377 - DNA, 122 bp, Homo sapiens
ccacgccaggggtgggaggacacttcgggcccagcgtagaggaggcctccgaggcccaagcgggcttcggctgctgcgagtccccagaggctccctcgggcctcactcgcggtgtctcctcc

SEQ ID NO: 100378 - DNA, 122 bp, Homo sapiens
agcttgggcccttcggagcacgaggccctgtgtgactgcacaggtcccatgcctgtgaaccggccctgccaacagttgaggatgaggtccagcatcaggaggggagctgtctatagttcagt

SEQ ID NO: 100379 - DNA, 122 bp, Homo sapiens
caaaagactgcgccacttcccgaagctccaccccagtgcacaggccggttggagtttttccggggggctccaccccagtgtacaggccggttggggtttttcccaggaccccttcccaccta

SEQ ID NO: 100380 - DNA, 122 bp, Homo sapiens
atgccccagcatcactcttctaccctaatggccgatttaatgggattttctcaacactcccgaacctaagctctttctcggcatgttaaataaagccctgtttcccagaacaccaaaagcaa

SEQ ID NO: 100381 - DNA, 122 bp, Homo sapiens
gcaaattgcctctttaatttctctcccggggtggtagaactgtggcattaaacagaagtgcgaacagaagttgagagtgggaagaaaggctgcccggaagggggtcaggaaagctcaggcaa

SEQ ID NO: 100382 - DNA, 122 bp, Homo sapiens
gaactgtcagagttccagcctgtatcaccgcaggttgacaagagggccagggtgaagatccgggtgacatccgcagggatgcatgtgtaaaacagcactctgggtaggatggaaagtacctg

SEQ ID NO: 100383 - DNA, 122 bp, Homo sapiens
ctaaaggaactgggatctgagggagttcctagacttggagcactaaagacacaagcgtggcggggctggcagcgcccgctatgagcacccctctgcccttggtcctggcctggctgttacag

SEQ ID NO: 100384 - DNA, 122 bp, Homo sapiens
aaggccgtctctccagtgggaaggggtcagtgcccaggcccggggtgaccgtgtgtacggcgtggcgtaggctggggtgtgggccctgcaccagcctggccagccctgaccccaggagaggg

SEQ ID NO: 100385 - DNA, 122 bp, Homo sapiens
gggggaaggtgtgtgggaatgaattccaaccctgccagaccgcagagggaagagcctgtccgaggctggcctgggcatctgatgtggacatgccaccagctcacccacccactgcaggcggc

SEQ ID NO: 100386 - DNA, 122 bp, Homo sapiens
aaaattatccgcttgcctcaaatatcttcattaaaaatgcatttaagctgtgaagctctacgaaggagagacctgtaatacatgaaagattagccccagattgctgattggactattttaca

SEQ ID NO: 100387 - DNA, 122 bp, Homo sapiens
cctgcctgcttacgcgcgctgcggattgttgctccgttgtacctgctggggaattcacctcgttactgcttgatatcttccaccccttacaaaatcagaaaaggtaagtgtcacattctgtg

SEQ ID NO: 100388 - DNA, 122 bp, Homo sapiens
aaagtgatagtaagatatatattccttgctatacccaatggaagtgtgcctggaaaataccgcatgtaagcctgaatttatttacctcgaaaatatgtccttggccaggtgtggtggctcac

SEQ ID NO: 100389 - DNA, 122 bp, Homo sapiens
ccgcccctcgagggggtggagctgggcggaggagggaatccgtgcggcccctcggatgaccggcccgagccgtccctccccgtcggtctcagagggcctctactcctgagaggaggagagaa

SEQ ID NO: 100390 - DNA, 122 bp, Homo sapiens
cactgcgggtgtggggaccttgtgcccaagccggggctctgggttcctgggacagaaaggcgggacccacagcccatgcagccatgcacacacaatggctcgcttcaaatacaagttgccaa

SEQ ID NO: 100391 - DNA, 122 bp, Homo sapiens
atctccctcggagaatggaccgcgggctctggattttgacaaagtcacgagcgagactggcgttttaaaccagcatgttagaaaagcggctttgggaagcgatcatttctttcacttttaat

SEQ ID NO: 100392 - DNA, 122 bp, Homo sapiens
tcactgcccccacctggggccagctctctttggaagggggcagcatcccccaaccctgcccggccctgctccgccccgccctgcctgcgtgtggaatgaaacaggaccacgtcccgtctgtc

SEQ ID NO: 100393 - DNA, 122 bp, Homo sapiens
tgtggggcagaagccaagactgggggtcacccacgagtccatccgagcacacagtaggcccgcaatcgaattctgtggcaggaatggattcataaagcatatgtgaggctgtagccaccctg

SEQ ID NO: 100394 - DNA, 122 bp, Homo sapiens
atatccgtaattcagttatacataaaactgaattcagttatatcataaaatgttcccatgcggggaatgattcgttggggtctcagcctgaggccagacgcagcagagagatcgggagttgg

SEQ ID NO: 100395 - DNA, 122 bp, Homo sapiens
tcaaacaatggtgacttcccagagcccgctggcagagccgcgggttgacgacggtgtcctcgcagtgtcgccgccaccccagcgtagtccaagtcagactatttcacaaagtcagagcgata

SEQ ID NO: 100396 - DNA, 122 bp, Homo sapiens
gccccaggagccgtcctgccccgcgcggcagcagcccctcgcggcggcctccggaacccccgagaccggcccccgggccgcaaccccttacccgccctcctcggtggcctcgctccggctta

SEQ ID NO: 100397 - DNA, 122 bp, Homo sapiens
ataaaagaaaaagattttgggaggttgaccttggcagtcctgtactgttgttcagtttttcgtctgtatcttgtggtagtactgttttgagcagaaaatattgtattaatacgttgctgagg

SEQ ID NO: 100398 - DNA, 122 bp, Homo sapiens
ggaagtttttcaggattgatagagcaaatggtgcacaaggtggtagtggcaggaatggaacgacaatataggaaggggcaagaaatgaagagcggtgctcagaactctgcatagactcctaa

SEQ ID NO: 100399 - DNA, 122 bp, Homo sapiens
aagcgaggacaggagacggccgcggagtccagaacatcagaacatcggctcctctgtccccggggaataaacatttggaaaatcactttccaatggggacctgctgtccctcacagcagcta

SEQ ID NO: 100400 - DNA, 122 bp, Homo sapiens
ttaggattcaggcagcagtgtctgtacctcgggtgggagggatggggccatctccttcaccgtggctaccattgtcactcgtaggggatgtggagtgagaacagcatttagtgaagttgtgc

SEQ ID NO: 100401 - DNA, 122 bp, Homo sapiens
cccggggacggtcaccaagtatgctcgccagatctgttgtgggccatgagggtccggaaacgtggaacccgggcaggggcgcgcggggctgctgcagtgacgaggcactggttctagatatt

SEQ ID NO: 100402 - DNA, 122 bp, Homo sapiens
cgcggccccagaacatgtccatatatggcgatctttccgaaagccgggcacccattggcccgccgggcagggacacgtggggccccggcccgccccgcccccagcccgcaccgcctcccaac

SEQ ID NO: 100403 - DNA, 122 bp, Homo sapiens
gccctcactgacccccaacctcccacctgctgagtcatcccgccccacccaccctcacctcgagccctctgacctctgtctgcccactgagcctgtcctgagtcctccctgccctccccaga

SEQ ID NO: 100404 - DNA, 122 bp, Homo sapiens
ctgcagctcactttctccctgtttgctggccagcagggtttgtggccgcctctgctgtgacgccacagcctggtgaggagggggctgcagttcctcaggaaactgccagtggacaaagtcat

SEQ ID NO: 100405 - DNA, 122 bp, Homo sapiens
ttaagagctgtaacactcactacgaaggtctgcagcttcactcctgatccagcgagaccacgaacccaccagaaggaagaaactccgaacatatctggacgtcagacggaacaaactccgga

SEQ ID NO: 100406 - DNA, 122 bp, Homo sapiens
caccccgtggggagggaggagagggcggcgcagcgctgtgctgcggggaacgatgcatgccgcttcctccaggacctgtgagtgcagggttggacggggctttctgagcttgggagctgggg

SEQ ID NO: 100407 - DNA, 122 bp, Homo sapiens
gcctcgagtcacgtcattgtacctgacagtctttttcaatagactaattcaattagtgctcgcggtttcggtcttcatctggagcccataataatgtgggggtgggtgggtgctggggattc

SEQ ID NO: 100408 - DNA, 122 bp, Homo sapiens
gcggggggggtaccggagaagcaggcgtcagtgttctactacagtcccacagtagtagaacgtagtcatggtgtctttgctattcgtgctgaatagctggtgttttccaaagtaagtataga

SEQ ID NO: 100409 - DNA, 122 bp, Homo sapiens
gtaaaactttgccccaagctttcaatcgcttttaaataacaatcgaaatgtcactggatccgctcttgccgcccatgaagctctcactcctcccgcctcggaacgcagaggtctgttccctc

SEQ ID NO: 100410 - DNA, 122 bp, Homo sapiens
cagggcagcctcaccgcctggatcctgggcaggagacctcccaggtaataaccgtgatcacggtgttgatgctcactctggggcaagggtgctcacgtgttcttgtacttgagcggagtagc

SEQ ID NO: 100411 - DNA, 122 bp, Homo sapiens
ttttttttttttttttgagactgagtctcactcttgttgcccatgctggagtgcaatgctcgatctcggctcactgcaacctctgcctcccggattcaagtgattctcctgcctcagcctcc

SEQ ID NO: 100412 - DNA, 122 bp, Homo sapiens
tctacgtttactaactggaagtccgctcccccttgttaatgtcctgcttgcaggggcttccggggtagttgccgttaagaactgcacctggaatactgattaggcaagtgtgaaaaaatcaa

SEQ ID NO: 100413 - DNA, 122 bp, Homo sapiens
aaaaaacctctcttcctactcccttagtgttttgaagaaaatcacacagtcctggccgggcgcagtgactcaggcctgtaatcctagcactttgggaggctgaggcgggtggattgcctgag

SEQ ID NO: 100414 - DNA, 122 bp, Homo sapiens
tccctgggcgctggggcctgctggaggagcttcacgcagtctggagctgaagggacacagcgagcgccccgacccgcgacgccccgactccgcgaaggcctccctgggaggctggggaagcg

SEQ ID NO: 100415 - DNA, 122 bp, Homo sapiens
tatgttagtaattttttccttgatggttttgggttaaacttgtaaaacaaacacatgttacgctgtgctggaatatgattgccttcagagtattaagattagaagagttactattctttgca

SEQ ID NO: 100416 - DNA, 122 bp, Homo sapiens
agtatgcttttctctcagaacatgtggagaaggctttttgtcttggaatagtctgcatgccgttttccatggtaattaaagcccttaaagcaaaggtttcttctggctctggttctttggat

SEQ ID NO: 100417 - DNA, 122 bp, Homo sapiens
cgcgaggacgcagactgcagagctctacggggaatgggagttttctctcgttcactatggcgtccccggcgacccgaatggaggctgctgcgttgcaagaactgggctaagactattttttt

SEQ ID NO: 100418 - DNA, 122 bp, Homo sapiens
aaaccttttttgtaaccggctgaatggctgtatctacggagccagtaggttgcggaaaggcgttcgcagggtggaggagcgggtagttggggaaccgggcgcgcctgatggggcgcaggaag

SEQ ID NO: 100419 - DNA, 122 bp, Homo sapiens
tgagagagctgctgatgagagagctactgaataaactacatttcacctgcctatgatgcccgaagttttctttcagctatttgctcatccactcactcccctcggacctcagctgggcctgg

SEQ ID NO: 100420 - DNA, 122 bp, Homo sapiens
atgtcagtgagagaagccggacacaaaggcctcgaggtgcacgcttctgtttatagggaacgtccggacaggcaaatccgcagagacagaaatgcgactgcagctgctgaggctggggagca

SEQ ID NO: 100421 - DNA, 122 bp, Homo sapiens
catgattgccaggagcaaatttttgtcgtgcacgaggtgtgttattaaaagtcggagctacgctgctgctgaatgaaaagttaaaagccctctttgagttcgggctgtaaaactggcggact

SEQ ID NO: 100422 - DNA, 122 bp, Homo sapiens
gctcccaagagagtaccatctttcagcccaagacccttgacagaaccccttcaactctgtcgccttttttcatctctggaattctgacaccacccatgacccctcttcttgttcatttacta

SEQ ID NO: 100423 - DNA, 122 bp, Homo sapiens
gagcgtcaaaatcgtgtcaccggttagtgagcagccacctaagagctctcaggtgatagccggagttttagtaagcaggtgagtaccccagacaattcagaaaaaaatgccttcaggtgttt

SEQ ID NO: 100424 - DNA, 122 bp, Homo sapiens
tcttttaatgtattgtgtgaagtatgtaacataatagtttgggatgggtagacataataacgaagttctggaggttaattgataagcaaccagtttgtctagttaggcaatatataatagtc

SEQ ID NO: 100425 - DNA, 122 bp, Homo sapiens
tatgaattacaagccttaaaagaggatcttaggttagctttcaaattattctacgtacctcgtattagctcataaatattcatgtccataagttcacatattagtgcaagagaaccagattt

SEQ ID NO: 100426 - DNA, 122 bp, Homo sapiens
ctgtgagcctttaccgggcatggcattcagcataaatgtgaaatgacagtgtgtgccctccggaaattacagagataaatacagcctcgtattatgctgggcccgcaagtccatggagtgct

SEQ ID NO: 100427 - DNA, 122 bp, Homo sapiens
ctgcagcctagtgctttgtgttaacaaacacccagtgtgagcttaacacaattgggcaggcgcagagctggccccagaatcttcctggagtaatgagggtctctcttcccctctgaccttgc

SEQ ID NO: 100428 - DNA, 122 bp, Homo sapiens
ccccgggcggtggggcggcctcggcgtgcgtggctcggttgcctgcaggcaggcacgcggcgctgtgagaaacgaacgtccgtgacttagcccacgggaccgtttctgcattttcaccccaa

SEQ ID NO: 100429 - DNA, 122 bp, Homo sapiens
tggtgctcatggctgcactgtctgtgacgggaagagaggaagccgcggtgcctctcagagcggaacacgcagtcgtggttcacttctgtgagtgagctacaagagctcacgccaaacaaagg

SEQ ID NO: 100430 - DNA, 122 bp, Homo sapiens
cgatccggcgggaacgtgggcctggaggctgccacgtgccggggccgagcctcaggaggccgctgtttccccaggcgagccacagaacacccctggctggaagggggtgacccgctcccgtt

SEQ ID NO: 100431 - DNA, 122 bp, Homo sapiens
ggcggggagccggaggtgggaggtgcctcttgagagtggctctccaccgctgacagcaaacgagctggtccggacggaggacagagggggaagaaacggagggagtcgctgggggacggcga

SEQ ID NO: 100432 - DNA, 122 bp, Homo sapiens
gccccggtgggcccggggcctgcggagggagccgagctcttggtgcttttcccgaaggagcgcgggaggcccacgggtccggcgagtgcccggcatggcggcttttccagcctgctttgtgt

SEQ ID NO: 100433 - DNA, 122 bp, Homo sapiens
cagcagccttaactgagctctgtggatggattcaaacctaggccttccccaggactggagcgccctttgaccagcagccagtgatcagctccccaatgtcctatgctgggtgacatttgttg

SEQ ID NO: 100434 - DNA, 122 bp, Homo sapiens
tcatcctttcatttcaaaccatatgaggagtatgttccaacagataataaacaagcacatcgtgcaaagaaggggggtgaggaggcaggttaataaagcttttgttctcctttgattaaact

SEQ ID NO: 100435 - DNA, 122 bp, Homo sapiens
caggctaaaaataaatcatgcaatgaataaaaaagttagatacgacactgtagagggattcgctgatacagtctgtccgactggtgaagagggaagaggcagaaggaaaaagacaagaatgt

SEQ ID NO: 100436 - DNA, 122 bp, Homo sapiens
cccccgtccccacatacaccagttcagagccaccttaaaagcaggaggcagttgtaaagtcgctggccagctagtggagtggagactgcagagggagataaagagagagggcaaagaggcag

SEQ ID NO: 100437 - DNA, 122 bp, Homo sapiens
gacctttgaggggcattggaatcctgggctcctcctctgctgggtggagccgcgaaccctcgttctctccgcggttttgtgtgtgtgggggggtcctgctcaggaggggatggtgggtggcc

SEQ ID NO: 100438 - DNA, 122 bp, Homo sapiens
tgtgccaggcgccgtgcagggctgtgaatcaggcagacccagcatctagtttgggctgtgcgtggtccagaggccagtgatgagggcagagtaggaggccctgagggtgaggtgggagggag

SEQ ID NO: 100439 - DNA, 122 bp, Homo sapiens
tgttatcctcttagccctactgtgttggaatagagcgtaaccagctggaggactgtaagacgcctgataatgccgctcttttccgctgtcccgtcttaatcttgttacacaaatggtcgtga

SEQ ID NO: 100440 - DNA, 122 bp, Homo sapiens
gatgaggccccttcctgacttgcgcacacggacctggagatgaagccccttcctgacttgcgcacacggacccggagatgaggccccttcctgcctagtgcacacgatcacggggatctata

SEQ ID NO: 100441 - DNA, 122 bp, Homo sapiens
agaggcacccagcctcttgggctcactgtcaccgtctgtttgccaagctgacagggagcacgtagtggataaaaactgtttcctctgggtggttaggtgtgagccctggccaggctgactga

SEQ ID NO: 100442 - DNA, 122 bp, Homo sapiens
gcccttctctaaaacctgggcggcggtgggggatttgtgtgccagaagaccttccagggtcggttgcggggatgatgtgggtaaggggtctcctccagagatcagcccctgaccccgccagg

SEQ ID NO: 100443 - DNA, 122 bp, Homo sapiens
cctagtcacgtgctggtgcctgctccacccccatctagtcttccaagcatttgatgcttccgaaattactgtacctgtttattgccagcacccaccagttaagtgcaactccaggggagcag

SEQ ID NO: 100444 - DNA, 122 bp, Homo sapiens
caccgacgaggatctcgcaggccggagagcggccaacgggagcagcgagaggggcggcgccgtcagcacccccgactatggggagaagaagctgccacaggcgctcatcatcggggtcaaga

SEQ ID NO: 100445 - DNA, 122 bp, Homo sapiens
gtcagcggcggagacggcgcccaccccgctccaacgtggagcaggagcaacggcgtggcccgtggagccccgcccctcacaggcaaccacagagaagccggactgggccacgtctaggaaga

SEQ ID NO: 100446 - DNA, 122 bp, Homo sapiens
gcctgaggctcccactgccgtgtgaacagggaagatgagggtcagacctggaggctgggacgccgggaatctgacagagcaccccctgtgatcacccacagtgtcccgcatccctccccaca

SEQ ID NO: 100447 - DNA, 122 bp, Homo sapiens
ccatccctgggccgtcttctggtcccttcctccgacaggagtggaggtactcaggtactccggcctcaggtaatgtcttggggaccatcctccctcgggcttgtttcatctctcaacccccg

SEQ ID NO: 100448 - DNA, 122 bp, Homo sapiens
gcgaaggggagggccctggagagcatgagacggatgacgaaccagcaccagtgaaggccccggagagcacgagacggatgacgaaccagcaccagcgaaggggagggccccggagaccacga

SEQ ID NO: 100449 - DNA, 122 bp, Homo sapiens
agtttggtcaacttaaagggaatttctacagagtattgctcatattgataacctacaggtcgtcacagttgatcgtttactttaggaataagcaggcttcctaattaatccaccttggggag

SEQ ID NO: 100450 - DNA, 122 bp, Homo sapiens
aggtgggagcacgggcaggctcaggcgggaagaaggaggcatcgtccagtaagaccgtcccggacgggaagctggtgaaaggtatgctgccacttgcatgttggccttgcacattccaccat

SEQ ID NO: 100451 - DNA, 122 bp, Homo sapiens
ccgggttagcggaagcagccttcaggtctcctaggagagcaggtttatgagcatgcgcagcggattttccgttagggaagccgatggggcgcggctccttggagcatgcgcacacaaacttt

SEQ ID NO: 100452 - DNA, 122 bp, Homo sapiens
gcccttttagcttcagggaagtctttggtgagcccatctctcattaccaaggtaacgaagcgcagactccgggcccgggtgggcggcatcaccaccaggttcacgccgagaaggagctggag

SEQ ID NO: 100453 - DNA, 122 bp, Homo sapiens
cagggcagagccttaaatgctaagctggggtttgctctcggtaggaccagctagctgccccgagcgggggctggaaccagatctcccccacgtggactcgcggacagggcggggatcaggac

SEQ ID NO: 100454 - DNA, 122 bp, Homo sapiens
tcttcactgcactctgcccactgtgaacgtttaacatttcaaagagtaattgccaaaaaacgaattcactacttgagttcaagccattaggtttttttttttaagccagtcaaatttagcag

SEQ ID NO: 100455 - DNA, 122 bp, Homo sapiens
cgagggcggcgggtgcggcggggccggggtccgagctgtggagggcggcagggcctgggacgccgtgaggggtcggggccgagccgggaggccgagcggggccggtggctgccggccggcgg

SEQ ID NO: 100456 - DNA, 122 bp, Homo sapiens
atctgaccctcactggtgatattgatttgatcacctggtccagatgttgtccaatttcttcgctgtacaatttctattactttttctccattccaacatacgagcagtttatagagaggcat

SEQ ID NO: 100457 - DNA, 122 bp, Homo sapiens
cttaattctgaaccatccgcacctgggaggggaagttgaaaggagcgctggagctgagcccgcatccttaaggatcccattcactgcttatgatggtagagctttgaattagatgtcaggct

SEQ ID NO: 100458 - DNA, 122 bp, Homo sapiens
agccatgacagagcaaacaagaaaagaaccagaaacaaggacttagccgtcttgaactcccgtccataaaatgcacctgtctctttggagttagataagttcagactgagtttgttccgaat

SEQ ID NO: 100459 - DNA, 122 bp, Homo sapiens
gtgggatttagaatttaaacgggccccagagcaagagattggctggggaaatgcccggatcgcggctgggctgctcgcatggcactgctcgggtacctccggccgggctccgtcgacgttcg

SEQ ID NO: 100460 - DNA, 122 bp, Homo sapiens
ctgctgcccctgcccagggcacaggccccagggttatcctttgctggagagagcaggccacggcggccacagcctcacatgatgggccttcctaggatctgtctgggttctggctgataaat

SEQ ID NO: 100461 - DNA, 122 bp, Homo sapiens
gtccactaagcactgcacaaacaagcaatcaaattatgaataaacataataaatatcagccgtgcgtgactgagtgatggctgcagtttctcagtatccctaggttctagttggtgcagttg

SEQ ID NO: 100462 - DNA, 122 bp, Homo sapiens
tttggttgttagcgcaggcagtttggcacacacttgatacaaccaggctgtgatgattggcgcaggggtacggacctcagctgagtcatgggagctgaatgtatgtgtttctcctttgtcct

SEQ ID NO: 100463 - DNA, 122 bp, Homo sapiens
cagattccgcccttctttaggatcactttatttccatggcttccaggaccttccctgctccgggaccttagtcagtgtcatcctgacccaatagatctctcatccccggcctccagttcgag

SEQ ID NO: 100464 - DNA, 122 bp, Homo sapiens
ctgcccactggaggtcgctgctgcacccaaactttgcaaggaattcggtccagaggattacggcgaagaggtaaaagcgaccctcagtttcccccagtcctgctcattttggtcacgcctct

SEQ ID NO: 100465 - DNA, 122 bp, Homo sapiens
ggatagcgacagaggtctctgcaggtgcccgggctcacagatcgcctcctggatgaggcccgggtggccgcgattggctgcgcgggcagcaggcttggagtcgggggaactcggtgatgaat

SEQ ID NO: 100466 - DNA, 122 bp, Homo sapiens
ttacacacagctgctacagttgcccgccctcctagggtagaatgcgactccggcttcccgcgctttttgagagggaacacacctccatgaagaactcgcaactatgtctctctcgaaacatt

SEQ ID NO: 100467 - DNA, 122 bp, Homo sapiens
catggatatggtgggaaagatgccggcctaggactcaggccacctgggtctagcgtgggccgggactcccatactggctacaggaccttggacagggcctttggctgccacagctgctaagc

SEQ ID NO: 100468 - DNA, 122 bp, Homo sapiens
caatcagagtaggcctccgggctttctcttatccaatcctggaaagtgtagtccacgaaccgcatatgcataacttcagtacataaatggggctgaagaagagtcaggctgttccaggttct

SEQ ID NO: 100469 - DNA, 122 bp, Homo sapiens
ccttgttcggtggctggctggaggagacattcgacaatggcaacagtggccaatcagagtcgccggcccttacgaagaggcttgaagagttgaggacggtgaaacccagagacgctggtgaa

SEQ ID NO: 100470 - DNA, 122 bp, Homo sapiens
gtaacacttgtgtcagaactatactcctgccaatggcaacaacgcagttcctgttccactcgctgaatgaggtcacgggtcgttcactcattgtagtctttgtgacgctattgttggtgata

SEQ ID NO: 100471 - DNA, 122 bp, Homo sapiens
ggcgctctataagttgtcgataggcgggcactccgccctagtttctaaggatcatgtctgcgagccaggattcccggtaagaaaggcatttgcaagagattgtggctgcttattttgccgcc

SEQ ID NO: 100472 - DNA, 122 bp, Homo sapiens
agaaattccatgggatgccatggtcttgtttgttttcataaataaggcctgtctatctgccgctggatttccctcttgtatcctagcaaggatcagactttgttttttgtgtatattttttg

SEQ ID NO: 100473 - DNA, 122 bp, Homo sapiens
cccattcccccaggttagagcgcggctccaggaacctatgtccgcgcggtgtagtagggacggctaaatggggcccgggtcagagcgagatcgggacccctcgctccgaggcgcccctgacc

SEQ ID NO: 100474 - DNA, 122 bp, Homo sapiens
taacgagcattcttcctgcctaaaaaacagtggatctgcaaatctctttcagtatctactcgctcttctgtacagatgcaaagcctttggattagattattttcctaagtgtaacaatagta

SEQ ID NO: 100475 - DNA, 122 bp, Homo sapiens
tcagtgcctggcaaaggaaaactttgtacagctgcaggctttcaccatacacaacagcatcgctaacgaatgctattacaatattcatttagcgtttaccaagtgcctactctatacaaatc

SEQ ID NO: 100476 - DNA, 122 bp, Homo sapiens
cctgcggccgggaggtactggcccagggcgctcggggcgggaggtggcaggcgaccggcgcgcgtcaggctcgtcacccgctggattgcggggccggagcggggacggggtctgggtcctgg

SEQ ID NO: 100477 - DNA, 122 bp, Homo sapiens
aacttgctagtttgaggctatgctgggcatcacggtcctaacaataggtgatgtcacccccggtagcccagctgtaaaattcctctctttatactctttctctatttctcagctggccaaca

SEQ ID NO: 100478 - DNA, 122 bp, Homo sapiens
accagccaaccatgtgagtgagccgtcttggaagtggatgctccagctccagtcaagcctcgaggtgacttcaactgtcaccgacatcttgaccgcaacctgatgagggaccccaggccaca

SEQ ID NO: 100479 - DNA, 122 bp, Homo sapiens
taaaccaggcaaagcaaaacaaaaggatcccagactcacttatcttctgccttgaaaggtcgctctggattcatggacatatttaaaggccctcctgatttgtacatagatactagagccga

SEQ ID NO: 100480 - DNA, 122 bp, Homo sapiens
agccactgtggccggcctaaatggctatttcatggtgaataaaccattagcctcaggcttcgtctcctctctctgtttgaagacaataaagtatgatgtaattgtattattttgataaggta

SEQ ID NO: 100481 - DNA, 122 bp, Homo sapiens
tggagtcatccctaccctgcccaggcctatggatcgcacagagacggatgggcagagagtcgttccccatgcagcggggctcctcctgagctccattttcgggccagctctgtgctgggctt

SEQ ID NO: 100482 - DNA, 122 bp, Homo sapiens
cccgcggaggccgcggcgccccccgcagcccaggccggcgcgcccggagcgtaccgttggcgatgagcttggccgacagctgcttgacgagctcagggatccgctcccactggcactcggag

SEQ ID NO: 100483 - DNA, 122 bp, Homo sapiens
cccggcgcacccagcaggtgccatcactctggatgggccagttctggatgctcccagtggcgcagaggcggcgacactggcaggcgtccggctgccgccacctcccgggtgtggcgggtctg

SEQ ID NO: 100484 - DNA, 122 bp, Homo sapiens
ttccgcggcctccacacccatcccggcatactttgcgccgtgcacaggcaagccctggtgcgcattggccccttcggccgccgtcggccggtagttactatggaaacccagctgccatcgct

SEQ ID NO: 100485 - DNA, 122 bp, Homo sapiens
aaagcattaatattttcatcatattatcattattcaatataataatatttgttcggttagcggcactaattaggccacattaaaaccgtagtgtgtccctaatggtgcgtaatgtgctcaca

SEQ ID NO: 100486 - DNA, 122 bp, Homo sapiens
ctttgtcccgcggcccgggtggctgcagcttaggtttctccccggaaggaaagcttgaggcgcacggttgcggtcggccggctgcgggggaccaggggccacacctgccgcggaggttacag

SEQ ID NO: 100487 - DNA, 122 bp, Homo sapiens
ctctctgttggtgcgcttcacctccgagaccttcccggaggcctacaagcccacagtgtacgagaacacaggggtggacgtcttcatggatggcatccagatcagcctgggcctctgggaca

SEQ ID NO: 100488 - DNA, 122 bp, Homo sapiens
cactccaaccaagccagattttctaggcacaccctgcccagcaggtcttagatctgcttccgaagttaaacaggactctgacgcagctcgagagggccacctagtgagctgcccagaagcag

SEQ ID NO: 100489 - DNA, 122 bp, Homo sapiens
ctaatctgcaaggaatcacttggagatccttgtggaaatgcagatttgaattcagcagctcggagtagggctgagacttgcttttctgacaagcccccaggtgacacagatgcttctagttc

SEQ ID NO: 100490 - DNA, 122 bp, Homo sapiens
cggcgagcggatcccgggcacaggggctggaggccgacccggtgagagtgcaaggtctcgcgaccaccgacgacagcagacagcgagtcgggccttcccatctgaggccagcttcagtacag

SEQ ID NO: 100491 - DNA, 122 bp, Homo sapiens
aggtggtgctgtcagccgctgccctgctcctggtgactgtggcctacaggctgtacaagtcgaggcctgccccagcccagcggtggggtgggaatggccaggcagaagccaaggaggaagca

SEQ ID NO: 100492 - DNA, 122 bp, Homo sapiens
gacatttttaaattctctgggaacgttcagaaggccttcgtgtgaatgccagctctcggccgccaacacacacatgtagaaggtacaagttgtggaaccagaatcaaatatttgcagctgga

SEQ ID NO: 100493 - DNA, 122 bp, Homo sapiens
tctctctgattaattttcgaaagagttggccaattttaatcatagcaaacacgatgatcacggtgatcatggcctgaacagctaaaagcagaaaataaaacccccagaacggactatgatct

SEQ ID NO: 100494 - DNA, 122 bp, Homo sapiens
ggctggttaggggctattgcataacatgccagcattccagagattctatcagagtgccaacggcaaaatctactttttcatcactgacatacagggtgtatcctgctttttaggagctctca

SEQ ID NO: 100495 - DNA, 122 bp, Homo sapiens
gcatgaagatatttcgtttccccagcaccatttgttgaaaaaccactgtcctttcttcatcgactggtctcggcacccttgtcaaaaatcgttcgaccatattgaggagtgttcattgctgg

SEQ ID NO: 100496 - DNA, 122 bp, Homo sapiens
agaaaatgggcgtgtcatgatagtgtcgctctgagttgtgtgtggcacagttgaacattacgaaatgactttatctctcttccattgctacattgtttcatgctttctgaatctctctttcc

SEQ ID NO: 100497 - DNA, 122 bp, Homo sapiens
gtagtgatatgactatgtgaagtactagaattcctggactctaaggcaggctggtcactgcgtgggcttggggaaattgcttgttctctgtgaacctcaaatattaggacttgtaaactaag

SEQ ID NO: 100498 - DNA, 122 bp, Homo sapiens
caatgagaccatcataatgctcccatcaaatgtcatcaacttctcccaagcagagaaacccgaacccaccaaccaggggcaggatagcctgaagaaacgtctacaggcaaaagtcaaagtta

SEQ ID NO: 100499 - DNA, 122 bp, Homo sapiens
cgcatcagggacactcgtctccacacctcctacctcaaagtcctacgcacctacccttcacgtctctccaaagcaactgaattaaagcgcctactggccttggcggcgcaggtgagtgccaa

SEQ ID NO: 100500 - DNA, 122 bp, Homo sapiens
gcgggcgggcggcgcggggggccgtccctccctggggccgccgcggccgcaggcccggcacggattcctttcaggcagaggggaaacatttaaactcgctcacctttgaactgccagggacg

SEQ ID NO: 100501 - DNA, 122 bp, Homo sapiens
tgggccgcgagtttgggaatctgacgcggatgcggcatgtgatcagctacagcttgtcaccgttcgagcagcgcgcctatccgcacgtcttcactaaaggaatccccaatgttctgcgccgc

SEQ ID NO: 100502 - DNA, 122 bp, Homo sapiens
gtctgcgagaagacggggaatcccgggggcaccgctggcacggggaaaagcagcctcttccgcctctccggaccagcagattcgtgcataaggatgggcgagggcagagagggaagcaatga

SEQ ID NO: 100503 - DNA, 122 bp, Homo sapiens
aagacaggaagtcaccccgtgcgcacaaacggtccaaagctctcccaggcagagactggacgggtcagtgtgagcagaagggggtcacccacgcccacaccacccttcagcaggcaccaagc

SEQ ID NO: 100504 - DNA, 122 bp, Homo sapiens
cgcgggcggcgggagcggagcagaagccgggcaggagaagcgctcagcgcgtgcacagggcgcccccggggcggcgagaggccttctgggcgcggtgcagacgtggaaacagcgacggccga

SEQ ID NO: 100505 - DNA, 122 bp, Homo sapiens
gcaggcggcggggagtgggctgggccggggggacgcgaggcggcggggcccgggggtcggcgaaggcccctcgcgggcggacaccggctccgcgccccgccacacactcccgctgcgcccgg

SEQ ID NO: 100506 - DNA, 122 bp, Homo sapiens
tttttttcctaagtgcacgtgggaacccgattccctttggtaggtgcggagaaatgtcatcggttcggtccacagaaatgcttgttcgactccctgacaactggtgagtagtctgtgaattt

SEQ ID NO: 100507 - DNA, 122 bp, Homo sapiens
aacacttttcaatccttacccagttattgtgaacgttcataccttttcttgaagaaataccgtttttgttgttgttgttgtttttgagacgtagtttcgctcttgttgcccagactggagtg

SEQ ID NO: 100508 - DNA, 122 bp, Homo sapiens
ttggtgatactcaagtgttggatttagctacgccctaggtgtgatgaactgtttcaaccccgttagtctcagcgtagccaggatagtcatgccatgttgaagggcatgcagatggcttagga

SEQ ID NO: 100509 - DNA, 122 bp, Homo sapiens
ttattcagattttagagggaagtgggtctacctactgtagaaaaatagtgaatgagaaaacgtgagcatcacaggtttagctacaaaacaaagaggtctttgtcatcacagttgatacagga

SEQ ID NO: 100510 - DNA, 122 bp, Homo sapiens
aattgctagccagaagtcttttttgtcctaattttaatgggagtgctcccagtgtttcaccgtttcctcttgtattctagtagatagttgttttttttttattttgtttttaatcaagttaa

SEQ ID NO: 100511 - DNA, 122 bp, Homo sapiens
cctctcctagatgaccctcgtttcttttctctctctctcctattcctccatcctgccacccgcttctctgcgaccccagacccctcgattgcagcgttgcccctgccctcacacccactgtc

SEQ ID NO: 100512 - DNA, 122 bp, Homo sapiens
tgaggattgtcaagttaccagaaagaaaagaaaccaggccagccagccagtcagcctgcacgcactacagaaaagattaacatggcttttcttgtaacagaggtcatagatcagtcccagtg

SEQ ID NO: 100513 - DNA, 122 bp, Homo sapiens
aatgttgctaccatttgagagagtgtggcttgattcggtaggataaaaactcttagtattcgcctaacattacgggccactgaattaacctgcaccgggtctcccagttctaccgagagtgg

SEQ ID NO: 100514 - DNA, 122 bp, Homo sapiens
gccctaggtgagcagggccaggaagggtgccagccgcctggggaggggtggtgggtaggccgtgccggccgctgacaccttgtgcccacagcgcgctcgtgtgccatccacaaggaggacct

SEQ ID NO: 100515 - DNA, 122 bp, Homo sapiens
atggtctctctggctgatccgggacggcagcgcgcggagaggctcttaaagggccagtggcggcgggaaggggcagcggtggggatcgccgttgaccccggcggggactggcaccctagaag

SEQ ID NO: 100516 - DNA, 122 bp, Homo sapiens
ctcgacagatgcgagcatctggccgcagcattcattagaaacaaaatggctcctctttggcgcttcctttccccctcccccttctctgccctcccccttacgtcacgggtgggcgcacccgc

SEQ ID NO: 100517 - DNA, 122 bp, Homo sapiens
ctgtaaatatgcagtgtgtacaacacagcccacggccactgttcttccactcagtgtcctcgccaggcccaacaaacagttcacttctctccgcctcaggtctgaatcaactagaaacagaa

SEQ ID NO: 100518 - DNA, 122 bp, Homo sapiens
ggcaccaagagcctctcagcaaagatgctgccaggaggcgttcccatggacccatgcatccgtctcttaaccctgcgacaggcctggtcctcgccatcaccgggctggtgaggtgtctcgtt

SEQ ID NO: 100519 - DNA, 122 bp, Homo sapiens
cgcggcttctccacaggacgctcgggccacagcctcgtgcaggtgcgacggccgcgcgaccgttagcgcgaggccccgccccgtcctcagcgactccgcccccaccgctcactgactccgcc

SEQ ID NO: 100520 - DNA, 122 bp, Homo sapiens
agaaccagcccggcgccggccccccgcccctccccgcgtcgccgggccggcgcggccaggcgggcccagaccgcggaagcacactcacttccacatcgcggcccttgttcttgaagctcttg

SEQ ID NO: 100521 - DNA, 122 bp, Homo sapiens
atccgcctgccttggcctccgaaagtgctgggattacaggcgtgagccactgcacccggccgacttttgttgtttttaatggcaatgatttttatctgttttgaacagcacttcgcacatac

SEQ ID NO: 100522 - DNA, 122 bp, Homo sapiens
caggttccactgccccagcgacgagtgggcacgagaggcagatgtgcggccccgggcacacgaaggggtccagctctctgtgcctgagtaccgcagccgcgtctatcaggtgctccggctct

SEQ ID NO: 100523 - DNA, 122 bp, Homo sapiens
ccattttgttagacgagaaaacagacaagcacacttatcagggcttcccaacaggtatgccggggagtgccccagctccatgggactgggaaggagggcaagttggcagcagaggctggagc

SEQ ID NO: 100524 - DNA, 122 bp, Homo sapiens
cctgagggccccggggagacgcctctgccggaagagggctccagcagaggttctgggccccgaggaaggccccttggtgcttcgacccttcaaatccacacacggctgtttccgggaagtga

SEQ ID NO: 100525 - DNA, 122 bp, Homo sapiens
tgagtggaaacagaattacagaaatgtggagttttgtttaagtaaaggggaacaaaaaaacgcaatcccatcgattttgatgctgacagtgattgcggtattagtgatgttaacagctttaa

SEQ ID NO: 100526 - DNA, 122 bp, Homo sapiens
tgggctcggctgctgctgcagccctcgcaggctggtggtgctacaaggccatgtatgcagcgggctttgggggctgggctctgccactgcagctggcaggacggctttgacactttctccgg

SEQ ID NO: 100527 - DNA, 122 bp, Homo sapiens
cgcccacccgaccatagagacaccgcatggctagagaaacttccatgatgttctgggctgcgaacgaaaacagaaccaaagcgtcagaaaggagcgggtgaaggggcgcggccgttgccagg

SEQ ID NO: 100528 - DNA, 122 bp, Homo sapiens
gcacaggtgtgaatgcaatggggatccgaagcccagaacaggggaggagaggagaaaatgcggacagataaataggaggctcagaaggacttcactgcgtggccgcctccaggggggcacgg

SEQ ID NO: 100529 - DNA, 122 bp, Homo sapiens
cattatttgcagattccaaatttgtgacttcacctcgaaaatcagtacttggagcacctccgccattatctgcggacaggcgcagaatggggaaaaatcggagtcacctgatacccaggtcc

SEQ ID NO: 100530 - DNA, 122 bp, Homo sapiens
gattatcagatggcaattctgcgatgcctaacacatggtagttatgttatgaaataatcccgccttttaaaatagaaatctaacactgaagaaactggaaaataaatgtgaaactaacccta

SEQ ID NO: 100531 - DNA, 122 bp, Homo sapiens
cagcagcagcagcagcagcagcagcaggaggaggaagacagcaatgatgaggctgcctaccgagcattcatgaggacctcctatgagaagaacccaaagctgttagcatccctggctgctga

SEQ ID NO: 100532 - DNA, 122 bp, Homo sapiens
gaagcaaaagcggaaactcctgataaactcatcagatctcgtgagaggtactcactatcacgagaacagcacggcaagaccacccccttcccccccgcccgaccacgattcaattacctcca

SEQ ID NO: 100533 - DNA, 122 bp, Homo sapiens
cccttcctctcaacttccatcattaggctcagggaccttggccctttccctgtgtcctgccgtgaaagttctggtgcctctttaccttaagtcgtctcctcatcttttgacttacatggacc

SEQ ID NO: 100534 - DNA, 122 bp, Homo sapiens
tgcctataatccaagcactatgggaggccgaggcatgtggatcacttgaggccaggaattcgaggccaacatggcgaaaccccatctctactaaaaatacaaaaattagctgggtttggtgg

SEQ ID NO: 100535 - DNA, 122 bp, Homo sapiens
tgatgctgtgatgtggcggcggatccagttcacgtaggcagggacacgagtgtagactcccggcctgttggggcggccgcagccctcaccccagctcacagtgccagcctgcacccaggcac

SEQ ID NO: 100536 - DNA, 122 bp, Homo sapiens
ctgctctgtttgaagcttcaatgaaactgtattaattgtcattttaactgaaagaattaccgctggccattgtagtgctgagagcaagagctgatctagctagggctttgtcttttcatctt

SEQ ID NO: 100537 - DNA, 122 bp, Homo sapiens
attattattattattttgagacagagtcttgctgtgtcgccaggctggagtgcagtggtgcgttgaactattattaaaaggcagtgtaacatagagtctaggaatttggactctgggctctc

SEQ ID NO: 100538 - DNA, 122 bp, Homo sapiens
gcacagtgtctagaggcaaactctacagcagtctataaatactctcgtacacgtgcccagcgagcggcacgtgtagaggcctactcctcacagcacagtgtctagaggcaaactctacagca

SEQ ID NO: 100539 - DNA, 122 bp, Homo sapiens
cccgagcggcaggaggaggctttcgagtctctgcccaggccgagatgtcatcctcccgggcgggggcgaggcagttcagcgagtgaacccagcgaatgaaggcgaccagggtgcgaattccg

SEQ ID NO: 100540 - DNA, 122 bp, Homo sapiens
gcctgaaggattaatgagagggggaagaatgttccagacacaaggaacagtgtgtgtgaacgtgcaagagagactgtaagatctctagggtctgttccatgtctaacaatataaggttctat

SEQ ID NO: 100541 - DNA, 122 bp, Homo sapiens
taataatcagagctgcccagcctgtatctaaaagtggtcaagatgcgggctgaagcgtcacgggtcaggaatgctgcacaggagagtctacggacaggctagatgacccttagcatggaggg

SEQ ID NO: 100542 - DNA, 122 bp, Homo sapiens
accgcacggagctgctgcagctgctcgtccgccatcttaccactccagctgcgcttcagtcgctgtcgtcgcagccaatgttctaattggatgagagaaaacctctaggcttattctgattg

SEQ ID NO: 100543 - DNA, 122 bp, Homo sapiens
aggtaaatcggccgcagaaaagaccaatgctaactccaccctgcatttgcagagatccgtcgctcacaccttttcttgtcttccgttgaaaaaagagaatcgtgggagtaggacctatttgc

SEQ ID NO: 100544 - DNA, 122 bp, Homo sapiens
aggattaatagccggactcgccgtgggcttgaccagatcgtgtgactccagtggggacggcgggctgggcactgtgccagctccttcccacctgccttcttccacggccagcccgtcgggtc

SEQ ID NO: 100545 - DNA, 122 bp, Homo sapiens
tcctccatcgagacagcactagactcgccagctccgcttttatccggtgcccggagcctgcgcactggagcctcctcagcccctagtgggcgtcgagtgacaccccaaccgggttcacccag

SEQ ID NO: 100546 - DNA, 122 bp, Homo sapiens
gaaaaaatagttgtgcacaacatctgctcactggactgtctgatccaatgtaattggctgcgtctggctaattctaagcactaaagtctacatctaagctatagatttaagcttgaagctac

SEQ ID NO: 100547 - DNA, 122 bp, Homo sapiens
cagaataattttcttccgtttgatcacacatctcatcagaggagcaggagagccgtccagcgtgagatatttgaaggggtgttggcaagaacatcagatggacgacaggggagaggggccca

SEQ ID NO: 100548 - DNA, 122 bp, Homo sapiens
ccgcggcttccctggctcccgtgagcatctcaccgggcggcactggccagcgccagccctcgggccggcccggatgagcagactcctgtagacacccgccgccctctcccggctcggcgcag

SEQ ID NO: 100549 - DNA, 122 bp, Homo sapiens
cccacggtcctctgactacaggtgtgagccatcatgcccggccccggggcgctggtgtgacgttgggatcccatggtcctctgactacaggtgtgagccatcatgcccggccccggggcgcg

SEQ ID NO: 100550 - DNA, 122 bp, Homo sapiens
ggggtcccggccggcctcttttctggcgccgagcagggcgtgggcacttgacccccaacgcggggacgcccgcgggccagactcggcccccctggaacaaccagcctgatgccccctcttca

SEQ ID NO: 100551 - DNA, 122 bp, Homo sapiens
aagaccagcctggccaatatggtgaaagtgaccatggctgggtgaaatgatcactgcagccggtctgggaaggcagaagcaagcagagggcctgggcaggataggcagggattctctgtggg

SEQ ID NO: 100552 - DNA, 122 bp, Homo sapiens
cagtgggtgtccagacggacatgcatgtgggccaccaagggcaccacccctacctgtgcccgccaacctgtggctggacccaggacccagacagccccacaaagaagggacagggggtcatc

SEQ ID NO: 100553 - DNA, 122 bp, Homo sapiens
gagcccgaatgcatgctgcttatatccggccaggaggagtgcaccaggtgagcaggtccccggcttccccaaatgtccagcccaggcctattttccctgtggccactggagggcagtgctgg

SEQ ID NO: 100554 - DNA, 122 bp, Homo sapiens
ttactcaaacaggtgactccaaagggctgctagctgcttatttggctttctgagtcatcacgaaatctccataatgggcaccaagcaccatttatgttctttgtaatactccagttgagtga

SEQ ID NO: 100555 - DNA, 122 bp, Homo sapiens
agcaggtctctctccggatttctagggctatgggtatatgtaattctttctctcatcgatcgtttcgattctcttgccggtcttgcagtttgcagggtcctaaacgaagaggggtggagatt

SEQ ID NO: 100556 - DNA, 122 bp, Homo sapiens
cagacacagcttctgacttcaaattaatcaaatgacagctagtaattgatttgcatggcccggtttatggggagccctaatcttagttttttcgtttctagtccacagtgtctacgtaatgc

SEQ ID NO: 100557 - DNA, 122 bp, Homo sapiens
tcgcggccggacggagggtggagggccctgcgcctgcgcggagctggagtccggctgggccgcagccgctgggagaccggcggttgccgtggggaccggtcgggcccctccctcctccggtc

SEQ ID NO: 100558 - DNA, 122 bp, Homo sapiens
tctccagaggtaggacgcagcttttcgccctgaacccgcgcagcggcaccttggtcaccgcgggtaggatagacagggaggagctctgcgacagatctccaaactgtgtgacaaacctggag

SEQ ID NO: 100559 - DNA, 122 bp, Homo sapiens
gcggagagaggaaggaggacagggatccaagggaggcccccacgaagtcaagaggaaagtcgctctgggatcagagacaagagagggaccccctccatcagcccccgctccaggggttctgg

SEQ ID NO: 100560 - DNA, 122 bp, Homo sapiens
ctgaacacttgcccaggatgtgccactggactttacttctccctccagcagggggcccctcgaggcccctccatgtcccttgaagctaggtccagctgtggggtccccttcctgtgggtgca

SEQ ID NO: 100561 - DNA, 122 bp, Homo sapiens
agaccttgtttctaccaaaaaaaaagaaacaaaaaaaaacaaaaaagaaattcacccaggcgaggaggcatgcacctgtggtcctaactacttggcaggctgaggtggtaggatcccttgag

SEQ ID NO: 100562 - DNA, 122 bp, Homo sapiens
atttctctttcccaagaattgcgatggaaacctacatccgccagaggcagctcatcatgtcgcctttgataacatcacacgtgattggggagaatgagccactcacttcagtcttgaataaa

SEQ ID NO: 100563 - DNA, 122 bp, Homo sapiens
aagaaatttacttttcaatcattgttagcgtggtgatggagcaggagctgctgagcaggccgccccggctctcttcctcagcgtctaggcttttagaattgttctatgtcctttcagccaac

SEQ ID NO: 100564 - DNA, 122 bp, Homo sapiens
gctcgggtggctcaggggcctcccaggcattcctgctgctgtggccagctgggcacacagcggtcacacccactgctgagtccagtcctctctcatgccattccatccttcactccctaaag

SEQ ID NO: 100565 - DNA, 122 bp, Homo sapiens
ttcaagctacaaacatgacatcagtcaatgcaacgttgggaagaagtgcacactagttgccggggattaggatttccaccacacaggcacacagatggaaatagtctcacggccactgataa

SEQ ID NO: 100566 - DNA, 122 bp, Homo sapiens
ttctaaagctccctggttttgtaagagtaagctcaggttaatccaagcatcacaaatctacgtctctccccttcacgcggtcagctgctttactccaggcgggaggaggtgtgctgtggtac

SEQ ID NO: 100567 - DNA, 122 bp, Homo sapiens
ctttcccaatcctggggtcagctgagccgagttagagctatgcccctcatttgttctctgcgggctacggcggggtcgggtgcgacttgaggatgggacgtctctgggacagcccgagctct

SEQ ID NO: 100568 - DNA, 122 bp, Homo sapiens
cgcccttcaaagccaccattcggcctgtgtttgacccgagcaaggtgcgggccagtggaccgggcctggagcgcggcaaggtcggtgaggcagccaccttcactgtggactgctcagaggca

SEQ ID NO: 100569 - DNA, 122 bp, Homo sapiens
tatttacctgaaatattgggtctcctgctttttgttcccattccaatgtcatatgatccccgtaccagtatgtcacatgatctcaaaccactatgtcacatgatcatgataggtgaacttgg

SEQ ID NO: 100570 - DNA, 122 bp, Homo sapiens
gtgtacattgccgtgtggtcgtgtttcctgtaggtgctgtaaaatacctggagtgctcggcgctcacacagcgaggcctcaagacagtgtttgacgaagcgatccgagcagtcctctgcccg

SEQ ID NO: 100571 - DNA, 122 bp, Homo sapiens
tcgccctgtccctctagcgtggcctctgtttgggggtctggggtggaggtcgtcccggcccgggtggttccggacgccggctttccgcacctggctcggtgacggcctcggcgccccgccct

SEQ ID NO: 100572 - DNA, 122 bp, Homo sapiens
acagcctggtcagacatggcgctaccactaatggaatctttcttgccatctttttcttgccgcttaacagtggcagtgacagtttgactcctgatttaagcctgattctgcttaactttttc

SEQ ID NO: 100573 - DNA, 122 bp, Homo sapiens
ccctccccctccgcccagctcggccaagggcgcatttgctgagcgtctggcggcctctaccggagcacctctgcagagggccgatcctccagcccagagacgacatgtggcgctcgggcgag

SEQ ID NO: 100574 - DNA, 122 bp, Homo sapiens
tgagaaatacacccaggcagggccagatactgcgtagcaggcggggcacagaggagggaacgcttgtgtctaactgatgctcctaatgcggaagcccctgaaaggcggttgtggtgcaaagg

SEQ ID NO: 100575 - DNA, 122 bp, Homo sapiens
gtggcgagcgcctataatcccagctacttagtaggctgaggcccaagaatcgcttgaggccgggaggtggaggttccaatgagcggggatcggatcgcaccactccactccagcctgggcga

SEQ ID NO: 100576 - DNA, 122 bp, Homo sapiens
cagacttacaaccgtcctcggccgcgcagcacagggttcccgcgccctgtccctatgccccggggacacagggcaggaggctgaaaaagggactcagcgttagaaactatggttggaattct

SEQ ID NO: 100577 - DNA, 122 bp, Homo sapiens
cctccaagacctcctgaaactttccccgtcgttcctgtgcccacctgcctccagcctctccgtctgtgcagaaaccaaatggcccctgtgtgataaacacaaagccacccgcggctctgtgt

SEQ ID NO: 100578 - DNA, 122 bp, Homo sapiens
cctttccagtggacgctggtgaaatgccctcttgtgtaggggtctctcccattctgaacacgaaaactcaacttagtctttgatatggatggcatgggatggtaacgtttggagcgtgtgtc

SEQ ID NO: 100579 - DNA, 122 bp, Homo sapiens
caccccctttcttgcgtcacatttccagtaattgactccgtaactggacattttttctcccgccgtatctccctgcctggtcgtcccacgcccatctccatagcggaggggtgctccacgcc

SEQ ID NO: 100580 - DNA, 122 bp, Homo sapiens
aggcccgccggccgaaggctgtgcggagcgggtctgcgggagacagcctttcggaaaggccgccgggctccgcgcgccgtggtgctcgcctccggtgacccgaggatggggagaggatgcct

SEQ ID NO: 100581 - DNA, 122 bp, Homo sapiens
ggcagaggctggcctgggatgcctggaggtggcgaagggggccccccaccgggctggcaccgggcatgcccaggtactatcttaagggagccatctgaatagtagtaaccgacaggatccca

SEQ ID NO: 100582 - DNA, 122 bp, Homo sapiens
gcactgggcccggggccgcgcggcccaggcgggcactggccagtggatggcagggctgggcgagttagaactgagagcccggcttcacagcgcagcgcgctccgaggccctctgtcgttacc

SEQ ID NO: 100583 - DNA, 122 bp, Homo sapiens
tggtaaaatttcagcgcgctcgcggagctcacaaaaacttccctcaagatctggatgggtcgacatttccgagacccgcaaagcaccggtgggtagggaagttccgtcctccacccacgcat

SEQ ID NO: 100584 - DNA, 122 bp, Homo sapiens
attagacgcaggacttaataaactgcttattgcaaaagctggtgaggacgatgatgagaccgctgggttgctgacatgggaggccccagcacttgaagccactttttcagaggacggggtgg

SEQ ID NO: 100585 - DNA, 122 bp, Homo sapiens
gagttcggggtggaactcaacagtagcagaagcgcggccctgcagactgccacaagggggcgccgccggaacccagtttctctcgaggtcttcgccccgagcgaggcccggcggggactccc

SEQ ID NO: 100586 - DNA, 122 bp, Homo sapiens
gcttttacctgtttcctgtctttggggaaggcaggctttgcctggctgagctgtggcccacgtttccagctcactgggccccagcatcatttggtgacccccccacccctgtcctgttccag

SEQ ID NO: 100587 - DNA, 122 bp, Homo sapiens
agcacagtcctggtggagcccagcagttctcatttctcgccttcattttcctgggtggctcgttattttactgagagtacttaggggtcgttggtcgtggtgctgcttgcaggctggtgtgt

SEQ ID NO: 100588 - DNA, 122 bp, Homo sapiens
tcacgggtgctaagtaagtcgaaaagcaagggcatctgataggagcctcagtttctcctccgcctgccaggaggtcttgtgcgtgcagagcggcggatgcgtgtggcaccgcaggcgcgggg

SEQ ID NO: 100589 - DNA, 122 bp, Homo sapiens
gatggcgccactgcactccgcctgggcgacagagggagaccccgtcttggggggggggggcggttacttcccctgaaatgccttagggacctcaaagtacagcccagaggcctattccaccc

SEQ ID NO: 100590 - DNA, 122 bp, Homo sapiens
ccgggggctgccctcctgctggcctttccgtcgtcgttgaacggatctgggggacggggacgttgcagaggagccacaatccccactcgttgtttccccaatgtgctttccgaactccccga

SEQ ID NO: 100591 - DNA, 122 bp, Homo sapiens
tgtttgggctgtctaggatgttgtgatcgacacaggaaacagacatgaaagccaaattggcgcagtgggtgaagtattgtaatactggtctctgtttatgatatatggaagaagtttcctag

SEQ ID NO: 100592 - DNA, 122 bp, Homo sapiens
cctctgcgaaggcgccggcgtgcccacggctaagaaacttcctctttctgctcccgggaacgaaggctgtagcagagaaggccttcaagtttcgagacccagttccagccgcagctgagcac

SEQ ID NO: 100593 - DNA, 122 bp, Homo sapiens
tcccctgcaccccacagtctctggagactgaggcagggtctccatgttgcagttatatctcgtgtatttaatttggcccccttaataaacagagggtggggcagaggctgtgagagaaggac

SEQ ID NO: 100594 - DNA, 122 bp, Homo sapiens
gattggtccgcacggcgagaggatttgcgcatgcactagctggccgcaagctcgcaaagacgctggctctaggtagccggttttcgcgagtttgtggcacagtgttggactgaacgagttaa

SEQ ID NO: 100595 - DNA, 122 bp, Homo sapiens
acatcaccacacccggctaatttttgtattaacatttttggtagagacggggttttgctacgttgcccagagtgatctcgagctcctaggctcaagtgatcctcctaccttggcctcccaaa

SEQ ID NO: 100596 - DNA, 122 bp, Homo sapiens
gtcgcaggcggagggggctgcgggctggctgcctgggcagcacaggacttgagggagctgcggggactcctggagtctcatcaggccttccagtcgctgtggggaccccggctgcgcgcgga

SEQ ID NO: 100597 - DNA, 122 bp, Homo sapiens
gcgcgtgtgggaacgttctgtgctatctcttggcttgagtcgggggtggaggacggacctcgttcacggatttcttaccgaatttctactttcttttttttttctaattggacactgaagcc

SEQ ID NO: 100598 - DNA, 122 bp, Homo sapiens
gtgtgcgcgcccgggaaggagctgggtgcagagcacggagcccacgtcgggggcccggaccgcggcggcctcgcctcgccccgcccccgcccccgcccccgggccctttcaccgccgcggcc

SEQ ID NO: 100599 - DNA, 122 bp, Homo sapiens
gtgagggacgggagaggagcctcccacgtgcggccgtgcgaggccgaggaacaggaacggcgtagctaggagaccaggtcccggagaaggagagctggccccactggcagagaaaggcgggg

SEQ ID NO: 100600 - DNA, 122 bp, Homo sapiens
agaggaggaacctgtagggggtgctgggctccaggcctgagatgaggatcttgctctggtcgccgtccacgagcaaggcctggggctgcccgttcgtgtcctcatactggaccacgaaggaa

SEQ ID NO: 100601 - DNA, 122 bp, Homo sapiens
agaacagtgcctagtgcataataagagctcaatcactgctgccttattcgactttcactacgactctgagggaggttctatttgtgcccccatttcattactgaggaacttaaattttacag

SEQ ID NO: 100602 - DNA, 122 bp, Homo sapiens
agcggggcccaggcccggacagggcaggaaaccaggggtcgggctgggacgcgggcgggacgcgccggggcgggtgcgctttccgggctgcggttttgggggaataaatggggccctcccgc

SEQ ID NO: 100603 - DNA, 122 bp, Homo sapiens
cggatttataaaagcagtcgcttagtaacttgcagcggctacatcaactttggaccaattcgcaaactgctggtgtaaagcgtttttgcgcatgtgctgtcgccttgcgggaaaaggagcct

SEQ ID NO: 100604 - DNA, 122 bp, Homo sapiens
ctcagtacacctgcacacgtgcactacacacaatcacacacgctatacatacacaccacacgtgtgcctcagtgctacacatgcctcatacgcacacacacccatgcatgtgtcacatgcac

SEQ ID NO: 100605 - DNA, 122 bp, Homo sapiens
gcagatggggcagttcagcctcttctcgcggagcggggctagacggagtcaggggcggaccgccacagcctgcaccaatcaggacccggttgataggcagagcctggcgacttcgaagactc

SEQ ID NO: 100606 - DNA, 122 bp, Homo sapiens
gttccaaaaattaaatacaacaaaaggcctaacaaattgcctcataagggctcaatcaatcgtattattgcaaccatttcgcttgtatttgagtgtgaagcgcctagaaaaccacaggaccc

SEQ ID NO: 100607 - DNA, 122 bp, Homo sapiens
tgcatctggtgcgtcagctggtccttgtcctgcaagagcctcatggagtcatccgtcagccggctggcccacagccgggaggcctcggccccacgcacctgcagctggttggactggtccca

SEQ ID NO: 100608 - DNA, 122 bp, Homo sapiens
ttgtgcagcccacagaccccccctccaccgcaggtaggaagctcagcagcgctgggaaaccgcagtgaacccagcccagctgaagggagcagagggaagccacaggagcaaggctggaaaga

SEQ ID NO: 100609 - DNA, 122 bp, Homo sapiens
gctgaagcggcccatggacttcggtacaaagctgctgagtccctgcttccccgaagcagccgtgctgcacccctctgcccagccccactccgggcctcaggcccccggacgccaagccgccg

SEQ ID NO: 100610 - DNA, 122 bp, Homo sapiens
ggcttctctcccgtgtgtgtacgctggtggatggctagcagggaggggtaggcgaagcgacgtccacagctagggcactggtggggtttttcacctgtgtgtgtggtccggtgattggccaa

SEQ ID NO: 100611 - DNA, 122 bp, Homo sapiens
cctcctccgccattttgaattgtggcgagaaatttgcgttctgagaattgtgggaaccttcgctttcccattttgaaaactgaaggacgtcacggtctgactgcttgaagacattttcagag

SEQ ID NO: 100612 - DNA, 122 bp, Homo sapiens
aatcagagaactgatttcttcatggaccttataaaatgggtttaaccactaatcctttggcgcatttgattggtctgacttttcttttcttaccaagctttcgaactgatatctgcagtgcc

SEQ ID NO: 100613 - DNA, 122 bp, Homo sapiens
ccctcccaccccccatccccagctgccagagggagactgctgtattccatctcaggccggcgacacgagaccccgcagaccatggtccactgggggagtcctctggcctcctcggatccccc

SEQ ID NO: 100614 - DNA, 122 bp, Homo sapiens
catgtgactggctgaccctcccagagcatggggtattggtcactgcttctgaacacccagcggtggcttggtgatcccatgcatagctccaatcctgttgccattgccattgccatttattt

SEQ ID NO: 100615 - DNA, 122 bp, Homo sapiens
cgtcccaggtcgagtctcctccttgctgaccaggcatcgcgagcagatgaatcctctgggcggttgtccctgtcaggctgtcaggacctgattttccctggtaagccttcgtcaggcaggtg

SEQ ID NO: 100616 - DNA, 122 bp, Homo sapiens
gacctgggagatgccgggtgctacggttatgccaggcgcctgggaggagcttgggcccgacggagccactctgtgcatggggggctgctcggggcagggtgccggggggtaggaggcagcgc

SEQ ID NO: 100617 - DNA, 122 bp, Homo sapiens
ccgctgccgctctcacagcacgatggcagagttcagcgtcttcgacagagaccacctgcccggcaaaccccaaagagtccgttctggcccttcacacaagacacttgtcagacccatctttt

SEQ ID NO: 100618 - DNA, 122 bp, Homo sapiens
cgcgcggggaatgtgggggtcgaggctgagagctgggcttggggcaggttcctttgcgttcgctcaggccacgatgaggccactaggacagatttctccgaaggctcggcctcggatcagag

SEQ ID NO: 100619 - DNA, 122 bp, Homo sapiens
ttccataaaatagtaaactattttagagtccacatataagtgagatcatgtagtacccaccgtgggcttattttaaggctctgagtaaatcaccatctctctgtgctagggtattctgagtc

SEQ ID NO: 100620 - DNA, 122 bp, Homo sapiens
agcgtctagccctctggatctccggcgtctgaggagataagcgcggtgtgggtcagaccccgaggggtcctcgcatctccgtctggaactcccctcaacgctctcaccattttgccccgcga

SEQ ID NO: 100621 - DNA, 122 bp, Homo sapiens
ttgaactcaaatgaaaatctgcctgccaaaaagcaatgcggaatgatgtagaaatttccccgtgacagcctacacctcatactttagaggctgaaaaacaaagaactcaagttaggtaataa

SEQ ID NO: 100622 - DNA, 122 bp, Homo sapiens
tggcagcccagggtccagcggcatccaggatgctggtgggtagctgcacagcccaggccgcgggaggttggctgctctcacctaacaggcctatgtggccctgacccctacctaggaagctg

SEQ ID NO: 100623 - DNA, 122 bp, Homo sapiens
cgaaaatttgatttacctaaaactattacactgtagacctggaggaatttcagtttttgccgtaattgttttcaatgtgtgttataaaaaataaattccactatgttcacgaatgtacaact

SEQ ID NO: 100624 - DNA, 122 bp, Homo sapiens
gcgctcctttgattatgagcagttgcgagacttgcaagtgtgggtgatagcgcgggacagcgggaaccctccactcagtagcaatgtatcattaagcctgttcgtgctggaccagaacgaca

SEQ ID NO: 100625 - DNA, 122 bp, Homo sapiens
tcattgctccccagaccctgtgccctctccaaacaacccacatttccttccctccccgctcgttttccagttctcctgttggaaggctcttgatcagtttaaccagtagtcttgggacctgg

SEQ ID NO: 100626 - DNA, 122 bp, Homo sapiens
aaggaccacacagacaacacacacccaagagtctgaccgacagccgtgggggctgctcaacgacgacaaaccccggggcttcctcgctcactgcagcatgatgtccttcaggttctcctgca

SEQ ID NO: 100627 - DNA, 122 bp, Homo sapiens
tcttagactatttctttcaaactttctacataaagctcagagattttattttaaagccaacgtgggtactgctgaagactgtatggaaaaatgagtggaaaagattctaagtatctttttac

SEQ ID NO: 100628 - DNA, 122 bp, Homo sapiens
gtcagggagcccccctcttcggccccagcccctgccaggatggggcgctgtgcccggcctcggagccgctggcaggcgtcccccacccacagtccgcacagccgaggcatccccagtgtgga

SEQ ID NO: 100629 - DNA, 122 bp, Homo sapiens
ttttggtggcgtttatttcatgatctgagcccctctggggaggtgaaccacctgggtgctcgattttagctttgttgactttgaagattagattgacaaaaattaaaagggaaaaacaggaa

SEQ ID NO: 100630 - DNA, 122 bp, Homo sapiens
ggtaggtggaagccgtttctaaccagaatgcctgcctgatctatagacttgtgacagccacgactttgtatgtctgctattgattttgttgttaatgtaattagagacaccagagggagaag

SEQ ID NO: 100631 - DNA, 122 bp, Homo sapiens
ggagagagtagggacagcgactgggagacgcgctccacagaaacccggactgagaggcagcgagagggtgagagtccggtgctgttccttccaaagctgcccccaagtcagggatgagctcg

SEQ ID NO: 100632 - DNA, 122 bp, Homo sapiens
aaaaaagatttgtacctgaatacaacttcctgatctttttttcctgataccttttcatttcgttgtttctttagcatttaaatttcctcaaaaaaaaaaaaaataaataaaaccatacctta

SEQ ID NO: 100633 - DNA, 122 bp, Homo sapiens
gaatcaagtttctgctcgaccacttcccagccagaagacctcatatgaaccattttgaatcgatttgctccctctgaacttgtttctgcatccttatactggggataagattactattttct

SEQ ID NO: 100634 - DNA, 122 bp, Homo sapiens
attgtttggtgttggattagcattcacagatgtgggtccaagaaattgctcaacagcccacggaggccaaggaagatctgccacgacatcgataccacgcctgactaggtcacttcaggctt

SEQ ID NO: 100635 - DNA, 122 bp, Homo sapiens
ttagggtaaagagggtaaacctactccatggtttcagtctggctggagctcaagaccaagcgcagtgggtatgtgtgtgtgaagcaaagaggctgggagtttaggttttctccccagcacaa

SEQ ID NO: 100636 - DNA, 122 bp, Homo sapiens
gcggctgcacttcgcctttgttctcgccacctagcggtccggcgtgcccctgcaaggacccggcaactgctcccgcgctaaccagaccagtgatggattcattgcaatgcggaactttcctt

SEQ ID NO: 100637 - DNA, 122 bp, Homo sapiens
cttgcccctcctcacctcccccaaccccaggacagagctgggggctgcagtgcagtgctgcgggcttggtggcctgctcatggtggaagaagtccaccagcagttttctttctttgttcttg

SEQ ID NO: 100638 - DNA, 122 bp, Homo sapiens
cacacactcatgctcccggctggggcgcctgcggcaccctgggggttaagtgctggtggccggacacattcacactccatgcccacgtggtttcctgcagctgcctgtaaggtgcagtttaa

SEQ ID NO: 100639 - DNA, 122 bp, Homo sapiens
atgggagggacctggtgggaagtgattggatcatgggggcagtttcctccatcctgttctcgtgataatgaatgagttctcacaagatctgatagttcataagtgtctggcatttcccctgc

SEQ ID NO: 100640 - DNA, 122 bp, Homo sapiens
aactgaggctcacagagggagcagcctgtggagacccaggtctctggctccggggcctgccgctaagggctgacctatccccctctccccgcaggtcccgggcgaggcgcccgcgccgtccg

SEQ ID NO: 100641 - DNA, 122 bp, Homo sapiens
ttcagccggggcctgcaggctctgaaacatcttacagaggcccaccactcacggcagctccgccgcacacccacgtctctccatactccgagacggttgcttgtacccattttgcagatggg

SEQ ID NO: 100642 - DNA, 122 bp, Homo sapiens
gcagaagagagatgcttcggtccccccacggatgaaagtggcttcccaggagccactgcgcgggtccctggggatcctggcatccctggttcggaaccacgctgtgtgtcgcgcccgctggg

SEQ ID NO: 100643 - DNA, 122 bp, Homo sapiens
gatttcgattggtcggtcagagaggttacctggaaatccaacaccgcccaacacccctcccgctccccagtccggggacttcgataggtgagtttggtgtagaaaacaaatctttcttcagt

SEQ ID NO: 100644 - DNA, 122 bp, Homo sapiens
aagaaaaggacatgtcagagaaaaacacccctgctggtctggaagtaagagacttccaggcgggccatgctaaactgcttatggaggccacatggcaggaaatatacttgtatcttttcatc

SEQ ID NO: 100645 - DNA, 122 bp, Homo sapiens
gctctacttggcttgcagttggaagctgaagtacaatttgacccaagccaccccctactgcgcacctgccatagcgcttgcgccccggagccgggcacggcgtcgcgggggtggggaggcgg

SEQ ID NO: 100646 - DNA, 122 bp, Homo sapiens
cctaagccattcaagtgctgtcctattagcctaatgacatcctcatctgactgggagagccgcttcttcttcttgaggctgctgcccagttctggggtggccaaggaagaggaggcggcggt

SEQ ID NO: 100647 - DNA, 122 bp, Homo sapiens
tgtgtaggatgtagccgctacccttggggccctgggaaccttgcaccacagttatgtatgcgagtatattctctccccaaggtgaacggtggagcttttgagggcaagaccctgcacctcac

SEQ ID NO: 100648 - DNA, 122 bp, Homo sapiens
aaaagctgctgcagaagaagtggaccaccttcctgaaggcccagctgctctgcacccagccggggcagctgcccttcaacgtcatccgccacgcggtcctgctccccgccgattctcccaca

SEQ ID NO: 100649 - DNA, 122 bp, Homo sapiens
gagtacggagctccaggctctgccagatctcaaagtgagaaccttgagggatgactgaaccgctcctccctcatcccccgccccactagaatccggttccgcccctgttgtccacccaggtg

SEQ ID NO: 100650 - DNA, 122 bp, Homo sapiens
cgggtcgtgacgagggtggctgggctctttctgccccggtggctgctgtctcctgggccgcgacgggaactgtaaactgcagcggcgggctcgggccggctccgctcgcgccctcctcggcc

SEQ ID NO: 100651 - DNA, 122 bp, Homo sapiens
atagctccctgggcagcagacatcatggattttcctccctctgggaaccagaggtccctccgtttctggtttgaatcccttagagacaaagaacttcattctctcccatacccgcgtgggac

SEQ ID NO: 100652 - DNA, 122 bp, Homo sapiens
actcaaggagtctttctggttgttagtccacgtgtcccgatttggggtttccaaaatacacgcccactggaaccgggccaggggagccagcctggccaagggctcccccagcccggccaagg

SEQ ID NO: 100653 - DNA, 122 bp, Homo sapiens
gttcattttacgaatgtgtctccggcggctcatttcatcttcaagtgacacaggacatcacgaaggccttctgtggtatttgtacgccactattcattgcagtgtgattcacgacagcagaa

SEQ ID NO: 100654 - DNA, 122 bp, Homo sapiens
tgcagcgtctctccaacagtggtctacactcgagacacttggcagcttttaaaaatacagcgtgcgtgagtgcagtgtctatcccatagtggtctacactcgagaaactcggcagctttaaa

SEQ ID NO: 100655 - DNA, 122 bp, Homo sapiens
agcaaagtgacatttttgtgtacatttaacaggactgcttaccttcacaacctgctcagtcggctttccctggacttctcctaaccgcccatttttcctggatttggcaccgagagttacag

SEQ ID NO: 100656 - DNA, 122 bp, Homo sapiens
cacaactagtgaagaactgggctcgggtcccagaaataggctgccctttccagagggtgacgggaatatcctccctgcttcccgttgccatggtttccgctcagccaccaggcagcctgttg

SEQ ID NO: 100657 - DNA, 122 bp, Homo sapiens
ccaactcagggagacccctccttggctccgtgtgggtcaagaaggaaaggatggattcctcgtgtccatgtagaggcagagagcgcttccaaaaagacagatgagtgaccattgcctcggct

SEQ ID NO: 100658 - DNA, 122 bp, Homo sapiens
gaaggcgcttgctcctccacgttcttgccccgtaggaacagtgacgatggcaaagcttaccgctttcctcgcctcgggctagggcttgttccgccgccctttcctgggcttctccttgctct

SEQ ID NO: 100659 - DNA, 122 bp, Homo sapiens
tacatcgctgccaattgccggatggcattttgttttgttttgtttaaaagcttgcctgtacgtctcagagtctgagaggtgagttgcaatttccctgtaggtcagagaatctgggaggtgag

SEQ ID NO: 100660 - DNA, 122 bp, Homo sapiens
cctctttgagttttcatttcccctgcttccaaatgggagcaatgcctcctagaactggtgcgaggacaagatgagctgacgcctgtgatgttcactcagtgttttgcacagagtgaagcctt

SEQ ID NO: 100661 - DNA, 122 bp, Homo sapiens
ttccttgtaacttaggtgggtcaatttctccacctggttgcccatcacgctgcggacacacgttcacaccgccgcaaggggagaaagcgaaaccaactccagggtcatttgcacaggtcccc

SEQ ID NO: 100662 - DNA, 122 bp, Homo sapiens
tcggggaggtgttcttccccctctgctgagcctgcatgaagacgcgtgcgctcaggccggcgtctgcagtgtagacacagctgcctaggctcacttgtggtgtggacgctgtgctgtgccgg

SEQ ID NO: 100663 - DNA, 122 bp, Homo sapiens
aggacaacgggcgtcgccggcgccgtgtgacttcgggctgtgggctcgctcgcggctcttcggccatggtgagtctgggacccgcgtctgcctagctgccccgccctacccctaccgggctg

SEQ ID NO: 100664 - DNA, 122 bp, Homo sapiens
gaacttctgcctggctctccgcattcttcccccaggctggcagacggctctgcccactcccgcccgcctgcgacacctgtcctgctgctccccttgacagctacctggcccctgacaggcag

SEQ ID NO: 100665 - DNA, 122 bp, Homo sapiens
acagagaaattaagagtaatttgcatttctaacactgtgaggaggttaggatgggggaaacggagatttggaggggaaaaaaggtactacaggaggcattatacaaagggaagtgaataaaa

SEQ ID NO: 100666 - DNA, 122 bp, Homo sapiens
ctctccccactcctccctggaatgccgtcatgccggcgatgaatatttatgaggcacacgcggccctcccgccctgccagcctcccgccttcccgctcccggcgcatgattaatattcaatg

SEQ ID NO: 100667 - DNA, 122 bp, Homo sapiens
taaagcctgcctcggaaatctgagggtggccgcgaacccacaagtcaagattcgcaggtgcgcgcgctaaggactgagctattggggcgatggagagagtctcgctctgcgtcagggacgga

SEQ ID NO: 100668 - DNA, 122 bp, Homo sapiens
cctgatcgaactcttcatcaacataaatccctggttttacaacaagaagccaagctcacccgatgctttcaaatgtgcacagttaaactagggcagaggtcccagcaagccttgcaaaatta

SEQ ID NO: 100669 - DNA, 122 bp, Homo sapiens
tcgggcgcccccagtggggcaatgtgggctgctgcagggaactcacgcgtgcctggcacccgtgcaggtcctggactcggagcaggaccctgcggagcacatccccgaggcagaggaggacc

SEQ ID NO: 100670 - DNA, 122 bp, Homo sapiens
tactagacttttaatctacagaagtcagcctgtcacaatgaaaataaaactacaaaagaacgttaagcctagctcagtaactaactggttgggaaggtaagcacaaatcatcttatctgttg

SEQ ID NO: 100671 - DNA, 122 bp, Homo sapiens
gatggacgagcgggaggtgcacacggatgggcaccgtgtcatcatagagcaggactggaacgtggccaggctgaccttcaggccggccttgccctgtgacagtggcatctattcttgtgagg

SEQ ID NO: 100672 - DNA, 122 bp, Homo sapiens
cacttccccactctagttttggtttcctggtctgtacaatggagataatcagggttttgccgatcctcgacaggctgccacgagcatcagtgatgatgaaagtaacagccaatcagtagctc

SEQ ID NO: 100673 - DNA, 122 bp, Homo sapiens
ctcaccctggcgtgcttcagcacctcctggatccgaaagtagcggtcggtgacgcgattccgcagccagagctgcgcggtgaggaagaccatggcgcctgcaggccggcgtcccgaacactc

SEQ ID NO: 100674 - DNA, 122 bp, Homo sapiens
gctacgagcacctgcacgtggaggctcagagcagcatcactaagagtcaaagcacagccccgctgatgaagcaacagaaacaaggtccagctctgcaccggcagctcagcattggaaacaga

SEQ ID NO: 100675 - DNA, 122 bp, Homo sapiens
tcttatttgctcagaactgtgtgatagatgttaatcacatctacactgtagaccatcagtcggtccacaatatagtttataaattgtgtgtccaatgaccagatgtttttagtgacagaatt

SEQ ID NO: 100676 - DNA, 122 bp, Homo sapiens
taagtggttttcaaatctgtctcttcccaaattatattgattataactttcttaatcacgcgggatatatttcattcatttctatccccagtggcttgcacagtgctgtgtacatagtaggt

SEQ ID NO: 100677 - DNA, 122 bp, Homo sapiens
tattctgtccattctcctccctcactttcaccccctccactttaaaaaaaaaagggggggcggggcattaaaaagcaggtgcgcaaaccccctagatccctgccctgtcctgggagccctcg

SEQ ID NO: 100678 - DNA, 122 bp, Homo sapiens
cccttgcaaaggactggcagtgagcagatggggacactcgagctgccccgcgacctgggccgagctgcctacaacctgggcccaggtgcctgcaagaattagacctccgataacgttaacac

SEQ ID NO: 100679 - DNA, 122 bp, Homo sapiens
agaggatgaggcaggagaattgcttgaacccaggaggcggaggctgcagtgagctgagatcgcgccactgcgctgcagcctggcaagagagcaagactccatctcaaaaaaaaaaaaaaaaa

SEQ ID NO: 100680 - DNA, 122 bp, Homo sapiens
gcgctggcttccgagccgcagctgggcgcatcgattccagggcaaagaggcccccagcggcgaaggttcccttcctgaagaatttcaggggtaggagttggccttggaagcttccgctgccg

SEQ ID NO: 100681 - DNA, 122 bp, Homo sapiens
atcacttctctatggagttgatcaagatcagcaagcatgacttcattctccttctatccccggctctcatgcagtgtctggtgcacagcagatgtgcagcaaatcctgaattacaacatcac

SEQ ID NO: 100682 - DNA, 122 bp, Homo sapiens
cccgccatgcctgagcctcccaccccctccgtgggctcctgtgcggccgagcctcccctacgagcgccgccccctgctcccgggcgtccagtcctatcaaccacccaagggctgaggagttc

SEQ ID NO: 100683 - DNA, 122 bp, Homo sapiens
gccggtcctggctgtgctttggggcagctccgtttctgtgtgttaccgagcatgtgtgtgcgttggtggctgttccgtggctgtggcaggtgacccaatggtgcttccccttcccctccggc

SEQ ID NO: 100684 - DNA, 122 bp, Homo sapiens
cgtcgctcgcacaactttttttccttccccgcctctcgcgagaggaaaagggcggggcgtcgccattttggcttccggttccccttgcggcctctgccacggtggttcgggaggcggcgcgc

SEQ ID NO: 100685 - DNA, 122 bp, Homo sapiens
atctgggcctggagctcggcgatctggtcgctgaggtctgtggagtctccctccagcttccggcgggtcttctccagctcctgtcgctgcttctcctccctgcggaggcgctctgcaatgca

SEQ ID NO: 100686 - DNA, 122 bp, Homo sapiens
aaggtagaaactgggttagaagagagaggggagcacaaacgcccggagagagcgagccctcgggataccattggctataggctggcctccgaacaactggacggtccaagtcctgagcgtct

SEQ ID NO: 100687 - DNA, 122 bp, Homo sapiens
actggctccacttcccatatttgccgtcttgtcagctttttcaggcccctaatcctctctcgtaaggtttcctgtatgtgagatggaagagaaggaaaaaagttgggattgagtatcccaac

SEQ ID NO: 100688 - DNA, 122 bp, Homo sapiens
aggcctatggacgccaccacgacaccacatggcagttactcggtatctgggccctggacgcgcaagaccccggaggccacaaacggtacaggaacacagccaggagtcacgctgcacacccc

SEQ ID NO: 100689 - DNA, 122 bp, Homo sapiens
ccagcgccatgacctgcaacttgcgggctgaccctgcactacttcaggcagctacggaggcgggcggggctaaaggagattcaatccttccggaaagaaccgcgcccgcccgcctcctgcac

SEQ ID NO: 100690 - DNA, 122 bp, Homo sapiens
tccggccctggcggggagagggtaccggctgccaccacctgctgccggtcccctcgcaggcgaccagcccaacttgggctgctcacgctactgccgctgctgccgctgccactgccgctgct

SEQ ID NO: 100691 - DNA, 122 bp, Homo sapiens
gggggctccaggagagcccgcgcctgactctccagggctttccatggctgggagctccttcgcttcaggaagagaatccagtcccaaggcaaggcacgcacatccccagtgagtaacacttc

SEQ ID NO: 100692 - DNA, 122 bp, Homo sapiens
gcgtctccagtcggtgactcaaggccgctcggtccgggggtgggtgtgggtcggcaggaccgaccagggccgcgcgggggcagctgccgggcgttcggtcacctagcggtgggagccgaggc

SEQ ID NO: 100693 - DNA, 122 bp, Homo sapiens
atatttcccgccttaaagagtttaaaaggtgatcaaaaaatctaacactggccacccgctcgggacaccttccacgctgtggaagctttgtactgtcattctgctcagtaaagcctacagcc

SEQ ID NO: 100694 - DNA, 122 bp, Homo sapiens
agagagaaaacagatgagatgagggaggccagcttggcccccagctggaaaggctgtggacgcaggatgggatctggctcagagagatcctggctgaaatccagcctccatcatttcctagc

SEQ ID NO: 100695 - DNA, 122 bp, Homo sapiens
gcccacggacaacggtcggggtccgggacacacctccgcctctccattccttacggggcccggaatcaccacgtacctccagtctcgtcggtgaaaacaacgaaattctgtcccaccgatcg

SEQ ID NO: 100696 - DNA, 122 bp, Homo sapiens
gtgatcacaagtgtcctcataacagaggggcagtaggaaatttgactacacagccggaggcgacgtaacaaaagcagaaagagatttgaagatgttaaactgctggtttggaagatgaaggg

SEQ ID NO: 100697 - DNA, 122 bp, Homo sapiens
cgacctcgctcctgcttatgaccctcgcagccacaggagcccccacttaggtgaacatttcggacggggccccggcggttcagacccggaggcggctcctcccggaggcagatcctcccggc

SEQ ID NO: 100698 - DNA, 122 bp, Homo sapiens
gtatacggacaaatatcaaatcatattgtacatactgttgtatgacttgcttttctcactcgacagtatataataggtatccttctatgtcaatacatcctagtctatatcattctttttaa

SEQ ID NO: 100699 - DNA, 122 bp, Homo sapiens
tatccttgtcatcgttcttcttttttctttttgtttttccgagacagtctctctctctgtcgcccaggctggagtgcagcagcacgatcttggctcactgcaacctccgcctcccgggttca

SEQ ID NO: 100700 - DNA, 122 bp, Homo sapiens
gctgcatggaattctaaattgtatttcactattatttgagaatgttctaaatacagtccgcgcacttcatctgatctggaaagaaaacactcaaagtaaggggaatacccagcatactctgt

SEQ ID NO: 100701 - DNA, 122 bp, Homo sapiens
agcaccagggcactgaccttaactctgtgttcttctagctccctatgaggacactgtacacgacatcgctaatgaggacgctgtatatgacattgctactgaggacgccatatatgacatcg

SEQ ID NO: 100702 - DNA, 122 bp, Homo sapiens
tctttcctacgtccatgaccctccctccaggccctggccctgccccttttttcctccctccggcctgtccggtttctgatatgggccaaggctcacagcttcctccgccttctggaccttct

SEQ ID NO: 100703 - DNA, 122 bp, Homo sapiens
gctgcaggtcctcctgcccggcagggaggcagctaaggcctggcaagaaattgagccccgcgcgggtgggccggcactgctggggtacccggcgcaccctctgcagctgctggcccaggtgc

SEQ ID NO: 100704 - DNA, 122 bp, Homo sapiens
tgtgctaaaagggtctgctttgttcaaaggcaaactttgtctttggaagaggaggaaatgcgagacatgagtttggggcctgacacttaggagggctaaggtagaaacaaaagaaatgaaag

SEQ ID NO: 100705 - DNA, 122 bp, Homo sapiens
ggcagagatcccgttcccctgcagagctacggggaccggaaggcgaaacagagctgtggacgcgggagcacatgctgcccaccagtggagcacaagtaaagaaagaacgcgcgattgcccgg

SEQ ID NO: 100706 - DNA, 122 bp, Homo sapiens
ctgtgatatgccataggtgtgacaatccgagcagtggagtcattcagcgggagcactgcgcgctatcccctcacattctctatgtactatgtatgtatgtattattattattgctgccaaga

SEQ ID NO: 100707 - DNA, 122 bp, Homo sapiens
gataatccccggagggcgaagttctttcatatgtaaggtgggcgcattgttattacttcccgaccacttaagagtcattcacaggctcagaccccggcttcctaatttccctccttccggaa

SEQ ID NO: 100708 - DNA, 122 bp, Homo sapiens
tgaacccgggaggcagaggttccagtgagccaaggtctccccactgcaatccagcctgtgcgacagagtgaaactccatttaaaaagaacaaaaacaaaaaacaaaacaaaaaggaaacaga

SEQ ID NO: 100709 - DNA, 122 bp, Homo sapiens
gaaacagccacggatgctttcgagtgaattcaacaaaggtagtttgtatcctggaaaacacgtaagtggtttctctctatttaatagagaagggttaaggttgcaagctgacaaacgaggct

SEQ ID NO: 100710 - DNA, 122 bp, Homo sapiens
ctgctattcatcatctgctggctgcccttccagatcagcaccttcctggatacgctgcatcgcctcggcatcctctccagctgccaggacgagcgcatcatcgatgtaatcacacagatcgc

SEQ ID NO: 100711 - DNA, 122 bp, Homo sapiens
actgaagctcaggctagggagggaagtcccaaagtggcacagcaaggcggctagggctggcgtctctgggctcagaggagctgcccagggccacacacttcacgtctgaccccttcatgggt

SEQ ID NO: 100712 - DNA, 122 bp, Homo sapiens
ccgcgttccccaccctgccgcaccccgttgctgcggcagacgcgaccccgccccccgcaacggactaagcacccccacttcgccccgcctcggcccagtgcgctcggcccgcccctttcccg

SEQ ID NO: 100713 - DNA, 122 bp, Homo sapiens
ccatcaggtgagaggtgaagcattttctgtcaccaccttcatctctctccacagggctttcgattaaacaagccaagttttccccccaaaaccaagaggctaggtaaattccgcagccgccg

SEQ ID NO: 100714 - DNA, 122 bp, Homo sapiens
tcctgcccagcctagcgggctctcccttaatcaactgtagcgaaaactgtctccttctcacgttcctggaaggtgctttttgacacaagaaagaggatgtgattgctagggtcatcatgtca

SEQ ID NO: 100715 - DNA, 122 bp, Homo sapiens
gcgctggttccgacccgggccccagaaggtctttttcgtttgagaaaagtcctcggaggccggggcagggtgcgccgatattggtttactaagggcgcctccagtttgagggcgttggggaa

SEQ ID NO: 100716 - DNA, 122 bp, Homo sapiens
aagcctctggccccgccttccccccaaaggaaggaggcgggagtagggagagaagggcggcgctcggcaacgtaaaagcgatctcccattagcgctcatcgccgccaatcgaggcttccttc

SEQ ID NO: 100717 - DNA, 122 bp, Homo sapiens
gcgcgggggagctctcaggagccctcacctcgccccggtcaccataggaaacagcccgcccgtccccaagcgcagccaccaccatgcaggtccctccacggggcgccctgccccggatctcc

SEQ ID NO: 100718 - DNA, 122 bp, Homo sapiens
atggtccacgagggcaaccagcgctgggacaaccttcagaggcgggtcacagccgtcctgcggagactcagggtgagctcctctgcacctggctcgggtgtagattttccaggagacataac

SEQ ID NO: 100719 - DNA, 122 bp, Homo sapiens
aagttgggaaacccaagactcagccaagtattagttctagtcattcattctagtaataaacggtgcaagagtccttgagtgcctactttatgcttgctgtcttgtattaaatccttgaggaa

SEQ ID NO: 100720 - DNA, 122 bp, Homo sapiens
gctcgcctctgtcgggatgggtcgcccagaggatccggatcttgggggattttgtgagggcgagagggtgggggaatcagtctgtccgcagcgcgttgaccatccctcccttccacctacta

SEQ ID NO: 100721 - DNA, 122 bp, Homo sapiens
cattttatttccagaagctattgagaacactctcctgaattcttcaaattcagtagagggcgacaaatgtacatataaatgatggtagtgggtcttaaataaagactcatgacacctaaagg

SEQ ID NO: 100722 - DNA, 122 bp, Homo sapiens
gcaggccggctgcctttccaaaagattctgtctcccttcttcccaagaagcaggcctctccgcgcgcgagaacagaggtgggaggacgggagtttgcaggcgcaaagaacaggagtttaagc

SEQ ID NO: 100723 - DNA, 122 bp, Homo sapiens
cgcagaccctcggtgggcagcgcactccagtcttcccaggctagcggctgcagggagctccggcccgcggcccctccgcctcaagtctgggagctgccggtcccactctgtctttgcctatg

SEQ ID NO: 100724 - DNA, 122 bp, Homo sapiens
tgttagtcaagatgctctgagagcgcacggccgcaaaacaaaaatggtcgctgcttagcccgccccctggtttccactccagagttgcagattcgtctggggtcgtatcttagaaagactag

SEQ ID NO: 100725 - DNA, 122 bp, Homo sapiens
acccgccacgcatgcactgtcttagtcctgcgggctacccgctacacacgcactctaacccgccacgcatgcactgtcttactcctgcggggtacccgctacacacgcactctaacccgcca

SEQ ID NO: 100726 - DNA, 122 bp, Homo sapiens
agagcatatagggaaaaaggtgtaagttttaactttatgcatagggaaggacataaacaccgtctacttgtgaataagtagtttagaagaaacaatctataagggcccggaagacttccggc

SEQ ID NO: 100727 - DNA, 122 bp, Homo sapiens
atgcttctggtttggggggtttctatgtttcagggtctgtggtcgcactctgaggtctttcgaagtcttcttcatgaattttgggtctctgagttgtccatctccggaccagctgaagtctc

SEQ ID NO: 100728 - DNA, 122 bp, Homo sapiens
tagaggacctgagcggagagtcctggggaaaacgctgacttctttttcttcacatagttccggctcgctgagctcggcggaaggagacggtgggagcggtgcgtagcccgtttggaattttg

SEQ ID NO: 100729 - DNA, 122 bp, Homo sapiens
accagagaccggagacggaatggcccagggtcagcctccacccggaaccggaggatgcagcgaagacgtctccttgaagtgggatacggatgtgaaccggcccaagtgctcgccggtccgtc

SEQ ID NO: 100730 - DNA, 122 bp, Homo sapiens
aacctgtccagagaaacagaaaatacacgtgcttttcagcaggacaaacagcctcagggtcgcccggctctcatgtcgtatgcatccggctttgggacaccacggggccaactgcgggaagg

SEQ ID NO: 100731 - DNA, 122 bp, Homo sapiens
gctagccctgccccggtgctactcggcggagctcattggcagtggcttctgtatgttgtccgtaaccagaggtgccaggagtgaaggacccccccactagagggcaggcggcccgaatgaat

SEQ ID NO: 100732 - DNA, 122 bp, Homo sapiens
ttccggccccgacgcgccgcccaacgggcccttgcagcccggccggccctcgcttggcggcggtgtcgacttctacgacgtcgccttcaaggtgagccaggcacccgccccccaggccagcg

SEQ ID NO: 100733 - DNA, 122 bp, Homo sapiens
cccatgagcaagtctctgctcgtgggagtggacaggtagtctgagcgaggaactttgctgcgtaagtcataaatgggttgagagatctgcattactgcagttaatctagcccattctgactg

SEQ ID NO: 100734 - DNA, 122 bp, Homo sapiens
accatccctttagtacaaattaagctattaaaaatacacagaactatttccctgaaattccgtaagtacatagtcaaaacacaatgtgaagaatttgtttaaaaacatcctgtagaaagttt

SEQ ID NO: 100735 - DNA, 122 bp, Homo sapiens
agtccagggaaggggatcatggtggggagggggcagtgaggtccagacgggggccatgggcggagaagaggaggtccagatttaagttcacagagagaagaggagattcaggctgaggccac

SEQ ID NO: 100736 - DNA, 122 bp, Homo sapiens
ttgtgggagtccccatttaaaatgagatattcacatttgatattttgccatccgtcttcacgttggatgcccagtggcattcaggaggttcttggcataactaggaaacagcattagccatc

SEQ ID NO: 100737 - DNA, 122 bp, Homo sapiens
cactaacacaaaaccacacatcactgaggtcacagcctctgccgagaccctgtccacagccggcaccacagagtcagctgcacctgatgccacgattgggaccccactccccaccaacagca

SEQ ID NO: 100738 - DNA, 122 bp, Homo sapiens
ctgcagtggtgcagtctgttaccttggagaccagctaacacattcccgcagggcaagcttcgctgctgagttgcttggaggagcttggagaaaccagaagtgagatccaggagaagtaaggc

SEQ ID NO: 100739 - DNA, 122 bp, Homo sapiens
ggtccggcgccaccacctctgccggacgtttgctatctctctacctccgtgcccagcccccggctattctcagcacagcagccaaagagattcctttaaaatagaagtcacatcctgccagc

SEQ ID NO: 100740 - DNA, 122 bp, Homo sapiens
ctgggctggaggtgctggcacagccgcctgcacgggcccagtgagccgtcagccatcagccgtcagccgtgacagcatgagtgaggtgctcaagtcagcccgtgactatgtgctcatggccg

SEQ ID NO: 100741 - DNA, 122 bp, Homo sapiens
gctgggatgtcctgacacagggcaagggccctaggaggctcaggtgtgtcatcctctgcacgctagctgtgcaacgtggagtcacaagcttcagaaattcccacctggcagtgttatgaaga

SEQ ID NO: 100742 - DNA, 122 bp, Homo sapiens
tttattattcccagtaatttttgccaaaattaaaggaaagaaaattggaaggcaaaatgacgtgcttttggaactgaggttgtgctgggaacaaaggcattatttgctaagagtaaaaaaat

SEQ ID NO: 100743 - DNA, 122 bp, Homo sapiens
tggcgctcttgggtttccgctttaactgaaaatgcttcaccgggggagtgaggggtcccgcgagggtcgtcagggcgtttttgttcaagtactggcactccagtggcagcatggcagacgct

SEQ ID NO: 100744 - DNA, 122 bp, Homo sapiens
ctcttttcccgcgcgtgcggtgccagctccagcggtccgaggctttcgagccctcccgcccgccacagctggggcccctcgtctaagaggcagcacattccccaaccagaatttaaggaagt

SEQ ID NO: 100745 - DNA, 122 bp, Homo sapiens
tgggaacaaagtgaaggcttgctgatgtaccttagaaatcctatctttttaagagaagtacgtggacactatctgatttcctgcagggtgctgtggctggagactggaagaaatggtggctt

SEQ ID NO: 100746 - DNA, 122 bp, Homo sapiens
atgaaaaggggacagaggtgatctggcctagtaagtaagtcttcttccagggactgtggacggttggttcacacaggcaacaggcaccagtgagtgggacacattttcacttagacaactga

SEQ ID NO: 100747 - DNA, 122 bp, Homo sapiens
cggggctcaggctccccgccctgcgggaccgcgggtggctgcgaccccagcccggttccccgccagcctgtcccctagcaatgcctccccgtacccgggtcccgcagacttacgcgcaagcc

SEQ ID NO: 100748 - DNA, 122 bp, Homo sapiens
gggagccggagcgcaccatggaggcggcggcaggcggccgcggctgtttccagccgcacccggggctgcagaagacgctggagcagttccacctgagctccatgagctcgctgggcggcccg

SEQ ID NO: 100749 - DNA, 122 bp, Homo sapiens
atttttaccctttgccatacttcctttcttcagtcagcattcagtgtgtagttttaaacacgttattaaaatatggcacttggcacatagtaacttctcagtaaatacaaaaattagccggg

SEQ ID NO: 100750 - DNA, 122 bp, Homo sapiens
agtcctgaccttgccggaggaggggcggcagcacctcacaaaatggcagtgaagttgtggcgcctccccactgttgtaactttgtagaaacttgccgtttgggagttatgggaaacgtgccc

SEQ ID NO: 100751 - DNA, 122 bp, Homo sapiens
gaactaattttaaatgttgacagaactttccaagcacacatttcctcaacaaaatggttacgactggaacaggaaagggcttagactttttcttctacagctatcccacaagtcagtctctt

SEQ ID NO: 100752 - DNA, 122 bp, Homo sapiens
gacattcccatacagccgggactccgagagcagccgtgggcgacctgggggccggggactcggcggatccggcccattcatcaaaggaaggcactgggacaaagttggccccctccccttct

SEQ ID NO: 100753 - DNA, 122 bp, Homo sapiens
gacaggaggatgctgtctactggactgtgagacgcacataaaggtcaaccagcctcacctcgggagtccgctcgggtggcttcttcctcaacgcctgcctagcgccagggtccacgggtgag

SEQ ID NO: 100754 - DNA, 122 bp, Homo sapiens
tgcctctctcggtcctcaaagtttcgatggacagagcgagtagtgacaggtagatccaggcggtcagtgcctcggctgggctgtggacagtgggcaggaagaacagcaggtcagggactgag

SEQ ID NO: 100755 - DNA, 122 bp, Homo sapiens
ctcggcagggccggtgtactttttgtggttgtcattggtgtgttgttgcacattccaggacgtcagtattttaacaggttctaagtgcctttctatcgtagcttatgttttcctcctcttgg

SEQ ID NO: 100756 - DNA, 122 bp, Homo sapiens
cctggaagagggcttttgaaccacggtgccctgttgcaaggggctgacctttggctgacacggccacggagcgggcagttcgttaacgaggatttgatacattagacattcgagctgggcgt

SEQ ID NO: 100757 - DNA, 122 bp, Homo sapiens
gtccaggattcagcaatgcagactgcacatcaattatatggtgatccgctccagggaacccgtaagaacacaacgcactgaacagagggaggatgtgggcagcagagaccgcccccacacga

SEQ ID NO: 100758 - DNA, 122 bp, Homo sapiens
tcatgagtagctgagactactattttattgttaatagagacaaagtctcgctatcctgcccgggctggtctcaaattactgggctcaagtgatccttctgtcttggtctaccaaagtgctgg

SEQ ID NO: 100759 - DNA, 122 bp, Homo sapiens
agtcccgctctcttccctggccaggcacccgaccgcccgagtccgggctctcgatgtctgcgcacccaggcgcgccccacgccctcggactcagacatcccagccagggctaaacgtcgggc

SEQ ID NO: 100760 - DNA, 122 bp, Homo sapiens
ccagcatcctcccaaacattctcctctcatctgcagcacacgaagccagagaagctgctacgtcagtcactctcatagtccattggctaactttgttcacaatccgatgatataaattaatg

SEQ ID NO: 100761 - DNA, 122 bp, Homo sapiens
tatacacacacaaagaaaaaatacactgaatagacaaaacctttcatgattaatgatgcacgggaataagtgatgaaaaaagtttcggtcccagatgatggccagtgataacaacatttttc

SEQ ID NO: 100762 - DNA, 122 bp, Homo sapiens
gaaatgctctaggagaacaggagttatgtactgaaacatcacagcaaacaaggtagtcagcgctttcccatgtctgtgggctggtcctagtggcccttaggaggagatgcttggtggattcc

SEQ ID NO: 100763 - DNA, 122 bp, Homo sapiens
atcatccataggatgacaaatcagccagggccaagatttccagacacttgagtgacttcccggtccccgaggtgacttgtcagctccagtgagtaacttggaactgtcgctcggggcaaggt

SEQ ID NO: 100764 - DNA, 122 bp, Homo sapiens
cactcccgggcgcgcgcttgggcgggcacgtcagcctcgctcggccgcgctgagcgcacacgccccaccccggccgcggctcctcgcccccggcgacgccccccacttcccgctccccgaaa

SEQ ID NO: 100765 - DNA, 122 bp, Homo sapiens
accctgccacagcttggaagtgtagcggtgcccagaggctttgcgtaactttgcccactgcgcccccgcgtgcaaaggtgtccccttcacactcacaccctcaccccatctcactccccttg

SEQ ID NO: 100766 - DNA, 122 bp, Homo sapiens
ttcagccccgggcgcctcgtgggagactagcgcttgtaacgtggtgagcccgcggtgtaacgctatgggcccgccttgcagcccctgacccacttccagcccgcagggccagccctacgtgg

SEQ ID NO: 100767 - DNA, 122 bp, Homo sapiens
gatgagacaaacagtgagcacatggagggtctgagaaaccaaagcaggccaaagtaaacacgtggagaccccagaggaaagatggaagaaaaacagcactaggatcaactgagaaatgaaaa

SEQ ID NO: 100768 - DNA, 122 bp, Homo sapiens
cttcagcttcaagaccgaggagaaggacggtcttctgctgcacgccgagggcgcccagggcgactacgtgacgctcgagctggagggggcacacctgctgctgcacatgagcctgggtgagc

SEQ ID NO: 100769 - DNA, 122 bp, Homo sapiens
acatactatagattaattgataatgtaaccatttttaaagagcctccaaatgttttctcacggacattgagtggaaaaatgcaatctgtgaaaatacagtagctgaaacttctcacaattgc

SEQ ID NO: 100770 - DNA, 122 bp, Homo sapiens
ggggccctgggcaggaggaaggaacagagcccagtggttcaggggcagagcctgcccccacggccaatcaccggaatcacccggctgctactccccaccccaggcacccgggtttaagtggt

SEQ ID NO: 100771 - DNA, 122 bp, Homo sapiens
cagagggatccaaaacaatccctcactgctaagacagaagaccggcggggataccaggaccgtgggccctgggccctgacgtctcggagcacacccggtcctgagcgggcccgatgtagtgg

SEQ ID NO: 100772 - DNA, 122 bp, Homo sapiens
aacctttagtcttcagtggctttggggtgccctctcagtggagactgtggttgcagtccccgggggcagcgggagaatggcttgaaggcacacctttcctgctgccgggcccgccccatttc

SEQ ID NO: 100773 - DNA, 122 bp, Homo sapiens
aaatatttacattttaaaacaaacaaacaaaaagtccgcgcggtcctaggtgaatctggccgaggcttctgcgtcaaggacggcgcgggtcagctgaggccaagaccgcaggcactgcccta

SEQ ID NO: 100774 - DNA, 122 bp, Homo sapiens
cccaagaaccccttccctgcttgcaccctggagagaacagcttgactcccatcaactcaacgctggtggaaagacagggaccgaaccctggctcaggcctggtcattgcctcctcagcactc

SEQ ID NO: 100775 - DNA, 122 bp, Homo sapiens
gggcgcggggagcccggttgtggtagggcttaggtgtcagaaacgaatttttaagtcgaacgaggcaaacaaaaacttagaaaacatgcatctccgggcgctgaaaatttgcatctctgggc

SEQ ID NO: 100776 - DNA, 122 bp, Homo sapiens
ttggccaaacagcgtttcttgatggatattctctgctctaattaaaacactgggcttctgcgtgaagaaggaagaaccgggagcaacgagggcgggaggagccttgtaaccaggcacccccg

SEQ ID NO: 100777 - DNA, 122 bp, Homo sapiens
agtcagtactgtgtagatatcagtgcacggttagtgctgtgccacagtgacagtcagtatcgtgtagatatcagtgcacagttagtgctgcgctacgccgacacttggtcagtactgtgctg

SEQ ID NO: 100778 - DNA, 122 bp, Homo sapiens
gcttccctgttgggagtcagccaggagcagccccagccgctgtgctctgtgtgagccttgcgggggcaggctggaaaggggcgcctgcctgacacggggatgcaccagccacaagatacact

SEQ ID NO: 100779 - DNA, 122 bp, Homo sapiens
ggctgaaggagttggagcccgcgccagagccaaagctgcagcccatggcgtagctgaggccggggcttgtgaggcccccgcaggctgagctcagatcacctgcatagccgctagtggtcttc

SEQ ID NO: 100780 - DNA, 122 bp, Homo sapiens
taagttctatccatgtggaggacagaacaaaatcagcctcactcacaaaacatcagaaaacgttctactggaatacgaacaaagggatcaataaaaataaaatctgaggccaggtgcggtgg

SEQ ID NO: 100781 - DNA, 122 bp, Homo sapiens
cactctttttttggaatctgcaagtggatatttgtatcgctttgagaatttcgttggaaacgggattacatataaaaagtagacagtagcattctcagaaacttccttacgatgtttgcatt

SEQ ID NO: 100782 - DNA, 122 bp, Homo sapiens
cccgctagctgccatctgtcttgtggtttcagattaccagcagcccctcatgattggcaccgggacagtcacgaggaagggctccaccttccggcccatggacacggatgccgaggaggcag

SEQ ID NO: 100783 - DNA, 122 bp, Homo sapiens
cttcatgctgacccactctacccaagtttcctttcactggcatcgaccctggaagtggctcgactttgagggagctaaccatattttctgcactttgtcagactgtttttttctcagcccag

SEQ ID NO: 100784 - DNA, 122 bp, Homo sapiens
aaaattcagataactcgcttcactccaaagtttctgattctgcaggtttggggtagggcccgagaatttgtcattttaacagtatctccggtgttgctgatgccgctggtcccagaaccaca

SEQ ID NO: 100785 - DNA, 122 bp, Homo sapiens
cggtcggctcccgagcgggacttgtgaggcgtggccgggtggaggaggcgcttgcgggggcgtggggctccccggcaggcgggaggcacggagcaagtcgcactggacaatgacctgggcag

SEQ ID NO: 100786 - DNA, 122 bp, Homo sapiens
gctcacccgccagcccggaaaggcaagccccagtcaggcggaaggtagatggtggaggggcgccgcggcggatggaggtgcccagggccacagaccgctcacagcggtaccggggcggggag

SEQ ID NO: 100787 - DNA, 122 bp, Homo sapiens
gccgaaaccgcttgccctaccactgtagcccacatttctgctccatttgaactagccaatcgggattagcttagattgcgcagtccagccccagccaatgggaacaggacacagaagcagcg

SEQ ID NO: 100788 - DNA, 122 bp, Homo sapiens
ggagctaggacatccccccaccacgccccgcccaagagcgtttacgtgtgttatgtaagtcgagcttcgggtttctggtcaggaggttataaagcatttggcccagagtctggcctggtgtt

SEQ ID NO: 100789 - DNA, 122 bp, Homo sapiens
tccaagggtcagccggggcgagaggaggaggaaggacgggggttggctggccctcaggaacgggggcaagttacagggcgcaatgcgggttccctgttcttgctaaccttggataacgatgc

SEQ ID NO: 100790 - DNA, 122 bp, Homo sapiens
ccagctccaaatgcaggtcgtgccatctccgcccagtgcagccgtcagagtcccggtctccgctccccaggctgctgtcccctgtcttggctgcctcgggctatgtccacggccgggcaccc

SEQ ID NO: 100791 - DNA, 122 bp, Homo sapiens
acaacagccactggaattgccgacgggtgcacggccaaacgcttggcaaagtgcgtggcgcgctgggattcccccacaaaaggcagtttaccaaaaaattattaagagaacccaggaaaatt

SEQ ID NO: 100792 - DNA, 122 bp, Homo sapiens
ggcctccacctcaaggaacctggcctgccagggggccccaaaccccgacaccccccgaggcgacggtggctcaggaggctctgagggaggcccctgtcccacccttgtcccgggtttgttct

SEQ ID NO: 100793 - DNA, 122 bp, Homo sapiens
tgggtctgcagcctctccagggtgcggcgtgggccccggccgtgtgagccgctgcctccccgagcagcaggttccgcagcccctccaagctgcagccgcatcgctgccccccatgaaggagc

SEQ ID NO: 100794 - DNA, 122 bp, Homo sapiens
cgaactcctgacctcaggtgatccgcccgcctcggcttcccaaaatgctgggattacaggcgtgagccaccgcaccctgcccaaaatgtttatgttttttgtttttgagacagggtctcagt

SEQ ID NO: 100795 - DNA, 122 bp, Homo sapiens
ggacgcggcccgccgcctgcaggacctcgcggctgggcccgtgggctccctgtgccgccgcgctgagcgatttagagacgccttcacccaggagctacgccgcggcctccgaggccgctcgg

SEQ ID NO: 100796 - DNA, 122 bp, Homo sapiens
ctcttctccagcctcaccaagttcttggactaaaattaggctgaaaattaaaaacaatgtcgaatctgaagagtacaaggcaaatacaggcaggagaaagaacatcttgtttcttccttatc

SEQ ID NO: 100797 - DNA, 122 bp, Homo sapiens
gatccgccagcctcggcctctcgaggtgccgggattgcagacggagtctggttcactcagcgctcaatggtgcccaggctggagtgcagtggcgtgatctcggctcgctacaacctccacct

SEQ ID NO: 100798 - DNA, 122 bp, Homo sapiens
cctttcagtagttgccatcttggccatgcaagaaaagaaaagaaggcatttactctatgtcgggggggtaagtagaggccttcatgactccatttaagatcagtattccaagactttgaaaa

SEQ ID NO: 100799 - DNA, 122 bp, Homo sapiens
gagcacttcagcaagggcgccttgggcccggaaagcggcgggagctgggggtcgtggggccgccgccagcagttccaggcggcctctgctccagctgcagcattccaagccctctcctcctg

SEQ ID NO: 100800 - DNA, 122 bp, Homo sapiens
cttaggtctgttgaaatgtgtttggaattatggtcatctcattctaggacaaataacatacggacttgaattattattacttaaatgcctcttgtggttctggctcattttgattgtatctg

SEQ ID NO: 100801 - DNA, 122 bp, Homo sapiens
atgcaggagtgtgtggcttggggctgctttggggatgggctcggaccatcgctggggcagcgatggggctctgggaagaaaccacagagagaaaaaacaaagggccccccctcagcacccct

SEQ ID NO: 100802 - DNA, 122 bp, Homo sapiens
tcacattggcaagggggcatgaaaagggagtggagaggctttgagatcttacttttctttcgttctaggctcttagtggaagaattaaatcagcctgcagaagagactgaaatgaggcacct

SEQ ID NO: 100803 - DNA, 122 bp, Homo sapiens
gccccgtcaaagactagagcgaaggtcactgaaatgacacaagatcagcgaggcccagggcgctgccgctcacagaatgcggagacacggctgcctcgcgtcccttccctgacctgccccag

SEQ ID NO: 100804 - DNA, 122 bp, Homo sapiens
gttgtccctcctccacgatcagcccgttcccgcagccggggcagaacagcagcatggtctcgaactccgcaggctccaactcccggcagctcccactgccgctcagcgccgatgcgccgccc

SEQ ID NO: 100805 - DNA, 122 bp, Homo sapiens
cacttcttttcctacaccatcccccctcaggacaattctagtattgcttgcacgtattctcgtccacaactgccctctcctgaggcttgtaaacccatcccgccaccttacgcccctatcta

SEQ ID NO: 100806 - DNA, 122 bp, Homo sapiens
ggaatgcggctgggaggactgcgcatgctcgaagggtgggggttgaggccgacggggcgccgtacggcggaggcggggtttcagtggcttctggtgctctagggtgagctctgcccggctgc

SEQ ID NO: 100807 - DNA, 122 bp, Homo sapiens
cctaatgtactctggagtcaaaacgaatcagttttatataatcaattattttagactatccgaagcataatgcttaagtttaaaagaggagacaaaaataggaggacaagatacttgagagg

SEQ ID NO: 100808 - DNA, 122 bp, Homo sapiens
actggcccttgctttggagtcaggaggcctctcttcttcccacagagccctgggatgcaccggccagaggccatgctgctgctgctcacgcttgccctcctggggggccccacctgggcagg

SEQ ID NO: 100809 - DNA, 122 bp, Homo sapiens
gcccgtccacgccctaaaagcaaaacccttaaccaatcattgcagccgcgtggggcatcacgggaactccggggctataaaagacctggttgctattttgtactcccggagtcactcatccc

SEQ ID NO: 100810 - DNA, 122 bp, Homo sapiens
taagaggtagatgagtcggggcaaattatttaattcttctgagcctcgtctgtaaaatatcgatgataatgctctcaccaacaccacagggtggttataaagattagaaatactctgtggct

SEQ ID NO: 100811 - DNA, 122 bp, Homo sapiens
tccgggcccccgacggggctggcgcccgccctccagccccggagccgctgggtcctaacgcgagctgcccgcatgggccgccacgccgtgccctcggggttccatctcctgggggggggggt

SEQ ID NO: 100812 - DNA, 122 bp, Homo sapiens
cctcctctcctgtgccatgttaccggcagtgcaggggacagccagagggatctaggcttccggtctccctcctccctgtctccaaagcggcaccgccctcgtgcgggttttctaaccgggca

SEQ ID NO: 100813 - DNA, 122 bp, Homo sapiens
ttattcctgccatcctccggccgcctctcccgcctgcaccacttggaggcagttgtttcacgtggggctcttgatggcataacctgatgtctgtcacggacccccaagcaggagcaatgcct

SEQ ID NO: 100814 - DNA, 122 bp, Homo sapiens
cttctcacttcccagacggggtggccgggcagaggcactccccacttcccagactatgggcggccgggcagaggtgctcctcacatcccagatggggtggccgggcagaggcactccccact

SEQ ID NO: 100815 - DNA, 122 bp, Homo sapiens
ttttctcagggagcccacctgaattcccaccggggaggcataggttctccaggagggcggcgttttggggaatcagacccaagggggacaccttccctgaagccctgcaagggtgatggtgg

SEQ ID NO: 100816 - DNA, 122 bp, Homo sapiens
ctaggcaggagagtttgtgaagctgaccggacacctgtggctcttatttcctaggtggcccgaggcagccgggatgacagctctccccaggaatcctgctgcctgctgagaaacatggtcag

SEQ ID NO: 100817 - DNA, 122 bp, Homo sapiens
gtctgtggcatttgacactattgatactccttccttagtccaacaaatatttattgaaaacgtcctatttattttttttgagatggagtttcgctcttgttgctcaggctgcagtgcaatgg

SEQ ID NO: 100818 - DNA, 122 bp, Homo sapiens
cttcctcaggaatttgagctggggatctgcatcctggccattgcagtcctttagcatcctcgccgcgccctgagcgcgctggaggctcgcaggctgcgccctcccagggctgatgccgcgtc

SEQ ID NO: 100819 - DNA, 122 bp, Homo sapiens
agggctgttatggcatcgcactgtgtagaagtccagtttcattgatctcgggataggggccgattggggtccagtggctccttcgaaagaccttttgcccttggaaaatgagatgtgacctc

SEQ ID NO: 100820 - DNA, 122 bp, Homo sapiens
ttcttgttctttcctggagactttgttttaaagctttggttttgtgattaaaggtccagtcggctacatccaggtacactaagttaaaaaaaatccttgaatgtgctcgagcttgagttcgt

SEQ ID NO: 100821 - DNA, 122 bp, Homo sapiens
tgcaaaagatgcaggatttcatgaagtcaaagcaagggggagaactgctgaaaccataagcgcaaataaaggactagtgcctggaataggcagagattcttaaaaaggactcagaaagcaat

SEQ ID NO: 100822 - DNA, 122 bp, Homo sapiens
tggaatatatgacagttaattttaggtatccactagactgggttgggaatacccaggtagcgagcaaaacattattcccgggtgtgtctgtgacggtgcttctggaagagataagcatttga

SEQ ID NO: 100823 - DNA, 122 bp, Homo sapiens
gccctggagctcggggggcctccgggatgttcgccaataggggtcctccccagctccaagcgtcctgaagcgctggagttgcagacctgggtctccagtctaacctcaactgacactcccgg

SEQ ID NO: 100824 - DNA, 122 bp, Homo sapiens
ggcgcggctcgggcttggggctccggctccgctcgggctgggctcgggctaggctgggctcggctggggttctcccaggatctgggcacaggccgcttgctctggctttggcgcccggccgc

SEQ ID NO: 100825 - DNA, 122 bp, Homo sapiens
ggcggtctacttgaggcggttaccttagtactccgagtagactgagtctgtggcgagctgcgggccgattcctggccagtgccatctcagccggagcaggcctcggggcctcagaagcaggc

SEQ ID NO: 100826 - DNA, 122 bp, Homo sapiens
caacctctcttgcagcatagtttccactggtagtaattccattcagctactcagacaacacgctcctcggccgaatgggacgacccttcttaagatggaaaatgttacaaaagaaaaaggat

SEQ ID NO: 100827 - DNA, 122 bp, Homo sapiens
tcacagaacagctatcatcatcttacctttgtggaaggcagtttgagaattgctgtgttacggtaggcagaattctaaaaatgcccttgtttcccccaagattctcctcttctgttgactca

SEQ ID NO: 100828 - DNA, 122 bp, Homo sapiens
cggcggaaagaaacaaagagagcaggtgtgaccagcggcgatgcgagcgtgggtggcgcccgggcagagctgcaggtgcaggaacccaagggggcggctccgggcaacagcggtgatcgcga

SEQ ID NO: 100829 - DNA, 122 bp, Homo sapiens
agctcccggattctatctgttaaagggtttaatggaagccggcaggcatgaccaatggatcgttattcaatctcagcccttctcccctccctggaggccggtgggactgaaagttccaagct

SEQ ID NO: 100830 - DNA, 122 bp, Homo sapiens
cacatactgtaatgtgaattcagtattttggtgaatctttttctaacacaagtgcatgtacgtgtaatgtttttgtgacatgcaataaccatttctatactgtatggtgacttcagttttcc

SEQ ID NO: 100831 - DNA, 122 bp, Homo sapiens
tccggacttgacgcccaggcgctggtccctcagcaggcaggggctgggctgcaaggagtacgaaccaccgccggggttgggcgcgtacttgtgccgcgggccggcgcgcagcttggggctgg

SEQ ID NO: 100832 - DNA, 122 bp, Homo sapiens
aacctcccggcgctcagtcactggttcttatttcagccctcttagccccgtaggtcggcgcgctgaaaacctttctggtacctggggcctttcctaagaaaaaggcacatgtctcgcacatt

SEQ ID NO: 100833 - DNA, 122 bp, Homo sapiens
cgtacctaaggtggttggggcacagcttgattttatacattttagggagatgtgagacatcgatatatataagaagtagattggttcggtctggaaatgtggacaactgcaagcgaaggcag

SEQ ID NO: 100834 - DNA, 122 bp, Homo sapiens
ctgccgccgcttctgtgccatgagacactggtgggggcacgtctcctgggggatgcagagcgcagcacgcgaggcgggctgtgggctcacggggctgccccctcctagcctggcccccagta

SEQ ID NO: 100835 - DNA, 122 bp, Homo sapiens
gtcctcatctgcgagctggggccatgacagaacccgcccggaagccctgcctgtgctcagcgtccaccccaattcccgggggcgaggcctggtgctccctgggactgtggccctgtctggac

SEQ ID NO: 100836 - DNA, 122 bp, Homo sapiens
tgcggccggtgggctccgggtgatgcgctacacccgggcggcgacagcgggagggaccgccgcctgggctgcggcttctatcccggccacccccacttccggctccggggactacagccccc

SEQ ID NO: 100837 - DNA, 122 bp, Homo sapiens
cacccacacccgcagtgacaccccttccgccaaatttgtttctctttctttcagcgcctgcgcgctgtcacgttacggcggaactaatccagcgacgcctgcgctttgacgcatttggtgcc

SEQ ID NO: 100838 - DNA, 122 bp, Homo sapiens
ctgaggagaaccggttggaataatgagccatggcagcaactgcctgagagagaggaccggcgggttgctgtagggctccctaaccggactgcctgtcagaaacctgcacagcttggtttctg

SEQ ID NO: 100839 - DNA, 122 bp, Homo sapiens
gcagattataaattttcatcagtacaaatatatataacttacatttgattgtaaggccaacgttcaaaagtaaaaatgagatgagctctcttattgttatccgaggtcaagaggctgcaact

SEQ ID NO: 100840 - DNA, 122 bp, Homo sapiens
ttgaaactgacaggagaagtcagtaagaccatgaatgcagagattcgagtaatacggctacgagccaaaagatgccagcagccacctgcagctggaagaggcataaatggattctcccctaa

SEQ ID NO: 100841 - DNA, 122 bp, Homo sapiens
cagccaagccacgaggccggagcggctgactttccattcgccacacaccccacccaaagacgagaactctgccacagccagcccttgttctcacccactgggagccctggggagttgaaatc

SEQ ID NO: 100842 - DNA, 122 bp, Homo sapiens
gcggggtcgcggggcggggtcgcggggcggggcgcggggcggggcggggcggggtggggtcgcggggcggggcccgggctaggccccgcccccgcactgagccgcccccgcccccagctcct

SEQ ID NO: 100843 - DNA, 122 bp, Homo sapiens
acggcagaaacctatcccgagaggaaagggccctgggcacaggctatggcagaagagcttcgagagcccaaagctcccagggaagctttgagcttcctcaaaaagctattttgagcctaaaa

SEQ ID NO: 100844 - DNA, 122 bp, Homo sapiens
tgagtggtcagagcaccttgaagtctgtgtagcacttgcatgtacagtgtcccttttcatcgtcacagccctgagaggtaaatggtgtgactcttcccattttgcaaatgagaaaagagaaa

SEQ ID NO: 100845 - DNA, 122 bp, Homo sapiens
taataacttattacaatattttcctaaaagtctgtcccacctgctcccctcccccgcccccggaaaacttaaggtgttatatcacaagggtattgtccagttttgttttgttatttatttac

SEQ ID NO: 100846 - DNA, 122 bp, Homo sapiens
accgtcaaccccgatgggaagataatggtcagaagatgcctggtcaccctgagaccctttcggtaaagttccctcctggttggttttttccccaggggggcgccgggtggaggtgggcgagg

SEQ ID NO: 100847 - DNA, 122 bp, Homo sapiens
agtccagagcggcgctgtgcagctggaagggcgcgcgatagctcaagttagaggcggccccggggcgcggcgcaggacacaagacctcaaactggtacttgcacaggtagccgttggcgcgc

SEQ ID NO: 100848 - DNA, 122 bp, Homo sapiens
cgttacctcagagatacccgtggccggcatgttggttgaaaaagcttcccggaagggagacgaagagaaaggagaggagcagctcgtgatcatccccggtagcgagtacgcggcgaagtagg

SEQ ID NO: 100849 - DNA, 122 bp, Homo sapiens
tgccaggggcgtgtttatgacattatcgcttcccagacagcttaggcccatccaggagaccggcgacagtgacttccttgccaaggtagccctttgagcagcgcacttgatacctgttcgtg

SEQ ID NO: 100850 - DNA, 122 bp, Homo sapiens
agctggagaagcctaaaagatcagaacaccagcaggagactgggctgggtagtgggaactcgggtgtggggccaaaggtcagagagcctgaatgggagtgatggaggcatttaggagtgaat

SEQ ID NO: 100851 - DNA, 122 bp, Homo sapiens
ctgctgtggacagcgggctgctgagaaagggcgggcagctgagcaggcagccaagccagccggagcattgtgtgtgatctgcaggctgaggctggctcaactgccttggagctctttgacag

SEQ ID NO: 100852 - DNA, 122 bp, Homo sapiens
ctccccccaccccacccccgcaggtcagccccgcgcctaggcggcagcggagtcccgaaccgcgtttctcccgcccaaaccctgccggggccgccgcccacctcgtgtgaccgcaagagggg

SEQ ID NO: 100853 - DNA, 122 bp, Homo sapiens
cggcccagtgcaaaccgtgatccaccctcttccgctcggtgggaggaacccggggctttgcgcccctaaccagcagcgtgaccctcgcagtcagggaacttctcatctgtgaagaaagctta

SEQ ID NO: 100854 - DNA, 122 bp, Homo sapiens
tagaagaaaaaaagcagagaggccttggttgaggttttggtggctctgagtcagatccaccggcctgaactccaccagccctgcaccccagcagccctgtaccccatcagccctgcacccca

SEQ ID NO: 100855 - DNA, 122 bp, Homo sapiens
aggagcgcatggtcggagaactccgggacctgtcgcccgacgacccgcaggtgcagaaggcggcgcaggcggccgtggccagctacaacatgggcagcaacagcatctactacttccgagac

SEQ ID NO: 100856 - DNA, 122 bp, Homo sapiens
aagggagatccaggtcttgggtctttcttccctttgattcagtcaccgtgggttccctagcgatagctcagccctgcagaaagacctgctaaggtacctggcctgcagtgtctttgttacca

SEQ ID NO: 100857 - DNA, 122 bp, Homo sapiens
aggtgggcccgaggaggacggcaggcagggccgggacgtgctgatgtcaggcgccttcgtcgactgagctccttcctgggccctgtaaggccttaggtgtaaaaatggggcttggtccgcag

SEQ ID NO: 100858 - DNA, 122 bp, Homo sapiens
tgctgcccactgtcctgaggtgggccgtcgtggaagccctgcttcctgccgtttgcgggacgagtcccgccctcttttttcctgtccccatcggtagtctgcgtgcacgtgttttccacagt

SEQ ID NO: 100859 - DNA, 122 bp, Homo sapiens
gcggtgggtgttgtacacaatcatcatggcggcggccggggccccggatggtgagtgcggcgggggtggcgggcgccgggccggggctgaggttgcggtcgctcctctgggggatgcggccc

SEQ ID NO: 100860 - DNA, 122 bp, Homo sapiens
ccgcattccctgcagccgcagggcttctcccccgggtgggagcgaaggtgctcgatgaggcgcgacttgtgggaggttttctcacactcccaacacttgtaaggcttcgctccggcgtgaac

SEQ ID NO: 100861 - DNA, 122 bp, Homo sapiens
cagagaatgaatgcatctgccggcaaggtggaacgccccccaccccgccccccaactagccgcaccgccccccaggaatgccctcttttggtccgccggtcttggactctgctctcccctct

SEQ ID NO: 100862 - DNA, 122 bp, Homo sapiens
aattaatactagtggcagcaccagagggagccacttacacacttttgtttcaagcagtgacgaagctgacagtaagacttaaaatgcagaaatattaaggtttaattgtattttctgaaaga

SEQ ID NO: 100863 - DNA, 122 bp, Homo sapiens
tgtgcacctgcctttccagttgtaacacctagaaatggcacctccaagggatgccctggccgagtgctgtgttcatatttttagaaatggtttatctgctgaataagactgcccagggagca

SEQ ID NO: 100864 - DNA, 122 bp, Homo sapiens
gctaggaggcacgttttggcctctttggtcacgatcagccttttggctgcaaccaaagagcgcgcctcgtttctatagcaaccaccccaggtccacgcctagacggcgagtggcaagggtca

SEQ ID NO: 100865 - DNA, 122 bp, Homo sapiens
aaatggattggtaaggattaggcaggagaatgctcctgttcacctgtttgtcaagcattccgcagcttgatggtatttctctattctaagccatcttaatactttcccatgctctgtgtagg

SEQ ID NO: 100866 - DNA, 122 bp, Homo sapiens
atggcctgtcagggtgtggacatggctgtctggggcatgtgcccagatggatgaggggctcgaggtagcacaagcgacacgcagagaacagcacggagggtctgggctgggcttctgaagga

SEQ ID NO: 100867 - DNA, 122 bp, Homo sapiens
cacagcctgcattgagtttgcttcccctccacaggtctcccgtggagagcagcccagacccggccacactcagtgaggaggaagtgcgcctcctgctggctgcactggtgcaggactatgtg

SEQ ID NO: 100868 - DNA, 122 bp, Homo sapiens
cgcgagcctccaatcgatctcgaagggcactcgtagagaaaactacacctcccaggaagccgtgtgcgtcgccccgccttctactgcctttcactgcgcgtgcgtcgtgctgtgggattcgc

SEQ ID NO: 100869 - DNA, 122 bp, Homo sapiens
gcctggccttgttagtgcatttttaagattacattcaatatacaagcatagaacagcttccgtgggaccaggcacaagctcagtcctgtaaccccagcactttgggaggccaaggcgggagg

SEQ ID NO: 100870 - DNA, 122 bp, Homo sapiens
cgccgtggagcagggggtggcactcgtaggggaggctcggccccatagcagctcatggagcgggtgggaggctcaggcatggcgggctgcaggtcccgagctctgccctgtgagaaggcagt

SEQ ID NO: 100871 - DNA, 122 bp, Homo sapiens
aggcggaggctgcggtgagccgtgacccctctaccgtgcgggtgaagggcagggcggagccgcccctgcgccccagcgtctgtggaacggggacggggagcggggctggggccacacgaggg

SEQ ID NO: 100872 - DNA, 122 bp, Homo sapiens
ggagcacagcagcaggggaagaggacagtgaggctgggatgcagcctccatgcagcctgtcgctttctccacaggagctctggcctgggccagactgccgagtcaccctgattcaggagtag

SEQ ID NO: 100873 - DNA, 122 bp, Homo sapiens
accccacactttagaaccggcaggattgaactccatgcaggccccacagcagactccaaccgggggtgcctgcgactctcagagccccagagggcacgttacagtgctcttttagctctgct

SEQ ID NO: 100874 - DNA, 122 bp, Homo sapiens
agggtggacacgtcccggggctggccagggaggagcctcgagagtgatgggcgtgctggccgggagggctttgctgccgcactctgttggggtggccgactggtgctacttgagggttatgc

SEQ ID NO: 100875 - DNA, 122 bp, Homo sapiens
gatgactttccatgtggaaacacatggaaataacatatctccaacacatggagataacgccgattaacaacacatggagtgagcagtgctgctccactcctcatccgacctgaaacctggaa

SEQ ID NO: 100876 - DNA, 122 bp, Homo sapiens
agcgcctcttccaggccatgccgtctaggaagtgaggagcgtctctgcccggccgcccatcgtctgagatgtggagagcgcctctgccccgacaccccttctgggatgtgaggagcgcctct

SEQ ID NO: 100877 - DNA, 122 bp, Homo sapiens
tcgggctgtaaacatgtctggtgttctagcacgcagcccagcagcttctgtgagtggagacgtgcacacaaacatcaggacctgtcggctactgggatattcaggtctttcagaggtgacat

SEQ ID NO: 100878 - DNA, 122 bp, Homo sapiens
cccggcctgtccttgccctccccggaggtgcctggatgggagcagcagcaccgagggggccgacacctggggctctgactctccccggggactgaaatgagcagggaggtggcatccctgca

SEQ ID NO: 100879 - DNA, 122 bp, Homo sapiens
ggacccagctcgggctggtagtggggcgggggtcgcagggcgcgggccgggccctcagcgcgcatgcgcgacaagggggcggggccagggcggggctgcgcccggcgtctagagcggcggcg

SEQ ID NO: 100880 - DNA, 122 bp, Homo sapiens
agagagcacgtacgaggaccccggcagtggggtcgagcttggtgccccggcttcagacagcgctcaagggtctcatcaccctcaaagggggcagtgcagaattgcccaccaccagggggcag

SEQ ID NO: 100881 - DNA, 122 bp, Homo sapiens
acctgcacgcgggtacttttagccctgggcaagccttgagccaagcgccgagaccaaacccgggaaattaaacagtgtgcatggaatgaaatgtggtccgtggaaggtgcctgcagctggcg

SEQ ID NO: 100882 - DNA, 122 bp, Homo sapiens
ttttttttggtgagtggtccagagctttaagctacttttccagtagtttgccactttctccgaggtagtttggctgctctttcagtaatgctaattgtgtgtcaaattttgtctacaacagt

SEQ ID NO: 100883 - DNA, 122 bp, Homo sapiens
ccaccgcgggggttgggaggaggctcgggcatggcgggctgcagttccccagccctgcgccgcggggaggcagctgaggcctggcgagaattcgagcgcagtgccggcactgctggggaacc

SEQ ID NO: 100884 - DNA, 122 bp, Homo sapiens
ccactctaaggacccgctcctccccgcccccgcccccaaagccgctcctctcacggcccccgaccccgcaggcaccgactgttctcagccccgcccctcgaggccccgccccgcggcttccc

SEQ ID NO: 100885 - DNA, 122 bp, Homo sapiens
gctaccacaaagcgaacgcctatctgtttggaatttcgcaaataaggaacgtttaaatgacgtagttcacatcctttgagtgctggctttctcttaaagggtgagtgcgtgcgcccaggtgg

SEQ ID NO: 100886 - DNA, 122 bp, Homo sapiens
cccaggaggtgggcagtgtctcctggcgtctgtttctgcccctgctaatagggctggatgcggagcttttctgacctgagggaagatcagggaacccactactaattcactcaggtgccagc

SEQ ID NO: 100887 - DNA, 122 bp, Homo sapiens
gaccctggccgcctgagtccccgtgccaccttccaggaaacaaagaaccggagtctgagccgagtccgagtcctcgggctgaaggcacactgtgaaaacttcaacctgctgctcccggtgcg

SEQ ID NO: 100888 - DNA, 122 bp, Homo sapiens
tgaggtaggaagtgccacacttttaagccgtcagatctcgtgagaactcactcatcatcacgagaacagcatggggcaaaccgcaccacgattgagtcacctcccaccaggtccctccctaa

SEQ ID NO: 100889 - DNA, 122 bp, Homo sapiens
gccccgcagagctcggttcacccaccgccaacagcgccccgcagagctcggttcacccaccgccaacagcgccccgcagagctcggttcacccaccgccaacagctcctcgcagagctcggt

SEQ ID NO: 100890 - DNA, 122 bp, Homo sapiens
cacgagatcatgttgtgattacaaaagactcctctgggctcccagccaggaacgtcgggccgccacccccacccttccactctcagagggcgaggaccagggcactggcagctggctggtcc

SEQ ID NO: 100891 - DNA, 122 bp, Homo sapiens
gatcgtgctctcatcagacctctctcttgggcaccccggcgcccattcctggccctggctcgctcgctgtccctggtggtcttccctgggcccttctggcttctgccctggagtttctcgac

SEQ ID NO: 100892 - DNA, 122 bp, Homo sapiens
acgagcgtcttaaaatagagagccaggcagaggagcgcgagacaccagagcgggaggcagcgactgagagccgccgggcactaggcgcgcaggtcggcgccggagtggcacgggcgggcggg

SEQ ID NO: 100893 - DNA, 122 bp, Homo sapiens
tgttgggagaagccaaaaactgtgctggcattgtgccagtgaaatgccagcaatcacgagcggtcttcctttttttttcttttttttttaaaaaaaaaaagatgtgcaagatgccttatggt

SEQ ID NO: 100894 - DNA, 122 bp, Homo sapiens
gagagtgacagggtgaagcaacttctcccagaaacttttgggcgcaaacgccctcaagtccggatcattggaaagtaactcgaagagaggagagaactagcgcaagcgtagcctcaaggcgg

SEQ ID NO: 100895 - DNA, 122 bp, Homo sapiens
tattttcaaacaagaaccgggagaagtcggtacaaggatacgtcgtgctgtgtatttaaacggcgcttcccacacacctgccgtctgcatcccgggaggacgccctttgggaaaggcctcct

SEQ ID NO: 100896 - DNA, 122 bp, Homo sapiens
acatacatctgaaaggcctgtctccaaggtcccttagagcaacctatacaacaaacaggccgcatacactaccaaggaagctgctgtttacagccattgcacactggacccccataaggaaa

SEQ ID NO: 100897 - DNA, 122 bp, Homo sapiens
cacttggtttctgtcccacctcgtgtttaaggtatccggtctaaaagcccggaggagagccgaggtgtaaggggatagggagaagggaagagatgggttagcagcaaactcacggatgaaag

SEQ ID NO: 100898 - DNA, 122 bp, Homo sapiens
caaccctgcccacctcacccggtcaccggaggatgcctgtcaacttctgggagctgcaagcgcgggccggccagtcgtccgcgcgcggctttttcttcaggacagcggaggcacaccgtgct

SEQ ID NO: 100899 - DNA, 122 bp, Homo sapiens
tgtgaaggagaacctgtcaagctccggctgatgaagtcttcagaagggctcagagtcaagcggcagaactcctggtgccatctgcttaattacaggcgcgggttttcctcggtgttttgatc

SEQ ID NO: 100900 - DNA, 122 bp, Homo sapiens
actagtcccgcccactcccttctacttccaggtcgggggggggcgggtccaatagaaaggcggaagccagtgtcccaggcgttctcacgcccgcaacaattcctgagtagggccttgcttga

SEQ ID NO: 100901 - DNA, 122 bp, Homo sapiens
cccagcacaagctctcctgcctggcctgggaccgagagtcccagaagcccctgggctggccggatgctcaaggcctcactgagggcatgcgtatcttcggaaacaagaaccagctgacatgt

SEQ ID NO: 100902 - DNA, 122 bp, Homo sapiens
gcgcgctcaccctgtccacatgcgcgctcaccctgcccacgtgcgtactcaccctgcccacgtacgcactcaccctgcccacgggcacgctcaccttgtccacgagcgcgctcaccctgccc

SEQ ID NO: 100903 - DNA, 122 bp, Homo sapiens
ccagaactaccaccaggactcagaggcggccatcaaccgccagatcaacctggagctctacgcctcctacgtttacctgtccatgtcttactactttgaccacgatgatgtggctttgaaga

SEQ ID NO: 100904 - DNA, 122 bp, Homo sapiens
aatgttgtctgaggactgaactgtggactttactattcataatgataaaataataaaatgcgaattactatatataatgtgcctcactcatgagaaagtaccgtgttgggtttttttttttc

SEQ ID NO: 100905 - DNA, 122 bp, Homo sapiens
tccctactgagtcacctgttcccagcacataaagtcgtggtgtttggagatgggaggaaccgagggaaagtcactttttagataaggctctgaagccccaggtctagtttcaatccactaat

SEQ ID NO: 100906 - DNA, 122 bp, Homo sapiens
agtcccaccggctgtggggccattcccagggacacccctgcagggacctggtcacaggcccgggggtgggctcacctccagttcatcgcagccgcctcattgatgtattcagcacagtagac

SEQ ID NO: 100907 - DNA, 122 bp, Homo sapiens
atttgtgaaatgggcacagaaatatttgcctcagtgttagcgtgagggtcacccaagattcgatgtttgtggaagggcctggaatacgatagtagctattattttaacaaatgaacagagtg

SEQ ID NO: 100908 - DNA, 122 bp, Homo sapiens
caggccccaatggagcaaatagagctcgggacccaggggcctttggaaggaacaggaatgcggttagaggtgagcactggccctgcttagctgcactctctgtcccattgtgcttcagtttc

SEQ ID NO: 100909 - DNA, 122 bp, Homo sapiens
tctgactttcatgaagtgaagattctgatgtccagagtaaataaaacaagcaagcaacatcgtttaccaaaaacgtgagaccaaaatgaaggtgtgtgagtcatgtattaggagtattcata

SEQ ID NO: 100910 - DNA, 122 bp, Homo sapiens
cagaggaaaagtgaaaaagatccaggttgccaaggagaccctttcaaatacattttacagcgctatgaaagcgataccttccctcgggttgagtttcgtcccggaggacgtgcaaggcgctg

SEQ ID NO: 100911 - DNA, 122 bp, Homo sapiens
atttgctgccgttttctcgtagagtgctcatgatttttaacatagtaaatccgtggagagcgctcaggtacagatcatggctgtgtgcagtgcaggctcaccgtctgcggcgccaggccggg

SEQ ID NO: 100912 - DNA, 122 bp, Homo sapiens
tggtctgacagcagctggggcggcagcaggtctccaggccacagccctggtcagagcagacggaaccacaacaggagctgaccatggtgtcagagggtaaaggttctgggtgggtttccaag

SEQ ID NO: 100913 - DNA, 122 bp, Homo sapiens
cgaccgtcgggggctgcttggtttggtggtggtggcggtggtgaggttttccccaccatccgtgttccatcaactgcttagagacacggctatggagattgtgattaaaagacgaccccaag

SEQ ID NO: 100914 - DNA, 122 bp, Homo sapiens
tttcacacagttgtactatttctttctgaaatgacattgtttgagggacagtgggtggaacgtgtgagctcctcactgaaggctgcctccagaattccctgaatggactgccttgctttctt

SEQ ID NO: 100915 - DNA, 122 bp, Homo sapiens
acgttctccaggaagactttgaggactccccgggtctcctcgtagatgagaccagaaatgcgcttgacgcccccacgtcgggcgagacggcgaatcgccggctttgtaatgccttggatatt

SEQ ID NO: 100916 - DNA, 122 bp, Homo sapiens
cgctctgggacagaccaggttgggattttaggggtatcaggtgaggagtccgcggagctccgggtcgccgccggcttgggccagggggtggcgtaaggcaccggattcttccaacccagaag

SEQ ID NO: 100917 - DNA, 122 bp, Homo sapiens
gaatgtttagagccaaatgcacccttcggttaaagtgctgaaggattcaatgcgcaccttcgggtgcttagcacagagctgctgagaaggaataaagtagggtcggattaggaataaaaagt

SEQ ID NO: 100918 - DNA, 122 bp, Homo sapiens
cttccggtaccgctgcctcccagtgcccagccaggagtctctagacagcctctccccaggcgattgcagttactgtggtggccgaggaaatgcaagactggaccatagagctgggggaacgc

SEQ ID NO: 100919 - DNA, 122 bp, Homo sapiens
ctaaggtacctagccaggagagggtggaagtcattccccaattcccatccttgcgccccccggcttagcccacgcagcctggacagaactggaggaggggtgcacctgcagctctcagcgcc

SEQ ID NO: 100920 - DNA, 122 bp, Homo sapiens
acccccagcaccccagcacccacctgaaacaatagcatcaaggtcttactttttctggagcgggagaaaaacctgatgcccccgggcgaggtagcagggttggagttgggggaagactcttt

SEQ ID NO: 100921 - DNA, 122 bp, Homo sapiens
gttggggttggcattgttgagcagcagccacttggcgcactcctcttgcccggcctccaccgccaggtgcagcaggctggcaccgctgtccagtgccaggtccacgtcctgcggctgcagga

SEQ ID NO: 100922 - DNA, 122 bp, Homo sapiens
cccacccctacctctttcccctcattatgtaattcgcagagtccagtcctcgaggaaacacgttgcctagttgtgtagtatttatatacaatgttaaaatacaaagaaagaccctaaagtca

SEQ ID NO: 100923 - DNA, 122 bp, Homo sapiens
ttgctgcgtttccatttcatccgccggttctggaaccaaatcttcacctgcgggcacaagcgggcgtgagaaaccggccaccgccaccccagggcttcctgtccccggagtcccccggccgc

SEQ ID NO: 100924 - DNA, 122 bp, Homo sapiens
tttcatgtttaactttaaacaattcaatgtttgcattattcctaacagatccagaaatgacgctgtctgggtcaacatttcagggaggagtctgccaccagtgtaatgtatcaataaacttc

SEQ ID NO: 100925 - DNA, 122 bp, Homo sapiens
tctcctctctccccgcagtcccacctcttcgtgctgcagctggtacaccggccctccgtccgctctgtgctgcaaggactcctcaagaagcgcctcctgcccgcagagcactgtatcacgaa

SEQ ID NO: 100926 - DNA, 122 bp, Homo sapiens
tcacgatatggagccagcgtgttccgattccgtccacaaaaataactcaggctgctttgccgaaccatcctgtccaccaggggcgttgctgaggctgtctgcctggaagggtcaccaatggg

SEQ ID NO: 100927 - DNA, 122 bp, Homo sapiens
ggatgcatttgaggaaacgcctccgactacatgcctcccacacaagcggtctgtgcagatcgcatctgacgcctacccggaggactcagctgttctgtttacatcgtggcggcacctctcac

SEQ ID NO: 100928 - DNA, 122 bp, Homo sapiens
agcttctagcttctgcaacaccaaagcgtgctgacaagccaggaggcactgactgctgaccgtgagtcgctgtcttcccctcgcttaaggggtctcccgggaaaatggcacaagccggtccc

SEQ ID NO: 100929 - DNA, 122 bp, Homo sapiens
caggccttcaatgtcctcagagctattttgtgacctacacactgcatggagatgccccaccggctttgattgcaccctctagcaaaagagatttccctgcagcttgaatggggcaaagcaag

SEQ ID NO: 100930 - DNA, 122 bp, Homo sapiens
cggcggcgcagcggttgctggtgtgggagaagccgctgcacagcctggtcacggcggccgcgctcaacggcctcttctggtaacggccgcggaggagggggcggggccgggatgagcggggg

SEQ ID NO: 100931 - DNA, 122 bp, Homo sapiens
cagggcttgtccactgggctgtactggcatttgaggctagatagttctttgtggtggttgcgtgggggtcttacactttatagggtggttaagagcatctctggcctctaccaactagatgc

SEQ ID NO: 100932 - DNA, 122 bp, Homo sapiens
tcatctttgaaatggggaccacaatctcatcttgaaggaatattgtgagaaacagcccagcgcctgggcctcagataggcagggatctacaagagtttcctggtccgcacaggggattctgt

SEQ ID NO: 100933 - DNA, 122 bp, Homo sapiens
ggccagtggtagtgacagacctaagagtgttctgtccctcttaggccccacgacgcgcaccgctgcgtgctgcctgggagctcattcttaggtttttaggtctttaaagaggctgtgaagag

SEQ ID NO: 100934 - DNA, 122 bp, Homo sapiens
agagggcgcagtagggccccagcggagcgcgagaacccgctctacagcctattgcttccccgccctgggcagagccacctggacatgagacccgccctcaatgccgaagcctctcggaagca

SEQ ID NO: 100935 - DNA, 122 bp, Homo sapiens
gtaaatggccttttgaaagttgaatctccaaacctaaacatctgaagtgtcgacaggcaacgtcacaactggttgggctgattttgtttactgccctgactttttaagcaaccacagcccta

SEQ ID NO: 100936 - DNA, 122 bp, Homo sapiens
cagtgttatcgccaccctgtggatttcttgggtaatgaaactcagaccgggaaatgaaaacggggattttcagtaaatcggttccagtaaatctctgctgctcttgtgggcgccctcttttg

SEQ ID NO: 100937 - DNA, 122 bp, Homo sapiens
gtgtcaggaagaacaagccatgcagaccccccacgtttgggcttgctgggggcttgggcacgttccagacttcggattcctgcacatcagtcaagcagcggatccaggtgtggattgcccag

SEQ ID NO: 100938 - DNA, 122 bp, Homo sapiens
gacagcagcagctggagccaccttcttccccttggccttcttcccttttggcatcttgggcggtgggaggaaagagaggaacaaatgtttttgtttgataactattccaggcttctgaggac

SEQ ID NO: 100939 - DNA, 122 bp, Homo sapiens
caggtggggtagagagtgctcctgaaacgaagaaagtaggacagaatccccctccattgacgtactaatgcatgcgtgcattccatttattccagtttttggtgaactccaggaacaacttg

SEQ ID NO: 100940 - DNA, 122 bp, Homo sapiens
tggggagcgcctctgccccgccgccccgtctgggatgtgaggagcacctctgcccggctgcgaccccgtctgggaggggaagagcgtctctacccggccgccccatctgagaagtgaggaga

SEQ ID NO: 100941 - DNA, 122 bp, Homo sapiens
aacgagtgtgcatataccttctttgctgttggggttctggggtttggccttctcccagggcgccaacgtcttgtcgtcgtccgcgctgtccaccagggccttgtcagcgggcatgtaccagg

SEQ ID NO: 100942 - DNA, 122 bp, Homo sapiens
gagagggagattcagtcttttgctgggggagaccactccctgccccaagagtttggagctcgggaccatccccccacttctgccacacccacgcccacttccaggaccacccgaggtagcta

SEQ ID NO: 100943 - DNA, 122 bp, Homo sapiens
ctggcgtggggaggtcagctggtgctcgaggtggccagtggagtggacgggcaaggggggcgcagtttgcgaactgctggggttctcggagggccggacagcccggtgttttctaataactc

SEQ ID NO: 100944 - DNA, 122 bp, Homo sapiens
ccgcaaagccagcgtctccttgtgcctaggtctttgcatagtcccggcagcccaggtccgcgcctcacccggagcgaagaaatttctagtgtgggacccgctccgccctccttctaggggcg

SEQ ID NO: 100945 - DNA, 122 bp, Homo sapiens
tggcattgtagtagtagaagcgggacgtgttggggtcgaacagctcccaccactggttctcgctggtgcgcttgatgcggacgccggccggcgggtcccacacgcactcaccggtgaccagg

SEQ ID NO: 100946 - DNA, 122 bp, Homo sapiens
tgttatatttatagggcctatttataagcctctatttaaatcttttctgataggctcagccggggacccagacactataatgattggcgcattcttccgtccttcaaaggggcgggttctag

SEQ ID NO: 100947 - DNA, 122 bp, Homo sapiens
gcggggggcggggagggtgggggctgcatcttcaaaggcaggcggctagcctaggcgcagcgaactccaggattcgctgtgggccctgtgcacccgctgttccaggaggcgagccctccgga

SEQ ID NO: 100948 - DNA, 122 bp, Homo sapiens
ggacagagccaggatcgggcttgcagtggcttcagaccccacctttctgaccacagcgctcgtgctcttggagcgccttgagatagtgggacaaggcggactggaggacgcagtttccagat

SEQ ID NO: 100949 - DNA, 122 bp, Homo sapiens
gagtggaagccactatcggagaggaacccaggaaagagtgtttgctcccgaggctgcagccgtggtgcccgtcggcgcgcctgcattctgcagcgggaaccgagggaaggccgtaagtcagg

SEQ ID NO: 100950 - DNA, 122 bp, Homo sapiens
gcccccgccagcacatctgcaggtagcagctttggccacaggaaggcgcatctgcactgccgggttcgcaaaagcggggcgtgtgggctgaattcccactttcagcagcgggagaggctgga

SEQ ID NO: 100951 - DNA, 122 bp, Homo sapiens
gagattacggcggcgccacccgggacatccagggccccgaggccctgggcggtccccacgcgagatcgcaaaccatgacaataggcagtcacccgaggtcaaataaaaacggagtgggtccc

SEQ ID NO: 100952 - DNA, 122 bp, Homo sapiens
taaaagacctctgttaattcctcatctggaggatcaaggccagactccccagccagaccacgggtccagtccagcacagcccacttctgtaggcccattgcctcccactctcgtcctctgag

SEQ ID NO: 100953 - DNA, 122 bp, Homo sapiens
gcccagcaccctgtgagcgccactctgcagacaccatgtgtggcgtccaggcaacagccccgccagagctccagcctcatgggtgtcccatcttggactcacagcccagtgacttctgaaca

SEQ ID NO: 100954 - DNA, 122 bp, Homo sapiens
aacgcaggggcggaaccgcatgactggcagtggcatcagcgatggcggctgcgtcggggtcggttctgcagcgctgtatcgtgtcgccggcagggaggcatagcgcctctctgatcttcctg

SEQ ID NO: 100955 - DNA, 122 bp, Homo sapiens
cctttattaggactataagtccagctcctgtgactcatcacttcagcctctgattggtcccgggccaggctttcacttcagcttctaacaggtcctgggccaagctgagcagcctctatgaa

SEQ ID NO: 100956 - DNA, 122 bp, Homo sapiens
acactttgagaagctgccatactgttttccacagcagctgcactattttacaatcccacccgtaatgcacagggttctaatttctccacatccttgccaacacttattattatcattttttt

SEQ ID NO: 100957 - DNA, 122 bp, Homo sapiens
ctccttccactggatgtacagagcgcttccagcagcttgagcttcacgcctgcccggagacggggtccgcgaggtgccagctttgcactgtcaaagggaatccctcccaggggaggacggac

SEQ ID NO: 100958 - DNA, 122 bp, Homo sapiens
ccaccacctccaaagtcctgaaccccttctcaagtgtaccacttcatccctgcttcctttcgtcccgtgggactaagcattcctcgggccttcactctcaccacttgctgtccctcaaaaag

SEQ ID NO: 100959 - DNA, 122 bp, Homo sapiens
tcattccttccggtgggttcgtggtcttgctggcctcaggagtgaagctgcagaccttcgcggtgagtgttacagttcataaacatggcacgtctggagttgttagtttctcccatccagag

SEQ ID NO: 100960 - DNA, 122 bp, Homo sapiens
caccaggaagtaatgaagtcttacccccaaaaaatgatggggatatgttaaaaggatcaacgaagggcaggtgggacactgtgttcttccaaatgtgataccccgagaagtccacagcatca

SEQ ID NO: 100961 - DNA, 122 bp, Homo sapiens
ctcaaaaaaaaatcaccattttgcaacccctaatgaaatactttatctagacaacttaaacgtggatattcaactattacctaaaagttggtgaggaattttatagtacttaaattggcatc

SEQ ID NO: 100962 - DNA, 122 bp, Homo sapiens
ctctcgcttccgcccgcctccctggctcgccggctggcgtcgccaccgcctcctcgtccccggccaccgctgtcgccgctgctgcaattcaaggcgcacactatcccactttcccgctggag

SEQ ID NO: 100963 - DNA, 122 bp, Homo sapiens
gagtagctgggactacaggcatgtgccactagacctggctctaaagacatatatgacacacgaaaccatttatttttcatttcacaatgtttattcacatatatggtattagtattctaatg

SEQ ID NO: 100964 - DNA, 122 bp, Homo sapiens
aggcccccgcagaggggctcagctcaggggacggcgacgacacaggcccccgcagaggggcgcagctgacgggacggcgccgacacaggcccccgcagaggggcgcagctgacgggacggcg

SEQ ID NO: 100965 - DNA, 122 bp, Homo sapiens
gcggacgccggggaagacggcccaggagggcccgaggcaggggagcccggggacggctggcgaggggcggcctctgcgctgaggggagccccaggccgcgcaccccaggcccgcctgacagg

SEQ ID NO: 100966 - DNA, 122 bp, Homo sapiens
aaatataaaagtgataggttcaccagggacaaccctgcactttgagctccactcgcgctgcgaatctcgtgctattattgacctgtttacagatgaataaactagggttcagagaggttgcg

SEQ ID NO: 100967 - DNA, 122 bp, Homo sapiens
gggaaaaaagagagacgcgttattgtcaatgtgatcatgaatgtccctcgctgaagcgggcgggtgtttcacttgcgaaaatccatcgccaccgctactagccaattgcaatgcaaatccat

SEQ ID NO: 100968 - DNA, 122 bp, Homo sapiens
tctgcctgagggacccagatgtatgtgacaaaatggaacctaacttactgttagcatgtgcggttgtgactggcatgtgtggctctgtgtatgaggaatttgtgacacggtagggggtattt

SEQ ID NO: 100969 - DNA, 122 bp, Homo sapiens
ttcgtgggggctggcaggaagctgggacaccgcagatgtggaacaaagcaagaggccgctcgagggtcgtcgggaaaacagttagaaccaatgaatgcttgtcaccttcacactgcctccca

SEQ ID NO: 100970 - DNA, 122 bp, Homo sapiens
caatatcccctgtgagttctgcagcgggttctttgagaaccgcaagggcctgtgtagtcacgcacgctcccacttgctgcagatgggtgtgaccgggtggtccgtccatggttcgcccattg

SEQ ID NO: 100971 - DNA, 122 bp, Homo sapiens
cggccgccgtgcgcctgcgtggcagaagcccctgctgagcatgcgcactggtgtgacccgcgtctcctccgtttgtgaagtctggcgggtcgcgtgtatactcagccgttctctcttcacag

SEQ ID NO: 100972 - DNA, 122 bp, Homo sapiens
agggtgggagagcagccccgccctgcctccccagctgcgctccctcccggctgttccaggcgcactccgagtccccagggcctgtgcaaagccaaggatttcctcggagccggagccggcgc

SEQ ID NO: 100973 - DNA, 122 bp, Homo sapiens
caaaaccgtgaagaaggcggcccgggtcatcatagaaaagtactacacacgcctgggcaacgacttccacacgaacaagcgcgtgtgcaaggagatcgccattatccccagcaagaagctcc

SEQ ID NO: 100974 - DNA, 122 bp, Homo sapiens
acgaataatgccccagggtttctctgtgacactggggtaacagcaccagctcagggcccacggatagcgtgaggggtcggtcggtgacccccgaaatcaagtcacaggccgcgatttatgtg

SEQ ID NO: 100975 - DNA, 122 bp, Homo sapiens
gagaactgagccaaattggagtcttcttgggacccaagttccctctctaacaggtgggggcgctctcagagccgagggggaaggtttcggggatggtgctggacccggacctgtgtccccca

SEQ ID NO: 100976 - DNA, 122 bp, Homo sapiens
gagaactgaatgaagattagatcttttaaaattggaagacttcggccaggcgcggtggctcgtgcctgtaattccagaactttgggaggccaaggcgggtggttcacctgaggtcaggagtt

SEQ ID NO: 100977 - DNA, 122 bp, Homo sapiens
ctgtctgctccaatcaggaggcgcggtccttccagcctcttgctcctgtgaatcacaggtcggcgggagccttttttcctttttttttttttcccggggagtcggcctcggggctctgctct

SEQ ID NO: 100978 - DNA, 122 bp, Homo sapiens
cttacttttgcagtctggggtgactgagtcaacgtgaccgtgcggagcaccaagcagccccgggtccccatggctaccgccagggcaacgcttcgcggcccgctcctcagggaccctcaggg

SEQ ID NO: 100979 - DNA, 122 bp, Homo sapiens
atagggtctatgttgcctgggctggtctcacacttcaggcttcaaacaatcctactgcctcggcctccggaaaaattgttatgttgcctttttttttcagtgggggtagagaaagagctatt

SEQ ID NO: 100980 - DNA, 122 bp, Homo sapiens
cccttacctcgtaggtgctggtaattcccagtttgtagaacaccgggaggaagacctccgcgctgatgaccaccacaaagaagtaggtgaaggcaaagatgctaaaaatggccccaaaacgg

SEQ ID NO: 100981 - DNA, 122 bp, Homo sapiens
gagcggagccgcttctccaggccgcccgcctccctgccgcaggagcaggcccgcgcccgccgcccgagagcctccggtagagggagacactccagcggctcctccgacttggcagcggccgg

SEQ ID NO: 100982 - DNA, 122 bp, Homo sapiens
gtagcgccgtgtccggcggagcttcagaccaaaaggcatggctatgtggtcctcggacgccgcccgcctatcctggcgcacacgcccctgagatggccttagcagtttcgtgactggaaaat

SEQ ID NO: 100983 - DNA, 122 bp, Homo sapiens
tccatggtgagaacaccgtctctatctgccttcacaacagactgaaggcagagctaagatcggatgtaattagtttacatgtcagacccaacaatccatgctgtacgtcatgcaggagtgat

SEQ ID NO: 100984 - DNA, 122 bp, Homo sapiens
ctcttcacacaccatcacgcccacgtaccttaatctcactgttgacagtacacttatgctcgcgctcatgcacactcgcccccacctcgccttcgctctttacacgagcttgcgcgcagaca

SEQ ID NO: 100985 - DNA, 122 bp, Homo sapiens
aaaccgcgaggtctacccccggggccgcgttcatctccacgttcacgttgcccccagccgcgcactgcagagccttcatctcctggagagaagcaagagtgtggctttaggggcattgcagg

SEQ ID NO: 100986 - DNA, 122 bp, Homo sapiens
cctgcacctatccagacagcacaaacccaggtggccccgggatcctgggggacagagcggcgacaaagcaacacaaaccccacgtcgaacagcggcgccgcgtgcgcaccccgcgcccgcgc

SEQ ID NO: 100987 - DNA, 122 bp, Homo sapiens
actttggccacctcgcagtcttttagggtcgccggaccggcttcctggaatacctgaggtcgcagattcaggtagtaaacagatgtggggtccaccctccgccaaatgggcggggcaagttc

SEQ ID NO: 100988 - DNA, 122 bp, Homo sapiens
tccgccgccgcccctcactcagccttgggtctgcgggaggcagcagaggaaaaggagccccggaaacactgaccgttacacggaacccacctacccgagagttcctagggttgcgcagctgg

SEQ ID NO: 100989 - DNA, 122 bp, Homo sapiens
aatccagcccagccccatcagcaggtatccgagggtgcactgcacagatcggcgtcaggacgtgcggccacacctactgtgaggagaggatggggctcgggtctgtgcatggggcatgtcat

SEQ ID NO: 100990 - DNA, 122 bp, Homo sapiens
gtggtctgctgccggtctgatccactacagctttctgaatcctggcgaaatcgttacattcgagaagtattcgcagcaaatcgatgcgatgcacagaaaactgcagtgtcaactgaaagggc

SEQ ID NO: 100991 - DNA, 122 bp, Homo sapiens
gagaggtccggtggggaaagaatcccggccctggagattatatatccgccttcgcatcagcggagcagggacgctgggagcgcgcgcggcccgccggctagtcagtcccctgacccggaacc

SEQ ID NO: 100992 - DNA, 122 bp, Homo sapiens
accttcagggtgcccctgtgtcaggaagtaagctttggttgctcctgtttttttcactcccgttgttaaattcaaaataaatgagcctctcccttgtgaagggcatgattacacagtatcca

SEQ ID NO: 100993 - DNA, 122 bp, Homo sapiens
agccccaccccacaccatgaggacagtgtgcctggggttcccggggtgcccagaagctctcgggagccctccttcactgacaggagggatggcccggtgcagggagggcaggagggtgagat

SEQ ID NO: 100994 - DNA, 122 bp, Homo sapiens
ggtgatgggctccctgggcaagcacgcggccccctccgccttctcctctgggctcccgggcgcactgtctcaggtcgcagtcaccactttaaccagggacagcggtgcttgggtctcccacg

SEQ ID NO: 100995 - DNA, 122 bp, Homo sapiens
gtgaggccgagccaggggcgggctgtggggtctcagcgcgcgccccccgggagctgagagcgccttccccgtgccctgattcccaggagatcccagagaccctgcggggctccggagaggcg

SEQ ID NO: 100996 - DNA, 122 bp, Homo sapiens
taatttcagtgattacatgaaaacacagctagaaaaactaaagtatttttgtagaaattacgagaaggttacattaacaatcagaataaggttactatttagactgtaatcaggtgtcaatg

SEQ ID NO: 100997 - DNA, 122 bp, Homo sapiens
cttctctctctgtctggtctgtgggtctctgttggtcacctccttctgtcgcgctggctccgcctgctccagtttcagaatgtaaagagaggcatggtgcagcctgagggaagaggccctag

SEQ ID NO: 100998 - DNA, 122 bp, Homo sapiens
ccctccctctggctgatttgtacaaaatcgcttcattaaaataactgaaggctggcagggcgcgttggctcacacctgtaatcccaacgctttgggaggccgagacgggtggatcacctgag

SEQ ID NO: 100999 - DNA, 122 bp, Homo sapiens
gccctttctatcccaaccccaggcccgctcaggttgatcccgcagaaacagaacttctcgcgggccagtcgccagcacctagaacttgggaagggagcagacggattagaggtcgggggagt

SEQ ID NO: 101000 - DNA, 122 bp, Homo sapiens
gtgctccccggctatgggggggccacttacccggcttagccttgcattgctccgacgctgcggcgcctctgccggcccgggaaactgcgggggagccggggaaagggggttggagacccagg

SEQ ID NO: 101001 - DNA, 122 bp, Homo sapiens
cggggcgggctccggtgtcagcgaccaagccgcaggtggcggcgagcgcggggctcggcccgagctcaggaggtgagtgttgccccccggaaccccctgggataccctggcccgcgcagcct

SEQ ID NO: 101002 - DNA, 122 bp, Homo sapiens
aggccgccgcacagaaagccctgccctccacgccgggtctctggagcgccctgggttgcccggccggtccctgccgctgacttgttgacactgcgagcactcagtccctcccgcgcgcctcc

SEQ ID NO: 101003 - DNA, 122 bp, Homo sapiens
accagaaaatgaaattctcagcttacaggcaacggaacaaaatgaaatcaggccaatgcacgcggccccgggaagcaccagggggcctcagcgagctcctgagtttcacactcagtgcgggg

SEQ ID NO: 101004 - DNA, 122 bp, Homo sapiens
cctaacatcactctgggtggtgaaagcgcacttttccctaatgtgtgggcggcaagaaggcggacccgctcgaagctccgcccacccacgcgaggccccgcccgcccgctcgaagccccgcc

SEQ ID NO: 101005 - DNA, 122 bp, Homo sapiens
gccccgggcccaccccgccctcctcctgcaccgccgggcccaccccgccccgctcctccacgccgagcttcagcccgcggagctgctgcgggccccagctgagaacccctacgcgctgcggc

SEQ ID NO: 101006 - DNA, 122 bp, Homo sapiens
gctactgcctggaacttggtgcctctgataacgtcctcctgacttggctgtagcaccaggcgccagacaaagaatcacaactggattgctcgttgataaaatgcttgccatttgcagagctg

SEQ ID NO: 101007 - DNA, 122 bp, Homo sapiens
agagagggcgtggcctgagccaaggagttcaggtggcagcttccagaagggcagaggccacgacaccgaggcccccagctggtgcctcctgtggctgagtgatgaggggcactggagtccaa

SEQ ID NO: 101008 - DNA, 122 bp, Homo sapiens
caccgcacacgcccacccatcacgtgcatcgtgtttaatcacacttccaatacctgtccccggggcccaccccacacgcccaccccatcacgtgcatcgtgtttaatcacacttccaacacc

SEQ ID NO: 101009 - DNA, 122 bp, Homo sapiens
cggaccagcattgttaacggctgcggttcgaagtggctgtgggtattgctgcggctggtgcgtcgtcgctctaggtacgttggggccgggcgagtgtcctgcgagagcggcgattggcgggg

SEQ ID NO: 101010 - DNA, 122 bp, Homo sapiens
gtcgtaaacaggcccggtcaatgcgacctaaaacaattataattacagctgcggaggtcgcgtttcagaacccccagccgcgcagccaggaggttaatgtcccagagtcactgtcaccacct

SEQ ID NO: 101011 - DNA, 122 bp, Homo sapiens
acccgcagagagtgcccgcctgtgttggggcagcagcgcctggaaggaggcggccccggccgcccgcagagctccgcctcccaggccgcgctctgtgtctttgtccaggctgggaggggccg

SEQ ID NO: 101012 - DNA, 122 bp, Homo sapiens
agcgggagaagacccggccctggccccaggagccctcagtggaatccatttagttgaaaacgtaaaaagcaatcgaggctgtaaatggcagtgagtgttgcactgcagcccagcagaaactg

SEQ ID NO: 101013 - DNA, 122 bp, Homo sapiens
ggccatcagtccttagggtctgagtgggggctccattcttagcagcacccatcccatccacggccgcgccgacaccccacacagccgccccgacaccccacgcggcctcgctgacaccccac

SEQ ID NO: 101014 - DNA, 122 bp, Homo sapiens
ctagccccggcggccgccgccgcccagaccggacgacaggccacctcgtcggcgtccgcccgagtccccgcctcgccgccaacgccacaaccaccgcgcacggccccctgactccgtccagt

SEQ ID NO: 101015 - DNA, 122 bp, Homo sapiens
tgggacgggtgtccgggagggaggggagcctggcggggtctggggcctcgtcgcggagggcgctgcgagggggaaactggggaaagggcctaattccccagtctccacctcgaatcaggaaa

SEQ ID NO: 101016 - DNA, 122 bp, Homo sapiens
gagggctagtgagggaggtagacttgcacgtcatgaaatgaaaaactttctaaaagccggcgtttccaaagccccaacaaccgctcttggccaggtgatgagcgccctgttcctggaggtat

SEQ ID NO: 101017 - DNA, 122 bp, Homo sapiens
ggaagttcacctctggaagggtgaggagcaataaatagggtgggtgatggacatatgtgacgtttgccacagagaggccgtcagtatgggccttgtggtccgggctctgctttgggacacaa

SEQ ID NO: 101018 - DNA, 122 bp, Homo sapiens
aggtcgcccagaggtgtgtggtctacgctggcccaaggagatccccaggcgactgaagtccgggtgtccacagctgtggcagccagcataacctccctccgtgcttccatcccttccccagc

SEQ ID NO: 101019 - DNA, 122 bp, Homo sapiens
tcctgtgtgtgcattccttgctttttgtctgtctctcccactaggcagcaaaccccaccacgcatggcaagaagtctagctctcctgttcatctttgtacacctcgagccttgcacaggggc

SEQ ID NO: 101020 - DNA, 122 bp, Homo sapiens
agctcacccagggtgcatgcttgcggctcctccggagctgggtcccgggagactgctaagcggctccgcggcccgtgctcatctgggctctgctgatgcttggaggctgtttccttactcag

SEQ ID NO: 101021 - DNA, 122 bp, Homo sapiens
actatctaaaagtatattttaatttcgttgtttatctgttgccagttttccccgctataacgtaagttccctaatgcagtgaccttgactgtcttttagtatgctcagctgagagagcgcct

SEQ ID NO: 101022 - DNA, 122 bp, Homo sapiens
tcccttcaagcctagtctcgtttgctggaatgtgggaaagggaatagaaatgagcgctgacgtgcctagatttgcccaggccacgacagtacctgtgagcatctgcccaggtctaggcgacc

SEQ ID NO: 101023 - DNA, 122 bp, Homo sapiens
cccagaggcagcagcggccagggccctctgatgccgagcagggacagtggcatttctagacgatgagggtggggcggtggccagcatctccgctccctacccagggaccttcactcgccggc

SEQ ID NO: 101024 - DNA, 122 bp, Homo sapiens
cttccagggggagtaaaggctccgaggcctcgtagcgctcttggtgtttttctgataattcgtagtgattaatgttttcgtgaattcttaattgccgaccttgtagaaatgccagcatttaa

SEQ ID NO: 101025 - DNA, 122 bp, Homo sapiens
atgtgcactgagacccttgctgcagtcagggttgccactgccccctccaaccctgacccccgctggcagccccaggcttgacattccactctgaacttgacaaggggaattgggtactacct

SEQ ID NO: 101026 - DNA, 122 bp, Homo sapiens
cgtactcctcttcctcctcctcctccccctccaaggtccatgcacacccctccatctcgccggtgagctcttggatcttggcgagtaggggcttatagatgtcattatactttttttccaga

SEQ ID NO: 101027 - DNA, 122 bp, Homo sapiens
actgcagcgtgatgcttaggcataaccggcactgtgcctggtctcggtgatgtgcagtgtcgtttggcaatgggaccttatccaggggagcaaagtggggagggaaacctgtggtcaggcca

SEQ ID NO: 101028 - DNA, 122 bp, Homo sapiens
tagtctgtttttcccttttttaaactttagtgtttgaggggggtcttaaggattttaaggcggtttatacatggtttggaataatatagaaatgcacgtcttaggttctgttttgaatcctg

SEQ ID NO: 101029 - DNA, 122 bp, Homo sapiens
acttcttggctttagagtgttaagacaggatctgcactcagctggtgtgctagagagagacgaagccgcctaaccaaacaatgcacagaaaggagaccctctgctcctgtgtttttctatca

SEQ ID NO: 101030 - DNA, 122 bp, Homo sapiens
ccctctggactccgacccccagaaggctgcgcggcacggtgtgacctgcgcagtggcgtccgttctaagtgctataacaacagggggaagatggctcagagttaggctggagaggggcggtg

SEQ ID NO: 101031 - DNA, 122 bp, Homo sapiens
aagccccctggccttcagagcccagggaaagcgtcacaaaagccggaagtgcgtcacacccgccttccggagctgcgctccgcttcggggtcctctctaggatcgcgggaggactttgcatc

SEQ ID NO: 101032 - DNA, 122 bp, Homo sapiens
gcggggactcgtcggggctcgggctccggcgtctgggatggtctgcaggcgtctgccgcccggccgctccctccggctcttatactctacccgacctgcccggctggttccaccaccgaccg

SEQ ID NO: 101033 - DNA, 122 bp, Homo sapiens
tgactttgattatttgcattgatgaccctggggcaagattcttggaccaaccctggagtccggccccgatcgagtggaggtagttgggggaggcgagccgcggccgggggcgggggagggac

SEQ ID NO: 101034 - DNA, 122 bp, Homo sapiens
ttacttgaatttcccggaattgctgctggggcagaatttgatgttttaattgtgcctagccgaccagctagtctctttttgttgttttctgtagccctctggtacttccaactagtttgtga

SEQ ID NO: 101035 - DNA, 122 bp, Homo sapiens
gggcgcaggcgccagggagggaaccagagcccgctgtggcggatgaaaggaagccgtcggcgtgttgtccccactcactgatagtttttgaactctagaacaaggaacaacttgtgaacaag

SEQ ID NO: 101036 - DNA, 122 bp, Homo sapiens
ggatcccactgcctctggactgccaggcactgcgtctggggtcaggccaggaaggggcagcgcgtggggtctgacattgaggccagcacccaaggggaaagcaagccttgcattttatccat

SEQ ID NO: 101037 - DNA, 122 bp, Homo sapiens
gtagcatccgcaaagtaattagcataatgtttcacaaaagtaggcactcgacgaatttgtcgttagctcatttcctcttgtattctatagaacacagatttcagcatgctaacaaaattaac

SEQ ID NO: 101038 - DNA, 122 bp, Homo sapiens
gccccggcgaggtggcgctgcaggagctttgcgggcagctggagcgctacctgggcgcggcggcccacggctgcggcggcgccaccgtgcgccacgctgttttcgcggctaaaggccgcgcg

SEQ ID NO: 101039 - DNA, 122 bp, Homo sapiens
cggagggcggggccgtactgcggggctggggcggggagcgggcgggaaatggaactgtgacggtcccggcctgaggcccctgcagccacgcacctcccggtgagaagcagagcgcgagaggg

SEQ ID NO: 101040 - DNA, 122 bp, Homo sapiens
gaacaccccccacccccccggccgcgaggcaagctgggaaggcgagttcctggagctgggcggcacaggccgacactgaggcctggaaactaccaatcccagaatgcatgacttgagcgccg

SEQ ID NO: 101041 - DNA, 122 bp, Homo sapiens
gccaatggcccactcggctgagatagttctgtgcagcctaagacaagtattccctgcctccgggcacacattaagccttagatttcctctgtgctgcccccaaaatactttctgatttttct

SEQ ID NO: 101042 - DNA, 122 bp, Homo sapiens
ggtgagcagtagccagcagctggtgtgccgtggacgccgctgaccgccgcgcgcccgaaccgggtgtccacatgagtgcctctcccagcagatccaggtaagaacttcctgaccttcctgag

SEQ ID NO: 101043 - DNA, 122 bp, Homo sapiens
cgcccacggatacccagagcttcatattacaagtgaagggtcctccgcccagagaggcgacggagctacgctggagttgcacgacagaaccagaaccccagtctttaggggtgtggcaagcg

SEQ ID NO: 101044 - DNA, 122 bp, Homo sapiens
gtctgcctggcgacctcccagagggcgagatgcctccgagggagcgtggagcgggcctcccggccttggcaggcagctaggatgaagatctttccagctctagctgcctggaaggaaactgg

SEQ ID NO: 101045 - DNA, 122 bp, Homo sapiens
ccgcaggccggggacgctgtgcagaccaccctgtaggggcgtcagacacagagcagcttacgcggaggcctctctcagaatggccgcagcaggtcacacagttagtgtctcaaagccctgca

SEQ ID NO: 101046 - DNA, 122 bp, Homo sapiens
tgtaacaacttggtggcaccgggggggaagtacagtcacctaataagttgccggcgcccgcgcccccattggccgtgcgcgtcacgtgcccgtccagcagaacaataacgcgtaaatcactc

SEQ ID NO: 101047 - DNA, 122 bp, Homo sapiens
tagggctgttgtgaacatggtgttgacctcacatataccctgaaaggggctcagggccctcggggacatctgtgaagcacgctctgggcatgctgatctgttggagcgagcgctgtggcaat

SEQ ID NO: 101048 - DNA, 122 bp, Homo sapiens
gactgttctgtgcactgtaggatactgagcagctccctggcctctactcacaagacaccccgtgccccatcccccaactcagttgcaacaaaaatgcctccaggcattgtcagatgtaccct

SEQ ID NO: 101049 - DNA, 122 bp, Homo sapiens
ctactgtcagtagaaggtaaaactgccctgctgacgctgttcacggagcttggttcagctcggcacggcagggcacgcttgctcgcccagagagagaataatgctactaacccctgcaaggg

SEQ ID NO: 101050 - DNA, 122 bp, Homo sapiens
cagatgagtaaagctggctgactaaagcacaataggcaatggcaggtattgcagcaaattcgggaacacaaactactaagagtggggtggggatgaggaggcaataaactccttagctacca

SEQ ID NO: 101051 - DNA, 122 bp, Homo sapiens
gctgccgtcccaggacccgcacctgcccctcgcctccctggtctccatcaacgcggacaacggccacctgtttgccctcaggtccctggactacgaggccctgcaggcgttcgagttccgcg

SEQ ID NO: 101052 - DNA, 122 bp, Homo sapiens
tgagatttcaagctgtaaggcgctctccaactgtgaaagtgtgacatggtcctggaataacggcgcccacacggtgcgttaggtgagaggtcagcataaagtttactttcttatccatagcg

SEQ ID NO: 101053 - DNA, 122 bp, Homo sapiens
gtatgaaagatgacaatgtagtccttgcctggagtgagataggggatatgagggcaaagtcgggcttttggggcaaagactatgaattctgttttggacatgttaattttgagatacttgtg

SEQ ID NO: 101054 - DNA, 122 bp, Homo sapiens
tccagctgtaacctaaccagagctcagcaggcccctttgctgctcctgggaacctcaggccgggccacctgcaggagtgcccttggtgtgtgtcccagaggttctgtctgccctggggctct

SEQ ID NO: 101055 - DNA, 122 bp, Homo sapiens
tgacctcgtgatccacccgcctcggcctcccaaattgctgggattacaggcgtgagccaccgcgcccggccaaaagttttagaaaataaaactaaatggaagattggaaactttttgaaaaa

SEQ ID NO: 101056 - DNA, 122 bp, Homo sapiens
cgatgcaggcctcccgccgcaccatctcgatcctcatctcgtcgttcttctcctccagctcgcggatctgcttcctgtacttgtccttttcgattaagcactgcgagtactgtgtctgagct

SEQ ID NO: 101057 - DNA, 122 bp, Homo sapiens
aaaagaagctcttggcagtacattgagctccatagagacagcgccggggcaagtgagagccggacgggcactgggcgactctgtgcctcgctgaggaaaaataactaaacatgggcaaagga

SEQ ID NO: 101058 - DNA, 122 bp, Homo sapiens
cttaagcgggctgggaactctagacactcagggatgggccagcccattagagtaagcattcggccacctctaggctgctacggtcactgctgctgtcaccatcaacgtgactgtctcacacc

SEQ ID NO: 101059 - DNA, 122 bp, Homo sapiens
tgcagacggcccggcagagcaaggcagcagtgatggcgctgggtcccccagggccgcgggcgcctcagtaccttggagtgtttcataaagtaatcaatatcgacctccagctcactgggatc

SEQ ID NO: 101060 - DNA, 122 bp, Homo sapiens
gtgtggtgttgctgatgcctttcctgtgcccccagcaatactacatcctgctgatcctgacggacggcgtggtgaccgacatggccgacacacgggaggccattgtgcgtgcctcacgcctg

SEQ ID NO: 101061 - DNA, 122 bp, Homo sapiens
tggggggttgccttggggcttccactctaaaatgtggccttaccttggccacaaaggggtcgggggggtgggggagagagagagagagagagagagggagagagcagcctgatcatagctcg

SEQ ID NO: 101062 - DNA, 122 bp, Homo sapiens
cgctactgcgacacaaagcaaagcaaggtgggcaagcaacactagttctttattcccgcacgccctaatccccaagtagctcttccgggtcactgcagtcttcacgggctccagactccgcc

SEQ ID NO: 101063 - DNA, 122 bp, Homo sapiens
tggctgagccgtgtggtagcaggcaggtgacgtggaagccacctgctctgctggccagcccgcctgaaccttgcctgagtagtcactgaacgtcccagcccaaaggctgtatcttgctagat

SEQ ID NO: 101064 - DNA, 122 bp, Homo sapiens
caaatacacgagccagatcctttcctgaggccaggaagcctggaatctaataacaccgggcggtggataaagtcccccgagccagtgcttagcttccgttaatggagccatggatggaagcg

SEQ ID NO: 101065 - DNA, 122 bp, Homo sapiens
atgatcaaagaggttccgttgctcagcagggtcccgccagggatgagtcaaagacgggtgcgtgcatgacaaggctcagccaccctccacgtccgctttccttggcttctctccatgcactt

SEQ ID NO: 101066 - DNA, 122 bp, Homo sapiens
gaacggtttcatcttgaaactacccccaccccaaaatctgtggaaaaattgtcttccatgcgacaggtcactggtgctgaaaaggttggggaccgctgttctgcaggaaacgagagacagag

SEQ ID NO: 101067 - DNA, 122 bp, Homo sapiens
cacaacgggggtgttctgagccgagaacacaggaaggagttccggcccagggtcatgagacgtccttgtccccttttttctctgttgggtttagttttgagaagccattcattgtcaggagg

SEQ ID NO: 101068 - DNA, 122 bp, Homo sapiens
ggaagctgtctctgcagaggcgtcgcattcctgagcggtcttcacgctctcccatccctgcgagggccacctctgaaaaatctcattcggaggtgacatgggaaaatggcttcatcacattt

SEQ ID NO: 101069 - DNA, 122 bp, Homo sapiens
cactccgcaagctaccctgtgggctcttcttcctctgcctccgctgtgagtgtaggctgtcgacagggttccagtggccctgtctcttccccaaccccacacgactactctggtgcctcaat

SEQ ID NO: 101070 - DNA, 122 bp, Homo sapiens
gcttgcgtagtggcgccgccctgatgtgtagtctccaggccgccccgaacaccagcccagcgggtcctggacccctaggtcatgtggctacagtggaatccaggcttggccgaatccaggac

SEQ ID NO: 101071 - DNA, 122 bp, Homo sapiens
ctgctgcgcatccggggagcggcccagttacgctcaccatggtgggccgtgcgggttgtgcgtgtctttcgtggtgctccaccctctcgtcctcgggtctttcggtcatccttgtgtttgtg

SEQ ID NO: 101072 - DNA, 122 bp, Homo sapiens
ccgcactgcctctagcaaagggacgcggggaagctcagcagaccttaggcctcccaagggcgccacggtggttcctttgagcccagagtcagctcttaagtccataggccttcctgaagctt

SEQ ID NO: 101073 - DNA, 122 bp, Homo sapiens
acggctggcctcagcgggaggcgcggaaatgcaagccgagcatgctggcgtgaaagcccccggggcctggcacccccaaaaacgaccccccacctccgttcctgccctcattgcccagggct

SEQ ID NO: 101074 - DNA, 122 bp, Homo sapiens
cctgaagtgaagccatcggtctcgtcacttcccaggaagacacctggctttccccactcccgccaggcccacagggtcccaagaggccagagagacaggactgcaaattgtcctacatggga

SEQ ID NO: 101075 - DNA, 122 bp, Homo sapiens
ggtaggagctgtgatcaactgtgctgacaacacaggagccaaaaacctgtatatcatctccgtgaaggggatcaagggacggctgaacagacttcccgctgctggtgtgggtgacatgggga

SEQ ID NO: 101076 - DNA, 122 bp, Homo sapiens
ctcactgagctgggcctagttgggggcagctgcgatggggtgggaagccacgctgtcacccgaccccgccttacggcccctgaaatccgaggcttgagcgcgggtgtcggtgtcgctttcgt

SEQ ID NO: 101077 - DNA, 122 bp, Homo sapiens
catggtctccctcttctatggcaccgcactctttatctatattcgccctaaggccagctacgatccggccactgaccctctggtgtccctcttctatgctgtggtcacccccatcctcaacc

SEQ ID NO: 101078 - DNA, 122 bp, Homo sapiens
ctctgggagcagcacccttccaggggaggtgggacgtcgagaacttctccctaagagatgcggggaaatggtggggcctgagagtgcaaacactgcagaaatgcgaaaaatgtagtgttaac

SEQ ID NO: 101079 - DNA, 122 bp, Homo sapiens
tcgtgcgcagagaggcctgacagcctctgcatcagtgaccgggcgaagagtggggcagctcggacggtggttggggaacgttagggagattggcgcgcggaccactgggtgagcgcccagga

SEQ ID NO: 101080 - DNA, 122 bp, Homo sapiens
gaccgtcccccccttccccttttaccccaatactgggcattacctcccaaccccccatcacgcagtggggctttctgcaaacctattgttatagatctccaaaaatgttttgtaccgcccac

SEQ ID NO: 101081 - DNA, 122 bp, Homo sapiens
tcaccccttcggagtaggggtcgctgggtaaggtccaagtgccagctctgcagtccccagcggcgctagaaggaacctccaggcaagttttgggggaaattcacctgacaggggaggagcag

SEQ ID NO: 101082 - DNA, 122 bp, Homo sapiens
gccgcctcttgcacctgagccaggagttcagtcgggaggcgggcgcggagcggttcccagcgcctggacgtcagccagtcgcaacacccgcgggaacacttgctacatttgccataatgcat

SEQ ID NO: 101083 - DNA, 122 bp, Homo sapiens
gcgcgccccggccccgcccccgcgcgctctcttgcttttctcaggtcctcggctccgccccgctctagaccccgccccacgccgccatccccgtgcccctcggccccgcccccgcgccccgg

SEQ ID NO: 101084 - DNA, 122 bp, Homo sapiens
cccgcttctcattcccgcgcccttagctgaggcttctcggtcctctgaaagtgccagcggcgtcagaggttggaatcaatgctttcctgacatcatcgcagttagccctgataggttttggg

SEQ ID NO: 101085 - DNA, 122 bp, Homo sapiens
catctaggcggggagaggagagaaggtagagaacttctgagagagttctgagaactaacgcgaatggctggattgcgctaactaggcgttcttagcaggaaaatgtcgccaagggaaggagt

SEQ ID NO: 101086 - DNA, 122 bp, Homo sapiens
ttcctgcaagatacacgttagcaacgaccgttctctctacgccaagctcatttgtctgagcgtatcagcaacacgacacctcgcagttcagtggatttgatgtgagctcccgcccctggcat

SEQ ID NO: 101087 - DNA, 122 bp, Homo sapiens
tcccggttaaattgccggcacgggaagggagggggtgcagttggggacccccgcaaggaccgactggtcaaggtaggaaggcagcccgaagagtctccaggctagaaggacaagatgaagga

SEQ ID NO: 101088 - DNA, 122 bp, Homo sapiens
tgcctcattcaccctacacgtgacagggacacccggggaccgcgcctcactcaccctgaacgtgacagggacacccggggacagtgcctcactcaccctgcaagtgacagggacacccgggg

SEQ ID NO: 101089 - DNA, 122 bp, Homo sapiens
gtcctccacagaagtgatgatccaaacacagagacaagaaatggcactggcaccctgccacgggataaataaaataacaactaggcctggattacctggcaaatgtacaaatactacagatg

SEQ ID NO: 101090 - DNA, 122 bp, Homo sapiens
aattgtgggccatcgacatgatgacggcccatcactcggcaacgcgaaggaacggactgccggaacacacacgcctcagaataatcacactgcctgagaggaaccaacccaaaaaatagctt

SEQ ID NO: 101091 - DNA, 122 bp, Homo sapiens
gtgcacacgcactgtggacgcacactgcactgtgccccccaacggctgacaacgtggagccgggatgcaggagcatccgccttctccaagtgagttctcggcactgccgtgctttcactaac

SEQ ID NO: 101092 - DNA, 122 bp, Homo sapiens
ggccgaccccggactggccgacctcccgcagcagctgctgttcgtgcaccagggcgagaccgagctgaaggagctgcactggcacccgcagtgcccagggctcctggtcagcacggcgctgt

SEQ ID NO: 101093 - DNA, 122 bp, Homo sapiens
taccttaacatctgcttgcatcaggaaagatgtctaaaaaaaatttgagggacatttttgcggacacttcctgaagcctggaccagttttatgtgatttgttgacatcctttttttttttct

SEQ ID NO: 101094 - DNA, 122 bp, Homo sapiens
taaaccacataggatgactcatcatatcagttatatccacttgtgctgacgtttgtcttgcgtaaccattgtgttaagtgctttccataaaaagccttcatgcaaatcttttttttttttcc

SEQ ID NO: 101095 - DNA, 122 bp, Homo sapiens
tgaggtctgcatgtgctgcaagcggaagcctgtggtcagcatgtggcagctcaaataatacgctccactagtgtgagaaagccacaacacagcacggagggaaccattcaccagaaccttct

SEQ ID NO: 101096 - DNA, 122 bp, Homo sapiens
ctcatgctgtgtccaagttaagagtttgtaactgtgaaccaggagaatcccaccaccttccggtcaaaacagaacagtgaaggaaattggagaaaagtttgttcacttactgagtacctaat

SEQ ID NO: 101097 - DNA, 122 bp, Homo sapiens
cacttcaggagcaagcttcaggccttcctcaagtcagtgccgtatttagtgtagcactgacgcatttcttaaccactcaacagttctattgtttttactaggttcccatgtttttttaatgc

SEQ ID NO: 101098 - DNA, 122 bp, Homo sapiens
agggctgagcacaacctatgttggaggcaacagtagcagcagcattggcaggatcagtaacgatcgtaccccggtgtagagctccctatctctgagctaggtattcgcatcacctcattcaa

SEQ ID NO: 101099 - DNA, 122 bp, Homo sapiens
ctaaaaaaaacaaaaaaccaggatggcatctgttgggcggggctacggggcttgtgatgccgcccgctgaactttgtgacacagccgcttgcggagacaggaagcggtcgcagcacgtcagg

SEQ ID NO: 101100 - DNA, 122 bp, Homo sapiens
cccaagaggacgaggatgaggcccggctgcgcaggcctccccggcccagctccgaccccgcgggatccctggatgcacgggcccccaaagaggagactcaaggggaaggcacctccagcgcc

SEQ ID NO: 101101 - DNA, 122 bp, Homo sapiens
ttttgatcttctgcagagctaggagcactctgacatatggttcaacaaaggctcgcagaccggggcatccagtacttgtggtgcttctgttaacgcctgtttatcagattattgaagggcaa

SEQ ID NO: 101102 - DNA, 122 bp, Homo sapiens
ttctactatctttgtagtagatgcaatagaaaagcgtaagcaaagctttctaagtctcaccgtcttggtttgtaatgtcagtaatcatagcccctgcctcatgatgctggtgtgagcctgaa

SEQ ID NO: 101103 - DNA, 122 bp, Homo sapiens
aaataaatcttggtgactattgtactgcagtttaaggtatttacaagtctttgagataaacgctcaatcagaatatggcaagaaaagtcatctttaggctcagtgaccctgtcactatcatt

SEQ ID NO: 101104 - DNA, 122 bp, Homo sapiens
ggccttagcaactgaactaggccagagcaaccgaactaggcagaatcgaacagaatttggcgcggtcgggctggccaggctgctcaagagtcaaagtgggccaacatggtgagaccctgtct

SEQ ID NO: 101105 - DNA, 122 bp, Homo sapiens
ctgtgagcagataaaaagtacatatacagttcatacaataatcttatgtatgtaaaaccccgttacgatgtcggcgacggggcccatcagtaactattacgtggactcgctcatctctcacg

SEQ ID NO: 101106 - DNA, 122 bp, Homo sapiens
atatcctgaaactttactgaagtcatttatcagttccaggagccttttggtggagcctttcgggttttctggatatggaatcatatcatctgaaaaagaaataatttgacttcttattttcc

SEQ ID NO: 101107 - DNA, 122 bp, Homo sapiens
tgacaacttgggcctgcccataccagttcttaaagagactacttccgttcacccggatttcggcaagagttacaatggaatcagaaaggctgggagtatataaccccctacctgggtggtaa

SEQ ID NO: 101108 - DNA, 122 bp, Homo sapiens
tctgtggcaccagctaacacggatctgagagaagccctgtcctccactcacctcacccgccgctgccaccatctcctctgtgccaactccttgtggaccgcaagaaagcatgactttgaaaa

SEQ ID NO: 101109 - DNA, 122 bp, Homo sapiens
tgagagcagacctccccaacaattcggtctcccatatggggtcacagccgtttgggtttccgatcgcgggcacggcacccatctgcggtgtctgtgaagccggcgcgttctgccgggggttt

SEQ ID NO: 101110 - DNA, 122 bp, Homo sapiens
tgagctgtgaaggttgtgaaggtatgtgagttatgtcttgaaaaatacacacatagtgagcgccaaatcccgggagtagtgtttaagtggcgggcttgtcagctgtcaagggctctgcagcc

SEQ ID NO: 101111 - DNA, 122 bp, Homo sapiens
gactgggctttagccatgtttactaagaggcagatgccattttatgccaatgccaggacccgagagaaatcatacttgaataagacgccttcccctctccttttctccttccccagtcgctt

SEQ ID NO: 101112 - DNA, 122 bp, Homo sapiens
actcttttgtggtctcattttctttaatgcaaggctcagaaggaaggagttgtaattattcgaggccctctaccaactttatatcaggcagctactgagtaataatacagtgtaatgattaa

SEQ ID NO: 101113 - DNA, 122 bp, Homo sapiens
cagggtgagatatatttgaacaagcatgagtttcagtaaggacaaagaacagaccagattcgtaaaggccaggctttggcagcccagacttcttaatgtggtttgctccctgttgcccacct

SEQ ID NO: 101114 - DNA, 122 bp, Homo sapiens
caggggcagacgggacaggggaccacagcagagccgggacctggggggggtcgcttcccccgtgtgctccaggccactgagaggctgtggccgggtcctctcctgtgacctcactggccaca

SEQ ID NO: 101115 - DNA, 122 bp, Homo sapiens
ggaaaaaccttatgtgtgcagccagtgtgggcgaggcttttgtgataaatcaactctcctcgcacacgagcagacacattcaggggagaagccttatgtgtgtggggaatgtgggcggggat

SEQ ID NO: 101116 - DNA, 122 bp, Homo sapiens
tcacgttgctggtggcctccatcatgatgacggtcaggctcagtgtcatccgcacaatcccgcctgcgggagccatcatgaaccccagcacgtccaccctcctggctcagggtcacgtggcc

SEQ ID NO: 101117 - DNA, 122 bp, Homo sapiens
ggcccgggcagcggtcgagtggcagctgcgtccagcccatgcgggagctgctgcgggttacgggtggccccagctccaggctcctcctccagccggtcccccaccctccaccccttctcgac

SEQ ID NO: 101118 - DNA, 122 bp, Homo sapiens
gcagacaattctaggaggtgttctgtgcacgtcttaggaggtcacggtgggactgcaccccgtgccccagcagcgacgtcaatcgcacagcctgctcctcctgacttgccactgaacccatg

SEQ ID NO: 101119 - DNA, 122 bp, Homo sapiens
gtcccccacctccaaagagcgccccttccctccctccggctctcactagctccgcagccccgtctatttttagctcgtgcccaccccctggaccctgggaacgttcatgagggggcgggtct

SEQ ID NO: 101120 - DNA, 122 bp, Homo sapiens
ctccgatttatgatggaggaataaaagcctctctcctcccaccacaaaagctttctctttcggagcaacctaggtggtttctagtgaggtcgatgagagaaagacagccctgtttacccacg

SEQ ID NO: 101121 - DNA, 122 bp, Homo sapiens
cggggcctccatgtccccctccttggagaccgaactgcattccattcaaatcccaaaggacgtcccctccatccatcagacacccccgtcccactaacacacagtcgctgccgaaggagcag

SEQ ID NO: 101122 - DNA, 122 bp, Homo sapiens
gttggtaagtgggtcaatgagccaaccaccctattttccccacaggccctccagtgggtccgctctccctggggctggcgacagtggacatccagaaccctgacatcacgagttcacgatac

SEQ ID NO: 101123 - DNA, 122 bp, Homo sapiens
taaaaatgacgaccttggcctttctgggcaatgtagaggcgttcacacgccatttttctgcggtggtgtccatgataagagccgagattgcaggggcctgcacgccgtcctgaagtcgcgtt

SEQ ID NO: 101124 - DNA, 122 bp, Homo sapiens
cagagaagtactgaagctagctagagatttctgcagggtgtggaatggggagaaaggcagcgtgactgtgtgtcacatttgtttctgacacctttttgtaggtctgaaatgcttttaaataa

SEQ ID NO: 101125 - DNA, 122 bp, Homo sapiens
aagttcggatgcctataaaacaaccagacggttcactccaggctggagattgacaggtctcgggcttcactgagccaaagtggcgcccccacgtggcgacagcttaactttacacagctctc

SEQ ID NO: 101126 - DNA, 122 bp, Homo sapiens
tttgagtgcagtgcgggccggcaggcaacgctgggcccggcctttcctcatctccgctggcggggatccccgttcgcctcaggaggcttccgaccccacagcatcccgccgctctgggcgcc

SEQ ID NO: 101127 - DNA, 122 bp, Homo sapiens
gttgggtaggccttcagcatacttttgtccaatcagcttcagactctcactataaataagcggctagctttctctttctcctgaagtgaatctagctctgaaggcatggcgcgtacgaagca

SEQ ID NO: 101128 - DNA, 122 bp, Homo sapiens
tattttatgttgatgaagtagacttcggaaaatgcttcaaaggatctagggggtgccctccgcatgtcacaatgcatcacctcggcccctggtccacgtggagaggtcacctcatttcccca

SEQ ID NO: 101129 - DNA, 122 bp, Homo sapiens
atctttctgctttctggactacttgatttttcttgcagattcctgatttaaatgctgcctcgagtccttctttccttaagtaagcgactgaagcctatgggcttccagggccacactctggc

SEQ ID NO: 101130 - DNA, 122 bp, Homo sapiens
cccctcccctgatttgagaggcctgtgatggagcgccaccagaaaattagtgcctgacaacgtcgtctattggcaataaattgagattccaagtgacacgtcgcgggatcaaacacagccac

SEQ ID NO: 101131 - DNA, 122 bp, Homo sapiens
ataagtgtacagtggagtttttcagaagctacatgatatgtattgacaccatggttcccacgatgaatagaatgtgtgcctatgtattctcgtgttttaaatttttctcacttttaagttct

SEQ ID NO: 101132 - DNA, 122 bp, Homo sapiens
gcggagggccagacgtgaggccagaggcggctggagcagcagctcccacccaatagcagacgaggcgtgagactctcaaccaccttccaagttttctcttcatcttcaagagaacctcaaac

SEQ ID NO: 101133 - DNA, 122 bp, Homo sapiens
gatctgggcggggcggggccggtgaggggtcgggggtgctcctgctattcagccggtgcgcgcggcggcgggaggcagtggctggggagtcccgtcgacgctctgttccgagagcgtgcccc

SEQ ID NO: 101134 - DNA, 122 bp, Homo sapiens
acagttgtgagccaccacacctggcttgaatgtagattttaataattgaatttattctgccgtgttgatagaataactgaatatcagtaaattgtgtaacagtggtggatactgttgcataa

SEQ ID NO: 101135 - DNA, 122 bp, Homo sapiens
ggctgtagacatggtaagtctggttccacctcttgtttgccctctgatttacctctttgtcgtgcttctagggcacacccctctggggtctcaactgcaagccaggagagtttagcagtacc

SEQ ID NO: 101136 - DNA, 122 bp, Homo sapiens
cttaaaggccctgtctccaaaaagttatatagagggatagggcttcgacatgtgaatttgcgggaaacacaattcagcccataaaatgcaagagccacaatcattcctgtgttattgatatt

SEQ ID NO: 101137 - DNA, 122 bp, Homo sapiens
aacagaaggatgtctcagatgaggatgtggctcgagccattaaccagaagctgggggacacgcctggtgtctcttactccgacattgctgcacgagcctatggttgtggccgcacggagctg

SEQ ID NO: 101138 - DNA, 122 bp, Homo sapiens
gtgccatggctaagtagacgtacctactcaacacaaatgagagaaaaaaactgatcatcccggtatttatagctgccctcgcgttctgattggacagtagactgtgccatgccacgtctcac

SEQ ID NO: 101139 - DNA, 122 bp, Homo sapiens
ggtgggcgcgcgcgcgtgggggagtccccggtccctgtcaggggcggggcgagaccaaggcgccgggcctgtggggaggagtgtaggcgcgcgcgagggcggggggcggccccacgcatcgt

SEQ ID NO: 101140 - DNA, 122 bp, Homo sapiens
aatgtaacacatcttgtccatattctcaggtgaccaggagcaacaaccgagccatggagacgtgggtgaaccagtcctacacagatggcttcttcctcttaggcatcttctcccacagtact

SEQ ID NO: 101141 - DNA, 122 bp, Homo sapiens
cccccacaccaagaaagccttggaagctcactgcagggccgatgagctggcctcccaggacggccgctagcctccggggcgccgcgtcggggccgggcccgccagttcttttccggattctg

SEQ ID NO: 101142 - DNA, 122 bp, Homo sapiens
tggagcctttcactctgcacttcaggaggtctgacagggtcactagtacttcaagattcccgtccctatttctgtcttaagcatgttcgttttataccctgttatgagatgttctttgattc

SEQ ID NO: 101143 - DNA, 122 bp, Homo sapiens
cagaggccggggttggggtcggtgcagaccgagggctggtttccttgactgtgggagaaacgccgggagccggagtaagtagggctccgggcggggcgaaaggaaaagttgggtccctagag

SEQ ID NO: 101144 - DNA, 122 bp, Homo sapiens
aggttggccagcgctgggccagcaggaactggaagctggtgtggggcctgggactttggacgcatttccagctttctctgaaccgggctggcttcctagcagatagggcgggaccgtcgggt

SEQ ID NO: 101145 - DNA, 122 bp, Homo sapiens
gcgccccctcttgaattcaggcctagcacatcacctccgcccctcgcaccctgcagtctgcgctccatacagcacgtgagcgggtgctcagcaatgttccctggctgaaagaaccgcataga

SEQ ID NO: 101146 - DNA, 122 bp, Homo sapiens
ttctttgactaggaaagggaactccctgaccccttgggcttcccgagtgaggcaatgcctcgccctgctttggctcgcgcagggtatgcgcacccactgacctgcgcccactgtctggcact

SEQ ID NO: 101147 - DNA, 122 bp, Homo sapiens
acggagagccccgccccaaacactgcggtcccaggtcgaggggagggctctcggcgcgagcgggactatcagggtgacctcacctgtgaccttcaccaccgtgaggtaccgccgcgcctggg

SEQ ID NO: 101148 - DNA, 122 bp, Homo sapiens
aagataattaagtgtattgtcacatagtttaacccttatttaaattacagtctggccaggcggtggcttctgcctataatcccagcactttgggaggctgaggcaggaggatcacctgaggg

SEQ ID NO: 101149 - DNA, 122 bp, Homo sapiens
cacccttctgggatgggggcagggtgggggaactcttgcctcacctccttttcctctcctcgtgcccactgcccccttggtgtcctctctggtgaactccagccacctctccctccacaggg

SEQ ID NO: 101150 - DNA, 122 bp, Homo sapiens
ctgggtcaatgccccagatcccaacggccatggaagctgccactcctgctccaatcagcgcgggctccagtgcctgcaagaggagatagctggacccagagcggcaaagcacggctgggagc

SEQ ID NO: 101151 - DNA, 122 bp, Homo sapiens
ggcctacagaggctcctgactggcagaactggaggtgtgggtgtggttcccttttcaccccggctcttatgttgccagtctcccccctaccaccaggcaaagcccccctaaacttagggtct

SEQ ID NO: 101152 - DNA, 122 bp, Homo sapiens
gcgaggcgctgctgggcgtccaggtgaggcggccaggccggtgctgggagggccgggcctcgcaccgcggctgccgcgggctttgtcccgggacaaaggggggcggccgggcgaggcctggc

SEQ ID NO: 101153 - DNA, 122 bp, Homo sapiens
ctgtcccgcgggcacgatggagcgctcctaccgtactctccacttttggtgtatttggaacgtttcatgccgtattaaaataaaacatggctaagctggatgtggggtggcggtgtgggata

SEQ ID NO: 101154 - DNA, 122 bp, Homo sapiens
tgaacttgccgcacagagtgaagagggccagccccagggtgaccacaagcagtaccatgtcgtagatgagggccatcacaaagtccatgggctcgtaggcgcaggctggccttgtgtcacgc

SEQ ID NO: 101155 - DNA, 122 bp, Homo sapiens
aggttgcatcatagagggcatagcggcagtccttatctggcagcatcttgacaaaggtggcgtaggggtcgtcgacagtctggcccacatcgcccaccaggatctccttgccctcctccagg

SEQ ID NO: 101156 - DNA, 122 bp, Homo sapiens
gtatattttatatttcaaataattagaagacttgaaatgtccccaatacatagaaactcacgagtgacagatgccctaaataccctcacttgatcattacatcattacacattctatgcatg

SEQ ID NO: 101157 - DNA, 122 bp, Homo sapiens
gtcctgcgtcacgcagcaaacgcagggtccactcaacagtctgggggctcggggggtccccgtaccggccccgtccggcttccagttatgaccccgcccttcccacccagaaccgcggcgga

SEQ ID NO: 101158 - DNA, 122 bp, Homo sapiens
aaatgattgagaggctgccccctcccactggtgcaggcgtgcgggggtcggatggggggccgcggaggggggaggtggccagcaggtgcctgggctccaggcccctacccccaccctcgtcc

SEQ ID NO: 101159 - DNA, 122 bp, Homo sapiens
gttccttagcaacgagttgttgacatttccgagagagcgggagcgtctgtacctctgcggcgtcactgggagcccgacggaaaactgcgctaaaggcttgtctttcccctgcccgaccgaag

SEQ ID NO: 101160 - DNA, 122 bp, Homo sapiens
gaatggcttttactgtccatatttctgcgagccttctgttcattacctcttagggattctcgaagattgaggctttctctgcagctctcctcttctgccagaatcacccttgacagtttgtt

SEQ ID NO: 101161 - DNA, 122 bp, Homo sapiens
aggagaaggagagagggagggcggagggcggaggggcggcgggaggagggcggggaggagcgctcttcctggttgggccctgccctgagctgccaccgggaagccagcctcagggactgcag

SEQ ID NO: 101162 - DNA, 122 bp, Homo sapiens
aaaattccccttttgttctttcatattgtctacattttccacaagagcctttcatattcacgtattacttatagttgtcttaagttctgtgtcagataattacagcatctgcatcttgcacc

SEQ ID NO: 101163 - DNA, 122 bp, Homo sapiens
gggacggtgtcgtcctttcaattcatttatctgcaggaatgattgctgctatcagtctcgcgctcaccgcccggctgaggaggtgaaagtttctccccaggaagataaaccgcaaaagacaa

SEQ ID NO: 101164 - DNA, 122 bp, Homo sapiens
cttgcagtgctctggacaattaggagtgcgggttactttgtgctgtttctctatctttttcgcctcggcttcgcaaggacagaggagatttagtgcaaatccctgagagtattggagaaaat

SEQ ID NO: 101165 - DNA, 122 bp, Homo sapiens
aggaggacgcgcggtgggatgtagggctagagggccccagtggtgggagaggtaaggattcggggggaacctcacatggccccagatcagagaaaccaacacacaccaccaccccgggcatc

SEQ ID NO: 101166 - DNA, 122 bp, Homo sapiens
cagcagaattccctccttctggtttccccctcttttgccaatgtgaggcaacaggtagtccgagctcaggtagtttctggagcccaattgtaggggcctgttcagtgcatttctgcgcgatc

SEQ ID NO: 101167 - DNA, 122 bp, Homo sapiens
gcacgagaactcgcccctcctgttgctgctggaactttgtccctctgtccagcgcctccccgacccggcacccgccgggtctttgtgagtgctactgtttcagattccacatctgagcgaga

SEQ ID NO: 101168 - DNA, 122 bp, Homo sapiens
tgctgccaaccctgggagccgggaagacgctgggtccggagcagccctggaccaggcagccgtccccagcccagaagggaggcttctcaccccgggagacaagaaggcacagggcactgggg

SEQ ID NO: 101169 - DNA, 122 bp, Homo sapiens
ggagcctgagccaggtgtatcacgcgatgcactgggctccagcaggattacccctggaatcggcgtctgcacccactcccagccctcgtgctaactgcgtacgcttagcagaatttctctga

SEQ ID NO: 101170 - DNA, 122 bp, Homo sapiens
agagtacagcctacactattgtgtctggcacagagtaggtgctctaaaatgtcatttaagcgagtgaatgaacaagtaaaacttcctggtagtttgtaaaagcaaattatctttctgtagaa

SEQ ID NO: 101171 - DNA, 122 bp, Homo sapiens
tagtgtatggtgaatccacttgaatttttgcaaagaagttcagttattgatgaacaaaagcgtagtctcatttatggaaacgttgtcaggactccacatatagtgaaggtttgcaccaggct

SEQ ID NO: 101172 - DNA, 122 bp, Homo sapiens
ctgtctccccgctgagcccaggcacttgcccaggccgccctgcaggaccactgcaataaacgccttctcctgccactgtgtgtccggctggagcctggaggggatgcagaaatagggcccgg

SEQ ID NO: 101173 - DNA, 122 bp, Homo sapiens
ggaggcgccgaagagggtttcccgctttgagcgcgtcaccctttgcgccttccagcttggcgcccctgtggcagctccgacagtggtggtctccgacctgcacctcagctcttcctgtcagg

SEQ ID NO: 101174 - DNA, 122 bp, Homo sapiens
aacgaagccggtgcggcgagcggacggaaactgggaggaaggcgcggcggagtggaagcgcgagcccagaacttaacttcgcggggccatccacatcgaggctcctcggggtccgccgcacg

SEQ ID NO: 101175 - DNA, 122 bp, Homo sapiens
gggacgtgaggagcccctctgcctgtctgcccagtctggaaagtgaggagcgtctctgcccggccgccatctcatctaggaagtaaggagcgcctcttcctggccgccatcccatctaggaa

SEQ ID NO: 101176 - DNA, 122 bp, Homo sapiens
tactaacctatacacccagaggatatttaacaaggggtcaatgaggcccaaggctgatcacgggactgactaaaaggatagaagatggatggacacacagacagatagatagatagatagag

SEQ ID NO: 101177 - DNA, 122 bp, Homo sapiens
ctaggttggtcttcaactcctgagctcaagcaatcttcccacctcagcctcccaaagtgccgggattacaggattgagccagggcacccagcctctaaaattcttttatcagctaattgaga

SEQ ID NO: 101178 - DNA, 122 bp, Homo sapiens
ctggaaggacaggtggacacggccacagagagcctagtccattgtttcccgaaagccagccgtttcctcaccacttcacgaattctgtgatactctcttaccacctttgccactatgtactc

SEQ ID NO: 101179 - DNA, 122 bp, Homo sapiens
agtcccaggagaccaggttctaattttggctctgccagtatggaggatgcgatcctcactcgctccatttaacttcaataggtctttgtttctgcctccctaaaatcagggagttagctgag

SEQ ID NO: 101180 - DNA, 122 bp, Homo sapiens
tctacttcctgaagacctgaacaccgctcccataaagccatggcttgccttggatttcagcggcacaaggctcagctgaacctggctaccaggacctggccctgcactctcctgttttttct

SEQ ID NO: 101181 - DNA, 122 bp, Homo sapiens
ctggcagacacactgtctcattcaactgtgcacaaacagtccaaactcactaaagatttgcgttctaaaggttcatttttaaattgattggttggtattggggacacattttttcccctaga

SEQ ID NO: 101182 - DNA, 122 bp, Homo sapiens
gctgaagttccacaccagtcgccctgagagctttgccatctacaagcgcagccgcgccgacggcccatgggagccctaccagttctacagcgcctcctgccagaagacctacggccggcccg

SEQ ID NO: 101183 - DNA, 122 bp, Homo sapiens
tcaccctgtgtcagcgactgggcagtgcgggagggtggggagctacggggtcgcccgggtcgggtgctttctgggttgacctaaggctgagtttagggaccgagtgcatcagagcagccaga

SEQ ID NO: 101184 - DNA, 122 bp, Homo sapiens
aaccgagattagggacttttcaccaaagccctctaggatttaaacccacgtaggtttctgcgtctctttccgttatgcccacttcaggatgaaaggcacggatctttgttggtagaaagtta

SEQ ID NO: 101185 - DNA, 122 bp, Homo sapiens
ccctccatcaccgagcccccccccccaccttctgtttttccagtatcgcagaatccgatccgttgctccctctggactggaatccgtatcctcggcatttcatcattccaagattctctact

SEQ ID NO: 101186 - DNA, 122 bp, Homo sapiens
agcacttctcttctggccatggaactaagtacagtggcactgtttgaggaccagtgttcccggggttcctgtgtgcccttatttctcctggacttttcatttaagctccaagccccaaatct

SEQ ID NO: 101187 - DNA, 122 bp, Homo sapiens
tggagcatgaccaggggaggaaaaatacatccaggcaaagggtatcactgttgcagtattcgtaaaaaaaacacgagctgggaattttaagtaagggagctgagctcctgtggagagtttga

SEQ ID NO: 101188 - DNA, 122 bp, Homo sapiens
tataagactctggcaacactgttttagactgtggggcatgggaacgttagatcccctcatcgccgttctgaagcccgtagctgttcgccatagaggagcaggccgcggcttctaagatggcg

SEQ ID NO: 101189 - DNA, 122 bp, Homo sapiens
ggttgggggtcttctatgcggacagctcaggtttgatcgttgtgcctgcagttctggaggcgacctgcagatggcgtgcgcgtccttgggaggcgttccgtcctcccagagatggaacgaag

SEQ ID NO: 101190 - DNA, 122 bp, Homo sapiens
aaatgggctagctgggaagggagcttagttttgaaaggcacatgttggcattagatgtttcggatttgagattctgaaagctggatggaaatactgtgcctgagcaatctaccatgaacctg

SEQ ID NO: 101191 - DNA, 122 bp, Homo sapiens
atcaccccgcccaccaagtgtcccctcttcttcctggaatagtctcggtgcacagcctcacgtaacagggccctcctgatatggcgagactccgcgctcctcgtcactcacggggcaggcgc

SEQ ID NO: 101192 - DNA, 122 bp, Homo sapiens
gatgggctgaatttcgttcttaactcgcttccccagccccacccggctccacctgtaaagcggagatttcctaatctggcccgagcctgacaccatgtggccacttgtgagaattgcatcca

SEQ ID NO: 101193 - DNA, 122 bp, Homo sapiens
ggtaattgatcaactgagtgccacttagcccccgaaaacagagaccctttgtgcccgcctcgcacccgctctgctaggtagcaaccgaacccccagagacatcggagcgggcgctgccgagg

SEQ ID NO: 101194 - DNA, 122 bp, Homo sapiens
taggcaaagccacgcacctaaaattcagtagcagagtaaggatgccaccaaaagaagcttcgtccccttctcccttgcccttaaaattccaactgatgccataggaagcgtagcctgtctca

SEQ ID NO: 101195 - DNA, 122 bp, Homo sapiens
ttgctcggtaaacacttattgggccccgggctgtgcacaccgccgcgggggaggggcgggcgacctgaaggcctggactccatggcctctgccagggatgccgggtccatgggccatcaatg

SEQ ID NO: 101196 - DNA, 122 bp, Homo sapiens
cagtttacctatgatgttcaccgtactatccacttcattttttatagttgaagtcaggaccgcatactcaggagaaagatcacttactccattactaagccccagagatgactcaactggtt

SEQ ID NO: 101197 - DNA, 122 bp, Homo sapiens
tgccgctgccccagtcttcgacctgctgatccttggatcctgaatctgtgcaaacagtaacgtgtgcgcacgcgcagcggggtggggggggagagagagttttaacaatccattcacaagcc

SEQ ID NO: 101198 - DNA, 122 bp, Homo sapiens
accgtagaagggtgcccagcacagcacataggccgtgagaatgcacatgagcaccaggaccgtcttcctgcggcagcgcagccgcttgcgaatctgctccgtctggaacccagggactgcct

SEQ ID NO: 101199 - DNA, 122 bp, Homo sapiens
ccaaggggcacccggaggcgctgcgatgggacgcgtacttcccagtgatgtggccctggccgtcgcacccggggaccggacacctgtaggcaggcagaggtgacacactttattgtctggcc

SEQ ID NO: 101200 - DNA, 122 bp, Homo sapiens
cacgactcctgagtaggtgcttctcaagccagaggcgggaagcgcaatccaagaagtgaccgtctccttgcagtttcatgacagcacctcctgtagttgtagcagatgaaagctaaacagat

SEQ ID NO: 101201 - DNA, 122 bp, Homo sapiens
cctactttgtactgggcacactggagagcaaaggtggtaccatctatgccctggtggctgcgggtggacacaaacatgtgaccaggtaatggtgacatggtgtggttggggtgcaatgggtg

SEQ ID NO: 101202 - DNA, 122 bp, Homo sapiens
tggaagcccctgggaagaggaatttcaagaaggaaaatcagaaacaccctgtctgtgctacgactgcccaggatcctctgctgtggcaacatatatcactggccaccccactgtgccgtgtt

SEQ ID NO: 101203 - DNA, 122 bp, Homo sapiens
agaactacgaacatcctctttctagttctaaagagaaatgagtggatggactctactggccgtgggtagtaagtgtattcccagctgggatgcctttgtggctattcttccatgtttctgac

SEQ ID NO: 101204 - DNA, 122 bp, Homo sapiens
cttgcagacaggcggctctcctgggctcacctgtgagcccacacgcagagccacctgcggcgtttgcgcagagcctctgcggccaccaggaagtcacacagcccttggtgggtccgcagtgg

SEQ ID NO: 101205 - DNA, 122 bp, Homo sapiens
tgcccatctgagcagagtgcttcatgaagtcaaatgcagtttttcttctcggaaaggaaccgtttgccaagcacgcgcccttgcctctcggtctggtgccctttcaggatgagcgtgtggga

SEQ ID NO: 101206 - DNA, 122 bp, Homo sapiens
agatcggggaccgtcttttgaagagtcagtccctccttagttgcccgcctcagctgaggccgccgccattttcttgctgtccgccgtctgcagagcgcgccaagctgcccggagctctccga

SEQ ID NO: 101207 - DNA, 122 bp, Homo sapiens
gcagggacagaccggcggggggcggcctggtacttcaggtcctggcacgctggggactggcgctcaccttaaaggagtccacaaactcgtcactcatcctccggagctcgcggccatagcgc

SEQ ID NO: 101208 - DNA, 122 bp, Homo sapiens
ccaggctagagtgcagtggtgccatctcacctcagtgcaaccactgcctctccattcaagcgattctcatgtctcagcctcccaggtagctgggattacaggcaggtgccaccatgccaggc

SEQ ID NO: 101209 - DNA, 122 bp, Homo sapiens
aattccttctctccttcaaatacaatatgcgcatctaacaatgtgctatttgcttctactcgactaagttctggaagtgaatttttagcctatactgaaatggtaacttcacctccagtctg

SEQ ID NO: 101210 - DNA, 122 bp, Homo sapiens
ctcactgcaacctcagcctcccgagttcaagtgattctcccacgtcagcctcccaagtagcggggattgcaggcacccgccaccacatccagctattttttgtattttttagtagagacggg

SEQ ID NO: 101211 - DNA, 122 bp, Homo sapiens
tttttgttgtttctgttgttctttgggcttgaaataggatattctggctatctagcgttccggcaaactaagagttactgtataggaagtgtgaaaacaaagtcagtaagattgattccaaa

SEQ ID NO: 101212 - DNA, 122 bp, Homo sapiens
ggagactaagggaattcggggcactgggggcgtttgctggaccagcgctctcgacggttgcgcacgccagccagctctcagtgttgaggattcggaggccctgccggtcccccgcgagtaaa

SEQ ID NO: 101213 - DNA, 122 bp, Homo sapiens
gagactgggagagggcggcagagaagagaggggggaccgagagccgcgtccccgcggtcgcgtggatttagaaaaaggctggctttaccatgacttatgtgcagcttgcgcatccaggggta

SEQ ID NO: 101214 - DNA, 122 bp, Homo sapiens
agaaaacaagggttttggcaaatgaatgaagacggactcccggcgtggaagctaaagacacgtcagccctgagcgcgaggggctgggggtggagcggagccggaggtggccaaaagaaacag

SEQ ID NO: 101215 - DNA, 122 bp, Homo sapiens
gcatcttctggaagccttgcggagtcaggagcccgtaggtaaggctgtggctggggaacccgacggggagcggcccggcggggcggggcgccgaggggcaggcgggtcccggggatggtccg

SEQ ID NO: 101216 - DNA, 122 bp, Homo sapiens
aaggacagatgtgaactctgaggcccagaactgctggatatttagagacccaccagctcccgtcctaccttggcagaaggctggaggctgcacagactcatctgggaaaactggcatttgag

SEQ ID NO: 101217 - DNA, 122 bp, Homo sapiens
gtggctgggtcgccaccccagcgtttggccattaccacatcagaaagcaatgaaatcacccggcgggactgtgaggcagatcggacttttgaatataagcccctgtgaatcctatccatgga

SEQ ID NO: 101218 - DNA, 122 bp, Homo sapiens
gctgacattgtcagttaagttgggcagatctgacttcgctgattaagtggatgtatgagccgatcctccccagaagctgggatcagcttccccatctgatggtgagtcagacctgctggggt

SEQ ID NO: 101219 - DNA, 122 bp, Homo sapiens
gagacatgtgcatcccacgggggaattagaccttaacccaaaggaatgtggctgtgatggcggaatttcaggcagctcggcgtgggggtgggggcccctcacatcttaccacccatgaagaa

SEQ ID NO: 101220 - DNA, 122 bp, Homo sapiens
cccgcccccggctccggaaagccagctccagccctctcaggcccagaagcctgcagtctccgcccatgccatcccctcagaggcctgacccgcccggacccacctccgccccgccccgcctc

SEQ ID NO: 101221 - DNA, 122 bp, Homo sapiens
tctccatttctacgcgtctgccgtcccagtacatctatggctttggggaaactgagcacacgactttcagaagaaacatgaactggaacacatggggaatgtttgctcatgatgagccacct

SEQ ID NO: 101222 - DNA, 122 bp, Homo sapiens
agcaggtggccccgggggccgtggagccttcgcctgccggcgaggctggagcaggtaggacgcagcgtgcgcgcctgggacccggctgggatgggcttctggggaccctgcccgccggggtc

SEQ ID NO: 101223 - DNA, 122 bp, Homo sapiens
atttccgactcacagggctgcggagcagcaactctcacgatatttgctgcgacccgcaggcgctatccgctgccgggttctggcgcgccctttcagttctgcttgctgtcggcaccgctgcg

SEQ ID NO: 101224 - DNA, 122 bp, Homo sapiens
aacgggcttagcaccggcaggttctggttggccctttgctgctgtgtgcgtgggtcccttcgtctctcctctctccctccaaggtgggatgtggtaccctgggagcacctgtgctgagtctc

SEQ ID NO: 101225 - DNA, 122 bp, Homo sapiens
tggaggtgagcccagtcctaggatgtgcaggccctctcctcatgttttttgccctcagagcgccttaccttgcccgaatcgagctgtgcggtacacctcctccacaccgcggaagccgagca

SEQ ID NO: 101226 - DNA, 122 bp, Homo sapiens
gcggcaggccgggaggtcgggaggagcccttggggcggcgtggccgggcttgagccacgacgaataacgggcgaggggcggggaggggccgaaagtttgccggggggcgagaggagagggcg

SEQ ID NO: 101227 - DNA, 122 bp, Homo sapiens
tccagagaagaggttgaggatttaagccactgagggggtggagctgggcagtgagtaggacgtcaggcttgcaagctctgggattaggccgaccagagcccatatcccagtcccgcctctta

SEQ ID NO: 101228 - DNA, 122 bp, Homo sapiens
ggtcgatgacctctcggtagtttcaaagggggctggagggggatatttgacttgttttttcgaaatgtagccttctaaccctcaagtctttagaagctgggtggactcttagtggtcctgca

SEQ ID NO: 101229 - DNA, 122 bp, Homo sapiens
tgttacctacttaggccatggaatgtctcaagttactcaaactcacccgcaaaggccttgcgtcacttgcgttcctcctgatctcgaaggcaggtgtgcacacttagcagctggctgttgct

SEQ ID NO: 101230 - DNA, 122 bp, Homo sapiens
acacatccagaggtgcccacgagtgtattcggggagaagcttcgagaacaagttgaagagcgactgtccttctatgagactggagagataccacgaaagaatctggatgtcatgaaggaagc

SEQ ID NO: 101231 - DNA, 122 bp, Homo sapiens
taagaaagactttgctgatgacagggtttcctgggagtccatgcgtgcctggagcagcagcgtctccagggacaggcagccaccatgagcctcagtgaggagcaggcccggagctttctgga

SEQ ID NO: 101232 - DNA, 122 bp, Homo sapiens
tgaagcaaagtcataattaaaatatgtggggaaattttgtaattgttccctaaaactgcacgtttgtaaaagactctatgtgttactaatgaatatgtatatatgtgtatttaggatgttag

SEQ ID NO: 101233 - DNA, 122 bp, Homo sapiens
tattcatttttgaggggagtatcacagaagggttctcactgcatcatagcaggagtagtgcgataccagtttgtttcatcacctggctaagatggtatctacattcatttgtcttactatgt

SEQ ID NO: 101234 - DNA, 122 bp, Homo sapiens
gcgcggcaccagaacccagaccccgaattaccccccgcgcgagtgcctccgccccgcggccgacagccccagcccgaacggcttcccggagcccaacgcagccaccacctccttcgccgctt

SEQ ID NO: 101235 - DNA, 122 bp, Homo sapiens
agcccccgacggcgcggccagcgggcgcgcccgcgctccccgcaccccgcctggccctgccggccacccccgcgcgcagcctagtcccccagcgccctgctccgccagcgccccgtcccgcc

SEQ ID NO: 101236 - DNA, 122 bp, Homo sapiens
ttaaccacgccaccctggaggacccagagaacacaccctttgccagggctttaagaaatgcgttggtgaagggagcatcagaaccctgacaaagccctgaggtagctgtccccagcagcctg

SEQ ID NO: 101237 - DNA, 122 bp, Homo sapiens
cgctacatggagaagagtggcaagtgcaacgtgcaccacggcaacgtccaggagacctaccggtacctgagtgacctcttcaccaccctggtggacctcaagtggcgcttcaacttgctcgt

SEQ ID NO: 101238 - DNA, 122 bp, Homo sapiens
cgccaggtagaactcgtcgtactgcctcctgaagttttctcctttgtagtagttgctagccgccacgatcacgtccacggtcaccatgctcaggatgaacatgtggaaaacggatgaccgca

SEQ ID NO: 101239 - DNA, 122 bp, Homo sapiens
tccggtgctcggcggctactctagccctcagccgggccctgggactctatcccctaaggccggttctctatggtcgacatcgcccctttgtcccgaatttcctccgggaggacgctctggtg

SEQ ID NO: 101240 - DNA, 122 bp, Homo sapiens
caaatgataacaaatacccaaaatagcgtacgtgttactccagaacaggaggaatggccacggggaagggagagggcgtgggctgtcgctttaggtttggcgaccagggatggggagggaag

SEQ ID NO: 101241 - DNA, 122 bp, Homo sapiens
aaggccatctcatgcttccctagggaaaagcccgaggcgcccaaggaatgtttgccctggcgaaagccgaaaaggggaaagaaaaagcaggtagcagagagggacagagaagccactaaaac

SEQ ID NO: 101242 - DNA, 122 bp, Homo sapiens
gaggctctgaggacacagcgttgctcataataatagctcgtatttattgaccacttacaccgtgccgggctctctattaaaccgttaacgcgcattaatcttcacatcagctctgtaaaatc

SEQ ID NO: 101243 - DNA, 122 bp, Homo sapiens
ttagtagctgggaaagaaactgacaaggtaacagacaaggccgtggcgcctgcagctcagcggactaaccgctgcgtaaccaatccgtggagccaagctgaccacctcgcgggtcctgcgca

SEQ ID NO: 101244 - DNA, 122 bp, Homo sapiens
cccaactgccagtcctctggtgttctcagctgtcctgtgttctgccttccctcgggcatacgtgagtcagaatgtcagcaccattaaaggaccagagcgccaagtttcttaatacgggtatc

SEQ ID NO: 101245 - DNA, 122 bp, Homo sapiens
ccccaatgtggagtgcaaaagcatgaggttcggcatgttgaaggaccatcaagctgtcaccggcaacgtcactgcgtttgatggatctattctctatctgcctgttaagcttcaacaagtga

SEQ ID NO: 101246 - DNA, 122 bp, Homo sapiens
tcattagttgataccagttcaagtcaggctttctagaaatctcattgtatgttaggggttcgattagagtacagtcatgcatcacttaatgaatggccacaggatacattctgagaaacgca

SEQ ID NO: 101247 - DNA, 122 bp, Homo sapiens
attgccaggaggcgagactgagagtgtcacagggattggacttgacctcagacatcttgacgctcaaaccaggattctagcagttgagttattcagtttcacgttaatccacaggcagacgg

SEQ ID NO: 101248 - DNA, 122 bp, Homo sapiens
tccaggccctagaattagacctcttaagaaatcatttatgtccattagattatttctgttcggtttttattctttcctatcaccaaggaggttaatgtcttcaactgtctgaggaactacac

SEQ ID NO: 101249 - DNA, 122 bp, Homo sapiens
ggttagtacttggatgggagatcgcctggaaataccgggtgctgtaggtttttggcttcccgctccctctctctttcccccttttgtcgccgcgcttttcaaccgccccctaactctgctcc

SEQ ID NO: 101250 - DNA, 122 bp, Homo sapiens
gccggggcaccagcagcgggtagccggcaaactcccgcggcgactcacactgcaggcggtcgtagttcttggtgacgttgttgaagaccaccagccaggccaggaagccgaagaggtcgcac

SEQ ID NO: 101251 - DNA, 122 bp, Homo sapiens
ctttcgtcagtagattccccttccccacgagccaaagtcctccagccagttggcagggagcgctcctatcttaaacactttttttttgaggtctgtttgtaaaccactgcgtaggaagtaag

SEQ ID NO: 101252 - DNA, 122 bp, Homo sapiens
ttaaggaacaggacctagtcttgcctcgttgtggaggtactttaccttgttatgttaccccgtaacaagggagtggggcagagcagtgtactcaaacttgtttgtccacttactagaaggcg

SEQ ID NO: 101253 - DNA, 122 bp, Homo sapiens
ctcccaattctctggatctcaactataggttcaaagcagcacatacacacacccattgggcggtgcacactcttcttaagtttcagataattggatactaaaaggaaaacagcatttggctt

SEQ ID NO: 101254 - DNA, 122 bp, Homo sapiens
agtggaagggagggggaacgcaggggagggagaggaggggaggagccgcgcggcccgcgccgcttccgaaccggaaagttggtcttgccgaagtcctgccaccccggcgtgcgcactccgct

SEQ ID NO: 101255 - DNA, 122 bp, Homo sapiens
gtaggcatggcggctggagagtctgatctatgtgacacctccactgtgactagggtataacgtgaataatttgtatgcagtaaagttcctctgcattacatcattgacagatctctagtaag

SEQ ID NO: 101256 - DNA, 122 bp, Homo sapiens
agcctctcccgcctcgcgcttcctcgggggcctggacgcggcgggaagcaacaaggacgacgctgatgcgcccggcgtctccatcgctatcccaggaaaaagctcgggcccagcaggcgcgt

SEQ ID NO: 101257 - DNA, 122 bp, Homo sapiens
aagcgacagcccagatttaagaaaacgaaacctagtgcagctggggcacttccgggatctcgctatccggccgccacccgcagctgcagcacagtcatggcccaggcgtcgccgccccggcc

SEQ ID NO: 101258 - DNA, 122 bp, Homo sapiens
ttgcttcagagcatgcgcgcgtgtcgtggtgaacggtggctcccaacaactcagtccacacgaatcctcagaatgtgacctctctggaaacaggggccttgcaggtgtaatttgctatggat

SEQ ID NO: 101259 - DNA, 122 bp, Homo sapiens
gggctcacagtcgtagctggaaggtatgtgcttcccaggcacaggcccagggccaggatccggctggctgcagattcccctgggggttctgaggaggggccagaaattgacttttttttttt

SEQ ID NO: 101260 - DNA, 122 bp, Homo sapiens
gtcccgcccccacgctgaaactgacacttcggatcgccgagtaacgctcaccagacgtcccggccctgcccctcacctgaccaatcaagacggccggccgaggcccctggaacggctcaggc

SEQ ID NO: 101261 - DNA, 122 bp, Homo sapiens
aagaggagacagtagctgaaatccttttttaaatctcttgagttagacacactgatatgccgaaacttgaagtctacccactccaggtacagtattcctaggagggaaatgctgcaagggag

SEQ ID NO: 101262 - DNA, 122 bp, Homo sapiens
caaactcctgacctcaggtgatccacccaccttgacttcttaaagtgcttggattacaggcgtgagcctccatgccccaccaattgtcttggctttatagttaggagtggaattgctgagtc

SEQ ID NO: 101263 - DNA, 122 bp, Homo sapiens
ggacggcctttttcaggccagccccaaagtcatacaacagcacgaggctgccttcttgcacggccaagcacaggaactggctctgcagaaacagggcagggttagtgtggggcagggtcagt

SEQ ID NO: 101264 - DNA, 122 bp, Homo sapiens
aaacagaaggtgccacaacaacctgcaaagccagtgtgaaggaacagcttgaaaaaacttcgaatttctactgactacagacaaatccaagtgctgatatttttatatcaattactggccaa

SEQ ID NO: 101265 - DNA, 122 bp, Homo sapiens
ctgcggacgcgggtgacctcagcaccatcctctcacccatcaaacttgtccagaaagtggcgtctaagatcccgtcccccgatcgaataacagaggagtctgtgtctgtagtttcttctgaa

SEQ ID NO: 101266 - DNA, 122 bp, Homo sapiens
ctgcagcagatccaaagcctggactgacctctgaagttctcaagaagacaactttaacctcgcatgtccttagtcacggagaaagtccgagaacctcttcttctccaccgtcctccagtgct

SEQ ID NO: 101267 - DNA, 122 bp, Homo sapiens
agccctcactaaattgtcactgctggcagaccgcagtaactcggtctgacctcaagcacccgataaaagagttcttgtccgtaaagtcagttacgtaggagttggtaatctcgggttttcat

SEQ ID NO: 101268 - DNA, 122 bp, Homo sapiens
ctcgtggactagatctttcctatttgggactctgacatcctgattttgatgcctttaaggcgccagaacatgttcataaactgtgactgatccctgtaactgcttttttcctaagtagagat

SEQ ID NO: 101269 - DNA, 122 bp, Homo sapiens
tcttctctctctggctgcttttaaggttttctctttattactggctttaggcaatttgatcgtgatgtgctttcacatatttttctaaatgatttttgtgcttggagtttggggatgttctt

SEQ ID NO: 101270 - DNA, 122 bp, Homo sapiens
tagactgtgaagcactgaatctgggctgagccatagcagacaggctaagcctggccgcctcgccctcctcttgcaggggggagccttctgtgctgtgagtcctgcccagcggccttccaccc

SEQ ID NO: 101271 - DNA, 122 bp, Homo sapiens
ctagttggggtggaccaaagagcctgcctgttcccgccccacctggggaaatggggaccacgccttctgctccaccacaacgcaatcggaggaaatctgttcaccgagtgttggcggaactg

SEQ ID NO: 101272 - DNA, 122 bp, Homo sapiens
accttttttcattgactccatcttgagcatttcccccaacacttagtcttctcttaccagcgtgttggttggcagcagggaatttcatcatctagagggattagaattcacttagcctttcc

SEQ ID NO: 101273 - DNA, 122 bp, Homo sapiens
tctgactccttccatataaggggacactgtccagggccgggcccccaccagcccgcccctcgaaaagctcctcaggagcccctgaggatgcacagacccaagaggatctggatgcgggacac

SEQ ID NO: 101274 - DNA, 122 bp, Homo sapiens
tgcagacggagtctcgttcactcagtgctcaatgttgttgcccaggctggagtgcagtggcgtgatcttggctagctacagcctccacctcccagccgcctgccttggcctcccaaagtgcc

SEQ ID NO: 101275 - DNA, 122 bp, Homo sapiens
tgaaaagaatatctctgtgtcttcatgagctgctgaagggttactaaattttctgtgggacgtataggcatgtattcaggcagtcatatgaacaccattagttccttctgaaacaagtagtt

SEQ ID NO: 101276 - DNA, 122 bp, Homo sapiens
ctgtgtgagaatttggggggatataaaaccagaggtggaattgctgggtcatagagtatacgtagaactcacctgtctaagtagcactgaattctctggaaaagctgcaccagcatactctt

SEQ ID NO: 101277 - DNA, 122 bp, Homo sapiens
ggagcgagggcctgggcggagctgactattcctgcctgggggtccaggtgagtgatgctgcggctgcttcccggtggcagaggcagagatgaggagtgcggtggattctggagagattctga

SEQ ID NO: 101278 - DNA, 122 bp, Homo sapiens
gtgggtcagatgcaagttagatcaaaaagaggaaggaagctttcctggggaacctcagctcgaactggcagaagaccatggatgagtgtttggggcaccattctggaagagaaaggaagaga

SEQ ID NO: 101279 - DNA, 122 bp, Homo sapiens
gccgtgctgctgcccaagaagacggagagtcagaagacgaagagcaaatgaccctgacgccgccctcagggagctggctcccccagcaaaggcccttttcatggtcgtcccgcaatgctttt

SEQ ID NO: 101280 - DNA, 122 bp, Homo sapiens
gcttggtgccacagggtgctcacatgtgcaaggcgtggtgactgcatggggatcagaggccgggcattagtgagggactacgcttgaagcccttagaaggtgcctggccattttgtgttccc

SEQ ID NO: 101281 - DNA, 122 bp, Homo sapiens
ggaaactccgcgcggggccgcccctctcttcccaggcctcaccagccccagcgcagccggcggcaccaggccggtgctcacggtgttccaggccactaacaactcctgtccgggccgggagt

SEQ ID NO: 101282 - DNA, 122 bp, Homo sapiens
gttagtagatacactgggctcttcatattcatggatttaacatttgaagttttgactactcgcgggtgaccccagtgttctgagtaatcaactcccagtgttctttgtcttcctttccagtt

SEQ ID NO: 101283 - DNA, 122 bp, Homo sapiens
gtttgaggagtgctgctgtgggagtatctaggacgactctgggagagagtggggcaggcccgaaatgagatcaacactgatgttgtcccagaggtgtctggaggctgggagtgggtgcagca

SEQ ID NO: 101284 - DNA, 122 bp, Homo sapiens
tggtgcagtcttctatactgtccttcacagcttagattcaatctttccttaaagtgtagccgggatacacaggagtgtgattctgggctgactcaaagttcttctcttgaaggctttttcct

SEQ ID NO: 101285 - DNA, 122 bp, Homo sapiens
acagggtgcatggtcacctgcagtggatggtgtgggcggcacggggtgcgtggtctcctgcggtggatggtgtgggcggcacggggtgcgtggtctcctgcggtgggtggtgtgggcggcac

SEQ ID NO: 101286 - DNA, 122 bp, Homo sapiens
ctaacatcccagcttattcccaaaagggtttgagccggacaggggctaaacaggccccttcgacttggcgggccggccagacgtgacagcaatgccaaggaggccaagtttctttgtccatt

SEQ ID NO: 101287 - DNA, 122 bp, Homo sapiens
acgcctggagccgggcggacgtggctgggccgggctgtcggggcgggcaggcgccgctgccggtgtctaggccacaccaccctgagcgcgccccagctcctctgagctcgtgaagctaagca

SEQ ID NO: 101288 - DNA, 122 bp, Homo sapiens
agggtgcctggatggaggggcaggcccaggccagacgcacactcaccactggagttgattcggaagacgttggccgacatctcctggaacagctcctggaggttgcacggatcgacctgggt

SEQ ID NO: 101289 - DNA, 122 bp, Homo sapiens
ccaggcctagtggccagtgaggcccgcagcagctcacagcctgcaggggtggttttgaggcgggggctacaagcactcgccggggccgcggcgctgcgggctccatcgggcagctcgcaccg

SEQ ID NO: 101290 - DNA, 122 bp, Homo sapiens
gtgcagcctatcaaaggttcacattatgaggatcgagtcaagctcaactatgaagggttccgagaacatctcactttgcttctcctgcaagagtaagtaacatgatataactacgtttcact

SEQ ID NO: 101291 - DNA, 122 bp, Homo sapiens
gcggcgacggtagccgaaggagttcaaaagacctctagtgcgcccaccgcaggtgacagccgaagttcatttcgtggtctgcttctttcctgtgtgaccttgcaaaacgggcttgacctcct

SEQ ID NO: 101292 - DNA, 122 bp, Homo sapiens
aggaaggaaggacacaaagaaggataaatccaggcgctgaagatacagaaacaattaaggcgtaaaagtttgaacacttggtaatgcaaatagtaatactaaccataatctaatctttagca

SEQ ID NO: 101293 - DNA, 122 bp, Homo sapiens
cggggccgcggcggcgcgggtgctccgggccgaggccgcggtaaagtttagcttgaagaacgcggccgcgctggagcaggggtggtggacggggccaggcgcgaggtggcggcggctgcggg

SEQ ID NO: 101294 - DNA, 122 bp, Homo sapiens
gggaaatgaggagatgaggagagacaggttctcagtcatctcacctgggcccgtgcctcccggtggaaacggagggagctgcttccccgtcactgcaccttcagaaaaacagacgaccccac

SEQ ID NO: 101295 - DNA, 122 bp, Homo sapiens
acggggtgggggctgctgtagatagacccttacgcccagagaactgctgggaggctgtggcgcgaggcgggactcaaatgctggaggaaggaggtgaggagtggtagagggagcgattgtca

SEQ ID NO: 101296 - DNA, 122 bp, Homo sapiens
tggcggagtggtccctacttggtcacaccttgctggggaattggaccctccgccccaacccgcaagcccttaaggtcactagtttgtggccagtaggtgatataacgatagtaatgatgatg

SEQ ID NO: 101297 - DNA, 122 bp, Homo sapiens
atgccgggagaagcagcttctgcaactcgctcccctgcatttacccatctcgctcatgcacgaagtatggcttttgaaacacgatgtgcagacccatctgtgagtggcagctccactgtgag

SEQ ID NO: 101298 - DNA, 122 bp, Homo sapiens
gggcgtgagcactgcccacatgcctggccaggcctgcgtcctgcacccctgtcccagcggcgccctctctgtgtcctggggctggcacctatggccctcagtgcagggcctggccactcccc

SEQ ID NO: 101299 - DNA, 122 bp, Homo sapiens
acacaggagtacagaaatacattagctccaaaggtcatgcctccaatcactccgttccctcggggctgccaagtacctcaatccagggacatagcaaagttgagacagttcagattcattgt

SEQ ID NO: 101300 - DNA, 122 bp, Homo sapiens
agccacacatatcacttcttataacacattccactatccaacatgttcaacaggaaaaagcgacctctcaatcggggtgggatgggctagacggcggctgcatcagtgacttccccttggtc

SEQ ID NO: 101301 - DNA, 122 bp, Homo sapiens
cccaggcgcaagttagggaagtgcttccgacaacctccccgcgaggcccgggtcgctcgacggggaggagcagctgaggccacccccgccagcccggcgcccagctctttgttctccaagca

SEQ ID NO: 101302 - DNA, 122 bp, Homo sapiens
ggcgatgacacaatctccagaacaaagacaacattgacaaacccaacaaaaacaaacagccgcgtgtgtgtggggaggggcagtcaagcgcagagtccgggaaggggatgggggaggaggag

SEQ ID NO: 101303 - DNA, 122 bp, Homo sapiens
accctcacgctcacctgtcatgactggcttcccaagcagggtccctggaggctctagcaacggggtgtgagcacacttgtcaccatcgagtggggccgacgctcccccagcgtgtgtgtgtg

SEQ ID NO: 101304 - DNA, 122 bp, Homo sapiens
tggttttaccctgagtcagaacactaagagcctggtttatttactgaccacttgctttgacgctcgtgagaaggctgttctgttgaagtcgtaatgctttgcacccagtaggagctcaacaa

SEQ ID NO: 101305 - DNA, 122 bp, Homo sapiens
cacagcagagtccatcccggcttctagacacccgcttccagctgggaaaggcgccagctccgcccacccggttcctggtgggtctcggcagttgccccgcccactcacaagcccctcttcct

SEQ ID NO: 101306 - DNA, 122 bp, Homo sapiens
tttaagaccttgatcgagcctgagggctgcagcttcagacttgccctgtaggtggcagggcggatgccaggcgcccagggacacgaggccacccaatggatgtcaagcaggaggggcaggga

SEQ ID NO: 101307 - DNA, 122 bp, Homo sapiens
aaatccctgtgaaatgtgatcaagaacacaaaatgctgaggcagctccagctaacatcagcgctcagtctccccgcccaggtgggatcctccaagcgcctcaacgcaccgcccatcccggtg

SEQ ID NO: 101308 - DNA, 122 bp, Homo sapiens
agcctccagatatccaggtgtccttccagggcagctttctggctttgggtgttaatcttccggggactgtttgtcctgtatttaagcccccttagggttggataggatggggaagtgctagg

SEQ ID NO: 101309 - DNA, 122 bp, Homo sapiens
tctactaaaaataagaaagttagcctggcctggtggtgtgggactgtagtcccagatactcgggaggctgagacagaaaaactacttgaacccgggaggtggaggttgcaacgagcggagat

SEQ ID NO: 101310 - DNA, 122 bp, Homo sapiens
agcatcaagtactagggaccatgtttgtcttggattcccccgtcccgcctgagcccagaacgcagagccggagtcaggggcttgcacatggagcgtttcacgcccaggaggctggggcaggg

SEQ ID NO: 101311 - DNA, 122 bp, Homo sapiens
tgtgtaaccctagttatacaatgaggaaaaatgcaagcactaagcatcaggaaattcacccggaaatggggaagactgccatcaaattaggtactctgtggtcaaggaggatctgtaagtct

SEQ ID NO: 101312 - DNA, 122 bp, Homo sapiens
tacctaaagcataagtgtaactgaaatgcttagctttaagccaggctgtgcctttgtagacgtagggttatttaaactcctgtagcatctttcttcagagtaatgaggaacttgacaaataa

SEQ ID NO: 101313 - DNA, 122 bp, Homo sapiens
gcggccctaacttctcccctccagagatgtcccccatggagggggacatgttccggaaaacgccaccacagcctccagacccctccaacgttcacacctaaaccgggagtggaggagctgcc

SEQ ID NO: 101314 - DNA, 122 bp, Homo sapiens
cagctttttccggatagtattaccccgagcaattgtctgcagatcggccgacagctgagacgttcaagctctgaattacggagaaagggccggagataaagccgagcacatgtatcccatca

SEQ ID NO: 101315 - DNA, 122 bp, Homo sapiens
gtgctaagagggtgacgcgagtgcccgaagccctggcctggttaccattcgcgactccctcgtcctgggttctcccattgccaggaatgttttactagtaaccatggtatagttgagacgat

SEQ ID NO: 101316 - DNA, 122 bp, Homo sapiens
tcttgtcaaagaagcaatctgaacaaataggctaagatcaattctattagaggtgaaatacggaccaagataccaacattgatcccttcagccatggcccttgcatatagttccaatgtaca

SEQ ID NO: 101317 - DNA, 122 bp, Homo sapiens
tcgggaggaggaggcgcgcggagctcccgggaggggggacaaatctctccctccgaggggcgagaacaggagactttcttctaaagttcaaaagaaagacgggctttcactcggcccccaaa

SEQ ID NO: 101318 - DNA, 122 bp, Homo sapiens
ttctccacattctcaccagcggttgttattgtctgtgtttttgagtatagccattgtagtcgatgtgtagtggtatctcatcatggctctaatgaacatttctcttatgattaatgattttg

SEQ ID NO: 101319 - DNA, 122 bp, Homo sapiens
aaaagctcattttcttctcctgtcctagggtttcactgatgaaggcctctgggacacccacgttgggggtgggggcggtgaggaccgccacctgcccgcggctcccctgcagccaggccacg

SEQ ID NO: 101320 - DNA, 122 bp, Homo sapiens
ggtgccggccggcgcgggcatggggagggccggcgccgcggccaacggcaccccgcagaacgtccagggcatcacctcctaccagcagcggtgagtagtcccgcctgggctgggatagtgcc

SEQ ID NO: 101321 - DNA, 122 bp, Homo sapiens
gcacgcccggaaccaggccccccctccccgcccccaccccacccacccgaccgacgcaggcgcagcctggggagctggcagccccaccagacctcccgtcgccatggagatgcccaaagggc

SEQ ID NO: 101322 - DNA, 122 bp, Homo sapiens
gagcgaagcgagaaagagcaaactcgggcgaagtttctttgctgcggtgtcgctcctaatcggaggagacagggagagagttaaaatgcaggaaccaatcgcttgaatggtgatgtaatgca

SEQ ID NO: 101323 - DNA, 122 bp, Homo sapiens
gcttatttcgcttagcataatgtcctccaggtttatccatgttgttgcaaatgtcaggatcgccttctaaaggctgaatgatattccattgtgtgtgtgtgtgcgtctgtgtatatgcgcgc

SEQ ID NO: 101324 - DNA, 122 bp, Homo sapiens
cctctcctctatcaccatgcccaagatggccagtcttttcctgatgggcatccaggagatcgagttcaacatttgcctggcccagatgttccttatccatgctctgtcagccgtggagtcag

SEQ ID NO: 101325 - DNA, 122 bp, Homo sapiens
cccagggaggctcccagctgcaggcaagggggttcccaccagctctctgctccccaggtccgggtggcccccagcctctagatctgcagccccacctagacagggtgagattcagcccccac

SEQ ID NO: 101326 - DNA, 122 bp, Homo sapiens
gactctggagcaagagtgggctatgggacaatggtcctcagtaggaacgggcctgcatctcgttctcccagagcaaggatctgaaatccaaaagatgatcaacaaatctgcatttcggcagg

SEQ ID NO: 101327 - DNA, 122 bp, Homo sapiens
gaactttaacagaacagctaataaacaaatccacaaggtcatgccaggctccctgggacccgaggtgttgggtctgaaatccagccaaagagaccaacacatcactttggcctcccagagtt

SEQ ID NO: 101328 - DNA, 122 bp, Homo sapiens
aggctggtcatgaactcctgggttcaagtgactctcctacctcaacctcccaagtagtggcggattacaggcatgcaccaccacgcctggcctcccttgaccagtttaactcttaccttccc

SEQ ID NO: 101329 - DNA, 122 bp, Homo sapiens
tgctgaatggaattaagcactttcttgtcacaaatatatcagtttgatgattttcgggcgcggtcttgtggatgcgagtcctctcagggtcgttcgtgaggccccagggcgtgggtgcgccc

SEQ ID NO: 101330 - DNA, 122 bp, Homo sapiens
agatgtagttcgctagaaggggcgatgtgcgcctgcgcctctcgggagggacttagggggcgtcgaaaatgatgtaaagaccgagttggcggcgtggggagttgtggctcggagggcgaggg

SEQ ID NO: 101331 - DNA, 122 bp, Homo sapiens
tttaaaacagagccaagattttcttcttcactcctcgcttggtggctcccagccagaggccggcagtggtgggaggctcgctctgggtgcacagacgctgccttcagacaccgcatgctcgt

SEQ ID NO: 101332 - DNA, 122 bp, Homo sapiens
ccaccccctatccatgccaccatgctctgctgagcaccaagcatgtgccatacctgactccggccaggtgccacagagaactgcacactgccctcccggagctcccagtccagcaggggaga

SEQ ID NO: 101333 - DNA, 122 bp, Homo sapiens
attctcgatgcgttgggattctagcttatctctgcaatctaaacacttttcagtaaagttcgggggcgcaattgcgcgctgaggtcgctgtaactcctgtcggccttctctggcactcgagt

SEQ ID NO: 101334 - DNA, 122 bp, Homo sapiens
acgttggtgcaatatctgcaaagactcctttttcagggaggattgctggtcgcggggaggcggcccagtccccggtcaggctggtgcatgttctcaagcccgtcccgcgccacaggccgcag

SEQ ID NO: 101335 - DNA, 122 bp, Homo sapiens
tcggcccggccccctgcccaaccctgcccagcgcgcgggggtcggcgaaggcgccgcggacgcaccgacggctgaagagcggcgatgcacatgcactagcagcaccccctaactcactccct

SEQ ID NO: 101336 - DNA, 122 bp, Homo sapiens
ggcttattggtttgggagatgccagccctgcatcctgttggatgtatatcaaatgagattcgacctgtggaatgtccccctcctttcagattttccctgagtcttacatctcagttttgagg

SEQ ID NO: 101337 - DNA, 122 bp, Homo sapiens
tgtgagcctgtgtgtccctgagagcgtgtgcccatgtgagcttgtgtgtccctgagagagcgtgtgtgcccgtgtgtgagcctgtgtccctgagaaagtgtgtgtgcccgtgtctgttagcc

SEQ ID NO: 101338 - DNA, 122 bp, Homo sapiens
tgttaggttcctaggtcaaaggctgagtttgtgaacacagagaaacactaagagatcaaccgctcaggaacagagagaaggaaaaccgcagaaacagaactagctagacatgcaagacagag

SEQ ID NO: 101339 - DNA, 122 bp, Homo sapiens
ccaggggagaggtggcaatgctcttgcccctgagggggcggcttcctgggggtgggtacccggcgctgggctcccccaggccactgccccctgactgtccaccatccctgggggctgggctt

SEQ ID NO: 101340 - DNA, 122 bp, Homo sapiens
ttttatattcagcatctaagaaagttggtaatgacatgttctgctctttccacattagcccgtaggtggcagcaaatcattatcattaaaattaaaaggtgcagtctggaaaaaaaaattag

SEQ ID NO: 101341 - DNA, 122 bp, Homo sapiens
gtgttttgaagacctacttgatgtcaagtattgttgatcttcacaaaggaatatcattctcgttcctatcatgcagctcatatgccaccattttggtggcttttaccatttgccaggccttg

SEQ ID NO: 101342 - DNA, 122 bp, Homo sapiens
tgttccattaggttgactgcgtcatcctcttcagaaatttctgtaactgcagcctgagatcgaagaatagacgtgatgtcattagataatttgtcaaagccattctgtgaacatatatttgc

SEQ ID NO: 101343 - DNA, 122 bp, Homo sapiens
gtcatcttgatctggcaacaccattaaactgcccactaactcagagcttcccagacttctcgttggtgtacttgcagcagcaaagaaaaatgaatgtataccctggagggctttagttaaag

SEQ ID NO: 101344 - DNA, 122 bp, Homo sapiens
gcctgagtgggggcggcccggcgagggtcgcgggtgagagggggattagggggttggctgcgctcagccctgcagtgcggaggtggcaacaggttcccatttgtcctgttgctggcgctgcg

SEQ ID NO: 101345 - DNA, 122 bp, Homo sapiens
gcggtgggcgagggacagtgcaggtgccgggtgcgggggtctccgggacagtccccggcacgcgctggtccgccgtggggccctgcggtgagcggcgccccctggcgcgggggaggaggacg

SEQ ID NO: 101346 - DNA, 122 bp, Homo sapiens
gacttcctccctataggcaggagggtagctgagatgaccgcgagccagttagaggaatttcgctgcctccagccccgcagcccgccgcagtgccaaataacagacggcagagggcgctccta

SEQ ID NO: 101347 - DNA, 122 bp, Homo sapiens
aaatgaacatttgccgattaaagcttaaatattggaagaaatttctcctggggcattccacgcgtctttgcaataattactaaattagtcaattgccacctctgtaaacaaacttcgtttag

SEQ ID NO: 101348 - DNA, 122 bp, Homo sapiens
gtgcggcgggagctgccgggggtgcggcagagtgccctggactacttcatgttcgccgtgcgctgccgacaccagcgccgccagctggtgcacttcgcctgggagcacttccggccccgctg

SEQ ID NO: 101349 - DNA, 122 bp, Homo sapiens
tagccggtggcgacgtcgcccccgccccacctccctgcgcaagtgcgaggctgccggcagcgcggcgcacgctccggccgttcccggcttccgcgcaaaacttccatcctgtccacgtgaag

SEQ ID NO: 101350 - DNA, 122 bp, Homo sapiens
caggaacagatcccccccacaccccctccccgcgagggctgcaacagcgcaggggagggccggatctctttacgtcttggaaatctgcagcaaaaaggagccactaatcttcctaccccact

SEQ ID NO: 101351 - DNA, 122 bp, Homo sapiens
gtgttacagctcttaaggcagcatgtctggagtttcttcctcctggtgggctcgtggtctcgctggcttcaggggtgaagctgcagatcttcgcggtgagtgttacagctcataaaagcagc

SEQ ID NO: 101352 - DNA, 122 bp, Homo sapiens
cctcttgtgttccatcttcatttaaaaattgactcagtgaagcaaggcagcctgcaggtccgcagtttcattgcgatctaagcttggtttatgttgagagtactgagcaaatgctatggttg

SEQ ID NO: 101353 - DNA, 122 bp, Homo sapiens
cgccaggagcgaggcgtccctggtgacagcgcgtcccgagggctctcccttttcccagagcgcataccaaaggcagactcctttgcaggctccacgagccccattcgcggtggaaaggggcg

SEQ ID NO: 101354 - DNA, 122 bp, Homo sapiens
gggacctggctgggggtgtctaggtccccttctgcagctctactgttgtgcagcagggtgcgtgaacgcagtgaacgcgaacaacgcatgcaggcgcagtgggagcgcgaggagcgtgagcg

SEQ ID NO: 101355 - DNA, 122 bp, Homo sapiens
aaaaggataagcccttccccaccactaacggaggaaacaagttggctcgggatcccgggacgcagggcaccagcagtccctactcttcccgggaaggatcaatctgaagtccccggcggcaa

SEQ ID NO: 101356 - DNA, 122 bp, Homo sapiens
gggggcgggattggctgctcagttgtacggtgtttatacagcaggtgaaaccaacctgaacgttgagagtggcagagggggtagggaagggaagggctgccctgagatgaataacctgctga

SEQ ID NO: 101357 - DNA, 122 bp, Homo sapiens
ctgggattataggtgtgagccaccgtatccagccagaaatggcccttatagaggctcagacgagtgagtagtgcactgcagcagtgagggtgggtggttcggtcatgctgtagtgtggatga

SEQ ID NO: 101358 - DNA, 122 bp, Homo sapiens
ggcagaggccgggagcagggcggtgacagtggggccagggtgaccgagaggggtggccgtcgctcttacttttgagtgggccggtaactccactggggtactcctgaggagaggggattcag

SEQ ID NO: 101359 - DNA, 122 bp, Homo sapiens
ttccggacgcaattaccaatgagaaatgcccttccccgacgtctttttacctgattggtgcgctcatcagttcccggaatacctttcctacaacagattggccatcgcggtggttggcctcg

SEQ ID NO: 101360 - DNA, 122 bp, Homo sapiens
caaaagaagcttagactttatcgtgatcttagcaaaattcttttcctatagctttctggtcgttaaggtgactccctcaagggcatcagtctgcactggaaatcattgcagtgtggtagaga

SEQ ID NO: 101361 - DNA, 122 bp, Homo sapiens
aacaaataaatcaagctctgaggtgaaagaaacagtgcagttttgttgctcacagggacccgtccccacacactggagagacttgaaggtgggggctctgcccatccactggggaatatctg

SEQ ID NO: 101362 - DNA, 122 bp, Homo sapiens
aggctgctagcaaacttgtccaaactttgccctggagaagatgttatctttattgttctgcgcagggaaacagatctgcactttgccccacagagagaaactatgtatcttctaaggttgtt

SEQ ID NO: 101363 - DNA, 122 bp, Homo sapiens
ctcacagccagaggccagggttggatccagggctgggcctgggcctggggggacagtgtccgccccttccccagcctcccgcccctggtcaggccaggaccctcttcaaagcaccttcatgc

SEQ ID NO: 101364 - DNA, 122 bp, Homo sapiens
agtttacaaagtacgagctcatttgggtgattttggagggcttgatttgtggatcgtggtcgttataaccctgtgcttcacgatttatgatgtattaatgaattatagcgatgcactgtact

SEQ ID NO: 101365 - DNA, 122 bp, Homo sapiens
ccccacccttcccggggccggggaagcggcgtgactaggaaagtcacttcggaacacagccggactctgcgccaccagctggagctcgccgggaccccaccccgcgggctgggcgggggcgg

SEQ ID NO: 101366 - DNA, 122 bp, Homo sapiens
cagagaggggcaatggggcagccctaccacctctggccaggccccaaacacccgtccccccgaggggcagccccacagctctggcctggccccaaacacccgtcccctcatgggccacgtaa

SEQ ID NO: 101367 - DNA, 122 bp, Homo sapiens
tgaggagctggggaaggaacaaagcgaggcctgcgggcggcggctgggctccggcggggccgcggggtgcggggcctgcgggcggcggcccgggcggagcgttggagggaaggaggtggcat

SEQ ID NO: 101368 - DNA, 122 bp, Homo sapiens
atggcgcccagcaggaatggcatgatgttgaagccccacttccacaaggactggcagcagcgtgtggccacgtggttcaaccagaagatccgcagaatcaaggcccggcaagccaaagggcg

SEQ ID NO: 101369 - DNA, 122 bp, Homo sapiens
cctgcgtgctcttgagccaggggtggagaggcccgaccgcggggggctgccccaccccgccgcccttcaccgcgagccggggcccagaccgcccagccacgcccagagcccgcgggcggaga

SEQ ID NO: 101370 - DNA, 122 bp, Homo sapiens
ggcgccggccgagggcgctgcttggctgcggcggggagaccgggcctgggttgcggcgggcggcggcctggccgggggcgctgacagacgcgcggagggcgggggaggccgggaggtgtcac

SEQ ID NO: 101371 - DNA, 122 bp, Homo sapiens
tcatacgacgtgactgtggacgaggaactgggcgagatccagctggtcagaatcgagaagcgcaagtactggctgaatgacgactggtacctgaagtacatcacgctgaagacgccccacgg

SEQ ID NO: 101372 - DNA, 122 bp, Homo sapiens
cctgggtggcggcggcggtgagggctgcgagcaagggtgctgcgtttgcattcgggggggcgggtatgtttctgcttcaggtggagctctgtagcgtttcattatcaccccagaaatcctca

SEQ ID NO: 101373 - DNA, 122 bp, Homo sapiens
ggcaagtattcactatgggccccacgtctgttagatcttttattcatatgaccttatttccgtttcaaagcaagtatgggagaaagaacttttgttatttttccctttttgagttttactct

SEQ ID NO: 101374 - DNA, 122 bp, Homo sapiens
aaatccaggctggtgttctgtctgggctcagacatccacataaccctgtcacccacagaccgccgtctaactcaaagacttcctctggctccccaaggctgcaaagcaaaacagactgtgtt

SEQ ID NO: 101375 - DNA, 122 bp, Homo sapiens
atacttccacccttactcattcagcaagtatttactgggcgcccaccagggttgagaaagcgggagaagccgacagacaggaaagacggctttctggatctcacgctcagcgggagggcgag

SEQ ID NO: 101376 - DNA, 122 bp, Homo sapiens
ctgggctcgcctcccccacctcctcctctgcttcactgtcccgggcccagcagttgccggcgcactcatgctccgaggcctgagccaaccggaggcgagacaagcacagggccctgcgcgca

SEQ ID NO: 101377 - DNA, 122 bp, Homo sapiens
gaaacctctcaaaccctatctagtgttaaatgtataagactgcgattctgtagctaggcccggtgaggtagaggtagcagagtgtatcaagaactggaagggattaaagagacctattttgt

SEQ ID NO: 101378 - DNA, 122 bp, Homo sapiens
ggcctcctgagaagtgcccacccactagctgccgctggctcagtcgcaaagagctgggttcgcagtatttcccaccgccacccctcctccccgcccttccatctttccgtctgcccgggctg

SEQ ID NO: 101379 - DNA, 122 bp, Homo sapiens
gtaggcagaaggctctaagcggtcggaagggtttcctgtgtgtcagcaacttcactttgccgagatagctggcggaagagggaaggagcgctcgcgggccaatcgcctgccagcagccacct

SEQ ID NO: 101380 - DNA, 122 bp, Homo sapiens
acgggtgaggaggatgtgattatggaagctctgcggtcatacaaccaggaggtaagcggccgcctgaggccggggggcgggcacggagggggtggggcagggtcgtgcgcgggtagcaggga

SEQ ID NO: 101381 - DNA, 122 bp, Homo sapiens
aggtgactttaaatttcatgctgctttgatttttttaaattattgatttgactcaggccacgtctctgagcagggtctaaaataagacatggagtatatttgagcttggattcacatttcac

SEQ ID NO: 101382 - DNA, 122 bp, Homo sapiens
ctgcagtcgaagcatctcctgagaccgggaagggtagagggggaaattccagggaaagggcgcctgcagctgtgtctacaggaattagggggaaaaggccgaccagaagggtgtggtccgta

SEQ ID NO: 101383 - DNA, 122 bp, Homo sapiens
gtagggtgtctacggggcgggcccgtgtagaccagctgtgctcctcgggcacaaacccgccgtacatgccaggcctagaagcttttggctttgtggacgcaaaatctggttggagccgcctt

SEQ ID NO: 101384 - DNA, 122 bp, Homo sapiens
gtaagcagcgcagcgagtttattcaccgagaataaactcctcaaagggcaacacggagtccgagcatgtgtgcccttaaaatgttgacagaaatttccagggtatctagaagaacgcttcgt

SEQ ID NO: 101385 - DNA, 122 bp, Homo sapiens
cccgtcggtccgccccgctgccctcccagctgccgaaaagaggggcctccgagccgccggcgccctctgccggcaacctccggaagcacactaggaggttccagccgatctggtcgaggggc

SEQ ID NO: 101386 - DNA, 122 bp, Homo sapiens
ttataagttgtttaaacggaacacattttgagccttttcctgagtgatcctgtctctccccgtgtttcagtgagcgtgcaacttggtgtttcgcggtgcgggtgtgttggtgctctccaggc

SEQ ID NO: 101387 - DNA, 122 bp, Homo sapiens
atagtgagaaaaagaggggagtggtggtgtggaggatatatatttgagtcggttggttgacgctgcagatgatctggtgatgtcacttgaggctgccctgcccttatattctggggtgtaaa

SEQ ID NO: 101388 - DNA, 122 bp, Homo sapiens
cgctttctcctcccagtacgtcttggctgtcggcagctccgtcttctatgccatgttctacggagacctggcggaagtcaaatctgaaattcacattccagacgtggagcccgcagcctttc

SEQ ID NO: 101389 - DNA, 122 bp, Homo sapiens
ctaggctgcctggggtgaggagtgtttaccatgctgaccacggtccagggctgagaggcccgcagtggctggagcgaaaggcaggctgaggccccgggagcgagggtctgggactgcccggc

SEQ ID NO: 101390 - DNA, 122 bp, Homo sapiens
ccccaagagaaagttcaccaagtttagatcccagtgccccgcagcgggtgaaggtggtcccgccccaggccggatctggccacagggctggcggcgcgctggaaaaccgcccacgtgggaag

SEQ ID NO: 101391 - DNA, 122 bp, Homo sapiens
agttgccaggacgagggaaaggtccacctacagctgcacttcctggacaatcttaaatgccgaccacgtggcagagcctgtgggcgtccacagcaggcgataagacacgcctcccatcagag

SEQ ID NO: 101392 - DNA, 122 bp, Homo sapiens
gtcaacactcttttatcaaagagaatttacaatagcaggaaagcactgagaggccaccatcggccaggcccctgccagaagcttcgccacacagtgtcatttcgtccttactacctgactcc

SEQ ID NO: 101393 - DNA, 122 bp, Homo sapiens
gtcaactgcaagtctgggatggtggctgagctgatcttgggaccccaggcccttctagaacgaagtctcagcgtgggagccaggagcagacagggtctcgacctcagagagcttccagcctg

SEQ ID NO: 101394 - DNA, 122 bp, Homo sapiens
taccaattcaaaggttaatctcatctggacacatcctacaggcatattgagaatactgttcggccaaatttctaggagtccaatggcctagtcaagttgacacacagaattaaccattaagt

SEQ ID NO: 101395 - DNA, 122 bp, Homo sapiens
cagcccaaacctaagctgcagatctctatgtctagctgtgtctgtgtctatgggaattctcgttccttgaattcccggcatatccttgaacaccccaatctctctgccatctccacgccact

SEQ ID NO: 101396 - DNA, 122 bp, Homo sapiens
gtgaggagagaaggaagcccttaaacgtcaaagcagtggagggttggggaggcatcggatcgcactttcgcctcctaggctggggaagatggtgcacatgcgttgtaatgcgcacgtgttac

SEQ ID NO: 101397 - DNA, 122 bp, Homo sapiens
gcaggcccagccgccgggccctgggcaggagctgacccactgcaccctggcacacaccgccggcgtggtcctcaccgccaccgccgaccacaacctgttgctctacgaggctcgctccctgc

SEQ ID NO: 101398 - DNA, 122 bp, Homo sapiens
gccaaccagatcaacaaccccgaggtggaggtggacatcaccaagccggacatgaccatccggcagcagatcatgcagctgaagatcatgaccaaccggctgcgcagcgcctacaacggcaa

SEQ ID NO: 101399 - DNA, 122 bp, Homo sapiens
gacatcctccctatccctgctttaggggcttttcctctcttactgtgccataccctccaccgtctcccctcctgtctcctgggctctactcctccctgccctcctctgcgtcctggccctcc

SEQ ID NO: 101400 - DNA, 122 bp, Homo sapiens
gcggccgcgacgcgagtcccaccactttgatctgcttttggctttagctgaggaccctcccgtgtcagcctaccccggggccgaggggcggtccaccgcccaatgatgcgccgagcttctcc

SEQ ID NO: 101401 - DNA, 122 bp, Homo sapiens
agggtagggagagcgggaggctgctggcctgaggctaaagctagtcactgacctctatcacgtgcttgttatatgttaggcatgatatgccagctccttttattcggcgtagcaatctctga

SEQ ID NO: 101402 - DNA, 122 bp, Homo sapiens
tcaaatgcatgcagacaggctcacatgaacatcagcccccatgctgcaaacccacaagtacgtgcacatgcaaaggtcaactccagctcccacccttaggtcccccatcagtgcacatgcac

SEQ ID NO: 101403 - DNA, 122 bp, Homo sapiens
accagcggggaagaaggtgccagcctgctctggttctgggggggtgggggcgtgtaggaacgggagggagattgtcaggctccactggccccactttagcgggtcccaagtgagaacagatc

SEQ ID NO: 101404 - DNA, 122 bp, Homo sapiens
cagattctcgcaggccactcggatggagacgactccttaagactgctcagtttccgggggcgggggcggccatcatcactgcagctgcctgttacagcaaatgactgagctctcccggggag

SEQ ID NO: 101405 - DNA, 122 bp, Homo sapiens
ggggcttcggagatgttcttgctcacagtgatggcctttgacctctacactgctatctgccgacccctccactatgctaccatcatgaatcaacgtctctgctgtatcctggtggctctctc

SEQ ID NO: 101406 - DNA, 122 bp, Homo sapiens
gcatcggcgactccctgcaggtacggcaggggtggcaaggggcgaacagcgcaccaggcccgcgaggaggtcactgagcaagggctgtgcgcgtggaaaccgtgatgacatcacactgacaa

SEQ ID NO: 101407 - DNA, 122 bp, Homo sapiens
ctcggctgcccgccgagcccaggtaagagggccgagctgggccgcaggggtgcgggtaagcgggtaaggggcccgtctcggcagggtgcaggtgtcgagggggacgagggagctgcggcggc

SEQ ID NO: 101408 - DNA, 122 bp, Homo sapiens
tggaggaggaggcgcttggactgtgagttgggcgctggatactgctcttctgattcctttcgggaaaaaggctgtgtgcaggcatcgggtctcatgggtctcgggatacagtctggtgagtt

SEQ ID NO: 101409 - DNA, 122 bp, Homo sapiens
cttctttacttccggcatattgctcaggctggttgggagggacaagtttaaagaacacatcggctgggtggaaccgggagggacacactcaaagttacaatgtaccctcagttacccccaca

SEQ ID NO: 101410 - DNA, 122 bp, Homo sapiens
caggcagcatgtgtgttctgctacatttttgttttctttgatgcctttggaagagatgagcgccaggcatagtggtgctgcttggctgaccagctgtgccctagtttttcaccatcccagtc

SEQ ID NO: 101411 - DNA, 122 bp, Homo sapiens
aacagatgtgattgagatagtaaatacttaataaaacaaatcacttccaaagccatatgtcgcacattcacataaggaatataataaattatttctaggtttttgagaaatcagaagttttt

SEQ ID NO: 101412 - DNA, 122 bp, Homo sapiens
ggctggtgtggtgcccttgagactggagaaggagcctccagatggatgagtcataacccacgagaagtgaagctgacatgcggacatgcccactgggttgggaaacatgctcgttactagag

SEQ ID NO: 101413 - DNA, 122 bp, Homo sapiens
ggggcgtggtccagtgcaggggcgtggcccagtgcaggggcgtggctttcagccaaggggcgtggccattgcgattgggcgggactccgaaacgagggccgcaatcagagaacaccgccagg

SEQ ID NO: 101414 - DNA, 122 bp, Homo sapiens
atttaatttcacagcccatctgcacaggggaactgaggagaaacaggaatgaagagtgggcgacaaagagaaagcatcccttcccacacgccaagagtccagtgcaacgatccctgccacac

SEQ ID NO: 101415 - DNA, 122 bp, Homo sapiens
tcaggagcaagatgggcaagtgttgccgccactgcttcccctgctgcagggggagcggcacgagcaacgtgggcacttctggagaccatgaaaactcctttatgaagatgctcaggagcaag

SEQ ID NO: 101416 - DNA, 122 bp, Homo sapiens
agccttcctccctctgagttgatcagaaacctcttgctcacggaatccccctcttcaacccgcacttcaacagatccccctgctcaaatggggctcaaaccgagtatccagctggtccagcc

SEQ ID NO: 101417 - DNA, 122 bp, Homo sapiens
tgaccgaagagggaggaggagagcccagagggcatctggaggaggtggctgccaggggagcgggttcagagtcatagtaactagagcagccagtcctgcagagaggtggggtcgtgcccgtg

SEQ ID NO: 101418 - DNA, 122 bp, Homo sapiens
ccgtaccctctgcagcgccacccgcgtcgcctctccgccgtgcgccaccctgagggctcccgcgattgcatcttcttgagcacagttaccaatgcgttcagcttcgtttcttactcggatgg

SEQ ID NO: 101419 - DNA, 122 bp, Homo sapiens
gcccgggacgcccttggaggttaatcctctagatactaagggctgcggggcgcttgggggcggcactgaggtagggcgtgggagaagaccggggtgacctttcctccgggggttcccaggtc

SEQ ID NO: 101420 - DNA, 122 bp, Homo sapiens
ttttgcgtattattaaagatgaagacttcaaaatactggagcaaagacaagtagtattatcggaaaaagaagcacaagcactgtgcaaggaatatgaaaatgaagactattttaataaactt

SEQ ID NO: 101421 - DNA, 122 bp, Homo sapiens
aaaaaaaaagcatacctggacgtaaaattcctttccctagtataaactcagatgcttacacgcatctttcactccgcatggcaaaaacagaattcatcatcctctctgctcctctaaaacag

SEQ ID NO: 101422 - DNA, 122 bp, Homo sapiens
cctcatggcttgctgttatttcactcgcagagttcagatgttgttcattccagcagaggccggatgtgtaaatcatcctgcagcagttctgtcttgtatggccggaggctccttggtgggct

SEQ ID NO: 101423 - DNA, 122 bp, Homo sapiens
gatgctgagtgagttctgggggtcagcctgcggcccccagcccccagcagtggctcatgtcggagtcccggaggaacgaataccaccccactgtcacttcttcagaggcgaaaggggaaggg

SEQ ID NO: 101424 - DNA, 122 bp, Homo sapiens
gaatgtcaaaataaggaagagagagtggttgataatcagtagagagaggtttctaactcacggaagtgtttgcaatacaacctctttgtacatcagctgtgtggaacaacatacttgtcact

SEQ ID NO: 101425 - DNA, 122 bp, Homo sapiens
gcgtcacctctcgggctcgtagccggcctgcagcagtcgggcgctgtaccgctgcgccgccgtctcgtgtcccgggtgttgccgggctccgggctccggaacagcggcggctccgcctccct

SEQ ID NO: 101426 - DNA, 122 bp, Homo sapiens
aggagccccccgtataaggaccccagggactcctctccccacgcggccgggccgcccgcccggcccccagcccggagagctgccaccgaccccctcaacgtcccaagccccagctctgtcgc

SEQ ID NO: 101427 - DNA, 122 bp, Homo sapiens
ctctggatgggaggagacccttggcaatggccggagctgtgtggccctgactcacattcccgatttttctcccacccagatcaaagagccccaaggctaacacgtcagccactgaaaaaaac

SEQ ID NO: 101428 - DNA, 122 bp, Homo sapiens
tgttcctgcaggagtgtgtgcactgtgccgcctccgctgcccagcctgagttcttgctagcgaccccgcctgaatgctttccaggcagcttgggagcacttcggatcccccaacacagcagg

SEQ ID NO: 101429 - DNA, 122 bp, Homo sapiens
tgggactataaaacccttgacagaaaacacagaattaaatctccacaaccctggactaggcgatagtttcttagacatgacacaaaagcacagaaaccaaacaaaaatagataaaagtggat

SEQ ID NO: 101430 - DNA, 122 bp, Homo sapiens
ggaaggctcatcactagcatgttctctgcctccccagattttgcctcttcaaggtgaatgcggcttcaaggggctatctttgtgctcctgccccacctggggcccatcctggtctggctgtt

SEQ ID NO: 101431 - DNA, 122 bp, Homo sapiens
gccagcgcctcagcaggcatctccttccagacccaaaccaagcacaagtgcctgaccccacgctctgctctcgcaaatgtcccaactctgcttcagaggagaaatggaagaataaacagact

SEQ ID NO: 101432 - DNA, 122 bp, Homo sapiens
tagaatggattagcccagcgacagtggccagggaacccacccagcagcctagggaaggtccgggaatggaactggggttcggccatcgccagcccagggctagactcagccaggtgggcagc

SEQ ID NO: 101433 - DNA, 122 bp, Homo sapiens
tgcgctcggaggattttctgctcctcctcccggtggctggcggccaatgcaggctctgggcgctcccagcagccccctcctccccctccgcccgcgcctccccccagcccgcgcttttgttg

SEQ ID NO: 101434 - DNA, 122 bp, Homo sapiens
agttgctaaatttgtgttcccattttaaattgaccaattttggggtgtgacacttttgagcggttgaattgggagaatgaagataagtaatttacctgtccaggatcaaaagaagcctagaa

SEQ ID NO: 101435 - DNA, 122 bp, Homo sapiens
aaaaagaagagtagaggaattgcccttcctgatgttgagaaccgtacagctacagcacagcgttatacggctcctacgtcagacagacatggctggggcagcgctggaggggagatgtggag

SEQ ID NO: 101436 - DNA, 122 bp, Homo sapiens
gggtgtctcctatgttgaaatcaagggagtgaatgttgattttaatgcctggtttgtaaacgcttgggaaagggattactacaggccagttttgattcatactatgtcatgcctgaaaaaaa

SEQ ID NO: 101437 - DNA, 122 bp, Homo sapiens
tccacaaagtactttccatcagatacacttttctgatggaaaccaggtgtgtgatggttacggccccaggttagctccagagcacattcaactgtgggtaaacacaaatgtgccctgtgcca

SEQ ID NO: 101438 - DNA, 122 bp, Homo sapiens
gggccggaagctgattcacccctcgacagacagacagacctggggcggacgcactgcccacggtcccctggtgcccgaattccgaaaatatcagaggcctaagcccaagagctcctggaaca

SEQ ID NO: 101439 - DNA, 122 bp, Homo sapiens
ctgccccgcctccccacgccctcctgctgggtggggtgagggctgagagcccacacgccccggtgtgcgactctgcagaggagtgactgcaggtctgcctgccctgcctcaagcatcttaga

SEQ ID NO: 101440 - DNA, 122 bp, Homo sapiens
gctccttcctgcctctcccagctcctgttagacacaggtgtcccttggctgtggcctcagcgctccagtccctgcctccgtccccattcaggtgaccttccctgtgtctgcgcctcctgttc

SEQ ID NO: 101441 - DNA, 122 bp, Homo sapiens
cctggtctttgttgtccaggaagtggccggggtccacctgctctgcctcaaagaagctggcgacctggccgctgggctggctgtcctccatttcccgctgggcccagaagcggctgaagaag

SEQ ID NO: 101442 - DNA, 122 bp, Homo sapiens
gagaagtcgtctggctctcagccatacgtctggtgtgggatgtgcagccccgcatgctggcggtgaaggcgctgggtgcactagatgtgggcagccccggacgcgggcagcggcgtcccagc

SEQ ID NO: 101443 - DNA, 122 bp, Homo sapiens
ctttctctccgggcccgggtcccagagtccccttgtgcttgctcctgagggtgacctgcccgtgccccggggcgagcacaggtgcggccctggccacaatgcgggcgtggcgagccgacacc

SEQ ID NO: 101444 - DNA, 122 bp, Homo sapiens
tgcgtgctttcaagacgctgtgaaggccagtgcgagagaggccttgagccacggtgccggcgatgggcgtggacccagggtgcacccaggcagcaggcctgacccgcagctccgtgtcacac

SEQ ID NO: 101445 - DNA, 122 bp, Homo sapiens
tgcttaatcactcaacaagattttaaaacgtgattgaagaccgcctacctgtgagggcagcgccgaccaggcttttcttgcccgctagtccacgtaatgcggtcgctaagaagcccgcagca

SEQ ID NO: 101446 - DNA, 122 bp, Homo sapiens
cagcccccctcggtgatcaggctgaagcgatgactaaatgccatttgctcctaatgacaccgtcacaagcactgaagccaccaaggaccgttgggcctgtacagaggagaggcagactcagg

SEQ ID NO: 101447 - DNA, 122 bp, Homo sapiens
aaatttttgctcagtggcactctccctagtgtccatgggttagggccatgctggggaaaacgggccggtatttacacacgcgcaaaacacccagagacggcacaaggaggttgaactcatgt

SEQ ID NO: 101448 - DNA, 122 bp, Homo sapiens
gggtcttcggctgcccccgcgcggcctgctgctgctgggctggtgtcccttcgagggctccgcgcgcctggagccctcacacacctgctggccctaaggccctcgagtcgggaggggggaca

SEQ ID NO: 101449 - DNA, 122 bp, Homo sapiens
ttccagtttatttttacagttcttaaaagtaaagcctattccaccaagatacttaaaatacgacaaaatatttaaaagtagaactaaaattgggaaaacattcttgatcaaccaattatgta

SEQ ID NO: 101450 - DNA, 122 bp, Homo sapiens
gaataaatggtgtgtcaggactgtgtttgcctgcaagtagcagagtgttccattagacatcgggtctgttttctcatatagatgctgttgccgagtcaggggtgcaatgatttctaatggct

SEQ ID NO: 101451 - DNA, 122 bp, Homo sapiens
ggacagttcccgccgccgaacttagcccgcgggtggggcggcccgggagccagcggggcacgtgagcgatggagaccatctggatctaccagttccgcctcatcgtgatcggggactccacc

SEQ ID NO: 101452 - DNA, 122 bp, Homo sapiens
ctgagagaacagggagagctactcttccctggagctgcagaggacaacttgttccacccacgctgccctgccccgatctcacagagttatgaccgcctcgttgcagtccgttcctaagttag

SEQ ID NO: 101453 - DNA, 122 bp, Homo sapiens
tcatgcttgtggaagcccaagtagtacgttttttgcataactgatttagtcctctattcacgtatttacaaccacttgctgtgttataagtactgcaaaactgtgtgggtgggaatggaagc

SEQ ID NO: 101454 - DNA, 122 bp, Homo sapiens
ggctcaccgtccgtttgccagatccgtgccttctggtctacaggtttgattgacccgttgcgtggtgactcatgcttctgcttttcatagctcgcaggccagcgttgcttttcagaatttat

SEQ ID NO: 101455 - DNA, 122 bp, Homo sapiens
taaagaaggaagagaagcgcatagaggagaagggaaataattttttaggagcctttcttacggctatgaggaatttggggctcagttgaaaagcctaaactgcctctcgggaggttgggcgc

SEQ ID NO: 101456 - DNA, 122 bp, Homo sapiens
tctccctttttgttgagtgtgggccgggttttgaaggcaggcacgttcctctcctgcccccggcagaggtctggagcaggcaacattcacttctgcacacatctgtggaaacccaggtgctg

SEQ ID NO: 101457 - DNA, 122 bp, Homo sapiens
atctcctagaaagtgctggctctaaatctactgctctgataaggcagctagaccccaactcgcacccaactgggtgccatctgcgccctggaccccagcttcccgtcaacgctagggcagag

SEQ ID NO: 101458 - DNA, 122 bp, Homo sapiens
taaggagggtaaggttggttagagcgcaggggccaaggccgcggcagcgaggccgtccagcgcgggctaggatcccgccagcccagccctggagcccggccgcctggccccagccctggccc

SEQ ID NO: 101459 - DNA, 122 bp, Homo sapiens
actcagtaggagggatccagtcccagaccttccggctctcaccagtacaccacaggctaacgccatccagcaatcagatgacaggaggaggagaggttcaaagaggactactgtatttctca

SEQ ID NO: 101460 - DNA, 122 bp, Homo sapiens
ctttcattaatttggtataaccctgtttctatgctgggtggataaaatggagggggccggcggaaatgcgctcagcgctaacgacagccacagagccacccttcttactgccccttgactgc

SEQ ID NO: 101461 - DNA, 122 bp, Homo sapiens
cacgctggacgtggccagcgacagccagtcggagatgcaggagaagcaccccagcctgaacggcggcggggccctcaacggcccggggagctggggggcgctcatggggggcaagcgggacc

SEQ ID NO: 101462 - DNA, 122 bp, Homo sapiens
gtcgagattaatacacacgcctcgtctcactccagaacacaatgactcaaaaccgcacgacgtgtacttttggaaacagctccgcgggagagcacccgggacaatccccaaaccccgttgcc

SEQ ID NO: 101463 - DNA, 122 bp, Homo sapiens
taaggtactcttttccttcttgagacatccacccccccaaccggtaggagccgccctccacgagagcgctcgaaggccgcgactgaactgccgcgtcatcacttcccacttcctctgaccca

SEQ ID NO: 101464 - DNA, 122 bp, Homo sapiens
atgataagaaaagagggtgctcaggcaggcgctaactttccttaatatccacgccagcgccgtcctcattggctgcccggcccgcgtgacgtcatggcggctagagttgggcacagctctgc

SEQ ID NO: 101465 - DNA, 122 bp, Homo sapiens
cccgccgcagccccccagttccgccgcagctgcagtctcaggggcagtgggtgtggggtccgcaagaaggagggtcttggccgcgctcgcttttccgccagagaggagtgcctgcgccgccg

SEQ ID NO: 101466 - DNA, 122 bp, Homo sapiens
aagcaagcaataagacaatagggaaacgagaagagctttccagacttagagaagagcaaacgcctcctggcaggcggaagcacactgaggaagcatggctggagctcaggaagatgaggaga

SEQ ID NO: 101467 - DNA, 122 bp, Homo sapiens
aaggtgctttagaaaataaacactccagggtaaacacctggcttacttttaaacatcagacgctgtggtctcacctgtcctggcaaggggcctctgccggctgttcccatgactggctcagg

SEQ ID NO: 101468 - DNA, 122 bp, Homo sapiens
ccagcgccctcagaggccctgggcacacgggcagatggtcaccgcctcctaagggagcagcgcgcgcccgttgctcgctgcccgttggttgttgctggtagctccggagggcggggttggcg

SEQ ID NO: 101469 - DNA, 122 bp, Homo sapiens
caaaagctcagagatccaggacacactttaagatcactgccctagaggaaggacacaaagcgccccaaggcacagacaagtccccaaggcacagacaagtccccaagggctacagaaaccct

SEQ ID NO: 101470 - DNA, 122 bp, Homo sapiens
agcctgagtctcctgtgtcccgtgtgcccctgccatgtgtgtcaaatggctgaacatttccgcctgtcccgcctcatgggattggaataggtttacaacagaagtgaatgtggaagcaattt

SEQ ID NO: 101471 - DNA, 122 bp, Homo sapiens
cagagctgacatcgtttccaaggcgcacccctcatcagtcctcctgccgtttcgggggtccgaagggtctcccggcacctggctcagcaattctttggggctccacctgctcaggcttcccc

SEQ ID NO: 101472 - DNA, 122 bp, Homo sapiens
ccggatcgcgcccggccggcccagaaggaaatgctctcagtccgagccaaacttcctgggcgactccgggctttctggctggagagaacccgccccctccagaggctcctgcgcaccccatg

SEQ ID NO: 101473 - DNA, 122 bp, Homo sapiens
cagcacggagccccgcactctgtccccacccgctgttccctgcaggagtgaaaccctggccggagactgaagaaaaggaccgttttcgtgactggctgcggtcaacaagcagtgacacgtct

SEQ ID NO: 101474 - DNA, 122 bp, Homo sapiens
gccggcggggccggctggcaggccgctccgagtgcggggcccgccaagcccacgcccacccggaactccagctggcccagaagcgccccgcgcagccctggttcccgctcgcgcctctccct

SEQ ID NO: 101475 - DNA, 122 bp, Homo sapiens
ggggggtatttgggggcctttgacttcacactgtagcaggaagaagttatgcaaaattctcgtcagatatagaaaaaaggaaacaggatatcattcatttccagaatggagcagaatcacaa

SEQ ID NO: 101476 - DNA, 122 bp, Homo sapiens
tcattgctccctgaagtatgcccgaattctacaaccggttcaagggccacagtgacctgacggaatatgcaaagcaacgcgggattcccaccccggtcactcccaagaacccgtggagcatg

SEQ ID NO: 101477 - DNA, 122 bp, Homo sapiens
tttcttcaccctaattgcctgcaccagaaagaagagggggaggggaagagggtcgggaggcgggaaaggatagctctgtaatgctctcagagctgagccaaaaaggaaaagaaagcaaaacg

SEQ ID NO: 101478 - DNA, 122 bp, Homo sapiens
cattacgtactgttcctgccgctgcacccccttggacccgctagctggccgcactgtgggcgcttaaccctttactgacttgagctccccagattgcagttggagtttgctgatagaaggac

SEQ ID NO: 101479 - DNA, 122 bp, Homo sapiens
gcctctctggccgcccagctctgcctggggaaggtggggccagagtggatgtgttcccagcgtggtcactcccctgcctcgccagcaggtctcggctccaatcaggaggcctaagccaagtg

SEQ ID NO: 101480 - DNA, 122 bp, Homo sapiens
acgtgggtgttctggcagctggcgatgcacggcccagaatgtgtacttggaagccgggaacggggcctgggccttggtctctgtggctttcgtttgctctaccctgggatttgcaaatccag

SEQ ID NO: 101481 - DNA, 122 bp, Homo sapiens
gtgagtattctgcagagtctcctctgctgtgctgaggtgtggacaatgggaaaccatggacggactggagtaggcaaatgtcatattccctgttacaactgtctgtttgcatgtcagccttc

SEQ ID NO: 101482 - DNA, 122 bp, Homo sapiens
actcaggccgggcgcggtggctacgcctgtaatcccagcactttgggaggtggagtccggcgtattacgaggtcaggagatccacaccacggtgaagccccatctctactaaaaatacaaaa

SEQ ID NO: 101483 - DNA, 122 bp, Homo sapiens
tgtgaagtaactgagacatctgttgttagatacatttttgtgatgagtaaactgaggcttcgtgattcaatgtcttgttcagagtcattcaaaagtatagacaagaccagtctccccaactt

SEQ ID NO: 101484 - DNA, 122 bp, Homo sapiens
gcgtgtctgcctatcaacctagacattcatctctagatctgtcccactaccctttcagctcgatttccccagtcgcgccagttagacaaacacacaaacaaataaacagagtggggtctggg

SEQ ID NO: 101485 - DNA, 122 bp, Homo sapiens
ctggcgcgggggtctcgagcctccaggaggccaggagcagagtcgctcagcataactcaccgttccgccccgccctgccgatccgtctgttcccggtggtcccttcggaaacggttcccgca

SEQ ID NO: 101486 - DNA, 122 bp, Homo sapiens
tgcccgcgcgggggccgtcggtagttacccggcaacgaggtggacgcccagtagagggagcggagccagtagggctggaagaactggcaagaaagccctagagagaggcgacctgccaattt

SEQ ID NO: 101487 - DNA, 122 bp, Homo sapiens
cttgctttaaatcctgcaggcattttctacacttggctggtgaacttgagatgggaacaacgctccctttggtctcagttcccaggggcctttcacagtatgaccatctcgctgcactgagt

SEQ ID NO: 101488 - DNA, 122 bp, Homo sapiens
cctttataagcccttgcttgtaagccatcagggagtttgtctgattcttgtttggtgccccgcaatacgtgccttttatcccccctctcgttgcaaatctcagcatcagtgtttggctttgc

SEQ ID NO: 101489 - DNA, 122 bp, Homo sapiens
cggagctgcgatcccaccctcagtccaagggcttaaacatctgcttttcggaactggaagcgcagcacaaaccttgcttttcaaaggcgctggggtctctcggcggccccatctcgggaaga

SEQ ID NO: 101490 - DNA, 122 bp, Homo sapiens
ttcatctcactagggagtgccagacagtgggcgcaggcgagtgggtgcgtgcaccgggcgcgagccgaagcagggcgaggcattgcctcacctgggaagcgcaaggggtcagggagttccct

SEQ ID NO: 101491 - DNA, 122 bp, Homo sapiens
aagtcctgtatatgtatgtagtagtttgggtgtgtatatatagtagcatttcaaaatggacgtactggtttaacctcctatccttggagagcagctggctctccaccttgttacacattatg

SEQ ID NO: 101492 - DNA, 122 bp, Homo sapiens
ccccaccccgaagggtccccgccgccgtcttagggctcagaggtgtggagctgggatgcgcgggaccctatccccggagtccctatcctgccccaatccggaccagaccttcggtctctaca

SEQ ID NO: 101493 - DNA, 122 bp, Homo sapiens
accgtcagtctctggaacagctggcgtgtggcggcatcggcatggtactccatgatggcccggtccacagcatgctgcacggccaggaagccttcccggatgtaccctgggtgcgggagcag

SEQ ID NO: 101494 - DNA, 122 bp, Homo sapiens
atctcaaagctagcggacttattctattcgccttctgatctatgttgcccaggctggtctcgaacttctggctcaagcaatccttctgcctcggcctcccaaagtgttgggattacaaacgt

SEQ ID NO: 101495 - DNA, 122 bp, Homo sapiens
tttggaagtaatatcatcttcccttcccccacggatattacgaacaatatcacaagggggcgtgtacagcccgggcgatattgggagtaatatcgtcctctcccctcctggatattatgaac

SEQ ID NO: 101496 - DNA, 122 bp, Homo sapiens
cacagctgcccctttgcttccggctgctgtttgccaagatgtcccagagacattctattccggccccgtacccccacccccgcacttcagtcctctactaaagagcaggcaggtgtgacagt

SEQ ID NO: 101497 - DNA, 122 bp, Homo sapiens
tcaaagccctcaaaatcatctttggagaaaggcacagactagcgactgtttctgtgatttcgtgtctttttacttccagacatgtccttaaccttggcacaacaaatctctaaatcgattga

SEQ ID NO: 101498 - DNA, 122 bp, Homo sapiens
ggaacattgggtttgggctccaggggctttaggagtggccgcgatgtgagtcggacagtccgacctccactgggggcccgcacagatggcacggcttaggaggaatcccgggctgcgggcat

SEQ ID NO: 101499 - DNA, 122 bp, Homo sapiens
ttccactatgagaacttcattactctgagtcataattgtgtgtttaatgtttacctttgtcgctaagctgaaagctccagagtctagggagaatggcaagaccaaggaagggtctcagcatt

SEQ ID NO: 101500 - DNA, 122 bp, Homo sapiens
gccatcctggggttgtgcatggtggcggcgaaggcacccagcgctgggaccccagcgaggcgacccggggccaccgggcaggcccaagagctccctgtctgcgggccccttgctttccgcag

SEQ ID NO: 101501 - DNA, 122 bp, Homo sapiens
atagcattatagaacttataaagccctttcacttatattatcatgtttgatcctcaataacgtgagttaagaatgatctgtgttgtgataccattttacagttcaagagaggttaagcggct

SEQ ID NO: 101502 - DNA, 122 bp, Homo sapiens
gtcgctggctctccgctctttgctttccaggggctggttggggtccagctccttcagggacgggctataggtaggggtgcccacttcgggatcttccgtgatggagagcagattcttggagg

SEQ ID NO: 101503 - DNA, 122 bp, Homo sapiens
tgcagcactgttaatcaaatggaggaaaagtgtgctgagtgtgtgtccggggtgagtgtgcgtgtgtatatgtcagaagaagctgctgttggtttgtctaagagcccagatgcactcgtgtg

SEQ ID NO: 101504 - DNA, 122 bp, Homo sapiens
gagcagcggcgggggcctagaggggtacgcagcccaggaggacccgctggcccggcctggcgcaccagtcctgcccgcgaggcgagtctggggacgctgcccgggaatccctcacgcgacct

SEQ ID NO: 101505 - DNA, 122 bp, Homo sapiens
agaatatggaatgatcagaattactcttatgacccagaccaagaacatcagcattacctacgaatttattggaaattcaaattctcctgtttcaccccaggcctgttaaatcagaaacttta

SEQ ID NO: 101506 - DNA, 122 bp, Homo sapiens
atactaagtttggacatcaaaagtcagttccccaatcccatggaaattaaatcagtttgtcgaagagatgtctgcattcccatatttattgcagcactattctaatagccatggaaacaact

SEQ ID NO: 101507 - DNA, 122 bp, Homo sapiens
tcagttgccaggacgctagggggcaaggtctacaggcggggctcctggaaataaagactccgagaggcggtgcggcgagaggaggggcggaagtgacgtcgtgtggggcgggtccgaccgcg

SEQ ID NO: 101508 - DNA, 122 bp, Homo sapiens
cggggcagcgacccgggcccggcccctgctgccgcccccgcgcctcggcggaacgagttgcgcagcaggcgggccttgggcttcacctccaccgggatctcgcaggcctcgccgccgcccgc

SEQ ID NO: 101509 - DNA, 122 bp, Homo sapiens
acttctcacaaggctgattacagatggtcaaacctggcttccaaggacagaattgcctctcggaagccagctgtggatctgagtccagagttggccacttgtgtgggtcctcacaagcaaag

SEQ ID NO: 101510 - DNA, 122 bp, Homo sapiens
gagacaaacctgtaggtccttcaagcaggctgggctggggcaagtgccggctctttgcctcggatcagctgaatggctggggcgttcaggaagcttgctctgtccagctcggaatcactccc

SEQ ID NO: 101511 - DNA, 122 bp, Homo sapiens
cctagtacctcctgggctaccgcaaagccacgtggcgaaatcgagaagcgcaaaaacagccgtgcgcggtggctcacgcctgtaatcccagcactttaggaggccgaggtggacggatcacg

SEQ ID NO: 101512 - DNA, 122 bp, Homo sapiens
ataaatttttttaaaaattccctcaatttgcaactatccagccaaggataaatcccagagcgtctcctggcactggctgggcctctgggcggctcggtgtgcagagcacacaatgccccgct

SEQ ID NO: 101513 - DNA, 122 bp, Homo sapiens
gacagcatagaactgagctgccaagaacgctggagtcagacagaactgagttcaaatccccgggtgaccttgggcaagctgctctctctgcttcagtttcctcatctgtaaaaaatgtgaca

SEQ ID NO: 101514 - DNA, 122 bp, Homo sapiens
tctttcttagtgaattattcacaacagttcttgacatgctgggtgttttaatcaatggaacgttagcctctgacctatcaaatgcatcccctgggggatctgaagagaacaagcgtgcatac

SEQ ID NO: 101515 - DNA, 122 bp, Homo sapiens
ctcagcagggggagccaagacttagcgctaaccattgcacctggggctgggagccagcgccggagccaggaggcccgctaggcggctgcaggcgctgtgatggccacctgggggcggccacg

SEQ ID NO: 101516 - DNA, 122 bp, Homo sapiens
cccagagcctcttcctgtccgcaccggtcggtgacgccaggcgcagacgccgagagatgacgtataccccacgtaccgcgcatgctcaaggacgagcctgccttgagcatgcgtgaaaggtg

SEQ ID NO: 101517 - DNA, 122 bp, Homo sapiens
ctgaaagaggaaaccgaggcttgctggggctcagtggcccttctgtggctgcacagctttcggggtggggccaggactgactgactccacacaaaagtgctcccggcccatgtctttaactc

SEQ ID NO: 101518 - DNA, 122 bp, Homo sapiens
gggagcctccttaccccaactggagcttccagctcttgcagaacagagaggtaaacaacgcggtctccatgacaacaagtgacgcgttgccagggcaaagagggctggttccgccactgagc

SEQ ID NO: 101519 - DNA, 122 bp, Homo sapiens
tcacatttccataggatgaaacattatttgttccctttaagatactatgtgatgaattaccgcagaagagatggaaggagaaaaaaatgggaatacaatagttaacacttctgttatattta

SEQ ID NO: 101520 - DNA, 122 bp, Homo sapiens
ttctctgcgccggtgggtggagcttcgttgcacgaaatgaacacccagtagtgatctgcccggctaacgctggggctttgcggacctcaggtcttaggcaggagcttgcgggcctaaaatgc

SEQ ID NO: 101521 - DNA, 122 bp, Homo sapiens
gcccctcacagtgcaccaaagcacactaaacactacaccaagccacgccacacagaaccacgctatgcgctacagcgagccacgccacacagaaccacgctatgcgctatactgagccacgc

SEQ ID NO: 101522 - DNA, 122 bp, Homo sapiens
cgtgacgcagactctggaataataaatacgttttctctgctacagtctcggcaaaggccacggccctagaacggggcgccgcctccgatgcagtctcagggccacagcctcagcgcagccac

SEQ ID NO: 101523 - DNA, 122 bp, Homo sapiens
ctccctcttctgttctgagcggaaaacagcggaacccattcctggaggcctgccctggaacggccaactcattcttactcctttctcctggggtccgatgctagggcaccacggtgaccagc

SEQ ID NO: 101524 - DNA, 122 bp, Homo sapiens
tggagccacgtggggaggagcaaaacccggaggtcccgggcaccttgggcagagccagagcggcgggagccggtcctgggcgcgttgccccgggagcgcccgtcgtccgggcagagcgcagc

SEQ ID NO: 101525 - DNA, 122 bp, Homo sapiens
ttttgtgccagaaatggagccggacctggcgacttttactgcccctcaggcgcggggcggcggtcgtcaactacagttcccatcatgccacgatccgcctggagtaattctccacgcctagt

SEQ ID NO: 101526 - DNA, 122 bp, Homo sapiens
gtggagataatgcagaggaaaaaggaatgtgaactggtattctgtgtaggctctgggccacgtttgatggtatacaagtatatccctgtcaaaaagaaaaagcaagggaccagaaacactgc

SEQ ID NO: 101527 - DNA, 122 bp, Homo sapiens
tccgggacagcagtgacagccaggccttggctcctgccgcccttcaaatgtgcctgggtgcgacggcaacccgcggccggcggggcggggggaccttttgtttgtttgttattatttgtaga

SEQ ID NO: 101528 - DNA, 122 bp, Homo sapiens
atcatagaatccctaaaagatggagatggtggccatctagaaggctcagctgttccatgccgggagcagccctaagtaccacactctgtggggttgtttgtgatggtttcagaccggacccc

SEQ ID NO: 101529 - DNA, 122 bp, Homo sapiens
ataacttgaataattaaattttctgaaaattttactactttcacacagtaaaaaagttcacgaccttttaaaatatcacaccaaataagcaactcaaatccctagaaacattctgattagaa

SEQ ID NO: 101530 - DNA, 122 bp, Homo sapiens
gccacccagaggccaggcgggagcgtggacggaagtgagcgcatcgggctgggagacagccgaatctcagaagtcagcactgggagattcatttctcttctcttcaaaaaacccattagacg

SEQ ID NO: 101531 - DNA, 122 bp, Homo sapiens
aaaaggtcggagaacaggaagccaaacctggtttggcggagaccttggtgctttcgaagccggagaaagtggctggctcccggcagccgcggaggcgccagctgctcaggctgcagacaaat

SEQ ID NO: 101532 - DNA, 122 bp, Homo sapiens
gctgtccccgtgctcatcgccctgtggagcagatcctgtctccttgctgacggtggagcccgggagttccagggcttgggaaggggaaggaaacctctctgaaatctgacacctgctctccc

SEQ ID NO: 101533 - DNA, 122 bp, Homo sapiens
caatctatgggctacgcagagaaaaactactcattagcagcattctaggtttacctcctacgtcctttctctgtgtgcctcaactctaaaaggtgaagtcaatttctttctcccgtgagttt

SEQ ID NO: 101534 - DNA, 122 bp, Homo sapiens
actcgaaccctaagctacagccacactgactctttgtcattacctggtgcttttacttgccgtcttgtctcaaggaaatgctcctttccctcttttttgcaaggcaaattcccagtcatgtt

SEQ ID NO: 101535 - DNA, 122 bp, Homo sapiens
gcgggccgagcctccttcttccagctgatccctggccgggctggacctgcgctatcagcgcgcccccaggccctggcccgggtagactccagaagcatgcccatcacccaccggtgatggga

SEQ ID NO: 101536 - DNA, 122 bp, Homo sapiens
ttattcaagtaggtgcccaggaaacagcacacagtaatcagaaaatgagtttatatagagcgagtctattttagtcacactagttaaatatgacaccgcaaaattcttacatggtctattta

SEQ ID NO: 101537 - DNA, 122 bp, Homo sapiens
ctgtgcgttatcacatcaaggtgcgcgccggcagaggcttcagcctggagctcagggtggcgggcattcacaagaaggtgacccggaccactggcatctctgtggatccgaggaggcagaac

SEQ ID NO: 101538 - DNA, 122 bp, Homo sapiens
acagaagaacgttgacgtcacatccgggagcgcagggttgccgttagttaccgaggaacgcggaagggtttctattgatgtcgatttcgtgcttacagcagttcttagcgaaggggaagcta

SEQ ID NO: 101539 - DNA, 122 bp, Homo sapiens
agaagagtagcactacaaaaaacgctacaaaaacgatgcgattagccagcccgacaacagcgcttcattgcgctgcgaggcacatgaactgcagaggtacatgagctgcggaacaattcaca

SEQ ID NO: 101540 - DNA, 122 bp, Homo sapiens
agggctgagcgtggccggggaggcccggagggaatcggaattggtcgcccgcggggctaacggaaaccttttgctgttattcaggaaactcctgcccgaacttgggtgaaaggcaccggaag

SEQ ID NO: 101541 - DNA, 122 bp, Homo sapiens
agccatatttctctgtaagaaaatacgttgtgagttttgaataagtatcgccccagcttccgagtggcaaatcctattattggtaatccatgatgatgtaagtcacacagcagcaggaaagc

SEQ ID NO: 101542 - DNA, 122 bp, Homo sapiens
cggagcgcgctccagccacctgtcccgggcgggaggggtgaggccggctgaggcaagcggcggctccgccctgtcagcacctctaccgacccggcgactgcccgggctgcctctgggccgta

SEQ ID NO: 101543 - DNA, 122 bp, Homo sapiens
gggcgcgcggcccgcggtcccttgcacgtcggcccccgtcgcccgccccgccccggcgcgcgtttccattttaaaccgccgcccgccgcccgccacccgccacccttcggccgcagccggtg

SEQ ID NO: 101544 - DNA, 122 bp, Homo sapiens
tttggcgtagcctaaggccttcggatctccctgtatggagagtttccttgagctaacagacgtgaatgaacttttagtcacgggatacccacgctgtgaaccaccccggcatcatttcctct

SEQ ID NO: 101545 - DNA, 122 bp, Homo sapiens
accaaattatccttaaaaactgcaatccacttggggagactgatttgaataataataaaacgggtctcccacacagccggctttgcatgcccgtcttgataaatggttctgtctaggcagtg

SEQ ID NO: 101546 - DNA, 122 bp, Homo sapiens
atttattttgaatttctcatttaggttcaaaagaagacccaaaatatccagctcataaaacgagtcacctttgacttcttgattctctcatccattaccactaattcctggctcttctgtaa

SEQ ID NO: 101547 - DNA, 122 bp, Homo sapiens
ggagaggacacccccgcctcagtggcctttgaaagcctttctacgctgttagcaccctaacgtgccgtgatgcctgccctgcccagtgaggggctctgctccccggcagcgagggaaaggtg

SEQ ID NO: 101548 - DNA, 122 bp, Homo sapiens
cagcggcggcttccccggcccggctcgcccgcgcttctctccctgtgggcggcggcccggcgcctggaaggtcaagatggaagaaatcctgaggaagctgcagaaggaggcgtccgggagca

SEQ ID NO: 101549 - DNA, 122 bp, Homo sapiens
ccccccaggaactcccaaggggctccttggagtctgcccaactcttagcctgatttcagccggctgtagcttcattcatcatgccactccatgatgcaggctcggggctgtccaggccagag

SEQ ID NO: 101550 - DNA, 122 bp, Homo sapiens
aaataaacttaaggaagaacagagaggaggggagtggaagagggagagagtgtgagacagcgatagagaaagaaccttgcagtttatgacaggagataattagaaatatgaacaacagactg

SEQ ID NO: 101551 - DNA, 122 bp, Homo sapiens
agggcccgccagagaaactcctgcgtgcagggttccaaaggcagcgggaagggcggcactcgcgtctccagccggctccacagcgctggcagacacaggccatcgagcccctccagagcgac

SEQ ID NO: 101552 - DNA, 122 bp, Homo sapiens
gaccaagccaaggccccaggctcagagcactcacacgccagtggagggggcagccctgtgcgacccagcagggcacaccccacctccagcctaggctccacccaggcctgatctgggtagcc

SEQ ID NO: 101553 - DNA, 122 bp, Homo sapiens
gggactgcccggagtgcatgggcgcgggccagggacgctgagcggtcgcgccatggagggcgccgagccccgcgcgcggcccgagcgcctggccgaggccgagacgcgggcggcggacggcg

SEQ ID NO: 101554 - DNA, 122 bp, Homo sapiens
ggcctcagggaatcacatgtccgcctggcctggcctggtaccaaatgtttatagacaggacgagggtcgctggaatcgcctcgctcctttcagcttggcgctaaggcgcgaatctcgatcct

SEQ ID NO: 101555 - DNA, 122 bp, Homo sapiens
tcacccagcagtcagtgggagaggatcgaatcagagcccctgtctatggcaacggccaagcggatgtggctacacagggaagaagccacacatttctcttaaaagagacccacatttcactt

SEQ ID NO: 101556 - DNA, 122 bp, Homo sapiens
gtagggaagagtaactgctagagaatgggacttggcccaggctaccagtcccaggggggtcgagctggctggctgtgcttttggcctgtgatggatttgactcttcaaggcttctgacaaag

SEQ ID NO: 101557 - DNA, 122 bp, Homo sapiens
gcagctctggttggctggaagctcctggggtctgaagtgatgaggcctggccctgcaccccgggctcttcctgtgcacagcagggttgactgggaggaccagagggtccaaaccctactgcc

SEQ ID NO: 101558 - DNA, 122 bp, Homo sapiens
acgcgcaatctgcatgaacgaaggccagtgcttaaagacgtgccattcattgccagaactcgattctcattggagcggaggaagttcgtgggtggagctggttgtttggcgcctgcgtcttg

SEQ ID NO: 101559 - DNA, 122 bp, Homo sapiens
tctgagctacagccccgagggggggccgggcgatgcctcctcctccgtgccagcctgtgccggggcccctaggaacccccaagtccctgcctgtgacctctgcagagcccagcaggcgcctc

SEQ ID NO: 101560 - DNA, 122 bp, Homo sapiens
taggacaaggagcaagttgatcatggtctctgtcctaaaacatttgaatttgaatctcttcgttgctatgggacagggtaatgtgtcatgagccacagtaatattctcttatggacttttct

SEQ ID NO: 101561 - DNA, 122 bp, Homo sapiens
atggccggcctgacagcatggcgagcagcttgtgctggtgcgtcctccagaaaaagaatgcgcgctctccaggaggtgatggtccctgttcataaactccctgttgctccctgttcccattc

SEQ ID NO: 101562 - DNA, 122 bp, Homo sapiens
cttttccaagttaatcaagtcccacaagagctaaaaggcagcccagagacgataggtccccgaactggatttcagcatctggagaggcataacagtggggcagaaaagccagggtcctagat

SEQ ID NO: 101563 - DNA, 122 bp, Homo sapiens
ccggaaccggctgtggcgggacccagacctcctcgctgttgtctctggggtctgaggacccgagtgccctggcccagctcggtcctcggtcctctcggcctcagggtggggctgggcctgca

SEQ ID NO: 101564 - DNA, 122 bp, Homo sapiens
ccagacacaacccgagcccctcctcagcctggagagggcaccagaggaatctgcacagcacgtcctggtcccactgaagcccttcccttccctcagctccccgtagggtggccttcccgccc

SEQ ID NO: 101565 - DNA, 122 bp, Homo sapiens
gcctcctttttctgtcatgcagacaagagaaaatggacttaccttctatggaggcaggggcggtggccggctccacatgctgatgggcaccactgaagaaccttctcttgtcactacagata

SEQ ID NO: 101566 - DNA, 122 bp, Homo sapiens
ttttcttgagacagggtcttgatatgtcaggctgcaggctgaagtatagtggcacaatcacggccctcttcagccttgacctcccagctcagcctccaggtagctgggactacaggtgcgcg

SEQ ID NO: 101567 - DNA, 122 bp, Homo sapiens
aggcccccgcccggccagactggaaaggcgggcgggccaggtcaggcggcgggaagaacacgggcaggagagaaaagaggaggggcaagagcgtgcagtgaggaaaggaacctgggagcgcc

SEQ ID NO: 101568 - DNA, 122 bp, Homo sapiens
aggagcatgttaatgaccatacaaacgccgagggttgcgtgtgtccatgcaaatgaagggcgttgcacgcagactttggtggagctgcctggaatgcagagaaggacctagaacacagacag

SEQ ID NO: 101569 - DNA, 122 bp, Homo sapiens
ctgagcgcggtgaccaggtcacaggctgtccctcgtgcctcagtgttctcatctgtatgtcgagcactgcacagaattagctcatgcgctgaggctttcacacctgtgatggaagagacaga

SEQ ID NO: 101570 - DNA, 122 bp, Homo sapiens
agctctgcccacaggatgctgggcagggctgcgccattgcagccacatcctgcggtcgggcgaagggacaggctccccacaagcagcgccgtgctggtcatgtcatgggtgggaactccacg

SEQ ID NO: 101571 - DNA, 122 bp, Homo sapiens
agaggctgcagtgagatctgattgtgccactgcattccctcctgggcaacagagccagaccgtgcctgccacggtacgctggtgtcctcttgaagagggggctaggcggggacagcggtacc

SEQ ID NO: 101572 - DNA, 122 bp, Homo sapiens
aatgtttttcaaagtttgcaagaacctggcattagcagggtaatttcatcacaaactccccgttttccagatgtccagttatgatctatttaaatcccgccgtccactttctcttctaattg

SEQ ID NO: 101573 - DNA, 122 bp, Homo sapiens
gctataaactctaaataataaccactacatgtttcattaggaaacagccaaaagtccggccgttaaaggaataatctgcagaacatcttgatttacaagggacaaaatgatgcaaattatat

SEQ ID NO: 101574 - DNA, 122 bp, Homo sapiens
gacatagtaataacaattaattctgcttcttaatgtactgcaggccagggaaatggaaagcgagaacagaacagtgataagagaattcatcctccttggtctgacccagtctcaagatattc

SEQ ID NO: 101575 - DNA, 122 bp, Homo sapiens
cggcgcgccggtacggctgagcgaaagtatggggagcgggccggggaacagatggcaccgcggcttgcctatttttgctttttggcagaggtgacggacgcctagaattactgactgataat

SEQ ID NO: 101576 - DNA, 122 bp, Homo sapiens
ttctgccgtgcctacgtgcactgacgtcgtcacaggtgggggataagattccgtcgcggtcggagttttcctgtgtgaacattgagatgtgcaattccgtgaccgcaggcactgcccctccg

SEQ ID NO: 101577 - DNA, 122 bp, Homo sapiens
catagtcattattattcctaactaaacatgtctaacttaactattcacttaactattcaccgcctctcagagatatttgccatttttcttctaattttctcacaagtggctttccagaggct

SEQ ID NO: 101578 - DNA, 122 bp, Homo sapiens
aaacctcgctgcgggtgggaggctgggctgcgccgcccctggcaccctggcctccacactcgccttggctctggatgcccagctctgtggcccaggatgcaggagggttggggtagggggac

SEQ ID NO: 101579 - DNA, 122 bp, Homo sapiens
gattcccaaatggagctgaaaaaaaacctttcctcttttagaaagttgtgaatgacccagcgagagctctagtaagctttactgaaccaagctgctaatagttatttaatgttattcttcag

SEQ ID NO: 101580 - DNA, 122 bp, Homo sapiens
gaactgcagcaagctcccagtaattccgggtgctgcacttccggtcaggcggtcgggctgcggggccctggggccagctcaccgccggaagtctccgcgtcccccccaccccggccagatcc

SEQ ID NO: 101581 - DNA, 122 bp, Homo sapiens
gcccgggcgccccgcgcgcgcccgcccgcgccgccgaggggatgcccgcgcccgccgccgcgccctgagcgcctttgtctgccgcccgcgcccttccgcaccactagcctctcgggagcatg

SEQ ID NO: 101582 - DNA, 122 bp, Homo sapiens
ttccagatttaaaaatatacttgtttggcttgattcaggctgctcctcattccaggcctgcgtgagtcattggagaaacatcctattagagtgcacccctactgattggcttcctttgtatg

SEQ ID NO: 101583 - DNA, 122 bp, Homo sapiens
atgcctcaggccccctgagtgccaacttcatgcaaggcttttactgaagtggtttacttacgtcacccagtcttctgacacccttacttgacaggtactatgattttcccagtgtttgagat

SEQ ID NO: 101584 - DNA, 122 bp, Homo sapiens
tacttttgaactcatggagccgggaaagggccctggggcccctggggcgtgggcagcactcgagatgcgttggcagaggacagagctcacagcccctgtccagctccacgccttcccgatgg

SEQ ID NO: 101585 - DNA, 122 bp, Homo sapiens
gagaccctgccccgcccccttcctggagcgttgactcccttctcgtctcgaggcctgtggcgtctgggtccgttggggcagaaccatggaggaaaagccttcgaaagtaagacgtctcccta

SEQ ID NO: 101586 - DNA, 122 bp, Homo sapiens
ctgggaagtgggacctggacgcttgatgttgaaaccgtggtgcctccaggatgccctgagcgccgtaggagagctccacttcccagccacgcgggcatccaggattgcatttaccggggctg

SEQ ID NO: 101587 - DNA, 122 bp, Homo sapiens
gaaaagttatgtttcacagaggtttttgcaatgccctgactctggatcgcagccctccctcgattctgggtattacatcatttcatttcagctaatgtaaacactcatcaccctgcacgttg

SEQ ID NO: 101588 - DNA, 122 bp, Homo sapiens
tgggcgtgcgatttaatggagcgcctctctgcctctccagtgcggccagagctcgcttcgcgcacccacccctgccgaggagcctacttgctgcagcccaatgcattgtgtaagacgcgacc

SEQ ID NO: 101589 - DNA, 122 bp, Homo sapiens
tcggctctgacgtggtccacgcctggagtccttcgggatagagcctgcccagtgcacacccggccctcgggcccccactgcccactgtcaggaccggggtatggacgcctggccacagctcc

SEQ ID NO: 101590 - DNA, 122 bp, Homo sapiens
gtctgctgcacattgccttcctaggagataatttcagaccccttgaatatgaggaaaatacgaagcaaacagaaataggaaggcttttatgtatttttgaagaaaaaacaggattttatgta

SEQ ID NO: 101591 - DNA, 122 bp, Homo sapiens
cagctgcggctgagacggaggtagccccccagaaccaagatctcctcggcagttgggtaccgcttcttcccagcccccgggactgcagcatcaactgtggctggagaggttggggtggctgg

SEQ ID NO: 101592 - DNA, 122 bp, Homo sapiens
cctctcagatgtcacttagtcacctttataaattatgacccaggcacaaatcagtttttccgttgaccacagcctggcaccatacctttggacaggtagatgaaacatgtctgttgaataga

SEQ ID NO: 101593 - DNA, 122 bp, Homo sapiens
cgtttccccctctggccctccggggacgccgcggattcgagctgcacagtcagaagaggacgttgaaaaggcgccaggcagccgccccgaaccaggccctcccggctgccgggcctgcaggc

SEQ ID NO: 101594 - DNA, 122 bp, Homo sapiens
tgctgggctcagtgaagatggaggcccatgacctggccgagtggagctactacccggaggcgggcgaggtgtgtcctcggggatggcggagcgggaagttgggggcaggtatcggggtgtgg

SEQ ID NO: 101595 - DNA, 122 bp, Homo sapiens
caagcaattccactcacatacacccagaattgaataagcatactcaaacaaatattagtgcgtagaaatactgccatggaaacaacccaaataaaataatgggttaacagcttgtggaagga

SEQ ID NO: 101596 - DNA, 122 bp, Homo sapiens
ctcccgggcctggcgcgaatggcctccggccgctctcggctgcgggccatggccgctccccggcgcgtccccacacggtccccgccccagtctggccgcagcccaccccgcgccgccactgg

SEQ ID NO: 101597 - DNA, 122 bp, Homo sapiens
ggggggggctcctcccagctcagcgactcaccctgctggaggtgaagtctcgagtcttagcgcggagcttgttgacttgagattctgcgatatccgcacgttcctcggcctcctccagctca

SEQ ID NO: 101598 - DNA, 122 bp, Homo sapiens
aacttacagtctggcgagagaaacagttgcacaaaaaacaatagcagtatgctaactgcacggccacagctaacatacgtggtgcttttcatgcttataaaagtgactgctttcctggaagg

SEQ ID NO: 101599 - DNA, 122 bp, Homo sapiens
agaaaggaggaggccgatgtgcccatggacattattaaccttccggcaaatccccacagccgccaaactgcgtctcctcttccgctctcggcgcgcagctcacgctcgcagcgtcagcgacg

SEQ ID NO: 101600 - DNA, 122 bp, Homo sapiens
tgcccgggtgcggggtgccgggacacggcgttgaaggcgctgagcggagggatctcagggcgagctcgagcggcgacggcgcgctctgtgattgcaccgcgagcgcctgaggtgatctcggc

SEQ ID NO: 101601 - DNA, 122 bp, Homo sapiens
attggaaagaatgtttgtttcgcattccgcattagtcacatagaatgcgctcctccctagcgagcttcctgaggtagacggctggttgcggtttctcgtaatccgggctgcccccaccctcc

SEQ ID NO: 101602 - DNA, 122 bp, Homo sapiens
gtgtcccgccgctgctggccgggcagacgagagctagcccccgcctaccggccatcgccccggggctttgctctgtctttggccggaggcactctgcgcagccctcacccccacccttcagc

SEQ ID NO: 101603 - DNA, 122 bp, Homo sapiens
tgatatgtgctttgaagaaaaaaatccaggatgcgaaggcagcatattgcaagtgatctacgtagtgcggtcaggtcagtgaaagagagccttaaattagaagtgagatctaagccaagacc

SEQ ID NO: 101604 - DNA, 122 bp, Homo sapiens
tgggtagtggggcctagtcagtaaaggtctggtcattaaggacctggccagtcagaacctcgtcagttaaggacctggccagtcagaacctcgtcagttaaggacctggccagtcagaagct

SEQ ID NO: 101605 - DNA, 122 bp, Homo sapiens
tcagccagggctgctcttgcagatggctccgtgtctggggagcgttgttttgcagccacccggaggtggcctgtcctatttgcgcttgcattctctctcccctcggatgggcatcgctggag

SEQ ID NO: 101606 - DNA, 122 bp, Homo sapiens
gcgctgtctgggattggcctgctggtgccaggccaccattggtccggacgtcctgggaggcgggccaaggctcggatcctagttttgattggccgttgtgcaaaccacgtagtggggacgcc

SEQ ID NO: 101607 - DNA, 122 bp, Homo sapiens
agcctaggatttcaagaccaacctgggtaacacaggagactccatctcataaaaaacaaacgactgagctttaattatcaagtcttaaggaatctaaagggaggatgggagacaaaaagaga

SEQ ID NO: 101608 - DNA, 122 bp, Homo sapiens
gcgctgggcggcggccctgggctgctttggctaacttggctgcggggcaggcgcgaggagcggcgcgccgaccgggccgagcggagaggccgcccattggccggccagcgccacgtggccgc

SEQ ID NO: 101609 - DNA, 122 bp, Homo sapiens
ccagcaggcatcttgttcgtgggtagagaagttactaatgccagtgcatttttactgaaccgagagaccaactgttgatatctttaagagcatgttaatattccatttgtggtcagagtgac

SEQ ID NO: 101610 - DNA, 122 bp, Homo sapiens
ccgacgccgcccccagcctgagcgctgagagggaaaacgagagctagaaaggaaagaaatcggactggtgactgcctggcaggggtgtaattcaaactgttgtgagcagacggcaggaggga

SEQ ID NO: 101611 - DNA, 122 bp, Homo sapiens
ggcctggttcaccacgccacccgggctggccacctggactgcgtcaagttcttggtgcagcgggcccagctgcccggcaaccagcgggcccacaacggggccaccccagcgcatgacgccgc

SEQ ID NO: 101612 - DNA, 122 bp, Homo sapiens
gcaagacggccgcgttccggttccggtaggttgcccgggagacgcgggtacacagagaagcggctcccgtcggaggccgagtcgtcgccacgatcgcccccttggtggactcgcaggccgag

SEQ ID NO: 101613 - DNA, 122 bp, Homo sapiens
ctggccgccgcgccccattctccgggattccggggccgcgggcgcgctccggggtccgggcgagtggacacaccccaccgctcgggccagccgcccgcccctcccgccggccggggaccgcg

SEQ ID NO: 101614 - DNA, 122 bp, Homo sapiens
tggctgagagcaaaggggctaatacagggctcatacaggacatcatcctgcagtcttgtgcgtgcacagtacacacgcgagcacgactgtctgtgcctggagacaccgtatggcaccggagg

SEQ ID NO: 101615 - DNA, 122 bp, Homo sapiens
gagtaaaaactgccccctggtttttcacaattgagaaactgagatccagaactcaggcagcgccaagtggcatttccttggcttggcactgctcgctagaggaggagtccgctaaagggtgg

SEQ ID NO: 101616 - DNA, 122 bp, Homo sapiens
tggagaaccaaaaacagtggcagcgcagaagagcgcagcgaagccatcatagttggtggccgagatattggtttattggttggtggatttaccatgacaggtacgttcagacgccgccggct

SEQ ID NO: 101617 - DNA, 122 bp, Homo sapiens
attagcctcatctttactcccgaaagctcactttgcttttagtcctggccgtcggctgagcgagctgcgcatgcgccacgtgcccccgtggcgtagggcctcgtccggtcacgactatccgc

SEQ ID NO: 101618 - DNA, 122 bp, Homo sapiens
cagtcctcacaggaaacattctgagaatgcttctgtctaggtttgatgtgaagatatacccgcttcgaaggaaggccacagagtggtgcaaatatccacatgcagattctacaggaagagtg

SEQ ID NO: 101619 - DNA, 122 bp, Homo sapiens
cctgggtggtcggccgttctgcccccaggactgaggctggaggggacattcctgccagcccggggcccatcccctggtgccatcattcggtccccacgtcccctgctgttccctgtgctctg

SEQ ID NO: 101620 - DNA, 122 bp, Homo sapiens
ccagcgagcctccagccgcgcgcgcacgaccggctcccgctcccggccgctcccggccggcgtccctgccagcactgctgccccacatgaaacagctgcaatcccgaggcttctggggggtt

SEQ ID NO: 101621 - DNA, 122 bp, Homo sapiens
ctcggagcctgcatccccctaagccaagactgtgcgcaggcagcacgtgctgaagccagacgaggacagcatgagagttcccctactcttcccccaggcaactagatgggccacttctctct

SEQ ID NO: 101622 - DNA, 122 bp, Homo sapiens
cttccgggactcagagacccaggaacacaaataaggccccctcaagaaatcatcctggaacgcagtggtgtaggctgggagctgctcactctgaaggccaagggaaggccagggaggagctg

SEQ ID NO: 101623 - DNA, 122 bp, Homo sapiens
gcaggtgaaggctctactatcctcagatgcaagaattcctgcagagtgactgggggcgggcgcaggggcctgcagctctggggtccgtggctcaggaaagactgaaggctgccctgctcagc

SEQ ID NO: 101624 - DNA, 122 bp, Homo sapiens
ggtgctctaaggtgtcttaagaaagtgactgcacagccacactgaactcacctgggagcgcgtacaaaatgcagaagcctggccccaccaaccctaacgcatccgaatagcgaagtaggtcc

SEQ ID NO: 101625 - DNA, 122 bp, Homo sapiens
ggaaactcaacctctgatcacgcaagttcagcgtgctgggccgccccactcctcacaggccggccagcatccgaggtgcccacagccagtgccctgcagtgttgaagctgttccacaatctg

SEQ ID NO: 101626 - DNA, 122 bp, Homo sapiens
gctaaagcagccaatcgtggagcagcttggctgcttgtcataaatggagcgacgtaatttcgacctgtcctttcccgggagttagcgatccctcaacccctgcactgcgctagtcctaaaga

SEQ ID NO: 101627 - DNA, 122 bp, Homo sapiens
agccatgcgcaggcggaggagcgcctctttcccttcggtgtggtgagtaagcgcagttgtcgtctcttgcggtgccgttgctggttctcacaccttttaggtctgttctcgtcttccgttcc

SEQ ID NO: 101628 - DNA, 122 bp, Homo sapiens
gggccagggactggaagcccagtgtcctggcttcaggtttgcccctggctgggcgtgtaccgttcagccctatttgggagcctggttgccacacctagaggttcctgctctgctgacttcac

SEQ ID NO: 101629 - DNA, 122 bp, Homo sapiens
tatgtaatgttgggaaaagcttcccaggtaatagcacctttttaaaaatatatatatatacgtctatatagtattttgcaagtaggtggcaatgctatgcttgaaatacaagggtgggaatg

SEQ ID NO: 101630 - DNA, 122 bp, Homo sapiens
ccccgcaacacgctgttttcagcgttccagaccacagcgctgcagtctacgctgccctgacgctggagtgtggaccttgttttgctcctcggggcccgtctgtttctggaaatgacttcttt

SEQ ID NO: 101631 - DNA, 122 bp, Homo sapiens
acgtgggggaagcgagtacaccattttaaatcaacactgcgaaaatgcaatctagcctggcggaggaccggcagctgggtcggagcttgcgagggctttgcagtctctgcctgttccttgtt

SEQ ID NO: 101632 - DNA, 122 bp, Homo sapiens
ttcgacgacctgcccctggctgaacagcgggaagcctgccgacgtgcctgctgcttcgcccgtgtggagccctcgcacaagtccaagattgtggagtacctgcagtcctacgatgagatcac

SEQ ID NO: 101633 - DNA, 122 bp, Homo sapiens
cgcaccacacacactaacagtcgtcttcacaggcgaccgcgcaccacacacactaacggacgtgcccgacatcttcacaggcacagcatgagccctgatgtgcgctttctgctcctgctcct

SEQ ID NO: 101634 - DNA, 122 bp, Homo sapiens
cctcggattcccgaggccccacctttcggggacttcaaacgcgccctgccacccggtgcccggctttcatctcccgcacagcaggcattgtttgcgggacttcacagagatgctaatccccg

SEQ ID NO: 101635 - DNA, 122 bp, Homo sapiens
tgttaaaaggcagatgggaagatccgcctctattctgagacaaacttgccttgtgtggtgcgaggtgaggtgtggggaccggcagcgggcctgccgcgcttcccgggcagcggagccggact

SEQ ID NO: 101636 - DNA, 122 bp, Homo sapiens
ctgcaggaccgcactggccctagcggaggttggggggagggactctgaacgcgcaaatcgcgaggagactgagtctctggaagaagagaggagcttaggttccacggaaggagcatagaagt

SEQ ID NO: 101637 - DNA, 122 bp, Homo sapiens
cttctgctgtggctctctgttctgagggctaaagctgtgggcgacagacgcagagcccggcgcgttgtcccggaagcagggccttcaggcacagagcccggcgccctgtcccggaagcgggg

SEQ ID NO: 101638 - DNA, 122 bp, Homo sapiens
agctgcccgcgtagtgcctgttgcactcgccaaggaccggcctggcagagatagaaaactcgcagtacgtttgcctcagaaccgcctcaatccggaaacagaaactccccaggcccggcact

SEQ ID NO: 101639 - DNA, 122 bp, Homo sapiens
gtgtggctccaggcgctgcaggaggcgtcggggctgggagcctggggcgccaggtgcggccgagatcccggctccgcccccgccgccggggccgcccccttaaccctttgctcgccgccgcc

SEQ ID NO: 101640 - DNA, 122 bp, Homo sapiens
cacgagggaagctcggggtgtgagccgcgcatcgggggcctcgaatcggaagggagacgtcgctcgctgattggtcccgcctccccagtctagcgtgaggcgaggcggggcgcggccgggcg

SEQ ID NO: 101641 - DNA, 122 bp, Homo sapiens
attaaggcacaagcgactgcatgtatgtgtggcggggacagagccccacctgggttgagtcgggaaatactgactttaatgggtggtgtgtgtttctgttatgcaccagctttttttttctt

SEQ ID NO: 101642 - DNA, 122 bp, Homo sapiens
cacactttcgttcaaaggacaagcctcttaattacttccaggccaacaaagtgcccctgacgggctggacaggcctagtgtgcaccatccttcaacactgtcctgacgtcatcatctaacag

SEQ ID NO: 101643 - DNA, 122 bp, Homo sapiens
ccccaggggcaagcaagcgaccacaggggaccggtcccggggctggatgtggctcatgtccgaagcgcacggagccgagccggtgttgctcagggaggctgcccgccccttcacgcagaccc

SEQ ID NO: 101644 - DNA, 122 bp, Homo sapiens
cttagtgctcttcctagtttcctgggcatggtgtacttacagtgaatgagatcagagctccgagttgagctgctgtgttaattggttgtatgattttaggcagttaacttctttggtctgag

SEQ ID NO: 101645 - DNA, 122 bp, Homo sapiens
ccaccaaacagtgcccatgacctttttatggtgccagttgggctttgggaagtgctttggcgcttcttgttggtccagccactgagctggtcatagtcagctgtataaaatccgcttttaat

SEQ ID NO: 101646 - DNA, 122 bp, Homo sapiens
cgcgctagagagaaacatgtatcgttttcgatcacagctcttcacggggatttctgctgccgccaccgcccactcttacccccgccgcttctcgactctgttgttagccgaagactcgcctc

SEQ ID NO: 101647 - DNA, 122 bp, Homo sapiens
atctatcttaaactacactcccatcgtgcaacggaaaacggacagagctcctgcgtgcaccgaagggacttcgagccaatccattgtcacagctctcagccggcgacctattggctcctgct

SEQ ID NO: 101648 - DNA, 122 bp, Homo sapiens
cagacttccttgagaagagtcagaccctgcagcggggctctgccttcccactgtcagcctcggggtcatctagctttatcgatccccatggagcgggtcaccgagccctgtgagcagggaga

SEQ ID NO: 101649 - DNA, 122 bp, Homo sapiens
gactgcccctgaggccctggaggaaggacactggtgagccccgcaggacactgaaatgtgcgccgaaaggacgcctgatggaagactaggatgggaaaaggaaatgagagccgatggcaggg

SEQ ID NO: 101650 - DNA, 122 bp, Homo sapiens
tctcgcaccagacactggaagggaagtttgcgaatcagaagttcagtggacttctgataacgtctaatttcacgagtgccacagtaccaggtctgtaatgatgaggtttcttcacccgtcca

SEQ ID NO: 101651 - DNA, 122 bp, Homo sapiens
gaatatttatgtcccagatatcttaaatttagtaagtttggtgtcttacacttggtaactcggtgcctcccctgagtgcttcagatccaaactgattcatcccactgcctcacttgattcca

SEQ ID NO: 101652 - DNA, 122 bp, Homo sapiens
aacagcaccgcggtggattcggatccgggtgagtagggaaatgcgcctcagcccctcccacgggccgcccacggattccaggatccgaaaacgcttccagctgctccgccaccccaggaagg

SEQ ID NO: 101653 - DNA, 122 bp, Homo sapiens
tgaaataaagctggttaacaaagctagccttttttttttttttttccctctgtgggccagcgagggtttcattttaggaaatggaagtgtcaatgtggacaaactgttctgaagtatttata

SEQ ID NO: 101654 - DNA, 122 bp, Homo sapiens
gccgcgcacgcaccaagcgtgcgtgcaggcagctatacccacttttctgccctactacttcgcctcagccaatccgtaatcgcttttcctgttatggacaggcaatagtcaccaataattgt

SEQ ID NO: 101655 - DNA, 122 bp, Homo sapiens
gcctctggtcggggccaacttgggtagatacttgaatctggattttccgtggttcgaagccggggtggtggatttctgttgctggaatacaccctggaggtccacggaagggttatttacgt

SEQ ID NO: 101656 - DNA, 122 bp, Homo sapiens
tcctcgcagggctgggctccaactccctgctgaagtgggtctgtatccctaggattcccgcggccgaatgaaaaggtggctcagtttgagacaggggtactttgggcccctgtcctggcatg

SEQ ID NO: 101657 - DNA, 122 bp, Homo sapiens
tcctctgctgccctggctctggcacccaggcagggggtgggggaggcaggcaggggtccccgtgggcgctgcctctgacccccgcccgccaccctccagccctgttactgcaccgctacgtg

SEQ ID NO: 101658 - DNA, 122 bp, Homo sapiens
cccccgcttccacggcccaaaaagctgtccccaccgaggtcctcgatctggcataattgccggcattgtgccgtgcctcccgccctggccacatcaatgtggctcattcttcgaggctccac

SEQ ID NO: 101659 - DNA, 122 bp, Homo sapiens
gtcccccctttgttcaatcccctagcaaccaacagcgacaagtggtggccgggacaggaacgtgagcaaagaaggtctgctggagcagagaaagagaaactgacaagacgaacgagaaaccc

SEQ ID NO: 101660 - DNA, 122 bp, Homo sapiens
ggtcttgggcagggggcggggcgtgcggggcaaggaagcggagacccagacagctgcaggcgcagagagaaatatccaaagacagagacccagacagacccggggagaaagagagatgaaga

SEQ ID NO: 101661 - DNA, 122 bp, Homo sapiens
cataaaaatatatttgtctgaggacccttgacactcccttggaaatgtcatataattttacgcctccacaatgcattcacacttacactctaactataccaatcaggtgaaataaaatgctt

SEQ ID NO: 101662 - DNA, 122 bp, Homo sapiens
gctggggcggcgggggcggcagtgagtggggtgggggcgagcggacctcggcggagcctccggcctgaggcaggatcagggccccttcctgggggagtttcctgcctggtccgcccttcccc

SEQ ID NO: 101663 - DNA, 122 bp, Homo sapiens
cccatccgggtgagtcctcgtgggtcctcccggaggcgccccctagtcccaggctctgcacgccctggccccgccccttgactcggccccgcccacagcggaatccgcagattcgccaggtc

SEQ ID NO: 101664 - DNA, 122 bp, Homo sapiens
ccccttttccccaggcatgcaagaactttgaggaacgccaagctctgtggcttgctccagcgccttcttgtgaagttggctccacagccttttcttactggcttgcttttcctcccccacat

SEQ ID NO: 101665 - DNA, 122 bp, Homo sapiens
tccctatagaagttcaatggctgcgaaagaatttgtagtaaaccaggcctcccaggatggcgagctccagtaagatgataatggaaagcagcagcttgttggttgtcactctacaaagagaa

SEQ ID NO: 101666 - DNA, 122 bp, Homo sapiens
tctcctttgatgaaatttactgtttcggattctagacttggctcttaccaacttaactttcggttaatagcttaatacctctgattcaggtttttgcatttgtcaactaccattgaatgata

SEQ ID NO: 101667 - DNA, 122 bp, Homo sapiens
gcgtggcggacggacggactgacggacgcgcagccttacccgaaaggccatggcggagcacgcccctcgccgctgctgcctgggctgggacttcagcacgcagcaggtacagtcgcctggcc

SEQ ID NO: 101668 - DNA, 122 bp, Homo sapiens
gctccgcagccggcgcctcaggcagagctgactccgggggcgtgggcgcagagagcgtcccgcagacccgggcgatccgaaaacgactcccaggaattccatgagcccctgggaccatgggt

SEQ ID NO: 101669 - DNA, 122 bp, Homo sapiens
gcacgccggagcaagggagctccaggcgtcactcagggcgagaggcagagaacaacgaggcgcgccgggccaggcccgcaagcccaggatccggcagggagctttcggccgagcgtactcag

SEQ ID NO: 101670 - DNA, 122 bp, Homo sapiens
ccacccggcatctcagatttccctggaaatggaaactgcaggtggtgcctcagcacattccgaggcgttcccgtggctggatgtttctcacgcggtgaggtgaagaacgagtcacctgttta

SEQ ID NO: 101671 - DNA, 122 bp, Homo sapiens
tgaagccaaaaccagtttacaaattaaccaccaagaaaaccggtagagcacagatgatgacgatagagctgttttgtccaatgtgagcgctactggccacccagggccatgtgaatttaaat

SEQ ID NO: 101672 - DNA, 122 bp, Homo sapiens
ctcctcctcacccctctgagaaagcccccctaaaaaaaggcttcagagtcaccggcatgccgcctcacgttgcaggacggaatcgcgcgctcctcacgctggagtaagttacgaaacatgat

SEQ ID NO: 101673 - DNA, 122 bp, Homo sapiens
cccagtgggcgtcatggatgagtggcggtgtggcagtccccctctacaggaagcatcccgcggcccagctggagtatgtcatctgcgactcccagagctctgtggtccttgccagccaggag

SEQ ID NO: 101674 - DNA, 122 bp, Homo sapiens
gaagaacatcatctactatctctaagcaaaaatctggcaaaccagagacagtggaggcaacgctgggaagcccagaacctaccataatagtaagggtagattcccatccgattctggtttac

SEQ ID NO: 101675 - DNA, 122 bp, Homo sapiens
gcacgtgcggggcggggctgtggcccgagcccggagctgattgggcgcgggcctggtgggcggggccgggccgcagctgtcagagccgcggcggcgaacgaggcgcagcgagctgagcggtg

SEQ ID NO: 101676 - DNA, 122 bp, Homo sapiens
gaactggcctgtgggtggtgtcagggctcttgaaattgcaaggacagaaccatctccttccggcttcgtgtaaggaagaccaagccaaggccaaggtgtctaccataccacacctttgggac

SEQ ID NO: 101677 - DNA, 122 bp, Homo sapiens
acttcttggaaataccgctcatctccggccattaaatgtgcttagctttgacttctgtctcgtaacagctgaacgctatggcaattttccataacaacacgcatctcagatgactcactgct

SEQ ID NO: 101678 - DNA, 122 bp, Homo sapiens
cccggcccttcggccgcggcggcgtgcgcctgccttttccgggggcgggggcctggcccgcgcgctcccctcccgcaggcgccacctcggacatccccgggattgctacttctctgccaact

SEQ ID NO: 101679 - DNA, 122 bp, Homo sapiens
tggcgggccgcgcgcgggtctccgtggaagtccgtttcgtgagcagcgccaaggtgaggtcggggcgggtcctgccgggagcctctccccagtccggccatggagacagcccggccggactc

SEQ ID NO: 101680 - DNA, 122 bp, Homo sapiens
gttcctgtcgcaagtggactttgagctgctgctggcccacgcgcgggagctgggcgtgctcgtgttcgagaactcggccaagcggctcatggtggtgaccccggccgggcacagcgacgtca

SEQ ID NO: 101681 - DNA, 122 bp, Homo sapiens
gcccgctaggaactccctgcgcggggaactccctgcgcggagaacaccggggacttttcgcgattctgccgcgcgagtgtgtcctgtattccttccgcaaacgtttatcaaacctggcaaag

SEQ ID NO: 101682 - DNA, 122 bp, Homo sapiens
catctgtaaaatggaaataatgagtccaacttaacaggtttgttacagcaattaaataaccgatgtattgtgcacagtgccaggcatgtagtgagccctcaccatgtgaatggcagcaccag

SEQ ID NO: 101683 - DNA, 122 bp, Homo sapiens
aggggactcgtgcccagggctctccttgctggcttgttggaatctggcttcaggtctacacggggcctctcgtttggtccagaacagcctggctcatcggctggggcttgcttgtgcagggc

SEQ ID NO: 101684 - DNA, 122 bp, Homo sapiens
atcctgtttgggtgctctttcccctcccacgtgccatctgctctgtccaccagcaccacacgttgattagcacccctggatgtgggacactgttacagaaccagaaagaaacccaagacagt

SEQ ID NO: 101685 - DNA, 122 bp, Homo sapiens
aaccccctgcggccgtcccgtggcccatccggccagttcacacagtcacctggggtaggccgaggtgtactttaacagctccctggatacagccgacaggtctgtgggaaaatgtccgacct

SEQ ID NO: 101686 - DNA, 122 bp, Homo sapiens
ctctcgggttgataagggacgcacgcccgaagaactgcctttaaccagcactggggacagcggcacgcaggtggccggggttggcgaacagccactgcagccgcgcctgcggccgggaagcg

SEQ ID NO: 101687 - DNA, 122 bp, Homo sapiens
agatacttttctaaaacaggtaagttcatgtactccacaggttctctctccaccttcaatcgccatgatgagctcaccatggaccgcaccaactgatggcggaaacttaagtatttcttatt

SEQ ID NO: 101688 - DNA, 122 bp, Homo sapiens
actccaaagttcatggggtcaacgggtggatggcttgggaagtaattgcaccctgacccgcgccccaagcctggactgctctgtcccaggtccctgacattttcccccatcctccctgagaa

SEQ ID NO: 101689 - DNA, 122 bp, Homo sapiens
catcagataagaacgtctccttcgatgtcacggatttcaagaggtagctggagaaactgacgtcaggagtgtcctgtgaatgaacatcgcccgaggcctagcacccacagaagaagggttct

SEQ ID NO: 101690 - DNA, 122 bp, Homo sapiens
ttctttgactcggaaagggaactccctgaccccttgcgcttcccaggtgaggcaatgcctcgccctactttggctcgcgcaccgtgcgtgtacccactggcctgcgcccactgtctggcact

SEQ ID NO: 101691 - DNA, 122 bp, Homo sapiens
aggacacgcggggcaccctcgggaaagtgggtcatgcagctacttggatggcaggaagcccgcggtgtctcctccagggagagcccccagagctgggagcagagttccgagggggagcccgg

SEQ ID NO: 101692 - DNA, 122 bp, Homo sapiens
gcacgataacacattagagggctggtttagcaaagggcaaggtagagttggcattagacgcgcttgcaaagggaggcgggcaagagcttcaagacgcgaatgacacttgagcagcctgggct

SEQ ID NO: 101693 - DNA, 122 bp, Homo sapiens
tgcgggtccgggagcgcgcagaacagcggggagggcttctccctcttctgggtaggggcgcgctaggtggagccccacctcccctccgcggagacccaccctccgagccgggagaggcgttg

SEQ ID NO: 101694 - DNA, 122 bp, Homo sapiens
gatgcctgggaaggctttctggagctcttgccatctcttcggctcgtcctttcaccacggcgtgcctggtttctggcctgttttagagactgagaaaccgaggcttggatggagcggccctg

SEQ ID NO: 101695 - DNA, 122 bp, Homo sapiens
acatctgtgggtttgggaagaagctttcatcactgggctgcaagactggaacaaagcgagcgtgcagttgtgtctgatgttagtcgcctttctgacttggtgtttgtaagtgttcactggcg

SEQ ID NO: 101696 - DNA, 122 bp, Homo sapiens
tgtctttcttcttcatggcctcatagtagggtgagtgctctgccaggtgacggttgggggcgcacaggtagtagatgttgcgggtgccggcccgcatgcggctggcgtattctgagaggctg

SEQ ID NO: 101697 - DNA, 122 bp, Homo sapiens
cgtgggaaaggactctggccagcgcggccggcacagagggagcggtgttaccggggtagacgggaaccgtggctgcccccatgctggtctgggagagacgaggggccggacgaaaggacagc

SEQ ID NO: 101698 - DNA, 122 bp, Homo sapiens
ggggcagccgcaggaggggcaggctgggaggggctgccctggctgttcacttgggcaggacgtcaaaggactcggacaccggactcggacaccggcttcccgttgcaggtctggatcttctt

SEQ ID NO: 101699 - DNA, 122 bp, Homo sapiens
tggccttatttcctatccctcgtccccacccagaccaacagggcaggggctggccggctgcgtgctcacctgctcatcaggagcaatgagggcatgggtggactcttccccaagcgaggggt

SEQ ID NO: 101700 - DNA, 122 bp, Homo sapiens
cggagcagggtttctacagctgctccccactttctcggacccggtcctggacccagcccccgactccgacacggctccaccatggaggaggcggaccgaatcctcatccattcgctgcgcca

SEQ ID NO: 101701 - DNA, 122 bp, Homo sapiens
ttgagtgttgtgcctgtgggaagcgttatacacacagcctgggacctcagcacagatgcccgttgacaggtgtcccaccggccttccgggttccagcgccaggcctggtgcctgccccagga

SEQ ID NO: 101702 - DNA, 122 bp, Homo sapiens
aaatatgtaggatcggtttccagctaagcagggaactccacagcgagttccctttctctccgcgtcccctcgaattgacctaaggtggatgtccctagcaccttattaattttctatcccag

SEQ ID NO: 101703 - DNA, 122 bp, Homo sapiens
gtcccgctgtccccccagcgcgtggccagttccccgcgactctttaagcagttctgctggcggtggcccccacacctgcctgggcccacagctcacccaggtcgagggaccctcgtgtcagc

SEQ ID NO: 101704 - DNA, 122 bp, Homo sapiens
acagtcatacaactacttgttgagagcaaagaacattcagtgttgtttctatcatatccacgttgcttctgagcacaaataattccacaatttgttttttttttcattcttttgctcagatt

SEQ ID NO: 101705 - DNA, 122 bp, Homo sapiens
actgaataatccacacctgaatttcagtgattcagactcaggtccaccgctaagaccaaacgtcctgtgctgccacctcatggccagcagagggcaatgaaacccacctttccggccatgca

SEQ ID NO: 101706 - DNA, 122 bp, Homo sapiens
tagagtcagatttggtgccagtaccacccctttctccagcacctgcctgaagtgccagagcgactcactagacagaagtataagccccatgtttcagaaaggggcagcctcacagataaact

SEQ ID NO: 101707 - DNA, 122 bp, Homo sapiens
ccctgtctctaccaaaaaattagctgggtatggcactgtgtgcctgttgtcccaactactcggagggctgatgggggaggatcacttgaacctgggaggtggaggttgcagtgagctaagat

SEQ ID NO: 101708 - DNA, 122 bp, Homo sapiens
gaccagagcccccgcacacctaggccacatggcacggcccaccgctcccaggctataaaccggcatagcatgtaactgtattgcatgccgcaactgtaacacaacagtatttgtgtatctaa

SEQ ID NO: 101709 - DNA, 122 bp, Homo sapiens
gtgggtgaatctaatgactggaataggtccagacttgctttcccaaaaccgctgcaaaatcgtcggagataattgtatcttttgcagggggaagcaagggggtaggtcgaaatcttttgaga

SEQ ID NO: 101710 - DNA, 122 bp, Homo sapiens
cgtttggcactggggagaatcctggcactttgcttcagaaacaaatctctttaattcctgcggactctgcatcaagcctgcattgctctttgttttttccaaggctaggacctgggctgttt

SEQ ID NO: 101711 - DNA, 122 bp, Homo sapiens
ggaaaatcccacagctgccctcatgtgatgggtcacatatattattaaaaatattgtggtcgggtgcagcggttcacacctgtaatcccaacgctttgggaggccaaggcagcgggcggatc

SEQ ID NO: 101712 - DNA, 122 bp, Homo sapiens
gaaaggaatcccaatccaacactgcactgactccagaccaggaatcccaattagtataaacgcagagggcatgaagactgagccattgaatgtcggcatgatttgttcatcagaatcaagtg

SEQ ID NO: 101713 - DNA, 122 bp, Homo sapiens
gctgcccagcagtgaacctgcagaatctcctgctcataggacatatcagcttctactgctcgatgctgtgctgcagacgtagcttttcccggaccggctcctgctgcctgaacagctagttc

SEQ ID NO: 101714 - DNA, 122 bp, Homo sapiens
ggccttgtctcaaaataataatgataaaaaaagaaacagactcagatatgacacagccgtcggaactgtcagacaggacattttaaatacaataaatatgctaaagactctaaggaccctaa

SEQ ID NO: 101715 - DNA, 122 bp, Homo sapiens
gaaggtttcggtactgaagagcagtatagaaaatcttttaggttaccaccaccttttacccgctatggtgaataaagctttggtttatgaatcggcgagtgatgtaacagctgtaatgtgaa

SEQ ID NO: 101716 - DNA, 122 bp, Homo sapiens
gtgcctcacacgaggggtccccagaggcttgcaaaacatccttctcttccaccacctccccggcttaccgagtctgccgcagcacccctgcgcccgccccaagcttgaggtagtctgcatgg

SEQ ID NO: 101717 - DNA, 122 bp, Homo sapiens
tatgttcaattggaaagatcaatataaacctttacctttaagaaaacttttggccgggctcggtggctcacgcctgtaatcccagcactttgggaggccgaggtgggtggatcacctgaggt

SEQ ID NO: 101718 - DNA, 122 bp, Homo sapiens
agctgccctggacagatgactttccaaagtgacatagtgtgctgggcccgctgcctgtcacgtaaagacgaggaaagaaagtttccgggttctcccacacacaattcagccctcactttgcc

SEQ ID NO: 101719 - DNA, 122 bp, Homo sapiens
gcattagggcttgaatctggaagacagatatcagttcgtcttggaattgttggaccatgccggatgaatgaaggcataagatctacaataaaacaaaggataaaattaccctttcatcatta

SEQ ID NO: 101720 - DNA, 122 bp, Homo sapiens
gcccggcaaggtagtggaagactggctgagcctggtgaaggccaagttctgtgaggcccccggcagctgcgtggctgtgcactgcgtggcgggcctgggccggtgagtgtcggggcggggta

SEQ ID NO: 101721 - DNA, 122 bp, Homo sapiens
tcctgattagctgtgtaatgcctggcacttctgtggttcaatctccttgtacacataccacgtccgtcatatggcatggggcatgtggccctcatgaagagagctgtgctgttggaacaaag

SEQ ID NO: 101722 - DNA, 122 bp, Homo sapiens
caaggtggaaatttagctgctgccattaaacatggggtaaactgtgctttccaggtaatgcggaacgcacgtgcctgcgttcagactccatttatcttcaccgtccttcaaaatggatgagc

SEQ ID NO: 101723 - DNA, 122 bp, Homo sapiens
cagggagggaaggaaaagggcgccggcccctaggatcaggcgggacccctccacttattgcggaatgagccgaacccgaaaagaggcagtcgtccaggagctgggatctcagtgagaaagac

SEQ ID NO: 101724 - DNA, 122 bp, Homo sapiens
gagcggaaaggaggattcgtgaaggctctctgatgccagtcaaggggttagactttgccccgcaggtgcggcctccaggtttttaagcagacgcctgtggctctcacacgccctctcccaag

SEQ ID NO: 101725 - DNA, 122 bp, Homo sapiens
agcggggtggttcatgtaaagaggaagcaagcacgcttctgggacagtaaggacgctacccggcatggtagttaagggtgcttactgtgaaggtggcctccctgggtccagctatttactgg

SEQ ID NO: 101726 - DNA, 122 bp, Homo sapiens
cagcaggtaagtgccacccagagaaagatcacacaaggattggtaaggcagtgatcctcgcgcggggactcgagaaagccggtgtgggatcgccttgggttttcccccaagtcttgacagag

SEQ ID NO: 101727 - DNA, 122 bp, Homo sapiens
ggggacatggctgagtggactcaggagttagaaacattcgctgggagcttctgtttccagcggagggaagagggaggcagctgagccctaactcagcaggcctggaaatattggaggagtgg

SEQ ID NO: 101728 - DNA, 122 bp, Homo sapiens
ctcctcgggctccggcgctggcggcgggggacgcggcggcaaggcctcgggggacccgggcgcctccggcatgtcgccccgcgcgtctcctctgccgccgcctccgccaccgcctggggccg

SEQ ID NO: 101729 - DNA, 122 bp, Homo sapiens
ccccccccaccccacccaggcaggggtccctatctctccccaggccctagggtggagtttcgctcttatcacccaggctggagtgcaatggcacaatctcagctcactgcaccctttccctc

SEQ ID NO: 101730 - DNA, 122 bp, Homo sapiens
tccactcgattaaagaggcctgcgtaagctggagagggaggacttgagttcggaccccctcgcagcctggagtctcagtttaccgctttgtgaaatggacacaataacagtctccactctcc

SEQ ID NO: 101731 - DNA, 122 bp, Homo sapiens
ctgcctcagcgaccagctctaccgaaggcagccatctccttcactgcctgcccctgcgcccgcggcatcccaggcccgtcttctctggcctccaggcttgcaacagcccaccgaggttgggg

SEQ ID NO: 101732 - DNA, 122 bp, Homo sapiens
actcccaggccgggctcgcgctctggatccctgaatccggcctttccggccggactgccgcgcctgtggccggaagagccagctagaccagagagtctgtacctgcaaccctggcggcgtcc

SEQ ID NO: 101733 - DNA, 122 bp, Homo sapiens
gttttaatggatatcttattggaagggctacatagtcagtatttcacaatatatgaactccgcataacacctatggcaaaacatttcagcactcaggtaaaattcattttttgccacaaaat

SEQ ID NO: 101734 - DNA, 122 bp, Homo sapiens
acgggattctgcagcgtccttagcctagcgggtggtgcggggcagggaagttccggacagcgaagagccacgttcgagctctaatgattctctgtgtccccagagaggaagtgtgaagtgtg

SEQ ID NO: 101735 - DNA, 122 bp, Homo sapiens
ccctagacgtctgcagggtgataaagggagggctggggttttcgcactgacaaaaactcacgtcaaccacctggccttggcccatggggatcccatgagcccctcgcagccccctggagagc

SEQ ID NO: 101736 - DNA, 122 bp, Homo sapiens
ttattggccagtatcagaaacacactccttatatgctaggagcagataccatcgtcccagcggacttccttcattttcctgtgtcaaaactaataccccttgttaaaactgccaccgatttc

SEQ ID NO: 101737 - DNA, 122 bp, Homo sapiens
cagcaagctgtgtgagtggctgaaagggtcactcacagaggtagtcatcatcctgtggctcgctgatctctttgtatgcatgaccctttctttctcgcaggctatacatctttccttcagtc

SEQ ID NO: 101738 - DNA, 122 bp, Homo sapiens
gaatgagaaccctaactttctgtaagctgctagtgcattaattttcactgctggtactttcgtccaaccttatcctttatgcaaaatagactaacaaatattaaatcctgtggttacagtga

SEQ ID NO: 101739 - DNA, 122 bp, Homo sapiens
ccgatgagtgtcacccatcttgaagtccgaattaaaagtgccttctgccctcctatgacacgttgcatctttattttttccttttagcatttgcttcattttgctttgtgttgtggttgttt

SEQ ID NO: 101740 - DNA, 122 bp, Homo sapiens
gtaacatctaaaacagagatgtggttcttaatgtttaacagaacagttctaatcctgccacgtgttatcattatagattttatagttgcctttctaactacttagcacagtttgagaatacg

SEQ ID NO: 101741 - DNA, 122 bp, Homo sapiens
aaagctctgggtaattattaaacattagaagtatagaacaaacaggccagccaggcccggcgaggccgcggcgggtccggcgccccggacctccggacccggaggtccggcgccctggttgg

SEQ ID NO: 101742 - DNA, 122 bp, Homo sapiens
cccagcccagaacacagggagagggcagagagatgtgctcatcagtctgggcaggcgggccgggagcagtcttccagaaacaggtgggagccagggctcattttcatagccaagggtcccag

SEQ ID NO: 101743 - DNA, 122 bp, Homo sapiens
tggcctggactaccttttaagcaaggatattaaggaagtggggctgaaaggcaagtcagccgagcagatgataggagacatcatcaacctcggcctgaaagggagggaggggagagcaaagg

SEQ ID NO: 101744 - DNA, 122 bp, Homo sapiens
cctgccaaactggttgctgcctccccggcagccgcggcgcgtccacctgcgcagccaccgcgccgccctgcccgcgctaccattggctcgctaaaaatgcctctctaatctgctctgctcgg

SEQ ID NO: 101745 - DNA, 122 bp, Homo sapiens
ggggagtgtcttctctctccaggtttcaccttccagtgtgcagaagttagaagggtctggcgggggcagtgccttacacatgcttgattcccacgctaccccctgccttgggaggtgtgtgg

SEQ ID NO: 101746 - DNA, 122 bp, Homo sapiens
acgcttcccgaccctgcccagccaggtcctgttcccaagtactcacgtcgtgcaggccttcggcgccccagtcctgccgactttcaaagacctgtgaaacttgatttcgccccttaatttta

SEQ ID NO: 101747 - DNA, 122 bp, Homo sapiens
ggagccgatttggcgaaagttacgtaaacaatggaattgtctcagtttgcgcctttgtttcgtttgacagccctccagggagtcatagtgattgctggagacggtgaactaacactgtgggg

SEQ ID NO: 101748 - DNA, 122 bp, Homo sapiens
aggagttcatttatttgaaacgtctattacctatacctggcttatcataggcactcgaaacgttattactgaaacctgcacaaccggtgatctgcaaagcactttcaccttaagtatctcgt

SEQ ID NO: 101749 - DNA, 122 bp, Homo sapiens
accgccccccatgagcaggatcagtgccgacgaggctgcagcgagtgtcgggctggccaccgcgaggggcctgggacgccactgccggcagaggctagaaggggcctgaccacacctgggcg

SEQ ID NO: 101750 - DNA, 122 bp, Homo sapiens
cggtgcaggatgctcaggtgctcgcggtcgagctgtggcctcgcccctccggtggatctccgaagttcactgttctgacaattacacgccatgacttttgaaaaaccagctgaggccgggcg

SEQ ID NO: 101751 - DNA, 122 bp, Homo sapiens
tccgggctgcctgccttctaaaagttcctgcaggaagcaggtgatgtggcctccccgacccgggcccgcccccaccactttgccggaggcgagctaaattccagccggggttcctagcagca

SEQ ID NO: 101752 - DNA, 122 bp, Homo sapiens
ccggcgcttgttgatgacgtaacttccggttgctgtgctgagtcggaagtgggaacccttcggccgctgagattctgtcgtgtcgtcgctgctggcacttcaggctctggtaagacaggcaa

SEQ ID NO: 101753 - DNA, 122 bp, Homo sapiens
ttccttgccccagagcgcccctccgaagcatccaggctacctcgtccgtcctcctgggagcgagtcctaggtgccaggagcagcgggagcctgcctgcgcactttgattagtctccctggcc

SEQ ID NO: 101754 - DNA, 122 bp, Homo sapiens
gggtgcggcccgggaggctgctaagagggcgctgacttgggcttgcagttgagcttttggcggtccggtggggtgtctgactcgcgccgtctgcaatcttcctcccgggtactgtgccccgc

SEQ ID NO: 101755 - DNA, 122 bp, Homo sapiens
gctaattcagcgggccgagttgggcctgccccagatgaattcctctggagctgaccggcccgcgcagagagcaagtgatgtggacagctgccttcagcatcgcagcccccagctcagtgtgc

SEQ ID NO: 101756 - DNA, 122 bp, Homo sapiens
ctacggacagttccgcggcgcacgcagccccaggccattgccgcagcggccccgggagtgcgctgccccgcctgggaaaggcgcaatcaggtgctcctagcaggaggaaacacacagtgcac

SEQ ID NO: 101757 - DNA, 122 bp, Homo sapiens
ggcggttgatggcggcctctgagtcttggtggtagttctggcgcacctgcgaggtagacgcggtcgtcatgccggcgactaaggagaggcggcggcagcggcagtggtggctacgcggcgct

SEQ ID NO: 101758 - DNA, 122 bp, Homo sapiens
tgaagatcacctttttatccagtgtacttgcagcattccccggtcaagtttcaagctgtgcgcccaggggtctgagataggttagaatgcaagagcaagagaacaccaccaacacaaaccag

SEQ ID NO: 101759 - DNA, 122 bp, Homo sapiens
ccctaagcgccccaaaatgaccagcctttacacaacccagctcgcaggcgaagctgaggtcggagctccaaaagcgagggaggacagccgctgaagaagtcccggcttcccataggccagga

SEQ ID NO: 101760 - DNA, 122 bp, Homo sapiens
gattgcaaggaggaagcctgctgcctggggaaggaaggaggggtgcaaatttctccagtacgtgaggaagttcctctgaccttgactacattactacacacgtccgtggctcttatggaagg

SEQ ID NO: 101761 - DNA, 122 bp, Homo sapiens
gtcacagatagcaagccgtccacccacgtacaaatacacactgttgcatggagtgtctagcgaagactgcttcaaaaccagtctgcagaatttcctcatttacatcggaaaaatgaatatcc

SEQ ID NO: 101762 - DNA, 122 bp, Homo sapiens
ggggccacggcggtgagcgcagcccgggactggagtttggggcggggcctcgtcggtgggcgacaccggggactagagctaagggtggggcctcgcggtgagtgcagccggggacgggaccc

SEQ ID NO: 101763 - DNA, 122 bp, Homo sapiens
tttcaattggacgggtgtttttaaagtctcgtctttccagccccaaacaaggtgtaacaacgcactcttccttctaaggaatgagatgagagacaaggatcactccagacatctcctaccta

SEQ ID NO: 101764 - DNA, 122 bp, Homo sapiens
cacgtacagactttgaatttagtaggccctgagcgttcatcttcatccgtccttctcagccggagcaccttgagctggcgcgtgttcaggtgcctctgagtctgtactccaaattatgttgg

SEQ ID NO: 101765 - DNA, 122 bp, Homo sapiens
taaatatttgagatactctagtaatatgattatgtaaattaaatatttaggatggagtcccgaagagaaaattacatgttctaagaagaaaagctgccagttgggttatcacttacagtgag

SEQ ID NO: 101766 - DNA, 122 bp, Homo sapiens
ggtagtgagcgaggagcatctgcggagatatgctcccgaccctgtattagtgcggggtgccggccacatcactgtgtaagcgagagggggtcttgggacttgaaatgcctgagatttggcaa

SEQ ID NO: 101767 - DNA, 122 bp, Homo sapiens
gcgggggtgtgagcggagcgcgtgcgggtggcgagggagcgccagtgccaacctgggagccgtgcctgccttccctgccgcctcgcgtcgcccaccgaagggacccggccgtgctgtccgcg

SEQ ID NO: 101768 - DNA, 122 bp, Homo sapiens
cgtggggatgcggggtgggcggcggggtatttttgggacggaggcctacgggccgagccacgcgcggcctcgcccggcggccccgggatgggccggcaggaggccgccggggtaactccgcc

SEQ ID NO: 101769 - DNA, 122 bp, Homo sapiens
gccctcagcctgcctccgcagcagctgggaaccgggcagcccagctggcccgccgcacggcgttaccagagctgccgcagccgcctggagccccagccgccatcctgagaattcgccgagct

SEQ ID NO: 101770 - DNA, 122 bp, Homo sapiens
ggcggaacgtgtgtcctgttgcctctttgcagacatgattaacaagcaggactgtaagtacggggataactgcaccttcgcctaccatcaggaggagatcgacgtgtggaccgaggagcgga

SEQ ID NO: 101771 - DNA, 122 bp, Homo sapiens
gctcactgacaattcagtctgggaaccggaagcggatgctccgcagggtcgaaaagaggccgggccagggtgcaacgagctgaccctccccttcccaccgcgccggcctgcgcgcgccgacg

SEQ ID NO: 101772 - DNA, 122 bp, Homo sapiens
gatcttcctcccttccacccttacgggcagcttccctccctgtcctcgtcccaaggtgcgcgctgtgattggaagcacctacatgctgacccaggacgaagtcctgtgggagaaagagctgc

SEQ ID NO: 101773 - DNA, 122 bp, Homo sapiens
tgagctccaggaggtgccccctgctcctcctgccccccacctgcccctgctcacctgcggcggctctgccctggtcccctgagctccaggagctgtcccctgctctgcaacctcccactggc

SEQ ID NO: 101774 - DNA, 122 bp, Homo sapiens
cgtgcggatgatggtattgaaatctatcccgatgccatcggacagcggggacaaggacagcgctctcttcttggagcgggccgagtgggacctggtggatgagtgccgaggactagggtaag

SEQ ID NO: 101775 - DNA, 122 bp, Homo sapiens
aagtcctgggaacccaggcaagtctcccagtcattgcccagcccgggtcctccctgagtccgaatttccatgtcccggaccagccggagtatggcattcctcaagctctttgctccctcatg

SEQ ID NO: 101776 - DNA, 122 bp, Homo sapiens
gctctccctaactttgataggcgaggaaaggacatagggcaggggtctccgtttctaaggcggaatgtcattagttttgttcttaatggtgcaaaacccaagagactctgaaccctctgcag

SEQ ID NO: 101777 - DNA, 122 bp, Homo sapiens
ctgagggcgaggcagggagggagcaagcggggctgggagggctgctggcgcgggctcgcgcgctgtgtatggtctatcgcaggcagctgacctttgaggaggaaatcgctgctctccgctcc

SEQ ID NO: 101778 - DNA, 122 bp, Homo sapiens
tggtgagggtcctggttggggtctgtactagagtaataagagccccttccaggcaacagccgcgaacgttctgccgtggatgcttggaaagcggggatctgagtagatggtgtttagggtag

SEQ ID NO: 101779 - DNA, 122 bp, Homo sapiens
ggccttctatgaggtcaaggtcatggttcgccccctttttccttccccaaatggcccttgcgccctgtcccctttcctggaccggctgcgacccgcccggggacgcgccttttcggggcgct

SEQ ID NO: 101780 - DNA, 122 bp, Homo sapiens
gtccacccggaccctgcatggaacatgccctttgcaaatctaaacccgcgttggggatcccggataattccgggccttgcatgggcgcggctaacaagagtgcccaccagggaactcgcctc

SEQ ID NO: 101781 - DNA, 122 bp, Homo sapiens
aagtgagttgtgcaataaatgttaagttgaaacctcctttctgttcttgcaatggtatgacgcacaaaagcaatcttaaggggaatgaaaactgtccaaaggttcagaaaagtagtgaaggg

SEQ ID NO: 101782 - DNA, 122 bp, Homo sapiens
tttgtttggtctctctccaaacgcgtgggtgtcatcggtgctcatctctgttccgggccccgtggccttcagcagcagcgtttaagatgtctgtccgtattctgcacgagggtttatatccc

SEQ ID NO: 101783 - DNA, 122 bp, Homo sapiens
cttggcccacgttgaatgcatgtgtcagtgtgtgatgtgacaacctgcattgttggtgttcgtcccgttcaggaagagggtagtgactctgcattctgtacacattaaaccatatgtgtaca

SEQ ID NO: 101784 - DNA, 122 bp, Homo sapiens
accccaaggacatttattccactgtgacagggctcatctctgaggagcaccagactcctgcggtggggagggaagattatccgcgctgcagagactagctggcctccggaagccgcctcctg

SEQ ID NO: 101785 - DNA, 122 bp, Homo sapiens
gtgagactctcaggacaggggtcaacaggacctgggtccagccttcctgactctgttcgtcggcaagttgttgaatctgtctgggccttgatttttctcgtgtgttcaatgggcagtgacaa

SEQ ID NO: 101786 - DNA, 122 bp, Homo sapiens
gtgttccacctgcctcggcctcccacagtgctgagattacaggcgtgagtcactgcacaccgccatgactgacttttatgtcattttaactggctgcaaatgaagtggagttagcaggtaat

SEQ ID NO: 101787 - DNA, 122 bp, Homo sapiens
cccacgaccgtcgccatggtcaccgctggcggcggagaggggtttacgtaaaggacgcagcgtcccccggggggcggaggcggccttcgcgccggcgccggcgccctgcggaagcggcgtta

SEQ ID NO: 101788 - DNA, 122 bp, Homo sapiens
ttttgtttttccctgtagacaggaataacattttgactagaaacttccctgatgtaataacgaagatggcctccttagaaagttccagaacagaccccttcacctctgtccccagaagcaga

SEQ ID NO: 101789 - DNA, 122 bp, Homo sapiens
actactccttagagtggaggtcagcagtgtctgattacctccagagttcctctctcttatcgtatcttgtccctcgctccatttccttttctggcattattggacagcaagtgttacaactt

SEQ ID NO: 101790 - DNA, 122 bp, Homo sapiens
cctgaaagccctgcgctaacactgtcctgtccggagcgaccctggctctgccagcgtccccggccacgtctgtgctctgtccttgtgtaatggaatgcaaaaaagccaagccctccgcctag

SEQ ID NO: 101791 - DNA, 122 bp, Homo sapiens
cttttctccttctccttcccctcccctcttcttttcttttcttttctttctttttgagaccgttttttttttttgcccaggctagagtgcaatggtgcaatctcagctcacggcaactttcg

SEQ ID NO: 101792 - DNA, 122 bp, Homo sapiens
ctgccctcggcgacggccgtggtccctgccctggggtcaattacagagcgaggtctgagccgcagaggctgggttttaggtcacagctgcctgaggcccacctgacagaaagttgactccag

SEQ ID NO: 101793 - DNA, 122 bp, Homo sapiens
gccgtgttcgcttgaacctaattcagtgggacagcagctgtctgggagacagcctcgggccggagccagcagaaacacggccgcagcactgtcctcaccttctagacagggaggtcagactt

SEQ ID NO: 101794 - DNA, 122 bp, Homo sapiens
ggcatgtgaggactgaaactcagtgtgaggatgggaagtttatgtctcccttctcaagcacgcagtcaggatgtgcatttgctgagtggaattgtggacaaaccattcacactccttaaatg

SEQ ID NO: 101795 - DNA, 122 bp, Homo sapiens
ggccccgccgctcctgctgctgctgctggccagtggagcggccgcctgcccgctgccctgcgtctgccagaacctgtccgagtcgctcagcaccctctgtgcccaccgaggcctgctgtttg

SEQ ID NO: 101796 - DNA, 122 bp, Homo sapiens
tgagagtggtatagaagtcaagggtagagagaatgtcaggaaggaaacatgatcaaatgtcgaatgcctcagaggtcaaataaagtgagaactgtaaagtgcttcctgactttgccagttag

SEQ ID NO: 101797 - DNA, 122 bp, Homo sapiens
acgacagccagcgggcccttaaatgcgagttggctgcattggcctctgctcaggagtccccggcacagccgtctcaggtgctcagagggaactccattgtcgatgcctggcttcctgggctc

SEQ ID NO: 101798 - DNA, 122 bp, Homo sapiens
gcggtccttgataagctgatctggggctttcctaggtcccctaagcctgatgagactgcacgagtgggcaggggagggacttaagattcttgccaatctgaccgtaagataaacaggggtaa

SEQ ID NO: 101799 - DNA, 122 bp, Homo sapiens
tgaggccgcgcgtggttcttcaatcacagcagaagactaaagcctctaggaaccccaactcggggcgtcaggaggggttggatggaagggaagatttggggtaatgtgccaaccgtatccac

SEQ ID NO: 101800 - DNA, 122 bp, Homo sapiens
ctgccattgtctgtgctcagaaaaccctcagtttctgcctcttacctgccagggtggtgccgcatcccacccccatcattgagcttgcctcatgtgtctcagcacagtcttttacagcaaaa

SEQ ID NO: 101801 - DNA, 122 bp, Homo sapiens
agccaagttaattgcctgtatttgcttcctgtggaaatatttcacaagacaccctgttatcgtgggcccagcatttgtacttgtgttttgctgatccgtttagcttttttgaaaattttggg

SEQ ID NO: 101802 - DNA, 122 bp, Homo sapiens
gagtgttgtcatcgtgcctctcagtgtctgcctccttcgctggtgtgtgagcccctcaaacggcttaggactgtatctgattaattcttaacgcctcgtcccagaagcggccttttcccttt

SEQ ID NO: 101803 - DNA, 122 bp, Homo sapiens
tgccagtctacatctactttatatgttcatttattgccttatgcaccagagagaaccgttcgggggctagaagccaagtcttcacgttttctgctgattttccgaacacctaccgccgtgtc

SEQ ID NO: 101804 - DNA, 122 bp, Homo sapiens
cagaggccccaacaccacagagccacgtctactcaccagcccccagcccccaccactccccgcacagtgtcctccatcatgctgtgggttttggaggttcagagggcacccagctgggagct

SEQ ID NO: 101805 - DNA, 122 bp, Homo sapiens
actttcagctgtgtcagaaaaaaaaaaaaaaggataggggtagcagaacaagttcaggaacgtagcaaatgtggcagaatgatgacggttggtgaatcaagaagaaaacaaatgtttattgt

SEQ ID NO: 101806 - DNA, 122 bp, Homo sapiens
taagaagtttctttctgagaaaggaaggcagagaaaaccctacccactcatggtggtggacgggtggtggcactgccttcagcactgagcctggaaagatgacttctcaccagcaatgagtg

SEQ ID NO: 101807 - DNA, 122 bp, Homo sapiens
ccagcccccacggtttcctgggcagccccgccttccgctgcccactccgtgagggatatgcgcttgggagctgcttcccctgcctgggagtgcagcccaggacccaccagggagcatgttgc

SEQ ID NO: 101808 - DNA, 122 bp, Homo sapiens
agtgagcagatcggtccccctcgtggagcgtggctctgagtcaaaagggtgcccgggtgccgccagttagggctccggtactggaaggagggggtgggccacgtgcgtctagggagtgcagc

SEQ ID NO: 101809 - DNA, 122 bp, Homo sapiens
ctatctagtaactgttgtgttcttttctcttttgccacaggttccaactatgggagcccacgccccgcccatgccaacatgaatgccaatgcggcagcggggctggcccctgagcacatccc

SEQ ID NO: 101810 - DNA, 122 bp, Homo sapiens
cctccgcctcctcccgcccttggctgcccctcccaggctcggcctccccgcgccggttcacgctcacatttgggctccccggcttgctgctggtgccgtttcatttcccatctgctcacctc

SEQ ID NO: 101811 - DNA, 122 bp, Homo sapiens
ccgcgacctgtgacgagtgactgcaggaatgcaggccacctggcgcccttacggatttaacgggccggcttccgaccccctcctgcggcgcgaccactgttcctcgcctgtgtcccccagag

SEQ ID NO: 101812 - DNA, 122 bp, Homo sapiens
gctgggggaggcggtaccttcaggggacactcaggagtcactgcacattaagatggagcccgaagagccacactccgagggggcatcgcaggaggatggggctcaaggtgcctggggctggg

SEQ ID NO: 101813 - DNA, 122 bp, Homo sapiens
caggactcttcagccactcagaggcctctacctcaggacctcaaccgatgattgggcgagcgcagtacgggcgttgcctggggaacgccttccgcgcctcgaagtaacgtcagcacgtcgac

SEQ ID NO: 101814 - DNA, 122 bp, Homo sapiens
tctgacctatcgtgtaggtaaaaattaatcttcagagtattacagacatgcgtgcccacgcgctaggcgaaagtgcgagtcggaagcacttcattccctctcttcgctagccggaagtcgcg

SEQ ID NO: 101815 - DNA, 122 bp, Homo sapiens
cagacaaaactgaggtcctggaggctggaggggggttggggcttctcagcgccgattccgcgggaagggccctggggcctcacacttagtcccgggagctgcaggtcttacctggagagacg

SEQ ID NO: 101816 - DNA, 122 bp, Homo sapiens
gggccgcagtacaggcgtgtggatgtggaaccctttctgggacggcgaaaccagctcttacgccgcttccgcgcgccatcactccctaccctgacctcgcacagaatctgtttcattaatct

SEQ ID NO: 101817 - DNA, 122 bp, Homo sapiens
gcctccacctcacctgggtgcttgcgcccgagggcacctgcatagaacaggcaacgcacgcggcactgaaccttcatcccccagggtcctgtggaaaccttgctatgtgccaggccctacac

SEQ ID NO: 101818 - DNA, 122 bp, Homo sapiens
catgacctcggtgtggaagcgcctgcagcgcgtgggcaagcgggcggccaagttccagttcgtggcctgttaccacgagctagtgttggagtgcaccaagaaatggtgagtgggagggaggc

SEQ ID NO: 101819 - DNA, 122 bp, Homo sapiens
ccatacatgttgggctgcagtaatgggatgcttatgctctcttcccacccttctccgtctcgctggacaccatgtgcactgtaattatacacaacccctgcaaatcaaaaccaaagtcatgt

SEQ ID NO: 101820 - DNA, 122 bp, Homo sapiens
tgggcccacctgcttctgttttctttgcttgggtcttgaggaattccagcagctgcgcggcgtgcacaagggctgccattgttctccgcctcagcgtggcggacaacgcgtccccaggaaag

SEQ ID NO: 101821 - DNA, 122 bp, Homo sapiens
tcctgtatcagttagaagttagcatcctgaacattctcatatgggtgaaggaggggccttcgtcaggcttcagattgtcttatgagcaatatctggaataatatttggtaaacagctggcct

SEQ ID NO: 101822 - DNA, 122 bp, Homo sapiens
caatcctgtgcctcatgaggctaatacttgtggccacttcaccccattcggtcagcaaggcgtcgttctttcctacaagtgtttgttgttgttgttgttttgagacaaggtctcactctgtt

SEQ ID NO: 101823 - DNA, 122 bp, Homo sapiens
acgagtgcggcgccggtgagcggggcccagaggcggcggcggcaggtgagtggcgggctgcgggtgcggagcctcccggtgggtgcagctgtcacgagccgcgcggccgcggaggccctagg

SEQ ID NO: 101824 - DNA, 122 bp, Homo sapiens
aatttagtgagggaagccccggcccgggtgggtggttacgcattccgcacccggtattgccgcatccgacctctggccaagtcaggcctcaggtccctgataactggtgtgccctaaactcg

SEQ ID NO: 101825 - DNA, 122 bp, Homo sapiens
tctagccgcgtccagcgctgccacagcaacggcgcgcagggcagggacccaggagggaggcggggccgcgcctgacccagtccagcaccctggcctgccagcctcgccgcttcgccactcac

SEQ ID NO: 101826 - DNA, 122 bp, Homo sapiens
gtggaccctgaattcgcctctcctcctgtcctctgggaggtggtagtttccatgggaatccgtgagggtagccgggcagctccctaaaccttagcaacagaaacaaaacacacgtacaaaag

SEQ ID NO: 101827 - DNA, 122 bp, Homo sapiens
tgtccccatctggctctctaggacactcgttctagaggcccgcccggccgtctcccagctcggctgccccccgcaggcccttcgctctggcctcagccaacagagcctccgcacgagggcgc

SEQ ID NO: 101828 - DNA, 122 bp, Homo sapiens
ctcttgtcacctcttgttacacatggccactgtgctggcggatcacagcatcgttgtcagcgtgaggaagcttccccggtgtctgaacgagtctgatcaggcagagacgagcagggagtggc

SEQ ID NO: 101829 - DNA, 122 bp, Homo sapiens
gcggggggccggggggcgcagaggctgcccgaacgcctaggaggtctcgagggtgggtggcgtacagcggggcgggggcgcaacccagaggccgaggctgggggctgggggaggggcgccgg

SEQ ID NO: 101830 - DNA, 122 bp, Homo sapiens
atgcactgattgtagaagcaatgacagccacagcttcgagtctgacggctggcgggcccccggaggggcgcacctccctacaccagccttcgtgcccctggggctagcgctggaagcagcac

SEQ ID NO: 101831 - DNA, 122 bp, Homo sapiens
gccatgctgcgccccgatagctttgtgggcgcatcgagtgcccgccgggtcaggaagcttcgtgaggtcatgcacaagaagacctgtgacgtcctcaaggagtttcttggcttgcactgaag

SEQ ID NO: 101832 - DNA, 122 bp, Homo sapiens
ttggaggatcaggttagtccaccactctgctcctcctgcgcggtgagggggtggtacacgcgccctacctcggagtgtgtggcgccatgatgcagggaagatggcttcgtttcggaagctaa

SEQ ID NO: 101833 - DNA, 122 bp, Homo sapiens
acagtgacataaatgatattaacttcagccatttatcctaacaggttttgtagattttgtcgcagttgaaaaataaaaaagatacttctcatgttccctgtcagtgttgggtaaaggtgatg

SEQ ID NO: 101834 - DNA, 122 bp, Homo sapiens
ttgcgtgtctgggggtgtcgggacacgcgcaggacacacacagtcccactttcctagtctcgcacttacctcaaggctgtcaacttttacgctcctccctgcgcgcacagcccccacctcac

SEQ ID NO: 101835 - DNA, 122 bp, Homo sapiens
ctgaaatctttaacttacctttctaggttattccccaatgccaaatttctcctgatggtccgagatggccgggcatcagtacattcaatgatttctcgaaaagttactatagctggatttga

SEQ ID NO: 101836 - DNA, 122 bp, Homo sapiens
gccccgggcgtggaaaaggacccaccgacgtcggtgatcttggtgcagatctcggtcagccggtcgccggggctcttgtcaggcgtgttgagaaagtgggggcgcagcagcgacttcagggt

SEQ ID NO: 101837 - DNA, 122 bp, Homo sapiens
ctgcaggctttgcccgccttcctggaagctctgtccctttagaggcagggagggatgaaacgctcccctcacataccatagagtgtggtccccacatggttctggcagggttctcatgcgcc

SEQ ID NO: 101838 - DNA, 122 bp, Homo sapiens
ccgagtctgacccaaagcgtaggtttctcttctcagccacgccttcagccacgcacaccacgcccaatcggccgtcccagggttgggctacgccaaatctgcaaccagcaggctgggcgtgg

SEQ ID NO: 101839 - DNA, 122 bp, Homo sapiens
gtgagtccctgcccgcagttttgaaactagacatgttactaaacactcctcagtttacttcgtgtggagctgctgctttgctggaaccctgcctctcggacatatgagtgctacatggcctc

SEQ ID NO: 101840 - DNA, 122 bp, Homo sapiens
agtattctgggattgagactgaacaaataagtaagtacatgatggattctgagagctccacgtctccttgtcagcagagggagtaacaaatgtgaaaggagaaggccagccggtggcctttg

SEQ ID NO: 101841 - DNA, 122 bp, Homo sapiens
tctgtcttcactctactaaatcttgcaactgcactcttctggtctatgtttcttacggctcgaggtgagctttcgcttgccatccaccactgccgtttgccaccgtcgcagacccgcggctg

SEQ ID NO: 101842 - DNA, 122 bp, Homo sapiens
caaccagatctcacctgtgtacaagaaggtcaggggtgtaggggctctgccagcttagaccgggcagcctgccaccaggcctggaatctggtgcagcttcaagaaacagttactcctccctc

SEQ ID NO: 101843 - DNA, 122 bp, Homo sapiens
cccactgctctgccccatcctggcttttattgtatctcctctaaaagggtgtgagctccacggggaggtacccatgtgctttgaggaaggtctgccccagtttatattcaataggtactttt

SEQ ID NO: 101844 - DNA, 122 bp, Homo sapiens
actcgtcaaaggcccggagaagcatcgcatgggacaggaggggaaggactcctgggggcacgtcctgggcctctgcccggagacccagtgtcttcctgccagcatctgctgccaggcagcag

SEQ ID NO: 101845 - DNA, 122 bp, Homo sapiens
agccaggtgaaggggagtgggagtggtgcgagctggatcctctctgctgctgggtgatcacgatctgtctagtcttgtctcacgattcaattcaaaggccacattttctttggaacttttcc

SEQ ID NO: 101846 - DNA, 122 bp, Homo sapiens
acccgcgaaaggcactggctgcggaaaagcagccaactgctccccagcgaaggggatggccggaagcgaggagagggagaagccccagcagagaccccaggaggaaaagaccccacaacggg

SEQ ID NO: 101847 - DNA, 122 bp, Homo sapiens
gggcggggcggaaaaaatacttcccgtctctccttttcgcctattagctccgtcaaaggtcgagtccgtgacgtcaaagagcatgggccaatcagagcacaccggactgctttttttttttt

SEQ ID NO: 101848 - DNA, 122 bp, Homo sapiens
gtaaagcgagctctggagatcgcatagagaaactgtagtgtcctgggtccgagcgacgcccgcttcccgcaaccgggagagccgattccggccgctgccctcggggggctccgcatacatct

SEQ ID NO: 101849 - DNA, 122 bp, Homo sapiens
ggtgggcggagctaaacccggagcgggatgacgtcatgaggacgcagccgcagagcgattcgcgtcccggaagcggcggtggcggccgcggcgtaggcggaggagattttcggacctgcgac

SEQ ID NO: 101850 - DNA, 122 bp, Homo sapiens
tcatgtgggttctatctcaattttaaaagagaactccgtctcctgagcacggcacacgggcggtcggagggtgagtcgatacttacgttcttcaccgcatcagcatatttctgctcattgaa

SEQ ID NO: 101851 - DNA, 122 bp, Homo sapiens
atccccgctccggggacggagtaaggcaaggaggcgggatcggaatgttggaggcagaaccgcaagctcccagggccacccaatcacagggccagtcatccgttgagaccctgcctccgcgc

SEQ ID NO: 101852 - DNA, 122 bp, Homo sapiens
aagtcagcctgccctgtaatcccaacccaggacttcacgaggagctccgccccaggccggcggttctcctggtggcattcaacttcctcattggtgagcaagtgaaggcttctgaaagtgct

SEQ ID NO: 101853 - DNA, 122 bp, Homo sapiens
taaattgcccctggctgtgaagaaatagcccctgaactcacaaacggaggcagaaattgtcgacccaggccctaaaactggaggtttcatgcaaaaggccccgcttggtaaaagctctggcc

SEQ ID NO: 101854 - DNA, 122 bp, Homo sapiens
cacaaagccccactgctacttttaagcctcgaggccacgcacaagaccttatccgccagtcgccctggccaggcagctacaacacagaaggcatagtgcgtgctatgctatgttcgcacaat

SEQ ID NO: 101855 - DNA, 122 bp, Homo sapiens
ggtggcacaagccgggtcgcggctctggcgggagcgcggggacctgcggatcagcactagcgccgcttccagggtcatccctactctcaggctcagggggcccatcagccgcatgacctgaa

SEQ ID NO: 101856 - DNA, 122 bp, Homo sapiens
ccccgcttgatgcctctgatgttctccagttcccttctcccaggtcccacgtctgctccccgccacctccagggaatcacctgtcatggtggatgagtttgagctcacagccaggcctcccc

SEQ ID NO: 101857 - DNA, 122 bp, Homo sapiens
aacagtgtttccccaaacttgcctcatcgtatgaatcacacaggcatccattaaacattccgattcaatacttctgggatggggtgtgggaatatgcatgtttaataagcacctggagtgat

SEQ ID NO: 101858 - DNA, 122 bp, Homo sapiens
cgaggccactgtcccagggccccagaagctgcaggaagagcctcctctggggcagagacacgccatgcacgcacgtggatccgaggacagccatgccactctccggtcacatgacccacgcc

SEQ ID NO: 101859 - DNA, 122 bp, Homo sapiens
tgagattacacagctgcagtgtgcatggaatgaaaaggtatctgtgcttggccgccagagcgcccagtatcctgaccttctgaacaaagcaaacctccctctgtttttaatgggtgagtttg

SEQ ID NO: 101860 - DNA, 122 bp, Homo sapiens
tcttccttcccgggatccacccccacgtcccccatctcccagcgcactcactgcccgccccgcccctcaccacagggcgccaatgcagggcagacaccgccaccagcctcccgcacctgccc

SEQ ID NO: 101861 - DNA, 122 bp, Homo sapiens
ccggcagtgaggaggaggagcgagcagacttgggtggctctgcgccgcggaggccacagccgcagacttccccagtagtaccgcgccgctccgccccggagtgacgccctccgcccatgggc

SEQ ID NO: 101862 - DNA, 122 bp, Homo sapiens
tgcacggtgcccagcgccagggtccagctcctggatcgcaggtcgaggaggggccacgggcggctcactgaaacctccgcctcccgggtccaagccatttccctgcctcagcctcctgaata

SEQ ID NO: 101863 - DNA, 122 bp, Homo sapiens
catttcggatgagtccacgctcgtggtcatcaatgacatcaacaaagaggaaagaaagcacgcgcacatctctgtgtgtcagatgagtgcccacgatgtcaaacatgcggtgcaggctgtac

SEQ ID NO: 101864 - DNA, 122 bp, Homo sapiens
cccggccgggtcccctaaggcgccgtggacgcggggggcggggcgagcgcggtcaggccccgccccggtcaggcccggccccgcccccagtcagaccccgcccccgcagcggcgtccgccca

SEQ ID NO: 101865 - DNA, 122 bp, Homo sapiens
ctagcagctggaccaaattctagtgacatggttcctttaagaacttgcccacagtgcatacgaaggacccttcatctcagctctgatgggctgtctagcttctgcccctcactgtccctgtc

SEQ ID NO: 101866 - DNA, 122 bp, Homo sapiens
ttctcaagacactaggctctcctgggttctgtaaccccgccgtggtacccaggtcccattcgctccgcccctcctggaaccccacccccacctccggaccccgctctgctgctcacactctt

SEQ ID NO: 101867 - DNA, 122 bp, Homo sapiens
tgcctcttagagattaggctggagccacagaacctggccaaggtggtccaagcctgcagccgctcccctgttggtgggttcttcaagaacaactcgggtgcttaggcttctcagagctgaag

SEQ ID NO: 101868 - DNA, 122 bp, Homo sapiens
gcagttggggcggggctgagggccgagggctggcggtgacccaaggcgacggaggaaagccgtgtggggtggaggtcagcgagtagcctctcccggtggagagtttgtccaggtgcccgaaa

SEQ ID NO: 101869 - DNA, 122 bp, Homo sapiens
tgtgtgcttggtccccaccatttctcctgcagtcccagactaaggaaggactggacggcccgacccaagcctcccgcaaatgattttaaggaaggagatgcccctcggcagccagacatgag

SEQ ID NO: 101870 - DNA, 122 bp, Homo sapiens
gggtcggatcctggaggagaaaaggtaagcaaatacccgcaacagacaactaggggtaaccggggcagccagaaagtggacattgcacaggcgatgttttgctatcgataggtactaatgta

SEQ ID NO: 101871 - DNA, 122 bp, Homo sapiens
cacctttgttttggtgaaagaaagaatgcatgtctacacagagcatttacaggggagcagcgtcatgtgaattctaataatggaagatttctccaaggagaaatcaactcttgggcacagaa

SEQ ID NO: 101872 - DNA, 122 bp, Homo sapiens
acagtggcttgtccctgtttcctgggggcttggccagtgccagggtgggctccaaacgcacggctctgggctcttggactcacccctgctttgggcaggcagtggaaggcaggccccacaag

SEQ ID NO: 101873 - DNA, 122 bp, Homo sapiens
atgtacgcaatcaatatttctggcaacttggccatcatcacactgattctctctgctccacgcctccacatccccatgtacatcttcctcagtaacttggccttgacagacatctgcttcac

SEQ ID NO: 101874 - DNA, 122 bp, Homo sapiens
aggaggcctccaggacttgggtctagcatccgcgagttaaacggggcggggacggaggagcggaccctctggatcccccgaccctggctgaaaggagacaggcttcaccacgtgaccgcccc

SEQ ID NO: 101875 - DNA, 122 bp, Homo sapiens
gcagtcccggctcgcaggtaattattgccagcggagcccgccggggagcgggggtgggcgcgccggcggtgggcgggcgggcgcggcggggcgcgggcataaaggggcgcggcgcggggccc

SEQ ID NO: 101876 - DNA, 122 bp, Homo sapiens
tacaactcagaccctttggatctgcgctttttagaagtactgtacttcacattctggcaccgtaagcccgaaatgtcctttaggcaaatgttaggagggaaaaatgtattcttgcaattcaa

SEQ ID NO: 101877 - DNA, 122 bp, Homo sapiens
gctccttgagcagcagggccacgcgctggacgagctggttgccatcgagggaggtgagcgcgatgtagaggaagaggccatagagcacgggcttggggatccactgaagcgggaccggcagc

SEQ ID NO: 101878 - DNA, 122 bp, Homo sapiens
agtgattaaccagcctcagcctcccacagtgctgggatcacaggtgtgagccaccgtgcccggcaccagttcccattaattatcttggaacccaaggattcaaagaagcagtcttttcaaag

SEQ ID NO: 101879 - DNA, 122 bp, Homo sapiens
aaaaaaaaaaaaaaaaaaaaaacccagaaggggaaatgtgcaatgaaagacacagatattcggggccttacagtcagagaccaaatgagggatggtcaaccaagggcacagccactgggcac

SEQ ID NO: 101880 - DNA, 122 bp, Homo sapiens
ttccaactgttctgattgttagtgacttagtcttttgttttctcaattcataagtgtccacgtttactgagcactgtttcaagatttgtgctaagtgttttaaaagatctcaaaatccccaa

SEQ ID NO: 101881 - DNA, 122 bp, Homo sapiens
caccagttcgcacgcctcacaggtccagtgcttcccaggtcaacgcacgcacgccacgcacgtcccactcgccgctcacactggcccatagccgcgtccgtcagcccgttccgcccgcccct

SEQ ID NO: 101882 - DNA, 122 bp, Homo sapiens
tcagtagtggcttgagaaaactaactgttgagtctgacaaagcaaagttctaagatagtgcgaagtataactagggctgctttgaaaaggaaacccagagagcaaggacaggtgtcgcttag

SEQ ID NO: 101883 - DNA, 122 bp, Homo sapiens
atgtgtgatgttgggggaagtcaccagagattctctggccacaggctgaggtgcctgacacgggtcaatcatgaatcgggaaggactatctctgttacgtgggacagaaaccctgaatctgg

SEQ ID NO: 101884 - DNA, 122 bp, Homo sapiens
cctgcgggatgcctgtgagctagagtctgggactgagccctgtgtggtcaggaggattgccgacagcagcgtgcagacagacgatgaggatggggagagccgctacctcttgagtcggcgac

SEQ ID NO: 101885 - DNA, 122 bp, Homo sapiens
gggctgtgcagcctctagtggagacggtccgaagactacatctcccaggctgctctgggccgccctgcgtcgtaaccctggcgcgcacggaggcggcgactcttacctcacaaaggtagctc

SEQ ID NO: 101886 - DNA, 122 bp, Homo sapiens
caaaagatcagcggcttctattaacaaacaggtgtttcttactgtattagtctgttttcacgctgctttaaagaactacctgagactcagcaatttataaagaaaagaagtttaattgattc

SEQ ID NO: 101887 - DNA, 122 bp, Homo sapiens
cagtgccgcatccgggggtgctcgggcactgcctgctctctgtcaccatgaatgccatcgcgaataatgccaagcattgttacaatatctgtgggttgccgtggttcctgttctccggggcc

SEQ ID NO: 101888 - DNA, 122 bp, Homo sapiens
cgcgcgttctctctctgaatttgtttcatttcactgcgagttggggtcgcgggggtagatcggagctgcctcttgagaatagcagtgcccaggctttggcccaggtggccggaacgcccctt

SEQ ID NO: 101889 - DNA, 122 bp, Homo sapiens
aagtggcagaggggaagtgtcatcatcgccgaaggggaagctgcctttcctggtaactggcggcgctctcgggaccacttcccaagcaggcatctgcccctctgttgtctggttccccggct

SEQ ID NO: 101890 - DNA, 122 bp, Homo sapiens
acctgacacacatttgggtaaatcgagttgcacatattaccatgttgcccaggctggtctcgaactcctaagctcaaatgatccgcctgccgcagcctcccaaattactgggattataggca

SEQ ID NO: 101891 - DNA, 122 bp, Homo sapiens
atggcggagctgggagggtcttgggctgggctgggctgggctgggctgggggactggtcccgggttggaggagggcgtgttggggagcctgcccgggttcctgggagaatctaggcgtctca

SEQ ID NO: 101892 - DNA, 122 bp, Homo sapiens
atggagcgaagcagtgaaaatacctacaagtcccgtcgccggagttaccactcctccttgcggctgtcagcccaccgcctgaactctgattcaggtgaggaggtcttcagtgtccagctctt

SEQ ID NO: 101893 - DNA, 122 bp, Homo sapiens
gctttgaggcgccttggggtaagtgccgcagagacccagcgggaatgcaggatggcagggcggcctcggggcggcagcaggcactgcgcggtggcccaggaagacgcagcgcggccgggctg

SEQ ID NO: 101894 - DNA, 122 bp, Homo sapiens
gctagacccttaattttcccccttatgtgggcaggatggaaattatagaaactttattctcgtctccctgaagaaaagttgagattaggaatgtccccttagtctgcttagcaatatggtga

SEQ ID NO: 101895 - DNA, 122 bp, Homo sapiens
ctggtatttgagaaccagccctaggtctccttgcaaaggcatcgtctccgttcatggcaccgggagcagtctgtcctgcaagagaaacagaccgagtctttccagccacagcagctttggtc

SEQ ID NO: 101896 - DNA, 122 bp, Homo sapiens
gccagaggaggggccgattggaagcagccacctcagcgaagctgcaggatttccgcagggcgggagctgtttatctcccggaagaaaacggctcctgtcacagaagtctcgtgattgctctg

SEQ ID NO: 101897 - DNA, 122 bp, Homo sapiens
tcacaggagtgtcccgcggaatgccctgccgcttttcgccacagcatctctcttgcactccgcgttcaactggctacctagagtcttttgctgatgctacttgcttttgccggactggaggt

SEQ ID NO: 101898 - DNA, 122 bp, Homo sapiens
cttccttctggagctgggtcctgactagggaccgcctgggtgaggtgaggacctggtggccgcagttgtggcactgtgcgcaggcgctgaactgaccggacggagcgggcggctgtggcctc

SEQ ID NO: 101899 - DNA, 122 bp, Homo sapiens
catgaagcgtggaggggtctccggtgttgctggagggcagctggagcctgcggagagcctcggcgcgctcctccctctcccccaccctccccccaccccgggcggggctccgcgtggggcgg

SEQ ID NO: 101900 - DNA, 122 bp, Homo sapiens
tcccttccctgttcatcacaaagtctcataatcacaatgaaaattgttaacactctactgcggggaaggaggatcatcaaagtgaaacggaacctcactactccccctcccacctccacatg

SEQ ID NO: 101901 - DNA, 122 bp, Homo sapiens
tagggcgccggcctgccttccagcccagttaggatttgggagttttttcttccctctgcgcgtaatctgacgctgtttggggagggcgaggccgaaacctgatcctccagtccgggggttcc

SEQ ID NO: 101902 - DNA, 122 bp, Homo sapiens
ccacctcggctcttcctaggtccgctcccttgtgcgagactcaactcccaaaagggcccgcgtctgcaccaccagcccctaaccctcccgggcgccaggagagggagggagtgcaactgcga

SEQ ID NO: 101903 - DNA, 122 bp, Homo sapiens
ctgcatttccggcccccttgctctcctgcacttccgcccagtcacatggatgatggatagcgttgggagctgttttctctatcttccaggtggctgctgggatcctaaacttgtttctttaa

SEQ ID NO: 101904 - DNA, 122 bp, Homo sapiens
ctgcgcggctctccggccccggcgcgccccggaggaacccggccgccgcttccctggggacggccgagcctgcccccgtcggcgcctccccaaaaagaggcccccccgcagtggctcccgaa

SEQ ID NO: 101905 - DNA, 122 bp, Homo sapiens
tcacagctgcgggggaaggtgcatcaggccagaccacgggaggccccacactccagcacccggtggcccccacactagccagccgtacccagagggcttgcattggtcaggatagaggcaaa

SEQ ID NO: 101906 - DNA, 122 bp, Homo sapiens
ttgcaagcattgggtgaagaagctaagcctctgggcctcacaaccaaagcccaggcttgccgcaggctacagaaacagttttcagaaagtacccagctcctgacaaagagtgaccatttaaa

SEQ ID NO: 101907 - DNA, 122 bp, Homo sapiens
ttggtgtccacggagagttggtatgcacaccgctagagggcgcaggagatcactcggccccgaggagcccttggtcaaggcacctgtaaagtcacccagccctctggcggcttcccgtttac

SEQ ID NO: 101908 - DNA, 122 bp, Homo sapiens
ccagacctggagcttccaccatggatgtgcatgtctcagccactggctcaggagagtcctcggaagggacttcggcgggcaggtaccctggagattttctggcccaagtttctttcaggcct

SEQ ID NO: 101909 - DNA, 122 bp, Homo sapiens
tctcctctggccgctgacctgcccgcctgttccgcagtacgtggtcatccccacgcggcgcgccactgccgtggccttgcagagcttcacctcccacctgctgggggacgccgggagcccct

SEQ ID NO: 101910 - DNA, 122 bp, Homo sapiens
ggatgagagaagtcgcaggaagaatcctctgcccggagcctgcagactccaacccctcagcgtgagggtcaggagccccacagtccccacagcagcaggaagcactagctccgggtcccgag

SEQ ID NO: 101911 - DNA, 122 bp, Homo sapiens
gcctgaccaggaggctcagtcattcactggacagctcccactggccgggagccagcttggcgcagggcaagcaatgtgatcaaggcagacactgatgcgccctggagaggttagagcaagag

SEQ ID NO: 101912 - DNA, 122 bp, Homo sapiens
taaagggcatgctcagttacaagggtcactgcatttggaaatacccaaactatgggtccccgtcatttgttacggttcatgaaatattcttcccagtaaagatacaaaatgccaaccagaag

SEQ ID NO: 101913 - DNA, 122 bp, Homo sapiens
cgcgcgccggagacggttagaaatggcggttggggcggagcagggggctggcgcgggaagcggggctgtctggctcggttacgcccccacctcgccaggaatctaggagtcggtttgttttc

SEQ ID NO: 101914 - DNA, 122 bp, Homo sapiens
cgacagggttgggaagaacgctggaaacgctggggctttgcttgtacccctgacccattccgattttcataaagctccgcatagttccacgggcaggcctctgtgccttcgcacatgcagct

SEQ ID NO: 101915 - DNA, 122 bp, Homo sapiens
agaggcaacggtactacacaatggcctgggaaacactccaggacagacgaccaggcaggtcggttagtctgtctttaacaaataaacttcaagggaaaaaggagagaaagcaaacaatggag

SEQ ID NO: 101916 - DNA, 122 bp, Homo sapiens
cccgcctcctcggcccgctcgcccgcggcagctccaggccccgccccaccccgccccgcccgacccacggcggccccaaaagccctcccgtccaaactggtggcagcccaaagctccgccca

SEQ ID NO: 101917 - DNA, 122 bp, Homo sapiens
tctccgcaggcgccctcccctcgccgggggccgcgagttgcatttggtaaaacccagccccggaatatatagatcgttggagcgcaatgaagtagcctttggagagaagggagagggcccgt

SEQ ID NO: 101918 - DNA, 122 bp, Homo sapiens
tgctggcaaaattaagattaaggccaagtctaccaacattggtttaaaatttatgagtgtcgcctgggtgcggtggctcatgcctgtaattccagcactttgggaggctaaggcaggcggat

SEQ ID NO: 101919 - DNA, 122 bp, Homo sapiens
ttctgggtaatgttcccacaggcgcacggcgggagagtgagggtcgcctccacctccttccggaagtaaaggccaaacccctgtagggggcgctgggaaatggacactccaggttggggcgg

SEQ ID NO: 101920 - DNA, 122 bp, Homo sapiens
atctgcagttccagacctcggatactgatctgacggacacagccatcttcaaagggaactcggcaccacacccaatattcaggctgtaaataaagccagcacaacaagctcctgggaaacgc

SEQ ID NO: 101921 - DNA, 122 bp, Homo sapiens
tctgttccccactcggcccctctctttcctccggtgggatcaatacctcggttgaggttacgtggaggtggccacattcttttaagctgtttgctcagtgcttggtttgctctgctaacacg

SEQ ID NO: 101922 - DNA, 122 bp, Homo sapiens
aattaaacctcgggctgcggatccggtcctggatcacttccaggggatggcagcagcacccggctcacccaggaggcgctacccccgaaggtatccagtcctcctgaccccaggcagcttgg

SEQ ID NO: 101923 - DNA, 122 bp, Homo sapiens
cgtgatcacctaacctaagagatgcctcctgacctacgcctcccagggcaatgcagatggcgctgtgaacctcctttaaggagcacgggaaagacaccacgtgagggtgacgatgtgacagc

SEQ ID NO: 101924 - DNA, 122 bp, Homo sapiens
cagaggcgcctctccccccgacccctcagggtggcgcctctccccacccagaccccctcacggaggcgcccctctcacaacgcccccaactaattcattgaggcgcccctcccccggcgccc

SEQ ID NO: 101925 - DNA, 122 bp, Homo sapiens
aaaaacaaaagatgaaacagaacatggtaagatttgatgagaaacacaaagctcttcaggcgagtagcaccagtaaaaccaaactggaaagtgattacattcattggcttaaggtttaaatc

SEQ ID NO: 101926 - DNA, 122 bp, Homo sapiens
cccttccccagggctgaagctcctggcaccatgatgctcaccccagcaggaccagagcaccgaggcccaaggccccagcctgccatgccgctgccaccgcggagcctgcaggtgctcctgct

SEQ ID NO: 101927 - DNA, 122 bp, Homo sapiens
aatagaatgcagattgcagttgctagaatataaacaggaaataagaagataaagacaactcgtggaataccttttcatagagcttaggtaaactgtaggaattattctccttgtactctaat

SEQ ID NO: 101928 - DNA, 122 bp, Homo sapiens
ggggggtggaaggaggatggagtcagcgaggtgagcgagggcgtccgggcctggggtgaccggggctatgttcgctgggcgcgggaggtggggtgggggcggcagactccaccccggagata

SEQ ID NO: 101929 - DNA, 122 bp, Homo sapiens
aatcaaaatacatgcagctaacaatagcaacgagctacataacaaaaactaagcaaaagacgtacggatcaattgtgactctaatacaagacatttttgggtccctttgtttgttgtccgca

SEQ ID NO: 101930 - DNA, 122 bp, Homo sapiens
gtgtgttcttgaattgtgtactgagccacaggaagaaaagggacaatggttagacaagagcgggtacagaagagttgagcactaggcaggtatttaatacatatttgttgaataatgactgg

SEQ ID NO: 101931 - DNA, 122 bp, Homo sapiens
gggacctcagtccctatcacccgtgcgctgcagctcagtggcacagccccttctagttcccgaggccctgtgccaagtgctttcatccagtccttaaacccaccctgtaaattaggtacaat

SEQ ID NO: 101932 - DNA, 122 bp, Homo sapiens
aaagcagggctaataatatcaaattcactggataattggggaaattaccagagatgatgacgataagaagcttggtatatacaggatgttagtgggacagttgatgaaatcagaattagact

SEQ ID NO: 101933 - DNA, 122 bp, Homo sapiens
cgagctgggccccacctgcaccagacacagtgtggtaccccactgaggcccttcatgtgtcggtgggggcaggcatgaggggcatttttggcttccactctgacacatcacctggggtggga

SEQ ID NO: 101934 - DNA, 122 bp, Homo sapiens
cctccttcccgcttgcagacctccgcgaagtcctgcaggtgcgagagcacagggagcgctcgagtcggccccacacccacggccctccacgcgccccccaccccggggagttacctccttgc

SEQ ID NO: 101935 - DNA, 122 bp, Homo sapiens
cccagtcggcgggtgcccctccctccccacggagacatagggcggggcagatctaggcgccgagactcccagccagacccgacagcgggctttccctagcacctcctcattgccaaggaggc

SEQ ID NO: 101936 - DNA, 122 bp, Homo sapiens
aaatagtgtttgatagtggaatggtaaaatacagaattctgcagaatttttcagtacttacgttcacatataatgttggtcatgcctgagcttatagcagcagcagccagaggaagatgagg

SEQ ID NO: 101937 - DNA, 122 bp, Homo sapiens
ccacactcagtttgcttggtgaaaatgttaataacgcacacttagaaaaacggtgataaccgttgcttgcataaagtggccatttgaatagactttggatctgatttagagatttagggatg

SEQ ID NO: 101938 - DNA, 122 bp, Homo sapiens
caggacagatgctgggctgtggcttgcactactggaaaaacaacttgagttgctcactgccgacctctccagtggaacaaaactccccaagagcagaattccaaccccagcttaggagccag

SEQ ID NO: 101939 - DNA, 122 bp, Homo sapiens
cagcttgaagatgatgctcaaggtactcttcatggaccaccattcgctgttggcaagaaacggctttacttacaaaacagactctttaccttctgctgtgtttgaagtatgtttagtcagca

SEQ ID NO: 101940 - DNA, 122 bp, Homo sapiens
catcttccccgcgaagccaggccgggtgcgggagatgcagtgcatgcccttagtgcattccggggccacatctggttttgttctgcaactgtaaagcatgcctggcagggctgttgaggacc

SEQ ID NO: 101941 - DNA, 122 bp, Homo sapiens
gggcgcctccatggggggcgctcagctggagctaccgagcggtgccaggccaggtgtgtgcgtccgtcggtctttccgtgcccacgccggagaccagccccggaggccgcctgggcctatcc

SEQ ID NO: 101942 - DNA, 122 bp, Homo sapiens
gcaggttttaaggtttcacaatcagttgtcagaaaaacagcacttatgcctgcagtatctcgttagcatctgactcaattatttttagattacattgtttagaagacattgtaaacccatct

SEQ ID NO: 101943 - DNA, 122 bp, Homo sapiens
tcttcgggttcgtcctcttcttggtgctgtggctgatgcatttcatggctatcatctacacgtgagtgagggaccgcaggaggggctcggggcaggggtccgggcctcggagacaggcgaga

SEQ ID NO: 101944 - DNA, 122 bp, Homo sapiens
atgccagagtggtagctgcttcagggcatcagcctggggccacatcaggacctacctgcacgtaggttgatcaggaccctggcagggctgtcaggtacagccacaaagcaagctgtttctga

SEQ ID NO: 101945 - DNA, 122 bp, Homo sapiens
ttgaaagcagacctgaaccctatgagtcatcgactcacaaagatgcccccagaaaggtaacgtccttattcgggcaaagtagaactatgaaactgtacaaagttatgcagggaaagagattt

SEQ ID NO: 101946 - DNA, 122 bp, Homo sapiens
gagctattttagtttcgggtcctcggggtgggggcggacgtgttgtgaggagcagggatacgtgttagtgcctgcgcgaggtcaggtagtcaagggtccacaaaaagctgagagaggcatca

SEQ ID NO: 101947 - DNA, 122 bp, Homo sapiens
accaatcaagatgcaattaaacctgtcagttcggctcatccttaactgggattggctactcgcagtatgcttatcccaagttttcattggctgacggccacctgtatggaaataagaattac

SEQ ID NO: 101948 - DNA, 122 bp, Homo sapiens
cgggtctgggactgcaggcccggcccaggactgagggactcggtagcttcaggcaatcttcgggacccgccccctctgtctgggctccagtccctgcgcacctactgtacgcccctcggggg

SEQ ID NO: 101949 - DNA, 122 bp, Homo sapiens
ataatgagtgtttgataccaggaagcctcacttcggaagtcacaaagagctggttacgctcgcctagaacccggcagggaaggccgccgttctccccggaaaccgccgggcgaagtgctgag

SEQ ID NO: 101950 - DNA, 122 bp, Homo sapiens
tccctacagtagataaaacgggcacagtagctaaaattaacgcctaagtaaaaccgctgccggtgagttttgggagtattttcgcttttttgaaagttagtattttggctctcacaaagcct

SEQ ID NO: 101951 - DNA, 122 bp, Homo sapiens
cctgggtcacaggctggcccactgtaagaggggctgtgattgggcaaggactgggcaccccgtcatgccccaaaggccttagacaatgcccaggggctgaggtctctgcagcttacttttct

SEQ ID NO: 101952 - DNA, 122 bp, Homo sapiens
gagagtattttctgttggagccccaacagaccctctgggtctctgagtttataagaaccccggacacaaaagtcccaaaataaggtctcaagcatggggggaggcagctttctactctgcca

SEQ ID NO: 101953 - DNA, 122 bp, Homo sapiens
tttgttcagatcatcttgttttggcagaaacttgaagggtatgtgactacttgttagatgcgaaggaagtagcatatcagacactgggcaccaagtgctgggagaacatggcactgtaagtg

SEQ ID NO: 101954 - DNA, 122 bp, Homo sapiens
ctggtcccctctcctagagagcccttcgccaaccctgggacagccccaaacgacagctcccgagcgccacccggaccagactccagtgccgccctgtcccgccaccctttttcccgcccaga

SEQ ID NO: 101955 - DNA, 122 bp, Homo sapiens
tgccctagtcccgacgtttggaagtgaggtacgctaagaggtagcagcttcagaggtctgcgtttcagcacctgggtcagcgcttcccagggtcagcaccagggatagacgccattgtcgct

SEQ ID NO: 101956 - DNA, 122 bp, Homo sapiens
cagttaagcagaagatctatttgcagaggtctcacagaaccccaggggcttagttaaggtcgtctaccctggcaagtacctaacatcagccagttcatttctaagagatgaggtttcattat

SEQ ID NO: 101957 - DNA, 122 bp, Homo sapiens
acccctctctctgcctgcgcagaacctggagtactgtatcatggtcattggggtccccaacgtgggcaagtcctccctcatcaactccctccggaggcagcacctcaggaaaggtactggcg

SEQ ID NO: 101958 - DNA, 122 bp, Homo sapiens
ggcgaacccgccaacgcagcgccgggccccgaacctcaggccccgccccaggttcccggccgtttggctagtttgtttgtcttaattttaatttctccgaggccagccagagcaggtttgtt

SEQ ID NO: 101959 - DNA, 122 bp, Homo sapiens
cgtgcgttgggtgcggactaggtggccgcggcgggagtgtgctggagcctgaagtccacgcgcgcggctgagaaccgccgggaccgcacgtgggcgccgcgcgcttcccccgcttcccaggt

SEQ ID NO: 101960 - DNA, 122 bp, Homo sapiens
gggatggagagaaggtaagaatggatgtagaaagactgtttaggaggtttttgcactaatcgaagtgagaaataagggtccaaactaaggcaatgttagaggggttatggaggaggagggta

SEQ ID NO: 101961 - DNA, 122 bp, Homo sapiens
ccagagagggcggggtttgggcagggacaatcctatccggaggtgaggctcaaggtggggcggggccacaatggaggacggggcctgcagggaagacccgagaaggagggctgcgaggcagg

SEQ ID NO: 101962 - DNA, 122 bp, Homo sapiens
aaaatctgggctattcccacctctacagccacaaagatcatcagaggatccactgagaaacgcagtagctcagtcacctattaagcgagatgatggacatgaaactgtgtgaatggtggagc

SEQ ID NO: 101963 - DNA, 122 bp, Homo sapiens
aaggttgactggtagggatgggtagtgtaggcaaggctctaggtaaggacatagaaaagacggcttacctggtttgagtgccagctaggctgcttagaacaatggttctcaagattaatgcc

SEQ ID NO: 101964 - DNA, 122 bp, Homo sapiens
gtcctttctggggctcatgggtgcctctgccatccctgggatgctggaaggggaggtggacgggggataaattgcttaatgcaactctaaagccttgcttgaagagagaaccagccctgcag

SEQ ID NO: 101965 - DNA, 122 bp, Homo sapiens
attatctcatgtattttcctgtatacctcaagttctcgtctcagtaaaatccttgagatacgtagcaagcaattggattacactccaagagacttggattacactcatgtctttcttctttg

SEQ ID NO: 101966 - DNA, 122 bp, Homo sapiens
ggcagggctttggggccggctccttggtcttctccaggagcttgttgatggtggcacccacgaggcccccacccggcccctgcttgtccttggagatcagccggcccacctccctggtcctc

SEQ ID NO: 101967 - DNA, 122 bp, Homo sapiens
ctcatgtagtcctcacagttcccctaacgaggaaggtaccattcttattcccattttacacggaagaaagccaagcccccatggttcaataatttgccagaattcacagagctggccatgga

SEQ ID NO: 101968 - DNA, 122 bp, Homo sapiens
cctcccgggttcaagcgattcttctgcctcagtctctcgagtagctgctgggattacaggcgcgtgccaccacgcctggctaatttttgtatttttagtagagacagggtttcaccatgttg

SEQ ID NO: 101969 - DNA, 122 bp, Homo sapiens
tcagggacttctggaaggaatgttcaacagtccctggagggcagatggagcactgggtcccggggcaccagaagggggctcaatctggtctgctaaccccatcctcctcgggacactccaga

SEQ ID NO: 101970 - DNA, 122 bp, Homo sapiens
ctcgcgcgtcccccgcccgctaatgttttggccgcttcaagatggcggtgcaggagtcggcggctcagttgtccatgaccctgaaggtccaggagtacccgaccctcaaggtgggcgcctgc

SEQ ID NO: 101971 - DNA, 122 bp, Homo sapiens
gtaacccttaagctttttaaaaactgactacaccctgggcaagtaaccaccccctgatgccgttgtgggagacagaatttctggcaggaagataattttctgactcaatctggcttgccgtt

SEQ ID NO: 101972 - DNA, 122 bp, Homo sapiens
ggaaatctaactgccctgcctgagctctgagtcaagggtcctactttggctgccagccagcgacgacttcaagggtaagatcctatgcgggccgtaaggactcttcccctccccctctccca

SEQ ID NO: 101973 - DNA, 122 bp, Homo sapiens
tgtctgaatgactttgagaacaagggaggtgagtctttgtggagcagccctgtcttcagccgtggcactgagccactggtctgtgtctagctgcctgagtgtctccacatatcgagggccct

SEQ ID NO: 101974 - DNA, 122 bp, Homo sapiens
gtgcaaagtgcttcctggaaatgcacaaaacccaagaggttataaatgcttttgcacaaacggggcatcataagaaccctcaaaagtgctttgatcttgcaggacagaaagtttcaccccca

SEQ ID NO: 101975 - DNA, 122 bp, Homo sapiens
tccgcttcccactcagagctctcctcccctctcttccccgccacccgtttctacgcagatcggtgccccagtccctggaggagcctccgccaactccgcaggaccccgccgggaagtagagc

SEQ ID NO: 101976 - DNA, 122 bp, Homo sapiens
tccccgccacagcagcagccacctcggctgcccccggaggtggaggcggggcaacggctgcgggcagggctgctgccctcacacctgcctgaggtggtggccggcctcagctgcgccttcat

SEQ ID NO: 101977 - DNA, 122 bp, Homo sapiens
tgccgacctggacgtcgtcatgtccctgaacaacctggatggtgagtgccacagtcagggcgccctgccgggctcaggcagccgcgggattgggcctgtaggaaggccctgggttgagcttc

SEQ ID NO: 101978 - DNA, 122 bp, Homo sapiens
agatgggcgattacttccctcatcctgaacactgtagtggagagtgtatcagctatctggcggtcacactgtactgccctccctttagagacaatgtttcccaaatgttgttaagctgtgtg

SEQ ID NO: 101979 - DNA, 122 bp, Homo sapiens
gcagttctgtctgctggcactgggaacgtcactggagtcccctcaggccatggtcttaggcgagcctgaagagatgggaaaggatgtttgccaggtcgataggggagtggggagtgaggagg

SEQ ID NO: 101980 - DNA, 122 bp, Homo sapiens
gcatgcacacccacacacactcagcatggtaggcttccttttcctctggcctcttctccacgctgtcccatgttcatcctcgcacaaagcagttgctgtctggcctacctggcaagatgcca

SEQ ID NO: 101981 - DNA, 122 bp, Homo sapiens
cttgctcacactcagggcaggaaagtgaaagataaactatgggccaatggcatttctccacgtagggcctggtgagtcccgccctctgaatgaatcagccgggccgtgtagctgtgctgttc

SEQ ID NO: 101982 - DNA, 122 bp, Homo sapiens
cggtgggggtcaggctcaccggcgccccgcactcatgtccgcggacccccgccccgcattcgtctccgcgaacccccgccccgcagcgcccacgcactcatctccatgaactcgtcgaacag

SEQ ID NO: 101983 - DNA, 122 bp, Homo sapiens
gtggtgggagggcagcacttgataggaggttgggcacagaaaggcatcatgcccttctgtcgtccctgataacactactaagcctatttattcattttcttgtttattaaacactggctact

SEQ ID NO: 101984 - DNA, 122 bp, Homo sapiens
tctcgtcttctttttccgtagaaatcaacggaacccagatttgccccaacgacctagtggcgttccatgacttctcctcggacctggagaacgtgccacacctgcgctacctgcggctggat

SEQ ID NO: 101985 - DNA, 122 bp, Homo sapiens
acagtattttattggaacacagctctgtccattcatttactgtctacagctgatttcacacgaccatggcaatgttgggtagctgtgacaacggtacacaaagcctaaaatatttcccatct

SEQ ID NO: 101986 - DNA, 122 bp, Homo sapiens
ggcctccggagagcctagtagagagtgtgggcagtgagcgcttgtagccgctagagggagcgctgggcacagtgcacgagagacaataaaggctgattatcccctcaatgtctctgcagcct

SEQ ID NO: 101987 - DNA, 122 bp, Homo sapiens
actaatatattctccgccctgtctccagaaaccgcccttcctctgtgggccggtggttaccggcaccattggtacacggaccacattttgtttcccaaagcaaccagatgatttttgaggtc

SEQ ID NO: 101988 - DNA, 122 bp, Homo sapiens
ctgtccagccctccctcaaaagccggggtcgaggccatctgggggtcttcagagaggtctcgctgtatgctctggacaaaccgcacgccgcagacagccggtatagtcagttctgccaaaac

SEQ ID NO: 101989 - DNA, 122 bp, Homo sapiens
gttttgcacaaactggaatcgtgaggtccttcctacagtcccgtggctcctggaaagcatcgtggtcccgaagagctggcggagagaagcggctcccagtgcttagccggcctgtcggagct

SEQ ID NO: 101990 - DNA, 122 bp, Homo sapiens
caacaccgaggtggtgctccccactccctgccctacgtcaccaaatccttgcatctccggcgggtgctagctgctctgatccccacctacacagtagccctgggagtttcctgcctgaaacc

SEQ ID NO: 101991 - DNA, 122 bp, Homo sapiens
acggagggcatggacgacttccgctacggctgtcagtctcctgaagatacgcttgtttgtcgccgtgacgagtttttactccccaaaatatctctcagaggtccccaagctgaccccaaaag

SEQ ID NO: 101992 - DNA, 122 bp, Homo sapiens
ccccactgtgatatggtccttaatattccaaggcggagaggatgatcttactcccaataccgcagaaagtgtacacaaccccagtgatatggttcccatgatccaagagagaagaggatgat

SEQ ID NO: 101993 - DNA, 122 bp, Homo sapiens
gatagccatggagatgagcgggaggaacagcgggccctgagcagccccggaagcaagtgccgcattcttcaggaaggaagagacctgggcacccaagacctggtttcctttcattcatccca

SEQ ID NO: 101994 - DNA, 122 bp, Homo sapiens
aaatgaggtcatacattccagattcccggtgttcagtaaaggctagttttcctgaagccccgttatactcataatccatcctaggtcaagtctacaccctacacaaaaatgttaataagtcc

SEQ ID NO: 101995 - DNA, 122 bp, Homo sapiens
ttgtgagtctgtctcgtgggcctccttcagtggtctgtgaccagcgggaatgaatggggacgtgttttgttcagccctgactcttggacgctggtggcagccgcgggcgcccactcacctgg

SEQ ID NO: 101996 - DNA, 122 bp, Homo sapiens
cttgttcccacagctctcctaatcctttcacatgaccatgaagacagcctttaaattcaacggaagatgtttctgacatttttttcaagctataaaaactatttccaggtccaggttgggga

SEQ ID NO: 101997 - DNA, 122 bp, Homo sapiens
ccccttccccaacagggtctcctatggacagaagtgcgggcaaggagctttgttcctccccgatgtcaccctcccacagcccacttgctagcaggcaagagaggggtggaggccggcagtaa

SEQ ID NO: 101998 - DNA, 122 bp, Homo sapiens
tgctgacaccctagggcaactgggcagggtagggtctctggggctgggtctctgcaggagcgcctggagcagagccccacgcccactgtcacctcctcccgagctgaggcctacgtgagaac

SEQ ID NO: 101999 - DNA, 122 bp, Homo sapiens
ggcagaggtccgggttggggatgtatccaaaccagaaatatcctttcaggtctctctccccgagacaaaccccggcagggtctgctcctcccggagccggcttgcaggcgtgttgggggaag

SEQ ID NO: 102000 - DNA, 122 bp, Homo sapiens
acagcacacttcctcgtccacgccttggtgcacctgcggcaatatattctgggtggcagacggttatttatgtctgagagcctccaactcactccccttcctcccaccacccctcctctaag

SEQ ID NO: 102001 - DNA, 122 bp, Homo sapiens
cccgccccaaaaaaaggcagggttgttcttggggcaaactgtggaatctccttttgcagacgaaatctttctgcaatggctgagtcaagttcagcggaatgggaggagagtgggccgtgggg

SEQ ID NO: 102002 - DNA, 122 bp, Homo sapiens
gaagaaggaggcggaggcagcgcgcgggatgggggagggaagggaggaggcggacctccgcgcagagccacgagggaaccgctagccagtcctgggtgaaactgacgctgccaggcaagtgg

SEQ ID NO: 102003 - DNA, 122 bp, Homo sapiens
gcggaaacagaatacacgtccttttctccattcgcacgacagagtcttgcgtggggtgaccgatgcctgagtttagctatccctgaacttgagaatacctgcttccaggtgttcttgagaaa

SEQ ID NO: 102004 - DNA, 122 bp, Homo sapiens
ggcagcaactggagccagaagtttaatttccttatatggtaaagcagaggttgtattgtgcgattaccttgactaagaactatcctctgacagagtttccaggttacctctctctctttctg

SEQ ID NO: 102005 - DNA, 122 bp, Homo sapiens
gagcctcgccgcggaccgctccggctcagtcttacaggctctgggccgctcggcgagcgccgctcaaaggctaacgtgcctgcttgtttctacccgacctccgaagcccagacgtgcttcag

SEQ ID NO: 102006 - DNA, 122 bp, Homo sapiens
tcacaatcttaggccattgttagtggctatttggtaactttttccattccttctctaattcgctcagattgaacctaaaaggacaatatgcattactttatttccctcagaacaaatcagta

SEQ ID NO: 102007 - DNA, 122 bp, Homo sapiens
ggctctccatgcgcagacctggtcgctcagactcgtaaggcaccactgtaggctgagaagcgctgtctaattatgtcttgcctgcttatttcagttcgagacttgtgtgcccgcaaaccgct

SEQ ID NO: 102008 - DNA, 122 bp, Homo sapiens
gccccaccgccgctgaaaggcggcagctcaggtcaaaggatcgcaggtaggcgccctgtgcgcgcctggtgactccgggcacccgtggcccgagttctgccatccccactctcccaccccca

SEQ ID NO: 102009 - DNA, 122 bp, Homo sapiens
tgaaatattcaacactttattataaaataggctttgtgttagatgattttacccaactgtcggataagttgtctgagcatgtttaagataggctaggctaagctatggtgtttggtaggtgt

SEQ ID NO: 102010 - DNA, 122 bp, Homo sapiens
gccgacgcctcagccgcctcagtcgcctcaatctcgccttccgccctcgctctccctccgcgccaccggaccccgtagccccgcgcgcccccagacctttaagccagatgatgaacttcctg

SEQ ID NO: 102011 - DNA, 122 bp, Homo sapiens
acaaattcgcgtttgcctctgctcggagaaatcccttaccaaggtggcacttgcagtgggcgggaccatgtctggagaaccagcgtcccctccaggcttgaccccatagctagatcgggtgc

SEQ ID NO: 102012 - DNA, 122 bp, Homo sapiens
gtagtgccgaaggtagatgagcttctggggagggaacttctcccggcagaggggacactccgcctgcggagaggagaaagggggtcacagcagctggggccactgggccatgcccatcccca

SEQ ID NO: 102013 - DNA, 122 bp, Homo sapiens
catgcggtcagccagagaaattgggtttattaacactgtgtgcaggcagtcatgtagatgcgtcagaacgtcggacctggccacatcatcatctgctggtacagaagataaattttgagccc

SEQ ID NO: 102014 - DNA, 122 bp, Homo sapiens
gctccggccggctccgctcgccgcccaccccgcgcgcccggccgccgcacttccagactccgcggactccggcgctcggccgccaccctccgcctcaggccctcaaattgacacataaggga

SEQ ID NO: 102015 - DNA, 122 bp, Homo sapiens
tcctgaccctgcagggctgagcggatgcagctttttgcctcttctcgctgcattctagcccgtcagtcagggcaacagccagatggtctgtgctaagattcatcccatccccacgggccctg

SEQ ID NO: 102016 - DNA, 122 bp, Homo sapiens
ttgtctaggaagtgcccgagcgctctgcgcaaggggtaggggcgtagggcgcctggggtccgccccttggttccctccccgacgcagccgccggcccgcccgccagtctgggctcctgcaca

SEQ ID NO: 102017 - DNA, 122 bp, Homo sapiens
cggctctaccaatcagcaagatgtgggtggggccagataagagaataaaagcaggctgcccgagcttgcattagtaactcgctcgggtccccttccggattgtggaaactttgttctttcgc

SEQ ID NO: 102018 - DNA, 122 bp, Homo sapiens
ccatcctaagtgggcaagcacctgtacaatatacagtatgttaggtggtaagtaaagcgacgaagataaccagagtgtatggagttacagggaaggtgacattcaaatgaagatatgatgac

SEQ ID NO: 102019 - DNA, 122 bp, Homo sapiens
agctgcacgaggctgcacgcgctgtgcccgacgcgcatgcgctttccttcaacggtcacccgctggggcgcgacagtggctttttgacccctggtcgaggtcacctttcccgccaagcgcag

SEQ ID NO: 102020 - DNA, 122 bp, Homo sapiens
cctaggtgtggcaagaattgtggtgattggttcagggacaaacatttaacccaagggtagcgagccagagtaggttccaggaattgtgctggaaggctttctgatggggatgctgaatgtgt

SEQ ID NO: 102021 - DNA, 122 bp, Homo sapiens
gcagtgctgagaaagtagataaacagtaatgtgataccaaccgtgaactgctggttctgtcgtcgccgttgtgtctacagacgggaacagaggattggaggaagggaagaaacaggaggaac

SEQ ID NO: 102022 - DNA, 122 bp, Homo sapiens
ctgagatccaaggtatcagtgtctcgtaggcgctgcacgaactcctcggcagaggtgcagcgctgtgcggtaccgatcagaaactgggcgacgtgccgctcgctcagccccaacaccgagtg

SEQ ID NO: 102023 - DNA, 122 bp, Homo sapiens
gcttctccggagctgcctgctcacgaggctgcactccctctggcctctgccactccctcccggctgggctgaaactgctcttgtccaagtcaccaacagcctctgcgctgcctgccgagcac

SEQ ID NO: 102024 - DNA, 122 bp, Homo sapiens
agtgaaaatgagagagcacgcgcgcgagagaggtaaacacaaactgttcgcctggaccaacgacttgaagacttgcctctaagagttggaagtctcgtcatgagtctcttgcatttctgtcc

SEQ ID NO: 102025 - DNA, 122 bp, Homo sapiens
cactacccgagcgctgttgcctggagaccacgggacgccgttgcctggagacagcggggacgcgttgcctggagactgtggaaggcccaggcaagagggcgcgtggcagcccaaggccatgg

SEQ ID NO: 102026 - DNA, 122 bp, Homo sapiens
ggccatcggctgtttgctttatgaatttgtgcctcagtttcttcatctctgaaacgggaacgatgggagccctcacctcgtatggtggtttgaggattgaatgaactcattgtccagcaccc

SEQ ID NO: 102027 - DNA, 122 bp, Homo sapiens
caccccccgtcccccccgccccatcccgtccccacctccgaactgtaaggtcagagtatccgcaagggagatttaacggtcagaccagagtagaggttatggaaaacagccaaatgagtcca

SEQ ID NO: 102028 - DNA, 122 bp, Homo sapiens
ccagagagtgagacccagcgcccttgtctcgcacccagtaggctttcatccccgccatggcggagctgatccagaagaagctacagggagaagtggagaaatatcaacagctacagaagggt

SEQ ID NO: 102029 - DNA, 122 bp, Homo sapiens
aaaacaaacaaaacgctcttgtgaaatatagtcaataaagtcaaagtttagctggctctacgtaactacaaagaaaaaaatcatcgcaatttaaaaaaatgtaactttcattaacgagcgcg

SEQ ID NO: 102030 - DNA, 122 bp, Homo sapiens
gaagcagatggactccgtcttgaacccactcaatttttcccccatcaattacccctctctcgtttttcaatactgggtctcttgcagagttgcagtggcggccacctggtcagtgaaatcag

SEQ ID NO: 102031 - DNA, 122 bp, Homo sapiens
ttaatgccccccagaatcagcaccatgtcatcacaggcttgggtcaaggggcgggtcagacgccagtcacatccgctcactgcccacagccacccccccacagtgagtcatctgccagggtg

SEQ ID NO: 102032 - DNA, 122 bp, Homo sapiens
ggaccccgagacccccaggcgctctcccaaggcctgacagaggaccccgagacccccaggcgctctcccagcacagccgtcacagaaaaaggcgactttccaaacaggcccaggacgcacag

SEQ ID NO: 102033 - DNA, 122 bp, Homo sapiens
tagcaagagggtggacacatagcaagaggatgcggggagtaatatcgcccccttctcccccgctggatattatgatccacatcgcagggaggcgggcgatgagaattattagggggtggaag

SEQ ID NO: 102034 - DNA, 122 bp, Homo sapiens
tcaccactgcaggccaccttacctgtggggggttgaaactcaagtacagggcatcgcctgcggggaggctgcgccgccgaggatccacaggtctgcgggcccagggggcctcagctgggagt

SEQ ID NO: 102035 - DNA, 122 bp, Homo sapiens
agggaaggacaaaggcccccagccatgaagggttttgctatttccaaagcttccccttatcgtcccctgtgattatctcccaaccccgtgacaaaggtagagcaaatattgttcttcccatt

SEQ ID NO: 102036 - DNA, 122 bp, Homo sapiens
gggcggagctaaagtggtcgtgattcatgctgtcgcgggaaccccgaaggtggggccccacgtaacaagaagatgacccgaagttgctccgcagtgggctgcagcacccgtgacaccgtgct

SEQ ID NO: 102037 - DNA, 122 bp, Homo sapiens
tccctaaacaagggattcaagggaacagtcacagatcctggggtgggggcatgtttgctacgtgtacatccgaagacgaccgcgggctggggacgggcggcctggcgggacagccccgggct

SEQ ID NO: 102038 - DNA, 122 bp, Homo sapiens
aatctttctgccctagccaatttattttctaatcttgtagctttcatataaagggctctccgtgagattgatgatgacagtctgggcagccacacagatgagcgggctcccctgttaattac

SEQ ID NO: 102039 - DNA, 122 bp, Homo sapiens
gcagatgcgacaggtgcccgtgtccaggctcttgctgtgggtcaccttgtgttcggtgagcgtcagcagcgaagggaagcgctcaccacagatgggacacatgtagtgcttggcagggcccc

SEQ ID NO: 102040 - DNA, 122 bp, Homo sapiens
ggcagtgggagagacagataccttattgacttctccacactagcatctgagcactcatcacgtacctgcagggatgtacacaaggttgggaatccaaccaagaactaacaatgcttgtggcc

SEQ ID NO: 102041 - DNA, 122 bp, Homo sapiens
actgggttggggtgggggtgtagccacatgcagtaaaagcactgcctgtctgtataacaacgacctgatgaaaaaaggaacgcgtgaaatggggagtgttagggcgtcacaaactccagtgt

SEQ ID NO: 102042 - DNA, 122 bp, Homo sapiens
ctgccacgattggcatacaatctacatgtgtcccttcccatgatcctctagggagcctggcgggcccaggaccctctccactccatgcctcctgttcatactccactgatctcaacccctgt

SEQ ID NO: 102043 - DNA, 122 bp, Homo sapiens
ggacatagacccccttagtaatgaagatccagtggcctaagtaaaaaattccaaataagccgggtgtggtgactcatacctgtaatcccaacactttgggaggccaaagcagaaggaccact

SEQ ID NO: 102044 - DNA, 122 bp, Homo sapiens
tttcgggggcgcccagaatccagactgttggggatcactatgagccaaagggagtgggtgcgccccctccctccaaataagaaaatgaataaaccaaacccaagagcccccggcgcgcgctg

SEQ ID NO: 102045 - DNA, 122 bp, Homo sapiens
ctaccccgtgatattgctcctaatattcacggaagaagcatctgatattactcccaatatcgcaggaagtgtacatccccatgtgagatggtccttcaaaatattccaaggcgtagggggtc

SEQ ID NO: 102046 - DNA, 122 bp, Homo sapiens
ctgctagtgtcgccctggtggaaacactcagttcaaatcctgctagcatcagaaaatgcacgattgaggattgaaaacgagggtgaaggaggaccagggaagcgcgaggagagaggcaaaat

SEQ ID NO: 102047 - DNA, 122 bp, Homo sapiens
gtccacagccatcagatggcaagtcgagaaggccctaatgtccgcggccatcagatcgcacgtggagaaggccctaaggtgaccacacagatttcctctcaagcagcccctcctcctcagag

SEQ ID NO: 102048 - DNA, 122 bp, Homo sapiens
actttgatgcagacttccgtgttaggttttcttcctcttctttttcaaatcctgaacagacgacagatcttcccttgggatactgagcacaacacttacgcagttcttggatgacagcctga

SEQ ID NO: 102049 - DNA, 122 bp, Homo sapiens
tgactagcctcagccaacatcttgatgtgcaaactcaggagaaggtctgaactagaaccacgagtctaagctgcctctgaattcctaacctaagaaactatatttctagaatctcaattctg

SEQ ID NO: 102050 - DNA, 122 bp, Homo sapiens
cgccgaggtaatgatcccgaatcctcgaggaggctaagcaggaccacggggctgaggctccgggatgctcgggcgaggcccgaggcggggcggcccacgggcgccggtcgccgggctctgga

SEQ ID NO: 102051 - DNA, 122 bp, Homo sapiens
tgtacaagctgtgcccttccctcctttcctcccccaacacacacaaaatgagtccatcaccggagctgcagaaagaaagggaagaaactaacgttctttctgcgtctgggagcttgtggggg

SEQ ID NO: 102052 - DNA, 122 bp, Homo sapiens
tgggagacagaggttgtctcctgtccatgcacccgcgcgcctgccttctaaccttcataccgttgggcagattaattcactggactaggcctctgttccgtgggagttgaaaagatttgacc

SEQ ID NO: 102053 - DNA, 122 bp, Homo sapiens
ctgccgccgctgcagtggaggccgccaggggggccggctggactgggcacgtggcaggcacgaggaagaccacgccaggcttccggctggtggagaagtatgggctcctggtgggcggggcc

SEQ ID NO: 102054 - DNA, 122 bp, Homo sapiens
acccagccagcggcttccgggctgttgcctgggttaccagagctccgccccacgcccttgcgtatatccggcgagcccagtgcgcaggcgcctcccaaagcctatctcgggtcctgagtcta

SEQ ID NO: 102055 - DNA, 122 bp, Homo sapiens
ctgctttcgctctgcgcgagttgggtctttgtgatataaaattcgccgagcgccgcgagccgtgctttgccaatggcgcgctcggcgcggggcgcgggctccgggttggggcgagccaacgc

SEQ ID NO: 102056 - DNA, 122 bp, Homo sapiens
gggagccggggtcccggtagcttctagtaggttccagaaggcggcgcgtgcggttgggaacgcggagcggacggattcgattcaacggggttccggaccgcgctgcgctatggagcaggtga

SEQ ID NO: 102057 - DNA, 122 bp, Homo sapiens
tccagcttggcactggctgctcctgcgtgctgggaggtgcccccctctcccgtgcccgcccgaagaaccaggcgccccagtgccctctccgggagaaagcgtgcccctgtcggcgagcctgt

SEQ ID NO: 102058 - DNA, 122 bp, Homo sapiens
tcttcatgtaatgctgtccctttcattcaccagtgacaaatgcagaattctgcgcgtgcacgcgcgcgtccacacagtcaacctacaccagtcctaatgcacaaaaacagagacctctggat

SEQ ID NO: 102059 - DNA, 122 bp, Homo sapiens
cccgaaggaggcgggagagatccggggtctccaatgtgagggggcgtcggacggcaaggacgcgtggctggcgacggtttcgcaggggcgcccgttcccctgggggcgcgaagtccccgctc

SEQ ID NO: 102060 - DNA, 122 bp, Homo sapiens
tgacgtggagggtgtgtgcaagcctctgtcctgcggctgggagatcacagacaccctgtgcgtgggccctgtcttcaccccagcgagcatcatgtgagtgggcctcgttccccccggagaat

SEQ ID NO: 102061 - DNA, 122 bp, Homo sapiens
gcaccgagcgcccacggctccctacgggagctgggccccccgggcctccaggtttcggcccgccccctggcaggcagcacaggtggctgagcaccgctacagcggcctctcaccggccgctt

SEQ ID NO: 102062 - DNA, 122 bp, Homo sapiens
taagaccgactggctccctacccttaaggtgcttgcattccagtacacatgtgcctgttgcggcacagggtggagacattaaacaagcagacaatatagggcattgctcagaaagtgacatg

SEQ ID NO: 102063 - DNA, 122 bp, Homo sapiens
tagagttcttcagagtgaggaagtgatgagggaacataatcacttcttttgtcatatgggcgaaatctgaggactgcgattcatttgtctgcaaatgtgtctcttcggtacaaattgcagca

SEQ ID NO: 102064 - DNA, 122 bp, Homo sapiens
tccgtcacctctgctgggaacggcggcagggcccgggggtgggaggcgttgtggcggtggcgtggcggtgggctctgggcctggcctctgtgctggttcgctggtgtgacctggggctggcc

SEQ ID NO: 102065 - DNA, 122 bp, Homo sapiens
tcgaacccacgcccccgaagagactggagccttaatccagcgccttagaccgctcggccacgctaccacccacagggtgcgtcgccgctttcagtttcacccaagtgactgtcgcccctttc

SEQ ID NO: 102066 - DNA, 122 bp, Homo sapiens
tggggtatttattcattccccccgttcctctagtgtttggtggcgttgccgttgcaagtgcgcagggctaaaatggactggttatcttaggatcatggaaaacctggaatcaaggctcaaga

SEQ ID NO: 102067 - DNA, 122 bp, Homo sapiens
ggtgcggcacccaccgacagcggaggaaattggggctggagccctggtctcggggctcaccgtcccgggacccgctgggctagcgcgggaagaagggaagtcttcgctccccctccccctcc

SEQ ID NO: 102068 - DNA, 122 bp, Homo sapiens
ccatgaccacggcaacagtagtgtccttgaaaccccagtgcaggcccccgggactccagccgctgcctcttctggctgcggtggtggctggggaaaggcccaggcccgggcctcgccctatg

SEQ ID NO: 102069 - DNA, 122 bp, Homo sapiens
ccagaaaccagatgcggaggctgatgaataatggagtctccaaggcaggacccccgcacccggctgttctccctcagtatcacctcccccagccccagaaaagcagatgggaaaccagggat

SEQ ID NO: 102070 - DNA, 122 bp, Homo sapiens
cctgggggtctggctttgtgtgcgaagacccctttcctgcagtctaggcgtggacgggggcgggagagtgggcggagggtgtggggccccactccacagccccaggtttgctgctgcgctgt

SEQ ID NO: 102071 - DNA, 122 bp, Homo sapiens
acgatataaatgaatctcagaataactattgagtaggggaagccagactgaaggaaagaacggatgttcctttttatggccgcttagcattccatggtgtataggtaccacattttcttcat

SEQ ID NO: 102072 - DNA, 122 bp, Homo sapiens
gttagagcaggaggttcttgtgtcacagtgcccttgattttcccactgaactgctgccaccgtgaatacgagctcttggagatgccgctgtctgccctcttccctttcctctccctcctcct

SEQ ID NO: 102073 - DNA, 122 bp, Homo sapiens
ctatgctcctgtccttaacctaccaacccctaatgccagccatgtgtccctggccactctcgcttgagggtgactggagacaccagactcccagttcccagatgacacaaagatagccttgc

SEQ ID NO: 102074 - DNA, 122 bp, Homo sapiens
aactgccggccggcggcggttgggggccgggtggaaacgcgggggcccagggggcccctccgtgccctctgctgtcagcggacgcggcggagacggaggcccgggtggcccccggggtcgtt

SEQ ID NO: 102075 - DNA, 122 bp, Homo sapiens
gtgatcctctagcctcagcctcccaaagcagtgggattgtaggcatgtgccactctggcccgaatagatgaggggagatcatttaagatggcattgctcagtctcactagtgggcatacatc

SEQ ID NO: 102076 - DNA, 122 bp, Homo sapiens
acactgggtcctatttgtggttgcttagtcaatgacttcatagcttaaaagaagtgacctcggagcccttgttcctgtatcgtacaattgcctagttcttcagttaccttcagcagtatgca

SEQ ID NO: 102077 - DNA, 122 bp, Homo sapiens
ttctacttacaattaaaaaaaaaaaaaccctattgggaaagatttcttaatcctagtcaacgtggcagtaagtttggtgtttgttgtcttatttctttatataagcctaaaggcaaagggga

SEQ ID NO: 102078 - DNA, 122 bp, Homo sapiens
cccagcctcaggctgacgctgacgtttcactgggccttgggtgctcaggacagtgccagacgctggatactgttttaagagccgcgcctttcaaaccgaaggggctccttaaccagcttaac

SEQ ID NO: 102079 - DNA, 122 bp, Homo sapiens
gactggttgtggacagcagccatcggtctgactggttgtggacagcaaccattcagaggccggagtgaacaaagatgcaaacgaagactcaacccgcagtcagtctggtttgttgcagacag

SEQ ID NO: 102080 - DNA, 122 bp, Homo sapiens
gccagtgctggccggcagctgacccagcagagatgaccgcgccaggctgccgactcctggcgcctccaggctggaacagatgagaggagagggagtcacctgctccatgttggacctgaggc

SEQ ID NO: 102081 - DNA, 122 bp, Homo sapiens
tgaggagaggtcttttttccttaatctgatgttaggggccacccaagcactggggccagacgcccaccatggctctgcgcatttgctggtttggtgatctgaggacatctgttgcttcttgt

SEQ ID NO: 102082 - DNA, 122 bp, Homo sapiens
accgggcgcggaagacgcggagcggaggccctccctcaggaggggcgcgggcgtggagggcgtgggcagggggcggggcgagccccgcagactgagtgctccggggagctgtcagtgtcagg

SEQ ID NO: 102083 - DNA, 122 bp, Homo sapiens
gcccgccgcgcacccgaccccccccgcgccgcgcctcccgcagctccccacgcgcgcgggcgccccccagcaccagtctcggcccgccccctccgcccgaccattggctgctgctcccgtca

SEQ ID NO: 102084 - DNA, 122 bp, Homo sapiens
cgcacgggtcgcgctctgggccagcttttgtctaccctgttctggggtcgccttccccgccggacccgcgcctggcgctcacgtggccagtaaataacagtcaaatccagggggaggaaaat

SEQ ID NO: 102085 - DNA, 122 bp, Homo sapiens
tttgaatacgccggggtgtgcagagcacaggtcagctattgtgtaggagagacactgagccgcatctgcagcctgttgttctggggtcgccttggttacagccacctctgtcacaatgtgca

SEQ ID NO: 102086 - DNA, 122 bp, Homo sapiens
aggcggggcaggaggcgagagtctcctcccccttcccttctccccgcctctcccgcgccccgcagccgcctggaccccccacccacccccgacccgggaggcaatgtcttcgcctccctccc

SEQ ID NO: 102087 - DNA, 122 bp, Homo sapiens
attttagcactaggaaaccctttgaaggacggtgtaaaatctggatatttaatctggtttcgctgagagttcagagggaagaagtgtttgtaaaaccacgtatatggctattagttaaagcc

SEQ ID NO: 102088 - DNA, 122 bp, Homo sapiens
ctgaggccagggaaaaaggtttgcctgcgatcctgaccaaggccacgcattaaaagactgcgtggaatccttaaagcctctaagaatctaacgtcctaagaaagaccaccccagaagtagat

SEQ ID NO: 102089 - DNA, 122 bp, Homo sapiens
gggagggggacggggcgggcggctgggggcggaggcaggacctcctgtaccttccctcctcgcctctctcactctgacagcgccgaggtgcgccgagcaggagcagggaacaaaggagcgga

SEQ ID NO: 102090 - DNA, 122 bp, Homo sapiens
taactctcctggctttttattcttcctacagaactcctctgttctgtgtcccagccctttcgggacccactaggcttttggctgactaatttaatcagcattttcagccgaggtgttggctt

SEQ ID NO: 102091 - DNA, 122 bp, Homo sapiens
ttacaaaagtccaggctgctgaaattaaactctgatgccattcatgccagcatccaatcacgacagagatcagaagttcagagatgcctccagctccaaattgccaacaacaagtgtggcta

SEQ ID NO: 102092 - DNA, 122 bp, Homo sapiens
tttgtatgtgcactgttctctgacccccacttgcagcccttcaccaacatgcactctgtgcgcagacatgcatgtgtgtacacgaggtcttacacatgggaaagggtctataaaaaattatg

SEQ ID NO: 102093 - DNA, 122 bp, Homo sapiens
cgaagcggtagctctgcaatgacttaagagcagttttgtgcgcttttcctgacggggttccgcctccaaaatgcataagttctcgcgagacgcagtaaggcaccggctcgaactggggcggg

SEQ ID NO: 102094 - DNA, 122 bp, Homo sapiens
cacggcggcctcctgtgttgctgttgtgttgagtgctgattgtatgtatgtaggcatgtgcgtgtatgcatgtgtatgtatttgtagtgcacatacgtgtgcatgtgtgtgtgtatgtgcac

SEQ ID NO: 102095 - DNA, 122 bp, Homo sapiens
gtttagaaacggattgaagttccactacatcacgtgtgttgttagagaattcgcctattacgacgacagcaacgtctgatctcctggctttcttcccctccttggtgggttccgttccgtcc

SEQ ID NO: 102096 - DNA, 122 bp, Homo sapiens
tagagtgaccagcctgctctgcaccaggttcaagtatgtgattggcatcggagtgggcgccggagcctatgtgctggccaagtttgcagtgagtctccccatgcccccattaccccaaacac

SEQ ID NO: 102097 - DNA, 122 bp, Homo sapiens
cgctggtcggctggggcggggcctgcttctggcctcatctagccccgccccaggcgagggcgccgcacccacaccgcgctgcgcagttttgttctgctccagctgttcgaaggtgatccagg
